(19) United States
(12) Patent Application Publication
(10) Pub. No.: US 2016/0275240 A1
(43) Pub. Date: Sep. 22, 2016

(54) METHODS AND COMPOSITIONS FOR POOLING AMPLIFICATION PRIMERS

(71) Applicant: NuGEN Technologies, Inc., San Carlos, CA (US)

(72) Inventors: Stephanie HUELGA, Belmont, CA (US); Jonathan SCOLNICK, San Francisco, CA (US); Doug AMORESE, Los Altos, CA (US)

(21) Appl. No.: 15/047,448

(22) Filed: Feb. 18, 2016

Related U.S. Application Data
(60) Provisional application No. 62/117,955, filed on Feb. 18, 2015.

(51) Int. Cl. G06F 19/22; C12Q 1/68

(52) U.S. Cl. CPC G06F 19/22; C12Q 1/6869

(57) ABSTRACT

Provided herein are methods, compositions, systems, and kits for pooling amplification primers. Such methods, compositions, systems, and kits can be useful for integrated analysis of multiple classes of genomic alterations in a single assay.

### CROSS-REFERENCE

[0001] This patent application claims the benefit of U.S. Provisional Application Ser. No. 62/117,955 filed Feb. 18, 2015, which is incorporated by reference herein in its entirety.

### SEQUENCING LISTING

[0002] This application contains a Sequence Listing which is concurrently submitted as an ASCII text file via EFS-Web. The concurrently submitted ASCII text file is named “25115_768_201 SL.txt”, was created on Feb. 18, 2016, and is 2 MB in size. The material in this submitted text file is hereby incorporated by reference in its entirety into this application.

### BACKGROUND

[0003] In a clinical sample the specific type of genomic alterations resulting in disease or disorder can be unknown. Classes of genomic alterations can include, by way of example only, single nucleotide polymorphisms, copy number variations, genome re-arrangements, abnormal gene expression, gene fusions, alternative splicing events, or a combination thereof. DNA sequencing can be used to assay such genomic alterations. While whole genome sequencing can be used to assay various classes of genomic alterations, whole genome sequencing can be cost-prohibitive for a large number of clinical and diagnostic applications. Therefore, it can be more practical and cost-effective to select genomic regions of interest for sequencing and analysis. Accordingly, target enrichment can be a commonly employed strategy in genomic sequencing in which genomic regions of interest are selectively captured from a polynucleotide sample before sequencing. However, each class of genomic alterations can require different requirements for target enrichment, sample processing, and data analysis steps. These disparate requirements can present significant challenges to the integrated analysis of multiple classes of genomic alterations in a single sample. Therefore, independent assays can be performed for each class of genomic alterations. For example, targeted sequencing assays can measure only one type of genomic alteration at a time (e.g., SNPs or CNV, but not SNPs and CNV in a single assay). The use of independent assays for each class of genomic alterations can result in increased cost, increased amounts of sample, increased manpower, and increased time. Therefore, there is a need for methods, kits, and systems for integrated analysis of multiple classes of genomic alterations in a single assay.

### SUMMARY

[0004] In one aspect, provided herein is a method for detecting presence or absence of two or more classes of genomic alterations in a single assay, the method comprising: (a) sequencing a plurality of polynucleotide library members to produce sequence reads; (b) with aid of a computer processor, querying the sequence reads for presence of a sequence corresponding to any one of a first or second sub-plurality of a plurality of primers, where the first sub-plurality of primers comprises sequence designed to prime extension reactions into target sequence corresponding to genomic locations suspected of harboring a first class of genomic alterations and the second sub-plurality of primers comprises sequence designed to prime extension reactions into target sequence corresponding to genomic locations suspected of harboring a second class of genomic alterations, where the first class of genomic alterations and second class of genomic alterations are different, thereby identifying a first subset of sequence reads generated by sequencing the polynucleotide library members generated using the first sub-plurality of primers and a second subset of sequence reads generated by sequencing the polynucleotide library members generated using the second sub-plurality of primers; (c) with aid of a computer processor, separating the first subset of sequence reads into a first data file, and separating the second subset of sequence reads into a second data file; and (d) with aid of a computer processor, analyzing the first subset of sequence reads for presence or absence of the first class of genomic alterations, and analyzing the second subset of sequence reads for presence or absence of the second class of genomic alterations. In some embodiments, the method comprises, before (a), hybridizing the plurality of primers to a sample of polynucleotides In some embodiments, the method further comprises extending the plurality of primers with a polymerase, thereby generating polynucleotide extension products. In some embodiments, the method further comprises amplifying the polynucleotide extension products, thereby generating amplification products.

[0005] In some embodiments, the polynucleotide extension products are the polynucleotide library members of (a). In some embodiments, the amplification products are the polynucleotide library members of (a). In some embodiments, the plurality of primers comprises n additional sub-pluralities of the plurality of primers comprising target-specific sequences designed to extend into target sequence corresponding to genomic locations suspected of harboring n additional classes of genomic alterations. In some embodiments, the sequence reads of (a) further comprise n additional subsets of sequence reads comprising sequences corresponding to the n additional sub-pluralities of the plurality of primers.

[0006] In some embodiments, the querying of (b) further comprises querying the sequence reads for presence of a sequence corresponding to the n additional sub-pluralities of the plurality of primers, thereby identifying n additional subsets of sequence reads generated by sequencing the polynucleotide library members generated using the n sub-pluralities of primers. In some embodiments, (c) further comprises separating the n additional subsets of sequence reads into n additional data files. In some embodiments, (d) further comprises analyzing the n additional subsets of sequence reads for presence or absence of the n additional classes of genomic alterations.

[0007] In some embodiments, (c) comprises storing the first subset of sequence reads into the first data file, and storing the second subset of sequence reads into the second data file.

[0008] In some embodiments, the method further comprises appending a first adaptor sequence to the polynucleotides. In some embodiments, the appending comprises ligation. In some embodiments, the appending comprises appending the first adaptor sequence to a 5′ end of the polynucleotides.

[0009] In some embodiments, the plurality of primers comprises a 5′ tail, where the 5′ tail comprises a second adaptor sequence. In some embodiments, the plurality of primers comprises a 3′ portion comprising a target-specific sequence designed to prime an extension reaction into a target sequence corresponding to a genomic location.

[0010] In some embodiments, the first adaptor sequence is distinct from the second adaptor sequence. In some embodiments, the first adaptor sequence or the second adaptor sequence comprise a barcode sequence. In some embodiments, the barcode sequence comprises a random hexamer sequence.

[0011] In some embodiments, the method further comprises extending the plurality of primers with a polymerase, thereby generating polynucleotide extension products, amplifying the polynucleotide extension products, thereby generating amplification products, where the amplifying comprises use of primers that are at least 70% identical to the first adaptor sequence and the second adaptor sequence.

[0012] In some embodiments, the polynucleotides comprise DNA. In some embodiments, the polynucleotides comprise RNA.

[0013] In some embodiments, the analyzing comprises simultaneously analyzing the first and second subsets of sequence reads.

[0014] In some embodiments, the first class or second class of genomic alterations are selected from the group consisting of single nucleotide polymorphisms (SNPs), insertions, deletions, altered expression levels, gene fusions, copy number variations, copy number alterations, inversions, and translocations.

[0015] In some embodiments, a sub-plurality of primers of the plurality of primers is designed to prime an extension reaction into target sequence corresponding to genomic locations suspected of harboring a mutation that results in altered expression levels. In some embodiments, the sub-plurality of the plurality of primers designed to prime an extension reaction into target sequence corresponding to genomic locations suspected of harboring a mutation that results in altered expression levels comprise primers designed to anneal within 5′ and 3′ exons of a gene suspected of having altered expression level. In some embodiments, the sub-plurality of the plurality of primers designed to prime an extension reaction into target sequence corresponding to genomic locations suspected of harboring a mutation that results in altered expression levels comprises primers designed to anneal within 5′ or 3′ exons of a housekeeping gene. In some embodiments, the primers in the sub-plurality of primers designed to prime an extension reaction into target genomic locations suspected of harboring altered expression levels are unique within a transcriptome. In some embodiments, the sub-plurality of the plurality of primers designed to prime an extension reaction into target sequence corresponding to genomic locations suspected of harboring a mutation that results in altered expression levels have a length of at least 35 bases. In some embodiments, the sub-plurality of the plurality of primers designed to prime an extension reaction into target sequence corresponding to genomic locations suspected of harboring a mutation that results in altered expression levels anneal at least 25 bases away from an exon junction.

[0016] In some embodiments, a sub-plurality of the plurality of primers is designed to prime an extension reaction into target sequence corresponding to genomic locations suspected of harboring SNPs. In some embodiments, the sub-plurality of the plurality of primers is designed to prime an extension reaction into target sequence corresponding to genomic locations suspected of harboring SNPs are designed to anneal to genomic locations no more than 40 bases away from the SNPs.

[0017] In some embodiments, a sub-plurality of the plurality of primers is designed to prime an extension reaction into target sequence corresponding to genomic locations suspected of encoding a transcript that is alternatively spliced. In some embodiments, the primers belonging to the sub-plurality of the plurality of primers designed to prime an extension reaction into target sequence corresponding to genomic locations suspected of encoding a transcript that is alternatively spliced have a length of at least 40 bases. In some embodiments, the sub-plurality of the plurality of primers designed to prime an extension reaction into target sequence corresponding to genomic locations suspected of encoding a transcript that is alternatively spliced comprises primers designed such that the 3′ end of the primers is no more than 25 bases from an exon junction. In some embodiments, the sub-plurality of the plurality of primers designed to prime an extension reaction into target sequence corresponding to genomic locations suspected of encoding a transcript that is alternatively spliced comprises primers designed to anneal to each exon of a gene suspected of encoding a transcript that is alternatively spliced.

[0018] In some embodiments, n=1, such that the plurality of primers is designed to prime extension reactions into target sequence corresponding to genomic regions suspected of harboring a total of three classes of genomic alterations. In some embodiments, the first class of genomic alterations is SNPs, the second class of genomic alterations is copy number variations and a third class of genomic alterations is gene fusion events.

[0019] In some embodiments, the polynucleotide extension products were extended from polynucleotides comprising a first adaptor sequence. In some embodiments, at least one primer of the plurality of primers comprises a second adaptor sequence. In some embodiments, the second adaptor sequence is located at a 5′ portion of the at least one primer. In some embodiments, a 3′ portion of the at least one primer comprises a target-specific sequence designed to prime an extension reaction into a target sequence corresponding to a genomic location. In some embodiments, the first adaptor sequence is distinct from the second adaptor sequence. In some embodiments, at least one of the first adaptor sequence and second adaptor sequence further comprises a barcode sequence. In some embodiments, the barcode sequence comprises a random hexamer sequence.

[0020] In some embodiments, the polynucleotide library members comprise DNA. In some embodiments, the polynucleotide library members comprise RNA. In some embodiments, the polynucleotide library members comprise DNA and RNA.

[0021] In some embodiments, the first sub-plurality of primers comprise about one to about one hundred thousand primers. In some embodiments, the plurality of primers are not used to amplify a whole exome.

[0022] In some embodiments, the target sequence corresponding to genomic locations are suspected of harboring cancer-related genomic alterations. In some embodiments, the target sequence corresponding to genomic locations are suspected of harboring cardiovascular disease-related genomic alterations. In some embodiments, the target sequence corresponding to genomic locations are suspected of harboring neurological disease-related genomic alterations. In some embodiments, the target sequence corresponding to genomic locations are suspected of harboring autoimmune disease-related genomic alterations.

[0023] In some embodiments, (d) comprises simultaneously analyzing the first subset of sequence reads and the second subset of sequence reads.

[0024] In some embodiments, the computer processor of (c) is the computer processor of (b). In some embodiments, the computer processor of (c) is the computer processor of (d).

[0025] In another aspect, disclosed herein is non-transitory computer readable media comprising computer executable code for detecting presence or absence of two or more classes of genomic alterations in a sample subjected to a single assay, the computer readable medium comprising: (a) a database comprising a set of oligonucleotide sequences corresponding to a set of primers, where the set of oligonucleotide sequences comprises: (i) a first subset of oligonucleotide sequences corresponding to a first subset of primers, where the first subset of primers are designed to prime an extension reaction into target sequence corresponding to genomic locations suspected of harboring a first class of genomic alterations, and (ii) a second subset of oligonucleotide sequences corresponding to a second subset of primers, where the second subset of primers are designed to prime an extension reaction into target sequence corresponding to genomic locations suspected of harboring a second class of genomic alterations; (b) a set of computer executable instructions that, when executed by a processor, performs: (i) receiving a set of sequence reads; (ii) querying the set of sequence reads for presence of a sequence belonging to the first subset of oligonucleotide sequences or second subset of oligonucleotide sequences in the database; (iii) transferring sequence reads which comprise a sequence belonging to the first subset of oligonucleotide sequences into a first data file; (iv) transferring sequence reads which comprise a sequence belonging to the second subset of oligonucleotide sequences into a second data file; and (v) analyzing the sequence reads transferred to the first data file for presence or absence of a first class of genomic alterations, and analyzing the sequence reads transferred to the second data file for presence or absence of a second class of genomic alterations.

[0026] In some embodiments, the set of oligonucleotide sequences further comprises n additional subsets of primers, where the n additional subsets of primers are designed to prime an extension reaction into target sequence corresponding to genomic locations suspected of harboring n additional classes of genomic alterations. In some embodiments, the querying further comprises querying the set of sequence reads for presence of a sequence belonging to any one of the n additional subsets of oligonucleotide sequences in the database.

[0027] In some embodiments, (iv) further comprises transferring sequence reads which comprise a sequence belonging to at least one of the n additional subsets of oligonucleotide sequences into a corresponding nth additional data file. In some embodiments, (v) further comprises analyzing the sequence reads transferred to the nth additional data files for presence or absence of an nth additional class of genomic alterations. In some embodiments, the analyzing of (v) comprises simultaneously analyzing.

[0028] In some embodiments, at least one of the first class, second class, or n additional classes of genomic alterations are selected from the group consisting of single nucleotide polymorphisms (SNPs), insertions, deletions, alternative splicing events, gene fusion events, altered expression levels, copy number variations, copy number alterations, inversions, and translocations.

[0029] In some embodiments, the first subset primers comprises about one to about one hundred thousand primers. In some embodiments, the set of primers are not capable of amplifying a whole exome.

[0030] In some embodiments, the target sequence corresponding to genomic locations are suspected of harboring cancer-related genomic alterations. In some embodiments, the target sequence corresponding to genomic locations are suspected of harboring cardiovascular disease-related genomic alterations. In some embodiments, the target sequence corresponding to genomic locations are suspected of harboring neurological disease-related genomic alterations. In some embodiments, the target sequence corresponding to genomic locations are suspected of harboring autoimmune disease-related genomic alterations.

[0031] In some embodiments, the first subset of primers comprises at least one primer comprising a sequence selected from SEQ ID NOS. 1-12299, and the second subset of primers comprises at least one primer comprising a sequence selected from SEQ ID NOS. 12300-35857.

[0032] In some embodiments, (b)(iii) and (b)(iv) are performed simultaneously.

[0033] In some embodiments, the database is a data file or a list.

[0034] In another aspect, disclosed herein is a computer system for detecting presence or absence of two or more classes of genomic alterations in a sample subjected to a single targeted assay, comprising: (a) a database comprising: (i) a first subset of oligonucleotide sequences corresponding to a first subset of primers, where the first subset of primers are designed to prime an extension reaction into target sequence corresponding to genomic locations suspected of harboring a first class of genomic alterations, and (ii) a second subset of oligonucleotide sequences corresponding to a second subset of primers, where the second subset of primers are designed to prime an extension reaction into target sequence corresponding to genomic locations suspected of harboring a second class of genomic alterations; and (b) a receiver configured to receive a set of sequence reads generated by sequencing a plurality of polynucleotide library members, where the polynucleotide library members were extended using (i) the first subset of primers, and (ii) the second subset of primers; and (c) a processor operatively coupled to the receiver, where the processor comprises computer executable instructions that, when executed by the processor, performs: (i) querying the set of sequence reads for presence of a sequence belonging to the first subset of oligonucleotide sequences or second subset of oligonucleotide sequences in the database; (ii) transferring sequence reads which comprise a sequence belonging to the first subset of oligonucleotide sequences into a first data file; (iii) transferring sequence reads which comprise a sequence belonging to the second subset of oligonucleotide sequences into a second data file; (iv) analyzing the sequence reads transferred to the first data file for presence or absence of a first class of genomic alterations, and analyzing the sequence reads transferred to the second data file for presence or absence of a second class of genomic alterations.

[0035] In some embodiments, the single targeted assay is a single targeted sequencing assay.

[0036] In some embodiments, (c)(iv) comprises simultaneously analyzing the sequence reads transferred to the first data file and the sequence reads transferred to the second data file.

[0037] In some embodiments, the database is a data file or a list.

[0038] In another aspect, disclosed herein are kits for detecting presence or absence of two or more classes of genomic alterations in a sample subjected to a single targeted assay, comprising: (a) a plurality of primers, where the plurality of primers comprises (i) a first subset of primers designed to prime an extension reaction into target sequence corresponding to genomic locations suspected of harboring a first class of genomic alterations, and (ii) a second subset of primers designed to prime an extension reaction into target sequence corresponding to genomic locations suspected of harboring a second class of genomic alterations, where the first class of genomic alterations and the second class of genomic alterations are different; (b) a polymerase; and (c) instructions for detecting presence or absence of two or more classes of genomic alterations in a single targeted assay.

[0039] In some embodiments, the plurality of primers comprises n additional sub-pluralities of primers comprising target sequence designed to extend into target sequence corresponding to genomic locations suspected of harboring n additional classes of genomic alterations.

[0040] In some embodiments, the instructions are instructions for simultaneously detecting presence or absence of two or more classes of genomic alterations in a single targeted assay. In some embodiments, the single targeted assay is a targeted sequencing assay.

[0041] In some embodiments, the kit further comprises a non-transitory computer readable medium.

[0042] In some embodiments, at least one primer of the first subset comprises an adaptor sequence. In some embodiments, the adaptor sequence is located at a 5′ portion of the at least one primer. In some embodiments, a 3′ portion of the at least one primer comprises a target-specific sequence designed to prime an extension reaction into a target genomic location. In some embodiments, the adaptor sequence further comprises a barcode sequence. In some embodiments, the barcode sequence comprises a random hexamer sequence.

[0043] In some embodiments, at least one of the first class, second class or n additional classes of genomic alterations are selected from single nucleotide polymorphisms (SNPs), insertions, deletions, alternative splicing events, gene fusion events, altered expression levels, copy number variations, copy number alterations, inversions, or translocations.

[0044] In some embodiments, the first subset of primers is designed to prime an extension reaction into target sequence corresponding to genomic locations suspected of harboring a mutation that result in altered expression levels. In some embodiments, the first subset of primers designed to prime an extension reaction into target sequence corresponding to genomic locations suspected of harboring a mutation that results in altered expression levels comprises primers designed to reside within 5′ or 3′ exons of a gene suspected of having altered expression level. In some embodiments, the first subset of primers designed to prime an extension reaction into target sequence corresponding to genomic locations suspected of harboring a mutation that results in altered expression levels comprises primers designed to reside within 5′ or 3′ exons of a housekeeping gene. In some embodiments, the primers in the first subset of primers designed to prime an extension reaction into target sequence corresponding to genomic locations suspected of harboring mutations that result in altered expression levels are unique. In some embodiments, the first subset of primers designed to prime an extension reaction into target sequence corresponding to genomic locations suspected of harboring a mutation that results in altered expression levels have a length of at least 35 bases. In some embodiments, the first subset of primers designed to prime an extension reaction into target sequence corresponding to genomic locations suspected of harboring a mutation that results in altered expression levels are located at least 25 bases away from an exon junction.

[0045] In some embodiments, the first subset of primers is designed to prime an extension reaction into target sequence corresponding to genomic locations suspected of harboring SNPs. In some embodiments, the first subset of primers is designed to prime an extension reaction into target sequence corresponding to genomic locations suspected of harboring SNPs are designed to anneal to genomic locations no more than 40 bases away from the SNPs.

[0046] In some embodiments, the first subset of primers is designed to prime an extension reaction into target sequence corresponding to genomic locations suspected of encoding a transcript that is alternatively spliced. In some embodiments, the first subset of primers belonging to the sub-plurality of primers designed to prime an extension reaction into target sequence corresponding to genomic locations suspected of encoding a transcript that is alternatively spliced have a length of at least 40 bases. In some embodiments, the first subset of primers designed to prime an extension reaction into target sequence corresponding to genomic locations suspected of encoding a transcript that is alternatively spliced comprises primers designed such that the 3′ end of the primers anneal no more than 25 bases from an exon junction. In some embodiments, the first subset of primers designed to prime an extension reaction into target sequence corresponding to genomic locations suspected of encoding a transcript that is alternatively spliced comprises primers designed to anneal to each exon of a gene suspected of encoding a transcript that is alternatively spliced.

[0047] In some embodiments, n=1, such that the plurality of primers is designed to prime extension reactions into target sequence corresponding to genomic regions suspected of harboring a total of three classes of genomic alterations. In some embodiments, the first class of genomic alterations comprises SNPs, the second class of genomic alterations comprises copy number variations and a third class of genomic alterations comprises gene fusion events.

[0048] In some embodiments, the first subset of primers comprises about one to about one hundred thousand primers. In some embodiments, the plurality of primers is not capable of amplifying a whole exome.

[0049] In some embodiments, the target sequence corresponding to genomic locations are suspected of harboring cancer-related genomic alterations. In some embodiments, the target sequence corresponding to genomic locations are suspected of harboring cardiovascular disease-related genomic alterations. In some embodiments, the target sequence corresponding to genomic locations are suspected of harboring neurological disease-related genomic alterations. In some embodiments, the target sequence corresponding to genomic locations are suspected of harboring autoimmune disease-related genomic alterations.

[0050] In some embodiments, the first subset of primers comprises at least one primer comprising a sequence selected from SEQ ID NOS. 1-12299, and the second subset of primers comprises at least one primer comprising a sequence selected from SEQ ID NOS. 12300-35857.

### INCORPORATION BY REFERENCE

[0051] All publications, patents, and patent applications mentioned in this specification are herein incorporated by reference to the same extent as if each individual publication, patent, or patent application was specifically and individually indicated to be incorporated by reference.

### BRIEF DESCRIPTION OF THE DRAWINGS

[0052] The novel features described herein are set forth with particularity in the appended claims. A better understanding of the features and advantages described herein will be obtained by reference to the following detailed description that sets forth illustrative embodiments, in which the principles described herein are utilized, and the accompanying drawings of which:

[0053] FIG. 1 depicts an exemplary workflow of a method described herein.

[0054] FIG. 2 depicts an exemplary embodiment of selective target enrichment method.

[0055] FIG. 3 depicts an exemplary computer system described herein.

### DETAILED DESCRIPTION

[0056] Methods described herein can employ, unless otherwise indicated, techniques of molecular biology, microbiology and recombinant DNA techniques, which are within the skill of the art. Such
[0057] techniques are explained fully in the literature. See, e.g., Sambrook, Fritsch & Maniatis, Molecular Cloning: A Laboratory Manual, Fourth Edition (2012); Oligonucleotide Synthesis (M. J. Gait, ed., 1984); Nucleic Acid Hybridization (B. D. Hames & S. J. Higgins, eds., 1984); A Practical Guide to Molecular Cloning (B. Perbal, 1984); and a series, Methods in Enzymology (Academic Press, Inc.), which are hereby incorporated by reference.

### DEFINITIONS

[0058] As used in the specification and claims, the singular forms “a”, “an” and “the” can include plural references unless the context clearly dictates otherwise. For example, the term “a cell” can include a plurality of cells, including mixtures thereof.

[0059] “Nucleotides” and “nt” can be used interchangeably herein to refer to biological molecules that can form nucleic acids. Nucleotides can have moieties that contain not only the known purine and pyrimidine bases, but also other heterocyclic bases that have been modified. Such modifications include methylated purines or pyrimidines, acylated purines or pyrimidines, alkylated riboses, or other heterocycles. In addition, the term “nucleotide” can include those moieties that contain hapten, biotin, or fluorescent labels and may contain not only conventional ribose and deoxyribose sugars, but other sugars as well. Modified nucleosides or nucleotides can also include modifications on the sugar moiety, e.g., wherein one or more of the hydroxyl groups are replaced with halogen atoms or aliphatic groups, are functionalized as ethers, amines, or the like. Modified nucleosides or nucleotides can also include peptide nucleic acid (PNA).

[0060] The terms “polynucleotides”, “nucleic acid”, “nucleotides” and “oligonucleotides” can be used interchangeably. They can refer to a polymeric form of nucleotides of any length, either deoxyribonucleotides or ribonucleotides, or analogs thereof. Polynucleotides may have any three-dimensional structure, and may perform any function, known or unknown. The following are non-limiting examples of polynucleotides: coding or non-coding regions of a gene or gene fragment, loci (locus) defined from linkage analysis, exons, introns, messenger RNA (mRNA), transfer RNA, transfer-messenger RNA, ribosomal RNA, antisense RNA, small nuclear RNA (snRNA), small nucleolar RNA (snoRNA), micro-RNA (miRNA), small interfering RNA (siRNA), ribozymes, cDNA, recombinant polynucleotides, branched polynucleotides, plasmids, vectors, isolated DNA of any sequence, isolated RNA of any sequence, nucleic acid probes, and primers. A polynucleotide may comprise modified nucleotides, such as methylated nucleotides and nucleotide analogs. If present, modifications to the nucleotide structure may be imparted before or after assembly of the polymer. The sequence of nucleotides may be interrupted by non-nucleotide components. A polynucleotide may be further modified after polymerization, such as by conjugation with a labeling component. A nucleic acid described herein can contain phosphodiester bonds, although in some cases, as outlined below (for example in the construction of primers and probes such as label probes), nucleic acid analogs are included that can have alternate backbones, comprising, for example, phosphoramide (Beaucage et al., Tetrahedron 49(10):1925 (1993) and references therein; Letsinger, J. Org. Chem. 35:3800 (1970); Sprinzl et al., Eur. J. Biochem. 81:579 (1977); Letsinger et al., Nucl. Acids Res. 14:3487 (1986); Sawai et al, Chem. Lett. 805 (1984), Letsinger et al., J. Am. Chem. Soc. 110:4470 (1988); and Pauwels et al., Chemica Scripta 26:141 91986)), phosphorothioate (Mag et al., Nucleic Acids Res. 19:1437 (1991); and U.S. Pat. No. 5,644,048), phosphorodithioate (Briu et al., J. Am. Chem. Soc. 111:2321 (1989), O-methylphophoroamidite linkages (see Eckstein, Oligonucleotides and Analogues: A Practical Approach, Oxford University Press), and peptide nucleic acid (also referred to herein as “PNA”) backbones and linkages (see Egholm, J. Am. Chem. Soc. 114:1895 (1992); Meier et al., Chem. Int. Ed. Engl. 31:1008 (1992); Nielsen, Nature, 365:566 (1993); Carlsson et al., Nature 380:207 (1996), all of which are incorporated by reference). Other analog nucleic acids include those with bicyclic structures including locked nucleic acids (also referred to herein as “LNA”), Koshkin et al., J. Am. Chem. Soc. 120.13252 3 (1998); positive backbones (Denpcy et al., Proc. Natl. Acad. Sci. USA 92:6097 (1995); non-ionic backbones (U.S. Pat. Nos. 5,386,023, 5,637,684, 5,602,240, 5,216,141 and 4,469,863; Kiedrowshi et al., Angew. Chem. Intl. Ed. English 30:423 (1991); Letsinger et al., J. Am. Chem. Soc. 110:4470 (1988); Letsinger et al., Nucleoside & Nucleotide 13:1597 (1994); Chapters 2 and 3, ASC Symposium Series 580, “Carbohydrate Modifications in Antisense Research”, Ed. Y. S. Sanghui and P. Dan Cook; Mesmaeker et al., Bioorganic & Medicinal Chem. Lett. 4:395 (1994); Jeffs et al., J. Biomolecular NMR 34:17 (1994); Tetrahedron Lett. 37:743 (1996)) and non-ribose backbones, including those described in U.S. Pat. Nos. 5,235,033 and 5,034,506, and Chapters 6 and 7, ASC Symposium Series 580, “Carbohydrate Modifications in Antisense Research”, Ed. Y. S. Sanghui and P. Dan Cook. Nucleic acids containing one or more carbocyclic sugars are also included within the definition of nucleic acids (see Jenkins et al., Chem. Soc. Rev. (1995) pp 169 176). Several nucleic acid analogs are described in Rawls, C & E News Jun. 2, 1997 page 35. “Locked nucleic acids” are also included within the definition of nucleic acid analogs. LNAs can be a class of nucleic acid analogues in which the ribose ring is “locked” by a methylene bridge connecting the 2′-0 atom with the 4′-C atom. All of these references are hereby expressly incorporated by reference. These modifications of the ribose-phosphate backbone can be done to increase the stability and half-life of such molecules in physiological environments. For example, PNA:DNA and LNA-DNA hybrids can exhibit higher stability and thus can be used in some embodiments. The target nucleic acids can be single stranded or double stranded, as specified, or contain portions of both double stranded or single stranded sequence. Depending on the application, the nucleic acids can be DNA (including, e.g., genomic DNA, mitochondrial DNA, and cDNA), RNA (including, e.g., mRNA and rRNA) or a hybrid, where the nucleic acid contains any combination of deoxyribo- and ribo-nucleotides, and any combination of bases, including uracil, adenine, thymine, cytosine, guanine, inosine, xathanine hypoxathanine, isocytosine, isoguanine, etc.

[0061] The term “target polynucleotide,”, “target region”, or “target”, as use herein, can refer to a polynucleotide of interest. In certain embodiments, a target polynucleotide can be under study. In certain embodiments, a target polynucleotide contains one or more sequences that are of interest and under study. A target polynucleotide can comprise, for example, a genomic sequence. A target polynucleotide can also comprise extranuclear nucleic acids, e.g., mitochondrial DNA, chloroplast DNA and the like. The target polynucleotide can comprise a target sequence whose presence, amount, and/or nucleotide sequence, or genomic alterations in these, are desired to be determined.

[0062] The term “genomic sequence”, as used herein, can refer to a sequence that occurs in a genome. Because RNAs are transcribed from a genome, this term encompasses sequence that exist in the nuclear genome of an organism, as well as sequences that can be present in a cDNA copy of an RNA (e.g., an mRNA) transcribed from such a genome.

[0063] The terms “anneal”, “hybridize” or “bind,” can be used interchangeably herein to refer to the combining of one or more single-stranded polynucleotide sequences, segments or strands, and allowing them to form a double-stranded molecule through base pairing. Two complementary sequences (e.g., DNA and/or RNA) can anneal or hybridize by forming hydrogen bonds with complementary bases to produce a double-stranded polynucleotide or a double-stranded region of a polynucleotide.

[0064] As used herein, a sequence can “correspond” to a sub-plurality of primers if it is substantially identical or complementary to an identifying sequence of a primer belonging to the sub-plurality of primers. The identifying sequence of a primer can comprise a unique target-selective sequence of the primer that is, e.g., not found in any other primer. The identifying sequence of a primer can be a barcode sequence that is common to all primers in a given sub-plurality of primers in a set, and which is not found in primers belonging to any other sub-plurality of primers in the set. The identifying sequence can be an entire sequence of a primer. In other embodiments, the identifying sequence can be less than the entire sequence of a primer.

[0065] As used herein, the term “complementary” can refer to a relationship between one or more antiparallel nucleic acid sequences in which the sequences are related by the base-pairing rules: A can pair with T or U and C can pair with G. A first sequence or segment that is “perfectly complementary” to a second sequence or segment is complementary across its entire length and has no mismatches. A first sequence or segment can be “substantially complementary” to a second sequence of segment when a polynucleotide consisting of the first sequence is sufficiently complementary to specifically anneal to a polynucleotide consisting of the second sequence.

[0066] As used herein, “amplification” of a nucleic acid sequence can refer to in vitro techniques for enzymatically increasing the number of copies of a target sequence. Amplification methods can include both methods in which the predominant product is single-stranded and methods in which the predominant product is double-stranded). A “round” or “cycle” of amplification can refer to a polymerase chain reaction (PCR) cycle in which a double stranded template can be denatured into single-stranded templates, forward and reverse primers can be annealed to the single stranded templates to form primer/template duplexes, primers can be extended by a polymerase from the primer/template duplexes to form extension products. In subsequent rounds of amplification the extension products can be denatured into single stranded templates and the cycle can be repeated. Amplification can include PCR. Examples of PCR techniques that can be used in the methods provided herein include quantitative PCR, quantitative fluorescent PCR (QF-PCR), multiplex fluorescent PCR (MF-PCR), real time PCR(RT-PCR), single cell PCR, restriction fragment length polymorphism PCR (PCR-RFLP), PCR-RFLP/RT-PCR-RFLP, hot start PCR, nested PCR, in situ polony PCR, in situ rolling circle amplification (RCA), bridge PCR, picotiter PCR, digital PCR (dPCR), droplet digital PCR (ddPCR), and emulsion PCR. Other suitable amplification methods include the ligase chain reaction (LCR), transcription amplification, molecular inversion probe (MIP) PCR, self-sustained sequence replication, selective amplification of target polynucleotide sequences, consensus sequence primed polymerase chain reaction (CP-PCR), arbitrarily primed polymerase chain reaction (AP-PCR), degenerate oligonucleotide-primed PCR (DOP-PCR) and nucleic acid based sequence amplification (NABSA). Other amplification methods that can be used herein include those described in U.S. Pat. Nos. 5,242,794; 5,494,810; 4,988,617; and 6,582,938. Amplification of target nucleic acids can occur on a bead. In other embodiments, amplification does not occur on a bead. Amplification can be by isothermal amplification, e.g., isothermal linear amplification. A hot start PCR can be performed wherein the reaction is heated to 95° C. e.g., for two minutes prior to addition of a polymerase or the polymerase can be kept inactive until a first heating step in cycle 1. Hot start PCR can be used to minimize nonspecific amplification.

[0067] The term “polymerase” as used herein can refer to an enzyme that links individual nucleotides together into a strand, using another strand as a template. Examples of polymerases can include a DNA polymerase, an RNA polymerase, a thermostable polymerase, a wild-type polymerase, a modified polymerase, E. coli DNA polymerase I, T7 DNA polymerase, bacteriophage T4 DNA polymerase Φ29 (phi29) DNA polymerase, Taq polymerase, Tth polymerase, Tli polymerase, Pfu polymerase VENT polymerase, DEEPVENT polymerase, EX-Taq polymerase, LA-Taq polymerase, Sso polymerase, Poc polymerase, Pab polymerase, Mth polymerase, ES4 polymerase, Tru polymerase, Tac polymerase, Tne polymerase, Tma polymerase, Tca polymerase, Tih polymerase, Tfi polymerase, Platinum Taq polymerases, Tbr polymerase, Tfl polymerase, Tth polymerase, Pfutubo polymerase, Pyrobest polymerase, Pwo polymerase, KOD polymerase, Bst polymerase, Sac polymerase, Klenow fragment, polymerase with 3′ to 5′ exonuclease activity, and variants, modified products and derivatives thereof. In some embodiments, the polymerase is a single subunit polymerase. The polymerase can have high processivity, namely the capability of the polymerase to consecutively incorporate nucleotides into a nucleic acid template without releasing the nucleic acid template.

[0068] The terms “template,” “template strand,” “template DNA” and “template nucleic acid” can be used interchangeably herein to refer to a strand of DNA or RNA that can copied by an amplification cycle.

[0069] The term “denaturing,” as used herein, can refer to the at least partial separation of a nucleic acid duplex into two single strands.

[0070] The term “extending”, as used herein, can refer to the extension of a primer annealed to a template nucleic acid by the addition of nucleotides using an enzyme, e.g., a polymerase.

[0071] The terms “primer” and “probe” can refer to a nucleotide sequence (e.g., an oligonucleotide) that anneals with a template sequence (such as a target polynucleotide, or a primer extension product). In some instances, a nucleotide sequence can have a free 3′-OH group and can be capable of promoting polymerization of a polynucleotide complementary to the template. A primer can be, for example, a sequence of the template (such as a primer extension product or a fragment of the template created following RNase cleavage of a template-DNA complex) that can be annealed to a sequence in the template itself (for example, as a hairpin loop), and can promote nucleotide polymerization. Thus, a primer can be an exogenous (e.g., added) primer or an endogenous (e.g., template fragment) primer. A primer can be a tailed primer; a tail can comprise a sequence that does not anneal to a template. A tail sequence of a tailed primer can be unhybridized to another sequence. A primer can comprise a 3′ end (e.g., at least 10 nt, 20 nt, 25 nt, 30 nt, 35 nt, 40 nt, 45 nt in length) that anneals to a template and, optionally, a 5′ tail (e.g., at least 10 nt, 20 nt, 25 nt, 30 nt, 35 nt, 40 nt, 45 nt in length) that does not anneal to a template. A 5′ tail can comprise an adaptor sequence.

[0072] The terms “determining”, “measuring”, “evaluating”, “assessing,” “assaying,” and “analyzing” can be used interchangeably herein to refer to any form of measurement, and include determining if an element is present or not. These terms can include both quantitative and/or qualitative determinations. Assessing can be relative or absolute. “Assessing the presence of” can include determining the amount of something present, as well as determining whether it is present or absent.

[0073] The term “about” as used herein, when referring to a numerical value or range, can allow for a degree of variability of +/−15% of a stated value or of a stated limit of a range.

[0074] The term “single nucleotide polymorphism”, or “SNP”, as used herein, can refer to a type of genomic sequence variation resulting from a single nucleotide substitution within a sequence. “SNP alleles” or “alleles of a SNP” can refer to alternative forms of the SNP at particular locus. The term “interrogated SNP allele” can refer to the SNP allele that an assay is designed to detect.

[0075] The term “copy number alteration” or “CNA” can refer to differences in the copy number of genetic information. CNA can refer to differences in the per genome copy number of a genomic region. For example, in a diploid organism the expected copy number for autosomal genomic regions is 2 copies per genome. Such genomic regions should be present at 2 copies per cell. CNA can be a source of genetic diversity in humans and can be associated with complex disorders and disease, for example, by altering gene dosage, gene disruption, or gene fusion. A CNA can also represent benign polymorphic variants. CNAs can be large, for example, larger than 1 Mb, or can be smaller, for example between about 1 base and about 1 Mb. In some instances, CNA's between 1 base and 1 kb can be referred to as an “insertion” (if the alteration is an addition) or a “deletion” (if the alteration is a deletion). CNA's can be referred to as “copy number variations” (CNV's). For a review see Zhang et al. Annu. Rev. Genomics Hum. Genet. 2009. 10:451-81. More than 38,000 CNAs greater than 100 bases (and less than 3 Mb) have been reported in humans. Along with SNPs these CNAs can account for a significant amount of phenotypic variation between individuals. In addition to having deleterious impacts, e.g. causing disease, they may also result in advantageous variation.

[0076] “Parsing” or “binning” as used herein can refer to a process of arranging or separating a plurality of sequence reads into distinct groups, or bins. Parsed or binned reads can be analyzed by individual data workflows with the aid of a computer processor. For example, sequence reads corresponding to genomic targets suspected of harboring SNPs can be binned or parsed based on a sequence of a probe (primer) designed to prime extension reactions into target sequence corresponding to genomic locations suspected of harboring SNPs.

### Overview

[0077] Described herein are methods, compositions, kits, and systems for integrated analysis of multiple classes of genomic alterations in a single assay. Methods described herein can improve genomic analysis by reducing the computational burden for analysis of multiple types of genomic alterations from a single experiment. Methods described herein can improve genomic analysis by reducing the time required for completing the assay and analysis from start to finish. Methods described herein can improve genomic analysis by enabling simultaneous detection of multiple classes of genomic alterations in a single sample.

[0078] A method described herein can comprise subjecting a sample of polynucleotides to target enrichment. Target enrichment can be carried out using a plurality of primers designed to amplify target sequences corresponding to genomic regions of interest. For example, a target sequence corresponding to a genomic region can be the same as a genomic region. In some instances, a target sequence corresponding to a genomic region is a transcript of a genomic region. In some instances, a target sequence is an exon. In some instances, a target sequence is an intron. In some instances, a target sequence is an exon/intron boundary. A target sequence can be, e.g., a non-repetitive sequence (e.g., a protein coding gene or an RNA-coding gene), or a repetitive sequence (e.g., tandem repeat, interspersed repeat, retrotransposon (e.g., long terminal repeat (LTR), non-long terminal repeat (Non-LTR), long interspersed element (LINEs), short interspersed elements (SINES), or DNA transposons. The target sequences corresponding to genomic regions of interest can be suspected of harboring one or a plurality of classes of genomic alterations. The plurality of primers can comprise multiple sub-pluralities of primers, wherein each sub-plurality is designed to amplify target regions suspected of harboring a specific class of genomic alterations. The target-enriched sample can be pre-amplified prior to sequencing. The target-enriched sample can then be sequenced to produce sequence reads. The sequence reads can then be queried for presence of a sequence corresponding to any primer sequence in any one of the sub-pluralities of primers. Sequence reads can be sorted into separate data files according to presence of a sequence corresponding to a particular sub-plurality of primers. Sequence reads in particular data files can be separated with the aid of a computer processor for detection of a particular class of genomic alterations.

[0079] FIG. 1 depicts an exemplary embodiment of a method described herein. A plurality of primers comprising two sub-pluralities of primers (“Probe Pool A” and “Probe Pool B”) is prepared. Probe Pool A comprises primers designed to prime extension reactions into target sequences corresponding to genomic locations suspected of harboring SNPs (e.g., primers SEQ ID NOs: 1-12,299, incorporated by reference from the text file named “25115_768_201 SL.txt”, was created on Feb. 18, 2016). Probe Pool B comprises primers designed to prime extension reactions into target sequences corresponding to genomic locations suspected of harboring gene fusions (e.g., primers SEQ ID NOs: 12,300-35857, incorporated by reference from the text file is named “25115_768_201 SL.txt”, was created on Feb. 18, 2016). Probes from Pools A and B are pooled together and used for target enrichment of polynucleotides in a biological sample. The target-enriched sample is then subjected to sequencing library preparation as described herein or otherwise known in the art. The resulting target-enriched library is subjected to sequencing, thereby producing sequence reads. The sequence reads are queried for presence of any primer sequence corresponding to Probe Pool A or B. Sequence reads comprising primer sequences corresponding to Probe Pool A are subjected to a SNP analysis bioinformatics workflow. Exemplary SNP analysis workflows include, e.g., Bowtie analysis and Genome Analysis toolkit (GATK) best practices pipeline. Sequence reads comprising primer sequences corresponding to Probe Pool B are subjected to a gene fusion analysis bioinformatics workflow. Exemplary gene fusion analysis bioinformatics workflows include, e.g., Spliced Transcripts Alignment to a Reference (STAR) alignment or other fusion detection software. The SNP analysis and gene fusion analysis can be performed simultaneously.

[0080] Exemplary Samples

[0081] The sample of polynucleotides can be obtained from a biological sample obtained from a subject. The biological sample can be a solid biological sample, e.g., a tumor sample. In some embodiments, a sample from a subject can comprise at least 1%, 5%, 10%, 15%, 20%, 25%, 30%, 35%, 40%, 45%, 50%, 55%, 60%, 65%, 70%, 75%, 80%, 85%, 90%, 95%, 96%, 97%, 98%, 99%, or 100% tumor cells or nucleic acid from a tumor. The solid biological sample can be processed by fixation in a formalin solution, followed by embedding in paraffin (e.g., a FFPE sample). The solid biological sample can be processed by freezing. Alternatively, the biological sample can be neither fixed nor frozen. The unfixed, unfrozen sample can be stored in a solution configured for the preservation of nucleic acid. The solid biological sample can optionally be subjected to homogenization, sonication, French press, dounce, freeze/thaw, which can be followed by centrifugation.

[0082] The sample can be a liquid biological sample. For example, the liquid biological sample can be a blood sample (e.g., whole blood, plasma, or serum). A whole blood sample can be subjected to separation of a cellular components (e.g., plasma, serum) and cellular components by use of a Ficoll reagent. In some embodiments, the liquid biological sample can be a urine sample. In some embodiments, the liquid biological sample can be a perilymph sample. In some embodiments, the liquid biological sample can be a fecal sample. In some embodiments, the liquid biological sample can be saliva. In some embodiments, the liquid biological sample can be semen. In some embodiments, the liquid biological sample can be amniotic fluid. In some embodiments, the liquid biological sample can be cerebrospinal fluid. In some embodiments, the liquid biological sample can be bile. In some embodiments, the liquid biological sample can be sweat. In some embodiments, the liquid biological sample can be tears. In some embodiments, the liquid biological sample can be sputum. In some embodiments, the liquid biological sample can be synovial fluid. In some embodiments, the liquid biological sample can be vomit. In some embodiments, the liquid biological sample can be a cell-free sample. In some specific embodiments, the cell-free sample can be a cell-free plasma sample.

[0083] Polynucleotides in a sample (which can be referred to as input nucleic acid or input) can comprise DNA. The input nucleic acid can be complex DNA, such as double-stranded DNA, genomic DNA or mixed nucleic acids from more than one organism. In some instances, an input nucleic acid sample can comprise a mixture of nucleic acids from a human and a microbe. In some instances, an input nucleic acid sample can comprise a mixture of nucleic acids from a human and a pathogen. In some instances, an input nucleic acid sample can comprise a mixture of nucleic acids from a human and a virus. In some instances, an input nucleic acid sample can comprise a mixture of nucleic acids from a human and a parasite. In some instances, an input nucleic acid sample can comprise a mixture of nucleic acids from a human and a fetus.

[0084] Polynucleotides in the sample can comprise RNA. The RNA can be obtained and purified. RNA can include RNAs in purified or unpurified form, which include, but are not limited to, mRNAs, tRNAs, snRNAs, rRNAs, retroviruses, small non-coding RNAs, microRNAs, polysomal RNAs, pre-mRNAs, intronic RNA, viral RNA, cell free RNA and fragments thereof. The non-coding RNA, or ncRNA may include snoRNAs, microRNAs, siRNAs, piRNAs and long nc RNAs. Polynucleotides in the sample can comprise cDNA. The cDNA can be generated from RNA, e.g., mRNA. The cDNA can be single or double stranded. Polynucleotides in the sample can be of a specific species, for example, human, rat, mouse, other animals, specific plants, bacteria, algae, viruses, and the like. Polynucleotides in the sample can be from a mixture of genomes of different species such as host-pathogen, bacterial populations, and the like. For example, the input DNA can be cDNA made from a mixture of genomes of different species. Alternatively, the input nucleic acid can be from a synthetic source. The input DNA can be mitochondrial DNA. The input DNA can be cell-free DNA. The cell-free DNA can be obtained from, e.g., a serum or plasma sample. The input DNA can comprise one or more chromosomes. For example, if the input DNA is from a human, the DNA can comprise one or more of chromosome 1, 2, 3, 4, 5, 6, 7, 8, 9, 10, 11, 12, 13, 14, 15, 16, 17, 18, 19, 20, 21, 22, X, or Y. The DNA can be from a linear or circular genome. The DNA can be plasmid DNA, cosmid DNA, bacterial artificial chromosome (BAC), or yeast artificial chromosome (YAC). The input DNA can be from more than one individual or organism. The input DNA can be double stranded or single stranded. The input DNA can be part of chromatin. The input DNA can be associated with histones.

[0085] A nucleic acid may have a natural or artificial structure, or a combination thereof. Nucleic acids with a natural structure, namely, deoxyribonucleic acid (DNA) and ribonucleic acid (RNA), generally have a backbone of alternating pentose sugar groups and phosphate groups. Each pentose group can be linked to a nucleobase (e.g., a purine (such as adenine (A) or guanine (T)) or a pyrimidine (such as cytosine (C), thymine (T), or uracil (U))). Nucleic acids with an artificial structure can be analogs of natural nucleic acids and may, for example, be created by changes to the pentose and/or phosphate groups of the natural backbone. Exemplary artificial nucleic acids include glycol nucleic acids (GNA), peptide nucleic acids (PNA), locked nucleic acid (LNA), threose nucleic acids (TNA), and the like.

[0086] In some instances, a plurality of samples can be from the same subject. In some instances, a plurality of samples can be from a plurality of different subjects. In some embodiments, a plurality of samples can be from at least 1, 2, 3, 4, 5, 6, 7, 8, 9, 10, 20, 30, 40, 50, 60, 70, 80, 90, 100, 150, 200, 250, 300, 350, 400, 450, 500, 550, 600, 650, 700, 750, 800, 850, 900, 950, 1000, 1500, 2000, 2500, 3000, 3500, 4000, 4500, 5000, 5500, 6000, 6500, 7000, 7500, 8000, 8500, 9000, 9500 or 10000 subjects.

[0087] In some embodiments, samples can be collected over a period of time. Samples can be collected over regular time intervals, or can be collected intermittently over irregular time intervals. In some instances, a sample can be collected at least every 1, 5, 10, 20, 30, 45 or 60 minutes. In some instances, a sample can be collected at least every 1, 2, 3, 4, 5, 6, 7, 8, 9, 10, 11, 12, 13, 14, 15, 16, 17, 18, 19, 20, 21, 22, 23, 24, 36, 48, 72 or 96 hours. In some instances, a sample can be collected at least every 1, 2, 3, 4, 5, 6, 7, 8, 9, 10, 11, 12, 13, 14, 15, 16, 17, 18, 19, 20, 21, 22, 23, 24, 25, 26, 27, 28, 29, 30 or 31 days. In some instances, a sample can be collected at least every 1, 2, 3, 4, 5, 6, 7, 8, 9, 10, 11, 12, 13, 14, 15, 16, 17, 18, 19, 20, 21, 22, 23, 24, 25, 26, 27, 28, 29, 30, 31, 32, 33, 34, 35 or 36 months. In some embodiments, a sample can be collected at least every 0.5, 1, 1.5, 2, 2.5, 3, 3.5, 4, 4.5, 5, 5.5, 6, 6.5, 7, 7.5, 8, 8.5, 9, 9.5 or 10 years. Nucleic acids from different samples can be compared, e.g., to monitor a progression or recurrence of a condition, e.g., a disease.

[0088] In some instances, a sample can be collected by core biopsy. In some embodiments, a sample can be collected by aspiration, e.g. through the use of a needle and syringe. Examples of samples amenable to aspiration can include a sample or bodily fluid, a cell suspension, or a liquid in a crime scene as exemplary examples. In some instances, a sample can be collected by scraping. Examples of scraping can include swabbing a patients cheek or scrubbing a crime scene as exemplary examples. In some instances, a sample can be collected through excavation. In some embodiments, a sample can be collected as a purified nucleic acid. Examples of such purified samples can include precipitated nucleic acid affixed to filter paper, phenol-chloroform extractions, nucleic acid purified by kit purification (e.g. Quigen Miniprep™ and the like), or gel purified nucleic acid as exemplary examples.

[0089] In some embodiments, a sample can be provided directly from a patient. In some embodiments, a sample can be provided indirectly from a patient through a third party. In some embodiments, a sample can come from a crime scene. In some embodiments, a sample can come from a public water supply. In some embodiments, a sample can come from an archeological excursion. In some embodiments, a sample can be collected for forensic analysis. In some embodiments, a sample can be collected for a security application, e.g., detection of a bioterrorism agent. In some embodiments, samples are collected for determining genealogical connections, e.g., samples taken from relatives (child, brother, sister, mother, father, aunt, uncle, grandfather, great grandfather, grandmother, great grandmother, or cousin). A sample can comprise a historical sample, e.g., a historical FFPE sample.

[0090] Exemplary Sample Preparation

[0091] Sample preparation can comprise fragmenting polynucleotides in an input sample to generate polynucleotide fragments. The nucleic acids can be e.g. DNA, or RNA. The nucleic acids can be single or double stranded. The DNA can be genomic DNA, extranuclear DNA (e.g. mitochondrial DNA), cDNA or any combination thereof. The nucleic acids in an input sample can be single or double stranded DNA. Fragmentation of the nucleic acids can be achieved. Fragmentation can be through physical fragmentation methods and/or enzymatic fragmentation methods. Physical fragmentation methods can include nebulization, sonication, and/or hydrodynamic shearing. Fragmentation can be accomplished mechanically comprising subjecting the nucleic acids in the input sample to acoustic sonication. Fragmentation can comprise treating the nucleic acids in the input sample with one or more enzymes under conditions suitable for the one or more enzymes to generate double-stranded nucleic acid breaks. Examples of enzymes useful in the generation of nucleic acid or polynucleotide fragments include sequence specific and non-sequence specific nucleases. Non-limiting examples of nucleases can include DNase I, RNase A, Fragmentase, Serratia marcescens endonuclease, restriction endonucleases, variants thereof, and combinations thereof. Reagents for carrying out enzymatic fragmentation reactions can be commercially available (e.g., from New England Biolabs). As a non-limiting example, digestion with DNase I can induce random double-stranded breaks in DNA in the absence of Mg²⁺ and in the presence of Mn²⁺. Fragmentation can comprise treating the nucleic acids in the input sample with one or more restriction endonucleases. Fragments can be generated using, e.g., a clustered regularly-interspaced short palidromic repeats (CRISPR)/Cas9, using guide RNA (gRNA). Fragments can be generated using zinc finger nucleases. Fragmentation can produce fragments having 5′ overhangs, 3′ overhangs, blunt ends, or a combination thereof. In some situations wherein fragmentation comprises the use of one or more restriction endonucleases, cleavage of sample polynucleotides can leave overhangs having a predictable sequence. Methods provided herein can include a step of size selecting fragments via methods such as column purification or isolation from an agarose gel.

[0092] Nucleic acids in an input sample can be fragmented into a population of fragmented nucleic acid molecules or polynucleotides of one or more specific size range(s). The fragments can have an average length from about 10 to about 10,000 nucleotides. The fragments can have an average length from about 50 to about 2,000 nucleotides. The fragments can have an average length from about 100 to about 2,500, about 10 to about 1,000, about 10 to about 800, about 10 to about 500, about 50 to about 500, about 50 to about 250, or about 50 to about 150 nucleotides. The fragments can have an average length less than 10,000 nucleotide, such as less than 5,000 nucleotides, less than 2,500 nucleotides, less than 2,500 nucleotides, less than 1,000 nucleotides, less than 500 nucleotides, such as less than 400 nucleotides, less than 300 nucleotides, less than 200 nucleotides, or less than 150 nucleotides.

[0093] Fragmentation of the nucleic acids can be followed by end repair of the nucleic acid fragments. End repair can include the generation of blunt ends, non-blunt ends (e.g., sticky or cohesive ends), or single base overhangs such as the addition of a single dA nucleotide to the 3′-end of the nucleic acid fragments, by a polymerase lacking 3′-exonuclease activity. End repair can be performed using any number of enzymes and/or methods including commercially available kits such as the Encore™ Ultra Low Input NGS Library System I. End repair can be performed on double stranded DNA fragments to produce blunt ends wherein the double stranded DNA fragments contain 5′ phosphates and 3′ hydroxyls. The double-stranded DNA fragments can be blunt-end polished (or “end repaired”) to produce DNA fragments having blunt ends. In some instances, a DNA fragment can be joined to adapters after end repair. Generation of the blunt ends on the double stranded fragments can be generated by the use of a single strand specific DNA exonuclease such as for example exonuclease 1, exonuclease 7 or a combination thereof to degrade overhanging single stranded ends of the double stranded products. Alternatively, the double stranded DNA fragments can be blunt ended by the use of a single stranded specific DNA endonuclease, for example, but not limited to, mung bean endonuclease or S1 endonuclease. Fragments, e.g., fragments generated by amplification with chimeric DNA/RNA primers, can be treated with, e.g., S1 nuclease, or RNase (e.g., RNase A) to remove ribonucleotides from fragments. Alternatively, the double stranded products can be blunt ended by the use of a polymerase that comprises single stranded exonuclease activity such as for example T4 DNA polymerase, or any other polymerase comprising single stranded exonuclease activity or a combination thereof to degrade the overhanging single stranded ends of the double stranded products. The polymerase comprising single stranded exonuclease activity can be incubated in a reaction mixture that does or does not comprise one or more dNTPs. A combination of single stranded nucleic acid specific exonucleases and one or more polymerases can be used to blunt end the double stranded fragments generated by fragmenting the sample comprising nucleic acids. The nucleic acid fragments can be made blunt ended by filling in the overhanging single stranded ends of the double stranded fragments. For example, the fragments may be incubated with a polymerase such as T4 DNA polymerase or Klenow polymerase or a combination thereof in the presence of one or more dNTPs to fill in the single stranded portions of the double stranded fragments. The double stranded DNA fragments can be made blunt by a combination of a single stranded overhang degradation reaction using exonucleases and/or polymerases, and a fill-in reaction using one or more polymerases in the presence of one or more dNTPs.

[0094] In some cases, the 5′ and/or 3′ end nucleotide sequences of fragmented nucleic acids are not modified or end-repaired prior to ligation with the adapter oligonucleotides. For example, fragmentation by a restriction endonuclease can be used to leave a predictable overhang. In some instances, ligation with one or more adapter oligonucleotides comprising an overhang complementary to the predictable overhang on a nucleic acid fragment can be performed after fragmentation. In another example, cleavage by an enzyme that leaves a predictable blunt end can be followed by ligation of blunt-ended nucleic acid fragments to adapter oligonucleotides comprising a blunt end. End repair can be followed by an addition of at least 1, 2, 3, 4, 5, 6, 7, 8, 9, 10, 11, 12, 13, 14, 15, 16, 17, 18, 19, or 20 nucleotides, such as one or more adenine, one or more thymine, one or more guanine, one or more cytosine, or one or more of a nuclease with an artificial structure as described herein to produce an overhang. Nucleic acid fragments having an overhang can be joined to one or more adapter oligonucleotides having a complementary overhang, such as in a ligation reaction. As a non-limiting example, a single adenine can be added to the 3′ ends of end repaired DNA fragments using a template independent polymerase, followed by ligation to one or more adapters each having a thymine at a 3′ end. Adapter oligonucleotides can be joined to blunt end double-stranded nucleic acid fragments which have been modified by extension of the 3′ end with one or more nucleotides followed by 5′ phosphorylation. Extension of the 3′ end can be performed with a polymerase such as for example Klenow polymerase or any of the suitable polymerases provided herein, or by use of a terminal deoxynucleotide transferase, in the presence of one or more dNTPs in a suitable buffer containing magnesium. Nucleic acid fragments having blunt ends can be joined to one or more adapters comprising a blunt end. Phosphorylation of 5′ ends of nucleic acid fragments can be performed for example with T4 polynucleotide kinase in a suitable buffer containing ATP and magnesium. The fragmented nucleic acid molecules may be treated to dephosphorylate 5′ ends or 3′ ends, for example, by using enzymes such as phosphatases.

[0095] In some cases, a sample can be treated with an enzyme that can remove a damaged base. Enzymes involved in base excision repair can be amenable to remove damaged bases. In some instances, the enzyme can be a DNA glycosylases. DNA glycosylases can flip the damaged base out of the double helix, and cleave the N-glycosidic bond of the damaged base, leaving an apurinic/apyrimidinic (AP) site. Examples of DNA glycosylases can include Ogg1, Mag1, and Uracil-N-glycosylase. In some instances, an AP endonucleases can cleave an AP site to yield a 3′ hydroxyl adjacent to a 5′ deoxyribosephosphate. Examples of AP endonucleases can include Apn1, Apn2, APEX1 and APEX2. In some instances, a DNA polymerase as described herein can be added to repair the nucleic acid after base excision.

[0096] The fragmented polynucleotides can be subjected to adaptor ligation. The fragmented polynucleotides can be subjected to adaptor ligation using methods described in US20130231253, which is hereby incorporated by reference. For example, the fragmented polynucleotides may be ligated to a first adaptor sequence. The first adaptor sequence may be ligated a 5′ end or both the 5′ and 3′ ends of the polynucleotide fragments. For example, the fragmented polynucleotides can be adaptor-ligated with a forward adaptor on both 5′ and 3′ ends of the fragments (see, e.g., FIG. 2).

[0097] The amount of nucleic acid in a sample can at most, or at least, 1 pg, 10 pg, 100 pg, 1 ng, 10 ng, 100 ng, 1 ug, 10 ug, 100 ug. The amount of nucleic acid in a sample can be about 1 pg to about 10 pg, about 10 pg to about 100 pg, about 100 pg to about 1 ng, about 1 ng to about 10 ng, about 10 ng to about 100 ng, about 100 ng to about 1 ug, about 1 ug to about 10 ug, or about 10 ug to about 100 ug.

[0098] Exemplary Primers

[0099] A plurality of primers as described herein can comprise sub-pluralities of primers. Each sub-plurality of primers can be designed to target sequences corresponding to genomic regions suspected of harboring a particular class of genomic alterations. Exemplary classes of genomic alterations include, but are not limited to of single nucleotide polymorphisms (SNPs), insertions, deletions, alternative splicing events, gene fusion events, altered expression levels, copy number variations, copy number alterations, inversions, and translocations.

[0100] In some embodiments, a primer can be designed to anneal to a target at a given melting temperature (Tₘ). In some instances, a Tₘ can be from about 20 to about 100° C., about 20 to about 90° C., about 20 to about 80° C., about 20 to about 70° C., about 20 to about 60° C., about 20 to about 50° C., about 20 to about 40° C., or about 20 to about 30° C. In some instances, a Tₘ can be at least, at most, or about 20, 21, 22, 23, 24, 25, 26, 27, 28, 29, 30, 31, 32, 33, 34, 35, 36, 37, 38, 39, 40, 41, 42, 43, 44, 45, 46, 47, 48, 49, 50, 51, 52, 53, 54, 55, 56, 57, 58, 59, 60, 61, 62, 63, 64, 65, 66, 67, 68, 69, 70, 71, 72, 73, 74, 75, 76, 77, 78, 79, 80, 81, 82, 83, 84, 85, 86, 87, 88, 89, 90, 91, 92, 83, 84, 85, 96, 97, 98, 99 or 100° C. A plurality of primers, or primers within a sub-plurality of a plurality of primers, can be designed to have Tₘs within a range, e.g., within a range spanning 15° C., 10° C., 9° C., 8° C., 7° C., 6° C., 5° C., 4° C., 3° C., 2° C., or 1° C. A plurality of primers, or primers within a sub-plurality of a plurality of primers, can be designed to have identical Tₘs.

[0101] In some embodiments, a primer can be designed to be a certain length. In some instances, a primer can be from about 8 to about 100, from about 8 to about 90, from about 8 to about 80, from about 8 to about 70, from about 8 to about 60, from about 8 to about 50, from about 8 to about 40, from about 8 to about 30, from about 8 to about 20, or from about 8 to about 10 bases in length. In some instances, a primer can be from about 25 to about 80, from about 25 to about 75, from about 25 to about 70, from about 25 to about 65, from about 25 to about 60, from about 25 to about 55, from about 25 to about 50, from about 25 to about 45, from about 25 to about 40, from about 25 to about 35, or from about 25 to about 30 bases in length. In some instances, a primer can be at least 20, at least 25, at least 30, at least 35, at least 40, at least 45, at least 50, at least 55, at least 60, at least 65, at least 70, at least 75, at least 80, at least 85, at least 90, at least 95 or at least 100 bases in length.

[0102] In some cases, primers within a sub-plurality are not designed to have a common sequence, e.g., a barcode, that can be used to parse or bin sequence reads based on genomic locations suspected of harboring a first class of genomic alterations. In some cases, a plurality of primers comprise a barcode capable of distinguishing primers used with different samples, and have, or lack, a barcode designed to parse or bin sequence reads based on genomic locations suspected of harboring a first class of genomic alterations.

[0103] In some cases, primers within a sub-plurality are designed to have a common sequence, e.g., a barcode that can be used to parse or bin sequence reads based on genomic locations suspected of harboring a first class of genomic alterations. The barcode can be about 2, 3, 4, 5, 6, 7, 8, 9, 10, 11, 12, 13, 14, 15 nt long. The barcode can be less than 3, 4, 5, 6, 7, 8, 9, 10, 11, 12, 13, 14, 15 nt long. The barcode can use a combination of all four canonical bases (ACGT), a combination of three bases of ACGT, or a combination of two bases of ACGT. Different sub-pluralities of primers can have different length barcodes. The barcode, or the complement of the barcode, can be incorporated into an amplification product, e.g., an amplification product of a target enriched library, and the barcode, or complement of the barcode, can become part of a sequence read. Sequence reads can be partitioned or binned based on having a common barcode (or complement of the barcode).

[0104] A plurality of primers can comprise any number of sub-pluralities of primers. For example, a plurality of primers can include at least, at most, or about 2, 3, 4, 5, 6, 7, 8, 9, 10, 11, 12, 13, 14, 15, 16, 17, 18, 19, 20, 21, 22, 23, 24, 25, 26, 27, 28, 29, 20, 31, 32, 33, 34, 35, 36, 37, 38, 39, 40, 41, 42, 43, 44, 45, 46, 47, 48, 49, 50, 51, 52, 53, 54, 55, 56, 57, 58, 59, 60, 61, 62, 63, 64, 65, 66, 67, 68, 69, 70, 71, 72, 73, 74, 75, 76, 77, 78, 79, 80, 81, 82, 83, 84, 85, 86, 87, 88, 89, 90, 91, 92, 93, 94, 95, 96, 97, 98, 99, or 100 sub-pluralities of primers. A plurality of primers can include about 2 to about 8, about 5 to about 20, about 10 to about 50, about 30 to about 100, or more than 100 sub-pluralities of primers. Any sub-plurality of primers can comprise any number of primers. For example, a sub-plurality of primers can include at least, at most, or about 2, 3, 4, 5, 6, 7, 8, 9, 10, 11, 12, 13, 14, 15, 16, 17, 18, 19, 20, 21, 22, 23, 24, 25, 26, 27, 28, 29, 20, 31, 32, 33, 34, 35, 36, 37, 38, 39, 40, 41, 42, 43, 44, 45, 46, 47, 48, 49, 50, 51, 52, 53, 54, 55, 56, 57, 58, 59, 60, 61, 62, 63, 64, 65, 66, 67, 68, 69, 70, 71, 72, 73, 74, 75, 76, 77, 78, 79, 80, 81, 82, 83, 84, 85, 86, 87, 88, 89, 90, 91, 92, 93, 94, 95, 96, 97, 98, 99, 100, 150, 200, 250, 300, 350, 400, 450, 500, 600, 700, 800, 900, 1000, 1100, 1200, 1300, 1400, 1500, 1600, 1700, 1800, 1900, 2000, 3000, 4000, 5000, 6000, 7000, 8000, 9000, 10000, 11000, 12000, 13000, 14000, 15000, 16000, 17000, 18000, 19000, 20000, 25000, 30000, 35000, 40000, 45000, 50000, 55000, 60000, 65000, 70000, 75000, 80000, 85000, 90000, 95000, 100000, 150000, 200000, 250000, 300000, 350000, 400000, 450000, 500000, 550000, 600000, 650000, 700000, 750000, 800000, 850000, 900000, 950000, 1000000, 1500000, 2000000, 2500000, 3000000, 3500000, 4000000, 4500000, 5000000, 5500000, 6000000, 6500000, 7000000, 7500000, 8000000, 8500000, 9000000, 9500000, or 10000000 primers. A subplurality of primers can include about 10 to about 100, about 100 to about 1000, about 1000 to about 10,000, about 10,000 to about 100,000, about 100,000 to about 1,000,000, or about 1,000,000 to about 10,000,000 different primers.

[0105] In some embodiments, a primer can anneal to a region of a target sequence corresponding to a genomic region comprising a lesion. A primer can anneal to a region of a target sequence corresponding to a genomic region that does not comprise a lesion. The term “lesion” as used herein can comprise any of the genomic alterations described herein. In some instances, a primer can anneal to a target sequence 5′ or 3′ to a lesion. In some instances, a 3′ end of a primer can anneal to a target sequence at a distance of at least 1, 2, 3, 4, 5 6, 7, 8, 9, 10, 11, 12, 13, 14, 15, 16, 17, 18, 19, 20, 21, 22, 23, 24, 25, 26, 27, 28, 29, 20, 31, 32, 33, 34, 35, 36, 37, 38, 39, 40, 41, 42, 43, 44, 45, 46, 47, 48, 49, 50, 51, 52, 53, 54, 55, 56, 57, 58, 59, 60, 61, 62, 63, 64, 65, 66, 67, 68, 69, 70, 71, 72, 73, 74, 75, 76, 77, 78, 79, 80, 81, 82, 83, 84, 85, 86, 87, 88, 89, 90, 91, 92, 93, 94, 95, 96, 97, 98, 99, 100, 150, 200, 250, 300, 350, 400, 450, 500, 550, 600, 650, 700, 750, 800, 850, 900, 950, 1000, 1100, 1200, 1300, 1400, 1500, 1600, 1700, 1800, 1900 or 2000 bases or base pairs away from a lesion. In some instances, a 3′ end of a primer can anneal to a target sequence at a distance of at most 1, 2, 3, 4, 56, 7, 8, 9, 10, 11, 12, 13, 14, 15, 16, 17, 18, 19, 20, 21, 22, 23, 24, 25, 26, 27, 28, 29, 20, 31, 32, 33, 34, 35, 36, 37, 38, 39, 40, 41, 42, 43, 44, 45, 46, 47, 48, 49, 50, 51, 52, 53, 54, 55, 56, 57, 58, 59, 60, 61, 62, 63, 64, 65, 66, 67, 68, 69, 70, 71, 72, 73, 74, 75, 76, 77, 78, 79, 80, 81, 82, 83, 84, 85, 86, 87, 88, 89, 90, 91, 92, 93, 94, 95, 96, 97, 98, 99, 100, 150, 200, 250, 300, 350, 400, 450, 500, 550, 600, 650, 700, 750, 800, 850, 900, 950, 1000, 1100, 1200, 1300, 1400, 1500, 1600, 1700, 1800, 1900 or 2000 bases or base pairs away from a lesion.

[0106] In some embodiments, a primer can be designed to anneal to a specific region of a target nucleic acid. In some instances, the 3′ end of a primer designed to anneal to a target sequence comprising a gene fusion event can anneal a base 3′ of an exon junction.

[0107] In some instances, the 3′ end of primer designed to anneal to a target sequence comprising a SNP can anneal immediately 3′ of the SNP.

[0108] In some instances, primers designed to anneal to a target sequence comprising a copy number alteration can tile across the sequence comprising the copy number alteration, e.g., a gene intron, exon, or both. The term “tile” can refer to annealing multiple primers along a target nucleic acid, wherein the annealed primers are separated by a distance. In some instances, tiling can comprise annealing primers to sequence in which pairs of annealed primers are separated by at least 1, 2, 3, 4, 5, 6, 7, 8, 9, 10, 15, 20, 25, 30, 35, 40, 45, 50, 55, 60, 65, 70, 75, 80, 85, 90, 95, 100, 110, 120, 130, 140, 150, 160, 170, 180, 190, 200, 210, 220, 230, 240, 250, 260, 270, 280, 290, 300, 500, 1000, 5000, or 10,000 bases. In some instances, tiling can comprise annealing at least 1, 5, 10, 15, 20, 25, 30, 35, 40, 45, 50, 55, 60, 65, 70, 75, 80, 85, 90, 95, 100, 110, 120, 130, 140, 150, 160, 170, 180, 190, 200, 210, 220, 230, 240, 250, 260, 270, 280, 290, 300, 310, 320, 330, 340, 350, 360, 370, 380, 390, 400, 410, 420, 430, 440, 450, 460, 470, 480, 490, 500, 550, 600, 650, 700, 750, 800, 850, 900, 950, 1000, 1100, 1200, 1300, 1400, 1500, 1600, 1700, 1800, 1900, 2000, 2500, 3000, 3500, 4000, 4500, 5000, 5500, 6000, 6500, 7000, 7500, 8000, 8500, 9000, 9500 or 10000 primers to a sequence.

[0109] In some embodiments, a primer can anneal to an exon of a target sequence corresponding to a genomic region suspected of harboring a particular class of genomic alterations. In some embodiments, a primer can anneal to an intron that is 5′ or 3′ of a target sequence corresponding to a genomic region suspected of harboring a particular class of genomic alterations. In some embodiments, a primer can anneal to an intron that is 5′ or 3′ of a target sequence corresponding to a genomic region suspected of harboring a particular class of genomic alterations. In some embodiments, a primer can anneal to a promotor region of a target sequence corresponding to a genomic region suspected of harboring a particular class of genomic alterations. In some embodiments, a primer can anneal to an enhancer region of a target sequence corresponding to a genomic region suspected of harboring a particular class of genomic alterations. In some embodiments, a primer can anneal to an operon. In some embodiments, the operon can be a lac operon. In some embodiments, a primer can anneal to an untranslated region of an RNA template. In some embodiments, a primer can anneal to an untranscribed region of a DNA template.

[0110] Primers in any one of the sub-pluralities can comprise a target-selective sequence. Such primers can also comprise an adaptor sequence. The adaptor sequence can be distinct from the adaptor sequence ligated to sample polynucleotides described herein. For example, if sample polynucleotides are ligated to a forward sequencing adaptor, the primers can comprise a reverse sequencing adaptor. Likewise, if sample polynucleotides are ligated to a reverse sequencing adaptor, the primers can comprise a forward sequencing adaptor. The primers can comprise an adaptor sequence at a 5′ end and a target-selective sequence at a 3′ end. Primers in any given sub-plurality can further comprise an adaptor or index sequence which identifies the sub-plurality.

[0111] In some instances, a primer can comprise a 5′ tail. A 5′ tail can comprise a nucleotide sequence that is different than a target sequence or that does not anneal to a target sequence. A 5′ tail sequence can be unhybridized to other sequence, e.g., other adaptor sequence or to another nucleic acid strand. In some embodiments, a 5′ tail can comprise a second adapter sequence. In some instances, a first adapter sequence and a second adapter sequence can be the same sequence. In other instances, a first adapter sequence and a second adapter sequence can be different sequences. In some embodiments, a 5′ tail can comprise an indexing adapter as described in U.S. Pat. No. 8,053,192, the contents of which are incorporated by reference herein. In some embodiments, a 5′ tail can be attached to a solid support. Non-limiting examples of solid supports that can be employed are described in U.S. Pat. No. 6,913,884, the contents of which are incorporated by reference herein.

[0112] Primers (or probes) can be synthesized using chemical synthesis, e.g., using phosphoramidite method.

[0113] Target Enrichment

[0114] Primers, for example, different pools of sub-plurality of primers, described herein can be pooled in a reaction mixture for target enrichment. The reaction mixture can comprise components for performing primer annealing and extension of target genomic regions. The reaction can produce extension products. The extension products can be subjected to an amplification reaction. The amplification reaction can be exponential, and can be carried out at various temperature cycles or isothermal. The amplification can be polymerase chain reaction. The amplification reaction can be isothermal. The oligonucleotide extension product can comprise first adaptor sequence on one end and second adaptor sequence on the other end as generated by the methods described herein. The oligonucleotide extension product can be separated from the template nucleic acid fragment in order to generate a single stranded oligonucleotide extension product with first adaptor sequence on the 5′ end and second adaptor sequence on the 3′ end. The single stranded oligonucleotide extension product can then be amplified using a first primer comprising sequence identical to the first adaptor and a second primer comprising sequence complementary to the second adaptor sequence. In this manner only oligonucleotide extension products comprising both the first and the second adaptor sequence will be amplified and thus enriched. The first adaptor and/or the second adaptor sequence can comprise an identifier sequence. The identifier sequence can be barcode sequence. The barcode sequence can be the same or different for the first adaptor and the second adaptor sequence. The first adaptor and/or the second adaptor sequence can comprise sequence that can be used for downstream applications such as, for example, but not limited to, sequencing. The first adaptor and/or the second adaptor sequence can comprise flow cell sequences which can be used for sequencing with the sequencing method developed by Illumina and described herein.

[0115] FIG. 2 depicts an exemplary embodiment of a method described herein for targeted enrichment of a polynucleotide sample. A single forward adaptor (e.g., a double stranded adaptor or single stranded adaptor) can be ligated to both ends of polynucleotide fragments (e.g., a double-stranded DNA fragment or single stranded DNA fragment) in the sample to produce forward adaptor-ligated fragments. The single forward adaptor can be a common adaptor. The forward adaptor-ligated fragments can be subjected to an end repair reaction to produce blunt ends. The forward adaptor-ligated fragments can then be denatured to generate a denatured library comprising single-stranded forward adaptor-ligated fragments with complementary ends. Custom target-selective primers, e.g., as described herein, e.g., with a reverse adaptor tail, can then be annealed to the single-stranded forward adaptor-ligated fragments comprising target genomic regions suspected of harboring specific classes of genomic alterations. Custom target-selective primers can comprise reverse adaptor tails at a 5′ portion of the primer and target-selective sequences at a 3′ portion of the primer. The reverse adaptor can comprise a distinct sequence from the forward adaptor. After annealing, the custom primers can be extended, thereby producing extension products comprising a forward adaptor sequence at a first end and a reverse adaptor sequence at a second end. The extension products can then be selectively amplified using a forward primer which anneals to the forward adaptor and a reverse primer which anneals to the reverse adaptor. Polynucleotides which were not extended with the custom primers will generally not be amplified using such primers.

[0116] Other target enrichment methods are described in U.S. patent application Ser. No. 14/836,936, which is incorporated by reference in its entirety.

[0117] A target enrichment technique employed in methods or systems provided herein can be an Agilent SureSelect Target Enrichment System. The Agilent SureSelect target enrichment system can involve use of an RNA probe set, complementary to target regions. The probe set can be designed using and online tool. Sheared DNA can be hybridized to RNA probes. Different pools of RNA probes can be designed based on different classes of genomic alterations. The RNA probes can be 120-mer biotinylated cRNA baits. Captured fragments can be separated, e.g., using streptavidin-coated beads, e.g., streptavidin coated magnetic beads. Beads can be washed, and RNA can be digested. Adaptors can be added to captured fragments, and selected regions can be amplified, e.g., by PCR. A resulting library can be quantified, e.g., using an Agilent 2100 Bioanalyzer. The library can be sequenced, e.g., using a sequencing technique described herein. Sequence reads can be parsed based on the different classes of probes used.

[0118] A target enrichment technique employed in methods or systems provided herein can be a NimbleGen SeqCap EZ choice system. A nucleic acid probe set, e.g., a DNA probe set, complementary to target regions can be designed. Different pools of probes (e.g., DNA probes) can be designed based on different classes of genomic alterations. The probes, e.g., DNA probes, can be biotinylated. An in-solution target enrichment can be performed. A nucleic acid sample, e.g., a genomic DNA sample, can be fragmented. Adaptors can be ligated to the fragments, e.g., genomic DNA fragments. The biotinylated probes can be hybridized to the fragments ligated to adaptors. The hybridized fragments can be captured, e.g., on a bead, washed, and amplified. The resulting library can be quantified, e.g., using an Agilent 2100 Bioanalyzer. The library can be sequenced, e.g., using a sequencing technique described herein. Sequence reads can be parsed based on the different classes of probes used.

[0119] For a hybridization based assay, coded adaptors can be paired with probes for specific classes of genomic alterations. For example, a barcoded Adaptor A can be attached to fragments, and a sub-plurality of primers can be used to primer reactions for target sequences suspected of comprising a first class of genomic alterations (Reaction A). In a separate reaction, barcoded Adaptor B can be attached to fragments and a sub-plurality of primers can be used to prime reactions for target sequences suspected of comprising a second class of genomic alterations (Reaction B). Products from Reaction A and Reaction B can be pooled, sequence reads can be generated, and the sequence reads can be parsed or binned based on barcodes in Adaptor A and Adaptor B.

[0120] In some embodiments, a target sequence can be enriched through conjugation to an affinity tag. In some instances, a target sequence can be coupled to biotin, which can then be purified by contacting the target sequence with streptavidin resin. Conjugation of polypeptide purification tags can also be used to enrich the target sequence. Examples of polypeptide purification tags can include an HA tag, a 6×Histidine tag, a maltose binding protein (MBP) tag or a thrioredoxin reductase (Trx) tag.

[0121] In some embodiments, a target sequence can comprise an epitope recognized by a DNA binding protein, which can then be enriched by contacting the nucleic acid with the DNA binding protein, where the DNA binding protein can be immobilized in a purification column for example. Alternatively, DNA bound to a DNA binding protein can be immunoprecipitated and separated from the bulk population, thereby enriching the population of target nucleic acids that are bound to the immunoprecipitated protein.

[0122] In some embodiments, a target nucleic acid can be enriched by washing a solution of DNA molecules over an array of specific immobilized primers designed to capture and enrich target sequences. After washing, each captured target nucleic acid can be amplified using a common primer, thereby enriching a desired population based on complementarity to the array.

[0123] Another method for enrichment of target sequences is through the incorporation of thionucleotides (see U.S. Pat. No. 5,525,471). Deoxynucleusides analogs comprising thionucleotides can be incorporated into a target sequence subjected to an amplification reaction. The selective incorporation of these thionucleotides can provide resistance to an exonuclease, while sequences lacking the thionucleotides can be digested by the endonuclease, thereby enriching a target nucleic acid sequence.

[0124] In some embodiments, a target sequence can be enriched through selective PCR amplification. A primer can be designed to confer an adaptor at a 3′ end of a target sequence upon annealing to and extending from a target sequence. A target specific primer can then be added that can be designed to anneal to a specific target, which is then enriched exponentially through successive rounds of PCR.

[0125] In some embodiments, amplification of a target sequence can comprise at least part of a genome of an organism. In some embodiments, at least 0.01%, 0.02%, 0.03%, 0.04%, 0.05%, 0.06%, 0.07%, 0.08%, 0.09%, 0.1%, 0.2%, 0.3%, 0.4%, 0.5%, 0.6%, 0.7%, 0.8%, 0.9%, 1%, 2%, 3%, 4%, 5%, 6%, 7%, 8%, 9%, 10%, 11%, 12%, 13%, 14%, 15%, 16%, 17%, 18%, 19%, 20%, 21%, 22%, 23%, 24%, 25%, 26%, 27%, 28%, 29%, 30%, 31%, 32%, 33%, 34%, 35%, 36%, 37%, 38%, 39%, 40%, 41%, 42%, 43%, 44%, 45%, 46%, 47%, 48%, 49%, 50%, 55%, 60%, 65%, 70%, 75%, 80%, 85%, 90%, 95%, 96%, 97%, 98%, 99% or 100% of the genome of an organism can be enriched (e.g., amplified) and analyzed.

[0126] In some embodiments, enrichment (e.g., amplification) of a target sequence can comprise enriching at least part of a transcriptome of an organism. In some embodiments, at least 0.01%, 0.02%, 0.03%, 0.04%, 0.05%, 0.06%, 0.07%, 0.08%, 0.09%, 0.1%, 0.2%, 0.3%, 0.4%, 0.5%, 0.6%, 0.7%, 0.8%, 0.9%, 1%, 2%, 3%, 4%, 5%, 6%, 7%, 8%, 9%, 10%, 11%, 12%, 13%, 14%, 15%, 16%, 17%, 18%, 19%, 20%, 21%, 22%, 23%, 24%, 25%, 26%, 27%, 28%, 29%, 30%, 31%, 32%, 33%, 34%, 35%, 36%, 37%, 38%, 39%, 40%, 41%, 42%, 43%, 44%, 45%, 46%, 47%, 48%, 49%, 50%, 55%, 60%, 65%, 70%, 75%, 80%, 85%, 90%, 95%, 96%, 97%, 98%, 99% or 100% of a transcriptome of an organism can be amplified and analyzed.

[0127] Sequencing

[0128] The target-enriched sample can be subjected to sequencing. Sequencing can utilize any sequencing method, such as next-generation sequencing. For example, sequencing can utilize the method commercialized by Illumina, as described U.S. Pat. Nos. 5,750,341; 6,306,597; and 5,969,119, which are hereby incorporated by reference. In general, double stranded fragment polynucleotides can be prepared by the methods described herein to produce amplified nucleic acid sequences tagged at one (e.g., (A)/(A′) or both ends (e.g., (A)/(A′) and (C)/(C′)). Single stranded nucleic acid tagged at one or both ends can be amplified (e.g., by SPIA or linear PCR).The resulting nucleic acid can then be denatured and the single-stranded amplified polynucleotides can be randomly attached to the inside surface of flow-cell channels. Unlabeled nucleotides can be added to initiate solid-phase bridge amplification to produce dense clusters of double-stranded DNA. To initiate the first base sequencing cycle, four labeled reversible terminators, primers, and DNA polymerase can be added. After laser excitation, fluorescence from each cluster on the flow cell can be imaged. The identity of the first base for each cluster can then be recorded. Cycles of sequencing can be performed to determine the fragment sequence one base at a time.

[0129] Sequencing can comprise use of sequencing by ligation methods commercialized by Applied Biosystems (e.g., SOLiD sequencing). Methods provided herein can be useful for preparing target polynucleotides for sequencing by synthesis using the methods commercialized by 454/Roche Life Sciences, including but not limited to the methods and apparatus described in Margulies et al., Nature (2005) 437:376-380 (2005); and U.S. Pat. Nos. 7,244,559; 7,335,762; 7,211,390; 7,244,567; 7,264,929; and 7,323,305. Methods provided herein can be useful for preparing target polynucleotide(s) for sequencing by the methods commercialized by Helicos BioSciences Corporation (Cambridge, Mass.) as described in, e.g., U.S. application Ser. No. 11/167,046, and U.S. Pat. Nos. 7,501,245; 7,491,498; 7,276,720; and in U.S. Patent Application Publication Nos. US20090061439; US20080087826; US20060286566; US20060024711; US20060024678; US20080213770; and US20080103058.

[0130] Methods provided herein can be useful for preparing target polynucleotide(s) for sequencing by the methods commercialized by Pacific Biosciences as described in, e.g., U.S. Pat. Nos. 7,462,452; 7,476,504; 7,405,281; 7,170,050; 7,462,468; 7,476,503; 7,315,019; 7,302,146; 7,313,308; and US Application Publication Nos. US20090029385; US20090068655; US20090024331; and US20080206764. Each of four DNA bases can be attached to one of four different fluorescent dyes. These dyes can be phospholinked. A single DNA polymerase can be immobilized with a single molecule of template single stranded DNA at the bottom of a zero-mode waveguide (ZMW). A ZMW can be a confinement structure which enables observation of incorporation of a single nucleotide by DNA polymerase against the background of fluorescent nucleotides that can rapidly diffuse in an out of the ZMW (in microseconds). It can take several milliseconds to incorporate a nucleotide into a growing strand. During this time, the fluorescent label can be excited and produce a fluorescent signal, and the fluorescent tag can be cleaved off. The ZMW can be illuminated from below. Attenuated light from an excitation beam can penetrate the lower 20-30 nm of each ZMW. A microscope with a detection limit of 20 zeptoliters (10^{˜21} liters) can be created. The tiny detection volume can provide 1000-fold improvement in the reduction of background noise. Detection of the corresponding fluorescence of the dye can indicate which base was incorporated. The process can be repeated.

[0131] Sequencing can comprise use of nanopore sequencing (see e.g. Soni G V and Meller A. (2007) Clin Chem 53: 1996-2001). A nanopore can be a small hole of the order of 1 nanometer in diameter. Immersion of a nanopore in a conducting fluid and application of a potential across it can result in a slight electrical current due to conduction of ions through the nanopore. The amount of current that flows can be sensitive to the size of the nanopore. As a DNA molecule passes through a nanopore, each nucleotide on the DNA molecule obstructs the nanopore to a different degree. Thus, the change in the current passing through the nanopore as the DNA molecule passes through the nanopore can represent a reading of the DNA sequence.

[0132] Sequencing can comprise use of semiconductor sequencing, e.g., as provided by Ion Torrent (e.g., using the Ion Personal Genome Machine (PGM)). Ion Torrent technology can use a semiconductor chip with multiple layers, e.g., a layer with micro-machined wells, an ion-sensitive layer, and an ion sensor layer. Nucleic acids can be introduced into the wells, e.g., a clonal population of single nucleic can be attached to a single bead, and the bead can be introduced into a well. To initiate sequencing of the nucleic acids on the beads, one type of deoxyribonucleotide (e.g., dATP, dCTP, dGTP, or dTTP) can be introduced into the wells. When one or more nucleotides are incorporated by DNA polymerase, protons (hydrogen ions) can be released in the well, which can be detected by the ion sensor. The semiconductor chip can then be washed and the process can be repeated with a different deoxyribonucleotide. A plurality of nucleic acids can be sequenced in the wells of a semiconductor chip. The semiconductor chip can comprise chemical-sensitive field effect transistor (chemFET) arrays to sequence DNA (for example, as described in U.S. Patent Application Publication No. 20090026082). Incorporation of one or more triphosphates into a new nucleic acid strand at the 3′ end of the sequencing primer can be detected by a change in current by a chemFET. An array can have multiple chemFET sensors.

[0133] Sequencing can produce sequence reads. In some embodiments, a sequence read can have a penetrance of at least 100, 150, 200, 250, 300, 350, 400, 450, 500, 600, 700, 800, 900, 1000, 1100, 1200, 1300, 1400, 1500, 1600, 1700, 1800, 1900, 2000, 2500, or 3000 base pairs from a region where a sequencing primer anneals to a target sequence. In some embodiments, a sequence read can have a penetrance of about 100 to about 3000, about 100 to about 2500, about 100 to about 2000, about 100 to about 1900, about 100 to about 1800, about 100 to about 1700, about 100 to about 1600, about 100 to about 1500, about 100 to about 1400, about 100 to about 1300, about 100 to about 1200, about 100 to about 1100, about 100 to about 1000, about 100 to about 900, about 100 to about 800, about 100 to about 700, about 100 to about 600, about 100 to about 500, about 100 to about 450, about 100 to about 400, about 100 to about 350, about 100 to about 300, about 100 to about 250, about 100 to about 200, or about 100 to about 150.

[0134] In some embodiments, sequencing can produce at least one sequence read. In some embodiments, sequencing can produce at least 1, 2, 3, 4, 5, 6, 7, 8, 9 or 10 sequencing reads. In such embodiments, a computer processor can separate each sequence read into at least 1, 2, 3, 4, 5, 6, 7, 8, 9 or 10 data files. Each individual data file can be compiled and analyzed to determine the presence of at least 1, 2, 3, 4, 5, 6, 7, 8, 9 or 10 classes of genomic aberrations. The number of sequence reads from a sample can be about, more than, less than, or at least 100, 1000, 5,000, 10,000, 20,000, 30,000, 40,000, 50,000, 60,000, 70,000, 80,000, 90,000, 100,000, 200,000, 300,000, 400,000, 500,000, 600,000, 700,000, 800,000, 900,000, 1,000,000, 2,000,000, 3,000,000, 4,000,000, 5,000,000, 6,000,000, 7,000,000, 8,000,000, 9,000,000, or 10,000,000.

[0135] In some embodiments, a “sequence depth” can be described as the number of times a nucleotide is read in a sequencing process. In some instances, the sequencing depth of a sequencing process described herein can be at least, or about 1, 2, 3, 4, 5, 6, 7, 8, 9, 10, 50, 100, 500, 1000, 5000, or 10,000 times. In some instances, a sequence depth can be about 10× to about 100×, about 50× to about 500×, about 100× to about 1000×, or about 1000× to about 10,000×.

[0136] In some embodiments, the sequencing processes described herein can process multiple samples simultaneously. In some embodiments, a sequencing process can process at least 1, 2, 3, 4, 5, 6, 7, 8, 9, 10, 15, 20, 25, 30, 35, 40, 45, 50, 55, 60, 65, 70, 75, 80, 85, 90, 95, 100, 110, 120, 130, 140, 150, 160, 170, 180, 190, 200, 300, 400, 500, 600, 700, 800, 900, 1000, 1100, 1200, 1300, 1400, 1500, 1600, 1700, 1800, 1900 or 2000 samples simultaneously.

[0137] In some embodiments, a sequencing process can be used in conjunction with other techniques, e.g., other techniques described herein. In some embodiments, a sequencing process can be used in conjunction with a target enrichment technique as described herein (e.g. PCR, streptavidin binding, etc.), which can then be sequenced after enrichment to positively or negatively identify genomic alterations in a target nucleic acid. In some embodiments, a sequencing process can be used in conjunction with a karyotyping technique. As a non-limiting example, fluorescence in situ hybridization can be used as a karyotyping tool to determine the relative number of nucleic acid sequences in a test cell as described in U.S. Pat. No. 6,197,501. This analysis can be used to detect any of the genomic aberrations described herein, which can be coupled to a sequencing process described herein to positively identify the genomic aberration.

[0138] Sequence Read Analysis

[0139] Sequence reads generated using methods or systems described herein can be queried for presence or absence of a sequence corresponding to any one of the sub-pluralities of primers described herein. Such presence or absence can be used to identify sequence reads generated from templates resulting from extension using a particular sub-plurality of primers. Sequence reads generated from templates resulting from specific sub-pluralities of primers can then be subjected to sequence analysis for detection of specific classes of genomic alterations. The querying, transferring, and analysis can be implemented using a computer readable medium comprising computer executable code. The computer readable medium can further comprise a database of identifying sequences for each sub-plurality of primers. The database can be, for example, a file, e.g., a data file, or a list. In some cases, sequence read analysis comprises removing duplicates, e.g., PCR duplicates.

[0140] Sequence Alignment

[0141] Sequence reads can be aligned to a reference genome. A reference genome can be, e.g., Hg18, Hg19, GRch37 or GRch38. A reference genome can be from a human. A reference genome can be from a human with a condition, e.g., cancer.

[0142] Sequence reads collected by a sequencing process described herein can be aligned using any of a number of algorithms. In some embodiments, a global alignment can be used. In some specific embodiments, a global alignment can employ a Needleman-Wunsch algorithm. In some embodiments, a local alignment can be used. In some specific embodiments, a local alignment can employ a Smith-Waterman algorithm. In some embodiments, a glocal alignment, which is a hybrid local and global algorithm, can be used. In some embodiments, a pairwise alignment can be used when comparing two sequence reads at a time to each other. In some embodiments, a multiple sequence alignment can be used when comparing multiple sequences to each other.

[0143] In some instances, a dynamic programming can be used with any of the sequencing alignment algorithms described herein. In some embodiments, dynamic programming can be used to apply a variable gap penalty to a sequence alignment, and therefore may facilitate alignments in the presence of frameshift mutations. In some embodiments, a progressive method can be used to align sequences of greater similarity in a multiple sequence alignment first, followed by alignment of progressively less similar sequences. This analysis can produce “weight” into a dataset by aligning similar sequences first, which can reduce the error associated with alignment of more dissimilar sequences. In some specific embodiments, the progressive method can be a Clustal method. In some instances, iterative methods can be employed, which can be used to align a sequence initially, and subsequently realign the sequence reads iteratively, which can be used to eliminate bias in the initial alignment.

[0144] Sequence alignment software that can be used in methods or systems described herein, e.g., for database searching can include, e.g., BLAST, CS-BLAST, CUDASW++, DIAMOND, FASTA, GGSEARCH, GLSEARCH, Genoogle, HMMER, HHpred/HHsearch, IDF, Infernal, KLAST, USEARCH, parasail, PSI-BLAST, PSI-Search, ScalaBLAST, Sequilab, SAM, SSEARCH, SWAPHI, SWAPHI-LS, SWIMM, or SWIPE.

[0145] Sequence alignment software that can be used in methods or systems provided herein, e.g., for pairwise alignment, can include ACANA, AlignMe, Bioconductor, BioPerl dpAlign, BLASTZ, LASTZ, CUDAlign, DNADot, DOTLET, FEAST, Genome Compiler, G-PAS, GapMis, GGSEARCH, GLSEARCH, JAligner, K*Sync, LALIGN, NW-align, mAlign, matcher, MCALIGN2, MUMmer, needle, Ngila, NW, parasail, Path, PatternHunter, ProbA (propA), PyMOL, REPuter, SABERTOTTH, Satsuma, SEQALN, SIM, GAP, NAP, LAP, SIM, SPA (Super pairwise alignment), SSEARCH, Sequences Studio, SWIFT suit, stretcher, tranalign, UGEN, water, wordmatch or YASS.

[0146] Sequence alignment software that can be used in methods or systems provided herein, e.g, for multiple sequence alignment, can include ABA, ALE, AMAP, anon, BAli-Phy, Base-By-Base, BHAOS/DIALIGN, Bowtie, Bowtie 2, BWA, ClustalW, CodonCode Aligner, Comass, DECIPHER, DIALIGN-TX, DIALIGN-T, DNA Alignment, DNA Baser Sequence Assembler, EDNA, FSA, Geneious, Kalign, MAFFT, MARNA, MAVID, MSA, MSAProbs, MULTALIN, Multi-LAGEN, MUSCLE, Opal, Pecan, Phylo, Praline, PicXAA, POA, Probalign, ProbCons, PROMALS3D, PRRN/PRRP, PSAlign, RevTrans, SAGA, SAM, Se-Al, STAR, STAR-Fusion, StatAlign, Stemloc, T-Coffee, UGENE, VectorFriends, or GLProbs.

[0147] Sequence alignment software that can be sued in methods or systems provided herein, e.g., for genomics analysis, can include ACT (Artemis Comparison Tool), AVID, BLAT, DECIPHER, FLAK, GMAP, Splign, Mauve, MGA, Mulan, Multiz, PLAST-ncRNA, Sequerome, Sequilab, Shuffle-LAGAN, SIBsim4/Sim4, or SLAM.

[0148] Sequence alignment software that can be used in methods or systems provided herein, e.g., for short-read sequence alignment, can include BarraCUDA, BBMap, BFAST, BigBWA, BLASTN, BLAT, Bowtie, HIVE-hexagon, BWA, BWA-PSSM, CASHX, Cloudburst, CUDA-EC, CUSHAW, CUSHAW2, CUSHAW2-GPU, CUSHAW3, drFAST, ELAND, ERNE, GASSST, GeM, Genalice MAP, Geneious Assembler, GensearchNGS, GMAP, GSNAP, GNUMAP, iSSAC, LAST, MAQ, mrFAST, mrsFAST, MOM, MOSAIK, MPscan, Novoalign, NovoalignCS, NextGENe, NextGenMap, Omixon, PALMapper, Partek, PASS, PerM, PRIMEX, QPalma, RazerS, REAL, cREAL, RMAP, rNA, RTG Investigator, Segemehl, SeqMap, Shrec, SHRiMP, SLIDER, SOAP, SOAP2, SOAP3, SOAP-dp, SOCS, SSAHA, SSAHA2, Stampy, SToRM, Subread, Subjunc, Taipan, UGENE, VelociMapper, XpressAlign, or ZOOM.

[0149] Alignment viewers/editors that can be used with methods or systems described herein can include, e.g, Ale, AliView, Base-By-Base, BioEdit, BioNumerics, BoxShade, CINEMA, CLC viewer, ClustalX viewer, Cylindrical BLAST Viewer, DECIPHER, Discovery Studio, DnaSP, emacs-biomode, FLAK, Genedoc, Geneious, Integrated Genome Browser (IGB), IVistMSA, Jalview 2, JEvTrace, JSAV, Maestro, MEGA, Multiseq (vmd plugin), MView, PFAAT, Ralee, S2S RNA editor, Seaview, Sequilab, SeqPop, Sequlator, SnipViz, Strap, Tablet, UGENE, VISSA sequence/structure viewer, DNApy, or Alignment Annotator.

[0150] Open-source bioinformatics software that can be used with methods or systems described herein can include, e.g., NET Bio, AMPHORA, Anduril, Autodock, Bedtools, Biochemical Algorithms Library (BALL), Bioclipse, Bioconductor, BioJava, BioJS, BioMOBY, BioPerl, BioPHP, Biophython, BioRuby, EMBOSS, FACS, Galaxy, GenePattern, GeWorkbench, GMOD, GenGIS, GenomeSpace, GENtle, IGV, Integrated Genome Browser, InterMine, LabKey Server, LARVA, mothur, PathVisio, PromKappa, ProSSA, PyPDB, RaFoSA, Orange, Staden Package, STAMP, Taverna workbench, TRAL, UGEN, or Unipept.

[0151] Binning Sequence Reads Based on Probe Sequence

[0152] Sequences reads can be binned based on probes (primers) used to amplify target sequences. In some cases, at least, or about 2, 3, 4, 5, 6, 7, 8, 9, 10, 20, 25, 30, 50, 75, or 100 probe pools are used. In some cases, about 2 to about 10, about 2 to about 5, about 3 to about 10, or about 3 to about 6 probe pools are used. Each probe pool can be designed to detect a different class of genomic alteration. In some embodiments, a single binning method can be used to bin a library of sequence reads. In some embodiments, a combination of binning methods can be used sequentially or simultaneously to bin a library of sequence reads.

[0153] In some embodiments, a direct lookup can be used to bin sequence reads. In such an embodiment, a sequence present in a primer can be used to bin a sequence read. The known sequence of a primer can be used to query sequence reads that contain the primer sequence, or a complement of the primer sequence. In some instances, at least 1, at least 2, at least 3, at least 4, at least 5, at least 6, at least 7, at least 8, at least 9, at least 10, at least 11, at least 12, at least 13, at least 14, at least 15, at least 16, at least 17, at least 18, at least 19, at least 20, at least 25, at least 30, at least 35, at least 40, at least 45, at least 50, at least 55, at least 60, at least 65, at least 70, at least 75, at least 80, at least 85, at least 90, at least 95 or at least 100 bases of a primer sequence can be used to query sequence reads. In some cases, at least 5%, 10%, 15%, 20%, 25%, 30%, 35%, 40%, 45%, 50%, 55%, 60%, 65%, 70%, 75%, 80%, 85%, 90%, 95% or 100% of a primer sequence can be used as an identifier to bin a sequence read. In some instances at least 1, at least 2, at least 3, at least 4, at least 5, at least 6, at least 7, at least 8, at least 9, at least 10, at least 11, at least 12, at least 13, at least 14, at least 15, at least 16, at least 17, at least 18, at least 19, at least 20, at least 25, at least 30, at least 35, at least 40, at least 45, at least 50, at least 55, at least 60, at least 65, at least 70, at least 75, at least 80, at least 85, at least 90, at least 95 or at least 100 bases of a primer sequence can be used as an identifier to bin a sequence read.

[0154] In some instances, a reverse sequence read can be queried for the presence of a primer sequence. In some instances, the querying of an incorporated primer sequence can be performed using automated software. In some instances, a threshold for a match during querying can allow for at least 1, at least 2, at least 3, at least 4, at least 5, at least 6, at least 7, at least 8, at least 9, or at least 10 mismatches from a known primer sequence. A threshold for binning a sequence read can be at least 50%, 60%, 70%, 75%, 80%, 85%, 90%, 91%, 92%, 93%, 94%, 95%, 96%, 97%, 98%, 99%, or 100% identity of a sequence in a sequence read and a primer sequence, or complement of a primer sequence.

[0155] In some embodiments, a Bowtie alignment can be used to bin sequence reads. In such an embodiment, an alignment index of probe sequences can be constructed. This alignment index can be used to align a library of sequence reads (e.g., reverse sequence reads) to a probe. In some instances, a sequence read can align to a probe comprising a sequence at least 10%, 15%, 20%, 25%, 30%, 35%, 40%, 45%, 50%, 55%, 60%, 65%, 70%, 75%, 80%, 85%, 90%, 95% or 100% identical to a primer sequence (or complement of a primer sequence) incorporated into the target sequence read. Each sequence aligned to a particular probe can then be binned simultaneously or sequentially based on the probe they are aligned to.

[0156] In some instances, a K-mer based method can be used to bin sequence reads. In some instances, probe sequences can be broken up into fragments (which can be called k-mers), which can be aligned against a sequence read (e.g., a reverse sequence read). In some instances, a sequence read can be broken up into fragments (k-mers), which can be aligned against a probe sequence. In some cases, a fragment (k-mer) can comprise at least 1, 2, 3, 4, 5, 6, 7, 8, 9, 10, 11, 12, 13, 14, 15, 16, 17, 18, 19 or 20 bases. A k-mer can be 8 bases. In some cases, a fragment (k-mer) can comprise at most the length of a probe (primer) or a sequence read. The number of k-mers that match a target sequence can be calculated, which can be used to bin a sequence read based on the sequence of the original, unfragmented probe. A sequence read can match a probe when it contains the most k-mer (subsequence) matches to that probe.

[0157] In some embodiments, binning can be carried out with the assistance of computer hardware. In some instances, a computer hardware can be a physical hardware. In some instances, a computer hardware can be a virtual hardware. In some cases, a computer hardware can comprise a computer processor. In some instances, the computer processor can be an INTEL® processor. An INTEL® processor can have at least 1, 2, 4 or 8 processor cores. In some instances, a computer hardware can comprise RAM memory. A computer hardware can comprise at least 4, 8, 16, 32, 64, 128, 256, 512, or 1025 GB of RAM memory. In some instances, a computer hardware can run a real-time operating system. In some instances, a computer hardware can run a single user, single task operating system. In some instances, a computer hardware can run a single user, multi-tasking operating system. In some cases, a single user, multi-tasking operating system can be a Microsoft Windows, Mac OS, or Linux based operating system. In some instances, a computer hardware can run a multi user operating system. In some cases, a multi user operating system can be a Unix operating system.

[0158] Analyzing Sequence Reads

[0159] In some instances, the number of sequence reads that can align to a target sequence can be normalized. In some instances, a normalization method can be a calculation of reads per kilobase per million (RPKM). An RPKM can be calculated by dividing the number of sequences that align to a probe by the product of the total number of sequence reads and the number of kilobases of transcript, and multiplying by 1,000,000. In some instances, a normalization method can be a calculation of fragments per kilobase of transcript per million mapped reads (FPKM). An FPKM can be calculated as described for an RPKM normalization; an FPKM can describe RNA transcripts specifically whereas an RPKM can describe nucleic acids in general. In some instances, a normalization method can be a calculation of transcripts per kilobase million (TPM). A TPM can be calculated by first dividing the number of sequence reads aligned to a target by the length of a target sequence, and dividing this by the number of the number of total sequence reads divided by 1,000,000.

[0160] In some cases, multiple algorithms described herein can be used to analyze sequence reads in a partition or bin. In some instances, at least 1, 2, 3, 4, 5, 6, 7, 8, 9, 10, 11, 12, 13, 14, 15, 16, 17, 18, 19 or 20 algorithms can be used to analyze sequence reads in a partition or bin. In some instances, at least 20, 25, 30, 35, 40, 45, 50, 55, 60, 65, 70, 75, 80, 85, 90, 95 or 100 algorithms can be used to analyze sequence reads in a partition or bin.

[0161] Sequencing reads can be separated into multiple partitions or bins. In some cases, multiple algorithms described herein can be used sequentially to analyze sequence reads in multiple partitions or bins. In some instances, multiple algorithms described herein can be used simultaneously to analyze sequence reads in multiple partitions or bins. In some instances, multiple algorithms described herein can be used sequentially to analyze sequence reads in a same partition or bin. In some instances, multiple algorithms described herein can be used simultaneously to analyze sequence reads in a same partition.

[0162] In some embodiments, multiple algorithms capable of detecting the same type of genomic alteration can be used to analyze sequence reads in the same bin; the analysis can be done sequentially or simultaneously. For example, fusions can be detected by using SOAPFuse, ChimeraScan and STAR-Fusion algorithm to analyze sequence reads in a partition or bin. In some embodiments, multiple algorithms, each capable of detecting a different type of genomic alteration, can be used simultaneously to analyze sequence reads in a partition or bin. In some instances, a fusion detection and a SNP detection algorithm can be used to analyze sequence reads in a partition or bin, sequentially or simultaneously. In some instances, the resulting data can be combined.

[0163] SNP Analysis Workflow

[0164] Exemplary SNP analysis workflows include, e.g., Bowtie 2 or BWA analysis, MuTect, SAMtools, Free Bayes, and/or Genome Analysis toolkit (GATK) best practices pipeline. Bowtie analysis can comprise implementing the Burrows-Wheeler transform for aligning. MuTect can comprise: 1. Pre-processing; 2. Statistical Analysis; 3. Post-processing. Pre-processing can comprise an initial alignment of sequencing reads. Statistical analysis can comprise using two Bayesian classifiers—the first can detect whether a SNP is non-reference at a given site and, for those sites that are found as non-reference, the second classifier can make sure the normal does not carry the SNP. Post-processing can comprise removal of artifacts of sequencing, short read alignments and hybrid capture. SAMtools can comprise storing, manipulating and aligning sequencing reads stored as SAM files. Free Bayes can comprise an alignment based on literal sequences of reads aligned to a particular target, not their precise alignment. The GATK best practices pipeline can comprise: 1. Pre-Processing; 2. Variant Discovery; and 3. Callset Refinement. Pre-Processing can comprise starting from raw sequence data, e.g., in FASTQ or uBAM format, and producing analysis-ready BAM files. Processing steps can include alignment to a reference genome as well as data cleanup operations to correct for technical biases and make the data suitable for analysis. Variant Discovery can comprise starting from analysis-ready BAM files and producing a callset in VCF format. Processing can involve identifying sites where one or more individuals display possible genomic variation, and applying filtering methods appropriate to the experimental design. Callset Refinement can comprise starting and ending with a VCF callset. Processing can involve using meta-data to assess and improve genotyping accuracy, attach additional information and evaluate the overall quality of the callset.

[0165] For SNP detection, the reverse reads corresponding to the set of reads that map to a “SNP” probe sequence file can be aligned to a genome using BWA. Variants can be detected using GATK best practices pipeline.

[0166] Analysis can be performed on a Linux system.

[0167] A SNP identified by a method described herein can be analyzed by other methods, e.g., hybridization based technique, e.g., microarray, PCR, real-time PCR, digital PCR, droplet digital PCR.

[0168] Fusion Analysis Workflow

[0169] Fusions can be detected using a fusion analysis workflow. Exemplary gene fusion analysis bioinformatics workflows include, e.g., Spliced Transcripts Alignment to a Reference (STAR) alignment and fusion detection software.

[0170] Fusion detection software can include Bellerophontes, BreakFusion, Chimera, chimerascan, chimEric TranScript detection algorithm, Complex Reads Analysis & Classification, comrad, deFuse, Dissect, FusionAnalyser, FusionCatcher, FusionFinder, FusionHunter, FusionMap, FusionMatcher, FusionQ, FusionSeq, IDP-fusion, JAFFA, NCLscan, nFuse, Pegasus, R453Plus1Toolbox, ShortFuse, STAR-Fusion, Snow-Shoes-FTD, SnowsShoes-FTD, SOAPfuse, SOAPfusion, TopHat-Fusion, Tumor-specimen suited RNA-seq Unified Pipeline, or ViralFusionSeq, or any combination thereof.

[0171] For fusion detection, forward and reverse reads corresponding to a set reads that map to a “fusion” probe sequence file can be analyzed by SOAPfuse. Fusion detection can be dependent on detecting instances where the forward and reverse reads came from different genes and where reads spanned splice junctions.

[0172] A fusion call method can comprise one or more of the following steps: 1. Trim reads of adaptor (optional); 2) assign probes to read using k-mer approach, e.g, as described herein; 3. Deduplicate raw reads using an N6 sequence in an index read (remove PCR duplicates) (optional); 4. quality trim probe-assigned reads (e.g., remove portions of reads where quality dips below a threshold) (optional); 5. align to genome with STAR; 6. filter reads which do not fully contain expected probe extension sequence (optional); 7. run STAR-Fusion with filtered and labeled STAR alignment; 8. post process called fusions based on expected contributing probes (optional).

[0173] Analysis can be performed on a Linux system.

[0174] A fusion event identified by a method described herein can be analyzed by other methods, e.g., hybridization based technique, e.g., microarray, PCR, real-time PCR, digital PCR, or droplet digital PCR.

[0175] Expression Analysis WorkFlow

[0176] Expression analysis can be carried out by two independent methods. First, forward reads corresponding to a set of reads that map to an “expression” probe sequence file can be aligned to a genome with RNA STAR. After alignment, Fragments Per Kilobase of transcript per Million mapped reads (FPKM) values for the targeted, as well as housekeeping genes, can be calculated using Cufflinks. Second, expression can be calculated using expression “probe counts,” or a number of times each “expression” probe sequence is present in a reverse read sequence. All values can be normalized between replicates and across cell lines.

[0177] DeSeq, SailFish, can also be used, or any expression analysis software for short reads can be used. In some cases, RPKMs, FPKMs, or TPMs are computed. Analysis can be performed on a Linux system. An altered expression event identified by a method described herein can be analyzed by other methods, e.g., hybridization based technique, e.g., microarray, PCR, real-time PCR, digital PCR, or droplet digital PCR.

[0178] Alternative Splicing WorkFlow

[0179] For alternative splicing, forward and reverse reads corresponding to a set of reads that map to an “exon usage” probe sequence file can be aligned to a genome with RNA STAR. Exon usage/isoform expression can be calculated using Cufflinks. Exon usage can be dependent on having forward and reverse reads map to an exon present in a gene isoform, as well as reads spanning to neighboring exons across splice junctions.

[0180] In some instances, an alignment tool capable of identifying splice sites from sequence reads can be employed. In some instances, the alignment tool can be TopHat, MapSplice, SpliceMap, HMMsplicer, GSNAP, STAR, RUM, SoapSplice or HISAT. In some instances, additional workflows can be used to predict isoform expression and exon usage. In some instances, the additional workflow can be Cuffdiff, ALEXA-seq, MISO, SplicingCompass, Flux Capacitor, JuncBASE, DEXSeq, MATS, SpliceR. FineSplice or ARH-seq. A Linux system can be used for analysis. An alternative splicing event identified by a method described herein can be analyzed by other methods, e.g., hybridization based technique, e.g., microarray, PCR, real-time PCR, digital PCR, or droplet digital PCR.

[0181] Copy Number Analysis WorkFlow

[0182] Custom counting of probe reads can be performed, e.g., after BWA or Bowtie alignment. Copy number analysis can be performed using tools such CONTRA. A Linux system can be used for analysis.

[0183] The following steps can be performed in a fusion analysis. 1. trim reads to remove adaptor and poor quality; linkers can be removed (a linker can be a sequence, e.g., from about 1 to about 20 bases, e.g., 15, that can be attached to a 5′ end of a primer (optional); 2. align the reads to the genome; 3. deduplicate reads (can be done before or after alignment) (optional); 4. count Forward reads that fall in a probePlus300 (file containing genomic coordinates for a 30 0 bp window in which coverage is expected that includes the probe and region downstream of the probe) region of each probe; 5. normalize each count by total counts overall; 6. obtain gene level copy number levels by averaging normalized counts across the gene (optional; one can also average probe counts across smaller portions of genes, ie: exons, introns); 7. obtain relative levels by comparing this number to the genes same number in a control sample (optional).

[0184] In some cases, the forward reads can be counted in each probe landing region and for each gene, the counts of all probe reads across a gene can be averaged to obtain a gene level copy number value that can be compared to a reference sample, e.g., PROMEGA™ Male (a combination of multiple individuals that can act as a two-copy reference control). Alternatively, a publically available tool, e.g., CONTRA, can be used to find significant copy number alterations.

[0185] Analysis can be performed, e.g., on a Linux system.

### Computer Systems

[0186] In another aspect, described herein are computer systems for the integrated analysis of multiple classes of genomic alterations. The computer system can provide a report communicating the analysis of the multiple classes of genomic alterations. The computer system can execute instructions contained in a computer-readable medium. The processor can be associated with one or more controllers, calculation units, and/or other units of a computer system, or implanted in firmware. One or more steps of the method can be implemented in hardware. One or more steps of the method can be implemented in software. Software routines may be stored in any computer readable memory unit such as flash memory, RAM, ROM, magnetic disk, laser disk, or other storage medium as described herein or known in the art. Software may be communicated to a computing device by any communication method including, for example, over a communication channel such as a telephone line, the internet, a wireless connection, or by a transportable medium, such as a computer readable disk, flash drive, etc. The one or more steps of the methods described herein may be implemented as various operations, tools, blocks, modules and techniques which, in turn, may be implemented in firmware, hardware, software, or any combination of firmware, hardware, and software. When implemented in hardware, some or all of the blocks, operations, techniques, etc. may be implemented in, for example, an application specific integrated circuit (ASIC), custom integrated circuit (IC), field programmable logic array (FPGA), or programmable logic array (PLA).

[0187] FIG. 3 depicts a computer adapted to enable a user to detect, analyze, and process sequence data. The system 300 can include a central computer server 301 that is programmed to implement exemplary methods described herein. The server 301 can include a central processing unit (CPU, also “processor”) 305 which can be a single core processor, a multi core processor, or plurality of processors for parallel processing. The server 301 also can include memory 310 (e.g. random access memory, read-only memory, flash memory); electronic storage unit 315 (e.g. hard disk); communications interface 320 (e.g. network adaptor) for communicating with one or more other systems; and peripheral devices 325 which may include cache, other memory, data storage, and/or electronic display adaptors. The memory 310, storage unit 315, interface 320, and peripheral devices 325 can be in communication with the processor 305 through a communications bus (solid lines), such as a motherboard. The storage unit 315 can be a data storage unit for storing data. The server 301 can be operatively coupled to a computer network (“network”) 330 with the aid of the communications interface 320. The network 330 can be the Internet, an intranet and/or an extranet, an intranet and/or extranet that is in communication with the Internet, a telecommunication or data network. The network 330, with the aid of the server 301, can implement a peer-to-peer network, which may enable devices coupled to the server 301 to behave as a client or a server.

[0188] The storage unit 315 can store files, such as subject reports, and/or communications with the caregiver, sequencing data, data about individuals, or any aspect of data.

[0189] The server can communicate with one or more remote computer systems through the network 330. The one or more remote computer systems may be, for example, personal computers, laptops, tablets, telephones, Smart phones, or personal digital assistants.

[0190] The system 300 can include a single server 301. In some situations, the system can include multiple servers in communication with one another through an intranet, extranet and/or the Internet.

[0191] The server 301 can be adapted to store sequence information, such as, for example, information on any of the classes of genomic alterations described herein. The server 301 can also be adapted to store, e.g., patient history and demographic data and/or other information of potential relevance. Such information can be stored on the storage unit 315 or the server 301 and such data can be transmitted through a network.

[0192] Methods as described herein can be implemented by way of machine (or computer processor) executable code (or software). The machine-executable code can be stored on an electronic storage location of the server 301, such as, for example, on the memory 310, or electronic storage unit 315. During use, the code can be executed by the processor 305. The code can be retrieved from the storage unit 315 and stored on the memory 310 for ready access by the processor 305. In some situations, the electronic storage unit 315 can be precluded, and machine-executable instructions can be stored on memory 310. Alternatively, the code can be executed on a second computer system 340.

[0193] Aspects of the systems and methods provided herein, such as the server 301, can be embodied in programming. Various aspects of the technology may be thought of as “products” or “articles of manufacture” typically in the form of machine (or processor) executable code and/or associated data that is carried on or embodied in a type of machine readable medium. Machine-executable code can be stored on an electronic storage unit, such memory (e.g., read-only memory, random-access memory, flash memory) or a hard disk. “Storage” type media can include any or all of the tangible memory of the computers, processors or the like, or associated modules thereof, such as various semiconductor memories, tape drives, disk drives and the like, which may provide non-transitory storage at any time for the software programming. All or portions of the software may at times be communicated through the Internet or various other telecommunication networks. Such communications, for example, may enable loading of the software from one computer or processor into another, for example, from a management server or host computer into the computer platform of an application server. Thus, another type of media that may bear the software elements includes optical, electrical, and electromagnetic waves, such as used across physical interfaces between local devices, through wired and optical landline networks and over various air-links. The physical elements that carry such waves, such as wired or wireless likes, optical links, or the like, also may be considered as media bearing the software. As used herein, unless restricted to non-transitory, tangible “storage” media, terms such as computer or machine “readable medium” can refer to any medium that participates in providing instructions to a processor for execution.

[0194] Hence, a machine readable medium, such as computer-executable code, may take many forms, including but not limited to, tangible storage medium, a carrier wave medium, or physical transmission medium. Non-volatile storage media can include, for example, optical or magnetic disks, such as any of the storage devices in any computer(s) or the like, such may be used to implement the system. Tangible transmission media can include: coaxial cables, copper wires, and fiber optics (including the wires that comprise a bus within a computer system). Carrier-wave transmission media may take the form of electric or electromagnetic signals, or acoustic or light waves such as those generated during radio frequency (RF) and infrared (IR) data communications. Common forms of computer-readable media therefore include, for example: a floppy disk, a flexible disk, hard disk, magnetic tape, any other magnetic medium, a CD-ROM, DVD, DVD-ROM, any other optical medium, punch cards, paper tame, any other physical storage medium with patterns of holes, a RAM, a ROM, a PROM and EPROM, a FLASH-EPROM, any other memory chip or cartridge, a carrier wave transporting data or instructions, cables, or links transporting such carrier wave, or any other medium from which a computer may read programming code and/or data. Many of these forms of computer readable media may be involved in carrying one or more sequences of one or more instructions to a processor for execution.

[0195] The results of the integrated analysis can be presented to a user with the aid of a user interface, such as a graphical user interface.

[0196] A computer system can be used for one or more steps, including, e.g., sample collection, sample processing, sequencing, querying sequence reads for presence of any sequence corresponding to one or more sub-pluralities of primers described herein, transferring queried sequence reads to data files according to the sub-pluralities of primers, subjecting the transferred sequence reads to specific bioinformatics workflows for analyzing a particular class of genomic alterations, receiving patient history or medical records, receiving and storing measurement data, analyzing said measurement data determine a diagnosis, prognosis, or therapeutic efficacy, generating a report, and reporting results to a receiver.

[0197] A client-server and/or relational database architecture can be used in any of the methods described herein. A client-server architecture can be a network architecture in which each computer or process on the network is either a client or a server. Server computers can be powerful computers dedicated to managing disk drives (file servers), printers (print servers), or network traffic (network servers). Client computers can include PCs (personal computers) or workstations on which users run applications, as well as example output devices as disclosed herein. Client computers can rely on server computers for resources, such as files, devices, and even processing power. The server computer can handle all of the database functionality. The client computer can have software that handles front-end data management and receive data input from users.

[0198] After performing a calculation, a processor can provide the output, such as from a calculation, back to, for example, the input device or storage unit, to another storage unit of the same or different computer system, or to an output device. Output from the processor can be displayed by a data display, e.g., a display screen (for example, a monitor or a screen on a digital device), a print-out, a data signal (for example, a packet), a graphical user interface (for example, a webpage), an alarm (for example, a flashing light or a sound), or a combination of any of the above. An output can be transmitted over a network (for example, a wireless network) to an output device. The output device can be used by a user to receive the output from the data-processing computer system. After an output has been received by a user, the user can determine a course of action, or can carry out a course of action, such as a medical treatment when the user is medical personnel. An output device can be the same device as the input device. Example output devices include, but are not limited to, a telephone, a wireless telephone, a mobile phone, a PDA, a flash memory drive, a light source, a sound generator, a fax machine, a computer, a computer monitor, a printer, an iPod, and a webpage. The user station may be in communication with a printer or a display monitor to output the information processed by the server. Such displays, output devices, and user stations can be used to provide an alert to the subject or to a caregiver thereof.

[0199] Data relating to the present disclosure can be transmitted over a network or connections for reception and/or review by a receiver. The receiver can be but is not limited to the subject to whom the report pertains; or to a caregiver thereof, e.g., a health care provider, manager, other healthcare professional, or other caretaker; a person or entity that performed and/or ordered the genotyping analysis; a genetic counselor. The receiver can also be a local or remote system for storing such reports (e.g. servers or other systems of a “cloud computing” architecture). A computer-readable medium can include a medium suitable for transmission of a result of an analysis of a biological sample.

[0200] Data storage can involve use of a ˜50TB NAS (network-attached storage). Processing can involve use multiple virtual Linux machines each with 4 dual cores (INTEL® XEON® CPU E5-26500@2) and 128 GB Ram.

[0201] Applications

[0202] In some instances, the compositions described herein can be used in a clinical setting. In some embodiments, a subject can provide a biological sample as described herein for diagnosis of a disease of known genetic genotype. In such embodiments, at least one genomic alteration can be identified by contacting a first sub-plurality of primers constructed to anneal to a target sequence corresponding to a genomic sequence suspected of harboring a first class of genomic alteration with a nucleic acid sample derived from the biological sample, followed by contacting a second sub-plurality of primers constructed to anneal to a target sequence corresponding to a genomic sequence suspected of harboring a second class of genomic alteration with the nucleic acid sample derived from the biological sample. The sequence reads can be quarried using a computer system described herein to determine the presence of the at least one genomic alteration. The data file can then be analyzed by a health care professional in order to correlate the at least one genomic alteration with a potential disease state.

[0203] In embodiments, the compositions described herein can be used to screen for specific disease states associated with a genomic alteration described herein. As a non-limiting example, a nucleic acid sample can be screened for mutations in BRCA1 or BRCA2, which may be used to diagnose a breast or ovarian cancer state. As another non-limiting example, a nucleic acid sample can be screened for mutations in p53, which may be used to diagnose various cancer states. As another non-limiting example, a nucleic acid sample can be screened for mutations in PARK2, which may be used to diagnose Parkinson disease. Other mutations in genes known to cause specific disease states can be screened in a similar manner to potentially diagnose a disease state.

[0204] In some embodiments, the disease can be of unknown genetic phenotype. In such embodiments, a genomic alteration can be identified by identified by contacting n sub-pluralities of primers engineered to anneal to n targets corresponding to potential genomic targets. In some embodiments, n can be 1, 2, 3, 4, 5, 6, 7, 8, 9, 10, 15, 20, 25, 30, 40, 50, 60, 70, 80, 90, or 100. With the aid of a computer processor described herein, each sequence read can be separated and stored in a data file, which can be interpreted by a health care professional to identify an unknown phenotype. In some embodiments, the data files can be interpreted by a researcher.

[0205] In some instances, the compositions described herein can be used to identify an unknown biological sample. A biological sample can be collected and contacted with a first and a second sub-plurality of primers corresponding to target sequences corresponding to regions of genomic DNA. With the aid of a computer processor, a first and a second data file can be separated to identify specific genomic abberations such as unique SNP's, which can be compared to a second sample in order to positively identify a biological sample. In some embodiments, the identification can be used for forensics applications. In some embodiments, the identification can be used for law enforcement applications. In some embodiments, the identification can be used for bioterrorism applications.

[0206] Methods provided herein can be used to prognose, diagnose, or monitor a condition, e.g., a disease, e.g., cancer, neurological disorder, or prenatal condition (e.g., aneuploidy). The conditions or cancers can include, for example, acute myeloid leukemia; bladder cancer, including upper tract tumors and urothelial carcinoma of the prostate; bone cancer, including chondrosarcoma, Ewing's sarcoma, and osteosarcoma; breast cancer, including noninvasive, invasive, phyllodes tumor, Paget's disease, and breast cancer during pregnancy; central nervous system cancers, adult low-grade infiltrative supratentorial astrocytoma/oligodendroglioma, adult intracranial ependymoma, anaplastic astrocytoma/anaplastic oligodendroglioma/glioblastoma multiforme, limited (1-3) metastatic lesions, multiple (>3) metastatic lesions, carcinomatous lymphomatous meningitis, nonimmunosuppressed primary CNS lymphoma, and metastatic spine tumors; cervical cancer; chronic myelogenous leukemia (CML); colon cancer, rectal cancer, anal carcinoma; esophageal cancer; gastric (stomach) cancer; head and neck cancers, including ethmoid sinus tumors, maxillary sinus tumors, salivary gland tumors, cancer of the lip, cancer of the oral cavity, cancer of the oropharynx, cancer of the hypopharynx, occult primary, cancer of the glottic larynx, cancer of the supraglottic larynx, cancer of the nasopharynx, and advanced head and neck cancer; hepatobiliary cancers, including hepatocellular carcinoma, gallbladder cancer, intrahepatic cholangiocarcinoma, and extrahepatic cholangiocarcinoma; Hodgkin disease/lymphoma; kidney cancer; melanoma; multiple myeloma, systemic light chain amyloidosis, Waldenstrom's macroglobulinemia; myelodysplastic syndromes; neuroendocrine tumors, including multiple endocrine neoplasia, type 1, multiple endocrine neoplasia, type 2, carcinoid tumors, islet cell tumors, pheochromocytoma, poorly differentiated/small cell/atypical lung carcinoids; Non-Hodgkin's Lymphomas, including chronic lymphocytic leukemia/small lymphocytic lymphoma, follicular lymphoma, marginal zone lymphoma, mantle cell lymphoma, diffuse large B-Cell lymphoma, Burkitt's lymphoma, lymphoblastic lymphoma, AIDS-Related B-Cell lymphoma, peripheral T-Cell lymphoma, and mycosis fungoides/Sezary Syndrome; non-melanoma skin cancers, including basal and squamous cell skin cancers, dermatofibrosarcoma protuberans, Merkel cell carcinoma; non-small cell lung cancer (NSCLC), including thymic malignancies; occult primary; ovarian cancer, including epithelial ovarian cancer, borderline epithelial ovarian cancer (Low Malignant Potential), and less common ovarian histologies; pancreatic adenocarcinoma; prostate cancer; small cell lung cancer and lung neuroendocrine tumors; soft tissue sarcoma, including soft-tissue extremity, retroperitoneal, intra-abdominal sarcoma, and desmoid; testicular cancer; thymic malignancies, including thyroid carcinoma, nodule evaluation, papillary carcinoma, follicular carcinoma, Hiirthle cell neoplasm, medullary carcinoma, and anaplastic carcinoma; uterine neoplasms, including endometrial cancer and uterine sarcoma.

[0207] Kits

[0208] Any of the compositions described herein may be comprised in a kit. In a non-limiting example, the kit, in a suitable container, comprises: a plurality of primers, wherein the plurality of primers comprises at least two sub-pluralities of primers. The kit can also comprise a computer readable medium, e.g., non-transitory computer readable medium, as described herein. The kit can also comprise reaction components for primer extension and amplification (e.g., dNTPs, polymerase, buffers). The kit can include reagents for library formation (e.g., primers (probes), dNTPs, polymerase, end repair enzymes). The kit may also comprise means for purification, such as a bead suspension. The kit can include reagents for sequencing, e.g., fluorescently labelled dNTPs, sequencing primers, etc.

[0209] The containers of the kits can include at least one vial, test tube, flask, bottle, syringe or other containers, into which a component may be placed and suitably aliquotted. Where there is more than one component in the kit, the kit also can contain a second, third or other additional container into which the additional components may be separately placed. However, various combinations of components may be comprised in a container.

[0210] When the components of the kit are provided in one or more liquid solutions, the liquid solution can be an aqueous solution. However, the components of the kit may be provided as dried powder(s). When reagents and/or components are provided as a dry powder, the powder can be reconstituted by the addition of a suitable solvent.

[0211] A kit can include instructions for employing the kit components as well the use of any other reagent not included in the kit. Instructions may include variations that can be implemented.

### EXAMPLES

### Example 1

### Primer Design and Synthesis

[0212] Four subsets of primers are designed to detect presence or absence of four classes of genomic alterations: abnormal gene expression (Subset 1), SNPs (Subset 2), alternative splicing events (Subset 3), and gene fusions (Subset 4). All primers include an Illumina adaptor sequence at a 5′ end and a target-specific sequence at a 3′ end.

[0213] Target-specific sequences of subset 1 primers are designed to reside within the two most 5′ and 3′ exons of genes suspected of having abnormal gene expression and optionally of genes suspected of having normal gene expression. For example, target-specific sequences of subset 1 primers also include sequences designed to reside within the two most 5′ and 3′ exons of ten housekeeping genes, which can be suspected of having normal gene expression. Subset 1 primers are further designed according to the following criteria: (1) primers have target-specific sequences designed to anneal to a genomic location entirely within an exon, or designed to span an exon-exon junction, (2) the target-specific sequence length of the primers are at least 35 bases in length, (3) primers have target-specific sequences designed to anneal to unique sequences within the transcriptomes, and (4) primers have target-specific sequences that are at least 25 bases from the exon junction. The sequences of the primers for detecting abnormal gene expression are recorded in a FASTA file labeled “expression”. The file can comprise target-specific sequences or the sequences of the entire primer, including the adaptor portions.

[0214] Target-specific sequences of subset 2 primers are designed such that 3′ ends of the primers are within 40 bases of a SNP. The sequences of these primers are recorded in a FASTA file labeled “SNP”.

[0215] Subset 3 primers comprise target-specific sequences which are designed to anneal to all reported exons within genes suspected of undergoing alternative splicing. The target-specific sequences of the primers are designed to be at least 40 bases in length. Such primers are also designed such that the 3′ end of each primer is between zero and about 25 bases from an exon junction. These primers are designed in each orientation relative to the exon junctions; e.g., they face the exons that are both 5′ and 3′ of the exon where the primer would anneal. The sequences of these primers are recorded in a FASTA file labeled “exon usage”.

[0216] Subset 4 primers for detection of gene fusion events can be designed according to the same principles as described for the subset 3 primers. For instance, subset 4 primers can comprise target-specific sequences which are designed to anneal to all reported exons within genes suspected of undergoing gene fusion events. The target-specific sequences of such primers can be designed to be at least 40 bases in length. Such primers can also be designed such that the 3′ end of each primer is between zero and about 25 bases from an exon junction. Such primers can also be designed in each orientation relative to the exon junctions; e.g., they face the exons that are both 5′ and 3′ of the exon where the primer would anneal. Subset 4 primers can include one or more primers in subset 3. Subset 4 primers can also include primers designed to genes previously implicated in fusion events. Exemplary genes which are previously implicated in fusion events include, but are not limited to ALK, BCR, and CDK6. To detect gene fusion events, primers used to monitor alternative splicing (exon usage FASTA file) and primers designed by the same criteria to genes previously implicated in fusion events with genes ALK, BCR and CDK6, are combined with the exon usage primers to ALK, BCR and CDK6 into a single FASTA file labeled “fusion”.

[0217] The primers corresponding to each class of genomic alterations are synthesized as one single pool of primers.

### Example 2

### Sample Preparation and Sequencing

[0218] Ovation Target Enrichment libraries are generated from 100 ng total RNA. Briefly, total RNA is converted into double stranded cDNA using NuGEN's cDNA module. Barcoded adapters containing a random hexamer tag (e.g., N6) to monitor fragment uniqueness are ligated onto these DNA molecules. The strands are then denatured. Primers described in Example 1 are annealed according to manufacturer's recommendations, and then extended. These libraries are enriched by PCR, using a separate set of primers designed to anneal to the adaptor sequences. The libraries are diluted to an appropriate concentration and sequenced on an Ilumina MiSeq. The sequencer is programmed to obtain 70 bases of the forward read (forward primer), a 14 base index read and 88 bases of a reverse read.

### Example 3

### Detecting Different Classes of Genomic Alterations

[0219] The resulting sequence data files are parsed for each sample by barcode, trimmed for quality, and duplicates removed. 18 bases are trimmed from the reverse read according to manufacturer's recommendations. The resulting data is further parsed by mapping the next 35 bases of the reverse read to each of the FASTA sequence files generated in primer design for measurement of abnormal expression, SNPs, alternative splicing events, and fusions. Each set of parsed reverse reads is paired with the corresponding set of forward reads. The resulting forward and reverse reads correspond to reads derived from the primers designed for each measurement and will be ready for independent analysis of gene expression, SNPs, alternative splicing and fusion detection.

[0220] Expression analysis is carried out by two independent methods. First, forward reads corresponding to the set of reads that mapped to the “expression” probe sequence file are aligned to the genome with RNA STAR. After alignment, Fragments Per Kilobase of transcript per Million mapped reads (FPKM) values for the targeted, as well as the housekeeping genes, are calculated using Cufflinks. Second, expression is calculated using the expression “probe counts,” or the number of times each “expression” probe sequence was present in the reverse read sequence. All values are normalized between replicates and across cell lines.

[0221] For SNP detection, the reverse reads corresponding to the set of reads that mapped to the “SNP” probe sequence file are aligned to the genome using BWA. Variants are detected using the GATK best practices pipeline.

[0222] For alternative splicing, the forward and reverse reads corresponding to the set of reads that mapped to the “exon usage” probe sequence file are aligned to the genome with RNA STAR. Exon usage/isoform expression is calculated using Cufflinks. Exon usage are dependent on having forward and reverse reads mapped to an exon present in a gene isoform, as well as reads spanning to neighboring exons across splice junctions.

[0223] For fusion detection, the forward and reverse reads corresponding to the set of reads that mapped to the “fusion” probe sequence file are analyzed by SOAPfuse. Fusion detection can be dependent on detecting instances where the forward and reverse reads came from different genes and where reads spanned splice junctions.

[0224] Alternatively, fusion detection is analyzed using a fusion analysis pipeline. As an optional first step, sequence reads are trimmed prior to analysis. Probes are then aligned to sequence reads using 8 base pair K-mers. The raw reads are then optionally deduplicated using an N6 sequence in the index read and the probe-assigned sequence reads are quality trimmed. The sequence reads are then aligned by STAR alignment, which is then optionally filtered to remove reads which do not fully contain an expected probe sequence. The aligned and optionally filtered sequence is then processed by STAR-Fusion, which can be filtered to post process called fusions based on expected contributing probes. [

[0225] For CNV detection, sequence reads that have been optionally trimmed to remove adaptor and poor quality reads are aligned using a Bowtie approach. The sequence reads can then be optionally deduplicated, and the number of forward reads that fall within a region of interest can be counted. The count is then normalized against the total number of sequence reads, and the gene level copy number level can be optionally determined by averaging normalized counts across the gene. These normalized counts can optionally be compared to the number of reads in a control sample.

[0226] While preferred embodiments have been shown and described herein, it will be obvious to those skilled in the art that such embodiments are provided by way of example only. Numerous variations, changes, and substitutions will now occur to those skilled in the art without departing from the disclosure. It should be understood that various alternatives to the embodiments described herein may be employed in practicing the disclosure.

The application's sequence listing, which the Patent Office published only in electronic form, follows.

SEQUENCE LISTING (35858 sequences)

SEQ ID NO: 1 - DNA, 40 bp, Artificial Sequence
  Description of Artificial Sequence: Synthetic primer
gagcatttccttatcgctgtgtaaggtctaactgcctctg

SEQ ID NO: 2 - DNA, 40 bp, Artificial Sequence
  Description of Artificial Sequence: Synthetic primer
accagaaatctgaccttcccacagacatcctccctttccc

SEQ ID NO: 3 - DNA, 40 bp, Artificial Sequence
  Description of Artificial Sequence: Synthetic primer
agggctcacctggggtaaagtgtagggccatggggccaag

SEQ ID NO: 4 - DNA, 40 bp, Artificial Sequence
  Description of Artificial Sequence: Synthetic primer
ggagccaagcctgggtttgttcccaactggtggttctctg

SEQ ID NO: 5 - DNA, 40 bp, Artificial Sequence
  Description of Artificial Sequence: Synthetic primer
tctccttcaaggatttttcccttcatcaaaacccagtacg

SEQ ID NO: 6 - DNA, 40 bp, Artificial Sequence
  Description of Artificial Sequence: Synthetic primer
ttttcagtgagccatttctgtttaaaattttgtttatttc

SEQ ID NO: 7 - DNA, 40 bp, Artificial Sequence
  Description of Artificial Sequence: Synthetic primer
taaatgagtgtttacatatttacattttgtttgtgttttc

SEQ ID NO: 8 - DNA, 40 bp, Artificial Sequence
  Description of Artificial Sequence: Synthetic primer
gagaactctcagatttctagccgatgaggagaaaaaaaag

SEQ ID NO: 9 - DNA, 40 bp, Artificial Sequence
  Description of Artificial Sequence: Synthetic primer
tgtcctgcccggcctgtgagtgcctctctccctcctcctg

SEQ ID NO: 10 - DNA, 40 bp, Artificial Sequence
  Description of Artificial Sequence: Synthetic primer
tgacagggagggcactggttacagcacctgccacactcac

SEQ ID NO: 11 - DNA, 40 bp, Artificial Sequence
  Description of Artificial Sequence: Synthetic primer
gctgtggctgtgcaggggacctgaggctggagctgtactc

SEQ ID NO: 12 - DNA, 40 bp, Artificial Sequence
  Description of Artificial Sequence: Synthetic primer
gcctggcattggaggccagctgaccggccatctgtgtgcc

SEQ ID NO: 13 - DNA, 40 bp, Artificial Sequence
  Description of Artificial Sequence: Synthetic primer
tataacattaatgttaaatactattattactcctaccttt

SEQ ID NO: 14 - DNA, 40 bp, Artificial Sequence
  Description of Artificial Sequence: Synthetic primer
ataagaatccgttcaatttcttgtaatgattagctgtatc

SEQ ID NO: 15 - DNA, 40 bp, Artificial Sequence
  Description of Artificial Sequence: Synthetic primer
agctgcgtctgtgggtcagagtgaggaggggccttcactg

SEQ ID NO: 16 - DNA, 40 bp, Artificial Sequence
  Description of Artificial Sequence: Synthetic primer
cctgcccaacccagagagcctggaccttgtctcacagagc

SEQ ID NO: 17 - DNA, 40 bp, Artificial Sequence
  Description of Artificial Sequence: Synthetic primer
ggcatcaggattggtactggtagtgaacggagaccactgc

SEQ ID NO: 18 - DNA, 40 bp, Artificial Sequence
  Description of Artificial Sequence: Synthetic primer
aaataatattgaatgtttcctttctttattcttttcttag

SEQ ID NO: 19 - DNA, 40 bp, Artificial Sequence
  Description of Artificial Sequence: Synthetic primer
tcctggcagagggacagggcaggagctggagctgggtctc

SEQ ID NO: 20 - DNA, 40 bp, Artificial Sequence
  Description of Artificial Sequence: Synthetic primer
caccagatgggtctgggtgcttgaggaccaagggtgtggg

SEQ ID NO: 21 - DNA, 40 bp, Artificial Sequence
  Description of Artificial Sequence: Synthetic primer
gagatcaggcccctgggagccccagtcggcactcccagcc

SEQ ID NO: 22 - DNA, 40 bp, Artificial Sequence
  Description of Artificial Sequence: Synthetic primer
ggaccgggccgaggcccgaccggcctggcagggctcgccc

SEQ ID NO: 23 - DNA, 40 bp, Artificial Sequence
  Description of Artificial Sequence: Synthetic primer
gcacagaagctgttgtactcatgaagaacatatgaaatgc

SEQ ID NO: 24 - DNA, 40 bp, Artificial Sequence
  Description of Artificial Sequence: Synthetic primer
taaatttaggatgttaaggggaataagtatcatccattgc

SEQ ID NO: 25 - DNA, 40 bp, Artificial Sequence
  Description of Artificial Sequence: Synthetic primer
ggtggaggagcctgaaccggggctgtggctggagagtacg

SEQ ID NO: 26 - DNA, 40 bp, Artificial Sequence
  Description of Artificial Sequence: Synthetic primer
tcttgctcttatttttccttcataaagacccaaccctatg

SEQ ID NO: 27 - DNA, 40 bp, Artificial Sequence
  Description of Artificial Sequence: Synthetic primer
cactagatattccctgagctttaaaagaaaaataacagac

SEQ ID NO: 28 - DNA, 40 bp, Artificial Sequence
  Description of Artificial Sequence: Synthetic primer
tttagtggactcttgtgggctaggaacaacaatcaagagc

SEQ ID NO: 29 - DNA, 40 bp, Artificial Sequence
  Description of Artificial Sequence: Synthetic primer
tgtgatttttacctagtcatgcctttctctgagtgtatgc

SEQ ID NO: 30 - DNA, 40 bp, Artificial Sequence
  Description of Artificial Sequence: Synthetic primer
aatcagtaagttacctgcttggcttggttagcagccactg

SEQ ID NO: 31 - DNA, 40 bp, Artificial Sequence
  Description of Artificial Sequence: Synthetic primer
ggatcgcatcaaggactctgttgacctctcctcccacctg

SEQ ID NO: 32 - DNA, 40 bp, Artificial Sequence
  Description of Artificial Sequence: Synthetic primer
gagggagggaactccctcagggagtgcaggagcagttggg

SEQ ID NO: 33 - DNA, 40 bp, Artificial Sequence
  Description of Artificial Sequence: Synthetic primer
agaacgtctgtaattcccatccttagtaatgtgcttattc

SEQ ID NO: 34 - DNA, 40 bp, Artificial Sequence
  Description of Artificial Sequence: Synthetic primer
aaaagaatccgaacaaaataccacccaagcgtggtgagcc

SEQ ID NO: 35 - DNA, 40 bp, Artificial Sequence
  Description of Artificial Sequence: Synthetic primer
ctgggcagagagaggatgtagggacttgaagatgccattg

SEQ ID NO: 36 - DNA, 40 bp, Artificial Sequence
  Description of Artificial Sequence: Synthetic primer
gaaacacgggcagagggcctacaggctgggcctgagttgc

SEQ ID NO: 37 - DNA, 40 bp, Artificial Sequence
  Description of Artificial Sequence: Synthetic primer
gtgacaaatccctgtgtccctccgctcccaggtcgcatag

SEQ ID NO: 38 - DNA, 40 bp, Artificial Sequence
  Description of Artificial Sequence: Synthetic primer
attccttttgagaaggcttccattgataacaccaacatcc

SEQ ID NO: 39 - DNA, 40 bp, Artificial Sequence
  Description of Artificial Sequence: Synthetic primer
caagccttccagcggcagctcacggcgctgattggctatg

SEQ ID NO: 40 - DNA, 40 bp, Artificial Sequence
  Description of Artificial Sequence: Synthetic primer
agacgaggtgaggaaggaagagtggccactggtggatgac

SEQ ID NO: 41 - DNA, 40 bp, Artificial Sequence
  Description of Artificial Sequence: Synthetic primer
catgtggcagatatctgggaagggagaagaccaaggaagc

SEQ ID NO: 42 - DNA, 40 bp, Artificial Sequence
  Description of Artificial Sequence: Synthetic primer
catgcgcggggtcaccaagccacggcgcgtgaactccagc

SEQ ID NO: 43 - DNA, 40 bp, Artificial Sequence
  Description of Artificial Sequence: Synthetic primer
gacacggtgaacacactctcgtggtccttgccgtggatgg

SEQ ID NO: 44 - DNA, 40 bp, Artificial Sequence
  Description of Artificial Sequence: Synthetic primer
tggagatggacattgagttctccttgtctgggttagttgc

SEQ ID NO: 45 - DNA, 40 bp, Artificial Sequence
  Description of Artificial Sequence: Synthetic primer
aaactaatttctcctattttaaaatgaaaatccatatttg

SEQ ID NO: 46 - DNA, 40 bp, Artificial Sequence
  Description of Artificial Sequence: Synthetic primer
attcaaaggtgtcaaagtatcctgataatataaagtagac

SEQ ID NO: 47 - DNA, 40 bp, Artificial Sequence
  Description of Artificial Sequence: Synthetic primer
gatgcctgctcttctgtttactctgtgttttccccacttc

SEQ ID NO: 48 - DNA, 40 bp, Artificial Sequence
  Description of Artificial Sequence: Synthetic primer
cttctctggctctgtgactccggtgttccctgcctccatc

SEQ ID NO: 49 - DNA, 40 bp, Artificial Sequence
  Description of Artificial Sequence: Synthetic primer
aaaaatagccatttgaatgtattgtgctgttgtcattgtg

SEQ ID NO: 50 - DNA, 40 bp, Artificial Sequence
  Description of Artificial Sequence: Synthetic primer
gaaacatattgaaaatgaagaaaactaatgcaataaatac

SEQ ID NO: 51 - DNA, 40 bp, Artificial Sequence
  Description of Artificial Sequence: Synthetic primer
aagtctcttgcttgagggcttcagaattgtcattctactc

SEQ ID NO: 52 - DNA, 40 bp, Artificial Sequence
  Description of Artificial Sequence: Synthetic primer
gcaaaatgaagacacaatgttttgtgcacgtgaacaaggc

SEQ ID NO: 53 - DNA, 40 bp, Artificial Sequence
  Description of Artificial Sequence: Synthetic primer
tgcttgatatattattcaaattgcttcttctttaccttta

SEQ ID NO: 54 - DNA, 40 bp, Artificial Sequence
  Description of Artificial Sequence: Synthetic primer
atatggagaggaaattaaatgaactaaataaagtgttacc

SEQ ID NO: 55 - DNA, 40 bp, Artificial Sequence
  Description of Artificial Sequence: Synthetic primer
gcctagtgacactgggcccgcgattccttggagcgggttg

SEQ ID NO: 56 - DNA, 40 bp, Artificial Sequence
  Description of Artificial Sequence: Synthetic primer
ggtcacagtaggtggcatcgttcctttctgactgcccgcc

SEQ ID NO: 57 - DNA, 40 bp, Artificial Sequence
  Description of Artificial Sequence: Synthetic primer
gcggatggtggagagggagctgtccagtgactttgtgttc

SEQ ID NO: 58 - DNA, 40 bp, Artificial Sequence
  Description of Artificial Sequence: Synthetic primer
aggctttagagaaggttggagctgagatgggagcttggag

SEQ ID NO: 59 - DNA, 40 bp, Artificial Sequence
  Description of Artificial Sequence: Synthetic primer
ggggcctgacttactcgttggtcatctgcaccaccttctc

SEQ ID NO: 60 - DNA, 40 bp, Artificial Sequence
  Description of Artificial Sequence: Synthetic primer
ctgggtgctgcagcccctcacctgcagtgcttcctgttgc

SEQ ID NO: 61 - DNA, 40 bp, Artificial Sequence
  Description of Artificial Sequence: Synthetic primer
gtattttttaagaacaaaaccatgtaataaaattctgact

SEQ ID NO: 62 - DNA, 40 bp, Artificial Sequence
  Description of Artificial Sequence: Synthetic primer
tatgttatgttatggatatggatttatcaaaaaaacttac

SEQ ID NO: 63 - DNA, 40 bp, Artificial Sequence
  Description of Artificial Sequence: Synthetic primer
gcatagaattcaggcaatcacccaattgcagattcaagtc

SEQ ID NO: 64 - DNA, 40 bp, Artificial Sequence
  Description of Artificial Sequence: Synthetic primer
agggcttcttgactaaagcccttggagcactgggtttttc

SEQ ID NO: 65 - DNA, 40 bp, Artificial Sequence
  Description of Artificial Sequence: Synthetic primer
aaatggtgttcttcctgtgttccttccacattaagttctc

SEQ ID NO: 66 - DNA, 40 bp, Artificial Sequence
  Description of Artificial Sequence: Synthetic primer
aaaaagaagaaaaaaacacttaaatcattttttctttctc

SEQ ID NO: 67 - DNA, 40 bp, Artificial Sequence
  Description of Artificial Sequence: Synthetic primer
tttcatagaaagcctccttcctcattcaactttttgcttg

SEQ ID NO: 68 - DNA, 40 bp, Artificial Sequence
  Description of Artificial Sequence: Synthetic primer
cactgaggctgcggtgtgtgcgagcactggaaagggagag

SEQ ID NO: 69 - DNA, 40 bp, Artificial Sequence
  Description of Artificial Sequence: Synthetic primer
tgagagtgctacccttctcttgtaaccttgcagccaacac

SEQ ID NO: 70 - DNA, 40 bp, Artificial Sequence
  Description of Artificial Sequence: Synthetic primer
ccagaggtccatgcatagccattcattcgttgattcattc

SEQ ID NO: 71 - DNA, 40 bp, Artificial Sequence
  Description of Artificial Sequence: Synthetic primer
catgacgcagacgatcatgactggaaggaagggcgctgac

SEQ ID NO: 72 - DNA, 40 bp, Artificial Sequence
  Description of Artificial Sequence: Synthetic primer
tgtgtgtaagcaccagaagtgcatgcttttatatacattt

SEQ ID NO: 73 - DNA, 40 bp, Artificial Sequence
  Description of Artificial Sequence: Synthetic primer
tactgatttgaaaagcagagcttaaataggttttaaagta

SEQ ID NO: 74 - DNA, 40 bp, Artificial Sequence
  Description of Artificial Sequence: Synthetic primer
caagactatttagaccacaaaattaggcaagaaagtttag

SEQ ID NO: 75 - DNA, 40 bp, Artificial Sequence
  Description of Artificial Sequence: Synthetic primer
tctcttttctaagagagcataaaagttaaaagcaaacagc

SEQ ID NO: 76 - DNA, 40 bp, Artificial Sequence
  Description of Artificial Sequence: Synthetic primer
taaatatgttttcagttactgcatctctcagttttctttg

SEQ ID NO: 77 - DNA, 40 bp, Artificial Sequence
  Description of Artificial Sequence: Synthetic primer
cgagggcggccctctgcactgagaaacgcgcagcccactc

SEQ ID NO: 78 - DNA, 40 bp, Artificial Sequence
  Description of Artificial Sequence: Synthetic primer
ccaggccccggccgtgctgctcgggcctccctcgacctgc

SEQ ID NO: 79 - DNA, 40 bp, Artificial Sequence
  Description of Artificial Sequence: Synthetic primer
tcccacagaaagccacactggggccaggacagggcaactg

SEQ ID NO: 80 - DNA, 40 bp, Artificial Sequence
  Description of Artificial Sequence: Synthetic primer
gccttctttgttctctggttccatgttgtctgccattctg

SEQ ID NO: 81 - DNA, 40 bp, Artificial Sequence
  Description of Artificial Sequence: Synthetic primer
aggcaaccaacaggccaaggaggcagcagggtgggtaatg

SEQ ID NO: 82 - DNA, 40 bp, Artificial Sequence
  Description of Artificial Sequence: Synthetic primer
ggactctaaaagtgaaattactggggcatagggtatgagg

SEQ ID NO: 83 - DNA, 40 bp, Artificial Sequence
  Description of Artificial Sequence: Synthetic primer
agtcattgtctgcccagctctgttcaaaccattatacaac

SEQ ID NO: 84 - DNA, 40 bp, Artificial Sequence
  Description of Artificial Sequence: Synthetic primer
tgacacttgttctgggaggttggaaagctggctctgtttc

SEQ ID NO: 85 - DNA, 40 bp, Artificial Sequence
  Description of Artificial Sequence: Synthetic primer
tcaaaatatgagctgtgaagttctgtaagtaccttttctc

SEQ ID NO: 86 - DNA, 40 bp, Artificial Sequence
  Description of Artificial Sequence: Synthetic primer
aggtcagagacattttgccagggaattgctattgggaagc

SEQ ID NO: 87 - DNA, 40 bp, Artificial Sequence
  Description of Artificial Sequence: Synthetic primer
agaaagggcatctgaaagcgtgcttttaccatttcatttc

SEQ ID NO: 88 - DNA, 40 bp, Artificial Sequence
  Description of Artificial Sequence: Synthetic primer
attccccgaccttcatagtcagagaatactgtcaaagcac

SEQ ID NO: 89 - DNA, 40 bp, Artificial Sequence
  Description of Artificial Sequence: Synthetic primer
agaagctttctttaaacaatagagaagggaaagggaggag

SEQ ID NO: 90 - DNA, 40 bp, Artificial Sequence
  Description of Artificial Sequence: Synthetic primer
gaaattgatgagcatttgccctgaatgtgtcacttgtttc

SEQ ID NO: 91 - DNA, 40 bp, Artificial Sequence
  Description of Artificial Sequence: Synthetic primer
tatcaccctgtctgctctgacaagagcatgccatagcatg

SEQ ID NO: 92 - DNA, 40 bp, Artificial Sequence
  Description of Artificial Sequence: Synthetic primer
agactcattttgtattcaaggagtttgtttgttcctttgc

SEQ ID NO: 93 - DNA, 40 bp, Artificial Sequence
  Description of Artificial Sequence: Synthetic primer
ccccatgcaaataaaaacaaaaccagagagatgcagaaac

SEQ ID NO: 94 - DNA, 40 bp, Artificial Sequence
  Description of Artificial Sequence: Synthetic primer
ccggatatgggtgaggatgtgttaaatgtgtgtctctttc

SEQ ID NO: 95 - DNA, 40 bp, Artificial Sequence
  Description of Artificial Sequence: Synthetic primer
tttttaaatctccttaagataatagaagaatttgttagtg

SEQ ID NO: 96 - DNA, 40 bp, Artificial Sequence
  Description of Artificial Sequence: Synthetic primer
agactgaatttcagcaagattccatgcctcctctccacac

SEQ ID NO: 97 - DNA, 40 bp, Artificial Sequence
  Description of Artificial Sequence: Synthetic primer
tgtgaatgaattactctgcctaaatactttcccatctttc

SEQ ID NO: 98 - DNA, 40 bp, Artificial Sequence
  Description of Artificial Sequence: Synthetic primer
caaagctcttggtccatgatcacaaaaggtatccaaatcg

SEQ ID NO: 99 - DNA, 40 bp, Artificial Sequence
  Description of Artificial Sequence: Synthetic primer
ctgcgactgatgagaacgcaatgcaaaatgaggtttatag

SEQ ID NO: 100 - DNA, 40 bp, Artificial Sequence
  Description of Artificial Sequence: Synthetic primer
aatgaagagcaaagtactttaactagaattttattttttc

SEQ ID NO: 101 - DNA, 40 bp, Artificial Sequence
  Description of Artificial Sequence: Synthetic primer
agacctcctcagccaagaatcccgtaactgcccccatctc

SEQ ID NO: 102 - DNA, 40 bp, Artificial Sequence
  Description of Artificial Sequence: Synthetic primer
gaggggaattgctcttctctttatgagaccactgtcttgc

SEQ ID NO: 103 - DNA, 40 bp, Artificial Sequence
  Description of Artificial Sequence: Synthetic primer
tatacagacagacacacacaagttctaagtgaaatataag

SEQ ID NO: 104 - DNA, 40 bp, Artificial Sequence
  Description of Artificial Sequence: Synthetic primer
ctccatttcagtttgtttttataaatgtgccatatcttcc

SEQ ID NO: 105 - DNA, 40 bp, Artificial Sequence
  Description of Artificial Sequence: Synthetic primer
aggactttgatctgaccaagggctgccttggtgatgccac

SEQ ID NO: 106 - DNA, 40 bp, Artificial Sequence
  Description of Artificial Sequence: Synthetic primer
ccaagcccagggccctttgctgaactccctctctctattg

SEQ ID NO: 107 - DNA, 40 bp, Artificial Sequence
  Description of Artificial Sequence: Synthetic primer
ataaaatggaccatttaacacagaagagagtgccccagtc

SEQ ID NO: 108 - DNA, 40 bp, Artificial Sequence
  Description of Artificial Sequence: Synthetic primer
tcccaggtggaataccgactgccatttcttttgtttcctc

SEQ ID NO: 109 - DNA, 40 bp, Artificial Sequence
  Description of Artificial Sequence: Synthetic primer
gtcggaggtggaattttacaaggactgggagtgaagatac

SEQ ID NO: 110 - DNA, 40 bp, Artificial Sequence
  Description of Artificial Sequence: Synthetic primer
gcggcagtgctgatgaaagccctgcgggagacagggaatg

SEQ ID NO: 111 - DNA, 40 bp, Artificial Sequence
  Description of Artificial Sequence: Synthetic primer
ccatgttagtcgggcccaagccaaactcaatgaaaaatta

SEQ ID NO: 112 - DNA, 40 bp, Artificial Sequence
  Description of Artificial Sequence: Synthetic primer
gtggttaatggaagcttttttaaattttttttttctgcct

SEQ ID NO: 113 - DNA, 40 bp, Artificial Sequence
  Description of Artificial Sequence: Synthetic primer
gaggcagcaagcacacagggcctgggactagcatgctgac

SEQ ID NO: 114 - DNA, 40 bp, Artificial Sequence
  Description of Artificial Sequence: Synthetic primer
cctctgcaggagggtgctcttagccacaggcagggatggg

SEQ ID NO: 115 - DNA, 40 bp, Artificial Sequence
  Description of Artificial Sequence: Synthetic primer
cttctctgtggattcagccctcacgtctcccctggcatcc

SEQ ID NO: 116 - DNA, 40 bp, Artificial Sequence
  Description of Artificial Sequence: Synthetic primer
tccagctggtctccaacctaccccatctgcttctttcacg

SEQ ID NO: 117 - DNA, 40 bp, Artificial Sequence
  Description of Artificial Sequence: Synthetic primer
aggagccctcggagctgcttaactttccctcccccacgtc

SEQ ID NO: 118 - DNA, 40 bp, Artificial Sequence
  Description of Artificial Sequence: Synthetic primer
ctgccgccggcacggcggaggggacgttggggacacctag

SEQ ID NO: 119 - DNA, 40 bp, Artificial Sequence
  Description of Artificial Sequence: Synthetic primer
atccacccacaagccaagatcccagccccactctactgtc

SEQ ID NO: 120 - DNA, 40 bp, Artificial Sequence
  Description of Artificial Sequence: Synthetic primer
tctgaaactcttcactctgtcccctcattcctccctgtgg

SEQ ID NO: 121 - DNA, 40 bp, Artificial Sequence
  Description of Artificial Sequence: Synthetic primer
tgttgggagctcagggtgggtggacagagcgagtgtgacg

SEQ ID NO: 122 - DNA, 40 bp, Artificial Sequence
  Description of Artificial Sequence: Synthetic primer
ccctctccaagtctctttcccattgcagggctgggtgagg

SEQ ID NO: 123 - DNA, 40 bp, Artificial Sequence
  Description of Artificial Sequence: Synthetic primer
cttcatgtaaaagacagttgtattggtgggtgcttcagac

SEQ ID NO: 124 - DNA, 40 bp, Artificial Sequence
  Description of Artificial Sequence: Synthetic primer
attcctaataatactttgtttttgtatgtcttactcctag

SEQ ID NO: 125 - DNA, 40 bp, Artificial Sequence
  Description of Artificial Sequence: Synthetic primer
tcagttggctttgtgctttaagagaaaacagggccaggtc

SEQ ID NO: 126 - DNA, 40 bp, Artificial Sequence
  Description of Artificial Sequence: Synthetic primer
tctctctctttaagccacttgtgtggtctgttttgtttag

SEQ ID NO: 127 - DNA, 40 bp, Artificial Sequence
  Description of Artificial Sequence: Synthetic primer
caatgactatatcccttaatgatacaagtgtctgttcatc

SEQ ID NO: 128 - DNA, 40 bp, Artificial Sequence
  Description of Artificial Sequence: Synthetic primer
gaaaaaatgggcagaccacatcgcattaactttaactctc

SEQ ID NO: 129 - DNA, 40 bp, Artificial Sequence
  Description of Artificial Sequence: Synthetic primer
ggccattccactcttacagtttatctataatgttctttag

SEQ ID NO: 130 - DNA, 40 bp, Artificial Sequence
  Description of Artificial Sequence: Synthetic primer
gatgatagatggagaaaagtgggtctaatatataaaggtg

SEQ ID NO: 131 - DNA, 40 bp, Artificial Sequence
  Description of Artificial Sequence: Synthetic primer
ctatgtaagtatttccttaattctgttctgaattgctgtc

SEQ ID NO: 132 - DNA, 40 bp, Artificial Sequence
  Description of Artificial Sequence: Synthetic primer
tacagtatagctctaatgattctgcctaaatccaaatctc

SEQ ID NO: 133 - DNA, 40 bp, Artificial Sequence
  Description of Artificial Sequence: Synthetic primer
agtttcaatcctgaattggtataaataagacagatgattc

SEQ ID NO: 134 - DNA, 40 bp, Artificial Sequence
  Description of Artificial Sequence: Synthetic primer
tgattatcattataattatcatataaaatattgatcatgc

SEQ ID NO: 135 - DNA, 40 bp, Artificial Sequence
  Description of Artificial Sequence: Synthetic primer
agtcttcctctatatttctctatttcaatccctactccag

SEQ ID NO: 136 - DNA, 40 bp, Artificial Sequence
  Description of Artificial Sequence: Synthetic primer
ttgttcttctttgtcttcatctctggttctgactaatttc

SEQ ID NO: 137 - DNA, 40 bp, Artificial Sequence
  Description of Artificial Sequence: Synthetic primer
acaagaaaacaataagaaagatagaattggcagagaactg

SEQ ID NO: 138 - DNA, 40 bp, Artificial Sequence
  Description of Artificial Sequence: Synthetic primer
agtgaaatgttcttttgtttactttttcttctatttcctc

SEQ ID NO: 139 - DNA, 40 bp, Artificial Sequence
  Description of Artificial Sequence: Synthetic primer
cgcgagagccccagccgcgggcgggcgggcggcgaagatg

SEQ ID NO: 140 - DNA, 40 bp, Artificial Sequence
  Description of Artificial Sequence: Synthetic primer
cgctgcgcaggaggcccggcgggtcctgctgccagcccgg

SEQ ID NO: 141 - DNA, 40 bp, Artificial Sequence
  Description of Artificial Sequence: Synthetic primer
gagcggcacgctgggctccgggctgctccttgaggactcg

SEQ ID NO: 142 - DNA, 40 bp, Artificial Sequence
  Description of Artificial Sequence: Synthetic primer
ccccgctcagcccgcccgccgcggtggctggcccagaccc

SEQ ID NO: 143 - DNA, 40 bp, Artificial Sequence
  Description of Artificial Sequence: Synthetic primer
tcgagggtgcctgctgacaggggttctctttgggatggtc

SEQ ID NO: 144 - DNA, 40 bp, Artificial Sequence
  Description of Artificial Sequence: Synthetic primer
aagtgaggcaccaggttcccgcaggagaggtgtcaggagc

SEQ ID NO: 145 - DNA, 40 bp, Artificial Sequence
  Description of Artificial Sequence: Synthetic primer
aaaaccaatcatgtctcataagtgatggggtgggtgtctc

SEQ ID NO: 146 - DNA, 40 bp, Artificial Sequence
  Description of Artificial Sequence: Synthetic primer
cacacctcagcagggatcacggcctccctccccgacttcc

SEQ ID NO: 147 - DNA, 40 bp, Artificial Sequence
  Description of Artificial Sequence: Synthetic primer
tactcaaatccatgaaaataaaggtatcagtgatgtctgc

SEQ ID NO: 148 - DNA, 40 bp, Artificial Sequence
  Description of Artificial Sequence: Synthetic primer
tggttttcagtattgattttgtgtatatgtgttgttttcc

SEQ ID NO: 149 - DNA, 40 bp, Artificial Sequence
  Description of Artificial Sequence: Synthetic primer
gtaattccttgagatgattgttttctttattgttaatatg

SEQ ID NO: 150 - DNA, 40 bp, Artificial Sequence
  Description of Artificial Sequence: Synthetic primer
ggtttaactttaaatattaactcagtaagtatttacagag

SEQ ID NO: 151 - DNA, 40 bp, Artificial Sequence
  Description of Artificial Sequence: Synthetic primer
acattagcaaactaattattttattttttgttactgaaat

SEQ ID NO: 152 - DNA, 40 bp, Artificial Sequence
  Description of Artificial Sequence: Synthetic primer
gtgataacttacaagatgttgaatgatgtaaaataaaggg

SEQ ID NO: 153 - DNA, 40 bp, Artificial Sequence
  Description of Artificial Sequence: Synthetic primer
cacttccacctctcacccacagcaggacttcactgtgacc

SEQ ID NO: 154 - DNA, 40 bp, Artificial Sequence
  Description of Artificial Sequence: Synthetic primer
ccctacaataacatactccattcagaaagtaattttcacc

SEQ ID NO: 155 - DNA, 40 bp, Artificial Sequence
  Description of Artificial Sequence: Synthetic primer
cctcaccccttcccattctaaccgaagggccctctttacc

SEQ ID NO: 156 - DNA, 40 bp, Artificial Sequence
  Description of Artificial Sequence: Synthetic primer
aataaatctggtagtcaatgcagctctgcggggtctctgc

SEQ ID NO: 157 - DNA, 40 bp, Artificial Sequence
  Description of Artificial Sequence: Synthetic primer
aaactatgtataatcacagatcatacaaatttatatactc

SEQ ID NO: 158 - DNA, 40 bp, Artificial Sequence
  Description of Artificial Sequence: Synthetic primer
ttgaaatctgtatttgtctaccatataaaattaaaataaa

SEQ ID NO: 159 - DNA, 40 bp, Artificial Sequence
  Description of Artificial Sequence: Synthetic primer
aaaatatgcaataaataggattcaaagaaacaaacaaaaa

SEQ ID NO: 160 - DNA, 40 bp, Artificial Sequence
  Description of Artificial Sequence: Synthetic primer
gactgatttctaattgttctgttttgtgaattatttttag

SEQ ID NO: 161 - DNA, 40 bp, Artificial Sequence
  Description of Artificial Sequence: Synthetic primer
tggggcactgtctgcatctgtagagttctaaaggcatggg

SEQ ID NO: 162 - DNA, 40 bp, Artificial Sequence
  Description of Artificial Sequence: Synthetic primer
cagccttccctggccaagagctcatgctttccttgctctc

SEQ ID NO: 163 - DNA, 40 bp, Artificial Sequence
  Description of Artificial Sequence: Synthetic primer
acagaagtgaggctcattaatctttgttgaactactttgc

SEQ ID NO: 164 - DNA, 40 bp, Artificial Sequence
  Description of Artificial Sequence: Synthetic primer
accattactcagacgtgatatgataagagtaagaagcatc

SEQ ID NO: 165 - DNA, 40 bp, Artificial Sequence
  Description of Artificial Sequence: Synthetic primer
attttatacagttctaggtatactgtaggagttcaataaa

SEQ ID NO: 166 - DNA, 40 bp, Artificial Sequence
  Description of Artificial Sequence: Synthetic primer
tagagggaaatgggtgacgactctccttttggtggcttac

SEQ ID NO: 167 - DNA, 40 bp, Artificial Sequence
  Description of Artificial Sequence: Synthetic primer
tgcagcctggggatgaggggatggaggtgtagcctgtagc

SEQ ID NO: 168 - DNA, 40 bp, Artificial Sequence
  Description of Artificial Sequence: Synthetic primer
gtcccggacaccccttgatgccgagtcctgcccatctgcc

SEQ ID NO: 169 - DNA, 40 bp, Artificial Sequence
  Description of Artificial Sequence: Synthetic primer
caatgattagaaagcatagcatgagttggcaacgctgaac

SEQ ID NO: 170 - DNA, 40 bp, Artificial Sequence
  Description of Artificial Sequence: Synthetic primer
gcatgaacactcactccttctacatttgttatacattttc

SEQ ID NO: 171 - DNA, 40 bp, Artificial Sequence
  Description of Artificial Sequence: Synthetic primer
ctgaggagggcatgaggctcagccccagaaccccctctgg

SEQ ID NO: 172 - DNA, 40 bp, Artificial Sequence
  Description of Artificial Sequence: Synthetic primer
cccacccagtcaatccctttggtgctcacgtggggtgctc

SEQ ID NO: 173 - DNA, 40 bp, Artificial Sequence
  Description of Artificial Sequence: Synthetic primer
atttggtcttccctgtctttcttctcccttgccccctacc

SEQ ID NO: 174 - DNA, 40 bp, Artificial Sequence
  Description of Artificial Sequence: Synthetic primer
tcagtgtcaagtttcagcctctccaggacagattccttac

SEQ ID NO: 175 - DNA, 40 bp, Artificial Sequence
  Description of Artificial Sequence: Synthetic primer
tctgtggggctgccacagcactaaactgttctctgtgtcc

SEQ ID NO: 176 - DNA, 40 bp, Artificial Sequence
  Description of Artificial Sequence: Synthetic primer
taaaagcagaatccccagggcccagccccatcggtaggag

SEQ ID NO: 177 - DNA, 40 bp, Artificial Sequence
  Description of Artificial Sequence: Synthetic primer
ggggctgagccagagcagcgggcacagagtggtcacatgg

SEQ ID NO: 178 - DNA, 40 bp, Artificial Sequence
  Description of Artificial Sequence: Synthetic primer
gcgatggggcactcccctggcccacgtcggaagcacttac

SEQ ID NO: 179 - DNA, 40 bp, Artificial Sequence
  Description of Artificial Sequence: Synthetic primer
gaaaagacaacttttgtcttcctctttggagtctggatgg

SEQ ID NO: 180 - DNA, 40 bp, Artificial Sequence
  Description of Artificial Sequence: Synthetic primer
ttcagatatttgctaatttgggttctgaatccttgtcttc

SEQ ID NO: 181 - DNA, 40 bp, Artificial Sequence
  Description of Artificial Sequence: Synthetic primer
taggatacacattatgaaatactaatcaagtttatttctg

SEQ ID NO: 182 - DNA, 40 bp, Artificial Sequence
  Description of Artificial Sequence: Synthetic primer
atatctagaacaacattgtgccacaaaaaaaaattctctg

SEQ ID NO: 183 - DNA, 40 bp, Artificial Sequence
  Description of Artificial Sequence: Synthetic primer
ggtccaggcccctggggacgctgagtgcagccgtttgttg

SEQ ID NO: 184 - DNA, 40 bp, Artificial Sequence
  Description of Artificial Sequence: Synthetic primer
gagggctctggttccacgccggctccatgccccccacccc

SEQ ID NO: 185 - DNA, 40 bp, Artificial Sequence
  Description of Artificial Sequence: Synthetic primer
aaggcagttgggcatgtccctgactctctatcccctccac

SEQ ID NO: 186 - DNA, 40 bp, Artificial Sequence
  Description of Artificial Sequence: Synthetic primer
agagacagcaatggggtgtgtggttgtgagcctggagaag

SEQ ID NO: 187 - DNA, 40 bp, Artificial Sequence
  Description of Artificial Sequence: Synthetic primer
tgggattcccaaagcttagagtaaccacctgctcttatcc

SEQ ID NO: 188 - DNA, 40 bp, Artificial Sequence
  Description of Artificial Sequence: Synthetic primer
gaggctatgccatcgtagtgacaagggtgggagtaatgag

SEQ ID NO: 189 - DNA, 40 bp, Artificial Sequence
  Description of Artificial Sequence: Synthetic primer
aggcgggaagcggcggggctcactcctgagcgccctgccc

SEQ ID NO: 190 - DNA, 40 bp, Artificial Sequence
  Description of Artificial Sequence: Synthetic primer
gggcataggcgggtggcaccaggccagagccagcactcac

SEQ ID NO: 191 - DNA, 40 bp, Artificial Sequence
  Description of Artificial Sequence: Synthetic primer
tgttcatttcagtcgtcacagagtttaaaaagtaaaagac

SEQ ID NO: 192 - DNA, 40 bp, Artificial Sequence
  Description of Artificial Sequence: Synthetic primer
acaataatctttgtcataaaaggctttctgctccacacag

SEQ ID NO: 193 - DNA, 40 bp, Artificial Sequence
  Description of Artificial Sequence: Synthetic primer
aatttaaaatatgtttaattttctatatagctccatcaag

SEQ ID NO: 194 - DNA, 40 bp, Artificial Sequence
  Description of Artificial Sequence: Synthetic primer
taaataagcaatgattaggaaaactcaacttgctgactac

SEQ ID NO: 195 - DNA, 40 bp, Artificial Sequence
  Description of Artificial Sequence: Synthetic primer
acgtggcctgcaaagggagctccactgacgacccctgcac

SEQ ID NO: 196 - DNA, 40 bp, Artificial Sequence
  Description of Artificial Sequence: Synthetic primer
agaaccaaacagaatcagggcagagtgaggcaggaggagg

SEQ ID NO: 197 - DNA, 40 bp, Artificial Sequence
  Description of Artificial Sequence: Synthetic primer
agcggccaccggccaccccgaggggaagcgaccccccacc

SEQ ID NO: 198 - DNA, 40 bp, Artificial Sequence
  Description of Artificial Sequence: Synthetic primer
cgaaaagccggggcgcctgcgctgccgccgccgcgtctgc

SEQ ID NO: 199 - DNA, 40 bp, Artificial Sequence
  Description of Artificial Sequence: Synthetic primer
caccagagctctccgtgctccacccctaccctgcctcaac

SEQ ID NO: 200 - DNA, 40 bp, Artificial Sequence
  Description of Artificial Sequence: Synthetic primer
cctgccttgtcccctgaaccctgggccagaggccctgacc

SEQ ID NO: 201 - DNA, 40 bp, Artificial Sequence
  Description of Artificial Sequence: Synthetic primer
gtgggaaactgtgcctcccatttttgtgcatctttgttgc

SEQ ID NO: 202 - DNA, 40 bp, Artificial Sequence
  Description of Artificial Sequence: Synthetic primer
gaaaatctttaaaatgcacgtactcaccatttgtctttgc

SEQ ID NO: 203 - DNA, 40 bp, Artificial Sequence
  Description of Artificial Sequence: Synthetic primer
tccctatgtacgtggagtaatacacctatgaagtgtggtc

SEQ ID NO: 204 - DNA, 40 bp, Artificial Sequence
  Description of Artificial Sequence: Synthetic primer
tttccctaagtttaccaaaggaagagtataaagaagaaag

SEQ ID NO: 205 - DNA, 40 bp, Artificial Sequence
  Description of Artificial Sequence: Synthetic primer
aacatttatttaactgaaggtatagtggagtagggtaagc

SEQ ID NO: 206 - DNA, 40 bp, Artificial Sequence
  Description of Artificial Sequence: Synthetic primer
acttgcatggaccagcccttccaccactccagaaacacac

SEQ ID NO: 207 - DNA, 40 bp, Artificial Sequence
  Description of Artificial Sequence: Synthetic primer
cctgttccctgtttaccctgagatgggtaatgatgtcttc

SEQ ID NO: 208 - DNA, 40 bp, Artificial Sequence
  Description of Artificial Sequence: Synthetic primer
cacacctcacttttcccctgccaaccctttatccttcctc

SEQ ID NO: 209 - DNA, 40 bp, Artificial Sequence
  Description of Artificial Sequence: Synthetic primer
acacctttggggaatgctctcgctgccgccccccacattc

SEQ ID NO: 210 - DNA, 40 bp, Artificial Sequence
  Description of Artificial Sequence: Synthetic primer
atgaaatacccagcacagtgcccttcccttacccatcatg

SEQ ID NO: 211 - DNA, 40 bp, Artificial Sequence
  Description of Artificial Sequence: Synthetic primer
atttcccctgaatttaatcatgcccaccctgcagaatgtc

SEQ ID NO: 212 - DNA, 40 bp, Artificial Sequence
  Description of Artificial Sequence: Synthetic primer
tagcgctgacttcaccaacgtaagaactccggcaatttac

SEQ ID NO: 213 - DNA, 40 bp, Artificial Sequence
  Description of Artificial Sequence: Synthetic primer
cctttacccttgaagttttatgtagtataaagcagatttt

SEQ ID NO: 214 - DNA, 40 bp, Artificial Sequence
  Description of Artificial Sequence: Synthetic primer
gaggaattgtagagtactgaacaggtaagtcatccctcag

SEQ ID NO: 215 - DNA, 40 bp, Artificial Sequence
  Description of Artificial Sequence: Synthetic primer
accctaatagctggctttaagaaatctttgtaatatgagg

SEQ ID NO: 216 - DNA, 40 bp, Artificial Sequence
  Description of Artificial Sequence: Synthetic primer
tcctttgacttctccctagaaatcagtcagtaaaaccaag

SEQ ID NO: 217 - DNA, 40 bp, Artificial Sequence
  Description of Artificial Sequence: Synthetic primer
aaccaactcccagcagaatgcgcagcacccatacagaggc

SEQ ID NO: 218 - DNA, 40 bp, Artificial Sequence
  Description of Artificial Sequence: Synthetic primer
gtttcttcccaaggtatctgaccctctctccataatccac

SEQ ID NO: 219 - DNA, 40 bp, Artificial Sequence
  Description of Artificial Sequence: Synthetic primer
tgccctcatcacccacccacatgcagacatgcccaagaac

SEQ ID NO: 220 - DNA, 40 bp, Artificial Sequence
  Description of Artificial Sequence: Synthetic primer
agaagttcagaacagtccctcctctctagacccaacatgc

SEQ ID NO: 221 - DNA, 40 bp, Artificial Sequence
  Description of Artificial Sequence: Synthetic primer
aactgctttgatcccagtaattggtacttgtgtctttcag

SEQ ID NO: 222 - DNA, 40 bp, Artificial Sequence
  Description of Artificial Sequence: Synthetic primer
tgtgagaaacatcagatactttatttttaattgtgttttc

SEQ ID NO: 223 - DNA, 40 bp, Artificial Sequence
  Description of Artificial Sequence: Synthetic primer
attcaagccaccatggaacaagttttattctgccttaaac

SEQ ID NO: 224 - DNA, 40 bp, Artificial Sequence
  Description of Artificial Sequence: Synthetic primer
attatagctacaatttctgttttgaagttttagtaaaatg

SEQ ID NO: 225 - DNA, 40 bp, Artificial Sequence
  Description of Artificial Sequence: Synthetic primer
gaaatctaggttttaatttttgttcataactttctttttc

SEQ ID NO: 226 - DNA, 40 bp, Artificial Sequence
  Description of Artificial Sequence: Synthetic primer
gctgggcctctgcctcctcacccatcatcccggcaccttc

SEQ ID NO: 227 - DNA, 40 bp, Artificial Sequence
  Description of Artificial Sequence: Synthetic primer
gcccagcaaggggctgtactggctctccggggtctgcacc

SEQ ID NO: 228 - DNA, 40 bp, Artificial Sequence
  Description of Artificial Sequence: Synthetic primer
tagacctgccctgaaattttgggaaaaaaaaattaagtac

SEQ ID NO: 229 - DNA, 40 bp, Artificial Sequence
  Description of Artificial Sequence: Synthetic primer
ggattgacttcccctgtttggattatttcactgcattatc

SEQ ID NO: 230 - DNA, 40 bp, Artificial Sequence
  Description of Artificial Sequence: Synthetic primer
actaaataggaaaataccagcttcatagacaaaggttctc

SEQ ID NO: 231 - DNA, 40 bp, Artificial Sequence
  Description of Artificial Sequence: Synthetic primer
cccttttaattaagaaaacttttattgatttattttttgg

SEQ ID NO: 232 - DNA, 40 bp, Artificial Sequence
  Description of Artificial Sequence: Synthetic primer
cctgccagacttgccagtgatgaaactgttactgtcttac

SEQ ID NO: 233 - DNA, 40 bp, Artificial Sequence
  Description of Artificial Sequence: Synthetic primer
ttacggcctaagtgtgcacctctgagaccctccacaaacc

SEQ ID NO: 234 - DNA, 40 bp, Artificial Sequence
  Description of Artificial Sequence: Synthetic primer
ttgagaaacagtgaaaaccccataccaaacataaacagag

SEQ ID NO: 235 - DNA, 40 bp, Artificial Sequence
  Description of Artificial Sequence: Synthetic primer
gtgttctggtgtggaatatctgccttggtctttgagaatc

SEQ ID NO: 236 - DNA, 40 bp, Artificial Sequence
  Description of Artificial Sequence: Synthetic primer
accacaaatcctgcaagcagaaggtgctgcacaggctcag

SEQ ID NO: 237 - DNA, 40 bp, Artificial Sequence
  Description of Artificial Sequence: Synthetic primer
taacgcacatgacttaatgggaatcattctctctcaccag

SEQ ID NO: 238 - DNA, 40 bp, Artificial Sequence
  Description of Artificial Sequence: Synthetic primer
gccagaatataggaagttccacttaataaaaacacaaaag

SEQ ID NO: 239 - DNA, 40 bp, Artificial Sequence
  Description of Artificial Sequence: Synthetic primer
gtttattttttataagtactaattccagtctttttttttt

SEQ ID NO: 240 - DNA, 40 bp, Artificial Sequence
  Description of Artificial Sequence: Synthetic primer
agagccagggccccaggctcgtgttgtctctcctcctgtc

SEQ ID NO: 241 - DNA, 40 bp, Artificial Sequence
  Description of Artificial Sequence: Synthetic primer
gaggaagaagagccttgaaggtattggttcctctctttcc

SEQ ID NO: 242 - DNA, 40 bp, Artificial Sequence
  Description of Artificial Sequence: Synthetic primer
cgccctgcagggctcctgggctccacagttgatgaggtag

SEQ ID NO: 243 - DNA, 40 bp, Artificial Sequence
  Description of Artificial Sequence: Synthetic primer
gctggtcctcggggttcctggggacctcctccctatgtgg

SEQ ID NO: 244 - DNA, 40 bp, Artificial Sequence
  Description of Artificial Sequence: Synthetic primer
gacctcatgcacatttgtggaaactggatggagagatttg

SEQ ID NO: 245 - DNA, 40 bp, Artificial Sequence
  Description of Artificial Sequence: Synthetic primer
aaaaataaagccaaaccttaccagaaaggagcaagctgac

SEQ ID NO: 246 - DNA, 40 bp, Artificial Sequence
  Description of Artificial Sequence: Synthetic primer
cactgggcccaatatgacatcacagccctccccacccaac

SEQ ID NO: 247 - DNA, 40 bp, Artificial Sequence
  Description of Artificial Sequence: Synthetic primer
ttggggtgggtctattgggttggggattaccgactgctcc

SEQ ID NO: 248 - DNA, 40 bp, Artificial Sequence
  Description of Artificial Sequence: Synthetic primer
cccagagctcaaggctgtctttccctcccggtcccctcca

SEQ ID NO: 249 - DNA, 40 bp, Artificial Sequence
  Description of Artificial Sequence: Synthetic primer
cagggccccgggatgcctcctgccacatgccagctctgcc

SEQ ID NO: 250 - DNA, 40 bp, Artificial Sequence
  Description of Artificial Sequence: Synthetic primer
gttcaagcactgtatttaaatatttaaaagatagaggagt

SEQ ID NO: 251 - DNA, 40 bp, Artificial Sequence
  Description of Artificial Sequence: Synthetic primer
catggctctgagaaagtgttatactctgttcttttgttgc

SEQ ID NO: 252 - DNA, 40 bp, Artificial Sequence
  Description of Artificial Sequence: Synthetic primer
gagccctctaaagaacagcttgtcctaatcatcacgtacc

SEQ ID NO: 253 - DNA, 40 bp, Artificial Sequence
  Description of Artificial Sequence: Synthetic primer
gcccttggtgacgacaacaaggacaggtcagttctccacg

SEQ ID NO: 254 - DNA, 40 bp, Artificial Sequence
  Description of Artificial Sequence: Synthetic primer
tgcactgagcgtttgttagtcctggtgttttattgtttgg

SEQ ID NO: 255 - DNA, 40 bp, Artificial Sequence
  Description of Artificial Sequence: Synthetic primer
ccctagacccacagactgtgaacacaggcccccgggatgg

SEQ ID NO: 256 - DNA, 40 bp, Artificial Sequence
  Description of Artificial Sequence: Synthetic primer
taaagatctatatgtgtagattaaacccatcctccatctc

SEQ ID NO: 257 - DNA, 40 bp, Artificial Sequence
  Description of Artificial Sequence: Synthetic primer
gcattgttgtgtttgtgtgtttttgtgtgtgactctctgg

SEQ ID NO: 258 - DNA, 40 bp, Artificial Sequence
  Description of Artificial Sequence: Synthetic primer
catcctaaatacttggtttttcttatttctctccctggtg

SEQ ID NO: 259 - DNA, 40 bp, Artificial Sequence
  Description of Artificial Sequence: Synthetic primer
agagcagaagcattcccatccttcccttccctttagttcc

SEQ ID NO: 260 - DNA, 40 bp, Artificial Sequence
  Description of Artificial Sequence: Synthetic primer
gttgttaggctgccagccgacagtcccatcccagagcggg

SEQ ID NO: 261 - DNA, 40 bp, Artificial Sequence
  Description of Artificial Sequence: Synthetic primer
ttctttgggttgaagccacagcgatagacatcaaaacacg

SEQ ID NO: 262 - DNA, 40 bp, Artificial Sequence
  Description of Artificial Sequence: Synthetic primer
atgaatcatgtttttaattaagatatttgtgtgttttatt

SEQ ID NO: 263 - DNA, 40 bp, Artificial Sequence
  Description of Artificial Sequence: Synthetic primer
tcagataaagttttttaaatgaactctgcaaaatttttag

SEQ ID NO: 264 - DNA, 40 bp, Artificial Sequence
  Description of Artificial Sequence: Synthetic primer
agtagagttctggggccactcccagctctaacaccccttg

SEQ ID NO: 265 - DNA, 40 bp, Artificial Sequence
  Description of Artificial Sequence: Synthetic primer
tccccatctttgtcccctgtgctctgcctggacctcttgg

SEQ ID NO: 266 - DNA, 40 bp, Artificial Sequence
  Description of Artificial Sequence: Synthetic primer
tatgtgctgttgtcacatgttgatacatgtatatttcttg

SEQ ID NO: 267 - DNA, 40 bp, Artificial Sequence
  Description of Artificial Sequence: Synthetic primer
atttccaagtagtcccaccagttagaagtagataaaacag

SEQ ID NO: 268 - DNA, 40 bp, Artificial Sequence
  Description of Artificial Sequence: Synthetic primer
tcagggcagcgacccggtcccctggtgactcgctcttgtg

SEQ ID NO: 269 - DNA, 40 bp, Artificial Sequence
  Description of Artificial Sequence: Synthetic primer
cgcgggccgcccggtacctgtggcgctgagctgcttgtag

SEQ ID NO: 270 - DNA, 40 bp, Artificial Sequence
  Description of Artificial Sequence: Synthetic primer
ttatgttcctgtggaattggtttgaatgcgcccctttttc

SEQ ID NO: 271 - DNA, 40 bp, Artificial Sequence
  Description of Artificial Sequence: Synthetic primer
tgtttcaaagcaaactggaaatgcatcatatcgctcttac

SEQ ID NO: 272 - DNA, 40 bp, Artificial Sequence
  Description of Artificial Sequence: Synthetic primer
tttgttctgtgtagttttcacctacatctgccatcttacg

SEQ ID NO: 273 - DNA, 40 bp, Artificial Sequence
  Description of Artificial Sequence: Synthetic primer
gggaagactgaagacaaagttcttaagggcagaatcaatc

SEQ ID NO: 274 - DNA, 40 bp, Artificial Sequence
  Description of Artificial Sequence: Synthetic primer
cccctgagcctgaatgaagaagcgatgccagggttatgtc

SEQ ID NO: 275 - DNA, 40 bp, Artificial Sequence
  Description of Artificial Sequence: Synthetic primer
agccttctctgatcatctctttggcaatatattttatatc

SEQ ID NO: 276 - DNA, 40 bp, Artificial Sequence
  Description of Artificial Sequence: Synthetic primer
caaaatggtaaaacacaatccttcacgatataaaatgtgg

SEQ ID NO: 277 - DNA, 40 bp, Artificial Sequence
  Description of Artificial Sequence: Synthetic primer
tataactataatatttcgcaagtctgaatcacaacttatt

SEQ ID NO: 278 - DNA, 40 bp, Artificial Sequence
  Description of Artificial Sequence: Synthetic primer
ttctcccaccgccttacctgctgctcattagtaggtggac

SEQ ID NO: 279 - DNA, 40 bp, Artificial Sequence
  Description of Artificial Sequence: Synthetic primer
tgagtttgcagtgattttgctattctaattaaacctgtac

SEQ ID NO: 280 - DNA, 40 bp, Artificial Sequence
  Description of Artificial Sequence: Synthetic primer
gaccaaatattaactaagttatgtatttccttttggcaac

SEQ ID NO: 281 - DNA, 40 bp, Artificial Sequence
  Description of Artificial Sequence: Synthetic primer
acacacacacacacacacaaacacacacacatggcagtag

SEQ ID NO: 282 - DNA, 40 bp, Artificial Sequence
  Description of Artificial Sequence: Synthetic primer
cttaagcaaaagatatcaaacgctgagtccagaaggtaag

SEQ ID NO: 283 - DNA, 40 bp, Artificial Sequence
  Description of Artificial Sequence: Synthetic primer
cttttttcctagtaacaatgcgtcagtttgaccatcctca

SEQ ID NO: 284 - DNA, 40 bp, Artificial Sequence
  Description of Artificial Sequence: Synthetic primer
tggaaaagcagcatgctttaataaggtaatgaataaatgg

SEQ ID NO: 285 - DNA, 40 bp, Artificial Sequence
  Description of Artificial Sequence: Synthetic primer
tgtttgatattcatatgttatctgtaatgtttttctcaag

SEQ ID NO: 286 - DNA, 40 bp, Artificial Sequence
  Description of Artificial Sequence: Synthetic primer
atcatttcactgagatatgcatctattacttttacatttc

SEQ ID NO: 287 - DNA, 40 bp, Artificial Sequence
  Description of Artificial Sequence: Synthetic primer
aggaagagaggggcggtcacacatgggtctgaggctgttc

SEQ ID NO: 288 - DNA, 40 bp, Artificial Sequence
  Description of Artificial Sequence: Synthetic primer
caagcatgtataacggctttcattcccactcttgttttgg

SEQ ID NO: 289 - DNA, 40 bp, Artificial Sequence
  Description of Artificial Sequence: Synthetic primer
aggcaacagaaccggcctgagcagtgggttttgccaactg

SEQ ID NO: 290 - DNA, 40 bp, Artificial Sequence
  Description of Artificial Sequence: Synthetic primer
ctacaatcttttcctcactgagagatctgggtgcatgtag

SEQ ID NO: 291 - DNA, 40 bp, Artificial Sequence
  Description of Artificial Sequence: Synthetic primer
ttgatgctttctgtctatgtgtgtgtgtataggtcagtgg

SEQ ID NO: 292 - DNA, 40 bp, Artificial Sequence
  Description of Artificial Sequence: Synthetic primer
aggcctcctcacttggccctaaccccagcctttgttttcc

SEQ ID NO: 293 - DNA, 40 bp, Artificial Sequence
  Description of Artificial Sequence: Synthetic primer
gtctttcctggtgagagatctggttcccgaaaccctgagg

SEQ ID NO: 294 - DNA, 40 bp, Artificial Sequence
  Description of Artificial Sequence: Synthetic primer
gtcctctgtcaaaacacggccccactccaaataaagcatc

SEQ ID NO: 295 - DNA, 40 bp, Artificial Sequence
  Description of Artificial Sequence: Synthetic primer
gcgactcttccattaccttcacagtacttccagtcattac

SEQ ID NO: 296 - DNA, 40 bp, Artificial Sequence
  Description of Artificial Sequence: Synthetic primer
aagaacatagaaattcctatatgtacatgcatgttttcac

SEQ ID NO: 297 - DNA, 40 bp, Artificial Sequence
  Description of Artificial Sequence: Synthetic primer
aatcatgatagaagtttcaaaggaaactcaatgcccttac

SEQ ID NO: 298 - DNA, 40 bp, Artificial Sequence
  Description of Artificial Sequence: Synthetic primer
tgaataaataagtaattccacccagagattttgaagtgac

SEQ ID NO: 299 - DNA, 40 bp, Artificial Sequence
  Description of Artificial Sequence: Synthetic primer
ggaagagccagctattccatttctcttctagagaaggtcc

SEQ ID NO: 300 - DNA, 40 bp, Artificial Sequence
  Description of Artificial Sequence: Synthetic primer
tgttccagagagctctgggaagacacctggggaggaagag

SEQ ID NO: 301 - DNA, 40 bp, Artificial Sequence
  Description of Artificial Sequence: Synthetic primer
ggggtcggggaggtggctctgaggagtgacctaacttgcg

SEQ ID NO: 302 - DNA, 40 bp, Artificial Sequence
  Description of Artificial Sequence: Synthetic primer
gcaatcacagtggcacagaggaaaagaacagcaagagaac

SEQ ID NO: 303 - DNA, 40 bp, Artificial Sequence
  Description of Artificial Sequence: Synthetic primer
ctttgaatgtttaactgtctggtgcccttctttctctcag

SEQ ID NO: 304 - DNA, 40 bp, Artificial Sequence
  Description of Artificial Sequence: Synthetic primer
attacaggcgtgagcctctgcacccggcccttattgttta

SEQ ID NO: 305 - DNA, 40 bp, Artificial Sequence
  Description of Artificial Sequence: Synthetic primer
caccctaacataaataacaactgaatgcttgccgtgtccc

SEQ ID NO: 306 - DNA, 40 bp, Artificial Sequence
  Description of Artificial Sequence: Synthetic primer
gggcgagtttgcacactcatggtccctctgcctccactgc

SEQ ID NO: 307 - DNA, 40 bp, Artificial Sequence
  Description of Artificial Sequence: Synthetic primer
ccccagccctgctctgcacccctggccgccccctcctcac

SEQ ID NO: 308 - DNA, 40 bp, Artificial Sequence
  Description of Artificial Sequence: Synthetic primer
cctctctgtggtctgatgctctgtatcttcttgcctggac

SEQ ID NO: 309 - DNA, 40 bp, Artificial Sequence
  Description of Artificial Sequence: Synthetic primer
ccatgaacttgtcccacaaaaacctccataaggcggagag

SEQ ID NO: 310 - DNA, 40 bp, Artificial Sequence
  Description of Artificial Sequence: Synthetic primer
caaatgaagtctgaaaatgactatgccagtcaacacactc

SEQ ID NO: 311 - DNA, 40 bp, Artificial Sequence
  Description of Artificial Sequence: Synthetic primer
ccagccgggaagctaactgtcctcctcctttttgtgtttg

SEQ ID NO: 312 - DNA, 40 bp, Artificial Sequence
  Description of Artificial Sequence: Synthetic primer
ctagtttaagaaagtgatatataaacacaagaatttgcag

SEQ ID NO: 313 - DNA, 40 bp, Artificial Sequence
  Description of Artificial Sequence: Synthetic primer
tggaataggcaacatgtttgtgatttactctgttatgatc

SEQ ID NO: 314 - DNA, 40 bp, Artificial Sequence
  Description of Artificial Sequence: Synthetic primer
gccctggcgtcagatgccacgtcacacctgtggtctctcc

SEQ ID NO: 315 - DNA, 40 bp, Artificial Sequence
  Description of Artificial Sequence: Synthetic primer
ggagtgtgggtgccagtacctgtgcaaatctccttctttg

SEQ ID NO: 316 - DNA, 40 bp, Artificial Sequence
  Description of Artificial Sequence: Synthetic primer
tggagatatagactttatttttaaaagattttttttttac

SEQ ID NO: 317 - DNA, 40 bp, Artificial Sequence
  Description of Artificial Sequence: Synthetic primer
catgaaataagagatttctattacatctccaaatgttgca

SEQ ID NO: 318 - DNA, 40 bp, Artificial Sequence
  Description of Artificial Sequence: Synthetic primer
gagtcctccctctcctcccctcctcctcacgacctttctc

SEQ ID NO: 319 - DNA, 40 bp, Artificial Sequence
  Description of Artificial Sequence: Synthetic primer
catggggcttgtagaccccttgaatctgcccctctctcac

SEQ ID NO: 320 - DNA, 40 bp, Artificial Sequence
  Description of Artificial Sequence: Synthetic primer
aagcaagcaggaaccatgtgggctggatttggagctaaag

SEQ ID NO: 321 - DNA, 40 bp, Artificial Sequence
  Description of Artificial Sequence: Synthetic primer
tggtaagatcggtaactttgttactcaaaaactttcttcc

SEQ ID NO: 322 - DNA, 40 bp, Artificial Sequence
  Description of Artificial Sequence: Synthetic primer
tgatcacgcccatcatccactggggaccccacccagtacc

SEQ ID NO: 323 - DNA, 40 bp, Artificial Sequence
  Description of Artificial Sequence: Synthetic primer
ctccttcccagctggacacctctagtgtccccctcacatc

SEQ ID NO: 324 - DNA, 40 bp, Artificial Sequence
  Description of Artificial Sequence: Synthetic primer
ccgctgcggcccttaaccctgtcacttctttccctacctc

SEQ ID NO: 325 - DNA, 40 bp, Artificial Sequence
  Description of Artificial Sequence: Synthetic primer
ttggtgggactggggagcaatcttgatcacggccacttac

SEQ ID NO: 326 - DNA, 40 bp, Artificial Sequence
  Description of Artificial Sequence: Synthetic primer
gtgatggtttcatattttgtttattacccctcttttgtgc

SEQ ID NO: 327 - DNA, 40 bp, Artificial Sequence
  Description of Artificial Sequence: Synthetic primer
aatctcatctattatgttgtgaaggcctcagtggtccagg

SEQ ID NO: 328 - DNA, 40 bp, Artificial Sequence
  Description of Artificial Sequence: Synthetic primer
tgatccctggcaggtgaataaggaagaagagacagatgag

SEQ ID NO: 329 - DNA, 40 bp, Artificial Sequence
  Description of Artificial Sequence: Synthetic primer
ttggttggaggtgcttggctgtcccgcggctccgtgctcc

SEQ ID NO: 330 - DNA, 40 bp, Artificial Sequence
  Description of Artificial Sequence: Synthetic primer
agtctgaacacggtcccgctgagcccggcccctcgctctc

SEQ ID NO: 331 - DNA, 40 bp, Artificial Sequence
  Description of Artificial Sequence: Synthetic primer
gggtagctggcagaccccaagtgcgtacggggcatcaagg

SEQ ID NO: 332 - DNA, 40 bp, Artificial Sequence
  Description of Artificial Sequence: Synthetic primer
gactcggatcctgcctcccagacctggcctttttcttgtc

SEQ ID NO: 333 - DNA, 40 bp, Artificial Sequence
  Description of Artificial Sequence: Synthetic primer
ttcatggaggggagcactcagcacctccctcaccccacac

SEQ ID NO: 334 - DNA, 40 bp, Artificial Sequence
  Description of Artificial Sequence: Synthetic primer
ggaccctaaggatgggaggcacgaaagcagcagtgaggac

SEQ ID NO: 335 - DNA, 40 bp, Artificial Sequence
  Description of Artificial Sequence: Synthetic primer
ccatcatgcttctccccaagtcccactcatacctctctgc

SEQ ID NO: 336 - DNA, 40 bp, Artificial Sequence
  Description of Artificial Sequence: Synthetic primer
tgattttctttttaaacaaaatttcacgtcacatacaaac

SEQ ID NO: 337 - DNA, 40 bp, Artificial Sequence
  Description of Artificial Sequence: Synthetic primer
atgaaaaaatgtaatttgctccctttacctcttatcaata

SEQ ID NO: 338 - DNA, 40 bp, Artificial Sequence
  Description of Artificial Sequence: Synthetic primer
cactgcaaacccgctttcagggatcttgaggctgcaaacc

SEQ ID NO: 339 - DNA, 40 bp, Artificial Sequence
  Description of Artificial Sequence: Synthetic primer
gcaggccagcttcacccttcctaagtccgcttctggtctc

SEQ ID NO: 340 - DNA, 40 bp, Artificial Sequence
  Description of Artificial Sequence: Synthetic primer
taggttcatctcacaatattttttcagacagaatttagtc

SEQ ID NO: 341 - DNA, 40 bp, Artificial Sequence
  Description of Artificial Sequence: Synthetic primer
tcccatcttagaacctttaaaggaaaaaccaaaacttatg

SEQ ID NO: 342 - DNA, 40 bp, Artificial Sequence
  Description of Artificial Sequence: Synthetic primer
tctccaaagctggctctctcattccccagaggccagagtg

SEQ ID NO: 343 - DNA, 40 bp, Artificial Sequence
  Description of Artificial Sequence: Synthetic primer
catcacaaagagggtaaccttgagcccaatctcttgttcc

SEQ ID NO: 344 - DNA, 40 bp, Artificial Sequence
  Description of Artificial Sequence: Synthetic primer
gccagaagctgcaccttctcatgcctccctgatccctgac

SEQ ID NO: 345 - DNA, 40 bp, Artificial Sequence
  Description of Artificial Sequence: Synthetic primer
ggagaggggccctcagggaggtgggtgatggggacagcac

SEQ ID NO: 346 - DNA, 40 bp, Artificial Sequence
  Description of Artificial Sequence: Synthetic primer
tattttaatgtaaccttgctaaaggagtgatttctatttc

SEQ ID NO: 347 - DNA, 40 bp, Artificial Sequence
  Description of Artificial Sequence: Synthetic primer
aggacatttctgttagaaggaatcgttttccttacttttc

SEQ ID NO: 348 - DNA, 40 bp, Artificial Sequence
  Description of Artificial Sequence: Synthetic primer
gtgtcagagtcctgagacagatcagcaacaaccgaaaatg

SEQ ID NO: 349 - DNA, 40 bp, Artificial Sequence
  Description of Artificial Sequence: Synthetic primer
gacgttgtgtgttcgcctcttgacattctcctcggtgtcc

SEQ ID NO: 350 - DNA, 40 bp, Artificial Sequence
  Description of Artificial Sequence: Synthetic primer
cccactgtggggcgggcggagcgccgcgggaggcggacga

SEQ ID NO: 351 - DNA, 40 bp, Artificial Sequence
  Description of Artificial Sequence: Synthetic primer
tggggcagctgcgacgctgccgagccggagcctcactcac

SEQ ID NO: 352 - DNA, 40 bp, Artificial Sequence
  Description of Artificial Sequence: Synthetic primer
cgagctttttaaaagtcggttttcttccccttttgctgta

SEQ ID NO: 353 - DNA, 40 bp, Artificial Sequence
  Description of Artificial Sequence: Synthetic primer
acatatggatcccgagcagcatggacaactgacattttag

SEQ ID NO: 354 - DNA, 40 bp, Artificial Sequence
  Description of Artificial Sequence: Synthetic primer
aagcctttggtcaaaaaacattaaaaatcagatttaaagc

SEQ ID NO: 355 - DNA, 40 bp, Artificial Sequence
  Description of Artificial Sequence: Synthetic primer
gattatttgcataaatttagtctttactctgtcattggtg

SEQ ID NO: 356 - DNA, 40 bp, Artificial Sequence
  Description of Artificial Sequence: Synthetic primer
cgcaaggaaactcaccttccaaagctgcggccaacgaagc

SEQ ID NO: 357 - DNA, 40 bp, Artificial Sequence
  Description of Artificial Sequence: Synthetic primer
ccccaaactcagttcggatcctacccgagtgaggcggcgc

SEQ ID NO: 358 - DNA, 40 bp, Artificial Sequence
  Description of Artificial Sequence: Synthetic primer
ctttgaaatggttcaaacaggtataagttactgtggaaag

SEQ ID NO: 359 - DNA, 40 bp, Artificial Sequence
  Description of Artificial Sequence: Synthetic primer
tgaagaaacagttgtgtattattttgtggttatgtgtttc

SEQ ID NO: 360 - DNA, 40 bp, Artificial Sequence
  Description of Artificial Sequence: Synthetic primer
tttttgaccactgatgataaattcaagtctctcttccttc

SEQ ID NO: 361 - DNA, 40 bp, Artificial Sequence
  Description of Artificial Sequence: Synthetic primer
gtccataggagcgttcactaaatatgatcccccttatctc

SEQ ID NO: 362 - DNA, 40 bp, Artificial Sequence
  Description of Artificial Sequence: Synthetic primer
ctataattgagtgtctgttcagctaccctgtttctttctc

SEQ ID NO: 363 - DNA, 40 bp, Artificial Sequence
  Description of Artificial Sequence: Synthetic primer
agcaaccatccatggaacagtggctggccttgggtcttgc

SEQ ID NO: 364 - DNA, 40 bp, Artificial Sequence
  Description of Artificial Sequence: Synthetic primer
taccagcacttcagtacctggacagtcttcaaaaccaaac

SEQ ID NO: 365 - DNA, 40 bp, Artificial Sequence
  Description of Artificial Sequence: Synthetic primer
atttgtgccagacttgttttaaaatttccctttatttgtc

SEQ ID NO: 366 - DNA, 40 bp, Artificial Sequence
  Description of Artificial Sequence: Synthetic primer
tcactgaagaagcaaactgccttttattaaaaattctttc

SEQ ID NO: 367 - DNA, 40 bp, Artificial Sequence
  Description of Artificial Sequence: Synthetic primer
aaagttataatacatttaataaattaattctaaagtttag

SEQ ID NO: 368 - DNA, 40 bp, Artificial Sequence
  Description of Artificial Sequence: Synthetic primer
ctggaccctagtcccaccacacttgcccctcaccccaccc

SEQ ID NO: 369 - DNA, 40 bp, Artificial Sequence
  Description of Artificial Sequence: Synthetic primer
cgccagcagtctccttccagtgactgaagaagcatccctg

SEQ ID NO: 370 - DNA, 40 bp, Artificial Sequence
  Description of Artificial Sequence: Synthetic primer
aagcatgtataaagtatatatgtttgctcttttgttcttc

SEQ ID NO: 371 - DNA, 40 bp, Artificial Sequence
  Description of Artificial Sequence: Synthetic primer
catttgagaaatatccacttccactatgagcaacggagag

SEQ ID NO: 372 - DNA, 40 bp, Artificial Sequence
  Description of Artificial Sequence: Synthetic primer
gaaacaaataacccgcctttactttctcgtctccatcttc

SEQ ID NO: 373 - DNA, 40 bp, Artificial Sequence
  Description of Artificial Sequence: Synthetic primer
cccgagctgaccagcctgtgtgtgtgttgtcttctgtgac

SEQ ID NO: 374 - DNA, 40 bp, Artificial Sequence
  Description of Artificial Sequence: Synthetic primer
gcatgctgttaaaaatgacagggatggggaacttggaacg

SEQ ID NO: 375 - DNA, 40 bp, Artificial Sequence
  Description of Artificial Sequence: Synthetic primer
cagtcattgattctgaattctcatctttattttcttttgc

SEQ ID NO: 376 - DNA, 40 bp, Artificial Sequence
  Description of Artificial Sequence: Synthetic primer
ctggaaattggtttgtctgttcagcaagtggacagctcag

SEQ ID NO: 377 - DNA, 40 bp, Artificial Sequence
  Description of Artificial Sequence: Synthetic primer
catttcaacctgtccttgggtgggattgcactcttgtttc

SEQ ID NO: 378 - DNA, 40 bp, Artificial Sequence
  Description of Artificial Sequence: Synthetic primer
agaagaattagagtagaagttgtcggggtccgctcttagg

SEQ ID NO: 379 - DNA, 40 bp, Artificial Sequence
  Description of Artificial Sequence: Synthetic primer
ggaatccagccccgaatccctgcaccccaagtcccaacgc

SEQ ID NO: 380 - DNA, 40 bp, Artificial Sequence
  Description of Artificial Sequence: Synthetic primer
caacggaaccgctactcccggacgcgctgggcgtgccccg

SEQ ID NO: 381 - DNA, 40 bp, Artificial Sequence
  Description of Artificial Sequence: Synthetic primer
ctcctccctctgcccctatattcccgaaaccccctcctcc

SEQ ID NO: 382 - DNA, 40 bp, Artificial Sequence
  Description of Artificial Sequence: Synthetic primer
ggggcggtggccccaacgggaaatccgggaaggctgcggg

SEQ ID NO: 383 - DNA, 40 bp, Artificial Sequence
  Description of Artificial Sequence: Synthetic primer
gcccgggcgccatcggcgcgtcctgctccaccagggcgac

SEQ ID NO: 384 - DNA, 40 bp, Artificial Sequence
  Description of Artificial Sequence: Synthetic primer
tggatcttcgggaagttcggggccaaacaggcaccaagag

SEQ ID NO: 385 - DNA, 40 bp, Artificial Sequence
  Description of Artificial Sequence: Synthetic primer
cggaggcctccgcgcgctccccgcgttcctaccttgtggc

SEQ ID NO: 386 - DNA, 40 bp, Artificial Sequence
  Description of Artificial Sequence: Synthetic primer
ggggcggcagcaggaggcgtcgccctggtccccaaggaag

SEQ ID NO: 387 - DNA, 40 bp, Artificial Sequence
  Description of Artificial Sequence: Synthetic primer
cgggcagagccaacccagccctcccgcctgcgaggtcacc

SEQ ID NO: 388 - DNA, 40 bp, Artificial Sequence
  Description of Artificial Sequence: Synthetic primer
catgctccaggcacaggcgggccttgacctctgcttctcc

SEQ ID NO: 389 - DNA, 40 bp, Artificial Sequence
  Description of Artificial Sequence: Synthetic primer
gggttctggaggggctttgaggggctgggtggtgagcagg

SEQ ID NO: 390 - DNA, 40 bp, Artificial Sequence
  Description of Artificial Sequence: Synthetic primer
ttgggcctcccttgaacccctcactgaacccccagggcaa

SEQ ID NO: 391 - DNA, 40 bp, Artificial Sequence
  Description of Artificial Sequence: Synthetic primer
tgcttgtcgctcccttggtaccacatatggtttttcctgc

SEQ ID NO: 392 - DNA, 40 bp, Artificial Sequence
  Description of Artificial Sequence: Synthetic primer
cacacacacatccagaaaaggcctattcttaacgtgctgc

SEQ ID NO: 393 - DNA, 40 bp, Artificial Sequence
  Description of Artificial Sequence: Synthetic primer
aggtcaaccctgacttctgtacttctaaatttttgtcctc

SEQ ID NO: 394 - DNA, 40 bp, Artificial Sequence
  Description of Artificial Sequence: Synthetic primer
aattttaaaaccccacagcagagcccctgtcaaaatgacc

SEQ ID NO: 395 - DNA, 40 bp, Artificial Sequence
  Description of Artificial Sequence: Synthetic primer
tttttaggcattcatagaaattagcaaatagcaaacctac

SEQ ID NO: 396 - DNA, 40 bp, Artificial Sequence
  Description of Artificial Sequence: Synthetic primer
tattggacttaccactaatgtaattgatgtgtttgttttc

SEQ ID NO: 397 - DNA, 40 bp, Artificial Sequence
  Description of Artificial Sequence: Synthetic primer
gagctgaagtattcacataacacagcaataaacaaacatg

SEQ ID NO: 398 - DNA, 40 bp, Artificial Sequence
  Description of Artificial Sequence: Synthetic primer
attcataaatgttcactaatttgttgcctaccagaaccag

SEQ ID NO: 399 - DNA, 40 bp, Artificial Sequence
  Description of Artificial Sequence: Synthetic primer
agaggccgtgtgaaatgacttactgatcatgtttttaacc

SEQ ID NO: 400 - DNA, 40 bp, Artificial Sequence
  Description of Artificial Sequence: Synthetic primer
tcacgctagttgtagaaacagcatctctccccgataaaac

SEQ ID NO: 401 - DNA, 40 bp, Artificial Sequence
  Description of Artificial Sequence: Synthetic primer
tggtttcctgaagctatgttccttaaatttccaaacgaac

SEQ ID NO: 402 - DNA, 40 bp, Artificial Sequence
  Description of Artificial Sequence: Synthetic primer
agtattataaagcatatttttctttgagaaggctaaaaac

SEQ ID NO: 403 - DNA, 40 bp, Artificial Sequence
  Description of Artificial Sequence: Synthetic primer
aatgagtcccattaatttctccctccctttcttcgtcttc

SEQ ID NO: 404 - DNA, 40 bp, Artificial Sequence
  Description of Artificial Sequence: Synthetic primer
caggtctgggtcctcagggctccgcatggtggctgtgtag

SEQ ID NO: 405 - DNA, 40 bp, Artificial Sequence
  Description of Artificial Sequence: Synthetic primer
gacaggaggatggctcttacctacactgtccacaaagagg

SEQ ID NO: 406 - DNA, 40 bp, Artificial Sequence
  Description of Artificial Sequence: Synthetic primer
gggcaggaggatgagccttgagggagggcaccacgctgag

SEQ ID NO: 407 - DNA, 40 bp, Artificial Sequence
  Description of Artificial Sequence: Synthetic primer
cccctcccagacccaccccttccggctgggcgcaccttgc

SEQ ID NO: 408 - DNA, 40 bp, Artificial Sequence
  Description of Artificial Sequence: Synthetic primer
atgtatcatttatactgcaaaagttgtagaaggagggtag

SEQ ID NO: 409 - DNA, 40 bp, Artificial Sequence
  Description of Artificial Sequence: Synthetic primer
ccagctgtgggagagctatccatgttgatgagtcctgttg

SEQ ID NO: 410 - DNA, 40 bp, Artificial Sequence
  Description of Artificial Sequence: Synthetic primer
aagtcctttactttttaccttgaaattaatctatcatatc

SEQ ID NO: 411 - DNA, 40 bp, Artificial Sequence
  Description of Artificial Sequence: Synthetic primer
aaaatgtataatttttactgacagccataaacacatttgc

SEQ ID NO: 412 - DNA, 40 bp, Artificial Sequence
  Description of Artificial Sequence: Synthetic primer
atccttcctacttcatttcttttcttccctcaagtttacg

SEQ ID NO: 413 - DNA, 40 bp, Artificial Sequence
  Description of Artificial Sequence: Synthetic primer
atcttctcaacaccttccccactctatgattatcacttac

SEQ ID NO: 414 - DNA, 40 bp, Artificial Sequence
  Description of Artificial Sequence: Synthetic primer
catggaaaggcctctccctcccttttttctccccactctg

SEQ ID NO: 415 - DNA, 40 bp, Artificial Sequence
  Description of Artificial Sequence: Synthetic primer
caggaagcacttcttggcccctctccacctcccctcctgg

SEQ ID NO: 416 - DNA, 40 bp, Artificial Sequence
  Description of Artificial Sequence: Synthetic primer
ctttctgccaaaattaatgtgctgaacttaaacttaccag

SEQ ID NO: 417 - DNA, 40 bp, Artificial Sequence
  Description of Artificial Sequence: Synthetic primer
ccaatgcaacagactttaaagaagttgtgttttacaatgc

SEQ ID NO: 418 - DNA, 40 bp, Artificial Sequence
  Description of Artificial Sequence: Synthetic primer
atgtattcttagtctccaccttgtttattctgtcattaac

SEQ ID NO: 419 - DNA, 40 bp, Artificial Sequence
  Description of Artificial Sequence: Synthetic primer
ttttctatcattaacctctaatagagaagaagtcaactag

SEQ ID NO: 420 - DNA, 40 bp, Artificial Sequence
  Description of Artificial Sequence: Synthetic primer
gagaactctatgtttttaataccccatctgggacatcgag

SEQ ID NO: 421 - DNA, 40 bp, Artificial Sequence
  Description of Artificial Sequence: Synthetic primer
atctgataagtattaccaggtgttggaggaatgtcataac

SEQ ID NO: 422 - DNA, 40 bp, Artificial Sequence
  Description of Artificial Sequence: Synthetic primer
atttttttcatttttcttaacacattgactttttggttcg

SEQ ID NO: 423 - DNA, 40 bp, Artificial Sequence
  Description of Artificial Sequence: Synthetic primer
ttaactaattttaaattaaacaaatttcacatatgtcatg

SEQ ID NO: 424 - DNA, 40 bp, Artificial Sequence
  Description of Artificial Sequence: Synthetic primer
agaacatgtaggaaacacaaggaagtacaacaaagacaac

SEQ ID NO: 425 - DNA, 40 bp, Artificial Sequence
  Description of Artificial Sequence: Synthetic primer
gttggcttttgaggctatatccacaggcctatttgaaccc

SEQ ID NO: 426 - DNA, 40 bp, Artificial Sequence
  Description of Artificial Sequence: Synthetic primer
ttgagatagataaatctaagtatgagtcatataataatac

SEQ ID NO: 427 - DNA, 40 bp, Artificial Sequence
  Description of Artificial Sequence: Synthetic primer
aatattggcaattattattactaataaactctgttattct

SEQ ID NO: 428 - DNA, 40 bp, Artificial Sequence
  Description of Artificial Sequence: Synthetic primer
gtttagtttattttttaaaattcattattatttgtaatgt

SEQ ID NO: 429 - DNA, 40 bp, Artificial Sequence
  Description of Artificial Sequence: Synthetic primer
tttcattactgtaagaataacaagataatgcaatgaaatt

SEQ ID NO: 430 - DNA, 40 bp, Artificial Sequence
  Description of Artificial Sequence: Synthetic primer
acagtgtttataaataggaataactgtgcgattttcatgg

SEQ ID NO: 431 - DNA, 40 bp, Artificial Sequence
  Description of Artificial Sequence: Synthetic primer
acaaaggaggtgagatgaacttgtccccaaaggcctcctg

SEQ ID NO: 432 - DNA, 40 bp, Artificial Sequence
  Description of Artificial Sequence: Synthetic primer
tcactttttcttcattgacaaattgagtttaactcttttc

SEQ ID NO: 433 - DNA, 40 bp, Artificial Sequence
  Description of Artificial Sequence: Synthetic primer
gtccacgagcctggggccggctcagggtggtcccggcgac

SEQ ID NO: 434 - DNA, 40 bp, Artificial Sequence
  Description of Artificial Sequence: Synthetic primer
cagctaaatcctgtgctgttgaaaaccctcaaggtgacag

SEQ ID NO: 435 - DNA, 40 bp, Artificial Sequence
  Description of Artificial Sequence: Synthetic primer
catgagagaggctaagtcactccgcattcataaaattccc

SEQ ID NO: 436 - DNA, 40 bp, Artificial Sequence
  Description of Artificial Sequence: Synthetic primer
aattgaacaatcgaattgattcttattcttttcttttttg

SEQ ID NO: 437 - DNA, 40 bp, Artificial Sequence
  Description of Artificial Sequence: Synthetic primer
aaatatttgcaggaatattgtttttactaaagaacactgc

SEQ ID NO: 438 - DNA, 40 bp, Artificial Sequence
  Description of Artificial Sequence: Synthetic primer
attttttccaaaatgatctgaattcaccttttcctctacg

SEQ ID NO: 439 - DNA, 40 bp, Artificial Sequence
  Description of Artificial Sequence: Synthetic primer
aggcgcttttgtcatttttggcatcagtgctctctcatcc

SEQ ID NO: 440 - DNA, 40 bp, Artificial Sequence
  Description of Artificial Sequence: Synthetic primer
ctcacctctttgcaccagcccttccctcctgccctatttc

SEQ ID NO: 441 - DNA, 40 bp, Artificial Sequence
  Description of Artificial Sequence: Synthetic primer
tagatttttgaaatattatagggatgatgggtagtcattg

SEQ ID NO: 442 - DNA, 40 bp, Artificial Sequence
  Description of Artificial Sequence: Synthetic primer
ccaaaatggtggtcgaactcaacattcgtgcctggacatc

SEQ ID NO: 443 - DNA, 40 bp, Artificial Sequence
  Description of Artificial Sequence: Synthetic primer
gcgaacctgtgctaacacaaacctcagagcaagcaccatc

SEQ ID NO: 444 - DNA, 40 bp, Artificial Sequence
  Description of Artificial Sequence: Synthetic primer
ctgggagtccttgtcctgtccccactcctttaatctcacc

SEQ ID NO: 445 - DNA, 40 bp, Artificial Sequence
  Description of Artificial Sequence: Synthetic primer
tcccacagggactcctccctgggactcctccccatcaggc

SEQ ID NO: 446 - DNA, 40 bp, Artificial Sequence
  Description of Artificial Sequence: Synthetic primer
actaaagtagtcgttgccagcatctgactgcaatttattc

SEQ ID NO: 447 - DNA, 40 bp, Artificial Sequence
  Description of Artificial Sequence: Synthetic primer
ctacaaaatagaatacatccctgagaaatggcagagaaac

SEQ ID NO: 448 - DNA, 40 bp, Artificial Sequence
  Description of Artificial Sequence: Synthetic primer
gcatgtttgtgacacagtaactaatgctgctcttttgttc

SEQ ID NO: 449 - DNA, 40 bp, Artificial Sequence
  Description of Artificial Sequence: Synthetic primer
aaaaaacaaaatcacgcacggcacgttgctcttttaagtg

SEQ ID NO: 450 - DNA, 40 bp, Artificial Sequence
  Description of Artificial Sequence: Synthetic primer
ggcagcctttataaaagcaaattaacccatgtgggcctta

SEQ ID NO: 451 - DNA, 40 bp, Artificial Sequence
  Description of Artificial Sequence: Synthetic primer
ttacaacaaaaacaagagcttacagtaatgtccgggatgg

SEQ ID NO: 452 - DNA, 40 bp, Artificial Sequence
  Description of Artificial Sequence: Synthetic primer
tgaagggaatgttcaatatacctatgggtgcctggggttc

SEQ ID NO: 453 - DNA, 40 bp, Artificial Sequence
  Description of Artificial Sequence: Synthetic primer
atgttagagtcagttgataaggattgctaaatttgtcttg

SEQ ID NO: 454 - DNA, 40 bp, Artificial Sequence
  Description of Artificial Sequence: Synthetic primer
aggcctacgccatttgctttgccatctccgcattgtccac

SEQ ID NO: 455 - DNA, 40 bp, Artificial Sequence
  Description of Artificial Sequence: Synthetic primer
atgctccattccccactccccacctcttcttcttttctag

SEQ ID NO: 456 - DNA, 40 bp, Artificial Sequence
  Description of Artificial Sequence: Synthetic primer
ggatgaggtattccctacttttcccacaagtcttatattc

SEQ ID NO: 457 - DNA, 40 bp, Artificial Sequence
  Description of Artificial Sequence: Synthetic primer
tccaagaagctagagggcctgggttggtctttaaatcttc

SEQ ID NO: 458 - DNA, 40 bp, Artificial Sequence
  Description of Artificial Sequence: Synthetic primer
ggcccaggcctggctcaccctgccctggccatctgtccgc

SEQ ID NO: 459 - DNA, 40 bp, Artificial Sequence
  Description of Artificial Sequence: Synthetic primer
actccacccctgctcgctccggctccgccccgcccctcac

SEQ ID NO: 460 - DNA, 40 bp, Artificial Sequence
  Description of Artificial Sequence: Synthetic primer
agggaaagaaaaatatcatacaatcaattaaagcaatcac

SEQ ID NO: 461 - DNA, 40 bp, Artificial Sequence
  Description of Artificial Sequence: Synthetic primer
atacagtgaaactgtttagaaactgattaagcattttaac

SEQ ID NO: 462 - DNA, 40 bp, Artificial Sequence
  Description of Artificial Sequence: Synthetic primer
ctccaacatttactagctatgtgattacctggcatgatac

SEQ ID NO: 463 - DNA, 40 bp, Artificial Sequence
  Description of Artificial Sequence: Synthetic primer
tggtagaaaaatgtttagtttaacttgttcacccatctag

SEQ ID NO: 464 - DNA, 40 bp, Artificial Sequence
  Description of Artificial Sequence: Synthetic primer
gatctctaaatgtgtattgatttttgattctcttatcttg

SEQ ID NO: 465 - DNA, 40 bp, Artificial Sequence
  Description of Artificial Sequence: Synthetic primer
ttttttttattttgacccatatgaataatagtaattttgc

SEQ ID NO: 466 - DNA, 40 bp, Artificial Sequence
  Description of Artificial Sequence: Synthetic primer
ctcaaccttcacacaactaagttaagtcctcttcacaaac

SEQ ID NO: 467 - DNA, 40 bp, Artificial Sequence
  Description of Artificial Sequence: Synthetic primer
cagtagccacttctgggaaaggtgggtagtgtggcccaag

SEQ ID NO: 468 - DNA, 40 bp, Artificial Sequence
  Description of Artificial Sequence: Synthetic primer
tcccttctcaactaatatctatgttccctttcctcatttc

SEQ ID NO: 469 - DNA, 40 bp, Artificial Sequence
  Description of Artificial Sequence: Synthetic primer
tttattttgagtaaaaatgataacttctctccaccctctc

SEQ ID NO: 470 - DNA, 40 bp, Artificial Sequence
  Description of Artificial Sequence: Synthetic primer
ttaactgagacagaaaaattacaataaaacacacacaagc

SEQ ID NO: 471 - DNA, 40 bp, Artificial Sequence
  Description of Artificial Sequence: Synthetic primer
aggcaaatagggtgtgattttgttctatattcatcttttg

SEQ ID NO: 472 - DNA, 40 bp, Artificial Sequence
  Description of Artificial Sequence: Synthetic primer
ttgacactcaatatactttatgatcactgaacacctttac

SEQ ID NO: 473 - DNA, 40 bp, Artificial Sequence
  Description of Artificial Sequence: Synthetic primer
cccttgagctccctccctgaccctgcccaccttggtcctc

SEQ ID NO: 474 - DNA, 40 bp, Artificial Sequence
  Description of Artificial Sequence: Synthetic primer
gcccaccgtgggcagctgggaagggagtgggagaagctgg

SEQ ID NO: 475 - DNA, 40 bp, Artificial Sequence
  Description of Artificial Sequence: Synthetic primer
cattaactgacatttagattagagaaaatatacatgaagc

SEQ ID NO: 476 - DNA, 40 bp, Artificial Sequence
  Description of Artificial Sequence: Synthetic primer
gtctgtcacagaatgttgacttttcccaatctgttacata

SEQ ID NO: 477 - DNA, 40 bp, Artificial Sequence
  Description of Artificial Sequence: Synthetic primer
tccactttacttctaaactcaggcaagcacccccacaaac

SEQ ID NO: 478 - DNA, 40 bp, Artificial Sequence
  Description of Artificial Sequence: Synthetic primer
tctattcaagtccttcactcactcattaatcagacttttt

SEQ ID NO: 479 - DNA, 40 bp, Artificial Sequence
  Description of Artificial Sequence: Synthetic primer
cccagccctgcctccaacactccccagctctgcctatctc

SEQ ID NO: 480 - DNA, 40 bp, Artificial Sequence
  Description of Artificial Sequence: Synthetic primer
gtggttggttagggcttctggtctcaccttatttttatcc

SEQ ID NO: 481 - DNA, 40 bp, Artificial Sequence
  Description of Artificial Sequence: Synthetic primer
ctcccatccacggcgcccctggagcagcggcaggcgacag

SEQ ID NO: 482 - DNA, 40 bp, Artificial Sequence
  Description of Artificial Sequence: Synthetic primer
ggccatgcctctgggcctgctgtccttaccgtgtctctgg

SEQ ID NO: 483 - DNA, 40 bp, Artificial Sequence
  Description of Artificial Sequence: Synthetic primer
agccgcagggtcttgacgctgtctctttctctctcttgtc

SEQ ID NO: 484 - DNA, 40 bp, Artificial Sequence
  Description of Artificial Sequence: Synthetic primer
cagttcaaccccgtaacatgcgagaccggcgtaggaaacc

SEQ ID NO: 485 - DNA, 40 bp, Artificial Sequence
  Description of Artificial Sequence: Synthetic primer
aacattaggaaggaaattctgctaagaactagggatgctg

SEQ ID NO: 486 - DNA, 40 bp, Artificial Sequence
  Description of Artificial Sequence: Synthetic primer
atggcactttcccttttctgcagtaactcttttctgtttg

SEQ ID NO: 487 - DNA, 40 bp, Artificial Sequence
  Description of Artificial Sequence: Synthetic primer
tgtgtcctgtgccttgtgattttccactggacaggactgc

SEQ ID NO: 488 - DNA, 40 bp, Artificial Sequence
  Description of Artificial Sequence: Synthetic primer
tcccactcctcccgccgtggacctcacctgaccctctctc

SEQ ID NO: 489 - DNA, 40 bp, Artificial Sequence
  Description of Artificial Sequence: Synthetic primer
gatattagttgagaagggaaaggtaacatccccctttagc

SEQ ID NO: 490 - DNA, 40 bp, Artificial Sequence
  Description of Artificial Sequence: Synthetic primer
cccattatcctgcagatgtgcttttccagactgatccaac

SEQ ID NO: 491 - DNA, 40 bp, Artificial Sequence
  Description of Artificial Sequence: Synthetic primer
tgtgtggtgcagaggagaaagagaaggattggggtttgag

SEQ ID NO: 492 - DNA, 40 bp, Artificial Sequence
  Description of Artificial Sequence: Synthetic primer
catgccatgtgtagctctaacactctctgttgttttgtcc

SEQ ID NO: 493 - DNA, 40 bp, Artificial Sequence
  Description of Artificial Sequence: Synthetic primer
gtatgttgaggtctccccgtctccgatcactgacctctgc

SEQ ID NO: 494 - DNA, 40 bp, Artificial Sequence
  Description of Artificial Sequence: Synthetic primer
atgccacaaggccccaggctgtgtccccaaggctgtgctc

SEQ ID NO: 495 - DNA, 40 bp, Artificial Sequence
  Description of Artificial Sequence: Synthetic primer
ttacatactcagtagacaacataaagcctcataattactc

SEQ ID NO: 496 - DNA, 40 bp, Artificial Sequence
  Description of Artificial Sequence: Synthetic primer
ttaaaaaattctgttaagagacccaaaacatagtatttct

SEQ ID NO: 497 - DNA, 40 bp, Artificial Sequence
  Description of Artificial Sequence: Synthetic primer
cctcagagagtcttcccacccaacttgagtccccacactg

SEQ ID NO: 498 - DNA, 40 bp, Artificial Sequence
  Description of Artificial Sequence: Synthetic primer
gactccctctgataactaattcctggggttggtcctccag

SEQ ID NO: 499 - DNA, 40 bp, Artificial Sequence
  Description of Artificial Sequence: Synthetic primer
atttggatgctccgttaaagcttgctccttcatgttcttg

SEQ ID NO: 500 - DNA, 40 bp, Artificial Sequence
  Description of Artificial Sequence: Synthetic primer
tttatttgaagaatacaacagaagtataagaatggctgtc

SEQ ID NO: 501 - DNA, 40 bp, Artificial Sequence
  Description of Artificial Sequence: Synthetic primer
cccaccctgctttttctgcctttacctatggtttcctatc

SEQ ID NO: 502 - DNA, 40 bp, Artificial Sequence
  Description of Artificial Sequence: Synthetic primer
agcaaaaagcattcaaatgcagcgtatcactacatagacc

SEQ ID NO: 503 - DNA, 40 bp, Artificial Sequence
  Description of Artificial Sequence: Synthetic primer
tgacactgcggtgccttgcagattaggtgagctttcaatc

SEQ ID NO: 504 - DNA, 40 bp, Artificial Sequence
  Description of Artificial Sequence: Synthetic primer
tatgatcttcatgtttgtttggtttgttaacaattttttc

SEQ ID NO: 505 - DNA, 40 bp, Artificial Sequence
  Description of Artificial Sequence: Synthetic primer
ggccctgagcagcctgcagctgccctcttaaccccctctg

SEQ ID NO: 506 - DNA, 40 bp, Artificial Sequence
  Description of Artificial Sequence: Synthetic primer
atcctggccctgtggccctgggcaaatcccaccctgcagg

SEQ ID NO: 507 - DNA, 40 bp, Artificial Sequence
  Description of Artificial Sequence: Synthetic primer
tgcactacatttaaggcattccaactgcctctgcacaatg

SEQ ID NO: 508 - DNA, 40 bp, Artificial Sequence
  Description of Artificial Sequence: Synthetic primer
gcaagatgatagtgagctgtaccaagttaaatcaccattc

SEQ ID NO: 509 - DNA, 40 bp, Artificial Sequence
  Description of Artificial Sequence: Synthetic primer
gttagcatctaataagtcataaaaagaaacttaagaaaaa

SEQ ID NO: 510 - DNA, 40 bp, Artificial Sequence
  Description of Artificial Sequence: Synthetic primer
tcagtgtgttaaatgtacagtatatgatgtttaaacatgc

SEQ ID NO: 511 - DNA, 40 bp, Artificial Sequence
  Description of Artificial Sequence: Synthetic primer
aagctgtattctgtttacagtggataattgtgtctttctc

SEQ ID NO: 512 - DNA, 40 bp, Artificial Sequence
  Description of Artificial Sequence: Synthetic primer
atgaagtcaattaagtttgagctgatgatttaagacagtg

SEQ ID NO: 513 - DNA, 40 bp, Artificial Sequence
  Description of Artificial Sequence: Synthetic primer
ccactggttagtgtggagatcctagattacagataagaac

SEQ ID NO: 514 - DNA, 40 bp, Artificial Sequence
  Description of Artificial Sequence: Synthetic primer
taggcgtaatggcaactctggtaataatgtttctaaaagc

SEQ ID NO: 515 - DNA, 40 bp, Artificial Sequence
  Description of Artificial Sequence: Synthetic primer
gaagctttgaggcctgggtctgcagggactctgtgagctg

SEQ ID NO: 516 - DNA, 40 bp, Artificial Sequence
  Description of Artificial Sequence: Synthetic primer
gtcctccagctcattcctcctgcctcctccgtggcctcag

SEQ ID NO: 517 - DNA, 40 bp, Artificial Sequence
  Description of Artificial Sequence: Synthetic primer
agaagttacagttgtgcaaagcttcaacactggctttttc

SEQ ID NO: 518 - DNA, 40 bp, Artificial Sequence
  Description of Artificial Sequence: Synthetic primer
tgagcatcctgtttctactgtagttgatctgcataattgg

SEQ ID NO: 519 - DNA, 40 bp, Artificial Sequence
  Description of Artificial Sequence: Synthetic primer
gcatcccacatcacctgacttaccttggtgtcctcctttg

SEQ ID NO: 520 - DNA, 40 bp, Artificial Sequence
  Description of Artificial Sequence: Synthetic primer
gtcagtgacatgataccagcagattaaatcaaccactcac

SEQ ID NO: 521 - DNA, 40 bp, Artificial Sequence
  Description of Artificial Sequence: Synthetic primer
aggcacttgatgatactcactgtccatcagcctccagttc

SEQ ID NO: 522 - DNA, 40 bp, Artificial Sequence
  Description of Artificial Sequence: Synthetic primer
gagttagtaactcctgtggtgagtggctctgtcccatttc

SEQ ID NO: 523 - DNA, 40 bp, Artificial Sequence
  Description of Artificial Sequence: Synthetic primer
ccccagcccgtggccatctcagcctgttgtctttctgttc

SEQ ID NO: 524 - DNA, 40 bp, Artificial Sequence
  Description of Artificial Sequence: Synthetic primer
aatacttaccaaaagctaaaactacaattttccaaaacag

SEQ ID NO: 525 - DNA, 40 bp, Artificial Sequence
  Description of Artificial Sequence: Synthetic primer
tcttactagataagcacagatacttcaaactagacactgc

SEQ ID NO: 526 - DNA, 40 bp, Artificial Sequence
  Description of Artificial Sequence: Synthetic primer
cttaaagtcaaactaacctgagactttatttttccaccag

SEQ ID NO: 527 - DNA, 40 bp, Artificial Sequence
  Description of Artificial Sequence: Synthetic primer
tcttttataactggtaaagagacgtgggaaatgaatttta

SEQ ID NO: 528 - DNA, 40 bp, Artificial Sequence
  Description of Artificial Sequence: Synthetic primer
gaaatagcctcacagtctggcacttcatattaatacctcc

SEQ ID NO: 529 - DNA, 40 bp, Artificial Sequence
  Description of Artificial Sequence: Synthetic primer
agtcatccttacatatttaatctgcaaacatgcagttctc

SEQ ID NO: 530 - DNA, 40 bp, Artificial Sequence
  Description of Artificial Sequence: Synthetic primer
tacttcccagcatagcgtgggatttccttaggtaggtatc

SEQ ID NO: 531 - DNA, 40 bp, Artificial Sequence
  Description of Artificial Sequence: Synthetic primer
ctcatccagcctccccggagcacagacctgggtggctatg

SEQ ID NO: 532 - DNA, 40 bp, Artificial Sequence
  Description of Artificial Sequence: Synthetic primer
ctggggtgaggggtggggagtgtggcagggctgccctgac

SEQ ID NO: 533 - DNA, 40 bp, Artificial Sequence
  Description of Artificial Sequence: Synthetic primer
agacttgatagggtgaaagaatggtgatggcaaacacttg

SEQ ID NO: 534 - DNA, 40 bp, Artificial Sequence
  Description of Artificial Sequence: Synthetic primer
cctcttcctcccctacgtttgccaaaggggtgaaaaatac

SEQ ID NO: 535 - DNA, 40 bp, Artificial Sequence
  Description of Artificial Sequence: Synthetic primer
aggccccagatttctcctgcattcatgggaaattgacatg

SEQ ID NO: 536 - DNA, 40 bp, Artificial Sequence
  Description of Artificial Sequence: Synthetic primer
caccctgctttcagttttaccacgtttcttctccctccac

SEQ ID NO: 537 - DNA, 40 bp, Artificial Sequence
  Description of Artificial Sequence: Synthetic primer
tatagtcgcgatgataaggtgataaggagggtggcgtgag

SEQ ID NO: 538 - DNA, 40 bp, Artificial Sequence
  Description of Artificial Sequence: Synthetic primer
tgttaatatatatacatctctctctttcctgattccatcc

SEQ ID NO: 539 - DNA, 40 bp, Artificial Sequence
  Description of Artificial Sequence: Synthetic primer
atattttaattgggcctttttagttaagagtttttatttc

SEQ ID NO: 540 - DNA, 40 bp, Artificial Sequence
  Description of Artificial Sequence: Synthetic primer
aagaattacaaattagtctttgggctgatcttcttaggtc

SEQ ID NO: 541 - DNA, 40 bp, Artificial Sequence
  Description of Artificial Sequence: Synthetic primer
actcatagacttttctggtaaattaatagttaatatacat

SEQ ID NO: 542 - DNA, 40 bp, Artificial Sequence
  Description of Artificial Sequence: Synthetic primer
gatttttcagcataaatataacatttactgcttttttccc

SEQ ID NO: 543 - DNA, 40 bp, Artificial Sequence
  Description of Artificial Sequence: Synthetic primer
aggccggggaaagcaggagggagaggggccgccgggctgg

SEQ ID NO: 544 - DNA, 40 bp, Artificial Sequence
  Description of Artificial Sequence: Synthetic primer
ggccggggacccgagcatccggaggggtcctggctcctgg

SEQ ID NO: 545 - DNA, 40 bp, Artificial Sequence
  Description of Artificial Sequence: Synthetic primer
ttcaggctccagtgatacttttgtgctctcaaggaaagac

SEQ ID NO: 546 - DNA, 40 bp, Artificial Sequence
  Description of Artificial Sequence: Synthetic primer
aatgagtgggccaatatggcaattgattgttctcatcttc

SEQ ID NO: 547 - DNA, 40 bp, Artificial Sequence
  Description of Artificial Sequence: Synthetic primer
aaccttttttacatcaattactagaagaaacagtgtaacg

SEQ ID NO: 548 - DNA, 40 bp, Artificial Sequence
  Description of Artificial Sequence: Synthetic primer
ttgtgatatttcacattctcatggtcttctccttttacag

SEQ ID NO: 549 - DNA, 40 bp, Artificial Sequence
  Description of Artificial Sequence: Synthetic primer
ctagccccggtcgtcgggagggcgctgagccacactgagc

SEQ ID NO: 550 - DNA, 40 bp, Artificial Sequence
  Description of Artificial Sequence: Synthetic primer
cagggcagaggaggaggaggactggaaagtggggtcgagg

SEQ ID NO: 551 - DNA, 40 bp, Artificial Sequence
  Description of Artificial Sequence: Synthetic primer
agcctgagacactattcagtcctgccttcctgcccccttg

SEQ ID NO: 552 - DNA, 40 bp, Artificial Sequence
  Description of Artificial Sequence: Synthetic primer
tgggaccaactcaaaggagacctggtgtggttgtcaatac

SEQ ID NO: 553 - DNA, 40 bp, Artificial Sequence
  Description of Artificial Sequence: Synthetic primer
tccccttcagcttctcttcacgcactccaagatctaaacc

SEQ ID NO: 554 - DNA, 40 bp, Artificial Sequence
  Description of Artificial Sequence: Synthetic primer
aaccaacaaagcttaaccccatcatcccctaacccaatag

SEQ ID NO: 555 - DNA, 40 bp, Artificial Sequence
  Description of Artificial Sequence: Synthetic primer
tgagtgttttgttttatccagaaatgcaataaaaattcag

SEQ ID NO: 556 - DNA, 40 bp, Artificial Sequence
  Description of Artificial Sequence: Synthetic primer
tttttgacaagacctttgattccttttgtaaacttacgcc

SEQ ID NO: 557 - DNA, 40 bp, Artificial Sequence
  Description of Artificial Sequence: Synthetic primer
tttttttctctctctctgctgatgctctagcttagatgtc

SEQ ID NO: 558 - DNA, 40 bp, Artificial Sequence
  Description of Artificial Sequence: Synthetic primer
ctctctccccatctctgtgtgatgcccctctctgacttgc

SEQ ID NO: 559 - DNA, 40 bp, Artificial Sequence
  Description of Artificial Sequence: Synthetic primer
ttttgtaaggggtccttaaaaatcatagatatcgtaaaag

SEQ ID NO: 560 - DNA, 40 bp, Artificial Sequence
  Description of Artificial Sequence: Synthetic primer
atttcaaataacagaatacattctgaattcaaaaatgatc

SEQ ID NO: 561 - DNA, 40 bp, Artificial Sequence
  Description of Artificial Sequence: Synthetic primer
ccgccctacctggcaccctgaccctggtcacggcctctcc

SEQ ID NO: 562 - DNA, 40 bp, Artificial Sequence
  Description of Artificial Sequence: Synthetic primer
tgcccgtggagctcccgcaggcccgcccagccctgtagtg

SEQ ID NO: 563 - DNA, 40 bp, Artificial Sequence
  Description of Artificial Sequence: Synthetic primer
aagctcaagtttgaaataatctccgtctgtcccctacctc

SEQ ID NO: 564 - DNA, 40 bp, Artificial Sequence
  Description of Artificial Sequence: Synthetic primer
ttctcttaaataaagtgagaacatttctatactggataca

SEQ ID NO: 565 - DNA, 40 bp, Artificial Sequence
  Description of Artificial Sequence: Synthetic primer
gcccaagccaaaggggaagggataaattggtaatgacaag

SEQ ID NO: 566 - DNA, 40 bp, Artificial Sequence
  Description of Artificial Sequence: Synthetic primer
tggctcctttgcttcactaagctatactgggatcttttcc

SEQ ID NO: 567 - DNA, 40 bp, Artificial Sequence
  Description of Artificial Sequence: Synthetic primer
ggtcttggtgatacagaaatgccctaattttcagaccaac

SEQ ID NO: 568 - DNA, 40 bp, Artificial Sequence
  Description of Artificial Sequence: Synthetic primer
cccaaattcttctaaacctgtataatatttacttcttccc

SEQ ID NO: 569 - DNA, 40 bp, Artificial Sequence
  Description of Artificial Sequence: Synthetic primer
gtgtagccttcaggaatgggatagtgaccctttcccttgc

SEQ ID NO: 570 - DNA, 40 bp, Artificial Sequence
  Description of Artificial Sequence: Synthetic primer
ttttctcccacactgcctgccctgtgattatgccactgcc

SEQ ID NO: 571 - DNA, 40 bp, Artificial Sequence
  Description of Artificial Sequence: Synthetic primer
gttcattctaatttattttcttgggcatattgctaagttg

SEQ ID NO: 572 - DNA, 40 bp, Artificial Sequence
  Description of Artificial Sequence: Synthetic primer
aaaacaaagcaaatcataacagcacaataatttatgcaaa

SEQ ID NO: 573 - DNA, 40 bp, Artificial Sequence
  Description of Artificial Sequence: Synthetic primer
acattgctatggaggacaggtataaaggaaacacaattag

SEQ ID NO: 574 - DNA, 40 bp, Artificial Sequence
  Description of Artificial Sequence: Synthetic primer
acattttgtacatagtcttctgtgagctccaaaccaagtg

SEQ ID NO: 575 - DNA, 40 bp, Artificial Sequence
  Description of Artificial Sequence: Synthetic primer
agtgacacccgctagggttatgggttctaggcacagagtg

SEQ ID NO: 576 - DNA, 40 bp, Artificial Sequence
  Description of Artificial Sequence: Synthetic primer
aatccaggtaagacacccacctgactgaccgggccttgcc

SEQ ID NO: 577 - DNA, 40 bp, Artificial Sequence
  Description of Artificial Sequence: Synthetic primer
cctccccactgctctccggcattctcgcagttggctttgc

SEQ ID NO: 578 - DNA, 40 bp, Artificial Sequence
  Description of Artificial Sequence: Synthetic primer
tgttaaattgcctgtgttggaagacagctaaaatgatgac

SEQ ID NO: 579 - DNA, 40 bp, Artificial Sequence
  Description of Artificial Sequence: Synthetic primer
cttacaaagtatgtcttaaactgttatggaaataaggatg

SEQ ID NO: 580 - DNA, 40 bp, Artificial Sequence
  Description of Artificial Sequence: Synthetic primer
gaaattattcttttctaatgtatgtatcacttctcctttc

SEQ ID NO: 581 - DNA, 40 bp, Artificial Sequence
  Description of Artificial Sequence: Synthetic primer
gtgtgagccacgatgcccagtcaatcttgtgtaattttta

SEQ ID NO: 582 - DNA, 40 bp, Artificial Sequence
  Description of Artificial Sequence: Synthetic primer
taaaatttaaatttggctacatctcttcttgattttctag

SEQ ID NO: 583 - DNA, 40 bp, Artificial Sequence
  Description of Artificial Sequence: Synthetic primer
agctgcatgaaacattttttattttgcttctttcacattg

SEQ ID NO: 584 - DNA, 40 bp, Artificial Sequence
  Description of Artificial Sequence: Synthetic primer
ccctctctcgatccccttcttcctaagcagcgccaggagg

SEQ ID NO: 585 - DNA, 40 bp, Artificial Sequence
  Description of Artificial Sequence: Synthetic primer
ggctcaccctgctgccccacacgccccacccgcctgggcg

SEQ ID NO: 586 - DNA, 40 bp, Artificial Sequence
  Description of Artificial Sequence: Synthetic primer
cggcacggcagggccggggtgtggcgggcttgggccactg

SEQ ID NO: 587 - DNA, 40 bp, Artificial Sequence
  Description of Artificial Sequence: Synthetic primer
ccagagctctctgtgaccctgggtcctcaccctgcccttc

SEQ ID NO: 588 - DNA, 40 bp, Artificial Sequence
  Description of Artificial Sequence: Synthetic primer
ccatccctctctgcccaccagagactccaagctggtcacc

SEQ ID NO: 589 - DNA, 40 bp, Artificial Sequence
  Description of Artificial Sequence: Synthetic primer
atgagcgagcgcagcgccatggctgccgtgctggccatgc

SEQ ID NO: 590 - DNA, 40 bp, Artificial Sequence
  Description of Artificial Sequence: Synthetic primer
ccggggagacctcgaggaggcggcacaggtcacgcatggc

SEQ ID NO: 591 - DNA, 40 bp, Artificial Sequence
  Description of Artificial Sequence: Synthetic primer
attgtcatcggttccttcaatttgcgcaaggacaaaggtc

SEQ ID NO: 592 - DNA, 40 bp, Artificial Sequence
  Description of Artificial Sequence: Synthetic primer
acaccagagatatttacagcgtttaaaatacattgattat

SEQ ID NO: 593 - DNA, 40 bp, Artificial Sequence
  Description of Artificial Sequence: Synthetic primer
aggcccctgagtggctgtcctcacctgccctgtccttctg

SEQ ID NO: 594 - DNA, 40 bp, Artificial Sequence
  Description of Artificial Sequence: Synthetic primer
ggggtgaccagcatctctgggaccctcacactcccaacgc

SEQ ID NO: 595 - DNA, 40 bp, Artificial Sequence
  Description of Artificial Sequence: Synthetic primer
cgggtgattcctcaacctcttgatttatttaattcttttc

SEQ ID NO: 596 - DNA, 40 bp, Artificial Sequence
  Description of Artificial Sequence: Synthetic primer
agcaagccctgggcgctaggagacagggacaggctgtggc

SEQ ID NO: 597 - DNA, 40 bp, Artificial Sequence
  Description of Artificial Sequence: Synthetic primer
tttaatattatacaatacatttaaataggaaagtttactg

SEQ ID NO: 598 - DNA, 40 bp, Artificial Sequence
  Description of Artificial Sequence: Synthetic primer
taactgtgaaaagtacacatcattaataacaaatacctcc

SEQ ID NO: 599 - DNA, 40 bp, Artificial Sequence
  Description of Artificial Sequence: Synthetic primer
gaccaagcgcaaggcgcgatatagagtatccttgcactcc

SEQ ID NO: 600 - DNA, 40 bp, Artificial Sequence
  Description of Artificial Sequence: Synthetic primer
cctccccagccacaaagagtctacatgtctagggtctaga

SEQ ID NO: 601 - DNA, 40 bp, Artificial Sequence
  Description of Artificial Sequence: Synthetic primer
tatggttttttattactaattggtatttcatcttaacttg

SEQ ID NO: 602 - DNA, 40 bp, Artificial Sequence
  Description of Artificial Sequence: Synthetic primer
aatttcttttatacttacaatgcatactattatatttcat

SEQ ID NO: 603 - DNA, 40 bp, Artificial Sequence
  Description of Artificial Sequence: Synthetic primer
cccctttgcctcgggccttcggcgacgtcagcaccgtctc

SEQ ID NO: 604 - DNA, 40 bp, Artificial Sequence
  Description of Artificial Sequence: Synthetic primer
cagagctgcccaccacagaccccgccactaaccatgaatg

SEQ ID NO: 605 - DNA, 40 bp, Artificial Sequence
  Description of Artificial Sequence: Synthetic primer
atgaatacagcctacttcatccaaaatagccaacatttcc

SEQ ID NO: 606 - DNA, 40 bp, Artificial Sequence
  Description of Artificial Sequence: Synthetic primer
gatcctgggtttcttttcaacttgtaatagtgttgtattc

SEQ ID NO: 607 - DNA, 40 bp, Artificial Sequence
  Description of Artificial Sequence: Synthetic primer
ggtgggaagtccagcttgggtccctgagagctgtgagaag

SEQ ID NO: 608 - DNA, 40 bp, Artificial Sequence
  Description of Artificial Sequence: Synthetic primer
ggtgcccactcttcccacccctgccaccctctcccacctc

SEQ ID NO: 609 - DNA, 40 bp, Artificial Sequence
  Description of Artificial Sequence: Synthetic primer
ctgtggcgagaggctggctttggagatcaaggtgggaacc

SEQ ID NO: 610 - DNA, 40 bp, Artificial Sequence
  Description of Artificial Sequence: Synthetic primer
gtgctgaggccggcccctgccaggaggccaggtccttacc

SEQ ID NO: 611 - DNA, 40 bp, Artificial Sequence
  Description of Artificial Sequence: Synthetic primer
aagcaaaattttaataatttacattttttttctccattac

SEQ ID NO: 612 - DNA, 40 bp, Artificial Sequence
  Description of Artificial Sequence: Synthetic primer
ctattccaaagtgaggtatgctgattctaagtaaataaac

SEQ ID NO: 613 - DNA, 40 bp, Artificial Sequence
  Description of Artificial Sequence: Synthetic primer
ccctctctgactccccataagtgcccctctccccaccccc

SEQ ID NO: 614 - DNA, 40 bp, Artificial Sequence
  Description of Artificial Sequence: Synthetic primer
gtggggctgggcatggggctggtgtgccctgttgcttccc

SEQ ID NO: 615 - DNA, 40 bp, Artificial Sequence
  Description of Artificial Sequence: Synthetic primer
ctcataaatatgtaaactaaaggaaattgtggaaactaac

SEQ ID NO: 616 - DNA, 40 bp, Artificial Sequence
  Description of Artificial Sequence: Synthetic primer
cctaaaaggcagacctcactagaacaacccagtctacccc

SEQ ID NO: 617 - DNA, 40 bp, Artificial Sequence
  Description of Artificial Sequence: Synthetic primer
tggtgtgtgtgtgtggtgtgtatatctgtctatcctcaag

SEQ ID NO: 618 - DNA, 40 bp, Artificial Sequence
  Description of Artificial Sequence: Synthetic primer
aaaagttcatatgctttttcttttccccttccttcctaac

SEQ ID NO: 619 - DNA, 40 bp, Artificial Sequence
  Description of Artificial Sequence: Synthetic primer
cccggccatcatggccaaaggtgaccaggaggggccggag

SEQ ID NO: 620 - DNA, 40 bp, Artificial Sequence
  Description of Artificial Sequence: Synthetic primer
agcatgtcaggattagccgatcgttacctcaagggagtgg

SEQ ID NO: 621 - DNA, 40 bp, Artificial Sequence
  Description of Artificial Sequence: Synthetic primer
tatcctttcgaagaaccactaaaacacaatttcaattcac

SEQ ID NO: 622 - DNA, 40 bp, Artificial Sequence
  Description of Artificial Sequence: Synthetic primer
tttatcaaagtaatttcatgagaaattctaactaatcatg

SEQ ID NO: 623 - DNA, 40 bp, Artificial Sequence
  Description of Artificial Sequence: Synthetic primer
ctcggccatccaggcagtgctgccgggactgagctcggtg

SEQ ID NO: 624 - DNA, 40 bp, Artificial Sequence
  Description of Artificial Sequence: Synthetic primer
agaaaccagggtgaaatgggccggccctggggaggggagg

SEQ ID NO: 625 - DNA, 40 bp, Artificial Sequence
  Description of Artificial Sequence: Synthetic primer
tgttggcgcagcctctggcacaggcactgcccccatgacg

SEQ ID NO: 626 - DNA, 40 bp, Artificial Sequence
  Description of Artificial Sequence: Synthetic primer
cgggacaggcgccccgagacgcacatgcgggatggtcagg

SEQ ID NO: 627 - DNA, 40 bp, Artificial Sequence
  Description of Artificial Sequence: Synthetic primer
gagggtgtctccccttttctgctccccagatctccccatc

SEQ ID NO: 628 - DNA, 40 bp, Artificial Sequence
  Description of Artificial Sequence: Synthetic primer
ctcagctgctcggggcctcctaaccctgagttcccctttg

SEQ ID NO: 629 - DNA, 40 bp, Artificial Sequence
  Description of Artificial Sequence: Synthetic primer
aatgccgctattaagactctcatatcttctgttttctctc

SEQ ID NO: 630 - DNA, 40 bp, Artificial Sequence
  Description of Artificial Sequence: Synthetic primer
tatattcttatattcttttctgctctacctgtgcctctac

SEQ ID NO: 631 - DNA, 40 bp, Artificial Sequence
  Description of Artificial Sequence: Synthetic primer
cgccctgcacgttcccgtggtggggtgtcccggggaatct

SEQ ID NO: 632 - DNA, 40 bp, Artificial Sequence
  Description of Artificial Sequence: Synthetic primer
atagcttgtccttgttctcctaaaatagatcctaaaatag

SEQ ID NO: 633 - DNA, 40 bp, Artificial Sequence
  Description of Artificial Sequence: Synthetic primer
gatgccctgaatgccacgcgcatgccttgggtctgtctcc

SEQ ID NO: 634 - DNA, 40 bp, Artificial Sequence
  Description of Artificial Sequence: Synthetic primer
gcctcacctcctctctgggattctgcctgtggggtgcagg

SEQ ID NO: 635 - DNA, 40 bp, Artificial Sequence
  Description of Artificial Sequence: Synthetic primer
tttatctgtatcaaagaatggtcctgcaccagtaatatgc

SEQ ID NO: 636 - DNA, 40 bp, Artificial Sequence
  Description of Artificial Sequence: Synthetic primer
tgacatgttctaatatagtcacattttcattatttttatt

SEQ ID NO: 637 - DNA, 40 bp, Artificial Sequence
  Description of Artificial Sequence: Synthetic primer
cagacccctgcccaggccgtgccagctgaatccccacaag

SEQ ID NO: 638 - DNA, 40 bp, Artificial Sequence
  Description of Artificial Sequence: Synthetic primer
cagggctgggccctgctgtgacagatcctgccttctccag

SEQ ID NO: 639 - DNA, 40 bp, Artificial Sequence
  Description of Artificial Sequence: Synthetic primer
tggctctgaaaccacccttgccaccctcattcctgtgtag

SEQ ID NO: 640 - DNA, 40 bp, Artificial Sequence
  Description of Artificial Sequence: Synthetic primer
caccatgccatgtgaaacacgtctctccaaattgtttttg

SEQ ID NO: 641 - DNA, 40 bp, Artificial Sequence
  Description of Artificial Sequence: Synthetic primer
agctacatgttgtttgctggtcctattctaaaagccagag

SEQ ID NO: 642 - DNA, 40 bp, Artificial Sequence
  Description of Artificial Sequence: Synthetic primer
gaactgaactagctaggaggtcgaggcagcaaaggctcag

SEQ ID NO: 643 - DNA, 40 bp, Artificial Sequence
  Description of Artificial Sequence: Synthetic primer
ctggagagaaaggaggaggaaggaaggaggagaccctcag

SEQ ID NO: 644 - DNA, 40 bp, Artificial Sequence
  Description of Artificial Sequence: Synthetic primer
tggaggatgaggtgctacttcagctgtgtgtgtgtctatg

SEQ ID NO: 645 - DNA, 40 bp, Artificial Sequence
  Description of Artificial Sequence: Synthetic primer
gcttctctaacatgattctttcgtgaatgttgtcgtaatg

SEQ ID NO: 646 - DNA, 40 bp, Artificial Sequence
  Description of Artificial Sequence: Synthetic primer
ccacagaaaaacaaacaaacttgtagtttaaggatattac

SEQ ID NO: 647 - DNA, 40 bp, Artificial Sequence
  Description of Artificial Sequence: Synthetic primer
atgacacattggccatttgtaccaagctctaaattgaatc

SEQ ID NO: 648 - DNA, 40 bp, Artificial Sequence
  Description of Artificial Sequence: Synthetic primer
gtttttgttgcctctgatttaacattttatatttcttttg

SEQ ID NO: 649 - DNA, 40 bp, Artificial Sequence
  Description of Artificial Sequence: Synthetic primer
cagggatttctgatataatgctttctggaaacatggattg

SEQ ID NO: 650 - DNA, 40 bp, Artificial Sequence
  Description of Artificial Sequence: Synthetic primer
aaatcaaattccaaaattggttaaattgaggatacttacg

SEQ ID NO: 651 - DNA, 40 bp, Artificial Sequence
  Description of Artificial Sequence: Synthetic primer
caacgggtccccagcccagctgcgaggccgtgcctgacca

SEQ ID NO: 652 - DNA, 40 bp, Artificial Sequence
  Description of Artificial Sequence: Synthetic primer
ttgtaaggccacagcagcagcctctctccggtcccctcag

SEQ ID NO: 653 - DNA, 40 bp, Artificial Sequence
  Description of Artificial Sequence: Synthetic primer
aagaggtgggaggagaaattagagaactagagaaacaagg

SEQ ID NO: 654 - DNA, 40 bp, Artificial Sequence
  Description of Artificial Sequence: Synthetic primer
gttcctgataatggcgtgcttgtgattcttttcctctctc

SEQ ID NO: 655 - DNA, 40 bp, Artificial Sequence
  Description of Artificial Sequence: Synthetic primer
agcctgcccacctcgtcaccaacacccctgcttcccttgc

SEQ ID NO: 656 - DNA, 40 bp, Artificial Sequence
  Description of Artificial Sequence: Synthetic primer
agcaacagacccctctctcctgctcccctgcagcctctgc

SEQ ID NO: 657 - DNA, 40 bp, Artificial Sequence
  Description of Artificial Sequence: Synthetic primer
ctcaccagcattaatttgtaatactatatcttttgtcttc

SEQ ID NO: 658 - DNA, 40 bp, Artificial Sequence
  Description of Artificial Sequence: Synthetic primer
agatgtcatttactgacacaaccaataccatgttattagg

SEQ ID NO: 659 - DNA, 40 bp, Artificial Sequence
  Description of Artificial Sequence: Synthetic primer
caaacacatttttcaaatacactggctgataacaactctc

SEQ ID NO: 660 - DNA, 40 bp, Artificial Sequence
  Description of Artificial Sequence: Synthetic primer
aactgcttattgaaataactgtaaactctccttttcctcc

SEQ ID NO: 661 - DNA, 40 bp, Artificial Sequence
  Description of Artificial Sequence: Synthetic primer
tttttcccgtttgatctttactgacatttaccgcagagtc

SEQ ID NO: 662 - DNA, 40 bp, Artificial Sequence
  Description of Artificial Sequence: Synthetic primer
ggcgtctggaaaattacatgatgaatgcatgccggaccag

SEQ ID NO: 663 - DNA, 40 bp, Artificial Sequence
  Description of Artificial Sequence: Synthetic primer
tggggtggggccgtggtcgcagaggccggtccccgctcac

SEQ ID NO: 664 - DNA, 40 bp, Artificial Sequence
  Description of Artificial Sequence: Synthetic primer
gagctcagaggcgaaaagcagccctgatccccagtaactc

SEQ ID NO: 665 - DNA, 40 bp, Artificial Sequence
  Description of Artificial Sequence: Synthetic primer
ccccggcaaggtggagactcagtgacggccctgatgctcc

SEQ ID NO: 666 - DNA, 40 bp, Artificial Sequence
  Description of Artificial Sequence: Synthetic primer
gaatatctgggacatagtagtgataagatattaactaaag

SEQ ID NO: 667 - DNA, 40 bp, Artificial Sequence
  Description of Artificial Sequence: Synthetic primer
actggttgttatcattgacaattataatatttgtgattta

SEQ ID NO: 668 - DNA, 40 bp, Artificial Sequence
  Description of Artificial Sequence: Synthetic primer
cagccccacgctcgggcgggtggcccgttcgccgcgctca

SEQ ID NO: 669 - DNA, 40 bp, Artificial Sequence
  Description of Artificial Sequence: Synthetic primer
ggacactttcagccccgagccgcggccgctcgggtcggac

SEQ ID NO: 670 - DNA, 40 bp, Artificial Sequence
  Description of Artificial Sequence: Synthetic primer
gtgagttttctgagtgcttttatcagaatgattatttaac

SEQ ID NO: 671 - DNA, 40 bp, Artificial Sequence
  Description of Artificial Sequence: Synthetic primer
ctgctttaaaattttcaatggagatcttactaaaaaaatg

SEQ ID NO: 672 - DNA, 40 bp, Artificial Sequence
  Description of Artificial Sequence: Synthetic primer
gcccgtgtggaatctcctggtttactctcttgctgaagac

SEQ ID NO: 673 - DNA, 40 bp, Artificial Sequence
  Description of Artificial Sequence: Synthetic primer
agaaaaatgaccgcacatgaccgctggcacaaagaccacg

SEQ ID NO: 674 - DNA, 40 bp, Artificial Sequence
  Description of Artificial Sequence: Synthetic primer
acatgtgtgtgaatataatgtagaattataaagtcataac

SEQ ID NO: 675 - DNA, 40 bp, Artificial Sequence
  Description of Artificial Sequence: Synthetic primer
tccccataccaggaccctactagtcttttaatcttgttac

SEQ ID NO: 676 - DNA, 40 bp, Artificial Sequence
  Description of Artificial Sequence: Synthetic primer
cccttaacgtggacaccgctgtgatttgtttgcaggactc

SEQ ID NO: 677 - DNA, 40 bp, Artificial Sequence
  Description of Artificial Sequence: Synthetic primer
aatgtgcttggtccccacgacccgcagccgcctcctcttg

SEQ ID NO: 678 - DNA, 40 bp, Artificial Sequence
  Description of Artificial Sequence: Synthetic primer
cctgggagtctcaggacagcctgacctcaccttcccctgc

SEQ ID NO: 679 - DNA, 40 bp, Artificial Sequence
  Description of Artificial Sequence: Synthetic primer
acccctgaggacccagtggagggccagggatgccactcac

SEQ ID NO: 680 - DNA, 40 bp, Artificial Sequence
  Description of Artificial Sequence: Synthetic primer
ttctcccttcattgcttaacacattttcctatttttatcc

SEQ ID NO: 681 - DNA, 40 bp, Artificial Sequence
  Description of Artificial Sequence: Synthetic primer
aatttcaagtttctttgccaagatattacaataaataatg

SEQ ID NO: 682 - DNA, 40 bp, Artificial Sequence
  Description of Artificial Sequence: Synthetic primer
gcgtgagccaccgcacccatcctaaaactgcttatatttt

SEQ ID NO: 683 - DNA, 40 bp, Artificial Sequence
  Description of Artificial Sequence: Synthetic primer
ctgaatgtcaccttaaataaattaaagtttagttgatatg

SEQ ID NO: 684 - DNA, 40 bp, Artificial Sequence
  Description of Artificial Sequence: Synthetic primer
agcatgaagaatagagaatgtaaatatagttaagaaaagg

SEQ ID NO: 685 - DNA, 40 bp, Artificial Sequence
  Description of Artificial Sequence: Synthetic primer
tgatcattactgatctaaatatttcttggcatgtttcatc

SEQ ID NO: 686 - DNA, 40 bp, Artificial Sequence
  Description of Artificial Sequence: Synthetic primer
ttggtgtggcattacacaatttattctcagtttgtggttc

SEQ ID NO: 687 - DNA, 40 bp, Artificial Sequence
  Description of Artificial Sequence: Synthetic primer
aaatacaataaagatagaaagctggaaaatcaataagatc

SEQ ID NO: 688 - DNA, 40 bp, Artificial Sequence
  Description of Artificial Sequence: Synthetic primer
acagcgtttcccactgaaaacctcaaggcctcacttctcc

SEQ ID NO: 689 - DNA, 40 bp, Artificial Sequence
  Description of Artificial Sequence: Synthetic primer
tcagatgtcctctgctcaccccaaccagtcccctgcaaac

SEQ ID NO: 690 - DNA, 40 bp, Artificial Sequence
  Description of Artificial Sequence: Synthetic primer
agatgtcctccttccccaaaccctgccccagccaatgtgc

SEQ ID NO: 691 - DNA, 40 bp, Artificial Sequence
  Description of Artificial Sequence: Synthetic primer
ctgcctcccacacatctggggtgacggtcttgtttccttc

SEQ ID NO: 692 - DNA, 40 bp, Artificial Sequence
  Description of Artificial Sequence: Synthetic primer
cgccctccccagaccatcagctgaaccctctgaccctgtg

SEQ ID NO: 693 - DNA, 40 bp, Artificial Sequence
  Description of Artificial Sequence: Synthetic primer
ggggcaccaccccgggaccctagcccacctcctccatgta

SEQ ID NO: 694 - DNA, 40 bp, Artificial Sequence
  Description of Artificial Sequence: Synthetic primer
acagcaaaaactcaatccacgctattaaaacagaccatac

SEQ ID NO: 695 - DNA, 40 bp, Artificial Sequence
  Description of Artificial Sequence: Synthetic primer
ggatctgaaacttgcccacccttcgggatattgcaggacg

SEQ ID NO: 696 - DNA, 40 bp, Artificial Sequence
  Description of Artificial Sequence: Synthetic primer
cctgtctagtgatgctggggtttggtccaaggctttcaga

SEQ ID NO: 697 - DNA, 40 bp, Artificial Sequence
  Description of Artificial Sequence: Synthetic primer
gccaccctgcctcatcggttggcatggagaagaaggtagg

SEQ ID NO: 698 - DNA, 40 bp, Artificial Sequence
  Description of Artificial Sequence: Synthetic primer
tcctgactttggtttgtccctgaccagagccctgctactc

SEQ ID NO: 699 - DNA, 40 bp, Artificial Sequence
  Description of Artificial Sequence: Synthetic primer
ggtggaagtgtgagctgcctattgaatggaaggcataggg

SEQ ID NO: 700 - DNA, 40 bp, Artificial Sequence
  Description of Artificial Sequence: Synthetic primer
ttttttttccttcttcaatttttgttgtttccatgttttc

SEQ ID NO: 701 - DNA, 40 bp, Artificial Sequence
  Description of Artificial Sequence: Synthetic primer
tacacacacataactccttcataaacagaattactatacc

SEQ ID NO: 702 - DNA, 40 bp, Artificial Sequence
  Description of Artificial Sequence: Synthetic primer
tcgggtggcggggccgcctggcgtcacttccgtccagacc

SEQ ID NO: 703 - DNA, 40 bp, Artificial Sequence
  Description of Artificial Sequence: Synthetic primer
tccggagggccgcaggcaccaactcccagtcccactgaag

SEQ ID NO: 704 - DNA, 40 bp, Artificial Sequence
  Description of Artificial Sequence: Synthetic primer
taaaaaaatataatcctacctggcagttttcaaaatgaac

SEQ ID NO: 705 - DNA, 40 bp, Artificial Sequence
  Description of Artificial Sequence: Synthetic primer
tattattgttagttactgaaaatgacacctttaaaaaatg

SEQ ID NO: 706 - DNA, 40 bp, Artificial Sequence
  Description of Artificial Sequence: Synthetic primer
cagggctaccccacctgcctcttctgcagccctgaccttg

SEQ ID NO: 707 - DNA, 40 bp, Artificial Sequence
  Description of Artificial Sequence: Synthetic primer
actgcagcagtaccctggaggccctactcaccaccacagg

SEQ ID NO: 708 - DNA, 40 bp, Artificial Sequence
  Description of Artificial Sequence: Synthetic primer
gtcctcttcttcttggcctggctgacttctgctgtctctc

SEQ ID NO: 709 - DNA, 40 bp, Artificial Sequence
  Description of Artificial Sequence: Synthetic primer
tgaggccctcgcgcttccaggactgcaggcttcctgtggg

SEQ ID NO: 710 - DNA, 40 bp, Artificial Sequence
  Description of Artificial Sequence: Synthetic primer
cactcaaggttaggaaaatggaaaagcacaagtcccagag

SEQ ID NO: 711 - DNA, 40 bp, Artificial Sequence
  Description of Artificial Sequence: Synthetic primer
taatttaagccatagctgacttaattgtattgttttcctg

SEQ ID NO: 712 - DNA, 40 bp, Artificial Sequence
  Description of Artificial Sequence: Synthetic primer
gtgtagccggaggaggaggggagagggatagggaaggtag

SEQ ID NO: 713 - DNA, 40 bp, Artificial Sequence
  Description of Artificial Sequence: Synthetic primer
gtatccagtagggcccagagctgacctgcctccctgtccc

SEQ ID NO: 714 - DNA, 40 bp, Artificial Sequence
  Description of Artificial Sequence: Synthetic primer
cattatcattagttaacagtactgataaaaaacagtgatc

SEQ ID NO: 715 - DNA, 40 bp, Artificial Sequence
  Description of Artificial Sequence: Synthetic primer
ttgccctgacctctgacacaaggaatgcctgctttctccc

SEQ ID NO: 716 - DNA, 40 bp, Artificial Sequence
  Description of Artificial Sequence: Synthetic primer
tctgtcaaaaaaagaaaaaatgaataaataaaacaagctg

SEQ ID NO: 717 - DNA, 40 bp, Artificial Sequence
  Description of Artificial Sequence: Synthetic primer
agtgtttgataaacaaactgttcagatatcattaactttc

SEQ ID NO: 718 - DNA, 40 bp, Artificial Sequence
  Description of Artificial Sequence: Synthetic primer
tggtctctcgctgagcccgtttcctctgccctaggacctg

SEQ ID NO: 719 - DNA, 40 bp, Artificial Sequence
  Description of Artificial Sequence: Synthetic primer
caaacaaacaaacaaaaacctcagcagaaccccaagatgc

SEQ ID NO: 720 - DNA, 40 bp, Artificial Sequence
  Description of Artificial Sequence: Synthetic primer
agctcagagggacatggagcccaacaggcacccccgacgc

SEQ ID NO: 721 - DNA, 40 bp, Artificial Sequence
  Description of Artificial Sequence: Synthetic primer
ctcccctttctctttctctctctctctgctccgtccttag

SEQ ID NO: 722 - DNA, 40 bp, Artificial Sequence
  Description of Artificial Sequence: Synthetic primer
aatatatttttttaacgtggaaataaatatataagaactc

SEQ ID NO: 723 - DNA, 40 bp, Artificial Sequence
  Description of Artificial Sequence: Synthetic primer
attgtattaatgtttaaagagattttatttgtttgtttaa

SEQ ID NO: 724 - DNA, 40 bp, Artificial Sequence
  Description of Artificial Sequence: Synthetic primer
tggagaataaatgctttgcaagaccctcggcaatgaaacc

SEQ ID NO: 725 - DNA, 40 bp, Artificial Sequence
  Description of Artificial Sequence: Synthetic primer
tgctttctgatggataaattcacatcatcctctgtttgtg

SEQ ID NO: 726 - DNA, 40 bp, Artificial Sequence
  Description of Artificial Sequence: Synthetic primer
atgtttttttctcattggtgatataatttattttcttaaa

SEQ ID NO: 727 - DNA, 40 bp, Artificial Sequence
  Description of Artificial Sequence: Synthetic primer
gtgctgctacatgtacagtgaaggtaaatcccattcttac

SEQ ID NO: 728 - DNA, 40 bp, Artificial Sequence
  Description of Artificial Sequence: Synthetic primer
cctggctcaccctctctctccctgtctcctttcgctttcc

SEQ ID NO: 729 - DNA, 40 bp, Artificial Sequence
  Description of Artificial Sequence: Synthetic primer
gcccagtgcctgtcctcaaagtccaccctcctgctagggc

SEQ ID NO: 730 - DNA, 40 bp, Artificial Sequence
  Description of Artificial Sequence: Synthetic primer
ccattacaggttgattgtcctgggctgtggctggctgtgg

SEQ ID NO: 731 - DNA, 40 bp, Artificial Sequence
  Description of Artificial Sequence: Synthetic primer
ttcaacctgggagatctgtaccttgaggggtcagacttac

SEQ ID NO: 732 - DNA, 40 bp, Artificial Sequence
  Description of Artificial Sequence: Synthetic primer
ataaataaacaaaaatgtaagaaatgtgatgttctgaaag

SEQ ID NO: 733 - DNA, 40 bp, Artificial Sequence
  Description of Artificial Sequence: Synthetic primer
gtttactcatggaggggaagctgtccatcagtatacattc

SEQ ID NO: 734 - DNA, 40 bp, Artificial Sequence
  Description of Artificial Sequence: Synthetic primer
aactccaactttattatactgaaaatcagaccgcccattt

SEQ ID NO: 735 - DNA, 40 bp, Artificial Sequence
  Description of Artificial Sequence: Synthetic primer
accgccctggtgccagcctgacaggcgccactgcttctgg

SEQ ID NO: 736 - DNA, 40 bp, Artificial Sequence
  Description of Artificial Sequence: Synthetic primer
ccctgctcccgtgggacatcctggccgagtcagcagagcc

SEQ ID NO: 737 - DNA, 40 bp, Artificial Sequence
  Description of Artificial Sequence: Synthetic primer
gagggttacagctgacggtggagtctggggagggcgtgtg

SEQ ID NO: 738 - DNA, 40 bp, Artificial Sequence
  Description of Artificial Sequence: Synthetic primer
aggggcccggcccatcgctgcttcctctcgcccatcacag

SEQ ID NO: 739 - DNA, 40 bp, Artificial Sequence
  Description of Artificial Sequence: Synthetic primer
gtgtcctgagtaggctgtgaccccatgtctgtcctctgac

SEQ ID NO: 740 - DNA, 40 bp, Artificial Sequence
  Description of Artificial Sequence: Synthetic primer
cccacgcctcagcccggcagcccaccgtgccacgtctccc

SEQ ID NO: 741 - DNA, 40 bp, Artificial Sequence
  Description of Artificial Sequence: Synthetic primer
cacagagctggggacggtgcgggcagggctgggcctggag

SEQ ID NO: 742 - DNA, 40 bp, Artificial Sequence
  Description of Artificial Sequence: Synthetic primer
tccctggccggagcagacctcactgacctccctgcatttg

SEQ ID NO: 743 - DNA, 40 bp, Artificial Sequence
  Description of Artificial Sequence: Synthetic primer
gcctctagagttgtctggagttgtcagctcttccccttgc

SEQ ID NO: 744 - DNA, 40 bp, Artificial Sequence
  Description of Artificial Sequence: Synthetic primer
atgtgctgcaggcagctccgacgggcctgacacctgaccc

SEQ ID NO: 745 - DNA, 40 bp, Artificial Sequence
  Description of Artificial Sequence: Synthetic primer
cggtctccccacctgtggaagaagtccagcacgctgacca

SEQ ID NO: 746 - DNA, 40 bp, Artificial Sequence
  Description of Artificial Sequence: Synthetic primer
ccacaaggaagaagctggaaagggcagtgccttagggacc

SEQ ID NO: 747 - DNA, 40 bp, Artificial Sequence
  Description of Artificial Sequence: Synthetic primer
cccgtgctcccggccactccaaagccacagtccgccaagc

SEQ ID NO: 748 - DNA, 40 bp, Artificial Sequence
  Description of Artificial Sequence: Synthetic primer
agcaagagcgcaggaagcgcttgctggagctgccaccgcc

SEQ ID NO: 749 - DNA, 40 bp, Artificial Sequence
  Description of Artificial Sequence: Synthetic primer
gctcagctgcagcaggggtccctaaggcactgccctttcc

SEQ ID NO: 750 - DNA, 40 bp, Artificial Sequence
  Description of Artificial Sequence: Synthetic primer
tgatatgagagggatgaaggcggtggaagacggctggtcc

SEQ ID NO: 751 - DNA, 40 bp, Artificial Sequence
  Description of Artificial Sequence: Synthetic primer
ttgacatttgtaaggaagatgcaaacccaggataatgttg

SEQ ID NO: 752 - DNA, 40 bp, Artificial Sequence
  Description of Artificial Sequence: Synthetic primer
acatgcaaaaaaagaaaagaaaaaacaaaagtaagctaag

SEQ ID NO: 753 - DNA, 40 bp, Artificial Sequence
  Description of Artificial Sequence: Synthetic primer
tgctcatttcctttggctgcacatgccattctcagtgacc

SEQ ID NO: 754 - DNA, 40 bp, Artificial Sequence
  Description of Artificial Sequence: Synthetic primer
aacttggttgaatcttactgacctttgtaaacactcactc

SEQ ID NO: 755 - DNA, 40 bp, Artificial Sequence
  Description of Artificial Sequence: Synthetic primer
taagaaaatgcacagatgagacacagaagtactgatgacc

SEQ ID NO: 756 - DNA, 40 bp, Artificial Sequence
  Description of Artificial Sequence: Synthetic primer
tggagtgactgcaaccgccaccttgcagggacgggactac

SEQ ID NO: 757 - DNA, 40 bp, Artificial Sequence
  Description of Artificial Sequence: Synthetic primer
attccagcagatgtgctgggtccttttcagttgcgtctta

SEQ ID NO: 758 - DNA, 40 bp, Artificial Sequence
  Description of Artificial Sequence: Synthetic primer
ttagcagctgttgtgatcataaaacgagaagcacatcaac

SEQ ID NO: 759 - DNA, 40 bp, Artificial Sequence
  Description of Artificial Sequence: Synthetic primer
gccagctactgcgtgtggcccgcaccgcccgttcccttcc

SEQ ID NO: 760 - DNA, 40 bp, Artificial Sequence
  Description of Artificial Sequence: Synthetic primer
ctcccgcaggtgtgggtttgtgcctgcccctcacactcac

SEQ ID NO: 761 - DNA, 40 bp, Artificial Sequence
  Description of Artificial Sequence: Synthetic primer
tcgctcacatcagaaaccagaaaaagggtaaacagtattc

SEQ ID NO: 762 - DNA, 40 bp, Artificial Sequence
  Description of Artificial Sequence: Synthetic primer
atggcttaatatctgagaaaatactgaaattttaaaaaac

SEQ ID NO: 763 - DNA, 40 bp, Artificial Sequence
  Description of Artificial Sequence: Synthetic primer
tttttatcctctagaaacagcagtagataggcagatcacc

SEQ ID NO: 764 - DNA, 40 bp, Artificial Sequence
  Description of Artificial Sequence: Synthetic primer
attcagatcactactccttttactgtcatggacaacagct

SEQ ID NO: 765 - DNA, 40 bp, Artificial Sequence
  Description of Artificial Sequence: Synthetic primer
tgcatgcgcttgacatcagtttgccagttgtgctttttgc

SEQ ID NO: 766 - DNA, 40 bp, Artificial Sequence
  Description of Artificial Sequence: Synthetic primer
acctgacagacaataaaaggcagcttggacacggctttac

SEQ ID NO: 767 - DNA, 40 bp, Artificial Sequence
  Description of Artificial Sequence: Synthetic primer
cactgtgagtgggcagaagcctggacagtcagcaccatcc

SEQ ID NO: 768 - DNA, 40 bp, Artificial Sequence
  Description of Artificial Sequence: Synthetic primer
aaaccactcacagaagactcagtatccgttggccagcaag

SEQ ID NO: 769 - DNA, 40 bp, Artificial Sequence
  Description of Artificial Sequence: Synthetic primer
tttttgaattttaagggaaaaatgttagctgctagcctca

SEQ ID NO: 770 - DNA, 40 bp, Artificial Sequence
  Description of Artificial Sequence: Synthetic primer
aaaatctttcccaacatattgcctcttacctggatgtggc

SEQ ID NO: 771 - DNA, 40 bp, Artificial Sequence
  Description of Artificial Sequence: Synthetic primer
cctctgcagccacccactgactgctttcgccctgctattc

SEQ ID NO: 772 - DNA, 40 bp, Artificial Sequence
  Description of Artificial Sequence: Synthetic primer
ctcttactgtgcctggcggcccacagctgcttttcaccag

SEQ ID NO: 773 - DNA, 40 bp, Artificial Sequence
  Description of Artificial Sequence: Synthetic primer
cttttattacatataaaactaggcacctaaaaaaaaaaac

SEQ ID NO: 774 - DNA, 40 bp, Artificial Sequence
  Description of Artificial Sequence: Synthetic primer
taaacatttatgtttgattcccatgtaattcaattctgtg

SEQ ID NO: 775 - DNA, 40 bp, Artificial Sequence
  Description of Artificial Sequence: Synthetic primer
ccagggtattctggagccactagacctctgtgtgtgttgc

SEQ ID NO: 776 - DNA, 40 bp, Artificial Sequence
  Description of Artificial Sequence: Synthetic primer
cgtcctccacaccccgcgacagctgccctcggtgacactc

SEQ ID NO: 777 - DNA, 40 bp, Artificial Sequence
  Description of Artificial Sequence: Synthetic primer
taaaaagtgaagaaaatgggcattttgcattcaccaccac

SEQ ID NO: 778 - DNA, 40 bp, Artificial Sequence
  Description of Artificial Sequence: Synthetic primer
agtgtgcagttacttaaattgcctttgtcttcttctttgc

SEQ ID NO: 779 - DNA, 40 bp, Artificial Sequence
  Description of Artificial Sequence: Synthetic primer
gggagaggagggctgaggaattgggaggggaatcagatag

SEQ ID NO: 780 - DNA, 40 bp, Artificial Sequence
  Description of Artificial Sequence: Synthetic primer
cttcattcaatcactgaccaccactccacctccccctcag

SEQ ID NO: 781 - DNA, 40 bp, Artificial Sequence
  Description of Artificial Sequence: Synthetic primer
ccacatcagttcttcacctccaaatccctgtctctctcac

SEQ ID NO: 782 - DNA, 40 bp, Artificial Sequence
  Description of Artificial Sequence: Synthetic primer
gttccctagggatgggccagcaggcaggtggaaggctcac

SEQ ID NO: 783 - DNA, 40 bp, Artificial Sequence
  Description of Artificial Sequence: Synthetic primer
attggcaaaagagggtgaggtgctggctctgctgtagtgg

SEQ ID NO: 784 - DNA, 40 bp, Artificial Sequence
  Description of Artificial Sequence: Synthetic primer
ccctgccaagaccaagcaccgctgccggctgacccatgcc

SEQ ID NO: 785 - DNA, 40 bp, Artificial Sequence
  Description of Artificial Sequence: Synthetic primer
ccattgcggccgacgagagcttcacaggtgccgaccttgg

SEQ ID NO: 786 - DNA, 40 bp, Artificial Sequence
  Description of Artificial Sequence: Synthetic primer
gccaggtagaagccgcgcttgctgaggggacccacactgc

SEQ ID NO: 787 - DNA, 40 bp, Artificial Sequence
  Description of Artificial Sequence: Synthetic primer
agtttttattcttttaaagctcaggccaatccaaagaaac

SEQ ID NO: 788 - DNA, 40 bp, Artificial Sequence
  Description of Artificial Sequence: Synthetic primer
agtgtgcagcagtgaaaatgttttattgggatgattttag

SEQ ID NO: 789 - DNA, 40 bp, Artificial Sequence
  Description of Artificial Sequence: Synthetic primer
atttaaattaaaataaaccttgacaagataaataatgaag

SEQ ID NO: 790 - DNA, 40 bp, Artificial Sequence
  Description of Artificial Sequence: Synthetic primer
tatcatcgattttctaatcacatatattttgtttcttttt

SEQ ID NO: 791 - DNA, 40 bp, Artificial Sequence
  Description of Artificial Sequence: Synthetic primer
agaattatgcatgttactcaaaataaccaatctagatact

SEQ ID NO: 792 - DNA, 40 bp, Artificial Sequence
  Description of Artificial Sequence: Synthetic primer
cttacctacttcaattgttgactgcttttacttacttttg

SEQ ID NO: 793 - DNA, 40 bp, Artificial Sequence
  Description of Artificial Sequence: Synthetic primer
aagtcctgcttacctgaagaggtgatacagtgatctgagc

SEQ ID NO: 794 - DNA, 40 bp, Artificial Sequence
  Description of Artificial Sequence: Synthetic primer
ggccaaggtaggaaggcaaccccaaaatgtgggtctgaga

SEQ ID NO: 795 - DNA, 40 bp, Artificial Sequence
  Description of Artificial Sequence: Synthetic primer
gctaagctcagtctgctcgtgaaaaatgatggtgacatgc

SEQ ID NO: 796 - DNA, 40 bp, Artificial Sequence
  Description of Artificial Sequence: Synthetic primer
catacacttattcttaagggaagatgtggggtacaagtgc

SEQ ID NO: 797 - DNA, 40 bp, Artificial Sequence
  Description of Artificial Sequence: Synthetic primer
ccacactcgacatgggccgtgcctgacctctcgcttcgtg

SEQ ID NO: 798 - DNA, 40 bp, Artificial Sequence
  Description of Artificial Sequence: Synthetic primer
cggcaggtgcagcacagctctgtggtgacaggggccaggc

SEQ ID NO: 799 - DNA, 40 bp, Artificial Sequence
  Description of Artificial Sequence: Synthetic primer
cccagagaggaggccggggtgctccccacacccacactta

SEQ ID NO: 800 - DNA, 40 bp, Artificial Sequence
  Description of Artificial Sequence: Synthetic primer
tgctgctgtagggcagagccacacttcaccccctgctatg

SEQ ID NO: 801 - DNA, 40 bp, Artificial Sequence
  Description of Artificial Sequence: Synthetic primer
cccctcttcccacctctccccaccctctctctctcaggac

SEQ ID NO: 802 - DNA, 40 bp, Artificial Sequence
  Description of Artificial Sequence: Synthetic primer
ctggggccggctccgccctcgctgcgggtggcggtggcgc

SEQ ID NO: 803 - DNA, 40 bp, Artificial Sequence
  Description of Artificial Sequence: Synthetic primer
tagcaattcagtttcacaacaaagcacaaaggcaggttcg

SEQ ID NO: 804 - DNA, 40 bp, Artificial Sequence
  Description of Artificial Sequence: Synthetic primer
aatagaaagatccaaaccaaatggaaaaaattaacttgtc

SEQ ID NO: 805 - DNA, 40 bp, Artificial Sequence
  Description of Artificial Sequence: Synthetic primer
cctgtcatgttttaccaccactttgaaaggaagaagatgg

SEQ ID NO: 806 - DNA, 40 bp, Artificial Sequence
  Description of Artificial Sequence: Synthetic primer
aaggcttataaatttttttccttttaggtagtctgtagag

SEQ ID NO: 807 - DNA, 40 bp, Artificial Sequence
  Description of Artificial Sequence: Synthetic primer
ggtgggaagatgaccagccgcagccaagaggaggcagggg

SEQ ID NO: 808 - DNA, 40 bp, Artificial Sequence
  Description of Artificial Sequence: Synthetic primer
atgtccccagcgcagcttgtgactcctgcctctctgaccc

SEQ ID NO: 809 - DNA, 40 bp, Artificial Sequence
  Description of Artificial Sequence: Synthetic primer
caatgtagactctggcctcatttacccctggaaagtctgg

SEQ ID NO: 810 - DNA, 40 bp, Artificial Sequence
  Description of Artificial Sequence: Synthetic primer
aataggcaaggaaggaaatgtattttaccaatggaaagcc

SEQ ID NO: 811 - DNA, 40 bp, Artificial Sequence
  Description of Artificial Sequence: Synthetic primer
agcccatataaagagtgctccaatttcttgttttatttac

SEQ ID NO: 812 - DNA, 40 bp, Artificial Sequence
  Description of Artificial Sequence: Synthetic primer
gggatggtcaagagctggaaatttccacccaagcataact

SEQ ID NO: 813 - DNA, 40 bp, Artificial Sequence
  Description of Artificial Sequence: Synthetic primer
aattaacttgtgcccagtttctaaatcatctaatgtaaag

SEQ ID NO: 814 - DNA, 40 bp, Artificial Sequence
  Description of Artificial Sequence: Synthetic primer
atttttaaaatttctcatttcctgagtttatttcttttag

SEQ ID NO: 815 - DNA, 40 bp, Artificial Sequence
  Description of Artificial Sequence: Synthetic primer
catctggttgtcgggctgtgtagacgggagctgataagtg

SEQ ID NO: 816 - DNA, 40 bp, Artificial Sequence
  Description of Artificial Sequence: Synthetic primer
ggacatcttcccactaatgccagatgcttgtgtgttctgc

SEQ ID NO: 817 - DNA, 40 bp, Artificial Sequence
  Description of Artificial Sequence: Synthetic primer
tggcgccaagagccctgggcctggcgtgaccaccaagtct

SEQ ID NO: 818 - DNA, 40 bp, Artificial Sequence
  Description of Artificial Sequence: Synthetic primer
aggtggcacctgggcctgtcccaccagctcacgcctggac

SEQ ID NO: 819 - DNA, 40 bp, Artificial Sequence
  Description of Artificial Sequence: Synthetic primer
ccagtttgttttattttagatgattgtctttttcctcttg

SEQ ID NO: 820 - DNA, 40 bp, Artificial Sequence
  Description of Artificial Sequence: Synthetic primer
gtaaattaactcatacctgagctatcttaagaaatacatg

SEQ ID NO: 821 - DNA, 40 bp, Artificial Sequence
  Description of Artificial Sequence: Synthetic primer
gagccccaggctgcccctcctgagtactcacccttgcggc

SEQ ID NO: 822 - DNA, 40 bp, Artificial Sequence
  Description of Artificial Sequence: Synthetic primer
aggagcattcacttctctgtcttctgtttctctcccacag

SEQ ID NO: 823 - DNA, 40 bp, Artificial Sequence
  Description of Artificial Sequence: Synthetic primer
aacgacggggtcggcctcacatgcgtgtcccacttaacac

SEQ ID NO: 824 - DNA, 40 bp, Artificial Sequence
  Description of Artificial Sequence: Synthetic primer
gaaaagagctagcctctcagccactgggtcttgtccatag

SEQ ID NO: 825 - DNA, 40 bp, Artificial Sequence
  Description of Artificial Sequence: Synthetic primer
gtatatttaaccagtaaagtaggcatacttatatagttgg

SEQ ID NO: 826 - DNA, 40 bp, Artificial Sequence
  Description of Artificial Sequence: Synthetic primer
tcttctctgagctaacatgcttccttatttgtgtgttttc

SEQ ID NO: 827 - DNA, 40 bp, Artificial Sequence
  Description of Artificial Sequence: Synthetic primer
gtttcaaaacacctagtttgtttgtttgtacttaattcta

SEQ ID NO: 828 - DNA, 40 bp, Artificial Sequence
  Description of Artificial Sequence: Synthetic primer
tttatctgatcaatggaaagtaatagcctgaaaaacttac

SEQ ID NO: 829 - DNA, 40 bp, Artificial Sequence
  Description of Artificial Sequence: Synthetic primer
ttgtggatgccacagagctgtgcagtgcgcgggcttgtcc

SEQ ID NO: 830 - DNA, 40 bp, Artificial Sequence
  Description of Artificial Sequence: Synthetic primer
ggtgggcgggctgcagggccttggggccaccggagcgtac

SEQ ID NO: 831 - DNA, 40 bp, Artificial Sequence
  Description of Artificial Sequence: Synthetic primer
gaaaataaaaaggcagctggaattaaatgatgggcctcac

SEQ ID NO: 832 - DNA, 40 bp, Artificial Sequence
  Description of Artificial Sequence: Synthetic primer
gcaacacatgatcttattttgaagacaagtttaccactac

SEQ ID NO: 833 - DNA, 40 bp, Artificial Sequence
  Description of Artificial Sequence: Synthetic primer
aacataaaatctcctacttgcagttttttactaataaaga

SEQ ID NO: 834 - DNA, 40 bp, Artificial Sequence
  Description of Artificial Sequence: Synthetic primer
tatgtgttcaaaaaattactacattttactttaaaaaatg

SEQ ID NO: 835 - DNA, 40 bp, Artificial Sequence
  Description of Artificial Sequence: Synthetic primer
atttcctcttgaaagaaacatcagtatcaaaatagaaatc

SEQ ID NO: 836 - DNA, 40 bp, Artificial Sequence
  Description of Artificial Sequence: Synthetic primer
aagaaaaagtcacatttcttcaatcactcaccattgtctg

SEQ ID NO: 837 - DNA, 40 bp, Artificial Sequence
  Description of Artificial Sequence: Synthetic primer
gtgacctggccgctggggagaggtttcatgcctggatttg

SEQ ID NO: 838 - DNA, 40 bp, Artificial Sequence
  Description of Artificial Sequence: Synthetic primer
aggccccatcaagctcgcctgtcctgctctgacctcctac

SEQ ID NO: 839 - DNA, 40 bp, Artificial Sequence
  Description of Artificial Sequence: Synthetic primer
aattctcattgttagaggaaaaggaggaaaaagaaacatt

SEQ ID NO: 840 - DNA, 40 bp, Artificial Sequence
  Description of Artificial Sequence: Synthetic primer
cgtgatcatactcagagacgcctattattagtcattagat

SEQ ID NO: 841 - DNA, 40 bp, Artificial Sequence
  Description of Artificial Sequence: Synthetic primer
tgttttcatgggataattatcctctcacatgtctccatac

SEQ ID NO: 842 - DNA, 40 bp, Artificial Sequence
  Description of Artificial Sequence: Synthetic primer
tgaaatgaaataataaagtttcaacaatttctttgaagac

SEQ ID NO: 843 - DNA, 40 bp, Artificial Sequence
  Description of Artificial Sequence: Synthetic primer
gagccccttcctggatctctaacccgtcacactcttcctc

SEQ ID NO: 844 - DNA, 40 bp, Artificial Sequence
  Description of Artificial Sequence: Synthetic primer
cagatcattctctgtcagctgtcattgccttccctgcacc

SEQ ID NO: 845 - DNA, 40 bp, Artificial Sequence
  Description of Artificial Sequence: Synthetic primer
cgccgggcgccgccaaagtttccaaagggcgcggaaagtg

SEQ ID NO: 846 - DNA, 40 bp, Artificial Sequence
  Description of Artificial Sequence: Synthetic primer
cggccagcgcaggaggccgccgcccgggcgcagagggcag

SEQ ID NO: 847 - DNA, 40 bp, Artificial Sequence
  Description of Artificial Sequence: Synthetic primer
agaatatttgaaataccttgtttcttaattttgtgtcttt

SEQ ID NO: 848 - DNA, 40 bp, Artificial Sequence
  Description of Artificial Sequence: Synthetic primer
tttgattttcaggtttacttacattattgaggacttcatg

SEQ ID NO: 849 - DNA, 40 bp, Artificial Sequence
  Description of Artificial Sequence: Synthetic primer
aagcataaagtcttgtattataaattagatttagattctg

SEQ ID NO: 850 - DNA, 40 bp, Artificial Sequence
  Description of Artificial Sequence: Synthetic primer
ggctataaacagcatgttcaagttagtatatttgaggttg

SEQ ID NO: 851 - DNA, 40 bp, Artificial Sequence
  Description of Artificial Sequence: Synthetic primer
attgaaatataatagactgaattgtcttaaatggtactaa

SEQ ID NO: 852 - DNA, 40 bp, Artificial Sequence
  Description of Artificial Sequence: Synthetic primer
taatagaaaatcactttgagcgttgaaaaaaaaagacttg

SEQ ID NO: 853 - DNA, 40 bp, Artificial Sequence
  Description of Artificial Sequence: Synthetic primer
cgcctctgtaccaaggctaaggtgtcaattagtcacatgc

SEQ ID NO: 854 - DNA, 40 bp, Artificial Sequence
  Description of Artificial Sequence: Synthetic primer
catcctcagaagtgagggttaatatgtctttgtgtgcatg

SEQ ID NO: 855 - DNA, 40 bp, Artificial Sequence
  Description of Artificial Sequence: Synthetic primer
tataacccaattagaagaggcaagcaaggcctgtagtaac

SEQ ID NO: 856 - DNA, 40 bp, Artificial Sequence
  Description of Artificial Sequence: Synthetic primer
tcgagaacatgtgcaacatttttcgtcttgtgatataaat

SEQ ID NO: 857 - DNA, 40 bp, Artificial Sequence
  Description of Artificial Sequence: Synthetic primer
acctgcagagacaggcattgcccacccctcgccaggccag

SEQ ID NO: 858 - DNA, 40 bp, Artificial Sequence
  Description of Artificial Sequence: Synthetic primer
gtaacaaatggcttcttttgtccttccctttgtttactac

SEQ ID NO: 859 - DNA, 40 bp, Artificial Sequence
  Description of Artificial Sequence: Synthetic primer
gcccggcagccccggtgtcaggctgcaggccaactactca

SEQ ID NO: 860 - DNA, 40 bp, Artificial Sequence
  Description of Artificial Sequence: Synthetic primer
aggaaagtggagggcttgccttctccccagcttgtgttgc

SEQ ID NO: 861 - DNA, 40 bp, Artificial Sequence
  Description of Artificial Sequence: Synthetic primer
agttcagaccctccagagcagacaccccagcgagaatttg

SEQ ID NO: 862 - DNA, 40 bp, Artificial Sequence
  Description of Artificial Sequence: Synthetic primer
ctggggtctcttcctctccaggccttgccgtccccctggc

SEQ ID NO: 863 - DNA, 40 bp, Artificial Sequence
  Description of Artificial Sequence: Synthetic primer
tttctcctctgtgtcaacagaagaggaagaaaacacactg

SEQ ID NO: 864 - DNA, 40 bp, Artificial Sequence
  Description of Artificial Sequence: Synthetic primer
tctagagtaaaaactgtgactctgttgctctggtccttcc

SEQ ID NO: 865 - DNA, 40 bp, Artificial Sequence
  Description of Artificial Sequence: Synthetic primer
tttttttttggtgacaattcaatattttgttctttttgtg

SEQ ID NO: 866 - DNA, 40 bp, Artificial Sequence
  Description of Artificial Sequence: Synthetic primer
aaagatttgtaacaagaagatgtaaatgattgggactaac

SEQ ID NO: 867 - DNA, 40 bp, Artificial Sequence
  Description of Artificial Sequence: Synthetic primer
atcgtcttaccccatgagagtgcttttcgaggtctgctac

SEQ ID NO: 868 - DNA, 40 bp, Artificial Sequence
  Description of Artificial Sequence: Synthetic primer
gccgagttgcggggtcctggggaaattgcagggcttacag

SEQ ID NO: 869 - DNA, 40 bp, Artificial Sequence
  Description of Artificial Sequence: Synthetic primer
ttctgggccctggcctggtccatgcccagggtcccccaac

SEQ ID NO: 870 - DNA, 40 bp, Artificial Sequence
  Description of Artificial Sequence: Synthetic primer
gctgagccgaggcccctgccctgccctcactgcctgctcc

SEQ ID NO: 871 - DNA, 40 bp, Artificial Sequence
  Description of Artificial Sequence: Synthetic primer
gaaattctcctactctgggtagatggatcccgcctctaag

SEQ ID NO: 872 - DNA, 40 bp, Artificial Sequence
  Description of Artificial Sequence: Synthetic primer
cttccaccaccccgaccattctctgttggccgagactcac

SEQ ID NO: 873 - DNA, 40 bp, Artificial Sequence
  Description of Artificial Sequence: Synthetic primer
aaacattctactcattaattgttggtagtttctattttgc

SEQ ID NO: 874 - DNA, 40 bp, Artificial Sequence
  Description of Artificial Sequence: Synthetic primer
aacttataatgttggactctttagaaaattaacacaactg

SEQ ID NO: 875 - DNA, 40 bp, Artificial Sequence
  Description of Artificial Sequence: Synthetic primer
agaaaaaatacacaagttgtatggtacaacatgccatttc

SEQ ID NO: 876 - DNA, 40 bp, Artificial Sequence
  Description of Artificial Sequence: Synthetic primer
caattcctgaccacccaatcctaacacctgaattgttttc

SEQ ID NO: 877 - DNA, 40 bp, Artificial Sequence
  Description of Artificial Sequence: Synthetic primer
ttctctacgcagatgtgctttgctagtggtgggaatggag

SEQ ID NO: 878 - DNA, 40 bp, Artificial Sequence
  Description of Artificial Sequence: Synthetic primer
agagaacaaaactctggtaccaatgagagttctcggtttg

SEQ ID NO: 879 - DNA, 40 bp, Artificial Sequence
  Description of Artificial Sequence: Synthetic primer
aatatttttgtttttcttttgcttgtccctgattttcctg

SEQ ID NO: 880 - DNA, 40 bp, Artificial Sequence
  Description of Artificial Sequence: Synthetic primer
gatttaatccctttttagactacaaatagaggaagaaatg

SEQ ID NO: 881 - DNA, 40 bp, Artificial Sequence
  Description of Artificial Sequence: Synthetic primer
ttattctatttcagccacgggtaataatttttgtcctttc

SEQ ID NO: 882 - DNA, 40 bp, Artificial Sequence
  Description of Artificial Sequence: Synthetic primer
tcaaaaaaagttggatatgaaagtaaaagaggagaaactc

SEQ ID NO: 883 - DNA, 40 bp, Artificial Sequence
  Description of Artificial Sequence: Synthetic primer
tttttaaagattttgaataatgcagtaagtttattaaagg

SEQ ID NO: 884 - DNA, 40 bp, Artificial Sequence
  Description of Artificial Sequence: Synthetic primer
caaagtctctatgagtacagaaggacacagactgtattac

SEQ ID NO: 885 - DNA, 40 bp, Artificial Sequence
  Description of Artificial Sequence: Synthetic primer
tgtgagagggagggctatctgcagcacagcgaaagagaac

SEQ ID NO: 886 - DNA, 40 bp, Artificial Sequence
  Description of Artificial Sequence: Synthetic primer
aagttgtaattctgttttcctgtgggtgcttttcctaatg

SEQ ID NO: 887 - DNA, 40 bp, Artificial Sequence
  Description of Artificial Sequence: Synthetic primer
aggacattttcgctggaggtaggaggtggggtcataaaag

SEQ ID NO: 888 - DNA, 40 bp, Artificial Sequence
  Description of Artificial Sequence: Synthetic primer
cagtcagttttaattactaacaaaagttgattgcctttag

SEQ ID NO: 889 - DNA, 40 bp, Artificial Sequence
  Description of Artificial Sequence: Synthetic primer
ggaggtgggactggcccttgcacctgcctgacccttgagc

SEQ ID NO: 890 - DNA, 40 bp, Artificial Sequence
  Description of Artificial Sequence: Synthetic primer
tccagcagtctgtagccatttgtcactatgtctttacctc

SEQ ID NO: 891 - DNA, 40 bp, Artificial Sequence
  Description of Artificial Sequence: Synthetic primer
acccataggcaagactaaagacatgtccttttttgttttg

SEQ ID NO: 892 - DNA, 40 bp, Artificial Sequence
  Description of Artificial Sequence: Synthetic primer
gtctagcctgccctgtggcttcttaaactaatcttggatg

SEQ ID NO: 893 - DNA, 40 bp, Artificial Sequence
  Description of Artificial Sequence: Synthetic primer
gagtcttgagcgcggcatggtctctgcggccctaatttcg

SEQ ID NO: 894 - DNA, 40 bp, Artificial Sequence
  Description of Artificial Sequence: Synthetic primer
aaaggccgggcacccactcctgacactcgggccctcaccc

SEQ ID NO: 895 - DNA, 40 bp, Artificial Sequence
  Description of Artificial Sequence: Synthetic primer
caccactaccacttccaggaggtaagaggaaaactgaaag

SEQ ID NO: 896 - DNA, 40 bp, Artificial Sequence
  Description of Artificial Sequence: Synthetic primer
ctagagtttctgaaattgattcctcttcacccctgttctg

SEQ ID NO: 897 - DNA, 40 bp, Artificial Sequence
  Description of Artificial Sequence: Synthetic primer
gtcaggtgcggggtcccactgggtgccgacacccctctcc

SEQ ID NO: 898 - DNA, 40 bp, Artificial Sequence
  Description of Artificial Sequence: Synthetic primer
gccagccaggtgctaccctccctggctcccaggccagcac

SEQ ID NO: 899 - DNA, 40 bp, Artificial Sequence
  Description of Artificial Sequence: Synthetic primer
ggagggaaccctccgagtcacccggttccatctacctttc

SEQ ID NO: 900 - DNA, 40 bp, Artificial Sequence
  Description of Artificial Sequence: Synthetic primer
cggcccctttccaacccctccctactccgcccagggacac

SEQ ID NO: 901 - DNA, 40 bp, Artificial Sequence
  Description of Artificial Sequence: Synthetic primer
agcttaatgactgtgttccccagagcagcacccccaagag

SEQ ID NO: 902 - DNA, 40 bp, Artificial Sequence
  Description of Artificial Sequence: Synthetic primer
cctgctctgtaccctgtaaccctaggtgtaaccttgctcc

SEQ ID NO: 903 - DNA, 40 bp, Artificial Sequence
  Description of Artificial Sequence: Synthetic primer
cctcaccccgttcttgtcttgggctcaccatacctgagca

SEQ ID NO: 904 - DNA, 40 bp, Artificial Sequence
  Description of Artificial Sequence: Synthetic primer
aaggatttcatgcattgttgcagtgatgcctggctgaccc

SEQ ID NO: 905 - DNA, 40 bp, Artificial Sequence
  Description of Artificial Sequence: Synthetic primer
gtgcactgttttccccttaggaaggaacgaaaggaaaaag

SEQ ID NO: 906 - DNA, 40 bp, Artificial Sequence
  Description of Artificial Sequence: Synthetic primer
cttcattgagatgtgagatgtatttgcgagcgtgtgagtc

SEQ ID NO: 907 - DNA, 40 bp, Artificial Sequence
  Description of Artificial Sequence: Synthetic primer
caggctaacccgccctgtgcctacaggcaggtgctccggg

SEQ ID NO: 908 - DNA, 40 bp, Artificial Sequence
  Description of Artificial Sequence: Synthetic primer
atggggcagccagaccgcgccgcagggccgggagagaacg

SEQ ID NO: 909 - DNA, 40 bp, Artificial Sequence
  Description of Artificial Sequence: Synthetic primer
cgccactaagaagccgctgccgcccctgcgacacctggac

SEQ ID NO: 910 - DNA, 40 bp, Artificial Sequence
  Description of Artificial Sequence: Synthetic primer
cccgctgctgcggctcaaggcggcccacgccagcctctcc

SEQ ID NO: 911 - DNA, 40 bp, Artificial Sequence
  Description of Artificial Sequence: Synthetic primer
cactctcgctgtcccgatgcagctccctttcctcgctgtc

SEQ ID NO: 912 - DNA, 40 bp, Artificial Sequence
  Description of Artificial Sequence: Synthetic primer
cgccaccgctggcgcccgcgccacagggtccccccgaggc

SEQ ID NO: 913 - DNA, 40 bp, Artificial Sequence
  Description of Artificial Sequence: Synthetic primer
caggtcgccgcgcactccccgtgcccgtctacatgttggt

SEQ ID NO: 914 - DNA, 40 bp, Artificial Sequence
  Description of Artificial Sequence: Synthetic primer
cccggcggccgcgcccacgccaacccaccggcgcacatcg

SEQ ID NO: 915 - DNA, 40 bp, Artificial Sequence
  Description of Artificial Sequence: Synthetic primer
cgggctcggaccgggcctccgacctggatagcgtggagtg

SEQ ID NO: 916 - DNA, 40 bp, Artificial Sequence
  Description of Artificial Sequence: Synthetic primer
agcccgcggctccagccaaagtcccgagccccgggcagca

SEQ ID NO: 917 - DNA, 40 bp, Artificial Sequence
  Description of Artificial Sequence: Synthetic primer
cggcagcgagtcctccgaccgctcgggcttccggcgacag

SEQ ID NO: 918 - DNA, 40 bp, Artificial Sequence
  Description of Artificial Sequence: Synthetic primer
gacggggagccccggccgctccccagggtggccgcgccgg

SEQ ID NO: 919 - DNA, 40 bp, Artificial Sequence
  Description of Artificial Sequence: Synthetic primer
acggtgcatcgtcgtcgtcaaagcagcccgaatcggaagc

SEQ ID NO: 920 - DNA, 40 bp, Artificial Sequence
  Description of Artificial Sequence: Synthetic primer
gcagtacccgtcgctggcactgccgctgttgaggctgtcg

SEQ ID NO: 921 - DNA, 40 bp, Artificial Sequence
  Description of Artificial Sequence: Synthetic primer
tccaggtcaccaccctcgctggggcctgggcggccggccg

SEQ ID NO: 922 - DNA, 40 bp, Artificial Sequence
  Description of Artificial Sequence: Synthetic primer
cggcgatgtccaggaagcgcttcacgtagctctcccactg

SEQ ID NO: 923 - DNA, 40 bp, Artificial Sequence
  Description of Artificial Sequence: Synthetic primer
gctagagaagttgaccggcgtgccctccgcggagtcagtg

SEQ ID NO: 924 - DNA, 40 bp, Artificial Sequence
  Description of Artificial Sequence: Synthetic primer
ggggcctccttccggccctgcggacgctcccgcgtaaaag

SEQ ID NO: 925 - DNA, 40 bp, Artificial Sequence
  Description of Artificial Sequence: Synthetic primer
gtggcagctgctgcctggtgcagccacgtgacaattgaat

SEQ ID NO: 926 - DNA, 40 bp, Artificial Sequence
  Description of Artificial Sequence: Synthetic primer
tcagcgtcgccagctccgaggtcttggcaggccggtgtag

SEQ ID NO: 927 - DNA, 40 bp, Artificial Sequence
  Description of Artificial Sequence: Synthetic primer
ggacagctcggagcggcggcgccgcaagcccggcgactcc

SEQ ID NO: 928 - DNA, 40 bp, Artificial Sequence
  Description of Artificial Sequence: Synthetic primer
ggcagggccgtggcgggaagcgtgctgcgcaggatgtggg

SEQ ID NO: 929 - DNA, 40 bp, Artificial Sequence
  Description of Artificial Sequence: Synthetic primer
cctctcataaccaaactgatacattttgaaacctgagaag

SEQ ID NO: 930 - DNA, 40 bp, Artificial Sequence
  Description of Artificial Sequence: Synthetic primer
ttgcagcgtgagttaacctgcaactgattttgttttacag

SEQ ID NO: 931 - DNA, 40 bp, Artificial Sequence
  Description of Artificial Sequence: Synthetic primer
tttaaatattttagtatcatggtacagtcaccagaaaaag

SEQ ID NO: 932 - DNA, 40 bp, Artificial Sequence
  Description of Artificial Sequence: Synthetic primer
ttaagcatacatagaatcataactatcctatcataaacta

SEQ ID NO: 933 - DNA, 40 bp, Artificial Sequence
  Description of Artificial Sequence: Synthetic primer
tacctgttttgtagtacttgaaacttttactttttatttg

SEQ ID NO: 934 - DNA, 40 bp, Artificial Sequence
  Description of Artificial Sequence: Synthetic primer
atacagtaactttaaaatctttgcttgagttgagcctttg

SEQ ID NO: 935 - DNA, 40 bp, Artificial Sequence
  Description of Artificial Sequence: Synthetic primer
ctgggcagctggcggcgggcctgggtctgcccacccctca

SEQ ID NO: 936 - DNA, 40 bp, Artificial Sequence
  Description of Artificial Sequence: Synthetic primer
ctggggaagcaggtgggaactaactgccctggcacatctg

SEQ ID NO: 937 - DNA, 40 bp, Artificial Sequence
  Description of Artificial Sequence: Synthetic primer
gctgccctgtgagagcactgacacctggaacctcctcacc

SEQ ID NO: 938 - DNA, 40 bp, Artificial Sequence
  Description of Artificial Sequence: Synthetic primer
cagaggagggctggggagagagagcagaaaggggcatgtc

SEQ ID NO: 939 - DNA, 40 bp, Artificial Sequence
  Description of Artificial Sequence: Synthetic primer
ataggactatctctgtccccaagaatcttacaacacagtc

SEQ ID NO: 940 - DNA, 40 bp, Artificial Sequence
  Description of Artificial Sequence: Synthetic primer
ggacctcggagaacgcacctctttgccgtccatgttcagc

SEQ ID NO: 941 - DNA, 40 bp, Artificial Sequence
  Description of Artificial Sequence: Synthetic primer
aaactccagcctcgatttaaaaagtatgtcttcgattatg

SEQ ID NO: 942 - DNA, 40 bp, Artificial Sequence
  Description of Artificial Sequence: Synthetic primer
ttttggtgtaactaagatgttgcttatgctctgacacctg

SEQ ID NO: 943 - DNA, 40 bp, Artificial Sequence
  Description of Artificial Sequence: Synthetic primer
ttgcaagacgtgcactaataatattttatatgatctttcc

SEQ ID NO: 944 - DNA, 40 bp, Artificial Sequence
  Description of Artificial Sequence: Synthetic primer
tctgtaccattaatttacaaagcacgatatgaagcacaac

SEQ ID NO: 945 - DNA, 40 bp, Artificial Sequence
  Description of Artificial Sequence: Synthetic primer
cagccccattctcacacctctccccaccccgaaggcttac

SEQ ID NO: 946 - DNA, 40 bp, Artificial Sequence
  Description of Artificial Sequence: Synthetic primer
tcctcacctttcctgccatggtctgactcctgaagacacc

SEQ ID NO: 947 - DNA, 40 bp, Artificial Sequence
  Description of Artificial Sequence: Synthetic primer
ctgtattatattttctcagatcccagtaagtaacctgaag

SEQ ID NO: 948 - DNA, 40 bp, Artificial Sequence
  Description of Artificial Sequence: Synthetic primer
aaagttaatatgtttattattttcattggtttctgtgttc

SEQ ID NO: 949 - DNA, 40 bp, Artificial Sequence
  Description of Artificial Sequence: Synthetic primer
tagactatggaaagaaagtggaaattcctcagaataaaac

SEQ ID NO: 950 - DNA, 40 bp, Artificial Sequence
  Description of Artificial Sequence: Synthetic primer
tcctgggctggctgcctctgagctcaggcatttctctctc

SEQ ID NO: 951 - DNA, 40 bp, Artificial Sequence
  Description of Artificial Sequence: Synthetic primer
tttgcactgttagatttttaaaaggaatattttcccatcc

SEQ ID NO: 952 - DNA, 40 bp, Artificial Sequence
  Description of Artificial Sequence: Synthetic primer
acacacagatagatgtctagagtccatgatccattaccgc

SEQ ID NO: 953 - DNA, 40 bp, Artificial Sequence
  Description of Artificial Sequence: Synthetic primer
aaaaagcaatctctcctgggccccactgaaggccctcctc

SEQ ID NO: 954 - DNA, 40 bp, Artificial Sequence
  Description of Artificial Sequence: Synthetic primer
ttgccccatgctggccccgccctcacaacccctgagactc

SEQ ID NO: 955 - DNA, 40 bp, Artificial Sequence
  Description of Artificial Sequence: Synthetic primer
cccatgctaatttgaaggacccttgttgggtgtctcagtc

SEQ ID NO: 956 - DNA, 40 bp, Artificial Sequence
  Description of Artificial Sequence: Synthetic primer
cccaaggtggggccgcctggtgtctgactgtgacttctcc

SEQ ID NO: 957 - DNA, 40 bp, Artificial Sequence
  Description of Artificial Sequence: Synthetic primer
tttttgaggtttggttgttaacacttgattaaatatgttc

SEQ ID NO: 958 - DNA, 40 bp, Artificial Sequence
  Description of Artificial Sequence: Synthetic primer
cctctccttcagggcctataggggaggggaaaggtgagac

SEQ ID NO: 959 - DNA, 40 bp, Artificial Sequence
  Description of Artificial Sequence: Synthetic primer
atgtgagaacaacaaacacattctttagtaaaagcgcaag

SEQ ID NO: 960 - DNA, 40 bp, Artificial Sequence
  Description of Artificial Sequence: Synthetic primer
gtgctgggtattgatcgactgcatttgttgtgtcttctag

SEQ ID NO: 961 - DNA, 40 bp, Artificial Sequence
  Description of Artificial Sequence: Synthetic primer
gcacgctccctgcaaacaggtgccctgaccatctctgtcg

SEQ ID NO: 962 - DNA, 40 bp, Artificial Sequence
  Description of Artificial Sequence: Synthetic primer
gtggctgggcacttactccatcatcatctgagacacgacg

SEQ ID NO: 963 - DNA, 40 bp, Artificial Sequence
  Description of Artificial Sequence: Synthetic primer
tctctaggatcgaagctcatttctcaataattggctatac

SEQ ID NO: 964 - DNA, 40 bp, Artificial Sequence
  Description of Artificial Sequence: Synthetic primer
gtaagtttgcaattaattttggttttaatcttgttctttc

SEQ ID NO: 965 - DNA, 40 bp, Artificial Sequence
  Description of Artificial Sequence: Synthetic primer
tgtcactgagggctctgccagccctaacatgagatttgtc

SEQ ID NO: 966 - DNA, 40 bp, Artificial Sequence
  Description of Artificial Sequence: Synthetic primer
taagggacagagaatgtaacctcagagccaggcagtcatc

SEQ ID NO: 967 - DNA, 40 bp, Artificial Sequence
  Description of Artificial Sequence: Synthetic primer
ggctgggcctcggggttccgggctgccacgtccactcacg

SEQ ID NO: 968 - DNA, 40 bp, Artificial Sequence
  Description of Artificial Sequence: Synthetic primer
tcaaaacaaagcccatcgaggctggccagagaagacttac

SEQ ID NO: 969 - DNA, 40 bp, Artificial Sequence
  Description of Artificial Sequence: Synthetic primer
ggttgctgtctgaattgggacttgattgttattatgtgtc

SEQ ID NO: 970 - DNA, 40 bp, Artificial Sequence
  Description of Artificial Sequence: Synthetic primer
ctctcagttttgtcaccttgccaggactgcgcccccttac

SEQ ID NO: 971 - DNA, 40 bp, Artificial Sequence
  Description of Artificial Sequence: Synthetic primer
cagtaaacaaatctgagctaatgttatactgttgtgtatg

SEQ ID NO: 972 - DNA, 40 bp, Artificial Sequence
  Description of Artificial Sequence: Synthetic primer
ctcattgttagtaataaagagtttaagattaaagaagtac

SEQ ID NO: 973 - DNA, 40 bp, Artificial Sequence
  Description of Artificial Sequence: Synthetic primer
ctcagattaattgctgtgcttttggattccaggttgatgc

SEQ ID NO: 974 - DNA, 40 bp, Artificial Sequence
  Description of Artificial Sequence: Synthetic primer
catatatgtatatatttaagttgtaccaaaaactgcttac

SEQ ID NO: 975 - DNA, 40 bp, Artificial Sequence
  Description of Artificial Sequence: Synthetic primer
ctcccctgaactccaggtaaaagtaacaaagactatcaag

SEQ ID NO: 976 - DNA, 40 bp, Artificial Sequence
  Description of Artificial Sequence: Synthetic primer
tggctgttctgggtccatttcagaatctacatctgcatcg

SEQ ID NO: 977 - DNA, 40 bp, Artificial Sequence
  Description of Artificial Sequence: Synthetic primer
taaaaactgagtcttaatcatttatgggtttatggatttc

SEQ ID NO: 978 - DNA, 40 bp, Artificial Sequence
  Description of Artificial Sequence: Synthetic primer
cgcacacacacacaccccaccacaccctatcactatgtac

SEQ ID NO: 979 - DNA, 40 bp, Artificial Sequence
  Description of Artificial Sequence: Synthetic primer
agaccaaagaggtgtttcctacccctacctcccagcatcc

SEQ ID NO: 980 - DNA, 40 bp, Artificial Sequence
  Description of Artificial Sequence: Synthetic primer
cccctcgtctcctcggcctccccgtgactgtagtgttctc

SEQ ID NO: 981 - DNA, 40 bp, Artificial Sequence
  Description of Artificial Sequence: Synthetic primer
cccaggtcccaggccccatcccaagccagagtccctgctc

SEQ ID NO: 982 - DNA, 40 bp, Artificial Sequence
  Description of Artificial Sequence: Synthetic primer
gggcaaggtaggtgaccagaccgccttcctcctgtccgca

SEQ ID NO: 983 - DNA, 40 bp, Artificial Sequence
  Description of Artificial Sequence: Synthetic primer
ttgtaacattttcatttttcctgtatcttgcatgtttctc

SEQ ID NO: 984 - DNA, 40 bp, Artificial Sequence
  Description of Artificial Sequence: Synthetic primer
gtttcagtgaagcagggaacaatcactaatacaacatttg

SEQ ID NO: 985 - DNA, 40 bp, Artificial Sequence
  Description of Artificial Sequence: Synthetic primer
gctccaggccccttgggccctgccccgcttcgcccacagc

SEQ ID NO: 986 - DNA, 40 bp, Artificial Sequence
  Description of Artificial Sequence: Synthetic primer
tgcctgactgccttcctgttgggctctccctttccatcac

SEQ ID NO: 987 - DNA, 40 bp, Artificial Sequence
  Description of Artificial Sequence: Synthetic primer
ggtggcgtacttggggtctgaggcaaagctctgggtggtg

SEQ ID NO: 988 - DNA, 40 bp, Artificial Sequence
  Description of Artificial Sequence: Synthetic primer
cggccgcgcctgctcaggcacaaaggcgtagttggtctgg

SEQ ID NO: 989 - DNA, 40 bp, Artificial Sequence
  Description of Artificial Sequence: Synthetic primer
ctggcagctccccgctgccaccccggctctcaagctcacc

SEQ ID NO: 990 - DNA, 40 bp, Artificial Sequence
  Description of Artificial Sequence: Synthetic primer
cgtggcccaggatgaggatgactttgagatctgctccatc

SEQ ID NO: 991 - DNA, 40 bp, Artificial Sequence
  Description of Artificial Sequence: Synthetic primer
gtaaaatgagatctttttatttgtttgttttactactttc

SEQ ID NO: 992 - DNA, 40 bp, Artificial Sequence
  Description of Artificial Sequence: Synthetic primer
tttttaaaaataactactgcttaaattaaaaagtatattg

SEQ ID NO: 993 - DNA, 40 bp, Artificial Sequence
  Description of Artificial Sequence: Synthetic primer
cctaacaatctctcgtggacctggtgagcctgtgctgatg

SEQ ID NO: 994 - DNA, 40 bp, Artificial Sequence
  Description of Artificial Sequence: Synthetic primer
gcaggctagatggtatgcttgttttcatcatctcctctgc

SEQ ID NO: 995 - DNA, 40 bp, Artificial Sequence
  Description of Artificial Sequence: Synthetic primer
ttagcagatgtgtacattgaagtctcagtttttcctcaag

SEQ ID NO: 996 - DNA, 40 bp, Artificial Sequence
  Description of Artificial Sequence: Synthetic primer
agctgccatacctgctctaggaaactaccagataaataac

SEQ ID NO: 997 - DNA, 40 bp, Artificial Sequence
  Description of Artificial Sequence: Synthetic primer
tggccggcatgctccaaggcccctcatgacccccatgctc

SEQ ID NO: 998 - DNA, 40 bp, Artificial Sequence
  Description of Artificial Sequence: Synthetic primer
tggcatcgtctcaggccaggcccagggaatcagggtgctg

SEQ ID NO: 999 - DNA, 40 bp, Artificial Sequence
  Description of Artificial Sequence: Synthetic primer
cttaaaaggattttgctttgactggcttgtgatgtttatc

SEQ ID NO: 1000 - DNA, 40 bp, Artificial Sequence
  Description of Artificial Sequence: Synthetic primer
atgtttcatgctgtatataagttacaaaagtaaaacatta

SEQ ID NO: 1001 - DNA, 40 bp, Artificial Sequence
  Description of Artificial Sequence: Synthetic primer
tacggatttggctatcaggcgtatttatcccgatttcctc

SEQ ID NO: 1002 - DNA, 40 bp, Artificial Sequence
  Description of Artificial Sequence: Synthetic primer
tccctgtctttgcgttaaagccgtgttttccctttgttac

SEQ ID NO: 1003 - DNA, 40 bp, Artificial Sequence
  Description of Artificial Sequence: Synthetic primer
taactgtaaatcttgaaagttagtaagagtaaccccaaag

SEQ ID NO: 1004 - DNA, 40 bp, Artificial Sequence
  Description of Artificial Sequence: Synthetic primer
gtctagtgtgtgctaactctgggttgtcagctcccctaag

SEQ ID NO: 1005 - DNA, 40 bp, Artificial Sequence
  Description of Artificial Sequence: Synthetic primer
caggtgtctctgctaataccttcaccctctcctcatgttg

SEQ ID NO: 1006 - DNA, 40 bp, Artificial Sequence
  Description of Artificial Sequence: Synthetic primer
aagtaggatcggacttggcaagtcagagacattctcctcc

SEQ ID NO: 1007 - DNA, 40 bp, Artificial Sequence
  Description of Artificial Sequence: Synthetic primer
atgcaccttgtccacatggctttctcccaccctactcctg

SEQ ID NO: 1008 - DNA, 40 bp, Artificial Sequence
  Description of Artificial Sequence: Synthetic primer
cagtggctggtggtttctggcctggctgcctctcctgttc

SEQ ID NO: 1009 - DNA, 40 bp, Artificial Sequence
  Description of Artificial Sequence: Synthetic primer
tccctgagcttttcaccttgtgccgaaccttttcctgtgc

SEQ ID NO: 1010 - DNA, 40 bp, Artificial Sequence
  Description of Artificial Sequence: Synthetic primer
tgggtgctgtggggtaaactgtgtggcagggctgtctcgc

SEQ ID NO: 1011 - DNA, 40 bp, Artificial Sequence
  Description of Artificial Sequence: Synthetic primer
ccctctgtgatgaccccactcgggcccttcccaagacctg

SEQ ID NO: 1012 - DNA, 40 bp, Artificial Sequence
  Description of Artificial Sequence: Synthetic primer
ggggccgtagctctgagcctcatggtgcccacctctttcc

SEQ ID NO: 1013 - DNA, 40 bp, Artificial Sequence
  Description of Artificial Sequence: Synthetic primer
gggccttgtgaaggccaattcaacccgtgaacaaaactcc

SEQ ID NO: 1014 - DNA, 40 bp, Artificial Sequence
  Description of Artificial Sequence: Synthetic primer
catgtttgtgattattaatgggatattaatgtttagtctg

SEQ ID NO: 1015 - DNA, 40 bp, Artificial Sequence
  Description of Artificial Sequence: Synthetic primer
tggtaatgcattatattttaagattttgcctttcttatac

SEQ ID NO: 1016 - DNA, 40 bp, Artificial Sequence
  Description of Artificial Sequence: Synthetic primer
atgaagcatattcatgctaagtaactatcttaagggttgc

SEQ ID NO: 1017 - DNA, 40 bp, Artificial Sequence
  Description of Artificial Sequence: Synthetic primer
gataacagttctatttccaaagatcattatggcactttcc

SEQ ID NO: 1018 - DNA, 40 bp, Artificial Sequence
  Description of Artificial Sequence: Synthetic primer
ttcctatgacatatcaatgatttttaaagtagcagaatgg

SEQ ID NO: 1019 - DNA, 40 bp, Artificial Sequence
  Description of Artificial Sequence: Synthetic primer
cagacatttatttctgggctgtttgatttcttccttctcc

SEQ ID NO: 1020 - DNA, 40 bp, Artificial Sequence
  Description of Artificial Sequence: Synthetic primer
cgggttgaatgtgctttgttttcatgcccttctgctcaag

SEQ ID NO: 1021 - DNA, 40 bp, Artificial Sequence
  Description of Artificial Sequence: Synthetic primer
tgttttacgcgtggaatgcacacctccggccaacggagac

SEQ ID NO: 1022 - DNA, 40 bp, Artificial Sequence
  Description of Artificial Sequence: Synthetic primer
tacggccaacggtggattatccgggccgctgcgcgtctgg

SEQ ID NO: 1023 - DNA, 40 bp, Artificial Sequence
  Description of Artificial Sequence: Synthetic primer
tcaacaagattttaaaatacagcactaaaatgaagatgtg

SEQ ID NO: 1024 - DNA, 40 bp, Artificial Sequence
  Description of Artificial Sequence: Synthetic primer
gaaatagcactgccatttaattcacacttatgtttattgc

SEQ ID NO: 1025 - DNA, 40 bp, Artificial Sequence
  Description of Artificial Sequence: Synthetic primer
gaccgtcaccccagatgtgtgggaggcaggcacatgatgg

SEQ ID NO: 1026 - DNA, 40 bp, Artificial Sequence
  Description of Artificial Sequence: Synthetic primer
ccatccagcccttgccggcctgtctgcccgattcttccag

SEQ ID NO: 1027 - DNA, 40 bp, Artificial Sequence
  Description of Artificial Sequence: Synthetic primer
caaaaaagactgatccccagcctctcccttccttctttgc

SEQ ID NO: 1028 - DNA, 40 bp, Artificial Sequence
  Description of Artificial Sequence: Synthetic primer
gtcaggcacagagtgccttctacctaactccacatccagc

SEQ ID NO: 1029 - DNA, 40 bp, Artificial Sequence
  Description of Artificial Sequence: Synthetic primer
catggggccctacctgcccatgtgggtgggtggttgtcac

SEQ ID NO: 1030 - DNA, 40 bp, Artificial Sequence
  Description of Artificial Sequence: Synthetic primer
caaaaacaatgtatcagaagacatatctaatcttcacttc

SEQ ID NO: 1031 - DNA, 40 bp, Artificial Sequence
  Description of Artificial Sequence: Synthetic primer
ttcacccaggaggcagccagctgccctggccccagaggac

SEQ ID NO: 1032 - DNA, 40 bp, Artificial Sequence
  Description of Artificial Sequence: Synthetic primer
cttgggtctaattaggactttttgtccctctcttattctc

SEQ ID NO: 1033 - DNA, 40 bp, Artificial Sequence
  Description of Artificial Sequence: Synthetic primer
cttctttctagaagataagctaaaaaggatattattttgc

SEQ ID NO: 1034 - DNA, 40 bp, Artificial Sequence
  Description of Artificial Sequence: Synthetic primer
gcacacgtcctggagccagcacagcgccttcgagcgagag

SEQ ID NO: 1035 - DNA, 40 bp, Artificial Sequence
  Description of Artificial Sequence: Synthetic primer
cgaaaggtgaaagagggcttcactgggcagctgatgtgac

SEQ ID NO: 1036 - DNA, 40 bp, Artificial Sequence
  Description of Artificial Sequence: Synthetic primer
tgtctgcaggcatgaacacacacgcaggcccgcctacccc

SEQ ID NO: 1037 - DNA, 40 bp, Artificial Sequence
  Description of Artificial Sequence: Synthetic primer
ttcagctctgagctggttataaatcatgtttagcatggaa

SEQ ID NO: 1038 - DNA, 40 bp, Artificial Sequence
  Description of Artificial Sequence: Synthetic primer
ccctttcagtttcagttatcatttgttattgattcttttc

SEQ ID NO: 1039 - DNA, 40 bp, Artificial Sequence
  Description of Artificial Sequence: Synthetic primer
caacgacatagagtacagtcctacaaatgccaatgtgttc

SEQ ID NO: 1040 - DNA, 40 bp, Artificial Sequence
  Description of Artificial Sequence: Synthetic primer
cttggcaacttaaaatttcacgctattatcaaaatggaag

SEQ ID NO: 1041 - DNA, 40 bp, Artificial Sequence
  Description of Artificial Sequence: Synthetic primer
tactttaatgccagggattttgttcctatctaataatgtc

SEQ ID NO: 1042 - DNA, 40 bp, Artificial Sequence
  Description of Artificial Sequence: Synthetic primer
taaactgcttcacatctagatataatggaaataattttgc

SEQ ID NO: 1043 - DNA, 40 bp, Artificial Sequence
  Description of Artificial Sequence: Synthetic primer
atttaaaaatattctctggtggtattaagataacatttcc

SEQ ID NO: 1044 - DNA, 40 bp, Artificial Sequence
  Description of Artificial Sequence: Synthetic primer
taataacccatctctcccttctttgtccatctctttttag

SEQ ID NO: 1045 - DNA, 40 bp, Artificial Sequence
  Description of Artificial Sequence: Synthetic primer
ctctgagctgcactcctgatcctgaaagttcttgctgctc

SEQ ID NO: 1046 - DNA, 40 bp, Artificial Sequence
  Description of Artificial Sequence: Synthetic primer
tttgaacaagccaaacatggctgcacaagtgcccctcagc

SEQ ID NO: 1047 - DNA, 40 bp, Artificial Sequence
  Description of Artificial Sequence: Synthetic primer
gctgaccttgacctctgagcacagtgcagtcagcccccac

SEQ ID NO: 1048 - DNA, 40 bp, Artificial Sequence
  Description of Artificial Sequence: Synthetic primer
ggcgggcctgaggactgaccgacacgtgccaccccttcag

SEQ ID NO: 1049 - DNA, 40 bp, Artificial Sequence
  Description of Artificial Sequence: Synthetic primer
aaataaacacacacggcgccgccctctgagcccgcccccg

SEQ ID NO: 1050 - DNA, 40 bp, Artificial Sequence
  Description of Artificial Sequence: Synthetic primer
ccgcaccctgagtggggcgggcgcgctgccccctggctcc

SEQ ID NO: 1051 - DNA, 40 bp, Artificial Sequence
  Description of Artificial Sequence: Synthetic primer
aaaattcagcaactatatctataatttcatctcttttgtc

SEQ ID NO: 1052 - DNA, 40 bp, Artificial Sequence
  Description of Artificial Sequence: Synthetic primer
taggatcataaaccatcctgtttttgttttctattttctc

SEQ ID NO: 1053 - DNA, 40 bp, Artificial Sequence
  Description of Artificial Sequence: Synthetic primer
cagtgagcatttgttactgcaaccactatctattttctcc

SEQ ID NO: 1054 - DNA, 40 bp, Artificial Sequence
  Description of Artificial Sequence: Synthetic primer
gctctagctgaaacagggcttctgctgatgggtcaacctg

SEQ ID NO: 1055 - DNA, 40 bp, Artificial Sequence
  Description of Artificial Sequence: Synthetic primer
gcagtggtgcctgctccagcgtgtgactctgcgccctctc

SEQ ID NO: 1056 - DNA, 40 bp, Artificial Sequence
  Description of Artificial Sequence: Synthetic primer
aggttctcataccagacgtccgagtaagtggtgaagactc

SEQ ID NO: 1057 - DNA, 40 bp, Artificial Sequence
  Description of Artificial Sequence: Synthetic primer
agccggaagctgggcatctgcagctggctcggcgcactcc

SEQ ID NO: 1058 - DNA, 40 bp, Artificial Sequence
  Description of Artificial Sequence: Synthetic primer
gggagagcatccagggcgggtgggaggaccgggacagcac

SEQ ID NO: 1059 - DNA, 40 bp, Artificial Sequence
  Description of Artificial Sequence: Synthetic primer
cctcattcgccacggcacccgctaccccacggtcaaacag

SEQ ID NO: 1060 - DNA, 40 bp, Artificial Sequence
  Description of Artificial Sequence: Synthetic primer
tagccccgccatccctggacccgcgggcctgcagcaaccc

SEQ ID NO: 1061 - DNA, 40 bp, Artificial Sequence
  Description of Artificial Sequence: Synthetic primer
tgggcacatgtaggctctccctgagtaacctgggctctgc

SEQ ID NO: 1062 - DNA, 40 bp, Artificial Sequence
  Description of Artificial Sequence: Synthetic primer
ttggccccacgctctctggttccaatcccaagtgaatccc

SEQ ID NO: 1063 - DNA, 40 bp, Artificial Sequence
  Description of Artificial Sequence: Synthetic primer
agaaacaagttgtttatcccatctctcctttttctcccta

SEQ ID NO: 1064 - DNA, 40 bp, Artificial Sequence
  Description of Artificial Sequence: Synthetic primer
aattaggagaaaaaagttaatttctattacaaaaaatacc

SEQ ID NO: 1065 - DNA, 40 bp, Artificial Sequence
  Description of Artificial Sequence: Synthetic primer
tttatactagactagactgcaaaaacagtaacactgaatc

SEQ ID NO: 1066 - DNA, 40 bp, Artificial Sequence
  Description of Artificial Sequence: Synthetic primer
tcatggatatatgggctttcaataatctgtttttatctac

SEQ ID NO: 1067 - DNA, 40 bp, Artificial Sequence
  Description of Artificial Sequence: Synthetic primer
gaattttggcaatgtatgttaatggaatcttctgtatctg

SEQ ID NO: 1068 - DNA, 40 bp, Artificial Sequence
  Description of Artificial Sequence: Synthetic primer
acatgctccataaatattctaacatggaaaatggcatcag

SEQ ID NO: 1069 - DNA, 40 bp, Artificial Sequence
  Description of Artificial Sequence: Synthetic primer
atgacttcttgtgcattgcaggtaatatctgtgttttgtg

SEQ ID NO: 1070 - DNA, 40 bp, Artificial Sequence
  Description of Artificial Sequence: Synthetic primer
acatatgactacctacaaaacaaggttcaaatttattatc

SEQ ID NO: 1071 - DNA, 40 bp, Artificial Sequence
  Description of Artificial Sequence: Synthetic primer
tttcttgatgtttttcaatgatgaatcttttgttttgtag

SEQ ID NO: 1072 - DNA, 40 bp, Artificial Sequence
  Description of Artificial Sequence: Synthetic primer
tatatatgtgacttttttggtgtgtgtaacacattattac

SEQ ID NO: 1073 - DNA, 40 bp, Artificial Sequence
  Description of Artificial Sequence: Synthetic primer
tctcatattagaaataacaatgtgtaccatataactaatt

SEQ ID NO: 1074 - DNA, 40 bp, Artificial Sequence
  Description of Artificial Sequence: Synthetic primer
cacgcgaccagccggtctcgcctcgggtccccggcctcag

SEQ ID NO: 1075 - DNA, 40 bp, Artificial Sequence
  Description of Artificial Sequence: Synthetic primer
ggggcgggaggcggtgaccagcagcaggaggagaaagaac

SEQ ID NO: 1076 - DNA, 40 bp, Artificial Sequence
  Description of Artificial Sequence: Synthetic primer
ttgcacagtgagccattgatgagagaccggcacttgactc

SEQ ID NO: 1077 - DNA, 40 bp, Artificial Sequence
  Description of Artificial Sequence: Synthetic primer
caccgcctgcacctccgtagcaagagaggaaacctcagtg

SEQ ID NO: 1078 - DNA, 40 bp, Artificial Sequence
  Description of Artificial Sequence: Synthetic primer
gtggccctcacccgtggggcactcgcactggaactcattg

SEQ ID NO: 1079 - DNA, 40 bp, Artificial Sequence
  Description of Artificial Sequence: Synthetic primer
tgcccagtggggcactggggccgcgcgtgcccccctcact

SEQ ID NO: 1080 - DNA, 40 bp, Artificial Sequence
  Description of Artificial Sequence: Synthetic primer
tacgtacatttactcatcttacttcctgtatcttcttatc

SEQ ID NO: 1081 - DNA, 40 bp, Artificial Sequence
  Description of Artificial Sequence: Synthetic primer
tattttggttcactcattgtgagataataaaataaacatg

SEQ ID NO: 1082 - DNA, 40 bp, Artificial Sequence
  Description of Artificial Sequence: Synthetic primer
ttacaggtaaaattaaagtttagaataatgtgattatttc

SEQ ID NO: 1083 - DNA, 40 bp, Artificial Sequence
  Description of Artificial Sequence: Synthetic primer
tcatattacttcagtagtcccatgtggatttacacactaa

SEQ ID NO: 1084 - DNA, 40 bp, Artificial Sequence
  Description of Artificial Sequence: Synthetic primer
taaaatttacaattaaaacacaattaccaagaaacaaatc

SEQ ID NO: 1085 - DNA, 40 bp, Artificial Sequence
  Description of Artificial Sequence: Synthetic primer
aaacctgtgactgtttttgtcaaaatttattaaaatattc

SEQ ID NO: 1086 - DNA, 40 bp, Artificial Sequence
  Description of Artificial Sequence: Synthetic primer
gggcgggcgcccggaccccgctgaggctgcgcccctgtcc

SEQ ID NO: 1087 - DNA, 40 bp, Artificial Sequence
  Description of Artificial Sequence: Synthetic primer
gctcccgccctgcgtccccgcccgcctgcccggcctcctc

SEQ ID NO: 1088 - DNA, 40 bp, Artificial Sequence
  Description of Artificial Sequence: Synthetic primer
cctcttagtttctaaggcacgttttaaattcagccatatt

SEQ ID NO: 1089 - DNA, 40 bp, Artificial Sequence
  Description of Artificial Sequence: Synthetic primer
ttaaagcatgtccacatctgttcaagtaacaaaaccatac

SEQ ID NO: 1090 - DNA, 40 bp, Artificial Sequence
  Description of Artificial Sequence: Synthetic primer
cattgtacaatacatagtctttaacaatatagaaaagtgc

SEQ ID NO: 1091 - DNA, 40 bp, Artificial Sequence
  Description of Artificial Sequence: Synthetic primer
tatccccttcctaaaatattactcaaaatcattatctctg

SEQ ID NO: 1092 - DNA, 40 bp, Artificial Sequence
  Description of Artificial Sequence: Synthetic primer
gagtacccaggcttggcaggtcttgccctcctcctttaac

SEQ ID NO: 1093 - DNA, 40 bp, Artificial Sequence
  Description of Artificial Sequence: Synthetic primer
gtgatagatattgatgactctcatgtgtttgtctctcttg

SEQ ID NO: 1094 - DNA, 40 bp, Artificial Sequence
  Description of Artificial Sequence: Synthetic primer
cttccacagggaaaggcctctctgtggccgggtgtactca

SEQ ID NO: 1095 - DNA, 40 bp, Artificial Sequence
  Description of Artificial Sequence: Synthetic primer
agccccatttctgttgcttctggctgaccgttacctttcc

SEQ ID NO: 1096 - DNA, 40 bp, Artificial Sequence
  Description of Artificial Sequence: Synthetic primer
ctgttgtatttatttctgtctcctgttatttcattttgac

SEQ ID NO: 1097 - DNA, 40 bp, Artificial Sequence
  Description of Artificial Sequence: Synthetic primer
gtatttgtaatgtgacccagggtataaatcacgttaagac

SEQ ID NO: 1098 - DNA, 40 bp, Artificial Sequence
  Description of Artificial Sequence: Synthetic primer
aaaccttctaaacctgatgaaaatccccaaacacatgaag

SEQ ID NO: 1099 - DNA, 40 bp, Artificial Sequence
  Description of Artificial Sequence: Synthetic primer
tcttcctctgtcttctctctcttcatactttttatttttt

SEQ ID NO: 1100 - DNA, 40 bp, Artificial Sequence
  Description of Artificial Sequence: Synthetic primer
atgtataatctgtgattcttagccaacttgaaatgaagac

SEQ ID NO: 1101 - DNA, 40 bp, Artificial Sequence
  Description of Artificial Sequence: Synthetic primer
tttgaacccagtcagcctagtttcagagtccatgctcttg

SEQ ID NO: 1102 - DNA, 40 bp, Artificial Sequence
  Description of Artificial Sequence: Synthetic primer
catttcactgctttattcctgtcactaatatccaatccag

SEQ ID NO: 1103 - DNA, 40 bp, Artificial Sequence
  Description of Artificial Sequence: Synthetic primer
ataaacacaaaaatgactctttgttttctcttgtttactg

SEQ ID NO: 1104 - DNA, 40 bp, Artificial Sequence
  Description of Artificial Sequence: Synthetic primer
tttataaatgtcatataagaaatcttgataaaaattaaaa

SEQ ID NO: 1105 - DNA, 40 bp, Artificial Sequence
  Description of Artificial Sequence: Synthetic primer
ttgggtatttacacaattatccaaattaaagaaataaaag

SEQ ID NO: 1106 - DNA, 40 bp, Artificial Sequence
  Description of Artificial Sequence: Synthetic primer
gatggattaagagagagcaggatgacatagagaggccaag

SEQ ID NO: 1107 - DNA, 40 bp, Artificial Sequence
  Description of Artificial Sequence: Synthetic primer
ttatgaatgcatcctttgtcttttaaaatctattgttctc

SEQ ID NO: 1108 - DNA, 40 bp, Artificial Sequence
  Description of Artificial Sequence: Synthetic primer
aaaaaccatccatggctccctgcagagaaaacggccactc

SEQ ID NO: 1109 - DNA, 40 bp, Artificial Sequence
  Description of Artificial Sequence: Synthetic primer
tggacatgcgccaggtggctggactgctgcatctgtgtgc

SEQ ID NO: 1110 - DNA, 40 bp, Artificial Sequence
  Description of Artificial Sequence: Synthetic primer
atgaaagagccatgctactgttggacttggtcccactctg

SEQ ID NO: 1111 - DNA, 40 bp, Artificial Sequence
  Description of Artificial Sequence: Synthetic primer
taaaagtgatgtttttcaaatgccatttactgagtctctc

SEQ ID NO: 1112 - DNA, 40 bp, Artificial Sequence
  Description of Artificial Sequence: Synthetic primer
aggctcttaaccagtaagctgagctgcctcagatgagccc

SEQ ID NO: 1113 - DNA, 40 bp, Artificial Sequence
  Description of Artificial Sequence: Synthetic primer
cagtcaccaggcttcacgggtcctcagctgcccgctcctc

SEQ ID NO: 1114 - DNA, 40 bp, Artificial Sequence
  Description of Artificial Sequence: Synthetic primer
ctcttcttcctgcagggatggagtggaggatattgacagc

SEQ ID NO: 1115 - DNA, 40 bp, Artificial Sequence
  Description of Artificial Sequence: Synthetic primer
gccatcaagaagtctcaggggaaggaaggttaggactctg

SEQ ID NO: 1116 - DNA, 40 bp, Artificial Sequence
  Description of Artificial Sequence: Synthetic primer
gtcctcaagagacacctgcaacagtaatgctactttattc

SEQ ID NO: 1117 - DNA, 40 bp, Artificial Sequence
  Description of Artificial Sequence: Synthetic primer
aagaagtggcccttgagtttccaactaatttgacttcttg

SEQ ID NO: 1118 - DNA, 40 bp, Artificial Sequence
  Description of Artificial Sequence: Synthetic primer
ttgagcctcagctggcgcttacagtagctgttcttattgg

SEQ ID NO: 1119 - DNA, 40 bp, Artificial Sequence
  Description of Artificial Sequence: Synthetic primer
gcagacagggaaagatctgctggacccatctgcagtacac

SEQ ID NO: 1120 - DNA, 40 bp, Artificial Sequence
  Description of Artificial Sequence: Synthetic primer
aggggtccacgtggggaacagccgccatggcacagaagag

SEQ ID NO: 1121 - DNA, 40 bp, Artificial Sequence
  Description of Artificial Sequence: Synthetic primer
cacccagagactgaggcagtgtgtgtgctgtgtttgcatg

SEQ ID NO: 1122 - DNA, 40 bp, Artificial Sequence
  Description of Artificial Sequence: Synthetic primer
aaatctttataataagaacatttaaaaaaactgggacttg

SEQ ID NO: 1123 - DNA, 40 bp, Artificial Sequence
  Description of Artificial Sequence: Synthetic primer
cacaagacttcatatccaagaaatcggtactctttcactc

SEQ ID NO: 1124 - DNA, 40 bp, Artificial Sequence
  Description of Artificial Sequence: Synthetic primer
gatcagggcatttctataaaaaataaactattttctttcc

SEQ ID NO: 1125 - DNA, 40 bp, Artificial Sequence
  Description of Artificial Sequence: Synthetic primer
attagagatgacaattatcaacctcatctgctctttcttg

SEQ ID NO: 1126 - DNA, 40 bp, Artificial Sequence
  Description of Artificial Sequence: Synthetic primer
catagctgacagctataaaatataagaatgctaggaatac

SEQ ID NO: 1127 - DNA, 40 bp, Artificial Sequence
  Description of Artificial Sequence: Synthetic primer
tattagagaaaaaagtgtcatgtagaattatgtattgatg

SEQ ID NO: 1128 - DNA, 40 bp, Artificial Sequence
  Description of Artificial Sequence: Synthetic primer
tggcccaggccacctggcctcaggcgggcaggcggggtcc

SEQ ID NO: 1129 - DNA, 40 bp, Artificial Sequence
  Description of Artificial Sequence: Synthetic primer
acccatggcactgagggctatgtgggctccccctgcattg

SEQ ID NO: 1130 - DNA, 40 bp, Artificial Sequence
  Description of Artificial Sequence: Synthetic primer
ttttctggatgggagggacattgattttgtttatttaatg

SEQ ID NO: 1131 - DNA, 40 bp, Artificial Sequence
  Description of Artificial Sequence: Synthetic primer
tcaaaggttggttctaaatgccctcctatatgcattgtcc

SEQ ID NO: 1132 - DNA, 40 bp, Artificial Sequence
  Description of Artificial Sequence: Synthetic primer
ccgtccatgccacccagccaactgtttatcccttctgctc

SEQ ID NO: 1133 - DNA, 40 bp, Artificial Sequence
  Description of Artificial Sequence: Synthetic primer
gcccgcctgtgcctggagcatgacctgcggggtgggatgc

SEQ ID NO: 1134 - DNA, 40 bp, Artificial Sequence
  Description of Artificial Sequence: Synthetic primer
attggagggagcaggaaggacaatcccaggcccttctttg

SEQ ID NO: 1135 - DNA, 40 bp, Artificial Sequence
  Description of Artificial Sequence: Synthetic primer
cagtgccccagcaggatgaggaggatgactgggaagacag

SEQ ID NO: 1136 - DNA, 40 bp, Artificial Sequence
  Description of Artificial Sequence: Synthetic primer
ttactgactagtcttttgttttggttttcaataataatgc

SEQ ID NO: 1137 - DNA, 40 bp, Artificial Sequence
  Description of Artificial Sequence: Synthetic primer
gaaagcttgtgatcagatgcaataaatgtttttattattt

SEQ ID NO: 1138 - DNA, 40 bp, Artificial Sequence
  Description of Artificial Sequence: Synthetic primer
atattctctcccatttagactgaagagaacaaagagttgg

SEQ ID NO: 1139 - DNA, 40 bp, Artificial Sequence
  Description of Artificial Sequence: Synthetic primer
aagatgtaggttcaaacaaaagccgtcgattcttattctg

SEQ ID NO: 1140 - DNA, 40 bp, Artificial Sequence
  Description of Artificial Sequence: Synthetic primer
tatatggtaatcttcatttttttttctccttttctgaaac

SEQ ID NO: 1141 - DNA, 40 bp, Artificial Sequence
  Description of Artificial Sequence: Synthetic primer
cactactgccagtaatttaaacattcccatagaggtattt

SEQ ID NO: 1142 - DNA, 40 bp, Artificial Sequence
  Description of Artificial Sequence: Synthetic primer
tacaaatgctgtaaagctaaatgttgaaatggtgacatga

SEQ ID NO: 1143 - DNA, 40 bp, Artificial Sequence
  Description of Artificial Sequence: Synthetic primer
ggtggtggaatgccttagggaccagaagccctaagtaccc

SEQ ID NO: 1144 - DNA, 40 bp, Artificial Sequence
  Description of Artificial Sequence: Synthetic primer
aagctgaacttcactccagttaatgctctcttcaattctg

SEQ ID NO: 1145 - DNA, 40 bp, Artificial Sequence
  Description of Artificial Sequence: Synthetic primer
aacatgtgaaccgagaagtcaagcattatgattttgagag

SEQ ID NO: 1146 - DNA, 40 bp, Artificial Sequence
  Description of Artificial Sequence: Synthetic primer
ttacaatgaaataaaggttaaactattaaaatgtgttcag

SEQ ID NO: 1147 - DNA, 40 bp, Artificial Sequence
  Description of Artificial Sequence: Synthetic primer
agcctagttattatgttgcatctttcttatcatatttttt

SEQ ID NO: 1148 - DNA, 40 bp, Artificial Sequence
  Description of Artificial Sequence: Synthetic primer
aactgatgcaaactcttgcacaaatgctgaaagctgtacc

SEQ ID NO: 1149 - DNA, 40 bp, Artificial Sequence
  Description of Artificial Sequence: Synthetic primer
ttgtttttcttatgttctgataatatattcccgtttttag

SEQ ID NO: 1150 - DNA, 40 bp, Artificial Sequence
  Description of Artificial Sequence: Synthetic primer
tgtcagtgtggagcatcctgtggggtctctggggtcttcc

SEQ ID NO: 1151 - DNA, 40 bp, Artificial Sequence
  Description of Artificial Sequence: Synthetic primer
cgttcacactgcagtctcccgtttcccgttgcaggcttcg

SEQ ID NO: 1152 - DNA, 40 bp, Artificial Sequence
  Description of Artificial Sequence: Synthetic primer
aaaaagttacctaacagtcaacaatgcaacatttagatac

SEQ ID NO: 1153 - DNA, 40 bp, Artificial Sequence
  Description of Artificial Sequence: Synthetic primer
atttagttcaaagtagactgctataattgggctatttttt

SEQ ID NO: 1154 - DNA, 40 bp, Artificial Sequence
  Description of Artificial Sequence: Synthetic primer
gaagtaccttcaccgtaagtttttcctccattttcaatac

SEQ ID NO: 1155 - DNA, 40 bp, Artificial Sequence
  Description of Artificial Sequence: Synthetic primer
tatattttctcttgtttttaaatgttagggaaacggactc

SEQ ID NO: 1156 - DNA, 40 bp, Artificial Sequence
  Description of Artificial Sequence: Synthetic primer
gagaactgtttttggtaaggtgatgggagttggggttctc

SEQ ID NO: 1157 - DNA, 40 bp, Artificial Sequence
  Description of Artificial Sequence: Synthetic primer
acccggaagcctgtgaggcaggcagtgctggagggagagg

SEQ ID NO: 1158 - DNA, 40 bp, Artificial Sequence
  Description of Artificial Sequence: Synthetic primer
atatatagtctgcttttgacaaaacagtcaaaaattactc

SEQ ID NO: 1159 - DNA, 40 bp, Artificial Sequence
  Description of Artificial Sequence: Synthetic primer
tttctttttattttgttttcctcccaaccttcttattctc

SEQ ID NO: 1160 - DNA, 40 bp, Artificial Sequence
  Description of Artificial Sequence: Synthetic primer
ttagcttggtgggaggactgacctaagcaagtttgttctg

SEQ ID NO: 1161 - DNA, 40 bp, Artificial Sequence
  Description of Artificial Sequence: Synthetic primer
tgcatgccccactgacgtgtgtgtgtgttaagattttggc

SEQ ID NO: 1162 - DNA, 40 bp, Artificial Sequence
  Description of Artificial Sequence: Synthetic primer
ggaacataaattactcgccagtggaggctccatgcaagag

SEQ ID NO: 1163 - DNA, 40 bp, Artificial Sequence
  Description of Artificial Sequence: Synthetic primer
cccggcgccattgtaactgtgacatctccgtggttctttg

SEQ ID NO: 1164 - DNA, 40 bp, Artificial Sequence
  Description of Artificial Sequence: Synthetic primer
ttatctctgatgctttttaagtgtacataaactgaccttc

SEQ ID NO: 1165 - DNA, 40 bp, Artificial Sequence
  Description of Artificial Sequence: Synthetic primer
cttgctgcgaggcacttttaagacaagagggtttgaagtg

SEQ ID NO: 1166 - DNA, 40 bp, Artificial Sequence
  Description of Artificial Sequence: Synthetic primer
cagcgcctggtaggtggggcggggtggtgactctttgctc

SEQ ID NO: 1167 - DNA, 40 bp, Artificial Sequence
  Description of Artificial Sequence: Synthetic primer
agcagggcttgagggatcctggggaccaatgcaaggtttg

SEQ ID NO: 1168 - DNA, 40 bp, Artificial Sequence
  Description of Artificial Sequence: Synthetic primer
tgagttattcaaatactggagcggatggcaaattcaaatc

SEQ ID NO: 1169 - DNA, 40 bp, Artificial Sequence
  Description of Artificial Sequence: Synthetic primer
catagaatattcatttctttcattaaaataatttgtattt

SEQ ID NO: 1170 - DNA, 40 bp, Artificial Sequence
  Description of Artificial Sequence: Synthetic primer
ataccagagatattcaattcaaaaaaggctaataaaaatc

SEQ ID NO: 1171 - DNA, 40 bp, Artificial Sequence
  Description of Artificial Sequence: Synthetic primer
acatatttattttatttgagcattatgttaccacgttttg

SEQ ID NO: 1172 - DNA, 40 bp, Artificial Sequence
  Description of Artificial Sequence: Synthetic primer
tctcttttagtagtttaggattcaagcaattttctgtgtc

SEQ ID NO: 1173 - DNA, 40 bp, Artificial Sequence
  Description of Artificial Sequence: Synthetic primer
taatttatttaaccaatccccatgtttccaattctaatgc

SEQ ID NO: 1174 - DNA, 40 bp, Artificial Sequence
  Description of Artificial Sequence: Synthetic primer
aaattaaacagttctttctgtgggtattgagcacatgatt

SEQ ID NO: 1175 - DNA, 40 bp, Artificial Sequence
  Description of Artificial Sequence: Synthetic primer
tattacataatacatttgttatcagcaagttcttctcaag

SEQ ID NO: 1176 - DNA, 40 bp, Artificial Sequence
  Description of Artificial Sequence: Synthetic primer
tacaatgatttccacttctcttatttacattttctaatcc

SEQ ID NO: 1177 - DNA, 40 bp, Artificial Sequence
  Description of Artificial Sequence: Synthetic primer
ctttagataaacaggtcataaacaaggaattatatcagac

SEQ ID NO: 1178 - DNA, 40 bp, Artificial Sequence
  Description of Artificial Sequence: Synthetic primer
ctgtccttgcctctggggatgcggattccaacctgtgctc

SEQ ID NO: 1179 - DNA, 40 bp, Artificial Sequence
  Description of Artificial Sequence: Synthetic primer
tatcacagtccacaacccaatggagacctcccccatccac

SEQ ID NO: 1180 - DNA, 40 bp, Artificial Sequence
  Description of Artificial Sequence: Synthetic primer
cctactactgggcattgacctaaaacaattatcctcattc

SEQ ID NO: 1181 - DNA, 40 bp, Artificial Sequence
  Description of Artificial Sequence: Synthetic primer
gcaccttgggttgtgacacactgaggacactaacagatgg

SEQ ID NO: 1182 - DNA, 40 bp, Artificial Sequence
  Description of Artificial Sequence: Synthetic primer
gcttcatgggaatctggggtttgttttgttggtgttttat

SEQ ID NO: 1183 - DNA, 40 bp, Artificial Sequence
  Description of Artificial Sequence: Synthetic primer
gtctccagctgcctctcttagtaacattcatatactctac

SEQ ID NO: 1184 - DNA, 40 bp, Artificial Sequence
  Description of Artificial Sequence: Synthetic primer
gagttaataatgtatcctagtttgtaatgtattctttagg

SEQ ID NO: 1185 - DNA, 40 bp, Artificial Sequence
  Description of Artificial Sequence: Synthetic primer
aatttaatagcaaacatagtagtatataattagaatatac

SEQ ID NO: 1186 - DNA, 40 bp, Artificial Sequence
  Description of Artificial Sequence: Synthetic primer
gtctgcgtgatgatcatttttaaccacatcttctgttttc

SEQ ID NO: 1187 - DNA, 40 bp, Artificial Sequence
  Description of Artificial Sequence: Synthetic primer
gaatgcaggacctctggcagaagccagaaaagatttcatc

SEQ ID NO: 1188 - DNA, 40 bp, Artificial Sequence
  Description of Artificial Sequence: Synthetic primer
catgctcctctctcggggaccatcggagccgggcagttac

SEQ ID NO: 1189 - DNA, 40 bp, Artificial Sequence
  Description of Artificial Sequence: Synthetic primer
caacctttttgctttgcaaaaaacacatccatggaatatg

SEQ ID NO: 1190 - DNA, 40 bp, Artificial Sequence
  Description of Artificial Sequence: Synthetic primer
ggctttcttaaaagaaccccaaacagaaaaagataaagtg

SEQ ID NO: 1191 - DNA, 40 bp, Artificial Sequence
  Description of Artificial Sequence: Synthetic primer
aagaattcagttgcttacttttcttaaaaacatctttccc

SEQ ID NO: 1192 - DNA, 40 bp, Artificial Sequence
  Description of Artificial Sequence: Synthetic primer
gaggaggtaggggtacacacgtaacataaatctgatgagc

SEQ ID NO: 1193 - DNA, 40 bp, Artificial Sequence
  Description of Artificial Sequence: Synthetic primer
gatctactattgttgatcattgttccttcccctcagacac

SEQ ID NO: 1194 - DNA, 40 bp, Artificial Sequence
  Description of Artificial Sequence: Synthetic primer
ccccagaccctcagttaccattgtatcccctttccttgtc

SEQ ID NO: 1195 - DNA, 40 bp, Artificial Sequence
  Description of Artificial Sequence: Synthetic primer
gtgttatttggaagaggcctaggcacagggtgctagaaag

SEQ ID NO: 1196 - DNA, 40 bp, Artificial Sequence
  Description of Artificial Sequence: Synthetic primer
tgagaagtttaaatgttgggtagttccttatgtaatgttt

SEQ ID NO: 1197 - DNA, 40 bp, Artificial Sequence
  Description of Artificial Sequence: Synthetic primer
taatatatctctacagagagtaacacagcaagaaagtaac

SEQ ID NO: 1198 - DNA, 40 bp, Artificial Sequence
  Description of Artificial Sequence: Synthetic primer
tctaagattgtaagaatttaagtatgtaacaaagcatttc

SEQ ID NO: 1199 - DNA, 40 bp, Artificial Sequence
  Description of Artificial Sequence: Synthetic primer
actgaagtttctaaaaagccaaaacaactgttgagtccac

SEQ ID NO: 1200 - DNA, 40 bp, Artificial Sequence
  Description of Artificial Sequence: Synthetic primer
tggccctcgttgggctggcgctcattggcctcccttgtgc

SEQ ID NO: 1201 - DNA, 40 bp, Artificial Sequence
  Description of Artificial Sequence: Synthetic primer
gaggccattgctgcccacggagctctggcacgctagcacc

SEQ ID NO: 1202 - DNA, 40 bp, Artificial Sequence
  Description of Artificial Sequence: Synthetic primer
actctttttaattgaaagatcaaacctaactcctttttgt

SEQ ID NO: 1203 - DNA, 40 bp, Artificial Sequence
  Description of Artificial Sequence: Synthetic primer
tttccatctgtatattttcacagtacaccatactatatcc

SEQ ID NO: 1204 - DNA, 40 bp, Artificial Sequence
  Description of Artificial Sequence: Synthetic primer
caggggctcccacgagttgggtcctttcgcaccagcacag

SEQ ID NO: 1205 - DNA, 40 bp, Artificial Sequence
  Description of Artificial Sequence: Synthetic primer
atatggtgataaatgcacttttgtcatatggtgatacatg

SEQ ID NO: 1206 - DNA, 40 bp, Artificial Sequence
  Description of Artificial Sequence: Synthetic primer
cctaggatcactcctcagtcaccaggagccccctcccagg

SEQ ID NO: 1207 - DNA, 40 bp, Artificial Sequence
  Description of Artificial Sequence: Synthetic primer
ggcttgggatgagacttttagcttacctaaaatatggccc

SEQ ID NO: 1208 - DNA, 40 bp, Artificial Sequence
  Description of Artificial Sequence: Synthetic primer
ttttcttgctgtttgctaatacttcaaaatttattctttc

SEQ ID NO: 1209 - DNA, 40 bp, Artificial Sequence
  Description of Artificial Sequence: Synthetic primer
ggaataatttacaaaattacaacagtttattactttgtag

SEQ ID NO: 1210 - DNA, 40 bp, Artificial Sequence
  Description of Artificial Sequence: Synthetic primer
aataagaggtaaagattgtgatctccataccctggagtag

SEQ ID NO: 1211 - DNA, 40 bp, Artificial Sequence
  Description of Artificial Sequence: Synthetic primer
cttctcacgatgacatattccttctctgtctctctctctc

SEQ ID NO: 1212 - DNA, 40 bp, Artificial Sequence
  Description of Artificial Sequence: Synthetic primer
ggccattacaggccggtccagctgcctggctaaggtgttc

SEQ ID NO: 1213 - DNA, 40 bp, Artificial Sequence
  Description of Artificial Sequence: Synthetic primer
cccaggaccccgaccctccctccctggagcaggcactcac

SEQ ID NO: 1214 - DNA, 40 bp, Artificial Sequence
  Description of Artificial Sequence: Synthetic primer
gttttagttaactactgattaatatacttaaaaaaaaatc

SEQ ID NO: 1215 - DNA, 40 bp, Artificial Sequence
  Description of Artificial Sequence: Synthetic primer
ctaaatttgtaaatatataggaaaagatggcaataacttg

SEQ ID NO: 1216 - DNA, 40 bp, Artificial Sequence
  Description of Artificial Sequence: Synthetic primer
tcatggaaacaccttgcttcttctccctccctttccactg

SEQ ID NO: 1217 - DNA, 40 bp, Artificial Sequence
  Description of Artificial Sequence: Synthetic primer
ggcactgactctggctctgaccgtggcctgcttgctgttc

SEQ ID NO: 1218 - DNA, 40 bp, Artificial Sequence
  Description of Artificial Sequence: Synthetic primer
ggtacagtgccacccagaggggtgggtggggtgggaggtg

SEQ ID NO: 1219 - DNA, 40 bp, Artificial Sequence
  Description of Artificial Sequence: Synthetic primer
tctgcatgacccagtctaggccctggagccaagcaggccc

SEQ ID NO: 1220 - DNA, 40 bp, Artificial Sequence
  Description of Artificial Sequence: Synthetic primer
tggggtgcaggtttctccctgacactcccagcctctgtcc

SEQ ID NO: 1221 - DNA, 40 bp, Artificial Sequence
  Description of Artificial Sequence: Synthetic primer
ctgctggggcctgcctgtccatcccctccagcccctcttg

SEQ ID NO: 1222 - DNA, 40 bp, Artificial Sequence
  Description of Artificial Sequence: Synthetic primer
aatgtgcaaggaggaattcaatgaggaagacagtaaattg

SEQ ID NO: 1223 - DNA, 40 bp, Artificial Sequence
  Description of Artificial Sequence: Synthetic primer
aacaagtgaaaaatataacttcgtattctgtgtattttgc

SEQ ID NO: 1224 - DNA, 40 bp, Artificial Sequence
  Description of Artificial Sequence: Synthetic primer
ccaggggctgcccctggccgagtcactgaagcgactgatg

SEQ ID NO: 1225 - DNA, 40 bp, Artificial Sequence
  Description of Artificial Sequence: Synthetic primer
aaaatgccataatttatggaggaaaaacacagtccaaggc

SEQ ID NO: 1226 - DNA, 40 bp, Artificial Sequence
  Description of Artificial Sequence: Synthetic primer
tgatcctttgactaaccctagaaaaatgtgctttatgtgc

SEQ ID NO: 1227 - DNA, 40 bp, Artificial Sequence
  Description of Artificial Sequence: Synthetic primer
actagcaatgggcagcactgagcataagcttaaagaaatg

SEQ ID NO: 1228 - DNA, 40 bp, Artificial Sequence
  Description of Artificial Sequence: Synthetic primer
cagccatgagacaataaatccttgtgtcttctgctgtttg

SEQ ID NO: 1229 - DNA, 40 bp, Artificial Sequence
  Description of Artificial Sequence: Synthetic primer
tgtgatggaatgataaaccaagataataaatgtaaaagat

SEQ ID NO: 1230 - DNA, 40 bp, Artificial Sequence
  Description of Artificial Sequence: Synthetic primer
agaaccaactgttcccagcacaccactgaactcactgaac

SEQ ID NO: 1231 - DNA, 40 bp, Artificial Sequence
  Description of Artificial Sequence: Synthetic primer
tttgatgtgaactttgttggaaacacattgatatgaaaca

SEQ ID NO: 1232 - DNA, 40 bp, Artificial Sequence
  Description of Artificial Sequence: Synthetic primer
aagaatctctttaattcaatttctctgtttctcctcatac

SEQ ID NO: 1233 - DNA, 40 bp, Artificial Sequence
  Description of Artificial Sequence: Synthetic primer
ggtatttatttgcatatcactaataagcaataaattagag

SEQ ID NO: 1234 - DNA, 40 bp, Artificial Sequence
  Description of Artificial Sequence: Synthetic primer
ggagttctatcctcccagcctatcccctctccttttcttg

SEQ ID NO: 1235 - DNA, 40 bp, Artificial Sequence
  Description of Artificial Sequence: Synthetic primer
acagtttggatgcaggggaaggcgttggggacaaaggacc

SEQ ID NO: 1236 - DNA, 40 bp, Artificial Sequence
  Description of Artificial Sequence: Synthetic primer
tgtgcacatgtgcgtcctgatggggtgagggtggggagtg

SEQ ID NO: 1237 - DNA, 40 bp, Artificial Sequence
  Description of Artificial Sequence: Synthetic primer
cctggaggccgacgcaggcccctgaccctaggcctgttgc

SEQ ID NO: 1238 - DNA, 40 bp, Artificial Sequence
  Description of Artificial Sequence: Synthetic primer
gctcgaccatttatggaaacaatctcacagaaagatgagc

SEQ ID NO: 1239 - DNA, 40 bp, Artificial Sequence
  Description of Artificial Sequence: Synthetic primer
atcagccattgccactgttatgatatattttgatgatttc

SEQ ID NO: 1240 - DNA, 40 bp, Artificial Sequence
  Description of Artificial Sequence: Synthetic primer
caggccctcccagaaggtctacatgggtgcttcccattcc

SEQ ID NO: 1241 - DNA, 40 bp, Artificial Sequence
  Description of Artificial Sequence: Synthetic primer
gggctagacaccactccacccagcctcctctgctccttgg

SEQ ID NO: 1242 - DNA, 40 bp, Artificial Sequence
  Description of Artificial Sequence: Synthetic primer
ggctctgtgcagaactgccctccaggccaggggaaacaac

SEQ ID NO: 1243 - DNA, 40 bp, Artificial Sequence
  Description of Artificial Sequence: Synthetic primer
tcttgtggttccgtgtgctttaacagtgcgccttctttgc

SEQ ID NO: 1244 - DNA, 40 bp, Artificial Sequence
  Description of Artificial Sequence: Synthetic primer
gatacaggaaaatccaaaaactattctgaactttagcaac

SEQ ID NO: 1245 - DNA, 40 bp, Artificial Sequence
  Description of Artificial Sequence: Synthetic primer
acatttcagaatgttctccttgcctgagataaccagtagg

SEQ ID NO: 1246 - DNA, 40 bp, Artificial Sequence
  Description of Artificial Sequence: Synthetic primer
tgataatgaaagtgagaatgcttaataaggcactaaaaat

SEQ ID NO: 1247 - DNA, 40 bp, Artificial Sequence
  Description of Artificial Sequence: Synthetic primer
tgagtcagaatatacaaataactttttggtcctgactttc

SEQ ID NO: 1248 - DNA, 40 bp, Artificial Sequence
  Description of Artificial Sequence: Synthetic primer
aatctgactttataccaaagttataattcctagtccttta

SEQ ID NO: 1249 - DNA, 40 bp, Artificial Sequence
  Description of Artificial Sequence: Synthetic primer
tgacagctatgctaatagtgtttcttgtctatataattgc

SEQ ID NO: 1250 - DNA, 40 bp, Artificial Sequence
  Description of Artificial Sequence: Synthetic primer
gagacgtcacttgcatgccttttacctgcccctttgtgtc

SEQ ID NO: 1251 - DNA, 40 bp, Artificial Sequence
  Description of Artificial Sequence: Synthetic primer
tcaccttcccggttcagatgctgctccttgaaccaaggac

SEQ ID NO: 1252 - DNA, 40 bp, Artificial Sequence
  Description of Artificial Sequence: Synthetic primer
tccagccctggcagagaagaaaaacagtaaacagcaagac

SEQ ID NO: 1253 - DNA, 40 bp, Artificial Sequence
  Description of Artificial Sequence: Synthetic primer
aactgggatttggtgggataacaagagccattacaaacag

SEQ ID NO: 1254 - DNA, 40 bp, Artificial Sequence
  Description of Artificial Sequence: Synthetic primer
tctcagagaaagaagccgttaagtcttttctaaatgatcc

SEQ ID NO: 1255 - DNA, 40 bp, Artificial Sequence
  Description of Artificial Sequence: Synthetic primer
tttagttggtgtttactacttgtactttctcactggaatg

SEQ ID NO: 1256 - DNA, 40 bp, Artificial Sequence
  Description of Artificial Sequence: Synthetic primer
ggcgccggcccagtcaagtatgtgcctgtccctgctccac

SEQ ID NO: 1257 - DNA, 40 bp, Artificial Sequence
  Description of Artificial Sequence: Synthetic primer
atggacccctgcccaccaccaccagccccagggagcagtc

SEQ ID NO: 1258 - DNA, 40 bp, Artificial Sequence
  Description of Artificial Sequence: Synthetic primer
caggcaggcactgctgccactgaggccaggcacctgcaca

SEQ ID NO: 1259 - DNA, 40 bp, Artificial Sequence
  Description of Artificial Sequence: Synthetic primer
gcaccgtctgattaggaggcctttcctctgacgctgtccg

SEQ ID NO: 1260 - DNA, 40 bp, Artificial Sequence
  Description of Artificial Sequence: Synthetic primer
cttgggtggcttgggctactacagtatgaaggggacaagg

SEQ ID NO: 1261 - DNA, 40 bp, Artificial Sequence
  Description of Artificial Sequence: Synthetic primer
aaagcacagaggaccctctttcattacctcccccttccac

SEQ ID NO: 1262 - DNA, 40 bp, Artificial Sequence
  Description of Artificial Sequence: Synthetic primer
ccatccagatcaacagaacattgcctggaacactggagag

SEQ ID NO: 1263 - DNA, 40 bp, Artificial Sequence
  Description of Artificial Sequence: Synthetic primer
taggacatagctttagtattgtttcaggtaatttgttttt

SEQ ID NO: 1264 - DNA, 40 bp, Artificial Sequence
  Description of Artificial Sequence: Synthetic primer
aggattctgggcctcagttgccccgcctggccctcacctg

SEQ ID NO: 1265 - DNA, 40 bp, Artificial Sequence
  Description of Artificial Sequence: Synthetic primer
cccaatggtccacatgctgacgaggtctttctttttcttg

SEQ ID NO: 1266 - DNA, 40 bp, Artificial Sequence
  Description of Artificial Sequence: Synthetic primer
ccaccatgggcggcccacaggccgcgaagtccatcccccg

SEQ ID NO: 1267 - DNA, 40 bp, Artificial Sequence
  Description of Artificial Sequence: Synthetic primer
gtcctgcctgtggggccgcagttccagctccccttccttg

SEQ ID NO: 1268 - DNA, 40 bp, Artificial Sequence
  Description of Artificial Sequence: Synthetic primer
aaatttttttgtagactcaaagcagtctttcctacttaac

SEQ ID NO: 1269 - DNA, 40 bp, Artificial Sequence
  Description of Artificial Sequence: Synthetic primer
actaaaagtcttgcaaaaattatctccacccttggatttg

SEQ ID NO: 1270 - DNA, 40 bp, Artificial Sequence
  Description of Artificial Sequence: Synthetic primer
attagggagtccaggagagcgtggaaataaaacggctgag

SEQ ID NO: 1271 - DNA, 40 bp, Artificial Sequence
  Description of Artificial Sequence: Synthetic primer
gccgatgacccaccccgggccccgtcgctcctgctaaccc

SEQ ID NO: 1272 - DNA, 40 bp, Artificial Sequence
  Description of Artificial Sequence: Synthetic primer
aaaaaccccgaacctaaatctgcccgcagacggacaccag

SEQ ID NO: 1273 - DNA, 40 bp, Artificial Sequence
  Description of Artificial Sequence: Synthetic primer
gtgtgaattgtgctgtgatggtttcgaaccgacttctctc

SEQ ID NO: 1274 - DNA, 40 bp, Artificial Sequence
  Description of Artificial Sequence: Synthetic primer
ggaagaatgttagcaaatggtgtttcagcagattcaggtc

SEQ ID NO: 1275 - DNA, 40 bp, Artificial Sequence
  Description of Artificial Sequence: Synthetic primer
ggcctgtgatctggcctgttggtgttcctcaaacttcatg

SEQ ID NO: 1276 - DNA, 40 bp, Artificial Sequence
  Description of Artificial Sequence: Synthetic primer
ttagtggttaacaaatctatgtttatcaactgttttactg

SEQ ID NO: 1277 - DNA, 40 bp, Artificial Sequence
  Description of Artificial Sequence: Synthetic primer
attaaacaatttaaagtatcccagaaacaaataataatgc

SEQ ID NO: 1278 - DNA, 40 bp, Artificial Sequence
  Description of Artificial Sequence: Synthetic primer
acatacacattttagcataccacaaattcttaaccctttc

SEQ ID NO: 1279 - DNA, 40 bp, Artificial Sequence
  Description of Artificial Sequence: Synthetic primer
ctgagaatgccacttgatttcttttcctttctctctctac

SEQ ID NO: 1280 - DNA, 40 bp, Artificial Sequence
  Description of Artificial Sequence: Synthetic primer
aaatggcagttatctttagaatctcaatcgcctgctctcc

SEQ ID NO: 1281 - DNA, 40 bp, Artificial Sequence
  Description of Artificial Sequence: Synthetic primer
acatatctgctatgtcttcctgaaaagggaatttaatctc

SEQ ID NO: 1282 - DNA, 40 bp, Artificial Sequence
  Description of Artificial Sequence: Synthetic primer
aatttttagctaaggaaaattttatatttctctttttgtc

SEQ ID NO: 1283 - DNA, 40 bp, Artificial Sequence
  Description of Artificial Sequence: Synthetic primer
aacacaagtgaggacaaagtgttgctgtaccctagtcacg

SEQ ID NO: 1284 - DNA, 40 bp, Artificial Sequence
  Description of Artificial Sequence: Synthetic primer
ctcagtgttccctgagatcttcatctgagacatcgctacc

SEQ ID NO: 1285 - DNA, 40 bp, Artificial Sequence
  Description of Artificial Sequence: Synthetic primer
ggtgaaatctaaggtaagttctatttcatacttcaaaatt

SEQ ID NO: 1286 - DNA, 40 bp, Artificial Sequence
  Description of Artificial Sequence: Synthetic primer
ccaaaccctctgcttcccctggcctgtggggcccaatctc

SEQ ID NO: 1287 - DNA, 40 bp, Artificial Sequence
  Description of Artificial Sequence: Synthetic primer
tagaaggcactccatggcctgccataacctcctatctccc

SEQ ID NO: 1288 - DNA, 40 bp, Artificial Sequence
  Description of Artificial Sequence: Synthetic primer
gacttctaggtcttgccattaacatggcctaccagagttg

SEQ ID NO: 1289 - DNA, 40 bp, Artificial Sequence
  Description of Artificial Sequence: Synthetic primer
agcagaggcaagagtgtcgctaacacgtgtgtgttccaac

SEQ ID NO: 1290 - DNA, 40 bp, Artificial Sequence
  Description of Artificial Sequence: Synthetic primer
aactaggataggtaaaactttgacataatcttattctttc

SEQ ID NO: 1291 - DNA, 40 bp, Artificial Sequence
  Description of Artificial Sequence: Synthetic primer
tgcaggccttagtgagaagccccacattctgctcttcttc

SEQ ID NO: 1292 - DNA, 40 bp, Artificial Sequence
  Description of Artificial Sequence: Synthetic primer
atctaaggtctgacattaattacctgcctttgcattttcc

SEQ ID NO: 1293 - DNA, 40 bp, Artificial Sequence
  Description of Artificial Sequence: Synthetic primer
catagctcagggaacccttaactggtgtttctccactcac

SEQ ID NO: 1294 - DNA, 40 bp, Artificial Sequence
  Description of Artificial Sequence: Synthetic primer
tcacagactctgcctttgcagaaagctagggtgcgagctg

SEQ ID NO: 1295 - DNA, 40 bp, Artificial Sequence
  Description of Artificial Sequence: Synthetic primer
caccagcagaggcagcgggtgctgccatggggactcattc

SEQ ID NO: 1296 - DNA, 40 bp, Artificial Sequence
  Description of Artificial Sequence: Synthetic primer
attcccttgatttgtaattccacactctttcatgtttctg

SEQ ID NO: 1297 - DNA, 40 bp, Artificial Sequence
  Description of Artificial Sequence: Synthetic primer
tttatagatgcatgccaaattgtccacggtttatattcac

SEQ ID NO: 1298 - DNA, 40 bp, Artificial Sequence
  Description of Artificial Sequence: Synthetic primer
cccaggtcctggaaggggtaggggtaggtgggtgaactgg

SEQ ID NO: 1299 - DNA, 40 bp, Artificial Sequence
  Description of Artificial Sequence: Synthetic primer
gtcttttggattgttcgtgcagtaattagtttggaatgcg

SEQ ID NO: 1300 - DNA, 40 bp, Artificial Sequence
  Description of Artificial Sequence: Synthetic primer
ccaccttctctgccagaagataccatttcaactttaacac

SEQ ID NO: 1301 - DNA, 40 bp, Artificial Sequence
  Description of Artificial Sequence: Synthetic primer
aaggaccccaaatttagttaataaaggcttgtggttcatc

SEQ ID NO: 1302 - DNA, 40 bp, Artificial Sequence
  Description of Artificial Sequence: Synthetic primer
ccaaatagtatgttctcattaaaagaggtgttcttgtgac

SEQ ID NO: 1303 - DNA, 40 bp, Artificial Sequence
  Description of Artificial Sequence: Synthetic primer
aacccaaagtatgagataaatactgtcataaataatagag

SEQ ID NO: 1304 - DNA, 40 bp, Artificial Sequence
  Description of Artificial Sequence: Synthetic primer
aatggtttatactgcaatttaccctccatttacatctctc

SEQ ID NO: 1305 - DNA, 40 bp, Artificial Sequence
  Description of Artificial Sequence: Synthetic primer
caatctacacagctgtgccagcagtccctgtcttagaaag

SEQ ID NO: 1306 - DNA, 40 bp, Artificial Sequence
  Description of Artificial Sequence: Synthetic primer
caaatacttaggaacagaggaagctgtgatgtccccaaag

SEQ ID NO: 1307 - DNA, 40 bp, Artificial Sequence
  Description of Artificial Sequence: Synthetic primer
tctgaattgcatctcgcatgtctaatgccaccatcctctg

SEQ ID NO: 1308 - DNA, 40 bp, Artificial Sequence
  Description of Artificial Sequence: Synthetic primer
actcaagtggtgttgcctctcagtgacacttgctgataac

SEQ ID NO: 1309 - DNA, 40 bp, Artificial Sequence
  Description of Artificial Sequence: Synthetic primer
ttctttttacttactgaatgtttaataaggtagcaacagc

SEQ ID NO: 1310 - DNA, 40 bp, Artificial Sequence
  Description of Artificial Sequence: Synthetic primer
tgacccaggagtccacgagctgaagggataaggcaaagtc

SEQ ID NO: 1311 - DNA, 40 bp, Artificial Sequence
  Description of Artificial Sequence: Synthetic primer
gagatggaatggtgttttgctcttggtgtaccacctgttc

SEQ ID NO: 1312 - DNA, 40 bp, Artificial Sequence
  Description of Artificial Sequence: Synthetic primer
aatactttcattgtaatgattaatgtttcatttgttttcc

SEQ ID NO: 1313 - DNA, 40 bp, Artificial Sequence
  Description of Artificial Sequence: Synthetic primer
agaggataggacaaaacaaagagaaagtagtaagaaacag

SEQ ID NO: 1314 - DNA, 40 bp, Artificial Sequence
  Description of Artificial Sequence: Synthetic primer
tagacaccaggccaggatgctgagggctggaggaggaagc

SEQ ID NO: 1315 - DNA, 40 bp, Artificial Sequence
  Description of Artificial Sequence: Synthetic primer
caggtgcagagtggggctgaggtccttccttgcactcagc

SEQ ID NO: 1316 - DNA, 40 bp, Artificial Sequence
  Description of Artificial Sequence: Synthetic primer
acagtccaggagcagaaccaagatccaggaagccttctcc

SEQ ID NO: 1317 - DNA, 40 bp, Artificial Sequence
  Description of Artificial Sequence: Synthetic primer
tcaagtatggaatattgagacatctctctgctttgtggtc

SEQ ID NO: 1318 - DNA, 40 bp, Artificial Sequence
  Description of Artificial Sequence: Synthetic primer
tgaagtggggttggtaggattctattacttacctgttttt

SEQ ID NO: 1319 - DNA, 40 bp, Artificial Sequence
  Description of Artificial Sequence: Synthetic primer
ggaccattgttgtagtagctctgcttgttcacacactcag

SEQ ID NO: 1320 - DNA, 40 bp, Artificial Sequence
  Description of Artificial Sequence: Synthetic primer
tcccaccctgttacctgcccgtgtcctgttcaaacacttg

SEQ ID NO: 1321 - DNA, 40 bp, Artificial Sequence
  Description of Artificial Sequence: Synthetic primer
ataaatggttctacatgaaattccaagattggcctctttc

SEQ ID NO: 1322 - DNA, 40 bp, Artificial Sequence
  Description of Artificial Sequence: Synthetic primer
cccggagcccttcctgcccctctctgatattggacccttc

SEQ ID NO: 1323 - DNA, 40 bp, Artificial Sequence
  Description of Artificial Sequence: Synthetic primer
accctctgacgcccagctccccacctcccaactctgtcac

SEQ ID NO: 1324 - DNA, 40 bp, Artificial Sequence
  Description of Artificial Sequence: Synthetic primer
cagatccagacacaacagcctgaccaccttcttaactctg

SEQ ID NO: 1325 - DNA, 40 bp, Artificial Sequence
  Description of Artificial Sequence: Synthetic primer
cagtaacaagattttaaaaccccttttgtgccctctttcc

SEQ ID NO: 1326 - DNA, 40 bp, Artificial Sequence
  Description of Artificial Sequence: Synthetic primer
ttagaagctcactccaaagccaccccatccttatagaaac

SEQ ID NO: 1327 - DNA, 40 bp, Artificial Sequence
  Description of Artificial Sequence: Synthetic primer
taatgacacatctctggttgtctccttttgatattttctc

SEQ ID NO: 1328 - DNA, 40 bp, Artificial Sequence
  Description of Artificial Sequence: Synthetic primer
cacacccacgtgccagacagacacggttggggactacacg

SEQ ID NO: 1329 - DNA, 40 bp, Artificial Sequence
  Description of Artificial Sequence: Synthetic primer
acccggggacacctccttcgcccggccggcacccggtcag

SEQ ID NO: 1330 - DNA, 40 bp, Artificial Sequence
  Description of Artificial Sequence: Synthetic primer
caggagcgagccggtcgctcacagctctctccagccgttc

SEQ ID NO: 1331 - DNA, 40 bp, Artificial Sequence
  Description of Artificial Sequence: Synthetic primer
ctggggcaggaactacgcctccatcatacgccgtgactgc

SEQ ID NO: 1332 - DNA, 40 bp, Artificial Sequence
  Description of Artificial Sequence: Synthetic primer
ggcttgggacacccaatgacccagtagcccaccctgtgtc

SEQ ID NO: 1333 - DNA, 40 bp, Artificial Sequence
  Description of Artificial Sequence: Synthetic primer
agccaccccataccgatgtgtctccgtgtcagctccactg

SEQ ID NO: 1334 - DNA, 40 bp, Artificial Sequence
  Description of Artificial Sequence: Synthetic primer
gtaatattgttgattgtgttgagtactatttatttttacc

SEQ ID NO: 1335 - DNA, 40 bp, Artificial Sequence
  Description of Artificial Sequence: Synthetic primer
tgtaaagacttaaagagatcttgttatatataacataagg

SEQ ID NO: 1336 - DNA, 40 bp, Artificial Sequence
  Description of Artificial Sequence: Synthetic primer
atacaaatttttattctaaaatgtacatctcttgttattt

SEQ ID NO: 1337 - DNA, 40 bp, Artificial Sequence
  Description of Artificial Sequence: Synthetic primer
taaaacgtttttatggtatttatccatgatgctcaaaatt

SEQ ID NO: 1338 - DNA, 40 bp, Artificial Sequence
  Description of Artificial Sequence: Synthetic primer
ttgctctccacccttctgagagcgctcactgctggtactc

SEQ ID NO: 1339 - DNA, 40 bp, Artificial Sequence
  Description of Artificial Sequence: Synthetic primer
gaaggctcttttcatggtctcgtctcctaatttcttttgc

SEQ ID NO: 1340 - DNA, 40 bp, Artificial Sequence
  Description of Artificial Sequence: Synthetic primer
ctacattatgagtatacagcatttatttttcacaacaagg

SEQ ID NO: 1341 - DNA, 40 bp, Artificial Sequence
  Description of Artificial Sequence: Synthetic primer
gcttgaattgttcacgcatttcttccttttattatttttt

SEQ ID NO: 1342 - DNA, 40 bp, Artificial Sequence
  Description of Artificial Sequence: Synthetic primer
gctcctatactgactgggaggacttttcttgtatctcctc

SEQ ID NO: 1343 - DNA, 40 bp, Artificial Sequence
  Description of Artificial Sequence: Synthetic primer
ggagaactaaggcggaatcagcacggagggtgagtgcagc

SEQ ID NO: 1344 - DNA, 40 bp, Artificial Sequence
  Description of Artificial Sequence: Synthetic primer
tatactgaagttcaggcatttaattcaaaaccaagaaaaa

SEQ ID NO: 1345 - DNA, 40 bp, Artificial Sequence
  Description of Artificial Sequence: Synthetic primer
tttttttaaagttccctcctttcttttccccttgcttccc

SEQ ID NO: 1346 - DNA, 40 bp, Artificial Sequence
  Description of Artificial Sequence: Synthetic primer
tgcaggccgtggggcgcgagggtcccgggcctgagccccg

SEQ ID NO: 1347 - DNA, 40 bp, Artificial Sequence
  Description of Artificial Sequence: Synthetic primer
agaacctctcgagcttccacctcgactgtcaccgcagcag

SEQ ID NO: 1348 - DNA, 40 bp, Artificial Sequence
  Description of Artificial Sequence: Synthetic primer
tttaaaaagaaagaaaaggtgtgtttctagttaaacagtg

SEQ ID NO: 1349 - DNA, 40 bp, Artificial Sequence
  Description of Artificial Sequence: Synthetic primer
gagatttttccctggttcccttaactgattcatgcacacg

SEQ ID NO: 1350 - DNA, 40 bp, Artificial Sequence
  Description of Artificial Sequence: Synthetic primer
ccatgatagccgtctttaacaagctctttctttctctctg

SEQ ID NO: 1351 - DNA, 40 bp, Artificial Sequence
  Description of Artificial Sequence: Synthetic primer
cactgaggtatatgtataggtatttctcagaacaataaac

SEQ ID NO: 1352 - DNA, 40 bp, Artificial Sequence
  Description of Artificial Sequence: Synthetic primer
gctctgggcccaggcccacagggcacaaggaccctggttt

SEQ ID NO: 1353 - DNA, 40 bp, Artificial Sequence
  Description of Artificial Sequence: Synthetic primer
agctgtgcaggagcccgcctgctgacgcggggcttccctg

SEQ ID NO: 1354 - DNA, 40 bp, Artificial Sequence
  Description of Artificial Sequence: Synthetic primer
tggctccaggcggctgcagctgctgctgctgctcaggact

SEQ ID NO: 1355 - DNA, 40 bp, Artificial Sequence
  Description of Artificial Sequence: Synthetic primer
cggagccggcgacagcgcgcgagagggaccgggcggtggc

SEQ ID NO: 1356 - DNA, 40 bp, Artificial Sequence
  Description of Artificial Sequence: Synthetic primer
ggcactctgtgcctgacagctgaccctaccttccctgtcc

SEQ ID NO: 1357 - DNA, 40 bp, Artificial Sequence
  Description of Artificial Sequence: Synthetic primer
gcctgggtccagccctcacttgggctcggtgaggatgtcg

SEQ ID NO: 1358 - DNA, 40 bp, Artificial Sequence
  Description of Artificial Sequence: Synthetic primer
ttatactatttcacaggaaaaggatccctgtcagaaaagc

SEQ ID NO: 1359 - DNA, 40 bp, Artificial Sequence
  Description of Artificial Sequence: Synthetic primer
tgtcagttaatgctttccccttgtctctcgtcttattttg

SEQ ID NO: 1360 - DNA, 40 bp, Artificial Sequence
  Description of Artificial Sequence: Synthetic primer
atgtgtatgcccacctgaaagacacatgtaactagtattg

SEQ ID NO: 1361 - DNA, 40 bp, Artificial Sequence
  Description of Artificial Sequence: Synthetic primer
gatgtcgaatttatcatcatataacaaaagcaacacacac

SEQ ID NO: 1362 - DNA, 40 bp, Artificial Sequence
  Description of Artificial Sequence: Synthetic primer
atgtagttttggtttctcatgtaatgtcgggctttatctc

SEQ ID NO: 1363 - DNA, 40 bp, Artificial Sequence
  Description of Artificial Sequence: Synthetic primer
aagttgtcccgtgtactcatgtggctgggaatctatgtgc

SEQ ID NO: 1364 - DNA, 40 bp, Artificial Sequence
  Description of Artificial Sequence: Synthetic primer
ctaagggcggagcctgggtccccacaagcggtccgaagtc

SEQ ID NO: 1365 - DNA, 40 bp, Artificial Sequence
  Description of Artificial Sequence: Synthetic primer
gttccagccactggccggcaaccttgctctcaccttgctc

SEQ ID NO: 1366 - DNA, 40 bp, Artificial Sequence
  Description of Artificial Sequence: Synthetic primer
cttcggaaggggtggtctgcccctcccctccccctcttcc

SEQ ID NO: 1367 - DNA, 40 bp, Artificial Sequence
  Description of Artificial Sequence: Synthetic primer
agggagggcctggccacatgagtgactgcctctcctcttg

SEQ ID NO: 1368 - DNA, 40 bp, Artificial Sequence
  Description of Artificial Sequence: Synthetic primer
ttgacattcaccccagtccctctggaataaccagctgtcc

SEQ ID NO: 1369 - DNA, 40 bp, Artificial Sequence
  Description of Artificial Sequence: Synthetic primer
acagaagcaaagcgttctttacgaacagccaagcccacag

SEQ ID NO: 1370 - DNA, 40 bp, Artificial Sequence
  Description of Artificial Sequence: Synthetic primer
gcaacatcgatacctgcagtgcaggaggctcacgaagccc

SEQ ID NO: 1371 - DNA, 40 bp, Artificial Sequence
  Description of Artificial Sequence: Synthetic primer
aggagggcctcaggcgggacccacagcctggcttgtcctc

SEQ ID NO: 1372 - DNA, 40 bp, Artificial Sequence
  Description of Artificial Sequence: Synthetic primer
tggctgtctctaagccaaaaccatttgtgaccatcaactc

SEQ ID NO: 1373 - DNA, 40 bp, Artificial Sequence
  Description of Artificial Sequence: Synthetic primer
tgctgcccatgctcacccttgcagcggacctcacacttac

SEQ ID NO: 1374 - DNA, 40 bp, Artificial Sequence
  Description of Artificial Sequence: Synthetic primer
atcgtcatccagagtatggcatgggtctgaggttattaag

SEQ ID NO: 1375 - DNA, 40 bp, Artificial Sequence
  Description of Artificial Sequence: Synthetic primer
ttccatgcttaagtaaaattgtaaatttgaaatatttttc

SEQ ID NO: 1376 - DNA, 40 bp, Artificial Sequence
  Description of Artificial Sequence: Synthetic primer
ctttgcggatagagaggcctgggtctgcagtcggggaatg

SEQ ID NO: 1377 - DNA, 40 bp, Artificial Sequence
  Description of Artificial Sequence: Synthetic primer
ctgccctccctctcctgctcagtcctcagcccccaagtag

SEQ ID NO: 1378 - DNA, 40 bp, Artificial Sequence
  Description of Artificial Sequence: Synthetic primer
ggcttaaggaatgtaagagaatgccaacttaagtttcctg

SEQ ID NO: 1379 - DNA, 40 bp, Artificial Sequence
  Description of Artificial Sequence: Synthetic primer
ccctcccacccagctcatgaataaatgcctgttggcttcc

SEQ ID NO: 1380 - DNA, 40 bp, Artificial Sequence
  Description of Artificial Sequence: Synthetic primer
taatttaatgtgtgtaattggttttgttagtgatctgtgc

SEQ ID NO: 1381 - DNA, 40 bp, Artificial Sequence
  Description of Artificial Sequence: Synthetic primer
taactgatgctcctggcatttaaccaaccagatatcactg

SEQ ID NO: 1382 - DNA, 40 bp, Artificial Sequence
  Description of Artificial Sequence: Synthetic primer
acaggctttctactgatccagatgacacaaaagcacaagc

SEQ ID NO: 1383 - DNA, 40 bp, Artificial Sequence
  Description of Artificial Sequence: Synthetic primer
aattttttcccttctttatctctctacctcccccttattt

SEQ ID NO: 1384 - DNA, 40 bp, Artificial Sequence
  Description of Artificial Sequence: Synthetic primer
ctgggctgagatagctcttatgagccctcccccaatcaag

SEQ ID NO: 1385 - DNA, 40 bp, Artificial Sequence
  Description of Artificial Sequence: Synthetic primer
cactcattctggccatctggtcactctgtgtgcctctatc

SEQ ID NO: 1386 - DNA, 40 bp, Artificial Sequence
  Description of Artificial Sequence: Synthetic primer
ttgagaagtagcagcctggccctcagagtgggcccccaag

SEQ ID NO: 1387 - DNA, 40 bp, Artificial Sequence
  Description of Artificial Sequence: Synthetic primer
gactgaatggctagtactgatggtttcacggctgtctctg

SEQ ID NO: 1388 - DNA, 40 bp, Artificial Sequence
  Description of Artificial Sequence: Synthetic primer
attacgactcccacagccaggctgagaatgccctaccatg

SEQ ID NO: 1389 - DNA, 40 bp, Artificial Sequence
  Description of Artificial Sequence: Synthetic primer
tctgggacagccaggcctggccaagcctggagaccccacc

SEQ ID NO: 1390 - DNA, 40 bp, Artificial Sequence
  Description of Artificial Sequence: Synthetic primer
tggccattttattctaaatttgctctgaatgatgttaatg

SEQ ID NO: 1391 - DNA, 40 bp, Artificial Sequence
  Description of Artificial Sequence: Synthetic primer
gctgtgtcaagcaaggggctgctgttgctgatgttagggc

SEQ ID NO: 1392 - DNA, 40 bp, Artificial Sequence
  Description of Artificial Sequence: Synthetic primer
agcagtgctgaatgacaaccatgtcctctttgggatgtta

SEQ ID NO: 1393 - DNA, 40 bp, Artificial Sequence
  Description of Artificial Sequence: Synthetic primer
tggaaagaagatgtttggacaccaggagaacagaaacaag

SEQ ID NO: 1394 - DNA, 40 bp, Artificial Sequence
  Description of Artificial Sequence: Synthetic primer
tgacgttgggtcggctgatacacccctgtcctctctgtcc

SEQ ID NO: 1395 - DNA, 40 bp, Artificial Sequence
  Description of Artificial Sequence: Synthetic primer
cccctcccacggaggccccgcggtcccaacaccggaaagg

SEQ ID NO: 1396 - DNA, 40 bp, Artificial Sequence
  Description of Artificial Sequence: Synthetic primer
tgggagctgagagtgtatttgtggaataaatatcccagtg

SEQ ID NO: 1397 - DNA, 40 bp, Artificial Sequence
  Description of Artificial Sequence: Synthetic primer
cctgtccccattgactgaaccatgctgtaaagccacattg

SEQ ID NO: 1398 - DNA, 40 bp, Artificial Sequence
  Description of Artificial Sequence: Synthetic primer
gaggaggaggaagagggcgaggcgacaagagaagaaggag

SEQ ID NO: 1399 - DNA, 40 bp, Artificial Sequence
  Description of Artificial Sequence: Synthetic primer
gcccaactctgccctgccacccctgggccacagccatgcc

SEQ ID NO: 1400 - DNA, 40 bp, Artificial Sequence
  Description of Artificial Sequence: Synthetic primer
aagtgaaccagagtatagttatttctccattttatttgac

SEQ ID NO: 1401 - DNA, 40 bp, Artificial Sequence
  Description of Artificial Sequence: Synthetic primer
tgcattatagtagaccacctcccctcttcacacaatgctg

SEQ ID NO: 1402 - DNA, 40 bp, Artificial Sequence
  Description of Artificial Sequence: Synthetic primer
tatttttatagtatgtaaaaagtacttgataaggaacatc

SEQ ID NO: 1403 - DNA, 40 bp, Artificial Sequence
  Description of Artificial Sequence: Synthetic primer
tcaaaataggttttaatcttttcccaatctttatttttag

SEQ ID NO: 1404 - DNA, 40 bp, Artificial Sequence
  Description of Artificial Sequence: Synthetic primer
ctggaattggcagcttagtcccaaggtcatgaatcagttc

SEQ ID NO: 1405 - DNA, 40 bp, Artificial Sequence
  Description of Artificial Sequence: Synthetic primer
ttattaagtggaacttcctatattctggctggtctgtatc

SEQ ID NO: 1406 - DNA, 40 bp, Artificial Sequence
  Description of Artificial Sequence: Synthetic primer
gggccaggtggagccactcactggtcctttcactctctgc

SEQ ID NO: 1407 - DNA, 40 bp, Artificial Sequence
  Description of Artificial Sequence: Synthetic primer
cccctcccttcccaagtgaggctgggccaaagccagtccc

SEQ ID NO: 1408 - DNA, 40 bp, Artificial Sequence
  Description of Artificial Sequence: Synthetic primer
gacaagcaaggagaattatgctaaaaatggtatcttagag

SEQ ID NO: 1409 - DNA, 40 bp, Artificial Sequence
  Description of Artificial Sequence: Synthetic primer
ttctcaatacgtttccctatgaatattattaactaactca

SEQ ID NO: 1410 - DNA, 40 bp, Artificial Sequence
  Description of Artificial Sequence: Synthetic primer
tgagcaggaggtcaggggagggagcaggtgtgccactgac

SEQ ID NO: 1411 - DNA, 40 bp, Artificial Sequence
  Description of Artificial Sequence: Synthetic primer
tttgggtccacgtacacgtacacccagagggtgatcaggg

SEQ ID NO: 1412 - DNA, 40 bp, Artificial Sequence
  Description of Artificial Sequence: Synthetic primer
ctgctgcagagacttacagaggggccaggaggaccgactc

SEQ ID NO: 1413 - DNA, 40 bp, Artificial Sequence
  Description of Artificial Sequence: Synthetic primer
gtcggatgagttggctgttctccctctgactgttcctatg

SEQ ID NO: 1414 - DNA, 40 bp, Artificial Sequence
  Description of Artificial Sequence: Synthetic primer
gatccatgtgccatttaaacctctctcctttgttgtgttc

SEQ ID NO: 1415 - DNA, 40 bp, Artificial Sequence
  Description of Artificial Sequence: Synthetic primer
ttttggaggggctgaacattcaaactatagcataacacac

SEQ ID NO: 1416 - DNA, 40 bp, Artificial Sequence
  Description of Artificial Sequence: Synthetic primer
tgacatgcggcacagccccgggccgtctggcaacactggg

SEQ ID NO: 1417 - DNA, 40 bp, Artificial Sequence
  Description of Artificial Sequence: Synthetic primer
aaaaaaaaatcttctggagagttgaaagcatggcttcgtg

SEQ ID NO: 1418 - DNA, 40 bp, Artificial Sequence
  Description of Artificial Sequence: Synthetic primer
gcggaagctggcaggaagagtgatgccaagacaagccaac

SEQ ID NO: 1419 - DNA, 40 bp, Artificial Sequence
  Description of Artificial Sequence: Synthetic primer
cattgtggcttctggcctccctggccctgctcacgctctg

SEQ ID NO: 1420 - DNA, 40 bp, Artificial Sequence
  Description of Artificial Sequence: Synthetic primer
tcagcagcctgtagacactcttcaatggttctgggctcac

SEQ ID NO: 1421 - DNA, 40 bp, Artificial Sequence
  Description of Artificial Sequence: Synthetic primer
taagaaatttaaagcaacagccgagaggaattcatgtttt

SEQ ID NO: 1422 - DNA, 40 bp, Artificial Sequence
  Description of Artificial Sequence: Synthetic primer
ctcaagctcttttcccagtgtgctgactaaggggcttttg

SEQ ID NO: 1423 - DNA, 40 bp, Artificial Sequence
  Description of Artificial Sequence: Synthetic primer
gctttggcttggcatagacccagaagtgagaatcccctag

SEQ ID NO: 1424 - DNA, 40 bp, Artificial Sequence
  Description of Artificial Sequence: Synthetic primer
tgtgaattttaacaatatcctctctccctcctttttgttg

SEQ ID NO: 1425 - DNA, 40 bp, Artificial Sequence
  Description of Artificial Sequence: Synthetic primer
aacagtcaggatctaagtaaaaataaccattcaccaggag

SEQ ID NO: 1426 - DNA, 40 bp, Artificial Sequence
  Description of Artificial Sequence: Synthetic primer
ttacacatatatgtttaaaatactctctttatgtttcttt

SEQ ID NO: 1427 - DNA, 40 bp, Artificial Sequence
  Description of Artificial Sequence: Synthetic primer
gtttaatgagatgaggaatcattcataatcaaatcataat

SEQ ID NO: 1428 - DNA, 40 bp, Artificial Sequence
  Description of Artificial Sequence: Synthetic primer
atacatgacttgcagtcttgtgatctgaatgccacatttt

SEQ ID NO: 1429 - DNA, 40 bp, Artificial Sequence
  Description of Artificial Sequence: Synthetic primer
gaggtctcaagaaacagaggatggtaaaagagatgagtgc

SEQ ID NO: 1430 - DNA, 40 bp, Artificial Sequence
  Description of Artificial Sequence: Synthetic primer
ccgtctgccgaggtgactgcagcctccggcgcctctctcc

SEQ ID NO: 1431 - DNA, 40 bp, Artificial Sequence
  Description of Artificial Sequence: Synthetic primer
catccccaactccgggcgcacccacccggccccgtccacg

SEQ ID NO: 1432 - DNA, 40 bp, Artificial Sequence
  Description of Artificial Sequence: Synthetic primer
acaaaaacaaaagctaataatggagccacataacacattc

SEQ ID NO: 1433 - DNA, 40 bp, Artificial Sequence
  Description of Artificial Sequence: Synthetic primer
accctgctagtctggagttgatcaaggaacctgtctccac

SEQ ID NO: 1434 - DNA, 40 bp, Artificial Sequence
  Description of Artificial Sequence: Synthetic primer
accatttttagaaataatgaactctagaaaaacaaatgac

SEQ ID NO: 1435 - DNA, 40 bp, Artificial Sequence
  Description of Artificial Sequence: Synthetic primer
tgtaattaattgcatcaacttttgtaaacacctttatttc

SEQ ID NO: 1436 - DNA, 40 bp, Artificial Sequence
  Description of Artificial Sequence: Synthetic primer
gcatctctgcaatgtgtggtcacctgcccatctctgtctc

SEQ ID NO: 1437 - DNA, 40 bp, Artificial Sequence
  Description of Artificial Sequence: Synthetic primer
ccctaggtgtggtctggacagagagattctcatcacttac

SEQ ID NO: 1438 - DNA, 40 bp, Artificial Sequence
  Description of Artificial Sequence: Synthetic primer
gctagggcccactgcccgcgccagggtcctggcggaggcc

SEQ ID NO: 1439 - DNA, 40 bp, Artificial Sequence
  Description of Artificial Sequence: Synthetic primer
ggtccagtgatgatagaccagccagccttgtgtcaggagg

SEQ ID NO: 1440 - DNA, 40 bp, Artificial Sequence
  Description of Artificial Sequence: Synthetic primer
gtaatgtacaataatgatgtaatttttcttatactatttc

SEQ ID NO: 1441 - DNA, 40 bp, Artificial Sequence
  Description of Artificial Sequence: Synthetic primer
atgcaattcacaagactcatgttggacttgtgtcataatg

SEQ ID NO: 1442 - DNA, 40 bp, Artificial Sequence
  Description of Artificial Sequence: Synthetic primer
aactgttcaatctagtatactttgtcttttgtgatgattc

SEQ ID NO: 1443 - DNA, 40 bp, Artificial Sequence
  Description of Artificial Sequence: Synthetic primer
acccacaaaataattaagtcccctatctcccaaccatgcc

SEQ ID NO: 1444 - DNA, 40 bp, Artificial Sequence
  Description of Artificial Sequence: Synthetic primer
gactgaaatgtgtaagctctttaaaagcatatacattttg

SEQ ID NO: 1445 - DNA, 40 bp, Artificial Sequence
  Description of Artificial Sequence: Synthetic primer
tcctcccactaagtcatggaattaggagggcaaaggagac

SEQ ID NO: 1446 - DNA, 40 bp, Artificial Sequence
  Description of Artificial Sequence: Synthetic primer
tgggctaaatttaatctatctcaatccatgtcctttctaa

SEQ ID NO: 1447 - DNA, 40 bp, Artificial Sequence
  Description of Artificial Sequence: Synthetic primer
tccaggtttgggccatcatgagtgaagctgccccctcttc

SEQ ID NO: 1448 - DNA, 40 bp, Artificial Sequence
  Description of Artificial Sequence: Synthetic primer
actaaagacagtgaactccaaacaggagaacaacatgaag

SEQ ID NO: 1449 - DNA, 40 bp, Artificial Sequence
  Description of Artificial Sequence: Synthetic primer
gaagttaagttttcattggagttatagggcatgttcttgg

SEQ ID NO: 1450 - DNA, 40 bp, Artificial Sequence
  Description of Artificial Sequence: Synthetic primer
tcaggtcataagaaccatagccacagccatctatccttgg

SEQ ID NO: 1451 - DNA, 40 bp, Artificial Sequence
  Description of Artificial Sequence: Synthetic primer
atgaagatccctggcttcaggaattgactgaatgtgttcc

SEQ ID NO: 1452 - DNA, 40 bp, Artificial Sequence
  Description of Artificial Sequence: Synthetic primer
tgtcccgcagacatcctgacctcccatcccagccctcacc

SEQ ID NO: 1453 - DNA, 40 bp, Artificial Sequence
  Description of Artificial Sequence: Synthetic primer
ccctctgggtgaggctcccggggtcacgtgtgtctccttc

SEQ ID NO: 1454 - DNA, 40 bp, Artificial Sequence
  Description of Artificial Sequence: Synthetic primer
atgagcactctaatgaatgaaaactatcttgtttatttgg

SEQ ID NO: 1455 - DNA, 40 bp, Artificial Sequence
  Description of Artificial Sequence: Synthetic primer
gacttcggctaactgagaggtgttttcttgtctggtttgg

SEQ ID NO: 1456 - DNA, 40 bp, Artificial Sequence
  Description of Artificial Sequence: Synthetic primer
gcccaagcatggtgcaatctcttggcatcccttccctctc

SEQ ID NO: 1457 - DNA, 40 bp, Artificial Sequence
  Description of Artificial Sequence: Synthetic primer
ccctgagggccaggaaggctccagtgctgggtgagaagtc

SEQ ID NO: 1458 - DNA, 40 bp, Artificial Sequence
  Description of Artificial Sequence: Synthetic primer
ttgtccctcagctgccaccatgagcggtaaggatgagtcc

SEQ ID NO: 1459 - DNA, 40 bp, Artificial Sequence
  Description of Artificial Sequence: Synthetic primer
ggggatcgcccggtcggccctcgcgcgcgccccctcactc

SEQ ID NO: 1460 - DNA, 40 bp, Artificial Sequence
  Description of Artificial Sequence: Synthetic primer
ctccaggtgtctcccctggcgggcccctgcctccctgcac

SEQ ID NO: 1461 - DNA, 40 bp, Artificial Sequence
  Description of Artificial Sequence: Synthetic primer
cagcagggtgagcctctcactgccctgctcttacccctag

SEQ ID NO: 1462 - DNA, 40 bp, Artificial Sequence
  Description of Artificial Sequence: Synthetic primer
ctgagtgccctgtcccgtccccagtccctccccgctggtg

SEQ ID NO: 1463 - DNA, 40 bp, Artificial Sequence
  Description of Artificial Sequence: Synthetic primer
ccctgaagggccatagtgctgttgcacatgactccctccc

SEQ ID NO: 1464 - DNA, 40 bp, Artificial Sequence
  Description of Artificial Sequence: Synthetic primer
ataaagtcatgaaggtatatttcgctgctgtttttattgc

SEQ ID NO: 1465 - DNA, 40 bp, Artificial Sequence
  Description of Artificial Sequence: Synthetic primer
gcttatatttatatggcattgtaaaattaatgtgtggtat

SEQ ID NO: 1466 - DNA, 40 bp, Artificial Sequence
  Description of Artificial Sequence: Synthetic primer
gcgagcaaagaaagagaacacaggaatacttcttaaagtc

SEQ ID NO: 1467 - DNA, 40 bp, Artificial Sequence
  Description of Artificial Sequence: Synthetic primer
agaaaatcaaatcaaagaatgtctcctccctgttttattc

SEQ ID NO: 1468 - DNA, 40 bp, Artificial Sequence
  Description of Artificial Sequence: Synthetic primer
aagttttatttaatggctaaatacaaactgaatgaaggtc

SEQ ID NO: 1469 - DNA, 40 bp, Artificial Sequence
  Description of Artificial Sequence: Synthetic primer
tatattttctaaggaatatttctggaaattattttttatt

SEQ ID NO: 1470 - DNA, 40 bp, Artificial Sequence
  Description of Artificial Sequence: Synthetic primer
gcatactaaatctttgtcaagataaaatgtttatcaaaac

SEQ ID NO: 1471 - DNA, 40 bp, Artificial Sequence
  Description of Artificial Sequence: Synthetic primer
aaactgagcttgtaatatgtaactttattttattgttttc

SEQ ID NO: 1472 - DNA, 40 bp, Artificial Sequence
  Description of Artificial Sequence: Synthetic primer
tttatggaatctccatatgttgaatttttgttttgttttc

SEQ ID NO: 1473 - DNA, 40 bp, Artificial Sequence
  Description of Artificial Sequence: Synthetic primer
tttttaaaagaatcaataaaaaaaattaactatattgtgc

SEQ ID NO: 1474 - DNA, 40 bp, Artificial Sequence
  Description of Artificial Sequence: Synthetic primer
tttgaatgacttaaatcttggagagtttacgtgcacctcc

SEQ ID NO: 1475 - DNA, 40 bp, Artificial Sequence
  Description of Artificial Sequence: Synthetic primer
ttgttaagagaaaataatttttttgctcccaaaatactac

SEQ ID NO: 1476 - DNA, 40 bp, Artificial Sequence
  Description of Artificial Sequence: Synthetic primer
gcagcaacagctgcagcaccgactacagcaggcccaaatg

SEQ ID NO: 1477 - DNA, 40 bp, Artificial Sequence
  Description of Artificial Sequence: Synthetic primer
atgggtatgaacccacctcccatgaccagaggtcccagtg

SEQ ID NO: 1478 - DNA, 40 bp, Artificial Sequence
  Description of Artificial Sequence: Synthetic primer
atgccccaggggcagccagggctacagccacctaccatgc

SEQ ID NO: 1479 - DNA, 40 bp, Artificial Sequence
  Description of Artificial Sequence: Synthetic primer
cagtctacaggcctatcagcagcgactccttcagcaacag

SEQ ID NO: 1480 - DNA, 40 bp, Artificial Sequence
  Description of Artificial Sequence: Synthetic primer
gaggccctgttgctgcccaaccacaccagtccgctgcatg

SEQ ID NO: 1481 - DNA, 40 bp, Artificial Sequence
  Description of Artificial Sequence: Synthetic primer
ttgctgcatccctgtcggtcccatccctggctccaaatgc

SEQ ID NO: 1482 - DNA, 40 bp, Artificial Sequence
  Description of Artificial Sequence: Synthetic primer
cctgcattggattcatgttctgcatggctggattggagtg

SEQ ID NO: 1483 - DNA, 40 bp, Artificial Sequence
  Description of Artificial Sequence: Synthetic primer
gggaccccatctgttgctgaaggagtcgctgctgataggc

SEQ ID NO: 1484 - DNA, 40 bp, Artificial Sequence
  Description of Artificial Sequence: Synthetic primer
cctctcttacccagaggggagcagggtgagccgcgtgtcc

SEQ ID NO: 1485 - DNA, 40 bp, Artificial Sequence
  Description of Artificial Sequence: Synthetic primer
cccctgcatgctacccaggccctccttccccaccccacag

SEQ ID NO: 1486 - DNA, 40 bp, Artificial Sequence
  Description of Artificial Sequence: Synthetic primer
aacaggatttgtaccgtagcttcaaattaacactggattc

SEQ ID NO: 1487 - DNA, 40 bp, Artificial Sequence
  Description of Artificial Sequence: Synthetic primer
taattgattgattcttatcaatagctgaagccaactaggt

SEQ ID NO: 1488 - DNA, 40 bp, Artificial Sequence
  Description of Artificial Sequence: Synthetic primer
ctgaatcagctgattggtccctccccggggtgcccgtgct

SEQ ID NO: 1489 - DNA, 40 bp, Artificial Sequence
  Description of Artificial Sequence: Synthetic primer
cctcctgccaggagccctctgtgagccctgtctccctcag

SEQ ID NO: 1490 - DNA, 40 bp, Artificial Sequence
  Description of Artificial Sequence: Synthetic primer
ttatttgcagtgaaagtatgctgagaatagcggtgttcaa

SEQ ID NO: 1491 - DNA, 40 bp, Artificial Sequence
  Description of Artificial Sequence: Synthetic primer
agatgcttgcatgtcaatcatttatgtatatatttttttc

SEQ ID NO: 1492 - DNA, 40 bp, Artificial Sequence
  Description of Artificial Sequence: Synthetic primer
gattagtctctggggcaggcctgattcaatgactctgtgg

SEQ ID NO: 1493 - DNA, 40 bp, Artificial Sequence
  Description of Artificial Sequence: Synthetic primer
ggggtgggaactatgtgggaagaatgaggaagaaagttct

SEQ ID NO: 1494 - DNA, 40 bp, Artificial Sequence
  Description of Artificial Sequence: Synthetic primer
cgggaaacagcctggttcttggagcctgggatgggagcac

SEQ ID NO: 1495 - DNA, 40 bp, Artificial Sequence
  Description of Artificial Sequence: Synthetic primer
tctcccagggagtcccacagtgttaggatcaagggaggag

SEQ ID NO: 1496 - DNA, 40 bp, Artificial Sequence
  Description of Artificial Sequence: Synthetic primer
gaatgtaagctgttttctttttaatgctacatcactttag

SEQ ID NO: 1497 - DNA, 40 bp, Artificial Sequence
  Description of Artificial Sequence: Synthetic primer
atagattgcaataaagataccaacacagaagtaatttttt

SEQ ID NO: 1498 - DNA, 40 bp, Artificial Sequence
  Description of Artificial Sequence: Synthetic primer
gcagggctctaagtgcagtaacttgatttgctgttgtatt

SEQ ID NO: 1499 - DNA, 40 bp, Artificial Sequence
  Description of Artificial Sequence: Synthetic primer
tgggcgcctgggaggggtgtttctgttgctaagggcatac

SEQ ID NO: 1500 - DNA, 40 bp, Artificial Sequence
  Description of Artificial Sequence: Synthetic primer
cagctccaatgtggcctctcatgagctttgatctccttcc

SEQ ID NO: 1501 - DNA, 40 bp, Artificial Sequence
  Description of Artificial Sequence: Synthetic primer
cagccaaaccaaagtacaacgccagcccaaatcgaacatc

SEQ ID NO: 1502 - DNA, 40 bp, Artificial Sequence
  Description of Artificial Sequence: Synthetic primer
ggggctgccgccgcacgcccgtgcgtctgtcctccgccgc

SEQ ID NO: 1503 - DNA, 40 bp, Artificial Sequence
  Description of Artificial Sequence: Synthetic primer
ccccgtcccacgcgctcccctccagggccaccctcttccc

SEQ ID NO: 1504 - DNA, 40 bp, Artificial Sequence
  Description of Artificial Sequence: Synthetic primer
ggaggggctgccaggcctctctgaccaccacctccccttc

SEQ ID NO: 1505 - DNA, 40 bp, Artificial Sequence
  Description of Artificial Sequence: Synthetic primer
ttccggggtgaccacggttctgcactgcccagatacttac

SEQ ID NO: 1506 - DNA, 40 bp, Artificial Sequence
  Description of Artificial Sequence: Synthetic primer
cctgggcccaaggccagggctgagagcctggtcccccaac

SEQ ID NO: 1507 - DNA, 40 bp, Artificial Sequence
  Description of Artificial Sequence: Synthetic primer
ggcaggaggtacggtgcttgagaggaggggctgggtgtgg

SEQ ID NO: 1508 - DNA, 40 bp, Artificial Sequence
  Description of Artificial Sequence: Synthetic primer
gcagagtgctaaaatataatacttgcttgtaaaattcttg

SEQ ID NO: 1509 - DNA, 40 bp, Artificial Sequence
  Description of Artificial Sequence: Synthetic primer
gtaaaattcattcagtagaatgtgtaaaatcaatactcac

SEQ ID NO: 1510 - DNA, 40 bp, Artificial Sequence
  Description of Artificial Sequence: Synthetic primer
ttctgcagaaaagaggatatgaagtcaattatattggaaa

SEQ ID NO: 1511 - DNA, 40 bp, Artificial Sequence
  Description of Artificial Sequence: Synthetic primer
gtcctttggaaagaacttgaagtaatatttttataattgt

SEQ ID NO: 1512 - DNA, 40 bp, Artificial Sequence
  Description of Artificial Sequence: Synthetic primer
ttaaaaacaaatcacacagtgaataatttttatccaggag

SEQ ID NO: 1513 - DNA, 40 bp, Artificial Sequence
  Description of Artificial Sequence: Synthetic primer
accctgcggcagtctctaattacagtgttcttcctttcag

SEQ ID NO: 1514 - DNA, 40 bp, Artificial Sequence
  Description of Artificial Sequence: Synthetic primer
cttcaggccctcagtgacatctctcccgccagaccaccag

SEQ ID NO: 1515 - DNA, 40 bp, Artificial Sequence
  Description of Artificial Sequence: Synthetic primer
ccccaccaccgcagagcaggtcggcctctgcctgactccc

SEQ ID NO: 1516 - DNA, 40 bp, Artificial Sequence
  Description of Artificial Sequence: Synthetic primer
ggagagttttgactgacgtcaacgtgggtcttggtatttc

SEQ ID NO: 1517 - DNA, 40 bp, Artificial Sequence
  Description of Artificial Sequence: Synthetic primer
ccttcatcctggaaaagcccttccctgggagaaatgaatg

SEQ ID NO: 1518 - DNA, 40 bp, Artificial Sequence
  Description of Artificial Sequence: Synthetic primer
taaagtctcctcggagggccggagcgcggggcgaggattc

SEQ ID NO: 1519 - DNA, 40 bp, Artificial Sequence
  Description of Artificial Sequence: Synthetic primer
ccccactcccagctcactcagccttttggtgtctgcccgg

SEQ ID NO: 1520 - DNA, 40 bp, Artificial Sequence
  Description of Artificial Sequence: Synthetic primer
acaagaataataatgatctgcacttccttttcttcattgc

SEQ ID NO: 1521 - DNA, 40 bp, Artificial Sequence
  Description of Artificial Sequence: Synthetic primer
gttgaggccctatgcatcccaggcaggccacagcgtttac

SEQ ID NO: 1522 - DNA, 40 bp, Artificial Sequence
  Description of Artificial Sequence: Synthetic primer
agcgcagaaagtggggccaggtttttctcccaacagatcc

SEQ ID NO: 1523 - DNA, 40 bp, Artificial Sequence
  Description of Artificial Sequence: Synthetic primer
tgtagtcccgcatttgccctctgacatgtttctccactgg

SEQ ID NO: 1524 - DNA, 40 bp, Artificial Sequence
  Description of Artificial Sequence: Synthetic primer
tcctcccctggtctcatcatttctttttattgctttctcc

SEQ ID NO: 1525 - DNA, 40 bp, Artificial Sequence
  Description of Artificial Sequence: Synthetic primer
ataaacctcctccatttttttaagtcaaaggctgagtcac

SEQ ID NO: 1526 - DNA, 40 bp, Artificial Sequence
  Description of Artificial Sequence: Synthetic primer
atttgtaaaatattctgaaagggccatgaaaatcaaaacc

SEQ ID NO: 1527 - DNA, 40 bp, Artificial Sequence
  Description of Artificial Sequence: Synthetic primer
cttaagcatttatcacttgaaagttacttaaattgttatc

SEQ ID NO: 1528 - DNA, 40 bp, Artificial Sequence
  Description of Artificial Sequence: Synthetic primer
ccaggcctgggcagcccctcaactcttgtgtgtccgtcgc

SEQ ID NO: 1529 - DNA, 40 bp, Artificial Sequence
  Description of Artificial Sequence: Synthetic primer
accctgaggctccaccgcccgcggacctgccagggcttgg

SEQ ID NO: 1530 - DNA, 40 bp, Artificial Sequence
  Description of Artificial Sequence: Synthetic primer
ttttaaataatcaatttaattcaaagaagtgcagagcaag

SEQ ID NO: 1531 - DNA, 40 bp, Artificial Sequence
  Description of Artificial Sequence: Synthetic primer
ttatattaatgattttttctgcttgataaaacttattaag

SEQ ID NO: 1532 - DNA, 40 bp, Artificial Sequence
  Description of Artificial Sequence: Synthetic primer
ggggcagcactgcccacctcactcctctctcctccccaca

SEQ ID NO: 1533 - DNA, 40 bp, Artificial Sequence
  Description of Artificial Sequence: Synthetic primer
gagcctcttgcaagctgcccagggccagcctttcccctgg

SEQ ID NO: 1534 - DNA, 40 bp, Artificial Sequence
  Description of Artificial Sequence: Synthetic primer
agccacaccctcagcatggccccttccaggcccatcactc

SEQ ID NO: 1535 - DNA, 40 bp, Artificial Sequence
  Description of Artificial Sequence: Synthetic primer
aagggacttggggaaggttgttcccaacccctttcttccc

SEQ ID NO: 1536 - DNA, 40 bp, Artificial Sequence
  Description of Artificial Sequence: Synthetic primer
taccttctgattttatagaattgttccaatatcttttctg

SEQ ID NO: 1537 - DNA, 40 bp, Artificial Sequence
  Description of Artificial Sequence: Synthetic primer
atttgtttgtacattgccataacaaatgttctgaattttg

SEQ ID NO: 1538 - DNA, 40 bp, Artificial Sequence
  Description of Artificial Sequence: Synthetic primer
ggagtcatttcagagtccatcaatccagtagaaagttcag

SEQ ID NO: 1539 - DNA, 40 bp, Artificial Sequence
  Description of Artificial Sequence: Synthetic primer
tatttcattatgtcctgaggaacagttggttatagaaagg

SEQ ID NO: 1540 - DNA, 40 bp, Artificial Sequence
  Description of Artificial Sequence: Synthetic primer
gtataaatttatcactgacgtatctgttttcttcattttt

SEQ ID NO: 1541 - DNA, 40 bp, Artificial Sequence
  Description of Artificial Sequence: Synthetic primer
ataattatttcatatttcattattcagaatatttgataag

SEQ ID NO: 1542 - DNA, 40 bp, Artificial Sequence
  Description of Artificial Sequence: Synthetic primer
gccctgcggggacacggtctgcaccctgcccgcggccacg

SEQ ID NO: 1543 - DNA, 40 bp, Artificial Sequence
  Description of Artificial Sequence: Synthetic primer
accccgacgggcggcgcgggcgcgggtacctgtagaatgc

SEQ ID NO: 1544 - DNA, 40 bp, Artificial Sequence
  Description of Artificial Sequence: Synthetic primer
aaccttaagactaacaacagtaaatttgcacctcagtaac

SEQ ID NO: 1545 - DNA, 40 bp, Artificial Sequence
  Description of Artificial Sequence: Synthetic primer
agcaattttggatccacgaggagaagaaaagtgaaatgac

SEQ ID NO: 1546 - DNA, 40 bp, Artificial Sequence
  Description of Artificial Sequence: Synthetic primer
aaaatttttgccttagaatggttagctttagatgtcatat

SEQ ID NO: 1547 - DNA, 40 bp, Artificial Sequence
  Description of Artificial Sequence: Synthetic primer
gaatggcctttcctgagtaactccttcccatttgctcctc

SEQ ID NO: 1548 - DNA, 40 bp, Artificial Sequence
  Description of Artificial Sequence: Synthetic primer
tagatgccttccccacctctccagaattcctatgggtcac

SEQ ID NO: 1549 - DNA, 40 bp, Artificial Sequence
  Description of Artificial Sequence: Synthetic primer
tttaaaaagcaaaagaaatcaagtgtgcatcacaccaaag

SEQ ID NO: 1550 - DNA, 40 bp, Artificial Sequence
  Description of Artificial Sequence: Synthetic primer
tatgttttagggcatcattcagaagatagtggacagtcac

SEQ ID NO: 1551 - DNA, 40 bp, Artificial Sequence
  Description of Artificial Sequence: Synthetic primer
gtcacagggtgagcggggtctccaggtggctcggcagtcc

SEQ ID NO: 1552 - DNA, 40 bp, Artificial Sequence
  Description of Artificial Sequence: Synthetic primer
ctgaactcccggtctctgtgacctgtgacccccggttatc

SEQ ID NO: 1553 - DNA, 40 bp, Artificial Sequence
  Description of Artificial Sequence: Synthetic primer
ctggtttaaatcttgaaaaaaaaattgaatttcaataatc

SEQ ID NO: 1554 - DNA, 40 bp, Artificial Sequence
  Description of Artificial Sequence: Synthetic primer
agttttaactttgtaattgttgatttcacttttctaacag

SEQ ID NO: 1555 - DNA, 40 bp, Artificial Sequence
  Description of Artificial Sequence: Synthetic primer
taagaggaaaaagtcaggagagtcctaacccaggccaacc

SEQ ID NO: 1556 - DNA, 40 bp, Artificial Sequence
  Description of Artificial Sequence: Synthetic primer
cctagggtgcagcagaggcacaggccgcccaggaaggtgg

SEQ ID NO: 1557 - DNA, 40 bp, Artificial Sequence
  Description of Artificial Sequence: Synthetic primer
agcgcgtgcgccaggtggtagctcacgtgcgggctcagga

SEQ ID NO: 1558 - DNA, 40 bp, Artificial Sequence
  Description of Artificial Sequence: Synthetic primer
gcccagccgactggccatctcctcgtagtcgcgctggtac

SEQ ID NO: 1559 - DNA, 40 bp, Artificial Sequence
  Description of Artificial Sequence: Synthetic primer
caaaagaggaagaagatgcccagggagcggcagggtcagc

SEQ ID NO: 1560 - DNA, 40 bp, Artificial Sequence
  Description of Artificial Sequence: Synthetic primer
cctgtgtgtcgcggagttcactggcctcctctcctcctgc

SEQ ID NO: 1561 - DNA, 40 bp, Artificial Sequence
  Description of Artificial Sequence: Synthetic primer
tgtaattttcattttgtaaactatatattctatattcaag

SEQ ID NO: 1562 - DNA, 40 bp, Artificial Sequence
  Description of Artificial Sequence: Synthetic primer
cagagagtcgccgtctccaaggtgaaagcggaagtagggc

SEQ ID NO: 1563 - DNA, 40 bp, Artificial Sequence
  Description of Artificial Sequence: Synthetic primer
tcactaaagtcaaaagcccggctgggagggcgcgacaaaa

SEQ ID NO: 1564 - DNA, 40 bp, Artificial Sequence
  Description of Artificial Sequence: Synthetic primer
ggcgggcaaggcgggccaggctctcttggagtgtctcctc

SEQ ID NO: 1565 - DNA, 40 bp, Artificial Sequence
  Description of Artificial Sequence: Synthetic primer
ctagtccactggcttctggggaattcggaagtctttgctg

SEQ ID NO: 1566 - DNA, 40 bp, Artificial Sequence
  Description of Artificial Sequence: Synthetic primer
ggatgcagctcgttaccacctggtgcagcaactctttccc

SEQ ID NO: 1567 - DNA, 40 bp, Artificial Sequence
  Description of Artificial Sequence: Synthetic primer
gaactatggaagcaaatcctaaaggactctctctgtaaac

SEQ ID NO: 1568 - DNA, 40 bp, Artificial Sequence
  Description of Artificial Sequence: Synthetic primer
tcaacatcaactcatcaactgtgacttcgttttaccttcc

SEQ ID NO: 1569 - DNA, 40 bp, Artificial Sequence
  Description of Artificial Sequence: Synthetic primer
tcgaaatgcaaggagatgataaaattgtacaatccctggg

SEQ ID NO: 1570 - DNA, 40 bp, Artificial Sequence
  Description of Artificial Sequence: Synthetic primer
ctgaagggcacagatggggtgactcaggagggagctgatg

SEQ ID NO: 1571 - DNA, 40 bp, Artificial Sequence
  Description of Artificial Sequence: Synthetic primer
gttccaaagcaaaccatgttatgtcatgggaaggactctg

SEQ ID NO: 1572 - DNA, 40 bp, Artificial Sequence
  Description of Artificial Sequence: Synthetic primer
tgggagtcctggttgagaaaacgatcactggggttcctac

SEQ ID NO: 1573 - DNA, 40 bp, Artificial Sequence
  Description of Artificial Sequence: Synthetic primer
gggagttttgtgtcagttgaagaaacagaaggaagtggag

SEQ ID NO: 1574 - DNA, 40 bp, Artificial Sequence
  Description of Artificial Sequence: Synthetic primer
agcagataccacccgaaagcctaaagtagacccctcactg

SEQ ID NO: 1575 - DNA, 40 bp, Artificial Sequence
  Description of Artificial Sequence: Synthetic primer
tcagcatcatttatgcttctgtgtctctctggcccccaca

SEQ ID NO: 1576 - DNA, 40 bp, Artificial Sequence
  Description of Artificial Sequence: Synthetic primer
aaagacaggaagagatgaggcccgcaaggtacagactgcc

SEQ ID NO: 1577 - DNA, 40 bp, Artificial Sequence
  Description of Artificial Sequence: Synthetic primer
gcgggtcgcacttcatgcactcagtccagcccacctatcc

SEQ ID NO: 1578 - DNA, 40 bp, Artificial Sequence
  Description of Artificial Sequence: Synthetic primer
gggttgcaactccaggggtgagagctgacgaactctcttc

SEQ ID NO: 1579 - DNA, 40 bp, Artificial Sequence
  Description of Artificial Sequence: Synthetic primer
tcctgaagctttttgattaatgttgaatttgtttatcatc

SEQ ID NO: 1580 - DNA, 40 bp, Artificial Sequence
  Description of Artificial Sequence: Synthetic primer
ataaaattgcagtttcctaaggaccagtgaaagtttgctg

SEQ ID NO: 1581 - DNA, 40 bp, Artificial Sequence
  Description of Artificial Sequence: Synthetic primer
cttttggactaggcctctgtggtccagcgtttgtcttctc

SEQ ID NO: 1582 - DNA, 40 bp, Artificial Sequence
  Description of Artificial Sequence: Synthetic primer
gactcctgtgtttagctccaccagcatcacttactctctc

SEQ ID NO: 1583 - DNA, 40 bp, Artificial Sequence
  Description of Artificial Sequence: Synthetic primer
aataatacagttctgaataatgtggcttccttctcttatc

SEQ ID NO: 1584 - DNA, 40 bp, Artificial Sequence
  Description of Artificial Sequence: Synthetic primer
tataaatgagcctagtgaaggagttggggaggaggtgatg

SEQ ID NO: 1585 - DNA, 40 bp, Artificial Sequence
  Description of Artificial Sequence: Synthetic primer
tcaagcttaagagtaataggctctgtgtgttttgtttttc

SEQ ID NO: 1586 - DNA, 40 bp, Artificial Sequence
  Description of Artificial Sequence: Synthetic primer
ggtttaaataaagtgacttcatctttaatccccctcaacg

SEQ ID NO: 1587 - DNA, 40 bp, Artificial Sequence
  Description of Artificial Sequence: Synthetic primer
ggggcaggagggctcggttctaatgctgcccttctcttgg

SEQ ID NO: 1588 - DNA, 40 bp, Artificial Sequence
  Description of Artificial Sequence: Synthetic primer
cagcagttagggtaggtaggagggagggaggcccaggagg

SEQ ID NO: 1589 - DNA, 40 bp, Artificial Sequence
  Description of Artificial Sequence: Synthetic primer
gaagcctttgaccttttggttttgcttgctgctttgtttc

SEQ ID NO: 1590 - DNA, 40 bp, Artificial Sequence
  Description of Artificial Sequence: Synthetic primer
ttaggctttgaactgtccatgggaggaaagcaacgaatcc

SEQ ID NO: 1591 - DNA, 40 bp, Artificial Sequence
  Description of Artificial Sequence: Synthetic primer
ttataaggtgtggccattgtaaaaactcatgtatttgctg

SEQ ID NO: 1592 - DNA, 40 bp, Artificial Sequence
  Description of Artificial Sequence: Synthetic primer
catacatttatctcaaaaataataaaagaactataacttg

SEQ ID NO: 1593 - DNA, 40 bp, Artificial Sequence
  Description of Artificial Sequence: Synthetic primer
tcttagaatactagaaatgttaataaaaataaaacttaac

SEQ ID NO: 1594 - DNA, 40 bp, Artificial Sequence
  Description of Artificial Sequence: Synthetic primer
caaattctcaattactaagtcataaaaataaaccaggtag

SEQ ID NO: 1595 - DNA, 40 bp, Artificial Sequence
  Description of Artificial Sequence: Synthetic primer
cgctcactctgcctgtctacaccgtccgagccacatactg

SEQ ID NO: 1596 - DNA, 40 bp, Artificial Sequence
  Description of Artificial Sequence: Synthetic primer
tgccctgctctcaccacgcttaagtggttctgttttccag

SEQ ID NO: 1597 - DNA, 40 bp, Artificial Sequence
  Description of Artificial Sequence: Synthetic primer
cttttctatggtgtggtgattggttctacatatacctttc

SEQ ID NO: 1598 - DNA, 40 bp, Artificial Sequence
  Description of Artificial Sequence: Synthetic primer
ccatattataaaatgtaagaggtactgagaacgtgcatta

SEQ ID NO: 1599 - DNA, 40 bp, Artificial Sequence
  Description of Artificial Sequence: Synthetic primer
ctgtggggtgcagccagctgctgacaggtgctctgttctc

SEQ ID NO: 1600 - DNA, 40 bp, Artificial Sequence
  Description of Artificial Sequence: Synthetic primer
tcacttcccaccaccctctcggtgggcacctggggaagcc

SEQ ID NO: 1601 - DNA, 40 bp, Artificial Sequence
  Description of Artificial Sequence: Synthetic primer
tttaaataaatagaaggcctgatatgttttaagtgggaag

SEQ ID NO: 1602 - DNA, 40 bp, Artificial Sequence
  Description of Artificial Sequence: Synthetic primer
tgtatataaggtaaactactctgtactttaaaaaattaac

SEQ ID NO: 1603 - DNA, 40 bp, Artificial Sequence
  Description of Artificial Sequence: Synthetic primer
gtgtagctttcctagaactggtgaagaggctaagtgtttg

SEQ ID NO: 1604 - DNA, 40 bp, Artificial Sequence
  Description of Artificial Sequence: Synthetic primer
aaaataaaacattaattgttctttccctttttttgtactg

SEQ ID NO: 1605 - DNA, 40 bp, Artificial Sequence
  Description of Artificial Sequence: Synthetic primer
ctggcctctcccatcttccctgagtggaatctctgctctc

SEQ ID NO: 1606 - DNA, 40 bp, Artificial Sequence
  Description of Artificial Sequence: Synthetic primer
cccgaggcatttcccactggaaagctctgcccatgctgac

SEQ ID NO: 1607 - DNA, 40 bp, Artificial Sequence
  Description of Artificial Sequence: Synthetic primer
aaagatgtcagataccacagcatctttacattgatgtttc

SEQ ID NO: 1608 - DNA, 40 bp, Artificial Sequence
  Description of Artificial Sequence: Synthetic primer
taacctgaattatcactatcagaacaaagcagtaaagtag

SEQ ID NO: 1609 - DNA, 40 bp, Artificial Sequence
  Description of Artificial Sequence: Synthetic primer
tattccaaagatcagaggtctctaattgcttttgccatgc

SEQ ID NO: 1610 - DNA, 40 bp, Artificial Sequence
  Description of Artificial Sequence: Synthetic primer
gtatataaatatacaaataaaacaaatcacagtattaaaa

SEQ ID NO: 1611 - DNA, 40 bp, Artificial Sequence
  Description of Artificial Sequence: Synthetic primer
catctgcccagcagctcatgccacggcctgcaccctgtcc

SEQ ID NO: 1612 - DNA, 40 bp, Artificial Sequence
  Description of Artificial Sequence: Synthetic primer
cccctcctacctaaagaaggggtttttcagatccaggagg

SEQ ID NO: 1613 - DNA, 40 bp, Artificial Sequence
  Description of Artificial Sequence: Synthetic primer
aagttacagaagaataacttgaaaagaaactcatacaatg

SEQ ID NO: 1614 - DNA, 40 bp, Artificial Sequence
  Description of Artificial Sequence: Synthetic primer
aggggacagtgcgtttctctcccaaacgattgcagttctc

SEQ ID NO: 1615 - DNA, 40 bp, Artificial Sequence
  Description of Artificial Sequence: Synthetic primer
ttaaagatcatctttctatgaatctgctccgtgattaaag

SEQ ID NO: 1616 - DNA, 40 bp, Artificial Sequence
  Description of Artificial Sequence: Synthetic primer
ggtctgcaacacacacagaggtctagtggctccagaatac

SEQ ID NO: 1617 - DNA, 40 bp, Artificial Sequence
  Description of Artificial Sequence: Synthetic primer
atagctgaatacttgatttgtttcttgtaactgatttctc

SEQ ID NO: 1618 - DNA, 40 bp, Artificial Sequence
  Description of Artificial Sequence: Synthetic primer
ccaagcctctttggaagaccacaagtatctggagcccaac

SEQ ID NO: 1619 - DNA, 40 bp, Artificial Sequence
  Description of Artificial Sequence: Synthetic primer
ttatgataaagtgtagggaggttgaacgttacataaatac

SEQ ID NO: 1620 - DNA, 40 bp, Artificial Sequence
  Description of Artificial Sequence: Synthetic primer
atgagacacactttaaaaaagagagctgctttgagagaac

SEQ ID NO: 1621 - DNA, 40 bp, Artificial Sequence
  Description of Artificial Sequence: Synthetic primer
aaacagtccagtgtgtaaactgatccccgttcattcctcg

SEQ ID NO: 1622 - DNA, 40 bp, Artificial Sequence
  Description of Artificial Sequence: Synthetic primer
ggtagctcagctggactgatatgtgatttattctttcaac

SEQ ID NO: 1623 - DNA, 40 bp, Artificial Sequence
  Description of Artificial Sequence: Synthetic primer
caaccacatgtgtccagtgaaaatcctcactccaggtcag

SEQ ID NO: 1624 - DNA, 40 bp, Artificial Sequence
  Description of Artificial Sequence: Synthetic primer
aattttctcttcctttttcttttttctgttcccccctttc

SEQ ID NO: 1625 - DNA, 40 bp, Artificial Sequence
  Description of Artificial Sequence: Synthetic primer
aaaccgcaattcccagatttctatctcctgcaaccaccac

SEQ ID NO: 1626 - DNA, 40 bp, Artificial Sequence
  Description of Artificial Sequence: Synthetic primer
gggaccctgtagtaatgccctcccacctcctttcttatcc

SEQ ID NO: 1627 - DNA, 40 bp, Artificial Sequence
  Description of Artificial Sequence: Synthetic primer
ccttgtggctgggcatttcccacccgcctcctggcagggc

SEQ ID NO: 1628 - DNA, 40 bp, Artificial Sequence
  Description of Artificial Sequence: Synthetic primer
tttgttacctgttctaattgagaaggagagagcaagtgag

SEQ ID NO: 1629 - DNA, 40 bp, Artificial Sequence
  Description of Artificial Sequence: Synthetic primer
attatttcagagataggagctttgttgttcatttacttac

SEQ ID NO: 1630 - DNA, 40 bp, Artificial Sequence
  Description of Artificial Sequence: Synthetic primer
cgggtcgccggctgctggagcagagcttggagaaactaag

SEQ ID NO: 1631 - DNA, 40 bp, Artificial Sequence
  Description of Artificial Sequence: Synthetic primer
ccgggttggggtcagaggatagggtgggcgcgaggctcag

SEQ ID NO: 1632 - DNA, 40 bp, Artificial Sequence
  Description of Artificial Sequence: Synthetic primer
gaaagattaaactttcccctagttttaggtacactaaatc

SEQ ID NO: 1633 - DNA, 40 bp, Artificial Sequence
  Description of Artificial Sequence: Synthetic primer
agacaatttaactatccaaaacagacttaagattaatgac

SEQ ID NO: 1634 - DNA, 40 bp, Artificial Sequence
  Description of Artificial Sequence: Synthetic primer
tactgctggtcccagcctagaaagctcactttgtgttctc

SEQ ID NO: 1635 - DNA, 40 bp, Artificial Sequence
  Description of Artificial Sequence: Synthetic primer
agatgatcccacggagcagggctcagagaagaagcctcac

SEQ ID NO: 1636 - DNA, 40 bp, Artificial Sequence
  Description of Artificial Sequence: Synthetic primer
aagaagacccggggcacgctgctggccctggagcggaaag

SEQ ID NO: 1637 - DNA, 40 bp, Artificial Sequence
  Description of Artificial Sequence: Synthetic primer
gtccagggtgcccgccttgccattggacaccacgctgaag

SEQ ID NO: 1638 - DNA, 40 bp, Artificial Sequence
  Description of Artificial Sequence: Synthetic primer
ggcaggcaggagggctgaaggtcactgcggggaggccggg

SEQ ID NO: 1639 - DNA, 40 bp, Artificial Sequence
  Description of Artificial Sequence: Synthetic primer
ggccacagccgcccagaaattctacccaagctccctcagc

SEQ ID NO: 1640 - DNA, 40 bp, Artificial Sequence
  Description of Artificial Sequence: Synthetic primer
atgatcaagtcttcaaaaataaggcagcctccaaaattac

SEQ ID NO: 1641 - DNA, 40 bp, Artificial Sequence
  Description of Artificial Sequence: Synthetic primer
agtcattattttataactgaaatagactctgcttttcctc

SEQ ID NO: 1642 - DNA, 40 bp, Artificial Sequence
  Description of Artificial Sequence: Synthetic primer
tgccaatacagttttacatattcctgtgatgtttttaatc

SEQ ID NO: 1643 - DNA, 40 bp, Artificial Sequence
  Description of Artificial Sequence: Synthetic primer
atcatccataaatccatactattggcataaaataaataat

SEQ ID NO: 1644 - DNA, 40 bp, Artificial Sequence
  Description of Artificial Sequence: Synthetic primer
gagcatgattcttaagcccagccaaagatggagccctcac

SEQ ID NO: 1645 - DNA, 40 bp, Artificial Sequence
  Description of Artificial Sequence: Synthetic primer
aaatggctgcctcttttccatttatatttcccaggttttg

SEQ ID NO: 1646 - DNA, 40 bp, Artificial Sequence
  Description of Artificial Sequence: Synthetic primer
cacgagggccttttggggagtcccaggaggtgctgagctg

SEQ ID NO: 1647 - DNA, 40 bp, Artificial Sequence
  Description of Artificial Sequence: Synthetic primer
tgtactgcaccagatcagggtggggtggggcagggcagag

SEQ ID NO: 1648 - DNA, 40 bp, Artificial Sequence
  Description of Artificial Sequence: Synthetic primer
tgtccagcctcccaaaatagaaaaggtcacaaaactactc

SEQ ID NO: 1649 - DNA, 40 bp, Artificial Sequence
  Description of Artificial Sequence: Synthetic primer
taccgtcccctccacctcacctccaattccactatttacc

SEQ ID NO: 1650 - DNA, 40 bp, Artificial Sequence
  Description of Artificial Sequence: Synthetic primer
agcagaggatgcaaagccaggagccaagggaggccagcag

SEQ ID NO: 1651 - DNA, 40 bp, Artificial Sequence
  Description of Artificial Sequence: Synthetic primer
gtcatgtctgtatgtggaaaattcaccatcttatctcctc

SEQ ID NO: 1652 - DNA, 40 bp, Artificial Sequence
  Description of Artificial Sequence: Synthetic primer
tttaagaatctactgagctctcttctgtagtaacgaagtc

SEQ ID NO: 1653 - DNA, 40 bp, Artificial Sequence
  Description of Artificial Sequence: Synthetic primer
cgttttatgacagaaaggcttaaaagaaaatcctcaaaag

SEQ ID NO: 1654 - DNA, 40 bp, Artificial Sequence
  Description of Artificial Sequence: Synthetic primer
gagggtgtaccagcctggagggtgtaccagccccaagtgg

SEQ ID NO: 1655 - DNA, 40 bp, Artificial Sequence
  Description of Artificial Sequence: Synthetic primer
tcaacagatatgttcaggccaccaacctcattctgttttg

SEQ ID NO: 1656 - DNA, 40 bp, Artificial Sequence
  Description of Artificial Sequence: Synthetic primer
cccagtgaggataagtgttaatttgaccatagaaactagg

SEQ ID NO: 1657 - DNA, 40 bp, Artificial Sequence
  Description of Artificial Sequence: Synthetic primer
atttggaaacctctataactaggatgattggagtgttgtg

SEQ ID NO: 1658 - DNA, 40 bp, Artificial Sequence
  Description of Artificial Sequence: Synthetic primer
atgcagcaggtgagcgaagcaccagaaatcatggatgtgg

SEQ ID NO: 1659 - DNA, 40 bp, Artificial Sequence
  Description of Artificial Sequence: Synthetic primer
tgcagccgcgcctggctgtcctgggcttcacgctcttctc

SEQ ID NO: 1660 - DNA, 40 bp, Artificial Sequence
  Description of Artificial Sequence: Synthetic primer
aggactataatgacagttaaccctgccaggagcctgaaga

SEQ ID NO: 1661 - DNA, 40 bp, Artificial Sequence
  Description of Artificial Sequence: Synthetic primer
ctcctgggttggttgagactttgataacttgaaaacgtgc

SEQ ID NO: 1662 - DNA, 40 bp, Artificial Sequence
  Description of Artificial Sequence: Synthetic primer
ttgtttcttatatgctaatatttttctctccctgctaata

SEQ ID NO: 1663 - DNA, 40 bp, Artificial Sequence
  Description of Artificial Sequence: Synthetic primer
tctagttaaatcctagtcattgaatcttgtagtgtcagtg

SEQ ID NO: 1664 - DNA, 40 bp, Artificial Sequence
  Description of Artificial Sequence: Synthetic primer
acaacattacaaaaacaaaaaatttaaaaaaaaatcattc

SEQ ID NO: 1665 - DNA, 40 bp, Artificial Sequence
  Description of Artificial Sequence: Synthetic primer
acctagataataactcgatgttagaaatttttatttaagt

SEQ ID NO: 1666 - DNA, 40 bp, Artificial Sequence
  Description of Artificial Sequence: Synthetic primer
cccaggacctgctcccagccccacggctccccttctgcac

SEQ ID NO: 1667 - DNA, 40 bp, Artificial Sequence
  Description of Artificial Sequence: Synthetic primer
cccctggaggagccatgccagccccacccaccagtttgtg

SEQ ID NO: 1668 - DNA, 40 bp, Artificial Sequence
  Description of Artificial Sequence: Synthetic primer
gccggacaaggaagcttatgtctagcctcactggaccttc

SEQ ID NO: 1669 - DNA, 40 bp, Artificial Sequence
  Description of Artificial Sequence: Synthetic primer
cctgcctagagacaaagagccagccacacatccaaacagg

SEQ ID NO: 1670 - DNA, 40 bp, Artificial Sequence
  Description of Artificial Sequence: Synthetic primer
cacagccgccctggggcctgggagcgctgagccggcaaac

SEQ ID NO: 1671 - DNA, 40 bp, Artificial Sequence
  Description of Artificial Sequence: Synthetic primer
tgtttcttcctccaattatcttcagactggtatctttcag

SEQ ID NO: 1672 - DNA, 40 bp, Artificial Sequence
  Description of Artificial Sequence: Synthetic primer
gttacatatttcatgtttgtgtttgatgtttgcctgactg

SEQ ID NO: 1673 - DNA, 40 bp, Artificial Sequence
  Description of Artificial Sequence: Synthetic primer
ctatagaaccatgttacaatgtatttgtgttttcagattc

SEQ ID NO: 1674 - DNA, 40 bp, Artificial Sequence
  Description of Artificial Sequence: Synthetic primer
ggtcccgcgtgctcctcacctttttcagcgcaggcaccag

SEQ ID NO: 1675 - DNA, 40 bp, Artificial Sequence
  Description of Artificial Sequence: Synthetic primer
tccctggcccggccgccgccgcccctctccccgcccagag

SEQ ID NO: 1676 - DNA, 40 bp, Artificial Sequence
  Description of Artificial Sequence: Synthetic primer
taaagtatacaggcatctaaggaagcaagtgagaaacctg

SEQ ID NO: 1677 - DNA, 40 bp, Artificial Sequence
  Description of Artificial Sequence: Synthetic primer
ctctctgctgagctgctggtaggagggcttcaatacacac

SEQ ID NO: 1678 - DNA, 40 bp, Artificial Sequence
  Description of Artificial Sequence: Synthetic primer
ggtcctctgccaggcagtggcccgcccggagggagctagg

SEQ ID NO: 1679 - DNA, 40 bp, Artificial Sequence
  Description of Artificial Sequence: Synthetic primer
gatgggctgccttgcagttctcagccctcacttctccttc

SEQ ID NO: 1680 - DNA, 40 bp, Artificial Sequence
  Description of Artificial Sequence: Synthetic primer
ccatgctgccccagtatgtacacacctgtcactcctccag

SEQ ID NO: 1681 - DNA, 40 bp, Artificial Sequence
  Description of Artificial Sequence: Synthetic primer
aaaagttaactgcttacttacttccctctgtttctcttcc

SEQ ID NO: 1682 - DNA, 40 bp, Artificial Sequence
  Description of Artificial Sequence: Synthetic primer
caggcgggcggggacgcagggcgggagcaaggctgaccac

SEQ ID NO: 1683 - DNA, 40 bp, Artificial Sequence
  Description of Artificial Sequence: Synthetic primer
ggaccccttacctgggaagttctcgcagagcacctcgatg

SEQ ID NO: 1684 - DNA, 40 bp, Artificial Sequence
  Description of Artificial Sequence: Synthetic primer
aagctgtagtatttcaactcactaacaagcatctattagc

SEQ ID NO: 1685 - DNA, 40 bp, Artificial Sequence
  Description of Artificial Sequence: Synthetic primer
actaaaattttaactgtatgtttgaatatttggtctttaa

SEQ ID NO: 1686 - DNA, 40 bp, Artificial Sequence
  Description of Artificial Sequence: Synthetic primer
tttgtcctcccttcacccagtcctctagggccctcattgc

SEQ ID NO: 1687 - DNA, 40 bp, Artificial Sequence
  Description of Artificial Sequence: Synthetic primer
ctccaccttccctctctcacccgatccccttctcccttcc

SEQ ID NO: 1688 - DNA, 40 bp, Artificial Sequence
  Description of Artificial Sequence: Synthetic primer
atgatatttggcaaacatgattattaattacttgagtcac

SEQ ID NO: 1689 - DNA, 40 bp, Artificial Sequence
  Description of Artificial Sequence: Synthetic primer
tgttaatctcactgggatgtcacaaaccttcacggatacc

SEQ ID NO: 1690 - DNA, 40 bp, Artificial Sequence
  Description of Artificial Sequence: Synthetic primer
atttggaagttttgtttacattatgtccttaggggttttc

SEQ ID NO: 1691 - DNA, 40 bp, Artificial Sequence
  Description of Artificial Sequence: Synthetic primer
gagacagcacacaaagtttacataacaacagagaggtagc

SEQ ID NO: 1692 - DNA, 40 bp, Artificial Sequence
  Description of Artificial Sequence: Synthetic primer
gctgcctggcggctgcaaagaaaaataacttcaagaatgg

SEQ ID NO: 1693 - DNA, 40 bp, Artificial Sequence
  Description of Artificial Sequence: Synthetic primer
gccccgcccctgacggtcaccccttgcagagagcggctac

SEQ ID NO: 1694 - DNA, 40 bp, Artificial Sequence
  Description of Artificial Sequence: Synthetic primer
aaaaattttcattaagtaaacattgatttaaacactatac

SEQ ID NO: 1695 - DNA, 40 bp, Artificial Sequence
  Description of Artificial Sequence: Synthetic primer
aggcatgagccactgcgcccggccaaccctgtaagtctac

SEQ ID NO: 1696 - DNA, 40 bp, Artificial Sequence
  Description of Artificial Sequence: Synthetic primer
tgtgctggcacctacccagcgagcactcatccacgtcctg

SEQ ID NO: 1697 - DNA, 40 bp, Artificial Sequence
  Description of Artificial Sequence: Synthetic primer
gtggtgtgccatgcctggcccaggggccgtgcccactgac

SEQ ID NO: 1698 - DNA, 40 bp, Artificial Sequence
  Description of Artificial Sequence: Synthetic primer
gagctacatgaacacccataaaagtgggttttagcttgtc

SEQ ID NO: 1699 - DNA, 40 bp, Artificial Sequence
  Description of Artificial Sequence: Synthetic primer
tgtgtagaggatggtcttgtgtctgtgttgactgattctc

SEQ ID NO: 1700 - DNA, 40 bp, Artificial Sequence
  Description of Artificial Sequence: Synthetic primer
ctcaataggacagagaactcttttgtcattccaaatttcc

SEQ ID NO: 1701 - DNA, 40 bp, Artificial Sequence
  Description of Artificial Sequence: Synthetic primer
tagaaattacgtataaattttctttctacttttattttag

SEQ ID NO: 1702 - DNA, 40 bp, Artificial Sequence
  Description of Artificial Sequence: Synthetic primer
acattttatttcctcaattaacaaaccatgtaaaataatg

SEQ ID NO: 1703 - DNA, 40 bp, Artificial Sequence
  Description of Artificial Sequence: Synthetic primer
tgtctagaaattttaaatgtcacatatttataaatgtgac

SEQ ID NO: 1704 - DNA, 40 bp, Artificial Sequence
  Description of Artificial Sequence: Synthetic primer
cgacagggcatgggtgcccaaggagacaagcaggaggttc

SEQ ID NO: 1705 - DNA, 40 bp, Artificial Sequence
  Description of Artificial Sequence: Synthetic primer
cagataagtgacataagtgacctgctttgtaaagccatag

SEQ ID NO: 1706 - DNA, 40 bp, Artificial Sequence
  Description of Artificial Sequence: Synthetic primer
agacatagaaagccagggtcccagatcagccactcattcc

SEQ ID NO: 1707 - DNA, 40 bp, Artificial Sequence
  Description of Artificial Sequence: Synthetic primer
agagtgtctgtcgctcagtcccactcaggggccactcttc

SEQ ID NO: 1708 - DNA, 40 bp, Artificial Sequence
  Description of Artificial Sequence: Synthetic primer
gttcttttctggtacgtagaagagtaatttttttcctctc

SEQ ID NO: 1709 - DNA, 40 bp, Artificial Sequence
  Description of Artificial Sequence: Synthetic primer
catctgtcactaattgccactcatttcctccttgataatc

SEQ ID NO: 1710 - DNA, 40 bp, Artificial Sequence
  Description of Artificial Sequence: Synthetic primer
aatggacagacctttctattataagactcagtagttcttg

SEQ ID NO: 1711 - DNA, 40 bp, Artificial Sequence
  Description of Artificial Sequence: Synthetic primer
tcatagagtttaataagatatttttcctttttcttcttag

SEQ ID NO: 1712 - DNA, 40 bp, Artificial Sequence
  Description of Artificial Sequence: Synthetic primer
ttttcattaatcatgaaaaccaatgtgcatgggcagaagg

SEQ ID NO: 1713 - DNA, 40 bp, Artificial Sequence
  Description of Artificial Sequence: Synthetic primer
gtttccaactgttgatactcattcaattgtgtctttccag

SEQ ID NO: 1714 - DNA, 40 bp, Artificial Sequence
  Description of Artificial Sequence: Synthetic primer
gtgtgtgagcaaaggcaccctgtccagtctaacctgaatc

SEQ ID NO: 1715 - DNA, 40 bp, Artificial Sequence
  Description of Artificial Sequence: Synthetic primer
gagggacctcaaggcaggggtgcctgtgcggctcgtttac

SEQ ID NO: 1716 - DNA, 40 bp, Artificial Sequence
  Description of Artificial Sequence: Synthetic primer
gctataaaattgaaacttaggagcagcgtttaagtctttg

SEQ ID NO: 1717 - DNA, 40 bp, Artificial Sequence
  Description of Artificial Sequence: Synthetic primer
ctccatttcaatcagcttctacaaaatatattttaatcac

SEQ ID NO: 1718 - DNA, 40 bp, Artificial Sequence
  Description of Artificial Sequence: Synthetic primer
ttcctgtagctcaggcagatgctccagggctcctttctgc

SEQ ID NO: 1719 - DNA, 40 bp, Artificial Sequence
  Description of Artificial Sequence: Synthetic primer
gttctccactctggacagcaatggatatgttctctgattc

SEQ ID NO: 1720 - DNA, 40 bp, Artificial Sequence
  Description of Artificial Sequence: Synthetic primer
aaggggaaggaaagaattttgcttaagatatcagtgtttg

SEQ ID NO: 1721 - DNA, 40 bp, Artificial Sequence
  Description of Artificial Sequence: Synthetic primer
tcaaagtatttcattttcttggtgccatttatcgtttttg

SEQ ID NO: 1722 - DNA, 40 bp, Artificial Sequence
  Description of Artificial Sequence: Synthetic primer
ttgtgaaagaacaacatgaacccatagtagagctaaattc

SEQ ID NO: 1723 - DNA, 40 bp, Artificial Sequence
  Description of Artificial Sequence: Synthetic primer
cagcagaaaaatcacccaaaggtaacatcttgccagaccc

SEQ ID NO: 1724 - DNA, 40 bp, Artificial Sequence
  Description of Artificial Sequence: Synthetic primer
ctaggtctcgagccctgtgattcaatgactgtttttcttc

SEQ ID NO: 1725 - DNA, 40 bp, Artificial Sequence
  Description of Artificial Sequence: Synthetic primer
agaaaagccaaggaagtccccaagtagcctcctggaaccc

SEQ ID NO: 1726 - DNA, 40 bp, Artificial Sequence
  Description of Artificial Sequence: Synthetic primer
ctgcccctccacatttcccagcagcatccctatccccaag

SEQ ID NO: 1727 - DNA, 40 bp, Artificial Sequence
  Description of Artificial Sequence: Synthetic primer
cccagttgagtgggaggcaggcaggcaggcgctgggtctg

SEQ ID NO: 1728 - DNA, 40 bp, Artificial Sequence
  Description of Artificial Sequence: Synthetic primer
agaccagctctgacaaaggcatcccttctccctgccactg

SEQ ID NO: 1729 - DNA, 40 bp, Artificial Sequence
  Description of Artificial Sequence: Synthetic primer
ctgggatctgtggtggtagaggcgggagcctgtggcttac

SEQ ID NO: 1730 - DNA, 40 bp, Artificial Sequence
  Description of Artificial Sequence: Synthetic primer
acagtggatgatccgcttcctggtactggaaagacacaac

SEQ ID NO: 1731 - DNA, 40 bp, Artificial Sequence
  Description of Artificial Sequence: Synthetic primer
gatttcaggtttacatttgaattcagaaacaaagttttct

SEQ ID NO: 1732 - DNA, 40 bp, Artificial Sequence
  Description of Artificial Sequence: Synthetic primer
gggcaccaaatgccttatccactgtgcagctccctcactc

SEQ ID NO: 1733 - DNA, 40 bp, Artificial Sequence
  Description of Artificial Sequence: Synthetic primer
tgtgatgcattgtatatttgatttaggggtgaactggatg

SEQ ID NO: 1734 - DNA, 40 bp, Artificial Sequence
  Description of Artificial Sequence: Synthetic primer
ggccatggagacactcaccaggccccagggtgcagagatg

SEQ ID NO: 1735 - DNA, 40 bp, Artificial Sequence
  Description of Artificial Sequence: Synthetic primer
ccccatgccaggcctgagccttgctgtctctaccacccca

SEQ ID NO: 1736 - DNA, 40 bp, Artificial Sequence
  Description of Artificial Sequence: Synthetic primer
gttatgtatgttttatagcctgttcactctcttttctctc

SEQ ID NO: 1737 - DNA, 40 bp, Artificial Sequence
  Description of Artificial Sequence: Synthetic primer
tttttttttaaagaaatacatcaagtgcctgtgtggactc

SEQ ID NO: 1738 - DNA, 40 bp, Artificial Sequence
  Description of Artificial Sequence: Synthetic primer
aatgtaatgggtccaccaaaacattaaataaataatctac

SEQ ID NO: 1739 - DNA, 40 bp, Artificial Sequence
  Description of Artificial Sequence: Synthetic primer
ccctctcattctttactacttccctaaagagaaaacacac

SEQ ID NO: 1740 - DNA, 40 bp, Artificial Sequence
  Description of Artificial Sequence: Synthetic primer
ccaacacaaacaagccccatgtgctgcagagaagcaggta

SEQ ID NO: 1741 - DNA, 40 bp, Artificial Sequence
  Description of Artificial Sequence: Synthetic primer
gctgggagctggccccgactcattgccctccccactcctc

SEQ ID NO: 1742 - DNA, 40 bp, Artificial Sequence
  Description of Artificial Sequence: Synthetic primer
gcggcccaatcttctgagatgctccgtgggagccgtgtgc

SEQ ID NO: 1743 - DNA, 40 bp, Artificial Sequence
  Description of Artificial Sequence: Synthetic primer
ctcctggctgttaggaaattcatgtgagcagcgacccaac

SEQ ID NO: 1744 - DNA, 40 bp, Artificial Sequence
  Description of Artificial Sequence: Synthetic primer
cctcctccagaccctggcagctgagttagttgctctcttg

SEQ ID NO: 1745 - DNA, 40 bp, Artificial Sequence
  Description of Artificial Sequence: Synthetic primer
gatgacttagaaatcaatttcattgccacaaaaatgacag

SEQ ID NO: 1746 - DNA, 40 bp, Artificial Sequence
  Description of Artificial Sequence: Synthetic primer
cttctctcaaaagcgacccctcccatccagtcctacctgg

SEQ ID NO: 1747 - DNA, 40 bp, Artificial Sequence
  Description of Artificial Sequence: Synthetic primer
cttaaatagtcaaaattagtctagttgtttggtagtctta

SEQ ID NO: 1748 - DNA, 40 bp, Artificial Sequence
  Description of Artificial Sequence: Synthetic primer
tttctacatttggaatattttacttaagtattgatgtgtg

SEQ ID NO: 1749 - DNA, 40 bp, Artificial Sequence
  Description of Artificial Sequence: Synthetic primer
ttgttttttcacaaagtttttgcttcaaatgtctcccata

SEQ ID NO: 1750 - DNA, 40 bp, Artificial Sequence
  Description of Artificial Sequence: Synthetic primer
tgtgggcagccccagagggtgacctgcccgcccactgacc

SEQ ID NO: 1751 - DNA, 40 bp, Artificial Sequence
  Description of Artificial Sequence: Synthetic primer
catgcctggccagggtagctcttttcaacacttaccgttc

SEQ ID NO: 1752 - DNA, 40 bp, Artificial Sequence
  Description of Artificial Sequence: Synthetic primer
tctgtcctcattgtattgaattgcttgctctctttctcag

SEQ ID NO: 1753 - DNA, 40 bp, Artificial Sequence
  Description of Artificial Sequence: Synthetic primer
gcactttgaaaagcacccatacgtcttggttcactcatcc

SEQ ID NO: 1754 - DNA, 40 bp, Artificial Sequence
  Description of Artificial Sequence: Synthetic primer
ggcagcatccaggtgcctggacatcagtcccgctatcccc

SEQ ID NO: 1755 - DNA, 40 bp, Artificial Sequence
  Description of Artificial Sequence: Synthetic primer
gagaggtgaacaacccctaatgcctgtgattccttcactc

SEQ ID NO: 1756 - DNA, 40 bp, Artificial Sequence
  Description of Artificial Sequence: Synthetic primer
agtccaggccccagccctcctccctcagaccgagcctcac

SEQ ID NO: 1757 - DNA, 40 bp, Artificial Sequence
  Description of Artificial Sequence: Synthetic primer
tccatcttgcccctgcctcctgccccatccctgccctctg

SEQ ID NO: 1758 - DNA, 40 bp, Artificial Sequence
  Description of Artificial Sequence: Synthetic primer
tcccaccatgaatgaatttctcactcattattctctgatc

SEQ ID NO: 1759 - DNA, 40 bp, Artificial Sequence
  Description of Artificial Sequence: Synthetic primer
tcagatcttctcagcattcgagagatctgtacgcgcgtgg

SEQ ID NO: 1760 - DNA, 40 bp, Artificial Sequence
  Description of Artificial Sequence: Synthetic primer
ggcggggagcagcatggagccggcggcggggagcagcatg

SEQ ID NO: 1761 - DNA, 40 bp, Artificial Sequence
  Description of Artificial Sequence: Synthetic primer
aatatggcagtaaggggatgattttcaaagttctttttgc

SEQ ID NO: 1762 - DNA, 40 bp, Artificial Sequence
  Description of Artificial Sequence: Synthetic primer
gacaattcttgaacaacttctgctcatgacaaactactgg

SEQ ID NO: 1763 - DNA, 40 bp, Artificial Sequence
  Description of Artificial Sequence: Synthetic primer
tcagtagtacaaagatttgatttctttttctttctatttc

SEQ ID NO: 1764 - DNA, 40 bp, Artificial Sequence
  Description of Artificial Sequence: Synthetic primer
aatatagctatcctcttataatacagcaagaaacataatt

SEQ ID NO: 1765 - DNA, 40 bp, Artificial Sequence
  Description of Artificial Sequence: Synthetic primer
ggccagtgaggcagtgacagccccgttactgggaacgggg

SEQ ID NO: 1766 - DNA, 40 bp, Artificial Sequence
  Description of Artificial Sequence: Synthetic primer
tgtctggccaggagcaaggggcagctgggcaatgatggtg

SEQ ID NO: 1767 - DNA, 40 bp, Artificial Sequence
  Description of Artificial Sequence: Synthetic primer
gcatctcagggccaaaaatttaatcagtggaaaaatagcc

SEQ ID NO: 1768 - DNA, 40 bp, Artificial Sequence
  Description of Artificial Sequence: Synthetic primer
aggaaaatgagatctactgttttcctttacttactacacc

SEQ ID NO: 1769 - DNA, 40 bp, Artificial Sequence
  Description of Artificial Sequence: Synthetic primer
ttatttcttaaccagtagctatgcttaatgcagtgcatac

SEQ ID NO: 1770 - DNA, 40 bp, Artificial Sequence
  Description of Artificial Sequence: Synthetic primer
acaagaatatattcatgaattgcataatctttattgatac

SEQ ID NO: 1771 - DNA, 40 bp, Artificial Sequence
  Description of Artificial Sequence: Synthetic primer
caaatatccttgtcttgttcctcatttaatagtgaccatc

SEQ ID NO: 1772 - DNA, 40 bp, Artificial Sequence
  Description of Artificial Sequence: Synthetic primer
aatcaagatttttcaacttttgatctaaaataaacaaata

SEQ ID NO: 1773 - DNA, 40 bp, Artificial Sequence
  Description of Artificial Sequence: Synthetic primer
ggctatggtcattggagaggcttccaatctttttccttcc

SEQ ID NO: 1774 - DNA, 40 bp, Artificial Sequence
  Description of Artificial Sequence: Synthetic primer
cagccggaaccaaggatgtgaagagcagcgcaggcagggg

SEQ ID NO: 1775 - DNA, 40 bp, Artificial Sequence
  Description of Artificial Sequence: Synthetic primer
ggtttacttgtgaattatttaaccctactctgttcgtatc

SEQ ID NO: 1776 - DNA, 40 bp, Artificial Sequence
  Description of Artificial Sequence: Synthetic primer
atcatgtgaaagaaatatgaaagttcagagatagagtaat

SEQ ID NO: 1777 - DNA, 40 bp, Artificial Sequence
  Description of Artificial Sequence: Synthetic primer
agaagagagcgcgtccccgccctccccgcggccagcctca

SEQ ID NO: 1778 - DNA, 40 bp, Artificial Sequence
  Description of Artificial Sequence: Synthetic primer
actcccagggcagtgccacagggcttcttcctccctccac

SEQ ID NO: 1779 - DNA, 40 bp, Artificial Sequence
  Description of Artificial Sequence: Synthetic primer
agtgcatctgggcgggcacaccccatctcaccacccacac

SEQ ID NO: 1780 - DNA, 40 bp, Artificial Sequence
  Description of Artificial Sequence: Synthetic primer
aggtgtgtccatctcagccaccctcatctgtgtgctggtg

SEQ ID NO: 1781 - DNA, 40 bp, Artificial Sequence
  Description of Artificial Sequence: Synthetic primer
ttcccaaatatgtaagtattctaaaatgattcctttggtc

SEQ ID NO: 1782 - DNA, 40 bp, Artificial Sequence
  Description of Artificial Sequence: Synthetic primer
gtttgaatcactagaaaagcccaatatgataaatgtaaac

SEQ ID NO: 1783 - DNA, 40 bp, Artificial Sequence
  Description of Artificial Sequence: Synthetic primer
aggtgtcctttgtgttcaggaatgagactcaagagacagc

SEQ ID NO: 1784 - DNA, 40 bp, Artificial Sequence
  Description of Artificial Sequence: Synthetic primer
gactcctcgcggtgtgtttctcacccgtgccgctctcttg

SEQ ID NO: 1785 - DNA, 40 bp, Artificial Sequence
  Description of Artificial Sequence: Synthetic primer
tagacagcctcaagctctgagaagaggaagttgtgagatg

SEQ ID NO: 1786 - DNA, 40 bp, Artificial Sequence
  Description of Artificial Sequence: Synthetic primer
tcacaagcatttgaagggacccctgactccagctgctcac

SEQ ID NO: 1787 - DNA, 40 bp, Artificial Sequence
  Description of Artificial Sequence: Synthetic primer
agcactaacagaagaaaaataaaggaatggagctaaaagc

SEQ ID NO: 1788 - DNA, 40 bp, Artificial Sequence
  Description of Artificial Sequence: Synthetic primer
gctttcctgtattgctctacttgattttcttacttattac

SEQ ID NO: 1789 - DNA, 40 bp, Artificial Sequence
  Description of Artificial Sequence: Synthetic primer
atatggtagtaatgacatcaccagacaaatatacaaatgc

SEQ ID NO: 1790 - DNA, 40 bp, Artificial Sequence
  Description of Artificial Sequence: Synthetic primer
ttacttgtattaaatgttttcttaactttccatgaatttc

SEQ ID NO: 1791 - DNA, 40 bp, Artificial Sequence
  Description of Artificial Sequence: Synthetic primer
ctggttccctgtcagcctccatctggacaatggggaaaag

SEQ ID NO: 1792 - DNA, 40 bp, Artificial Sequence
  Description of Artificial Sequence: Synthetic primer
gcagaggcacgggaggtctctccattttccaccttctctg

SEQ ID NO: 1793 - DNA, 40 bp, Artificial Sequence
  Description of Artificial Sequence: Synthetic primer
accccactccttgcttctcagatgaaaccaccagcacagg

SEQ ID NO: 1794 - DNA, 40 bp, Artificial Sequence
  Description of Artificial Sequence: Synthetic primer
ttccagctccctcacctccccgcctcccgctctcccttcc

SEQ ID NO: 1795 - DNA, 40 bp, Artificial Sequence
  Description of Artificial Sequence: Synthetic primer
gtgtatgaactataatgtctcattgctgtgtaagtaattg

SEQ ID NO: 1796 - DNA, 40 bp, Artificial Sequence
  Description of Artificial Sequence: Synthetic primer
accaaacacatatttgacaaggtgtttccttctcttttaa

SEQ ID NO: 1797 - DNA, 40 bp, Artificial Sequence
  Description of Artificial Sequence: Synthetic primer
atttcaaacatatttcctttgcctttccctgcctactttc

SEQ ID NO: 1798 - DNA, 40 bp, Artificial Sequence
  Description of Artificial Sequence: Synthetic primer
cgtgagccactgcgcccagcaggttgccacttcttattac

SEQ ID NO: 1799 - DNA, 40 bp, Artificial Sequence
  Description of Artificial Sequence: Synthetic primer
gggtgattatcacactcaaacctctctctcttctttcgag

SEQ ID NO: 1800 - DNA, 40 bp, Artificial Sequence
  Description of Artificial Sequence: Synthetic primer
tgtcagcttcagaactcctggaaaaggtgtggctgatctg

SEQ ID NO: 1801 - DNA, 40 bp, Artificial Sequence
  Description of Artificial Sequence: Synthetic primer
aataggtacatttttctcctgttgattttcattctttttc

SEQ ID NO: 1802 - DNA, 40 bp, Artificial Sequence
  Description of Artificial Sequence: Synthetic primer
attacgttttaagcttgctatttagactataatgtttttc

SEQ ID NO: 1803 - DNA, 40 bp, Artificial Sequence
  Description of Artificial Sequence: Synthetic primer
aacataagtctgggtgtatctggtgttgaaaattctaatg

SEQ ID NO: 1804 - DNA, 40 bp, Artificial Sequence
  Description of Artificial Sequence: Synthetic primer
acggagagtgttcactatccccatgactgggaaatcttac

SEQ ID NO: 1805 - DNA, 40 bp, Artificial Sequence
  Description of Artificial Sequence: Synthetic primer
gagcctagaagtatcaaatatgaaacctactaaaattttg

SEQ ID NO: 1806 - DNA, 40 bp, Artificial Sequence
  Description of Artificial Sequence: Synthetic primer
cattttattatgttattttcctaatttttatttttatcaa

SEQ ID NO: 1807 - DNA, 40 bp, Artificial Sequence
  Description of Artificial Sequence: Synthetic primer
ggctcagccaggccttgggcaagccccgaggtaaatttct

SEQ ID NO: 1808 - DNA, 40 bp, Artificial Sequence
  Description of Artificial Sequence: Synthetic primer
ggcagctctatgccctagcctcttagggatggaagaggac

SEQ ID NO: 1809 - DNA, 40 bp, Artificial Sequence
  Description of Artificial Sequence: Synthetic primer
gctgggctccttccaggaaccccaccaacatgcaaccccc

SEQ ID NO: 1810 - DNA, 40 bp, Artificial Sequence
  Description of Artificial Sequence: Synthetic primer
tgagtcgcctgtcactagaggtaagcaagcagaatccagg

SEQ ID NO: 1811 - DNA, 40 bp, Artificial Sequence
  Description of Artificial Sequence: Synthetic primer
aactagatatctttggaatactaaaaattcttacgttttc

SEQ ID NO: 1812 - DNA, 40 bp, Artificial Sequence
  Description of Artificial Sequence: Synthetic primer
gcaattctgccctgggtctttggtttcttcagctacctcc

SEQ ID NO: 1813 - DNA, 40 bp, Artificial Sequence
  Description of Artificial Sequence: Synthetic primer
acatgtacataaagaggacattacaagaattattttgttc

SEQ ID NO: 1814 - DNA, 40 bp, Artificial Sequence
  Description of Artificial Sequence: Synthetic primer
caagtatattcccagcctttaaaatatgtaagccaaatac

SEQ ID NO: 1815 - DNA, 40 bp, Artificial Sequence
  Description of Artificial Sequence: Synthetic primer
ccagcttgggacaaaggtggttctccctgaagccccagac

SEQ ID NO: 1816 - DNA, 40 bp, Artificial Sequence
  Description of Artificial Sequence: Synthetic primer
aagacaaggcagggcctggggtctaggagagacctgagag

SEQ ID NO: 1817 - DNA, 40 bp, Artificial Sequence
  Description of Artificial Sequence: Synthetic primer
actattacatgattttatatctcagaaagaatatgatatg

SEQ ID NO: 1818 - DNA, 40 bp, Artificial Sequence
  Description of Artificial Sequence: Synthetic primer
agagaccacatatttaagataagaaagaatcatatttgtg

SEQ ID NO: 1819 - DNA, 40 bp, Artificial Sequence
  Description of Artificial Sequence: Synthetic primer
tatgtgaccagcctgtcccctgctgtcggcccagctagag

SEQ ID NO: 1820 - DNA, 40 bp, Artificial Sequence
  Description of Artificial Sequence: Synthetic primer
cctgctcgtaggcagcttcttacccacttcccccactgcc

SEQ ID NO: 1821 - DNA, 40 bp, Artificial Sequence
  Description of Artificial Sequence: Synthetic primer
gcatggccacgtgggaatgagcactagtcgaggtctctgc

SEQ ID NO: 1822 - DNA, 40 bp, Artificial Sequence
  Description of Artificial Sequence: Synthetic primer
aaaaaaaatttagccacaaacaggatagagtgcaggatgg

SEQ ID NO: 1823 - DNA, 40 bp, Artificial Sequence
  Description of Artificial Sequence: Synthetic primer
aaagttagtattactgttcaaggcacatacatgcacagac

SEQ ID NO: 1824 - DNA, 40 bp, Artificial Sequence
  Description of Artificial Sequence: Synthetic primer
ccccagagcattagtagcatgttttgaatcagtgacattc

SEQ ID NO: 1825 - DNA, 40 bp, Artificial Sequence
  Description of Artificial Sequence: Synthetic primer
tagatcttttaagtacactttaaaaagtgttgtttctttg

SEQ ID NO: 1826 - DNA, 40 bp, Artificial Sequence
  Description of Artificial Sequence: Synthetic primer
ctattttgttagaaggaaataaatagaacacatgcaaaag

SEQ ID NO: 1827 - DNA, 40 bp, Artificial Sequence
  Description of Artificial Sequence: Synthetic primer
acttgacttacttgtctgatttattattattattcttttg

SEQ ID NO: 1828 - DNA, 40 bp, Artificial Sequence
  Description of Artificial Sequence: Synthetic primer
tcattacaaatggctgtcataactaattatagaggataca

SEQ ID NO: 1829 - DNA, 40 bp, Artificial Sequence
  Description of Artificial Sequence: Synthetic primer
aggctttcagattctaaaggaaagaatacatgcggtggat

SEQ ID NO: 1830 - DNA, 40 bp, Artificial Sequence
  Description of Artificial Sequence: Synthetic primer
ctttcagcatcttcacttgaagatccatcagatgattctg

SEQ ID NO: 1831 - DNA, 40 bp, Artificial Sequence
  Description of Artificial Sequence: Synthetic primer
ggtatgcaggccgagtctgcccctccagtggctcctcttc

SEQ ID NO: 1832 - DNA, 40 bp, Artificial Sequence
  Description of Artificial Sequence: Synthetic primer
gtgacttcccgtagaggggaagcccgggaggaggcccctg

SEQ ID NO: 1833 - DNA, 40 bp, Artificial Sequence
  Description of Artificial Sequence: Synthetic primer
aagtatatatattattattttccttttctttctatttgac

SEQ ID NO: 1834 - DNA, 40 bp, Artificial Sequence
  Description of Artificial Sequence: Synthetic primer
catatgtgacattcaagttatacacctgccagacttattc

SEQ ID NO: 1835 - DNA, 40 bp, Artificial Sequence
  Description of Artificial Sequence: Synthetic primer
cccttgacatccattgttctccttttctccttttcctttc

SEQ ID NO: 1836 - DNA, 40 bp, Artificial Sequence
  Description of Artificial Sequence: Synthetic primer
tactcccagaatttggggacatggggttccgaaaacaggc

SEQ ID NO: 1837 - DNA, 40 bp, Artificial Sequence
  Description of Artificial Sequence: Synthetic primer
gctctgagagattggtaacagaaagtgtaagtcagactgg

SEQ ID NO: 1838 - DNA, 40 bp, Artificial Sequence
  Description of Artificial Sequence: Synthetic primer
ctccaaggccttgtctggcccacaccttctttagtgtctc

SEQ ID NO: 1839 - DNA, 40 bp, Artificial Sequence
  Description of Artificial Sequence: Synthetic primer
aaacaatttaaggtcaccctccctcaccccagagaaaatg

SEQ ID NO: 1840 - DNA, 40 bp, Artificial Sequence
  Description of Artificial Sequence: Synthetic primer
ggtggctgtgtgttatgatggaccagttcacccaagtatg

SEQ ID NO: 1841 - DNA, 40 bp, Artificial Sequence
  Description of Artificial Sequence: Synthetic primer
tttaaagaatcacacatggacataaacagtaaaataaaac

SEQ ID NO: 1842 - DNA, 40 bp, Artificial Sequence
  Description of Artificial Sequence: Synthetic primer
attcatgcagatacctacttttacatacacactaacattc

SEQ ID NO: 1843 - DNA, 40 bp, Artificial Sequence
  Description of Artificial Sequence: Synthetic primer
caggcccacagaggaccttgatgggctgggacccgagctg

SEQ ID NO: 1844 - DNA, 40 bp, Artificial Sequence
  Description of Artificial Sequence: Synthetic primer
atggccggggcgcgggcacccagctgaccccaatctgtcc

SEQ ID NO: 1845 - DNA, 40 bp, Artificial Sequence
  Description of Artificial Sequence: Synthetic primer
atgtgcttacaagtgttcaggttgttcttgacgtgttctc

SEQ ID NO: 1846 - DNA, 40 bp, Artificial Sequence
  Description of Artificial Sequence: Synthetic primer
gagctgggtactgcatcgcagggattcccagggtccttac

SEQ ID NO: 1847 - DNA, 40 bp, Artificial Sequence
  Description of Artificial Sequence: Synthetic primer
aaatgtctacacacaagctttcatatacctttattctgtc

SEQ ID NO: 1848 - DNA, 40 bp, Artificial Sequence
  Description of Artificial Sequence: Synthetic primer
aaacatgcagtggtttcattaaattaacaacaataaatag

SEQ ID NO: 1849 - DNA, 40 bp, Artificial Sequence
  Description of Artificial Sequence: Synthetic primer
gatgagaggttaagatgcttgaggaaggcctgaccctgtt

SEQ ID NO: 1850 - DNA, 40 bp, Artificial Sequence
  Description of Artificial Sequence: Synthetic primer
ctgggtgagtctgtctcattcaccatgatacctaagtcgg

SEQ ID NO: 1851 - DNA, 40 bp, Artificial Sequence
  Description of Artificial Sequence: Synthetic primer
agctgtgagccccgctctgagccactcttctcttccctac

SEQ ID NO: 1852 - DNA, 40 bp, Artificial Sequence
  Description of Artificial Sequence: Synthetic primer
gctttgaaaattaataatattcaatctatataaataggac

SEQ ID NO: 1853 - DNA, 40 bp, Artificial Sequence
  Description of Artificial Sequence: Synthetic primer
cagccaagttaaactcagtttactacgttgttttttaatc

SEQ ID NO: 1854 - DNA, 40 bp, Artificial Sequence
  Description of Artificial Sequence: Synthetic primer
taggcggggcctggccttggtggtgggcactttccctgag

SEQ ID NO: 1855 - DNA, 40 bp, Artificial Sequence
  Description of Artificial Sequence: Synthetic primer
gagcctccatgactgggcctggcctggggcccccattttc

SEQ ID NO: 1856 - DNA, 40 bp, Artificial Sequence
  Description of Artificial Sequence: Synthetic primer
tttgccatgctttataagttaacaaactgaagcccaagac

SEQ ID NO: 1857 - DNA, 40 bp, Artificial Sequence
  Description of Artificial Sequence: Synthetic primer
tgttatagttgaacattaccttgcctccttactcattcac

SEQ ID NO: 1858 - DNA, 40 bp, Artificial Sequence
  Description of Artificial Sequence: Synthetic primer
tgcctctgagtgccagcccacggccctcgagagtgactgc

SEQ ID NO: 1859 - DNA, 40 bp, Artificial Sequence
  Description of Artificial Sequence: Synthetic primer
gctcaggccgcctctgctgagcacctccctgagcccgggg

SEQ ID NO: 1860 - DNA, 40 bp, Artificial Sequence
  Description of Artificial Sequence: Synthetic primer
cccaccaccccgccaccaccgacgagccggcgcgaagtcc

SEQ ID NO: 1861 - DNA, 40 bp, Artificial Sequence
  Description of Artificial Sequence: Synthetic primer
tggctggagcttgaggacgcaaggagggtttgtcactggc

SEQ ID NO: 1862 - DNA, 40 bp, Artificial Sequence
  Description of Artificial Sequence: Synthetic primer
tccccgcccactgcccagctccaccctcgcccagcgctca

SEQ ID NO: 1863 - DNA, 40 bp, Artificial Sequence
  Description of Artificial Sequence: Synthetic primer
cctgtggggtccctcggcttgggcccctcaccacccatcc

SEQ ID NO: 1864 - DNA, 40 bp, Artificial Sequence
  Description of Artificial Sequence: Synthetic primer
ccccgaccctcccgcacagcagtctcacctgaagggcatt

SEQ ID NO: 1865 - DNA, 40 bp, Artificial Sequence
  Description of Artificial Sequence: Synthetic primer
gcccgtttccagcgcctcagtcggttccccatgccctcag

SEQ ID NO: 1866 - DNA, 40 bp, Artificial Sequence
  Description of Artificial Sequence: Synthetic primer
gccggcacgccgcccagcatggtccgggaaaccaggcatc

SEQ ID NO: 1867 - DNA, 40 bp, Artificial Sequence
  Description of Artificial Sequence: Synthetic primer
gggcgggaagcggcgcccgaggagcgagcgcggccgcggg

SEQ ID NO: 1868 - DNA, 40 bp, Artificial Sequence
  Description of Artificial Sequence: Synthetic primer
aagttgagaagctctaacttagcttctgccctttcctttc

SEQ ID NO: 1869 - DNA, 40 bp, Artificial Sequence
  Description of Artificial Sequence: Synthetic primer
aggaaaaaattaatgtcccataaaacacacgtcattctta

SEQ ID NO: 1870 - DNA, 40 bp, Artificial Sequence
  Description of Artificial Sequence: Synthetic primer
tcctccccttcctcctgaaggcctgaggctccctgtgacc

SEQ ID NO: 1871 - DNA, 40 bp, Artificial Sequence
  Description of Artificial Sequence: Synthetic primer
ggagcaggcagagggaggtggtgggtgggaggggctgtac

SEQ ID NO: 1872 - DNA, 40 bp, Artificial Sequence
  Description of Artificial Sequence: Synthetic primer
cagggtggtggctggggcgatggtggacgccctgaagatg

SEQ ID NO: 1873 - DNA, 40 bp, Artificial Sequence
  Description of Artificial Sequence: Synthetic primer
cactgggtctctatggcaggtctgggttctcctgtctccc

SEQ ID NO: 1874 - DNA, 40 bp, Artificial Sequence
  Description of Artificial Sequence: Synthetic primer
gaacaggaagcccttctgactaggtttgtgccccctccac

SEQ ID NO: 1875 - DNA, 40 bp, Artificial Sequence
  Description of Artificial Sequence: Synthetic primer
ccctgctccctgacggcttcttgctcacaccccgggagac

SEQ ID NO: 1876 - DNA, 40 bp, Artificial Sequence
  Description of Artificial Sequence: Synthetic primer
aatttgatttataagtatatgccaattatatgattatttt

SEQ ID NO: 1877 - DNA, 40 bp, Artificial Sequence
  Description of Artificial Sequence: Synthetic primer
ttcaaaacgttttaagaaaatccttaccaatactccatcc

SEQ ID NO: 1878 - DNA, 40 bp, Artificial Sequence
  Description of Artificial Sequence: Synthetic primer
ttctgtctttacccattatttataggattttgtcactttg

SEQ ID NO: 1879 - DNA, 40 bp, Artificial Sequence
  Description of Artificial Sequence: Synthetic primer
agtgtatagacaaaagaattattccaacctccaatgaccc

SEQ ID NO: 1880 - DNA, 40 bp, Artificial Sequence
  Description of Artificial Sequence: Synthetic primer
tttaccattctttaatttttgtctatacagaaggtttgtc

SEQ ID NO: 1881 - DNA, 40 bp, Artificial Sequence
  Description of Artificial Sequence: Synthetic primer
gaggacgttgctaaagctcaccatgcccttatttctctag

SEQ ID NO: 1882 - DNA, 40 bp, Artificial Sequence
  Description of Artificial Sequence: Synthetic primer
aaaacatgttataccaatttaaaacgcttctcccctttcc

SEQ ID NO: 1883 - DNA, 40 bp, Artificial Sequence
  Description of Artificial Sequence: Synthetic primer
attcacatcaaaaatagtacatgttgaggatattaaaaac

SEQ ID NO: 1884 - DNA, 40 bp, Artificial Sequence
  Description of Artificial Sequence: Synthetic primer
catctctccctccccaggcccagccctggcagcgggtact

SEQ ID NO: 1885 - DNA, 40 bp, Artificial Sequence
  Description of Artificial Sequence: Synthetic primer
ctgggctcggggagcgccagcctgagaggagcgcgtgagc

SEQ ID NO: 1886 - DNA, 40 bp, Artificial Sequence
  Description of Artificial Sequence: Synthetic primer
gaaaacactaatgtaacataaaggtaacaaataataaatg

SEQ ID NO: 1887 - DNA, 40 bp, Artificial Sequence
  Description of Artificial Sequence: Synthetic primer
attaggatttgttttaagtttttaaggagaaagcttgagc

SEQ ID NO: 1888 - DNA, 40 bp, Artificial Sequence
  Description of Artificial Sequence: Synthetic primer
atgattatgactttttttttaaatcacagatggtgttctc

SEQ ID NO: 1889 - DNA, 40 bp, Artificial Sequence
  Description of Artificial Sequence: Synthetic primer
ttgtaattttacatgtgacatatgttcatcttttaaaatg

SEQ ID NO: 1890 - DNA, 40 bp, Artificial Sequence
  Description of Artificial Sequence: Synthetic primer
tattgcctctgaactatcttaatctttttttatttttggg

SEQ ID NO: 1891 - DNA, 40 bp, Artificial Sequence
  Description of Artificial Sequence: Synthetic primer
ccaaatgatatctctgtctgcattatttctgaaaaccaac

SEQ ID NO: 1892 - DNA, 40 bp, Artificial Sequence
  Description of Artificial Sequence: Synthetic primer
cctgagagggtcccctgctcacagcctccttccctctctc

SEQ ID NO: 1893 - DNA, 40 bp, Artificial Sequence
  Description of Artificial Sequence: Synthetic primer
aagccccggcaaggctgcctgggacatcaccctcacttac

SEQ ID NO: 1894 - DNA, 40 bp, Artificial Sequence
  Description of Artificial Sequence: Synthetic primer
taatgagtctttttcatttgagtcagcagggtttttcttg

SEQ ID NO: 1895 - DNA, 40 bp, Artificial Sequence
  Description of Artificial Sequence: Synthetic primer
atgaactatgatcgtaaagaacatgctactcctaagctac

SEQ ID NO: 1896 - DNA, 40 bp, Artificial Sequence
  Description of Artificial Sequence: Synthetic primer
ttccactcaataaacaatcagttacttaacacaagaaatc

SEQ ID NO: 1897 - DNA, 40 bp, Artificial Sequence
  Description of Artificial Sequence: Synthetic primer
gtgtttcctattaggtctaactcagtggcaactacattca

SEQ ID NO: 1898 - DNA, 40 bp, Artificial Sequence
  Description of Artificial Sequence: Synthetic primer
ggctgtcttttccctttactccccacgcccaaccctccac

SEQ ID NO: 1899 - DNA, 40 bp, Artificial Sequence
  Description of Artificial Sequence: Synthetic primer
aactctgtaagcgacttttggtgataggagtctgtgattg

SEQ ID NO: 1900 - DNA, 40 bp, Artificial Sequence
  Description of Artificial Sequence: Synthetic primer
tccataagccacatggagaaaagctaaaagaagggacaac

SEQ ID NO: 1901 - DNA, 40 bp, Artificial Sequence
  Description of Artificial Sequence: Synthetic primer
tccttcctggaagaatagtgatttttatactgtactttta

SEQ ID NO: 1902 - DNA, 40 bp, Artificial Sequence
  Description of Artificial Sequence: Synthetic primer
ccggaggcctggcccacccgcagccccgcaccgcgcctca

SEQ ID NO: 1903 - DNA, 40 bp, Artificial Sequence
  Description of Artificial Sequence: Synthetic primer
caaagggcggcagtgaccggctctcctgcttgtttttccc

SEQ ID NO: 1904 - DNA, 40 bp, Artificial Sequence
  Description of Artificial Sequence: Synthetic primer
tgatcacagttgacgagctttagaaaccccaaataacaag

SEQ ID NO: 1905 - DNA, 40 bp, Artificial Sequence
  Description of Artificial Sequence: Synthetic primer
ggggttcttggagaagaacctggtcccagaggagcttgac

SEQ ID NO: 1906 - DNA, 40 bp, Artificial Sequence
  Description of Artificial Sequence: Synthetic primer
tcttaaaaagtactgctgttgcctatagtccagacaaacg

SEQ ID NO: 1907 - DNA, 40 bp, Artificial Sequence
  Description of Artificial Sequence: Synthetic primer
gtgtgtgtgtgtgtgtgtttgtgtattcatatgtatgttg

SEQ ID NO: 1908 - DNA, 40 bp, Artificial Sequence
  Description of Artificial Sequence: Synthetic primer
agccatcttttgtgtcgcccaccgggctcatgtgtcatcg

SEQ ID NO: 1909 - DNA, 40 bp, Artificial Sequence
  Description of Artificial Sequence: Synthetic primer
cttcccaaagatgcccacctgcatggtgatgttggactcc

SEQ ID NO: 1910 - DNA, 40 bp, Artificial Sequence
  Description of Artificial Sequence: Synthetic primer
ggggacatttgtgaggcccagccctcattttggtcccttg

SEQ ID NO: 1911 - DNA, 40 bp, Artificial Sequence
  Description of Artificial Sequence: Synthetic primer
ccggggacactcctgtgcccaccctgccctggcctcagtg

SEQ ID NO: 1912 - DNA, 40 bp, Artificial Sequence
  Description of Artificial Sequence: Synthetic primer
ctacgatctgccaaacttgagaaatagtgagttttctgtc

SEQ ID NO: 1913 - DNA, 40 bp, Artificial Sequence
  Description of Artificial Sequence: Synthetic primer
ttaagagacagctggcagaattataagaatgaaaaggacc

SEQ ID NO: 1914 - DNA, 40 bp, Artificial Sequence
  Description of Artificial Sequence: Synthetic primer
gcagggcttatgcctgccagcccctgacacgcattgtgtc

SEQ ID NO: 1915 - DNA, 40 bp, Artificial Sequence
  Description of Artificial Sequence: Synthetic primer
gctggcctccactgccctgcgccccacccaccacactcac

SEQ ID NO: 1916 - DNA, 40 bp, Artificial Sequence
  Description of Artificial Sequence: Synthetic primer
ttccttaacacatttcagatactcacctaccttacttttg

SEQ ID NO: 1917 - DNA, 40 bp, Artificial Sequence
  Description of Artificial Sequence: Synthetic primer
ttggagttttctaaattcatttaatttcttttaaaagtgg

SEQ ID NO: 1918 - DNA, 40 bp, Artificial Sequence
  Description of Artificial Sequence: Synthetic primer
caaagaagatggggctcacacagcaagaccccaaccactc

SEQ ID NO: 1919 - DNA, 40 bp, Artificial Sequence
  Description of Artificial Sequence: Synthetic primer
aggctgacgtggcctgcgttggtctaggtgcgcagcaacc

SEQ ID NO: 1920 - DNA, 40 bp, Artificial Sequence
  Description of Artificial Sequence: Synthetic primer
ccaactataaaaccctctttttctgtaccccacttttctc

SEQ ID NO: 1921 - DNA, 40 bp, Artificial Sequence
  Description of Artificial Sequence: Synthetic primer
agaatatccccgagccaagtccctccccttcactgtagac

SEQ ID NO: 1922 - DNA, 40 bp, Artificial Sequence
  Description of Artificial Sequence: Synthetic primer
acaattttatgaaaatacattaaataagcctacatacctg

SEQ ID NO: 1923 - DNA, 40 bp, Artificial Sequence
  Description of Artificial Sequence: Synthetic primer
tgacgaatataaagcgttatctgcttcactgtggacttac

SEQ ID NO: 1924 - DNA, 40 bp, Artificial Sequence
  Description of Artificial Sequence: Synthetic primer
gatcaagattaatcgccttttctttatttttcttctaaac

SEQ ID NO: 1925 - DNA, 40 bp, Artificial Sequence
  Description of Artificial Sequence: Synthetic primer
aaatatatttacaactgtggataaacagaggccaccttac

SEQ ID NO: 1926 - DNA, 40 bp, Artificial Sequence
  Description of Artificial Sequence: Synthetic primer
aagctagtcaatgcccggactgctttacgccccccgcagc

SEQ ID NO: 1927 - DNA, 40 bp, Artificial Sequence
  Description of Artificial Sequence: Synthetic primer
aagcttgatccctaagggcagcaagacaacagcagctaag

SEQ ID NO: 1928 - DNA, 40 bp, Artificial Sequence
  Description of Artificial Sequence: Synthetic primer
accttccatttcaccagattcagaaaaggcatcatcatcc

SEQ ID NO: 1929 - DNA, 40 bp, Artificial Sequence
  Description of Artificial Sequence: Synthetic primer
atggtttgctttactgttggaactttagagcctggttttg

SEQ ID NO: 1930 - DNA, 40 bp, Artificial Sequence
  Description of Artificial Sequence: Synthetic primer
gccccatccccgctgcccgcctctggtctccgtctgtatg

SEQ ID NO: 1931 - DNA, 40 bp, Artificial Sequence
  Description of Artificial Sequence: Synthetic primer
agctctgaaccgtgggaggctgggctgggctcccttgagg

SEQ ID NO: 1932 - DNA, 40 bp, Artificial Sequence
  Description of Artificial Sequence: Synthetic primer
aaaacaggaataattttaataacctgactgtgtcttggag

SEQ ID NO: 1933 - DNA, 40 bp, Artificial Sequence
  Description of Artificial Sequence: Synthetic primer
agcaaaatttcttattctgtttaagggaaagaaaccttcc

SEQ ID NO: 1934 - DNA, 40 bp, Artificial Sequence
  Description of Artificial Sequence: Synthetic primer
caagcttgggtccttacgatggctcccacgatgggtcctg

SEQ ID NO: 1935 - DNA, 40 bp, Artificial Sequence
  Description of Artificial Sequence: Synthetic primer
atgaggattccgaacctggccctccaaagcagaggaaagc

SEQ ID NO: 1936 - DNA, 40 bp, Artificial Sequence
  Description of Artificial Sequence: Synthetic primer
taatttataacaatgaattgtatttctcaccttccccttt

SEQ ID NO: 1937 - DNA, 40 bp, Artificial Sequence
  Description of Artificial Sequence: Synthetic primer
gctgtgttcattctgcagtcattcgtcaaatcaaggatac

SEQ ID NO: 1938 - DNA, 40 bp, Artificial Sequence
  Description of Artificial Sequence: Synthetic primer
tccacataaacatgcctgggaggacccagggccaactcac

SEQ ID NO: 1939 - DNA, 40 bp, Artificial Sequence
  Description of Artificial Sequence: Synthetic primer
agctaagtgcagggacagatacatggggagtggggcacag

SEQ ID NO: 1940 - DNA, 40 bp, Artificial Sequence
  Description of Artificial Sequence: Synthetic primer
agtggagtggacaataaacttgccttgtttgtggttttac

SEQ ID NO: 1941 - DNA, 40 bp, Artificial Sequence
  Description of Artificial Sequence: Synthetic primer
cacattttcagtgtacctattaatcacaactaacaccatc

SEQ ID NO: 1942 - DNA, 40 bp, Artificial Sequence
  Description of Artificial Sequence: Synthetic primer
tgctatttcttaggaaccgttaattaatctttcaacaatc

SEQ ID NO: 1943 - DNA, 40 bp, Artificial Sequence
  Description of Artificial Sequence: Synthetic primer
gtcaatcaaaattattcaaggctgtcaagaaaacatacgc

SEQ ID NO: 1944 - DNA, 40 bp, Artificial Sequence
  Description of Artificial Sequence: Synthetic primer
ttgccttttagatgttatgattgaaagttcaggatgagtc

SEQ ID NO: 1945 - DNA, 40 bp, Artificial Sequence
  Description of Artificial Sequence: Synthetic primer
cacccactaaattgcaggtgtacctagaaagtatgctttc

SEQ ID NO: 1946 - DNA, 40 bp, Artificial Sequence
  Description of Artificial Sequence: Synthetic primer
catgaccctcccaggccagtggggtgcccttcctgaagtc

SEQ ID NO: 1947 - DNA, 40 bp, Artificial Sequence
  Description of Artificial Sequence: Synthetic primer
atcaagggtcatccctattgatggcttctgcccttcgtcc

SEQ ID NO: 1948 - DNA, 40 bp, Artificial Sequence
  Description of Artificial Sequence: Synthetic primer
tttcgagagtgtggaggacctgagctagggtggtgacttg

SEQ ID NO: 1949 - DNA, 40 bp, Artificial Sequence
  Description of Artificial Sequence: Synthetic primer
aaaagatgtggtggagacacagtgggcgcccccagagagg

SEQ ID NO: 1950 - DNA, 40 bp, Artificial Sequence
  Description of Artificial Sequence: Synthetic primer
gggaggttctgacattttggtggtcactgccatgtttcac

SEQ ID NO: 1951 - DNA, 40 bp, Artificial Sequence
  Description of Artificial Sequence: Synthetic primer
cccatgcaggaatcttagggtggccccatccctgaccacc

SEQ ID NO: 1952 - DNA, 40 bp, Artificial Sequence
  Description of Artificial Sequence: Synthetic primer
ccctttatcttatctaacttgtagggagcctggcacatcc

SEQ ID NO: 1953 - DNA, 40 bp, Artificial Sequence
  Description of Artificial Sequence: Synthetic primer
tctgcagtattgttctcagcttatgcgtgcatctgtcttg

SEQ ID NO: 1954 - DNA, 40 bp, Artificial Sequence
  Description of Artificial Sequence: Synthetic primer
ccccaaatcccaggtgagagaacactcgaggaaagcttgg

SEQ ID NO: 1955 - DNA, 40 bp, Artificial Sequence
  Description of Artificial Sequence: Synthetic primer
gctcaccttttctcctttttctgcagggaggaaagattcc

SEQ ID NO: 1956 - DNA, 40 bp, Artificial Sequence
  Description of Artificial Sequence: Synthetic primer
cgcacttctgtttaaaaaggaagttaaaccaaagcacagc

SEQ ID NO: 1957 - DNA, 40 bp, Artificial Sequence
  Description of Artificial Sequence: Synthetic primer
cccctagtctgttgtctggctgagcaagcctcctgagggg

SEQ ID NO: 1958 - DNA, 40 bp, Artificial Sequence
  Description of Artificial Sequence: Synthetic primer
aaacaaggaggtgggtccaacccttccaagactaatggag

SEQ ID NO: 1959 - DNA, 40 bp, Artificial Sequence
  Description of Artificial Sequence: Synthetic primer
tatctttttaaagggaaaaggaaatgattgggtttttttg

SEQ ID NO: 1960 - DNA, 40 bp, Artificial Sequence
  Description of Artificial Sequence: Synthetic primer
tagacaacttttagtaaataaaaatggaatttttgttgtc

SEQ ID NO: 1961 - DNA, 40 bp, Artificial Sequence
  Description of Artificial Sequence: Synthetic primer
cgtttcaatcaccactaaatcaatctaaatacaggaaatc

SEQ ID NO: 1962 - DNA, 40 bp, Artificial Sequence
  Description of Artificial Sequence: Synthetic primer
ggctggggaggggccaccatcctgcctctccttcctccac

SEQ ID NO: 1963 - DNA, 40 bp, Artificial Sequence
  Description of Artificial Sequence: Synthetic primer
ggaggtaagcagacagccacacagtgtgaccgagggcact

SEQ ID NO: 1964 - DNA, 40 bp, Artificial Sequence
  Description of Artificial Sequence: Synthetic primer
cctttaggtaataagctagtgtgtagacagacatggtaac

SEQ ID NO: 1965 - DNA, 40 bp, Artificial Sequence
  Description of Artificial Sequence: Synthetic primer
agaaataacaggtatattgtcatgtatattttctgtattt

SEQ ID NO: 1966 - DNA, 40 bp, Artificial Sequence
  Description of Artificial Sequence: Synthetic primer
tctgggcctcctccgcccaccggcggcgtctcccgcgaag

SEQ ID NO: 1967 - DNA, 40 bp, Artificial Sequence
  Description of Artificial Sequence: Synthetic primer
cggccgggtgcgtcactcgcgaagtggaatttgcccagac

SEQ ID NO: 1968 - DNA, 40 bp, Artificial Sequence
  Description of Artificial Sequence: Synthetic primer
ttgctttatttttagtaaacttttcctttctaaatctatg

SEQ ID NO: 1969 - DNA, 40 bp, Artificial Sequence
  Description of Artificial Sequence: Synthetic primer
tttacaactgatcttttttcaattactaatttgttacttc

SEQ ID NO: 1970 - DNA, 40 bp, Artificial Sequence
  Description of Artificial Sequence: Synthetic primer
taggactctcttgtacatattctggatatgcatgacttgc

SEQ ID NO: 1971 - DNA, 40 bp, Artificial Sequence
  Description of Artificial Sequence: Synthetic primer
ttatttcaaattcttattttaaaaaatgttatgtttggtc

SEQ ID NO: 1972 - DNA, 40 bp, Artificial Sequence
  Description of Artificial Sequence: Synthetic primer
gggaaaaaaagtctctgtctcaagcactcaggaaccttac

SEQ ID NO: 1973 - DNA, 40 bp, Artificial Sequence
  Description of Artificial Sequence: Synthetic primer
cgttataaatgacctctcattacacacccaagaccgtcag

SEQ ID NO: 1974 - DNA, 40 bp, Artificial Sequence
  Description of Artificial Sequence: Synthetic primer
agttaagcctttgtgggctccaggtccctggtgagattag

SEQ ID NO: 1975 - DNA, 40 bp, Artificial Sequence
  Description of Artificial Sequence: Synthetic primer
tttattctccgaaagatgtagcgacctgtaaactgaaggc

SEQ ID NO: 1976 - DNA, 40 bp, Artificial Sequence
  Description of Artificial Sequence: Synthetic primer
tccagtcacctaaggcccagtgagtgtcctctcttgcttc

SEQ ID NO: 1977 - DNA, 40 bp, Artificial Sequence
  Description of Artificial Sequence: Synthetic primer
tcccagttagagactgcgggcaggggtctgggcatctggg

SEQ ID NO: 1978 - DNA, 40 bp, Artificial Sequence
  Description of Artificial Sequence: Synthetic primer
gtagatgttagtcatgattataatacctgttcttattttt

SEQ ID NO: 1979 - DNA, 40 bp, Artificial Sequence
  Description of Artificial Sequence: Synthetic primer
caaacaaagcaacaaagaaagtgaatagtgaaacagactg

SEQ ID NO: 1980 - DNA, 40 bp, Artificial Sequence
  Description of Artificial Sequence: Synthetic primer
ctccagtgacaggaggctctgtgcgcacctccagggacac

SEQ ID NO: 1981 - DNA, 40 bp, Artificial Sequence
  Description of Artificial Sequence: Synthetic primer
cctgagttctgaaaagtgttgcctcctctgtttcctttag

SEQ ID NO: 1982 - DNA, 40 bp, Artificial Sequence
  Description of Artificial Sequence: Synthetic primer
gggcctcagagaaaggcaaaagggcctagactttgacttc

SEQ ID NO: 1983 - DNA, 40 bp, Artificial Sequence
  Description of Artificial Sequence: Synthetic primer
gagggtgcactcacgctgcctcacctcctcgcctcctctg

SEQ ID NO: 1984 - DNA, 40 bp, Artificial Sequence
  Description of Artificial Sequence: Synthetic primer
gcatctggaagagggtgcagcctgaggctgctgtcatcac

SEQ ID NO: 1985 - DNA, 40 bp, Artificial Sequence
  Description of Artificial Sequence: Synthetic primer
ttccaatgcttccctttggtgtcccaggttctcggtgctc

SEQ ID NO: 1986 - DNA, 40 bp, Artificial Sequence
  Description of Artificial Sequence: Synthetic primer
actcccacaaaggattcactggccggacgtttaaaagcag

SEQ ID NO: 1987 - DNA, 40 bp, Artificial Sequence
  Description of Artificial Sequence: Synthetic primer
ggtctagaaaaatttgaaaattttaagtaacagttgttag

SEQ ID NO: 1988 - DNA, 40 bp, Artificial Sequence
  Description of Artificial Sequence: Synthetic primer
ctcaggatatttcaacagctgtgtctaatcacttttaatg

SEQ ID NO: 1989 - DNA, 40 bp, Artificial Sequence
  Description of Artificial Sequence: Synthetic primer
aaaatgattttgttgagttgtatgccagttcttccttctg

SEQ ID NO: 1990 - DNA, 40 bp, Artificial Sequence
  Description of Artificial Sequence: Synthetic primer
ccttttagatagccaggtatcactgtaagaatttacctac

SEQ ID NO: 1991 - DNA, 40 bp, Artificial Sequence
  Description of Artificial Sequence: Synthetic primer
tgactaggacattcctggaactaatcctttcctccatgtg

SEQ ID NO: 1992 - DNA, 40 bp, Artificial Sequence
  Description of Artificial Sequence: Synthetic primer
tttgttcccaaatccactatgcccaagtcctatgcttctg

SEQ ID NO: 1993 - DNA, 40 bp, Artificial Sequence
  Description of Artificial Sequence: Synthetic primer
gacagcagatcaagactgtgtcagaagggtgcaaactgac

SEQ ID NO: 1994 - DNA, 40 bp, Artificial Sequence
  Description of Artificial Sequence: Synthetic primer
ctcctgtcctttcacttaaatcctcctttaactcactacc

SEQ ID NO: 1995 - DNA, 40 bp, Artificial Sequence
  Description of Artificial Sequence: Synthetic primer
gggcagcaggcagggtcatccctgccacccaccaaccttg

SEQ ID NO: 1996 - DNA, 40 bp, Artificial Sequence
  Description of Artificial Sequence: Synthetic primer
tggaagactggatgaggaaagtgccagcccacccactgcc

SEQ ID NO: 1997 - DNA, 40 bp, Artificial Sequence
  Description of Artificial Sequence: Synthetic primer
tgcaagaggctcgcagccaagtccacccactactgtctac

SEQ ID NO: 1998 - DNA, 40 bp, Artificial Sequence
  Description of Artificial Sequence: Synthetic primer
catgtcagaggaaggaggcagaggtcagggttggagagtc

SEQ ID NO: 1999 - DNA, 40 bp, Artificial Sequence
  Description of Artificial Sequence: Synthetic primer
gcatctcctacttgatgagaaagtgcatgcagaagtcaag

SEQ ID NO: 2000 - DNA, 40 bp, Artificial Sequence
  Description of Artificial Sequence: Synthetic primer
agcaaagaccctcagaatgatcctccatgaacttatgctc

SEQ ID NO: 2001 - DNA, 40 bp, Artificial Sequence
  Description of Artificial Sequence: Synthetic primer
tttttgttctgattgctttttattccaatatcttaaatgg

SEQ ID NO: 2002 - DNA, 40 bp, Artificial Sequence
  Description of Artificial Sequence: Synthetic primer
ttaagttaataaaactgataaaaacaaagcatttacatac

SEQ ID NO: 2003 - DNA, 40 bp, Artificial Sequence
  Description of Artificial Sequence: Synthetic primer
ggtcctgtaccactgggttcccaacatggactggcccttt

SEQ ID NO: 2004 - DNA, 40 bp, Artificial Sequence
  Description of Artificial Sequence: Synthetic primer
cgcagatgtccagaactggataaggcagggcccggaggac

SEQ ID NO: 2005 - DNA, 40 bp, Artificial Sequence
  Description of Artificial Sequence: Synthetic primer
tctccttgtcaatgggaactggttatagttggttgatttg

SEQ ID NO: 2006 - DNA, 40 bp, Artificial Sequence
  Description of Artificial Sequence: Synthetic primer
tctgtatccaaattcttgtgctgatgtttgtttttctttc

SEQ ID NO: 2007 - DNA, 40 bp, Artificial Sequence
  Description of Artificial Sequence: Synthetic primer
tcccgaggagcgggcagtcaggcagtggtggttctctctc

SEQ ID NO: 2008 - DNA, 40 bp, Artificial Sequence
  Description of Artificial Sequence: Synthetic primer
agacttggccttccaacctctcactgacatgtcccttccc

SEQ ID NO: 2009 - DNA, 40 bp, Artificial Sequence
  Description of Artificial Sequence: Synthetic primer
ttttattttggttttgtcatactttgacctttgtcttttc

SEQ ID NO: 2010 - DNA, 40 bp, Artificial Sequence
  Description of Artificial Sequence: Synthetic primer
aatactcacatgcatgccgattgtgcacacaaaccaaaac

SEQ ID NO: 2011 - DNA, 40 bp, Artificial Sequence
  Description of Artificial Sequence: Synthetic primer
gcatggtcaaaagcccaatgacacaggcaggcttgacttc

SEQ ID NO: 2012 - DNA, 40 bp, Artificial Sequence
  Description of Artificial Sequence: Synthetic primer
tgttcatcatacctgttgactgcgtaggaccctgatttgg

SEQ ID NO: 2013 - DNA, 40 bp, Artificial Sequence
  Description of Artificial Sequence: Synthetic primer
gccacaatttaggtaggcaggattagtctatatatgttgc

SEQ ID NO: 2014 - DNA, 40 bp, Artificial Sequence
  Description of Artificial Sequence: Synthetic primer
atttttaaatgtctaagccaacacctatttaaaacataat

SEQ ID NO: 2015 - DNA, 40 bp, Artificial Sequence
  Description of Artificial Sequence: Synthetic primer
acgttaaagattccaagcctatttcttaggtactactctg

SEQ ID NO: 2016 - DNA, 40 bp, Artificial Sequence
  Description of Artificial Sequence: Synthetic primer
cttattttaagtcttattgtctcaaattcttctttatcag

SEQ ID NO: 2017 - DNA, 40 bp, Artificial Sequence
  Description of Artificial Sequence: Synthetic primer
attatcaacacaaacattgtaatattcttgacaactgaag

SEQ ID NO: 2018 - DNA, 40 bp, Artificial Sequence
  Description of Artificial Sequence: Synthetic primer
aacccagtactgatggctggtgtttactacctccttcttc

SEQ ID NO: 2019 - DNA, 40 bp, Artificial Sequence
  Description of Artificial Sequence: Synthetic primer
tccaaggctggagagcccagctcttatttgtcccttgttc

SEQ ID NO: 2020 - DNA, 40 bp, Artificial Sequence
  Description of Artificial Sequence: Synthetic primer
ggatattccaacagtttactgaaagactctgaaaggagtc

SEQ ID NO: 2021 - DNA, 40 bp, Artificial Sequence
  Description of Artificial Sequence: Synthetic primer
ctcctgccagccctccctcaagtcccaatcttgaatgacc

SEQ ID NO: 2022 - DNA, 40 bp, Artificial Sequence
  Description of Artificial Sequence: Synthetic primer
ggacagagccagccagcagccccatctccccagcccccac

SEQ ID NO: 2023 - DNA, 40 bp, Artificial Sequence
  Description of Artificial Sequence: Synthetic primer
gccgcggcgcacctgtctcggctgccggctccccgcacct

SEQ ID NO: 2024 - DNA, 40 bp, Artificial Sequence
  Description of Artificial Sequence: Synthetic primer
tgagcggagtttcccacaatgccccggtgcggtgcagccg

SEQ ID NO: 2025 - DNA, 40 bp, Artificial Sequence
  Description of Artificial Sequence: Synthetic primer
agatattgttgtttctctagaactgagccaagagctgtcc

SEQ ID NO: 2026 - DNA, 40 bp, Artificial Sequence
  Description of Artificial Sequence: Synthetic primer
cccgcagcagctgcatgaggtgtgcaagggaaggaactgg

SEQ ID NO: 2027 - DNA, 40 bp, Artificial Sequence
  Description of Artificial Sequence: Synthetic primer
ctctcatgtaatattaaatcttttatctaatttaatttac

SEQ ID NO: 2028 - DNA, 40 bp, Artificial Sequence
  Description of Artificial Sequence: Synthetic primer
actttgttttgccaacttcaagttctgaaataaccctaac

SEQ ID NO: 2029 - DNA, 40 bp, Artificial Sequence
  Description of Artificial Sequence: Synthetic primer
gatcactacttttcagaagggaacttaacagctttatgac

SEQ ID NO: 2030 - DNA, 40 bp, Artificial Sequence
  Description of Artificial Sequence: Synthetic primer
cttggtttactagttcagtatgtggggtctaatgtttttg

SEQ ID NO: 2031 - DNA, 40 bp, Artificial Sequence
  Description of Artificial Sequence: Synthetic primer
ttacatgcaaggaaactagttctgaatacacttagaagag

SEQ ID NO: 2032 - DNA, 40 bp, Artificial Sequence
  Description of Artificial Sequence: Synthetic primer
ggtcactggcacatggcagtggcctcaaaagacaaaagac

SEQ ID NO: 2033 - DNA, 40 bp, Artificial Sequence
  Description of Artificial Sequence: Synthetic primer
gcagcagcccgactcagggcctgtggtgtgtgtgcctctc

SEQ ID NO: 2034 - DNA, 40 bp, Artificial Sequence
  Description of Artificial Sequence: Synthetic primer
acaacctggccaccaatgtccctggcttttggccctggag

SEQ ID NO: 2035 - DNA, 40 bp, Artificial Sequence
  Description of Artificial Sequence: Synthetic primer
taatttgaagtttcagttttgttttaaacttgtattttgg

SEQ ID NO: 2036 - DNA, 40 bp, Artificial Sequence
  Description of Artificial Sequence: Synthetic primer
tggttccagcaggcctggcagcagtcctagggtcccagtt

SEQ ID NO: 2037 - DNA, 40 bp, Artificial Sequence
  Description of Artificial Sequence: Synthetic primer
gcacaggccatggcgggctcagcgttctcctcccaccacc

SEQ ID NO: 2038 - DNA, 40 bp, Artificial Sequence
  Description of Artificial Sequence: Synthetic primer
taaaataaaataaatatggcctcatcttttgaaaactagc

SEQ ID NO: 2039 - DNA, 40 bp, Artificial Sequence
  Description of Artificial Sequence: Synthetic primer
tccagttgagagtacttaccattgtattttgtgttttcag

SEQ ID NO: 2040 - DNA, 40 bp, Artificial Sequence
  Description of Artificial Sequence: Synthetic primer
gaatacagtaagggaagtatttggctgtgactcagaggtg

SEQ ID NO: 2041 - DNA, 40 bp, Artificial Sequence
  Description of Artificial Sequence: Synthetic primer
ttggtttctgcagttatttggtgagatgtgtcaagcagtc

SEQ ID NO: 2042 - DNA, 40 bp, Artificial Sequence
  Description of Artificial Sequence: Synthetic primer
agaaaatgtgtgatcccatttttggtatttgttttctctc

SEQ ID NO: 2043 - DNA, 40 bp, Artificial Sequence
  Description of Artificial Sequence: Synthetic primer
atctcacatcatactggggaaagcaatgaaacacatactc

SEQ ID NO: 2044 - DNA, 40 bp, Artificial Sequence
  Description of Artificial Sequence: Synthetic primer
attgccattgagttatacctttaccttattgactggtttc

SEQ ID NO: 2045 - DNA, 40 bp, Artificial Sequence
  Description of Artificial Sequence: Synthetic primer
tataccgcaatttatgccagtggttcacctattcttctag

SEQ ID NO: 2046 - DNA, 40 bp, Artificial Sequence
  Description of Artificial Sequence: Synthetic primer
ggtctaatgcattcaactatccaaattaaatacaatggtg

SEQ ID NO: 2047 - DNA, 40 bp, Artificial Sequence
  Description of Artificial Sequence: Synthetic primer
catgaaataagggtagaacaaaggaactgatgccctctag

SEQ ID NO: 2048 - DNA, 40 bp, Artificial Sequence
  Description of Artificial Sequence: Synthetic primer
attatctaaatcatttgtttaaaaaaaaaagaagcttatg

SEQ ID NO: 2049 - DNA, 40 bp, Artificial Sequence
  Description of Artificial Sequence: Synthetic primer
ccttacaattcctgctagggtattttttttttctttatac

SEQ ID NO: 2050 - DNA, 40 bp, Artificial Sequence
  Description of Artificial Sequence: Synthetic primer
atctttcccctttaaatatgatttattgtctttctcatac

SEQ ID NO: 2051 - DNA, 40 bp, Artificial Sequence
  Description of Artificial Sequence: Synthetic primer
aaacattatttactattttacattattttacctgtactag

SEQ ID NO: 2052 - DNA, 40 bp, Artificial Sequence
  Description of Artificial Sequence: Synthetic primer
atccccaccccgctctgcattctacaagtaatgtgtgtcc

SEQ ID NO: 2053 - DNA, 40 bp, Artificial Sequence
  Description of Artificial Sequence: Synthetic primer
cctgattccctatgtgccctaaaaatagaggggtactcac

SEQ ID NO: 2054 - DNA, 40 bp, Artificial Sequence
  Description of Artificial Sequence: Synthetic primer
tcttctctctgtttttgtcttgtttggtgtgtttccttgg

SEQ ID NO: 2055 - DNA, 40 bp, Artificial Sequence
  Description of Artificial Sequence: Synthetic primer
gggagaaggacctccacagaggcccaaccccgggcggacc

SEQ ID NO: 2056 - DNA, 40 bp, Artificial Sequence
  Description of Artificial Sequence: Synthetic primer
gattactttataattatcttcttagttctttgtcatttac

SEQ ID NO: 2057 - DNA, 40 bp, Artificial Sequence
  Description of Artificial Sequence: Synthetic primer
agaagattaatacttcaaacatatcaaccaatattttctt

SEQ ID NO: 2058 - DNA, 40 bp, Artificial Sequence
  Description of Artificial Sequence: Synthetic primer
ttttgtccctgggacttcaataatgtgctatatttgtaac

SEQ ID NO: 2059 - DNA, 40 bp, Artificial Sequence
  Description of Artificial Sequence: Synthetic primer
ttaaaaaatgggaaaacataactttatgagtcttgagatt

SEQ ID NO: 2060 - DNA, 40 bp, Artificial Sequence
  Description of Artificial Sequence: Synthetic primer
gggctcggtggcacagcgctcaccccgcctcccgccagca

SEQ ID NO: 2061 - DNA, 40 bp, Artificial Sequence
  Description of Artificial Sequence: Synthetic primer
cagcagcagggtgggctgctagggacccctcacattgttg

SEQ ID NO: 2062 - DNA, 40 bp, Artificial Sequence
  Description of Artificial Sequence: Synthetic primer
aaaaattaaggaattaaaaaataaaaatcaaattctcggc

SEQ ID NO: 2063 - DNA, 40 bp, Artificial Sequence
  Description of Artificial Sequence: Synthetic primer
cctgtagcaattgggctaaatctgtctttaattctttttc

SEQ ID NO: 2064 - DNA, 40 bp, Artificial Sequence
  Description of Artificial Sequence: Synthetic primer
cctgagtgatgcttttacaatgagaagacgttatttacag

SEQ ID NO: 2065 - DNA, 40 bp, Artificial Sequence
  Description of Artificial Sequence: Synthetic primer
aggctaacctgaaaggaaacatttttctccctttaaatag

SEQ ID NO: 2066 - DNA, 40 bp, Artificial Sequence
  Description of Artificial Sequence: Synthetic primer
cacaggggtgggcacctctatgcacctctctgaagtgtcg

SEQ ID NO: 2067 - DNA, 40 bp, Artificial Sequence
  Description of Artificial Sequence: Synthetic primer
acagctgactgcagggccctgggcacagcctggctcctgg

SEQ ID NO: 2068 - DNA, 40 bp, Artificial Sequence
  Description of Artificial Sequence: Synthetic primer
tcattgtgcctgtgatccccaccctccatctgcttgcttc

SEQ ID NO: 2069 - DNA, 40 bp, Artificial Sequence
  Description of Artificial Sequence: Synthetic primer
tctgaggcagaacgcctcccctcccgccccggtggcactg

SEQ ID NO: 2070 - DNA, 40 bp, Artificial Sequence
  Description of Artificial Sequence: Synthetic primer
aggcagccttgggcacccatggggtagcaggaggccatgc

SEQ ID NO: 2071 - DNA, 40 bp, Artificial Sequence
  Description of Artificial Sequence: Synthetic primer
ccagtccctttgctcctgacttgggctctctggggctcag

SEQ ID NO: 2072 - DNA, 40 bp, Artificial Sequence
  Description of Artificial Sequence: Synthetic primer
cagcctagggacccgaaccaaaccttgtttaatgttctcc

SEQ ID NO: 2073 - DNA, 40 bp, Artificial Sequence
  Description of Artificial Sequence: Synthetic primer
atcccagcagcctgagggtggggagaagaccccgctgagg

SEQ ID NO: 2074 - DNA, 40 bp, Artificial Sequence
  Description of Artificial Sequence: Synthetic primer
cctgagagctggcaaagatgggaataaatgttgatagttt

SEQ ID NO: 2075 - DNA, 40 bp, Artificial Sequence
  Description of Artificial Sequence: Synthetic primer
aagatttagacaatgaaatacacttgatgatgccaaggtc

SEQ ID NO: 2076 - DNA, 40 bp, Artificial Sequence
  Description of Artificial Sequence: Synthetic primer
gatgagcctcccaagtctcagctccctggagtcactgtgt

SEQ ID NO: 2077 - DNA, 40 bp, Artificial Sequence
  Description of Artificial Sequence: Synthetic primer
aaccccagaggacgggagagtcagacaacacacgagagac

SEQ ID NO: 2078 - DNA, 40 bp, Artificial Sequence
  Description of Artificial Sequence: Synthetic primer
ggatccatatgtggtaatcattatttaatggaaactcttc

SEQ ID NO: 2079 - DNA, 40 bp, Artificial Sequence
  Description of Artificial Sequence: Synthetic primer
cagtccgcctctgatgcacactaaaaaaaggcatacttgg

SEQ ID NO: 2080 - DNA, 40 bp, Artificial Sequence
  Description of Artificial Sequence: Synthetic primer
gttcagaggggcctctgctcccactcgggtcatggccttc

SEQ ID NO: 2081 - DNA, 40 bp, Artificial Sequence
  Description of Artificial Sequence: Synthetic primer
gagcggaggcagcaaccaccgcgcctgccaggcccagagc

SEQ ID NO: 2082 - DNA, 40 bp, Artificial Sequence
  Description of Artificial Sequence: Synthetic primer
gtcttgggaaacctgggaatgcatagacaaaatgtgagat

SEQ ID NO: 2083 - DNA, 40 bp, Artificial Sequence
  Description of Artificial Sequence: Synthetic primer
tcttatttctaacttcaggagttgatgtttttcccagtcc

SEQ ID NO: 2084 - DNA, 40 bp, Artificial Sequence
  Description of Artificial Sequence: Synthetic primer
gcctttaaagaaagctactgtgtgaacctcatcaaccatc

SEQ ID NO: 2085 - DNA, 40 bp, Artificial Sequence
  Description of Artificial Sequence: Synthetic primer
ggtttcttaatagtacttcataaaaatattctaaataagg

SEQ ID NO: 2086 - DNA, 40 bp, Artificial Sequence
  Description of Artificial Sequence: Synthetic primer
caatactgcagtgaatgacctgagcccaagggagcaaagc

SEQ ID NO: 2087 - DNA, 40 bp, Artificial Sequence
  Description of Artificial Sequence: Synthetic primer
ctagtatttgaattttgatgtatgtacacccctgcctctg

SEQ ID NO: 2088 - DNA, 40 bp, Artificial Sequence
  Description of Artificial Sequence: Synthetic primer
atacatttgaaaacaagctgagggcattgaggagggatag

SEQ ID NO: 2089 - DNA, 40 bp, Artificial Sequence
  Description of Artificial Sequence: Synthetic primer
gtatactcacatgattggtgctctctgaaatctgcttctc

SEQ ID NO: 2090 - DNA, 40 bp, Artificial Sequence
  Description of Artificial Sequence: Synthetic primer
ttgtttggttaagggaagatggtgcaaagatacttatttc

SEQ ID NO: 2091 - DNA, 40 bp, Artificial Sequence
  Description of Artificial Sequence: Synthetic primer
ctgttggcataaagcgggtgttcaggtagcaagtattatc

SEQ ID NO: 2092 - DNA, 40 bp, Artificial Sequence
  Description of Artificial Sequence: Synthetic primer
aggcctgtgttttacagaaaaagattcttttaacactatg

SEQ ID NO: 2093 - DNA, 40 bp, Artificial Sequence
  Description of Artificial Sequence: Synthetic primer
tgagggactagtttgctctgattagttaccttttcttttc

SEQ ID NO: 2094 - DNA, 40 bp, Artificial Sequence
  Description of Artificial Sequence: Synthetic primer
gtataacatatgaaatataatttttaaagaatacaaaact

SEQ ID NO: 2095 - DNA, 40 bp, Artificial Sequence
  Description of Artificial Sequence: Synthetic primer
tgttagattcttaagcagataacaaggaaaatttattttc

SEQ ID NO: 2096 - DNA, 40 bp, Artificial Sequence
  Description of Artificial Sequence: Synthetic primer
actacatattttcatttaattttcctctaaaatgttcctc

SEQ ID NO: 2097 - DNA, 40 bp, Artificial Sequence
  Description of Artificial Sequence: Synthetic primer
cgcatgttagcaagttcatcaaccatccttctccagatac

SEQ ID NO: 2098 - DNA, 40 bp, Artificial Sequence
  Description of Artificial Sequence: Synthetic primer
gaccagaagggttgcagccatattcctgggtgggagaagg

SEQ ID NO: 2099 - DNA, 40 bp, Artificial Sequence
  Description of Artificial Sequence: Synthetic primer
aaaaagaagcagcagcaggtggcattacaaattaagcacg

SEQ ID NO: 2100 - DNA, 40 bp, Artificial Sequence
  Description of Artificial Sequence: Synthetic primer
cgctggcccctcagtgtggcctgggcctgacgctctgttc

SEQ ID NO: 2101 - DNA, 40 bp, Artificial Sequence
  Description of Artificial Sequence: Synthetic primer
tggctgccacgccccgaccccgcccgtgccccccgggcct

SEQ ID NO: 2102 - DNA, 40 bp, Artificial Sequence
  Description of Artificial Sequence: Synthetic primer
aggaaaacaaatgtacaagtctgttgagactaaagcaagc

SEQ ID NO: 2103 - DNA, 40 bp, Artificial Sequence
  Description of Artificial Sequence: Synthetic primer
atgtgataaaccacaaagttttaaagttctttttcttgtg

SEQ ID NO: 2104 - DNA, 40 bp, Artificial Sequence
  Description of Artificial Sequence: Synthetic primer
aagggcctcgaggcaaagtggccctgctctcaggagatgt

SEQ ID NO: 2105 - DNA, 40 bp, Artificial Sequence
  Description of Artificial Sequence: Synthetic primer
cccctccaccctaactcctcatctggggttgcattgacag

SEQ ID NO: 2106 - DNA, 40 bp, Artificial Sequence
  Description of Artificial Sequence: Synthetic primer
gtcacccctattaattacacagttactgtgcataatcagc

SEQ ID NO: 2107 - DNA, 40 bp, Artificial Sequence
  Description of Artificial Sequence: Synthetic primer
tatactaaatctttgatataagcgtctttcttttcatttc

SEQ ID NO: 2108 - DNA, 40 bp, Artificial Sequence
  Description of Artificial Sequence: Synthetic primer
ctgttcccttaccccgggtggcccgcgcgccctcctgacc

SEQ ID NO: 2109 - DNA, 40 bp, Artificial Sequence
  Description of Artificial Sequence: Synthetic primer
ccgcggacacacgtgtgcaaggggcatgtccacagctgcc

SEQ ID NO: 2110 - DNA, 40 bp, Artificial Sequence
  Description of Artificial Sequence: Synthetic primer
gtacgtggtagtactgacttttaacgacttactaattttt

SEQ ID NO: 2111 - DNA, 40 bp, Artificial Sequence
  Description of Artificial Sequence: Synthetic primer
ctttttaccatttatggaaagaagcattaaaacatataac

SEQ ID NO: 2112 - DNA, 40 bp, Artificial Sequence
  Description of Artificial Sequence: Synthetic primer
atatttaggattgataggcacttctagctaatgactaggg

SEQ ID NO: 2113 - DNA, 40 bp, Artificial Sequence
  Description of Artificial Sequence: Synthetic primer
ttgactctattcccatggcaccagtttactcagaatttac

SEQ ID NO: 2114 - DNA, 40 bp, Artificial Sequence
  Description of Artificial Sequence: Synthetic primer
aaaacttcttacccataccaggagaaaattatttcagagc

SEQ ID NO: 2115 - DNA, 40 bp, Artificial Sequence
  Description of Artificial Sequence: Synthetic primer
cagaaatgtctgctatactgattcctgacttgtttttatg

SEQ ID NO: 2116 - DNA, 40 bp, Artificial Sequence
  Description of Artificial Sequence: Synthetic primer
gagtgaatacattacattaccaaattctagtgtgtttctc

SEQ ID NO: 2117 - DNA, 40 bp, Artificial Sequence
  Description of Artificial Sequence: Synthetic primer
aaataatttaggtaattattttattttattttaggtagtg

SEQ ID NO: 2118 - DNA, 40 bp, Artificial Sequence
  Description of Artificial Sequence: Synthetic primer
tctgtctctgtttttttattttccagaaaatcagttcgag

SEQ ID NO: 2119 - DNA, 40 bp, Artificial Sequence
  Description of Artificial Sequence: Synthetic primer
ggagggaggcagggttacagggaatggcaggcggaggttg

SEQ ID NO: 2120 - DNA, 40 bp, Artificial Sequence
  Description of Artificial Sequence: Synthetic primer
ctccttgtcctaccactccaggagggacctcatcctcgtc

SEQ ID NO: 2121 - DNA, 40 bp, Artificial Sequence
  Description of Artificial Sequence: Synthetic primer
acgtagacgccagtggctcactcgctcctggcaccttccc

SEQ ID NO: 2122 - DNA, 40 bp, Artificial Sequence
  Description of Artificial Sequence: Synthetic primer
ttttcaaagtataaacatattctctatgcaattttgaacc

SEQ ID NO: 2123 - DNA, 40 bp, Artificial Sequence
  Description of Artificial Sequence: Synthetic primer
atttttttcttagttggcactctatgtgctttcattcctg

SEQ ID NO: 2124 - DNA, 40 bp, Artificial Sequence
  Description of Artificial Sequence: Synthetic primer
aaatacatatgattctttttttgtatttttcatttcatac

SEQ ID NO: 2125 - DNA, 40 bp, Artificial Sequence
  Description of Artificial Sequence: Synthetic primer
agttgtatctacacaaactaattggaaacacattccctac

SEQ ID NO: 2126 - DNA, 40 bp, Artificial Sequence
  Description of Artificial Sequence: Synthetic primer
cgctcgcagtcgagccgagccggcggacccgcctgggctc

SEQ ID NO: 2127 - DNA, 40 bp, Artificial Sequence
  Description of Artificial Sequence: Synthetic primer
ccctccccgcggccctccgcccacgcccaccctgcaacag

SEQ ID NO: 2128 - DNA, 40 bp, Artificial Sequence
  Description of Artificial Sequence: Synthetic primer
atatatatatgtatttctgatttatgttaacttcatttcc

SEQ ID NO: 2129 - DNA, 40 bp, Artificial Sequence
  Description of Artificial Sequence: Synthetic primer
agaaagctgctacactcctacagatgagaccaacagaatg

SEQ ID NO: 2130 - DNA, 40 bp, Artificial Sequence
  Description of Artificial Sequence: Synthetic primer
gtcttcaaaaataatttacaagacatttaacgaatggaac

SEQ ID NO: 2131 - DNA, 40 bp, Artificial Sequence
  Description of Artificial Sequence: Synthetic primer
aagtttgtcgacatttaatgtttactgtcacatttctttg

SEQ ID NO: 2132 - DNA, 40 bp, Artificial Sequence
  Description of Artificial Sequence: Synthetic primer
ttcttgtccaggtgaaaaatacaaaatcttctaaagtaac

SEQ ID NO: 2133 - DNA, 40 bp, Artificial Sequence
  Description of Artificial Sequence: Synthetic primer
ataatactacagaatttggaattattatgttttacattta

SEQ ID NO: 2134 - DNA, 40 bp, Artificial Sequence
  Description of Artificial Sequence: Synthetic primer
gcccaaataaataaccactgccccatctgtcatcctctgc

SEQ ID NO: 2135 - DNA, 40 bp, Artificial Sequence
  Description of Artificial Sequence: Synthetic primer
ctgagcttttgggatttctcttacttatagaatgtgttcc

SEQ ID NO: 2136 - DNA, 40 bp, Artificial Sequence
  Description of Artificial Sequence: Synthetic primer
gcctgctggtggccaacctgctggcccacatgaactactc

SEQ ID NO: 2137 - DNA, 40 bp, Artificial Sequence
  Description of Artificial Sequence: Synthetic primer
ccggcggggctcggggctcaggtcggacacgccattgacg

SEQ ID NO: 2138 - DNA, 40 bp, Artificial Sequence
  Description of Artificial Sequence: Synthetic primer
acgataaaacattatagagccataggaattattattcaag

SEQ ID NO: 2139 - DNA, 40 bp, Artificial Sequence
  Description of Artificial Sequence: Synthetic primer
ttaactaccttctccttcttgagtactttatggaattttc

SEQ ID NO: 2140 - DNA, 40 bp, Artificial Sequence
  Description of Artificial Sequence: Synthetic primer
caaaccctagactcaggacgtggcatgatgcaggagaagg

SEQ ID NO: 2141 - DNA, 40 bp, Artificial Sequence
  Description of Artificial Sequence: Synthetic primer
acagtgaaacttgcgcaatgaagaaacggccgggtcactc

SEQ ID NO: 2142 - DNA, 40 bp, Artificial Sequence
  Description of Artificial Sequence: Synthetic primer
ttttcgaaaagtagaacagttttaaaaactaatagaaaag

SEQ ID NO: 2143 - DNA, 40 bp, Artificial Sequence
  Description of Artificial Sequence: Synthetic primer
ctggaaatatttgtccttggtgtttactttgcattccttc

SEQ ID NO: 2144 - DNA, 40 bp, Artificial Sequence
  Description of Artificial Sequence: Synthetic primer
ttctgttctagcctggggagtcactaaaggcaactctttc

SEQ ID NO: 2145 - DNA, 40 bp, Artificial Sequence
  Description of Artificial Sequence: Synthetic primer
aattcccaaagctgcaacagcagaaggtgcaggaacagtc

SEQ ID NO: 2146 - DNA, 40 bp, Artificial Sequence
  Description of Artificial Sequence: Synthetic primer
atccattgccagcaatggatttggggctaggaaaatatac

SEQ ID NO: 2147 - DNA, 40 bp, Artificial Sequence
  Description of Artificial Sequence: Synthetic primer
aatttattaataaatgtgtattttattcttttcatttgtt

SEQ ID NO: 2148 - DNA, 40 bp, Artificial Sequence
  Description of Artificial Sequence: Synthetic primer
gcttcataaaattagccttgaagttcagaaaccaaacacc

SEQ ID NO: 2149 - DNA, 40 bp, Artificial Sequence
  Description of Artificial Sequence: Synthetic primer
tccagtctaatctgagctcttttgcctgttctctgcttcc

SEQ ID NO: 2150 - DNA, 40 bp, Artificial Sequence
  Description of Artificial Sequence: Synthetic primer
gtgatcacctctgtccctaccgatgccacacacccttctg

SEQ ID NO: 2151 - DNA, 40 bp, Artificial Sequence
  Description of Artificial Sequence: Synthetic primer
atgcaaaccctttgccttcctggccagtctgggcctctgc

SEQ ID NO: 2152 - DNA, 40 bp, Artificial Sequence
  Description of Artificial Sequence: Synthetic primer
taccaagagaaaaacaagtgatgaaattcccttgacacac

SEQ ID NO: 2153 - DNA, 40 bp, Artificial Sequence
  Description of Artificial Sequence: Synthetic primer
taaacatttttctgtttatacgattttgcttgtgtgtatg

SEQ ID NO: 2154 - DNA, 40 bp, Artificial Sequence
  Description of Artificial Sequence: Synthetic primer
ctctgacctgtaatcagtgcaggtgattaaattgaatccc

SEQ ID NO: 2155 - DNA, 40 bp, Artificial Sequence
  Description of Artificial Sequence: Synthetic primer
ggcaaagatgcagagctctgagtagaaccattgctcaaag

SEQ ID NO: 2156 - DNA, 40 bp, Artificial Sequence
  Description of Artificial Sequence: Synthetic primer
ttgaggaaaggaagaagactacagggcatagattgtcctc

SEQ ID NO: 2157 - DNA, 40 bp, Artificial Sequence
  Description of Artificial Sequence: Synthetic primer
acctgcctactaattcccataattatgtggctgtcttttt

SEQ ID NO: 2158 - DNA, 40 bp, Artificial Sequence
  Description of Artificial Sequence: Synthetic primer
aaagccgctgctcccatgggcacctggtggtgcaattaac

SEQ ID NO: 2159 - DNA, 40 bp, Artificial Sequence
  Description of Artificial Sequence: Synthetic primer
cacaacttgcttttcacataacctcttaccattaatttgc

SEQ ID NO: 2160 - DNA, 40 bp, Artificial Sequence
  Description of Artificial Sequence: Synthetic primer
acctagggagaatgaccttatgccaactcctgccccaaac

SEQ ID NO: 2161 - DNA, 40 bp, Artificial Sequence
  Description of Artificial Sequence: Synthetic primer
ttctacatgattgtatctaatattgtcctctctcctagcg

SEQ ID NO: 2162 - DNA, 40 bp, Artificial Sequence
  Description of Artificial Sequence: Synthetic primer
tacacacacaatcacatagcataggaagaaaacagcttac

SEQ ID NO: 2163 - DNA, 40 bp, Artificial Sequence
  Description of Artificial Sequence: Synthetic primer
aataatcttctccgttctctctcattattccctcgagttc

SEQ ID NO: 2164 - DNA, 40 bp, Artificial Sequence
  Description of Artificial Sequence: Synthetic primer
ggatggggcccaccatgcccaccagctctgtccctccatc

SEQ ID NO: 2165 - DNA, 40 bp, Artificial Sequence
  Description of Artificial Sequence: Synthetic primer
cctctaacatgacgagtgttgccttcacagctatgggctc

SEQ ID NO: 2166 - DNA, 40 bp, Artificial Sequence
  Description of Artificial Sequence: Synthetic primer
gtccgcgctcacacctgttttccctttcagttggagagag

SEQ ID NO: 2167 - DNA, 40 bp, Artificial Sequence
  Description of Artificial Sequence: Synthetic primer
tgagcgcacaccccacatgccctgcatgccccacgctggc

SEQ ID NO: 2168 - DNA, 40 bp, Artificial Sequence
  Description of Artificial Sequence: Synthetic primer
ccagatttatagcagagcgagggtcaggttttatcaactc

SEQ ID NO: 2169 - DNA, 40 bp, Artificial Sequence
  Description of Artificial Sequence: Synthetic primer
cagggattacactgtatttctttgacttcagttgtctttg

SEQ ID NO: 2170 - DNA, 40 bp, Artificial Sequence
  Description of Artificial Sequence: Synthetic primer
cctttcacaggggtcttctccatcacaccccaacaaagtc

SEQ ID NO: 2171 - DNA, 40 bp, Artificial Sequence
  Description of Artificial Sequence: Synthetic primer
gccctgggcaccttgcagccctgcacctgcctgccacttc

SEQ ID NO: 2172 - DNA, 40 bp, Artificial Sequence
  Description of Artificial Sequence: Synthetic primer
agagacagccccaggagtcgctacctggccccagcccttc

SEQ ID NO: 2173 - DNA, 40 bp, Artificial Sequence
  Description of Artificial Sequence: Synthetic primer
tggggcagggtggagatgagggtgcggggtggcagctcac

SEQ ID NO: 2174 - DNA, 40 bp, Artificial Sequence
  Description of Artificial Sequence: Synthetic primer
tgtacatctgacctgaatagtctgtgattgatcttgtttc

SEQ ID NO: 2175 - DNA, 40 bp, Artificial Sequence
  Description of Artificial Sequence: Synthetic primer
agcagaagtctcaagataacgaaattcagaagaataaatc

SEQ ID NO: 2176 - DNA, 40 bp, Artificial Sequence
  Description of Artificial Sequence: Synthetic primer
gtgtctaggcagatctctgaggggacctgaaatctgatgc

SEQ ID NO: 2177 - DNA, 40 bp, Artificial Sequence
  Description of Artificial Sequence: Synthetic primer
ttctttccctccaacataagactgacgcattaaggacacc

SEQ ID NO: 2178 - DNA, 40 bp, Artificial Sequence
  Description of Artificial Sequence: Synthetic primer
tgccaccatgtgccccgtgccatcggtatgtctctgttcc

SEQ ID NO: 2179 - DNA, 40 bp, Artificial Sequence
  Description of Artificial Sequence: Synthetic primer
aaaaaaaaaccgagacagaagcagagaggtgggcacatgc

SEQ ID NO: 2180 - DNA, 40 bp, Artificial Sequence
  Description of Artificial Sequence: Synthetic primer
cttgaaacaaaattccaaatgaaccacattttatgtcaag

SEQ ID NO: 2181 - DNA, 40 bp, Artificial Sequence
  Description of Artificial Sequence: Synthetic primer
tagacctgcagttttcatgaattcactttgttctatctgc

SEQ ID NO: 2182 - DNA, 40 bp, Artificial Sequence
  Description of Artificial Sequence: Synthetic primer
cagggtccctgagagccagagtgagcaggaggtggcggta

SEQ ID NO: 2183 - DNA, 40 bp, Artificial Sequence
  Description of Artificial Sequence: Synthetic primer
gagcagtgggccctagtggtgctgacaggggtgggtgtgc

SEQ ID NO: 2184 - DNA, 40 bp, Artificial Sequence
  Description of Artificial Sequence: Synthetic primer
ctttttcccttttaaacctccccagcaagcctattgaaag

SEQ ID NO: 2185 - DNA, 40 bp, Artificial Sequence
  Description of Artificial Sequence: Synthetic primer
tctggaaactgctcactctgtattcctcatttccaaccag

SEQ ID NO: 2186 - DNA, 40 bp, Artificial Sequence
  Description of Artificial Sequence: Synthetic primer
tgccccggagaagagccttcccaagcgcggggttgcttgc

SEQ ID NO: 2187 - DNA, 40 bp, Artificial Sequence
  Description of Artificial Sequence: Synthetic primer
tctccctatcttcaggttaccattgcgccctcagggtctc

SEQ ID NO: 2188 - DNA, 40 bp, Artificial Sequence
  Description of Artificial Sequence: Synthetic primer
ccattgccacccctcactgtctgggtgtgctcactctgcc

SEQ ID NO: 2189 - DNA, 40 bp, Artificial Sequence
  Description of Artificial Sequence: Synthetic primer
cacagccccatgtccttccccaccccacaccgactccagg

SEQ ID NO: 2190 - DNA, 40 bp, Artificial Sequence
  Description of Artificial Sequence: Synthetic primer
ggcggtgacgccgtctcccttccttctttcctccctctcg

SEQ ID NO: 2191 - DNA, 40 bp, Artificial Sequence
  Description of Artificial Sequence: Synthetic primer
gggcggccggacagaggatggcgactcacacgctagctcg

SEQ ID NO: 2192 - DNA, 40 bp, Artificial Sequence
  Description of Artificial Sequence: Synthetic primer
gggcccaaattcaccaataatagaggaagaagtcccaacc

SEQ ID NO: 2193 - DNA, 40 bp, Artificial Sequence
  Description of Artificial Sequence: Synthetic primer
ttaaattttatttaaatcacttttcctttctacccaaaag

SEQ ID NO: 2194 - DNA, 40 bp, Artificial Sequence
  Description of Artificial Sequence: Synthetic primer
gtagaggtggtatttgaatgttctctattcaagttattgc

SEQ ID NO: 2195 - DNA, 40 bp, Artificial Sequence
  Description of Artificial Sequence: Synthetic primer
gataactggataatatactgattttacttggaggtgcagc

SEQ ID NO: 2196 - DNA, 40 bp, Artificial Sequence
  Description of Artificial Sequence: Synthetic primer
gatgcacacttggaccttgtactggggagtaacacacatc

SEQ ID NO: 2197 - DNA, 40 bp, Artificial Sequence
  Description of Artificial Sequence: Synthetic primer
ccaccgtgcaactcttcagccagattcaatgtattcttac

SEQ ID NO: 2198 - DNA, 40 bp, Artificial Sequence
  Description of Artificial Sequence: Synthetic primer
aggggcagggaggcctcggccccaggacgggtgtgtgctg

SEQ ID NO: 2199 - DNA, 40 bp, Artificial Sequence
  Description of Artificial Sequence: Synthetic primer
gccgcgaacgggtgcagtgcctgtggcggtgccgtgcagc

SEQ ID NO: 2200 - DNA, 40 bp, Artificial Sequence
  Description of Artificial Sequence: Synthetic primer
cttaaaattcatctaacacatctataataacattcttttc

SEQ ID NO: 2201 - DNA, 40 bp, Artificial Sequence
  Description of Artificial Sequence: Synthetic primer
atactggactgtcaaaatagaaaaataccaaaatgtgtgg

SEQ ID NO: 2202 - DNA, 40 bp, Artificial Sequence
  Description of Artificial Sequence: Synthetic primer
ctcagaattcagtcctaggagccctaacagccatgctttc

SEQ ID NO: 2203 - DNA, 40 bp, Artificial Sequence
  Description of Artificial Sequence: Synthetic primer
aggccacatcccaatttcagaacccaggcaatggaaaggg

SEQ ID NO: 2204 - DNA, 40 bp, Artificial Sequence
  Description of Artificial Sequence: Synthetic primer
aggtggcagccttacctcaggaggctcagcaggggtcctc

SEQ ID NO: 2205 - DNA, 40 bp, Artificial Sequence
  Description of Artificial Sequence: Synthetic primer
cccgtggccaccgcccactcaccggtggatgcagcacttg

SEQ ID NO: 2206 - DNA, 40 bp, Artificial Sequence
  Description of Artificial Sequence: Synthetic primer
tcactctctattttgtgtttttgcatgtgtgtgcctgtgg

SEQ ID NO: 2207 - DNA, 40 bp, Artificial Sequence
  Description of Artificial Sequence: Synthetic primer
ggccctgccatagatgggcaggaagcagaggctccaaagc

SEQ ID NO: 2208 - DNA, 40 bp, Artificial Sequence
  Description of Artificial Sequence: Synthetic primer
accattgctgcagatgagagcttctcccaggtggactttg

SEQ ID NO: 2209 - DNA, 40 bp, Artificial Sequence
  Description of Artificial Sequence: Synthetic primer
ccgagtaagaggcccaaagctcctgacttctgtgtttacc

SEQ ID NO: 2210 - DNA, 40 bp, Artificial Sequence
  Description of Artificial Sequence: Synthetic primer
aaaaacacgtgtttccatgttttggaagagttttaactgc

SEQ ID NO: 2211 - DNA, 40 bp, Artificial Sequence
  Description of Artificial Sequence: Synthetic primer
aataataaatgaatttttacatttgttgttaaatattggc

SEQ ID NO: 2212 - DNA, 40 bp, Artificial Sequence
  Description of Artificial Sequence: Synthetic primer
acgaggtcggggcagcatttgagagctgactcgcctgtcc

SEQ ID NO: 2213 - DNA, 40 bp, Artificial Sequence
  Description of Artificial Sequence: Synthetic primer
tcctcccaaccccattgaggctccccttcacctgtacgcg

SEQ ID NO: 2214 - DNA, 40 bp, Artificial Sequence
  Description of Artificial Sequence: Synthetic primer
atctacctgtgtcagttccctccttttctattttctcttc

SEQ ID NO: 2215 - DNA, 40 bp, Artificial Sequence
  Description of Artificial Sequence: Synthetic primer
tcctctccctgaccgtacaagaagctcaagcaatggaaac

SEQ ID NO: 2216 - DNA, 40 bp, Artificial Sequence
  Description of Artificial Sequence: Synthetic primer
ttgcctctgataagcagagaacagggtctcatggggaagg

SEQ ID NO: 2217 - DNA, 40 bp, Artificial Sequence
  Description of Artificial Sequence: Synthetic primer
caaccccacatgaggactcaggctgtttcccccatttcag

SEQ ID NO: 2218 - DNA, 40 bp, Artificial Sequence
  Description of Artificial Sequence: Synthetic primer
cttggaaagttaaaacatcccacagtgaggaacccaagac

SEQ ID NO: 2219 - DNA, 40 bp, Artificial Sequence
  Description of Artificial Sequence: Synthetic primer
agacttattttattctaattacaggatgaacccaccacag

SEQ ID NO: 2220 - DNA, 40 bp, Artificial Sequence
  Description of Artificial Sequence: Synthetic primer
tggattctttgctgtgtactagtgggtttttactgatttg

SEQ ID NO: 2221 - DNA, 40 bp, Artificial Sequence
  Description of Artificial Sequence: Synthetic primer
gagccactgtgcctggcccacacatatttcttaacaggtt

SEQ ID NO: 2222 - DNA, 40 bp, Artificial Sequence
  Description of Artificial Sequence: Synthetic primer
tgcctggggaccactggcccacaacgacagtactgtgctc

SEQ ID NO: 2223 - DNA, 40 bp, Artificial Sequence
  Description of Artificial Sequence: Synthetic primer
tgggtccacccaggtcttttcttccattttgccttgaccc

SEQ ID NO: 2224 - DNA, 40 bp, Artificial Sequence
  Description of Artificial Sequence: Synthetic primer
cgaatgcagagtgctcctgacattgcctgtcactttttcc

SEQ ID NO: 2225 - DNA, 40 bp, Artificial Sequence
  Description of Artificial Sequence: Synthetic primer
ctaccctagaaactgagttctaagttttcaattgaagaac

SEQ ID NO: 2226 - DNA, 40 bp, Artificial Sequence
  Description of Artificial Sequence: Synthetic primer
ttaaaatcacatttaacagaattattaatacaagttttcc

SEQ ID NO: 2227 - DNA, 40 bp, Artificial Sequence
  Description of Artificial Sequence: Synthetic primer
ctcatgcaaactccaaaacaatattctcaaacattaaaaa

SEQ ID NO: 2228 - DNA, 40 bp, Artificial Sequence
  Description of Artificial Sequence: Synthetic primer
gatgtgggctgctgtttgactaggaggcccctgctcactg

SEQ ID NO: 2229 - DNA, 40 bp, Artificial Sequence
  Description of Artificial Sequence: Synthetic primer
acctgtgggtgtacatgtgaaggaaggacacaggacaacc

SEQ ID NO: 2230 - DNA, 40 bp, Artificial Sequence
  Description of Artificial Sequence: Synthetic primer
gccgcctttcccaggggtgggatgggagggtcggatgctg

SEQ ID NO: 2231 - DNA, 40 bp, Artificial Sequence
  Description of Artificial Sequence: Synthetic primer
ccagcctggccgccacgtcccttccccaacagcttgctcc

SEQ ID NO: 2232 - DNA, 40 bp, Artificial Sequence
  Description of Artificial Sequence: Synthetic primer
tcagaagtgggaagagaagctcaggtgagcaaggggaacc

SEQ ID NO: 2233 - DNA, 40 bp, Artificial Sequence
  Description of Artificial Sequence: Synthetic primer
aagtataaggaagtatggctcccaaagattatagatacaa

SEQ ID NO: 2234 - DNA, 40 bp, Artificial Sequence
  Description of Artificial Sequence: Synthetic primer
aacagtttccatagatactgctattctgaaagtctttttc

SEQ ID NO: 2235 - DNA, 40 bp, Artificial Sequence
  Description of Artificial Sequence: Synthetic primer
tgcctattttccctgttctaaagaagagacaccatcctgc

SEQ ID NO: 2236 - DNA, 40 bp, Artificial Sequence
  Description of Artificial Sequence: Synthetic primer
tgctcttctgcagtctttattagcattgtttaaacgtacc

SEQ ID NO: 2237 - DNA, 40 bp, Artificial Sequence
  Description of Artificial Sequence: Synthetic primer
atcaagttattaaagtttcaaataagttgtactgccaagt

SEQ ID NO: 2238 - DNA, 40 bp, Artificial Sequence
  Description of Artificial Sequence: Synthetic primer
ggccagggccagcatggagcacctgggtccgcaccacctc

SEQ ID NO: 2239 - DNA, 40 bp, Artificial Sequence
  Description of Artificial Sequence: Synthetic primer
cgggccgcggccaggcggggagcgcgcgggccggactcac

SEQ ID NO: 2240 - DNA, 40 bp, Artificial Sequence
  Description of Artificial Sequence: Synthetic primer
cggcgcctgcagcatgggtcctctgaccggctcctacaac

SEQ ID NO: 2241 - DNA, 40 bp, Artificial Sequence
  Description of Artificial Sequence: Synthetic primer
gccaaggccatgttcacgttgtaggagccggtcagaggac

SEQ ID NO: 2242 - DNA, 40 bp, Artificial Sequence
  Description of Artificial Sequence: Synthetic primer
tgaccagccagcagtagcccagcaaaccgcccagaagcag

SEQ ID NO: 2243 - DNA, 40 bp, Artificial Sequence
  Description of Artificial Sequence: Synthetic primer
tgcactcatgacctgggcccacatggcctgactctccttg

SEQ ID NO: 2244 - DNA, 40 bp, Artificial Sequence
  Description of Artificial Sequence: Synthetic primer
ggcctcctggggcaggttgggcattggttgcggccatctc

SEQ ID NO: 2245 - DNA, 40 bp, Artificial Sequence
  Description of Artificial Sequence: Synthetic primer
tggcggtggcagcgggccccaccccggctggcctgaaccc

SEQ ID NO: 2246 - DNA, 40 bp, Artificial Sequence
  Description of Artificial Sequence: Synthetic primer
gctgttagcgccacaggcactgacagatcggacggacacg

SEQ ID NO: 2247 - DNA, 40 bp, Artificial Sequence
  Description of Artificial Sequence: Synthetic primer
tgtacgctgtgctgtcgccaccaatacagccccttctttc

SEQ ID NO: 2248 - DNA, 40 bp, Artificial Sequence
  Description of Artificial Sequence: Synthetic primer
gtggtctctaagagccattcctcaaaacggaaaaattaac

SEQ ID NO: 2249 - DNA, 40 bp, Artificial Sequence
  Description of Artificial Sequence: Synthetic primer
ggcagcaccaggaacactgccatttctcacccttttctcc

SEQ ID NO: 2250 - DNA, 40 bp, Artificial Sequence
  Description of Artificial Sequence: Synthetic primer
ggccccacacagccccatccttccctctggcccgatccac

SEQ ID NO: 2251 - DNA, 40 bp, Artificial Sequence
  Description of Artificial Sequence: Synthetic primer
tcccctctgaccaggactgaggggctttttctctctgtgc

SEQ ID NO: 2252 - DNA, 40 bp, Artificial Sequence
  Description of Artificial Sequence: Synthetic primer
agacggcgtcttcagtgaacacctccccaaagatgcccgg

SEQ ID NO: 2253 - DNA, 40 bp, Artificial Sequence
  Description of Artificial Sequence: Synthetic primer
ccaggattgtccctttcactgtcttcttagcttttctttc

SEQ ID NO: 2254 - DNA, 40 bp, Artificial Sequence
  Description of Artificial Sequence: Synthetic primer
cagacacagcccagtgaagaggggaagaggcccggtgctg

SEQ ID NO: 2255 - DNA, 40 bp, Artificial Sequence
  Description of Artificial Sequence: Synthetic primer
tagcagtttctggtggtggccagattgatagggagcattg

SEQ ID NO: 2256 - DNA, 40 bp, Artificial Sequence
  Description of Artificial Sequence: Synthetic primer
gagatataaatgagtgcttctcttttgatttaacaagtgc

SEQ ID NO: 2257 - DNA, 40 bp, Artificial Sequence
  Description of Artificial Sequence: Synthetic primer
tttttaaaattcacataaaattttaatatctgtatttttg

SEQ ID NO: 2258 - DNA, 40 bp, Artificial Sequence
  Description of Artificial Sequence: Synthetic primer
ctgcaaggccctgcctgccagtaaggacactcttcccttc

SEQ ID NO: 2259 - DNA, 40 bp, Artificial Sequence
  Description of Artificial Sequence: Synthetic primer
ggcgcacagcacctgctgctctccaacgaggctggggtac

SEQ ID NO: 2260 - DNA, 40 bp, Artificial Sequence
  Description of Artificial Sequence: Synthetic primer
agaactttttatcctttgctggaattaatatggtgttctc

SEQ ID NO: 2261 - DNA, 40 bp, Artificial Sequence
  Description of Artificial Sequence: Synthetic primer
caccgctactacagaagcagccaggggctgaaacacactg

SEQ ID NO: 2262 - DNA, 40 bp, Artificial Sequence
  Description of Artificial Sequence: Synthetic primer
atccagcaaagtctagtcccctcaacttttcttcctgctt

SEQ ID NO: 2263 - DNA, 40 bp, Artificial Sequence
  Description of Artificial Sequence: Synthetic primer
tacaggcgtgagccactgcacccaattatacactttcatg

SEQ ID NO: 2264 - DNA, 40 bp, Artificial Sequence
  Description of Artificial Sequence: Synthetic primer
gcgacctaggtctctaactgcccctcccctcttctctctc

SEQ ID NO: 2265 - DNA, 40 bp, Artificial Sequence
  Description of Artificial Sequence: Synthetic primer
gacctcatcaagctgtccttcccaatgaccccttcaactc

SEQ ID NO: 2266 - DNA, 40 bp, Artificial Sequence
  Description of Artificial Sequence: Synthetic primer
ccgcaccctcatctccaccctgccccaccgccccggcccc

SEQ ID NO: 2267 - DNA, 40 bp, Artificial Sequence
  Description of Artificial Sequence: Synthetic primer
gttggcagcgccgcttgctgaccctggtgcctgcccatag

SEQ ID NO: 2268 - DNA, 40 bp, Artificial Sequence
  Description of Artificial Sequence: Synthetic primer
cccacctgtctccgcccctcggcccctcgcccggctttgc

SEQ ID NO: 2269 - DNA, 40 bp, Artificial Sequence
  Description of Artificial Sequence: Synthetic primer
ccctactcatctactggagcgtcccgcccggtgtctcctc

SEQ ID NO: 2270 - DNA, 40 bp, Artificial Sequence
  Description of Artificial Sequence: Synthetic primer
gtcatgtgatttcacatagcttttcttatctgaaacttgc

SEQ ID NO: 2271 - DNA, 40 bp, Artificial Sequence
  Description of Artificial Sequence: Synthetic primer
actttaaaaagtttctcactcacccacctgtttcctaaac

SEQ ID NO: 2272 - DNA, 40 bp, Artificial Sequence
  Description of Artificial Sequence: Synthetic primer
gtatggaaataagcctcaaaaatgacaatgtgcagaatag

SEQ ID NO: 2273 - DNA, 40 bp, Artificial Sequence
  Description of Artificial Sequence: Synthetic primer
taagctcccaagtccagagctcagtcccaagggttgtttc

SEQ ID NO: 2274 - DNA, 40 bp, Artificial Sequence
  Description of Artificial Sequence: Synthetic primer
taccctttcttacctattcagttatttgtaatttattgtc

SEQ ID NO: 2275 - DNA, 40 bp, Artificial Sequence
  Description of Artificial Sequence: Synthetic primer
ttaaaaagaatgaagggcttagctatggaatgatatactc

SEQ ID NO: 2276 - DNA, 40 bp, Artificial Sequence
  Description of Artificial Sequence: Synthetic primer
ttctgttggattttaaagttgggtaacttttctctctctg

SEQ ID NO: 2277 - DNA, 40 bp, Artificial Sequence
  Description of Artificial Sequence: Synthetic primer
tgccaaaatataaacacaaaaaaagaatcagaataattac

SEQ ID NO: 2278 - DNA, 40 bp, Artificial Sequence
  Description of Artificial Sequence: Synthetic primer
gttgtttggactccttgcaagtatggcatgcagcaatctc

SEQ ID NO: 2279 - DNA, 40 bp, Artificial Sequence
  Description of Artificial Sequence: Synthetic primer
catacagagtgaaatatcactttgctatttcttttcttgc

SEQ ID NO: 2280 - DNA, 40 bp, Artificial Sequence
  Description of Artificial Sequence: Synthetic primer
cacaaatgtatagtgaaaaaattaagtgcatttatataag

SEQ ID NO: 2281 - DNA, 40 bp, Artificial Sequence
  Description of Artificial Sequence: Synthetic primer
tcgcctcttgtgaataaattaatgaaacccatttctactc

SEQ ID NO: 2282 - DNA, 40 bp, Artificial Sequence
  Description of Artificial Sequence: Synthetic primer
gcaaagatacctaataatgtgcacaactccataagaaagg

SEQ ID NO: 2283 - DNA, 40 bp, Artificial Sequence
  Description of Artificial Sequence: Synthetic primer
catttacacttaaaattctacaaatatgagagccaaaatt

SEQ ID NO: 2284 - DNA, 40 bp, Artificial Sequence
  Description of Artificial Sequence: Synthetic primer
gaatgcttgtttctgtcagcctcagaaacctccttctatc

SEQ ID NO: 2285 - DNA, 40 bp, Artificial Sequence
  Description of Artificial Sequence: Synthetic primer
gatgaggaggtgggagctcctgatgtctgaagatcctgtc

SEQ ID NO: 2286 - DNA, 40 bp, Artificial Sequence
  Description of Artificial Sequence: Synthetic primer
ttctgtttatgaaggagttatgtgtgtgtaaaacccaaag

SEQ ID NO: 2287 - DNA, 40 bp, Artificial Sequence
  Description of Artificial Sequence: Synthetic primer
actacactagtgatggctttaccaaatctgggaaaaaatg

SEQ ID NO: 2288 - DNA, 40 bp, Artificial Sequence
  Description of Artificial Sequence: Synthetic primer
ctgtggatcatcagtgagtagacatgggtttaactgtctc

SEQ ID NO: 2289 - DNA, 40 bp, Artificial Sequence
  Description of Artificial Sequence: Synthetic primer
tggtgtttcagaacagcccaaataagcagcaatgtcaggc

SEQ ID NO: 2290 - DNA, 40 bp, Artificial Sequence
  Description of Artificial Sequence: Synthetic primer
agaggcattagtcacttggcttgagtgtacccagatcctc

SEQ ID NO: 2291 - DNA, 40 bp, Artificial Sequence
  Description of Artificial Sequence: Synthetic primer
cttgccttgtatatgttatcatttcccttgtgttttgttc

SEQ ID NO: 2292 - DNA, 40 bp, Artificial Sequence
  Description of Artificial Sequence: Synthetic primer
cacagcgtgataagaccttgaccctcccatcaacagtcac

SEQ ID NO: 2293 - DNA, 40 bp, Artificial Sequence
  Description of Artificial Sequence: Synthetic primer
ccccaatttcctccacaaggctatggctatgagaaacctc

SEQ ID NO: 2294 - DNA, 40 bp, Artificial Sequence
  Description of Artificial Sequence: Synthetic primer
ttgacttttaaaagaggctgctctaaatgactcaccctca

SEQ ID NO: 2295 - DNA, 40 bp, Artificial Sequence
  Description of Artificial Sequence: Synthetic primer
gcatgaactaaaaaccaaatatgcaaattgttcacttatt

SEQ ID NO: 2296 - DNA, 40 bp, Artificial Sequence
  Description of Artificial Sequence: Synthetic primer
tttcatattactttgaattttattaaaacagaaattgaac

SEQ ID NO: 2297 - DNA, 40 bp, Artificial Sequence
  Description of Artificial Sequence: Synthetic primer
aattattacatttagtaatctagctggagatcatttctta

SEQ ID NO: 2298 - DNA, 40 bp, Artificial Sequence
  Description of Artificial Sequence: Synthetic primer
ttttactcttgattctcaaacatggaaaaacagatagatg

SEQ ID NO: 2299 - DNA, 40 bp, Artificial Sequence
  Description of Artificial Sequence: Synthetic primer
aaactttctttggaggaagaccgttcgatatctactttac

SEQ ID NO: 2300 - DNA, 40 bp, Artificial Sequence
  Description of Artificial Sequence: Synthetic primer
tgaaagccttatatctttctcatgggaggatgttctttcc

SEQ ID NO: 2301 - DNA, 40 bp, Artificial Sequence
  Description of Artificial Sequence: Synthetic primer
tatgctcaattttttaaagtaactatctgactatacaatc

SEQ ID NO: 2302 - DNA, 40 bp, Artificial Sequence
  Description of Artificial Sequence: Synthetic primer
ttttcatagtctgcttataattagccgctataactaatag

SEQ ID NO: 2303 - DNA, 40 bp, Artificial Sequence
  Description of Artificial Sequence: Synthetic primer
taactctcatgttatatctagtgttttaatcagagaaaga

SEQ ID NO: 2304 - DNA, 40 bp, Artificial Sequence
  Description of Artificial Sequence: Synthetic primer
tgagggtgtggcgccgcgggtggactgggaaggcactcac

SEQ ID NO: 2305 - DNA, 40 bp, Artificial Sequence
  Description of Artificial Sequence: Synthetic primer
gaacattgcaaaacagtatctgaataagtaaaagctggtg

SEQ ID NO: 2306 - DNA, 40 bp, Artificial Sequence
  Description of Artificial Sequence: Synthetic primer
atacccaagtagctctaaacccctcacactctgaactaac

SEQ ID NO: 2307 - DNA, 40 bp, Artificial Sequence
  Description of Artificial Sequence: Synthetic primer
ctgggctctgggcttacctgaaacaatcatgaggaagtag

SEQ ID NO: 2308 - DNA, 40 bp, Artificial Sequence
  Description of Artificial Sequence: Synthetic primer
atcctacccctctaccaggccgcgatggtgcaaacacagc

SEQ ID NO: 2309 - DNA, 40 bp, Artificial Sequence
  Description of Artificial Sequence: Synthetic primer
ctgaagaaaataacctagactatgtaataaaaggcaacac

SEQ ID NO: 2310 - DNA, 40 bp, Artificial Sequence
  Description of Artificial Sequence: Synthetic primer
agcttatttttgacggtcatcttgctttcttcttatttag

SEQ ID NO: 2311 - DNA, 40 bp, Artificial Sequence
  Description of Artificial Sequence: Synthetic primer
gacgcccttgaaaatgaaactcccaccttacccttcattc

SEQ ID NO: 2312 - DNA, 40 bp, Artificial Sequence
  Description of Artificial Sequence: Synthetic primer
gggttttctgtgattgttgctgactctctgtttctggttc

SEQ ID NO: 2313 - DNA, 40 bp, Artificial Sequence
  Description of Artificial Sequence: Synthetic primer
tgtcaccccatctgctgcccagccccgctgcccttctcac

SEQ ID NO: 2314 - DNA, 40 bp, Artificial Sequence
  Description of Artificial Sequence: Synthetic primer
tgaaggagggtgttccctctgagccaccttgtctgtcatg

SEQ ID NO: 2315 - DNA, 40 bp, Artificial Sequence
  Description of Artificial Sequence: Synthetic primer
gagagggcagcggggcgggtgtacctgctcagccgacata

SEQ ID NO: 2316 - DNA, 40 bp, Artificial Sequence
  Description of Artificial Sequence: Synthetic primer
gataaccttgagccagtggtgtctgcctggctgtaatgac

SEQ ID NO: 2317 - DNA, 40 bp, Artificial Sequence
  Description of Artificial Sequence: Synthetic primer
ctcagttatttctactgcactgatggacacctttcccttc

SEQ ID NO: 2318 - DNA, 40 bp, Artificial Sequence
  Description of Artificial Sequence: Synthetic primer
ttaaaaataaaaaggttggaagaggaagagaacaaaagtc

SEQ ID NO: 2319 - DNA, 40 bp, Artificial Sequence
  Description of Artificial Sequence: Synthetic primer
tcaaaccttcctcttattccagcaaggccagtaaccacac

SEQ ID NO: 2320 - DNA, 40 bp, Artificial Sequence
  Description of Artificial Sequence: Synthetic primer
ctgaggaggttactcatcaacctttggactgaatctcatg

SEQ ID NO: 2321 - DNA, 40 bp, Artificial Sequence
  Description of Artificial Sequence: Synthetic primer
ctagtgactatacttgaatcattctcaaacttacttctac

SEQ ID NO: 2322 - DNA, 40 bp, Artificial Sequence
  Description of Artificial Sequence: Synthetic primer
ttttgttattttcgttgttatttacatgttgttgtcttac

SEQ ID NO: 2323 - DNA, 40 bp, Artificial Sequence
  Description of Artificial Sequence: Synthetic primer
ggaggccagagtctgtacccagaccgtgcgggcttttctg

SEQ ID NO: 2324 - DNA, 40 bp, Artificial Sequence
  Description of Artificial Sequence: Synthetic primer
ccctcctccaaataagcccacgcaggccgtacagactcac

SEQ ID NO: 2325 - DNA, 40 bp, Artificial Sequence
  Description of Artificial Sequence: Synthetic primer
atgaactgtaatgattccaatttctacacaacaagatttc

SEQ ID NO: 2326 - DNA, 40 bp, Artificial Sequence
  Description of Artificial Sequence: Synthetic primer
tgaaataaaattcctgtggactttttcttaaaaatttaac

SEQ ID NO: 2327 - DNA, 40 bp, Artificial Sequence
  Description of Artificial Sequence: Synthetic primer
atatctgtttattattcagtattcctgtgtacattttctg

SEQ ID NO: 2328 - DNA, 40 bp, Artificial Sequence
  Description of Artificial Sequence: Synthetic primer
aggttttttaccagtaatgatgtggaacatctgtttatct

SEQ ID NO: 2329 - DNA, 40 bp, Artificial Sequence
  Description of Artificial Sequence: Synthetic primer
atttgtagagatgaggactacagcccatatcaagctatac

SEQ ID NO: 2330 - DNA, 40 bp, Artificial Sequence
  Description of Artificial Sequence: Synthetic primer
tcagcaagatttcttcttgcaaagataacatcataccata

SEQ ID NO: 2331 - DNA, 40 bp, Artificial Sequence
  Description of Artificial Sequence: Synthetic primer
tgaacatttgttatttgatgtgaactttgtgcctgttttg

SEQ ID NO: 2332 - DNA, 40 bp, Artificial Sequence
  Description of Artificial Sequence: Synthetic primer
gtccaaattcaaataaaatcaggaaattcaaatcacttac

SEQ ID NO: 2333 - DNA, 40 bp, Artificial Sequence
  Description of Artificial Sequence: Synthetic primer
gtcattttgcatgaaggcagcaattaaaaagggtttatgg

SEQ ID NO: 2334 - DNA, 40 bp, Artificial Sequence
  Description of Artificial Sequence: Synthetic primer
agccttctcttgtttgtgccccatctgccattttcctgtg

SEQ ID NO: 2335 - DNA, 40 bp, Artificial Sequence
  Description of Artificial Sequence: Synthetic primer
ccctctgcatcttaccggcccctctgcagactctgaaacc

SEQ ID NO: 2336 - DNA, 40 bp, Artificial Sequence
  Description of Artificial Sequence: Synthetic primer
tggaagggtggtcttgggtatctggcctgctcacacctcc

SEQ ID NO: 2337 - DNA, 40 bp, Artificial Sequence
  Description of Artificial Sequence: Synthetic primer
aaacgtgcacttttaaatgtttagatgaaagtaatgtttc

SEQ ID NO: 2338 - DNA, 40 bp, Artificial Sequence
  Description of Artificial Sequence: Synthetic primer
tactcttactaaatggaaatcaaataaaataattgttcat

SEQ ID NO: 2339 - DNA, 40 bp, Artificial Sequence
  Description of Artificial Sequence: Synthetic primer
gtaaaaatttttctccccagtctaatgtatttgtttgtat

SEQ ID NO: 2340 - DNA, 40 bp, Artificial Sequence
  Description of Artificial Sequence: Synthetic primer
agaaaaggagtgacaaaacagtgttgcgtggtgagaaacc

SEQ ID NO: 2341 - DNA, 40 bp, Artificial Sequence
  Description of Artificial Sequence: Synthetic primer
gagtgaaagcaccacctgaattacaaaacacaagtataag

SEQ ID NO: 2342 - DNA, 40 bp, Artificial Sequence
  Description of Artificial Sequence: Synthetic primer
caaggtacttcagttgtattttcctcaagaaactccttag

SEQ ID NO: 2343 - DNA, 40 bp, Artificial Sequence
  Description of Artificial Sequence: Synthetic primer
gaggcggggcagggctggaggtaaccagcagtgacagtcc

SEQ ID NO: 2344 - DNA, 40 bp, Artificial Sequence
  Description of Artificial Sequence: Synthetic primer
gcaatggggctgtcagtgtccccatcccctccccaggtac

SEQ ID NO: 2345 - DNA, 40 bp, Artificial Sequence
  Description of Artificial Sequence: Synthetic primer
aggtgattattgtgccaatatccgtaataaccctgtatcc

SEQ ID NO: 2346 - DNA, 40 bp, Artificial Sequence
  Description of Artificial Sequence: Synthetic primer
actagataactacctgtaatttttctttcatttcttacag

SEQ ID NO: 2347 - DNA, 40 bp, Artificial Sequence
  Description of Artificial Sequence: Synthetic primer
tccaggttttattggcttgcactaaaggtagttggaaatg

SEQ ID NO: 2348 - DNA, 40 bp, Artificial Sequence
  Description of Artificial Sequence: Synthetic primer
aaaaactatgcacaataagtgaaacatcctattaactctg

SEQ ID NO: 2349 - DNA, 40 bp, Artificial Sequence
  Description of Artificial Sequence: Synthetic primer
tcggagggaaagcccgcggttaggtaggaagtattgaaag

SEQ ID NO: 2350 - DNA, 40 bp, Artificial Sequence
  Description of Artificial Sequence: Synthetic primer
aaggttgcttagtttctcatttccatttctgtttaatttc

SEQ ID NO: 2351 - DNA, 40 bp, Artificial Sequence
  Description of Artificial Sequence: Synthetic primer
tcgccagccccacttgcttttgtgcttgcggattcagtgc

SEQ ID NO: 2352 - DNA, 40 bp, Artificial Sequence
  Description of Artificial Sequence: Synthetic primer
ctgcctaaacaggcagccagcacctctgggcccacccccg

SEQ ID NO: 2353 - DNA, 40 bp, Artificial Sequence
  Description of Artificial Sequence: Synthetic primer
cattaggttattgatgatgctagtaacaatgaactttatg

SEQ ID NO: 2354 - DNA, 40 bp, Artificial Sequence
  Description of Artificial Sequence: Synthetic primer
gtaatctctcaccattaccattccaaatattcttccattt

SEQ ID NO: 2355 - DNA, 40 bp, Artificial Sequence
  Description of Artificial Sequence: Synthetic primer
aacagtagatgcttagtttatgcttttctaactctctttg

SEQ ID NO: 2356 - DNA, 40 bp, Artificial Sequence
  Description of Artificial Sequence: Synthetic primer
tgggaaacagattcctccttgtcacttaatttggattgtg

SEQ ID NO: 2357 - DNA, 40 bp, Artificial Sequence
  Description of Artificial Sequence: Synthetic primer
atgtgtgtgttctgcccgggcctccctgccctccctgcac

SEQ ID NO: 2358 - DNA, 40 bp, Artificial Sequence
  Description of Artificial Sequence: Synthetic primer
ctatcagggctaaacctggcaggttcccctctcccccaac

SEQ ID NO: 2359 - DNA, 40 bp, Artificial Sequence
  Description of Artificial Sequence: Synthetic primer
ataatgaaaaataaacacacattaactctctttcttcaac

SEQ ID NO: 2360 - DNA, 40 bp, Artificial Sequence
  Description of Artificial Sequence: Synthetic primer
catatttcaactatcaaggaaaaatttaatcttctgtggc

SEQ ID NO: 2361 - DNA, 40 bp, Artificial Sequence
  Description of Artificial Sequence: Synthetic primer
acatggacatagtccatcctcaagaaagaatgatggaaag

SEQ ID NO: 2362 - DNA, 40 bp, Artificial Sequence
  Description of Artificial Sequence: Synthetic primer
ctttcttctttcattgaaggctggttatttacagaacttc

SEQ ID NO: 2363 - DNA, 40 bp, Artificial Sequence
  Description of Artificial Sequence: Synthetic primer
cagaggggctggcatccctttggcccctggcgcccccctc

SEQ ID NO: 2364 - DNA, 40 bp, Artificial Sequence
  Description of Artificial Sequence: Synthetic primer
gggtaggggtaggggttggggtggcagggccctggtaacc

SEQ ID NO: 2365 - DNA, 40 bp, Artificial Sequence
  Description of Artificial Sequence: Synthetic primer
ggcagggactcactgtctcttcccttccacatgtttctgg

SEQ ID NO: 2366 - DNA, 40 bp, Artificial Sequence
  Description of Artificial Sequence: Synthetic primer
gatgggccctcctggggaagaagctgggtgggcctgaagg

SEQ ID NO: 2367 - DNA, 40 bp, Artificial Sequence
  Description of Artificial Sequence: Synthetic primer
tggtgcttattaaagtaacataagttttttctgtgttttc

SEQ ID NO: 2368 - DNA, 40 bp, Artificial Sequence
  Description of Artificial Sequence: Synthetic primer
tgaaaatgaacagaaattcaaatatcatataaacacctac

SEQ ID NO: 2369 - DNA, 40 bp, Artificial Sequence
  Description of Artificial Sequence: Synthetic primer
ggggtaaggttctaccctgatgccacttctggacctccta

SEQ ID NO: 2370 - DNA, 40 bp, Artificial Sequence
  Description of Artificial Sequence: Synthetic primer
agggagagacagggttgaagcaggttgggcatggctttgg

SEQ ID NO: 2371 - DNA, 40 bp, Artificial Sequence
  Description of Artificial Sequence: Synthetic primer
ccctaagggagggaaggaagacctgggttcccctgctgtg

SEQ ID NO: 2372 - DNA, 40 bp, Artificial Sequence
  Description of Artificial Sequence: Synthetic primer
tttcccgtggctacaaagtgtgtcttttgttgctctctcc

SEQ ID NO: 2373 - DNA, 40 bp, Artificial Sequence
  Description of Artificial Sequence: Synthetic primer
gcaataatctgctgatgtgttgaaggccacagccccttcc

SEQ ID NO: 2374 - DNA, 40 bp, Artificial Sequence
  Description of Artificial Sequence: Synthetic primer
tctgattggaacagcttctgctgtcgctttcctcacattc

SEQ ID NO: 2375 - DNA, 40 bp, Artificial Sequence
  Description of Artificial Sequence: Synthetic primer
tttgcaagatgcctctgaaaagagcggccctccgcatttg

SEQ ID NO: 2376 - DNA, 40 bp, Artificial Sequence
  Description of Artificial Sequence: Synthetic primer
ccctcctacccatgggagcaccaggtcggccattctcagg

SEQ ID NO: 2377 - DNA, 40 bp, Artificial Sequence
  Description of Artificial Sequence: Synthetic primer
cccaagccaggccacatccaagttcaggtcctccctcagc

SEQ ID NO: 2378 - DNA, 40 bp, Artificial Sequence
  Description of Artificial Sequence: Synthetic primer
ggggtggcccaccccgacaccgtcctgtcttccctctcgg

SEQ ID NO: 2379 - DNA, 40 bp, Artificial Sequence
  Description of Artificial Sequence: Synthetic primer
caggctgcagaccttgttgcccgcgtcctcctggcactcg

SEQ ID NO: 2380 - DNA, 40 bp, Artificial Sequence
  Description of Artificial Sequence: Synthetic primer
gtgccccgccaaattcaacgggctcttgtgccacatcctg

SEQ ID NO: 2381 - DNA, 40 bp, Artificial Sequence
  Description of Artificial Sequence: Synthetic primer
tggaagaaaaaccatttttttctggaaataccaccctttg

SEQ ID NO: 2382 - DNA, 40 bp, Artificial Sequence
  Description of Artificial Sequence: Synthetic primer
atgttattggagatgctaacatttgttatcttgtgtgtag

SEQ ID NO: 2383 - DNA, 40 bp, Artificial Sequence
  Description of Artificial Sequence: Synthetic primer
gaaatgtggaccccatttctcctggcgctgttgccttatg

SEQ ID NO: 2384 - DNA, 40 bp, Artificial Sequence
  Description of Artificial Sequence: Synthetic primer
agcaaataatttcggcagaatgcagtcaaggtgcacaacc

SEQ ID NO: 2385 - DNA, 40 bp, Artificial Sequence
  Description of Artificial Sequence: Synthetic primer
atgcaggacgggcccatgtctctgcacaaccaggctacac

SEQ ID NO: 2386 - DNA, 40 bp, Artificial Sequence
  Description of Artificial Sequence: Synthetic primer
agagtgctagcacctcaaggggagagaaaactgtaggtgc

SEQ ID NO: 2387 - DNA, 40 bp, Artificial Sequence
  Description of Artificial Sequence: Synthetic primer
aatgagaaagagaatccagacagcagaatgtcgaaaggag

SEQ ID NO: 2388 - DNA, 40 bp, Artificial Sequence
  Description of Artificial Sequence: Synthetic primer
ggtgtcagacttttaatggctctggctgtctctcatatcc

SEQ ID NO: 2389 - DNA, 40 bp, Artificial Sequence
  Description of Artificial Sequence: Synthetic primer
cccttcctgctgccaccttcccgccagccacagggatctg

SEQ ID NO: 2390 - DNA, 40 bp, Artificial Sequence
  Description of Artificial Sequence: Synthetic primer
ccacccagtccccggcataacatgcccctggccccttccc

SEQ ID NO: 2391 - DNA, 40 bp, Artificial Sequence
  Description of Artificial Sequence: Synthetic primer
ccatctcccctcccggccccagccctagcctctcccactc

SEQ ID NO: 2392 - DNA, 40 bp, Artificial Sequence
  Description of Artificial Sequence: Synthetic primer
ctggtccctgcccagtcctgctgagatccctcccactgtc

SEQ ID NO: 2393 - DNA, 40 bp, Artificial Sequence
  Description of Artificial Sequence: Synthetic primer
actgtcggactgaccttccatacttttattgtttttattc

SEQ ID NO: 2394 - DNA, 40 bp, Artificial Sequence
  Description of Artificial Sequence: Synthetic primer
tttcttagcatataatgcctaagaatgaaacagaactgag

SEQ ID NO: 2395 - DNA, 40 bp, Artificial Sequence
  Description of Artificial Sequence: Synthetic primer
agttgcaaagcccaccacagaatgacacacaggtcgtctg

SEQ ID NO: 2396 - DNA, 40 bp, Artificial Sequence
  Description of Artificial Sequence: Synthetic primer
ttttctctcgctttcttctttctcatcacccctggatggg

SEQ ID NO: 2397 - DNA, 40 bp, Artificial Sequence
  Description of Artificial Sequence: Synthetic primer
agtagtgatttctaaaattagaatgtatataaaatacaac

SEQ ID NO: 2398 - DNA, 40 bp, Artificial Sequence
  Description of Artificial Sequence: Synthetic primer
ttattatacaccctgtacaagactatatgaaggaacttgg

SEQ ID NO: 2399 - DNA, 40 bp, Artificial Sequence
  Description of Artificial Sequence: Synthetic primer
tgattaaataccttatccattgaatttattttaatctttc

SEQ ID NO: 2400 - DNA, 40 bp, Artificial Sequence
  Description of Artificial Sequence: Synthetic primer
gttagtctttaaaagtttagaactcttattttttaatctg

SEQ ID NO: 2401 - DNA, 40 bp, Artificial Sequence
  Description of Artificial Sequence: Synthetic primer
aagagcagagctctcctttcccagtcacctgaaacaatgg

SEQ ID NO: 2402 - DNA, 40 bp, Artificial Sequence
  Description of Artificial Sequence: Synthetic primer
tcctaaaccagaagcatctagtagagttataggtgtttcc

SEQ ID NO: 2403 - DNA, 40 bp, Artificial Sequence
  Description of Artificial Sequence: Synthetic primer
ttcagcaaacactctcccctgaaaaccttcccgtgaactg

SEQ ID NO: 2404 - DNA, 40 bp, Artificial Sequence
  Description of Artificial Sequence: Synthetic primer
gtccccacatccaccaagcagggtttccaggcctgaggtg

SEQ ID NO: 2405 - DNA, 40 bp, Artificial Sequence
  Description of Artificial Sequence: Synthetic primer
tcctgaggcccacgggagggtctgggtaatgacgaaatgc

SEQ ID NO: 2406 - DNA, 40 bp, Artificial Sequence
  Description of Artificial Sequence: Synthetic primer
aaatttgttcaaggagatcccaagggcccatgaaagagcc

SEQ ID NO: 2407 - DNA, 40 bp, Artificial Sequence
  Description of Artificial Sequence: Synthetic primer
ggtaactcattttgccatttcttcatttttaggacaactg

SEQ ID NO: 2408 - DNA, 40 bp, Artificial Sequence
  Description of Artificial Sequence: Synthetic primer
tctgtgtctctctctctctctctctctctgagcaccaagg

SEQ ID NO: 2409 - DNA, 40 bp, Artificial Sequence
  Description of Artificial Sequence: Synthetic primer
gcagcattgttcagtccatccctttccaagctcctcacag

SEQ ID NO: 2410 - DNA, 40 bp, Artificial Sequence
  Description of Artificial Sequence: Synthetic primer
agaagagaactcagaagagcacggagggcccaggaagtac

SEQ ID NO: 2411 - DNA, 40 bp, Artificial Sequence
  Description of Artificial Sequence: Synthetic primer
ggcgtagtgtaaagggaaataataaggttaagtgttgttc

SEQ ID NO: 2412 - DNA, 40 bp, Artificial Sequence
  Description of Artificial Sequence: Synthetic primer
cccagtggtggatttgcagactttgatgtgtgtgtttatg

SEQ ID NO: 2413 - DNA, 40 bp, Artificial Sequence
  Description of Artificial Sequence: Synthetic primer
ctcccgctccagtggccctctcacccttcactgtaacacg

SEQ ID NO: 2414 - DNA, 40 bp, Artificial Sequence
  Description of Artificial Sequence: Synthetic primer
gccccacgagaggccaatgaaccgagagctgcctgagacc

SEQ ID NO: 2415 - DNA, 40 bp, Artificial Sequence
  Description of Artificial Sequence: Synthetic primer
tttcaaaactggaaatggcaagtcactagaaagtgaaagc

SEQ ID NO: 2416 - DNA, 40 bp, Artificial Sequence
  Description of Artificial Sequence: Synthetic primer
taatgtatttgtattagtaaaagcctcagcttaatgaatc

SEQ ID NO: 2417 - DNA, 40 bp, Artificial Sequence
  Description of Artificial Sequence: Synthetic primer
aacattttttctaccccacctcccaaaattcaaaatcctc

SEQ ID NO: 2418 - DNA, 40 bp, Artificial Sequence
  Description of Artificial Sequence: Synthetic primer
ttaatgtctttgtctagtcgtctaatgtttttaacactgg

SEQ ID NO: 2419 - DNA, 40 bp, Artificial Sequence
  Description of Artificial Sequence: Synthetic primer
ctcctgtccttggcacaacaactgcagcaaagactggttc

SEQ ID NO: 2420 - DNA, 40 bp, Artificial Sequence
  Description of Artificial Sequence: Synthetic primer
gactcagctcagttaattttggttacatccctctctgctc

SEQ ID NO: 2421 - DNA, 40 bp, Artificial Sequence
  Description of Artificial Sequence: Synthetic primer
aaatttatcacaatattcagtacacactttgtgtcaaacc

SEQ ID NO: 2422 - DNA, 40 bp, Artificial Sequence
  Description of Artificial Sequence: Synthetic primer
atagctgttatcctttaaaaatatatttttatgtgtttcc

SEQ ID NO: 2423 - DNA, 40 bp, Artificial Sequence
  Description of Artificial Sequence: Synthetic primer
tccagcaattattattaaatacttaaaaaacctgagaccc

SEQ ID NO: 2424 - DNA, 40 bp, Artificial Sequence
  Description of Artificial Sequence: Synthetic primer
ggccaacaattgcttgactgttctttaccatactgtttag

SEQ ID NO: 2425 - DNA, 40 bp, Artificial Sequence
  Description of Artificial Sequence: Synthetic primer
gcggttcaagtagcatgtcgcccaagagcagaagtcaaac

SEQ ID NO: 2426 - DNA, 40 bp, Artificial Sequence
  Description of Artificial Sequence: Synthetic primer
agcttctgggttttgcacaagttaggtttgttttgttttg

SEQ ID NO: 2427 - DNA, 40 bp, Artificial Sequence
  Description of Artificial Sequence: Synthetic primer
tccctgactggaggcttctctcatcccctgccctccctac

SEQ ID NO: 2428 - DNA, 40 bp, Artificial Sequence
  Description of Artificial Sequence: Synthetic primer
tggggtcctggtcacccctactcattctcttgacaaaaaa

SEQ ID NO: 2429 - DNA, 40 bp, Artificial Sequence
  Description of Artificial Sequence: Synthetic primer
aaagaagaaataactaagaattatttgagaaaaaaataac

SEQ ID NO: 2430 - DNA, 40 bp, Artificial Sequence
  Description of Artificial Sequence: Synthetic primer
ttgactgaatgtatttatggttttgtgtttttgcttttcc

SEQ ID NO: 2431 - DNA, 40 bp, Artificial Sequence
  Description of Artificial Sequence: Synthetic primer
ggtcattctggaatctggtgagaatggccttcctgttatg

SEQ ID NO: 2432 - DNA, 40 bp, Artificial Sequence
  Description of Artificial Sequence: Synthetic primer
tgggtccttcagcccacttggtcagcctgctcccctctgc

SEQ ID NO: 2433 - DNA, 40 bp, Artificial Sequence
  Description of Artificial Sequence: Synthetic primer
ctgctggaaggcgcgactgcaacttgactttgcctcactg

SEQ ID NO: 2434 - DNA, 40 bp, Artificial Sequence
  Description of Artificial Sequence: Synthetic primer
tggcaggacagaatgccctctctccactagctccccttac

SEQ ID NO: 2435 - DNA, 40 bp, Artificial Sequence
  Description of Artificial Sequence: Synthetic primer
aacaaagtgctgtgccactgtaatgatgtcagatactttc

SEQ ID NO: 2436 - DNA, 40 bp, Artificial Sequence
  Description of Artificial Sequence: Synthetic primer
tcggtgctattctcagcaggcgatgaaggaggtgacttac

SEQ ID NO: 2437 - DNA, 40 bp, Artificial Sequence
  Description of Artificial Sequence: Synthetic primer
ccccagggccctgtgacaaccttgtctttgtcctctcttg

SEQ ID NO: 2438 - DNA, 40 bp, Artificial Sequence
  Description of Artificial Sequence: Synthetic primer
gtttgcccaggcagcttgcccacccgttgcacccctcttg

SEQ ID NO: 2439 - DNA, 40 bp, Artificial Sequence
  Description of Artificial Sequence: Synthetic primer
cctagcagaggcagagtgcatgtcccggtgtcctctctcc

SEQ ID NO: 2440 - DNA, 40 bp, Artificial Sequence
  Description of Artificial Sequence: Synthetic primer
ctgagggcccagttgctcttccccattgtccttggcactc

SEQ ID NO: 2441 - DNA, 40 bp, Artificial Sequence
  Description of Artificial Sequence: Synthetic primer
aaaaaccacccagcggtgatggcagcgagcgtgcgtcctc

SEQ ID NO: 2442 - DNA, 40 bp, Artificial Sequence
  Description of Artificial Sequence: Synthetic primer
ggtgtcccaggccctctcctgactggtcctccccatccac

SEQ ID NO: 2443 - DNA, 40 bp, Artificial Sequence
  Description of Artificial Sequence: Synthetic primer
taatatgatttgcaaaatgagtattcatttgtgatttttt

SEQ ID NO: 2444 - DNA, 40 bp, Artificial Sequence
  Description of Artificial Sequence: Synthetic primer
gtttttaagatagatagtcttcaaatgagaagtttaatgt

SEQ ID NO: 2445 - DNA, 40 bp, Artificial Sequence
  Description of Artificial Sequence: Synthetic primer
aggactaagcagggagggagtgacaccttgaacacgaatc

SEQ ID NO: 2446 - DNA, 40 bp, Artificial Sequence
  Description of Artificial Sequence: Synthetic primer
taattgaaccttgccagcatcctcacgcaggttccctatc

SEQ ID NO: 2447 - DNA, 40 bp, Artificial Sequence
  Description of Artificial Sequence: Synthetic primer
tgacaaaatgccattctgtagtccactgttactgtctttc

SEQ ID NO: 2448 - DNA, 40 bp, Artificial Sequence
  Description of Artificial Sequence: Synthetic primer
aacactcttgtaggttgtttaaaaacaaaaaaaagtgaaa

SEQ ID NO: 2449 - DNA, 40 bp, Artificial Sequence
  Description of Artificial Sequence: Synthetic primer
ggctacagtgtgtgtcaaggctcacccctcctgccctgtg

SEQ ID NO: 2450 - DNA, 40 bp, Artificial Sequence
  Description of Artificial Sequence: Synthetic primer
agcctctacccagcctcccggtcccaaagtctgcacaagc

SEQ ID NO: 2451 - DNA, 40 bp, Artificial Sequence
  Description of Artificial Sequence: Synthetic primer
aaaggaccattattcaagcccaagagccaagtggtctcac

SEQ ID NO: 2452 - DNA, 40 bp, Artificial Sequence
  Description of Artificial Sequence: Synthetic primer
gttttacagttataattcctatgtgttcaccttgtgttac

SEQ ID NO: 2453 - DNA, 40 bp, Artificial Sequence
  Description of Artificial Sequence: Synthetic primer
ccctccagtcgggcccatccactcaagcccctggtgtctc

SEQ ID NO: 2454 - DNA, 40 bp, Artificial Sequence
  Description of Artificial Sequence: Synthetic primer
ggggctctcgggccagcgtgaaccccggcgtcctgaaccc

SEQ ID NO: 2455 - DNA, 40 bp, Artificial Sequence
  Description of Artificial Sequence: Synthetic primer
ccaggcccacaccttcatctggccagctgggctggctggg

SEQ ID NO: 2456 - DNA, 40 bp, Artificial Sequence
  Description of Artificial Sequence: Synthetic primer
ataataaaataaaaataaggaaggccccagttaaattgtg

SEQ ID NO: 2457 - DNA, 40 bp, Artificial Sequence
  Description of Artificial Sequence: Synthetic primer
cagtgcccgcttctctgcaggcgacgtgagcatcggcatc

SEQ ID NO: 2458 - DNA, 40 bp, Artificial Sequence
  Description of Artificial Sequence: Synthetic primer
tccagctgccttctggagctggcaggtgcatgtcgctgtg

SEQ ID NO: 2459 - DNA, 40 bp, Artificial Sequence
  Description of Artificial Sequence: Synthetic primer
catcagctagaagtcatattttccaaacagatgcccaaag

SEQ ID NO: 2460 - DNA, 40 bp, Artificial Sequence
  Description of Artificial Sequence: Synthetic primer
gaagagatagaaaaatgagactgaccaggaaatggatagg

SEQ ID NO: 2461 - DNA, 40 bp, Artificial Sequence
  Description of Artificial Sequence: Synthetic primer
tttgaattgtaaagtataacatttagacttaattaatttg

SEQ ID NO: 2462 - DNA, 40 bp, Artificial Sequence
  Description of Artificial Sequence: Synthetic primer
gagaacacagtgttaccttctcataatctccaatatttag

SEQ ID NO: 2463 - DNA, 40 bp, Artificial Sequence
  Description of Artificial Sequence: Synthetic primer
tttaaatattttttgattttttctaatcatgaaaattcag

SEQ ID NO: 2464 - DNA, 40 bp, Artificial Sequence
  Description of Artificial Sequence: Synthetic primer
catgtattacggagtgccaactgtattttaaagcaattaa

SEQ ID NO: 2465 - DNA, 40 bp, Artificial Sequence
  Description of Artificial Sequence: Synthetic primer
agtccttgacatctaagtactctttgtaggtgcttcttgg

SEQ ID NO: 2466 - DNA, 40 bp, Artificial Sequence
  Description of Artificial Sequence: Synthetic primer
gaaagaggcatttaatgaaatcagtgttttgcttctctag

SEQ ID NO: 2467 - DNA, 40 bp, Artificial Sequence
  Description of Artificial Sequence: Synthetic primer
aagaagggaggttactaggaagggctatggggcctccaac

SEQ ID NO: 2468 - DNA, 40 bp, Artificial Sequence
  Description of Artificial Sequence: Synthetic primer
tcccaaccctgctgtggccaggcctgctcctgcttgttgc

SEQ ID NO: 2469 - DNA, 40 bp, Artificial Sequence
  Description of Artificial Sequence: Synthetic primer
aggggagggatctttactgcatacaaagacgtcaaaggag

SEQ ID NO: 2470 - DNA, 40 bp, Artificial Sequence
  Description of Artificial Sequence: Synthetic primer
ttgcacttggggtttaatactgaccattaattcccccatg

SEQ ID NO: 2471 - DNA, 40 bp, Artificial Sequence
  Description of Artificial Sequence: Synthetic primer
aaatttcaattttatttttgctaagtatttattctttgat

SEQ ID NO: 2472 - DNA, 40 bp, Artificial Sequence
  Description of Artificial Sequence: Synthetic primer
gaaataaaattacactctgtcataaaagccatcagtattg

SEQ ID NO: 2473 - DNA, 40 bp, Artificial Sequence
  Description of Artificial Sequence: Synthetic primer
catttgttattagttttgtcctatctttctccttgttacc

SEQ ID NO: 2474 - DNA, 40 bp, Artificial Sequence
  Description of Artificial Sequence: Synthetic primer
accgacttccacttgactagctgagcccattgacataatg

SEQ ID NO: 2475 - DNA, 40 bp, Artificial Sequence
  Description of Artificial Sequence: Synthetic primer
aatcctttaaaggaggaaggccgtaagcagacaaatccta

SEQ ID NO: 2476 - DNA, 40 bp, Artificial Sequence
  Description of Artificial Sequence: Synthetic primer
cagattggttggtcttaccactccatcccatgtgctccag

SEQ ID NO: 2477 - DNA, 40 bp, Artificial Sequence
  Description of Artificial Sequence: Synthetic primer
gttgccaagataactggacggaggttgaagtggtgccttc

SEQ ID NO: 2478 - DNA, 40 bp, Artificial Sequence
  Description of Artificial Sequence: Synthetic primer
tggtgaaggagatttccattccagaagaagtaccaactgg

SEQ ID NO: 2479 - DNA, 40 bp, Artificial Sequence
  Description of Artificial Sequence: Synthetic primer
agtcccagacagaagctcctgcccgccctcctgtgtgatg

SEQ ID NO: 2480 - DNA, 40 bp, Artificial Sequence
  Description of Artificial Sequence: Synthetic primer
ttcgacaagctgtcaaaatgcgggtctctgtcccccacag

SEQ ID NO: 2481 - DNA, 40 bp, Artificial Sequence
  Description of Artificial Sequence: Synthetic primer
gagtttgggaaagattggcagcccaaggtttaaaccattc

SEQ ID NO: 2482 - DNA, 40 bp, Artificial Sequence
  Description of Artificial Sequence: Synthetic primer
agtgtagtaaagcagctctcatgctttattgctttaagaa

SEQ ID NO: 2483 - DNA, 40 bp, Artificial Sequence
  Description of Artificial Sequence: Synthetic primer
gtaataaatgccatctattttaactgacttctttttcaag

SEQ ID NO: 2484 - DNA, 40 bp, Artificial Sequence
  Description of Artificial Sequence: Synthetic primer
tcataggtatgcttggggcagtaaattaataaacacaaac

SEQ ID NO: 2485 - DNA, 40 bp, Artificial Sequence
  Description of Artificial Sequence: Synthetic primer
atttttccatcattaaaatttgaaacttgcatcaaacacc

SEQ ID NO: 2486 - DNA, 40 bp, Artificial Sequence
  Description of Artificial Sequence: Synthetic primer
gtattaaaactattaaaactcaagctacactggtaagttt

SEQ ID NO: 2487 - DNA, 40 bp, Artificial Sequence
  Description of Artificial Sequence: Synthetic primer
ggactccttggctagatcttgaagaaatgcctcaggacac

SEQ ID NO: 2488 - DNA, 40 bp, Artificial Sequence
  Description of Artificial Sequence: Synthetic primer
tttttttttccccaagcgaagcatgaacagttgctaagtg

SEQ ID NO: 2489 - DNA, 40 bp, Artificial Sequence
  Description of Artificial Sequence: Synthetic primer
tatttagaatgccttctcttttgtctatatctgataattt

SEQ ID NO: 2490 - DNA, 40 bp, Artificial Sequence
  Description of Artificial Sequence: Synthetic primer
gcccatcctgcaccccttctgcccaatcaccccctgaaag

SEQ ID NO: 2491 - DNA, 40 bp, Artificial Sequence
  Description of Artificial Sequence: Synthetic primer
cagaaaggccaggccatctctggtaatcctactcttgctg

SEQ ID NO: 2492 - DNA, 40 bp, Artificial Sequence
  Description of Artificial Sequence: Synthetic primer
acaaatcccaaaacaaacctgaaaagtgaaattaaatgac

SEQ ID NO: 2493 - DNA, 40 bp, Artificial Sequence
  Description of Artificial Sequence: Synthetic primer
ttaacgtccacatggagatatggaagaggaccggggattg

SEQ ID NO: 2494 - DNA, 40 bp, Artificial Sequence
  Description of Artificial Sequence: Synthetic primer
atagcttttgaaatttccttttggtgaagtttacattgtc

SEQ ID NO: 2495 - DNA, 40 bp, Artificial Sequence
  Description of Artificial Sequence: Synthetic primer
gctatcagtttcaaccagaacacccatttaactattttta

SEQ ID NO: 2496 - DNA, 40 bp, Artificial Sequence
  Description of Artificial Sequence: Synthetic primer
gagagggctctggttctgattcttgcctgttcctgttttc

SEQ ID NO: 2497 - DNA, 40 bp, Artificial Sequence
  Description of Artificial Sequence: Synthetic primer
gggttggagggtggacaccagaggccagtgtttgctcctc

SEQ ID NO: 2498 - DNA, 40 bp, Artificial Sequence
  Description of Artificial Sequence: Synthetic primer
cccacatggcccaaggtgggcatcttgacgttacctctgc

SEQ ID NO: 2499 - DNA, 40 bp, Artificial Sequence
  Description of Artificial Sequence: Synthetic primer
gtttctgtatgtcttctaacctgtgagtttgcctgttttc

SEQ ID NO: 2500 - DNA, 40 bp, Artificial Sequence
  Description of Artificial Sequence: Synthetic primer
cccggcccgggagtgatgccaccctgcctctcccctctcc

SEQ ID NO: 2501 - DNA, 40 bp, Artificial Sequence
  Description of Artificial Sequence: Synthetic primer
tgccctgaggcctggggcagcaggagcgggtaggcgccag

SEQ ID NO: 2502 - DNA, 40 bp, Artificial Sequence
  Description of Artificial Sequence: Synthetic primer
ttactgccatcgacttacattggtggtctttttgtaatag

SEQ ID NO: 2503 - DNA, 40 bp, Artificial Sequence
  Description of Artificial Sequence: Synthetic primer
atttcctttttgttctggcggtgttttgaaattagttatt

SEQ ID NO: 2504 - DNA, 40 bp, Artificial Sequence
  Description of Artificial Sequence: Synthetic primer
tgaggctgagaagggccctcacccgccaggtgcatcatag

SEQ ID NO: 2505 - DNA, 40 bp, Artificial Sequence
  Description of Artificial Sequence: Synthetic primer
tccctgctgactttgttctgagatgagattgcttgtgtac

SEQ ID NO: 2506 - DNA, 40 bp, Artificial Sequence
  Description of Artificial Sequence: Synthetic primer
tatgaagatttgattttaacatgaatttttttttctgacc

SEQ ID NO: 2507 - DNA, 40 bp, Artificial Sequence
  Description of Artificial Sequence: Synthetic primer
tttaaaacttagaaacagtgagaataaacgatcagacatc

SEQ ID NO: 2508 - DNA, 40 bp, Artificial Sequence
  Description of Artificial Sequence: Synthetic primer
cttggtggacatggtccggtggtcccggacactctctctg

SEQ ID NO: 2509 - DNA, 40 bp, Artificial Sequence
  Description of Artificial Sequence: Synthetic primer
aaatgggtcaggcctcccctgttcccagccccgcgctcac

SEQ ID NO: 2510 - DNA, 40 bp, Artificial Sequence
  Description of Artificial Sequence: Synthetic primer
ttttataattaagctgcaaaaggaagaaaaacaaacaaaa

SEQ ID NO: 2511 - DNA, 40 bp, Artificial Sequence
  Description of Artificial Sequence: Synthetic primer
tttccaggatattagtatgaagaaaaaaattttttttaac

SEQ ID NO: 2512 - DNA, 40 bp, Artificial Sequence
  Description of Artificial Sequence: Synthetic primer
aatctaggcattgttaccttaattatagcagaaagtattc

SEQ ID NO: 2513 - DNA, 40 bp, Artificial Sequence
  Description of Artificial Sequence: Synthetic primer
aatttcaattgaagtaactcaaacattcaaaacagatgac

SEQ ID NO: 2514 - DNA, 40 bp, Artificial Sequence
  Description of Artificial Sequence: Synthetic primer
ccgagtgacagacctggctccgctctcttccttcttccag

SEQ ID NO: 2515 - DNA, 40 bp, Artificial Sequence
  Description of Artificial Sequence: Synthetic primer
cgggagaccgggctagcctatgggagcgcccagataacgc

SEQ ID NO: 2516 - DNA, 40 bp, Artificial Sequence
  Description of Artificial Sequence: Synthetic primer
ccgaggccgtgggtaccagccttcctctgccccacactcg

SEQ ID NO: 2517 - DNA, 40 bp, Artificial Sequence
  Description of Artificial Sequence: Synthetic primer
ccactttcagcacctcgctgaggcgcccttgccctccacc

SEQ ID NO: 2518 - DNA, 40 bp, Artificial Sequence
  Description of Artificial Sequence: Synthetic primer
tgtattcataatgtgctgactggatgagtagaaacatatc

SEQ ID NO: 2519 - DNA, 40 bp, Artificial Sequence
  Description of Artificial Sequence: Synthetic primer
atatacatggattttataagatttatagcataatcagaca

SEQ ID NO: 2520 - DNA, 40 bp, Artificial Sequence
  Description of Artificial Sequence: Synthetic primer
tctttatagcatcaaggaatctgatgagaaagcaggaaag

SEQ ID NO: 2521 - DNA, 40 bp, Artificial Sequence
  Description of Artificial Sequence: Synthetic primer
gaatcaaatcttgctgtagtgaatggtgcaaatattagtg

SEQ ID NO: 2522 - DNA, 40 bp, Artificial Sequence
  Description of Artificial Sequence: Synthetic primer
catcatcatgcaaacttttactcataatattgttcatctg

SEQ ID NO: 2523 - DNA, 40 bp, Artificial Sequence
  Description of Artificial Sequence: Synthetic primer
ccactaacattcctctgctcaggctgaattattaaaggag

SEQ ID NO: 2524 - DNA, 40 bp, Artificial Sequence
  Description of Artificial Sequence: Synthetic primer
gaatttgaatctgctgtttctcaattgctctgtctctgac

SEQ ID NO: 2525 - DNA, 40 bp, Artificial Sequence
  Description of Artificial Sequence: Synthetic primer
gcctggcagcgctcaccctgacttgggtcctccttgtgtg

SEQ ID NO: 2526 - DNA, 40 bp, Artificial Sequence
  Description of Artificial Sequence: Synthetic primer
ggccaggcatctctgatgacctctgtttgtgtgttgtcac

SEQ ID NO: 2527 - DNA, 40 bp, Artificial Sequence
  Description of Artificial Sequence: Synthetic primer
gtcttagaaagaggtttccagtaccaaaggaaagacaggg

SEQ ID NO: 2528 - DNA, 40 bp, Artificial Sequence
  Description of Artificial Sequence: Synthetic primer
attttcatttttgcttttcttattccttttctcatagtag

SEQ ID NO: 2529 - DNA, 40 bp, Artificial Sequence
  Description of Artificial Sequence: Synthetic primer
tcacatttataatccatgtacctgattctccatttctggc

SEQ ID NO: 2530 - DNA, 40 bp, Artificial Sequence
  Description of Artificial Sequence: Synthetic primer
tcacagtaggggactccctggtgtgagcctgtccctctgc

SEQ ID NO: 2531 - DNA, 40 bp, Artificial Sequence
  Description of Artificial Sequence: Synthetic primer
ccttctgaaagtatatacaattaaaatttacagttactca

SEQ ID NO: 2532 - DNA, 40 bp, Artificial Sequence
  Description of Artificial Sequence: Synthetic primer
atcataatattataatgaaataatgaatttgtttttatcc

SEQ ID NO: 2533 - DNA, 40 bp, Artificial Sequence
  Description of Artificial Sequence: Synthetic primer
ttttgaacttcttttctcaatcatcggtctcttttctctc

SEQ ID NO: 2534 - DNA, 40 bp, Artificial Sequence
  Description of Artificial Sequence: Synthetic primer
tcactccagctgcagggaaggtggccccacggacgtgatg

SEQ ID NO: 2535 - DNA, 40 bp, Artificial Sequence
  Description of Artificial Sequence: Synthetic primer
aaaagaagaaaccctactttaaaataaaagtgagctccag

SEQ ID NO: 2536 - DNA, 40 bp, Artificial Sequence
  Description of Artificial Sequence: Synthetic primer
aaattgaggtggttgacttagtgataaagttatgtttccc

SEQ ID NO: 2537 - DNA, 40 bp, Artificial Sequence
  Description of Artificial Sequence: Synthetic primer
ttggtagattcttgaattcttactaatttatcttcttttg

SEQ ID NO: 2538 - DNA, 40 bp, Artificial Sequence
  Description of Artificial Sequence: Synthetic primer
aactgaggttttacaattagactggtccacataagaaatc

SEQ ID NO: 2539 - DNA, 40 bp, Artificial Sequence
  Description of Artificial Sequence: Synthetic primer
gtggtgtggccagacctccaggcccagggcgaccccccct

SEQ ID NO: 2540 - DNA, 40 bp, Artificial Sequence
  Description of Artificial Sequence: Synthetic primer
tgggtctctgggcggtggcgcaggctgcagccaggcgagg

SEQ ID NO: 2541 - DNA, 40 bp, Artificial Sequence
  Description of Artificial Sequence: Synthetic primer
ccagaacttgggttttaattcaacctaattcatttctctc

SEQ ID NO: 2542 - DNA, 40 bp, Artificial Sequence
  Description of Artificial Sequence: Synthetic primer
cactgcacccagccaacaaacacttctttagcacgacctg

SEQ ID NO: 2543 - DNA, 40 bp, Artificial Sequence
  Description of Artificial Sequence: Synthetic primer
tttaatatatgaaacaatggcttagtaattaaagtgttgg

SEQ ID NO: 2544 - DNA, 40 bp, Artificial Sequence
  Description of Artificial Sequence: Synthetic primer
tgttttttatgtttagctctttaatccatctggaaatgat

SEQ ID NO: 2545 - DNA, 40 bp, Artificial Sequence
  Description of Artificial Sequence: Synthetic primer
cggcactctgtctgtttgtctgtctgtctctctctgtgtt

SEQ ID NO: 2546 - DNA, 40 bp, Artificial Sequence
  Description of Artificial Sequence: Synthetic primer
cccttcagggaccaggtttttgttgcctggagggtgactg

SEQ ID NO: 2547 - DNA, 40 bp, Artificial Sequence
  Description of Artificial Sequence: Synthetic primer
tgtgggccatgctctaccctccccggtctccagtcttcac

SEQ ID NO: 2548 - DNA, 40 bp, Artificial Sequence
  Description of Artificial Sequence: Synthetic primer
agttggatttaggccagtttggcttaagcatgagagaaac

SEQ ID NO: 2549 - DNA, 40 bp, Artificial Sequence
  Description of Artificial Sequence: Synthetic primer
attcagaacacaaagatcatcctttcagagaaaataatgc

SEQ ID NO: 2550 - DNA, 40 bp, Artificial Sequence
  Description of Artificial Sequence: Synthetic primer
ttaataaaaattgaacttccctccctccctgcccccttac

SEQ ID NO: 2551 - DNA, 40 bp, Artificial Sequence
  Description of Artificial Sequence: Synthetic primer
caccaactcaggtcccaatcagaaaatcatccctccacac

SEQ ID NO: 2552 - DNA, 40 bp, Artificial Sequence
  Description of Artificial Sequence: Synthetic primer
atggtggctcatgcctttcaagacactgcttcttcttccc

SEQ ID NO: 2553 - DNA, 40 bp, Artificial Sequence
  Description of Artificial Sequence: Synthetic primer
aagttccatttaggttgctggtgggaagttagtgcatttc

SEQ ID NO: 2554 - DNA, 40 bp, Artificial Sequence
  Description of Artificial Sequence: Synthetic primer
cacagtatccctatggcttctcttggcctaaaggaaaaaa

SEQ ID NO: 2555 - DNA, 40 bp, Artificial Sequence
  Description of Artificial Sequence: Synthetic primer
gttcatataaaatggtaaaagatcttttcatataaaaagg

SEQ ID NO: 2556 - DNA, 40 bp, Artificial Sequence
  Description of Artificial Sequence: Synthetic primer
aaatgaactgatatactgatttttctctttcctttattgt

SEQ ID NO: 2557 - DNA, 40 bp, Artificial Sequence
  Description of Artificial Sequence: Synthetic primer
aaagaatcctcccagcctgaggcccctccctctgccttcc

SEQ ID NO: 2558 - DNA, 40 bp, Artificial Sequence
  Description of Artificial Sequence: Synthetic primer
cttgggccctggatcccctctcatcgactcattatgcacc

SEQ ID NO: 2559 - DNA, 40 bp, Artificial Sequence
  Description of Artificial Sequence: Synthetic primer
gaaactggacctttgcatggtgggcgtgactggctgagac

SEQ ID NO: 2560 - DNA, 40 bp, Artificial Sequence
  Description of Artificial Sequence: Synthetic primer
agaaactgctttgttttcttgttctcattctgtgtcttcc

SEQ ID NO: 2561 - DNA, 40 bp, Artificial Sequence
  Description of Artificial Sequence: Synthetic primer
aaatagtacactaggtactaacactgattaacggtttctg

SEQ ID NO: 2562 - DNA, 40 bp, Artificial Sequence
  Description of Artificial Sequence: Synthetic primer
tataactgttattattggtgaaggcaatttactcttgaac

SEQ ID NO: 2563 - DNA, 40 bp, Artificial Sequence
  Description of Artificial Sequence: Synthetic primer
taaaaattcaatacatatttgttaactcaatttaaggatg

SEQ ID NO: 2564 - DNA, 40 bp, Artificial Sequence
  Description of Artificial Sequence: Synthetic primer
cttagtctccatttaaaatatgttctgttttcttaacttc

SEQ ID NO: 2565 - DNA, 40 bp, Artificial Sequence
  Description of Artificial Sequence: Synthetic primer
cccagttctggggagattctggggagggagtcttgggctg

SEQ ID NO: 2566 - DNA, 40 bp, Artificial Sequence
  Description of Artificial Sequence: Synthetic primer
agtatatgaccatgcatatgagcatttgtctctcctcttc

SEQ ID NO: 2567 - DNA, 40 bp, Artificial Sequence
  Description of Artificial Sequence: Synthetic primer
gttagcttgcaagcatgtttgtctgttcacatccctaacc

SEQ ID NO: 2568 - DNA, 40 bp, Artificial Sequence
  Description of Artificial Sequence: Synthetic primer
tggcctcactcctggttactgggcatcctcccgttttcgc

SEQ ID NO: 2569 - DNA, 40 bp, Artificial Sequence
  Description of Artificial Sequence: Synthetic primer
aaaagctgccaatctaaagatatgattatttactgtgtac

SEQ ID NO: 2570 - DNA, 40 bp, Artificial Sequence
  Description of Artificial Sequence: Synthetic primer
tttaaacttctatgtagtttgaaatgaaacaaaactaacc

SEQ ID NO: 2571 - DNA, 40 bp, Artificial Sequence
  Description of Artificial Sequence: Synthetic primer
ttctgtttgtgtctccaaatgcatcagctcccccagctcc

SEQ ID NO: 2572 - DNA, 40 bp, Artificial Sequence
  Description of Artificial Sequence: Synthetic primer
agaggaatctgtagttgtattctactttgttaattagtgg

SEQ ID NO: 2573 - DNA, 40 bp, Artificial Sequence
  Description of Artificial Sequence: Synthetic primer
tgattctatcttaagggaaaaactggaggaaagaactccc

SEQ ID NO: 2574 - DNA, 40 bp, Artificial Sequence
  Description of Artificial Sequence: Synthetic primer
tgtgtaattgtaaaactttcctaagtgacctttctctctc

SEQ ID NO: 2575 - DNA, 40 bp, Artificial Sequence
  Description of Artificial Sequence: Synthetic primer
aataatttatgtacttcctggggtacaaagaagcaggatg

SEQ ID NO: 2576 - DNA, 40 bp, Artificial Sequence
  Description of Artificial Sequence: Synthetic primer
ttgttgatgaatagtgtcttactggtctttttcttctgac

SEQ ID NO: 2577 - DNA, 40 bp, Artificial Sequence
  Description of Artificial Sequence: Synthetic primer
cgtttgacataagagtctataatcaagtctcacatctttc

SEQ ID NO: 2578 - DNA, 40 bp, Artificial Sequence
  Description of Artificial Sequence: Synthetic primer
gagttttattcaagttaacttaatatactttctcttttcc

SEQ ID NO: 2579 - DNA, 40 bp, Artificial Sequence
  Description of Artificial Sequence: Synthetic primer
tttccatatgcgaaagcctggctggagggcacttccttac

SEQ ID NO: 2580 - DNA, 40 bp, Artificial Sequence
  Description of Artificial Sequence: Synthetic primer
atcaggaattgatctgtacccggctccctgacctcatctc

SEQ ID NO: 2581 - DNA, 40 bp, Artificial Sequence
  Description of Artificial Sequence: Synthetic primer
gggagagaacgttaccttccaggctgctcttgttgttggc

SEQ ID NO: 2582 - DNA, 40 bp, Artificial Sequence
  Description of Artificial Sequence: Synthetic primer
caatgtctttaaggaacttctatgaaaagatcccattatc

SEQ ID NO: 2583 - DNA, 40 bp, Artificial Sequence
  Description of Artificial Sequence: Synthetic primer
taaaatgtttttgaatgaaagctttgtcagagaagtaaac

SEQ ID NO: 2584 - DNA, 40 bp, Artificial Sequence
  Description of Artificial Sequence: Synthetic primer
ttttcttactgaaccctaattggcaggaggtactgttgtc

SEQ ID NO: 2585 - DNA, 40 bp, Artificial Sequence
  Description of Artificial Sequence: Synthetic primer
gcggtgtatcttctgttggcttatccttgtgtggcttctg

SEQ ID NO: 2586 - DNA, 40 bp, Artificial Sequence
  Description of Artificial Sequence: Synthetic primer
gcaggagcctggcctgggaggacgatttattattacactg

SEQ ID NO: 2587 - DNA, 40 bp, Artificial Sequence
  Description of Artificial Sequence: Synthetic primer
aaacagctcctttaatgactggttcctcatttttttctcc

SEQ ID NO: 2588 - DNA, 40 bp, Artificial Sequence
  Description of Artificial Sequence: Synthetic primer
caaattactcttccattggtattaacatcttcatatttgc

SEQ ID NO: 2589 - DNA, 40 bp, Artificial Sequence
  Description of Artificial Sequence: Synthetic primer
gagtatccttacttttggtctgtaatatctcctttttgac

SEQ ID NO: 2590 - DNA, 40 bp, Artificial Sequence
  Description of Artificial Sequence: Synthetic primer
ggaacctgctcgctcacgtcggctttccccttctgttttg

SEQ ID NO: 2591 - DNA, 40 bp, Artificial Sequence
  Description of Artificial Sequence: Synthetic primer
acgctagagttcctcacctgttccaccttgcccctcctgc

SEQ ID NO: 2592 - DNA, 40 bp, Artificial Sequence
  Description of Artificial Sequence: Synthetic primer
ttcatccagtttcctggtgactctccttgtcttctctctc

SEQ ID NO: 2593 - DNA, 40 bp, Artificial Sequence
  Description of Artificial Sequence: Synthetic primer
tgcaggtagacctgggactcggccagccatcgcccttgag

SEQ ID NO: 2594 - DNA, 40 bp, Artificial Sequence
  Description of Artificial Sequence: Synthetic primer
cagggcattagaggcccagagagagaggtggtgctgagtg

SEQ ID NO: 2595 - DNA, 40 bp, Artificial Sequence
  Description of Artificial Sequence: Synthetic primer
gcatggacggggccctccaagcctgctaacaccctgttcg

SEQ ID NO: 2596 - DNA, 40 bp, Artificial Sequence
  Description of Artificial Sequence: Synthetic primer
ctgttgaagctgaacacgcaaaagaccgaaaggacgagag

SEQ ID NO: 2597 - DNA, 40 bp, Artificial Sequence
  Description of Artificial Sequence: Synthetic primer
gtggtgctccctggggtctgaccttgtgcctcttctgttc

SEQ ID NO: 2598 - DNA, 40 bp, Artificial Sequence
  Description of Artificial Sequence: Synthetic primer
ttccagttaataatggaattgtcttgatttctctccctga

SEQ ID NO: 2599 - DNA, 40 bp, Artificial Sequence
  Description of Artificial Sequence: Synthetic primer
cgcacgcacacacactcacctttctcatacaggcttctcc

SEQ ID NO: 2600 - DNA, 40 bp, Artificial Sequence
  Description of Artificial Sequence: Synthetic primer
taaaatgtacattgttcttttaatacatatgttctctctg

SEQ ID NO: 2601 - DNA, 40 bp, Artificial Sequence
  Description of Artificial Sequence: Synthetic primer
aatctgaaaaactgacaacaggaccttcttaaaatactgc

SEQ ID NO: 2602 - DNA, 40 bp, Artificial Sequence
  Description of Artificial Sequence: Synthetic primer
ccacacaccagattaattactgaacataaacaccctacag

SEQ ID NO: 2603 - DNA, 40 bp, Artificial Sequence
  Description of Artificial Sequence: Synthetic primer
ttgcctttttcttaagcataaccaaaaatcttttctttgc

SEQ ID NO: 2604 - DNA, 40 bp, Artificial Sequence
  Description of Artificial Sequence: Synthetic primer
tgtgtgtttttggcaactcttttcttactcttttgttttt

SEQ ID NO: 2605 - DNA, 40 bp, Artificial Sequence
  Description of Artificial Sequence: Synthetic primer
ccttttttcttttcataaaacaaaaccatcccccataaac

SEQ ID NO: 2606 - DNA, 40 bp, Artificial Sequence
  Description of Artificial Sequence: Synthetic primer
cttctgtggttctcttataacgaaataatgtaattttcta

SEQ ID NO: 2607 - DNA, 40 bp, Artificial Sequence
  Description of Artificial Sequence: Synthetic primer
tttataattataaaaatacaaaattgtactagcaccatta

SEQ ID NO: 2608 - DNA, 40 bp, Artificial Sequence
  Description of Artificial Sequence: Synthetic primer
gccacctccccgacccctctccacgctggcctcgcacacc

SEQ ID NO: 2609 - DNA, 40 bp, Artificial Sequence
  Description of Artificial Sequence: Synthetic primer
tgtaaccaggatggctgtgccctgaacccaccctgacctc

SEQ ID NO: 2610 - DNA, 40 bp, Artificial Sequence
  Description of Artificial Sequence: Synthetic primer
aacccaagaaagaagaaggctccctgcccatatgcctctc

SEQ ID NO: 2611 - DNA, 40 bp, Artificial Sequence
  Description of Artificial Sequence: Synthetic primer
attgcctgaagatgccatttcctccataccctttactcac

SEQ ID NO: 2612 - DNA, 40 bp, Artificial Sequence
  Description of Artificial Sequence: Synthetic primer
ctcgagaagaaacaggacattatttacacattaaaggaac

SEQ ID NO: 2613 - DNA, 40 bp, Artificial Sequence
  Description of Artificial Sequence: Synthetic primer
tgtcgagcaccttggccgcgtgcccttggcctctctgacc

SEQ ID NO: 2614 - DNA, 40 bp, Artificial Sequence
  Description of Artificial Sequence: Synthetic primer
tatatgtattacgacagcaacaaaatatatgaaatactgg

SEQ ID NO: 2615 - DNA, 40 bp, Artificial Sequence
  Description of Artificial Sequence: Synthetic primer
agttttctctatttaattccttacagttctcgtgaaaaaa

SEQ ID NO: 2616 - DNA, 40 bp, Artificial Sequence
  Description of Artificial Sequence: Synthetic primer
aacacctcgggagaggtctctggctcgttgtgaccccaag

SEQ ID NO: 2617 - DNA, 40 bp, Artificial Sequence
  Description of Artificial Sequence: Synthetic primer
ggggcactctgcggcctggggacctggagccctgggctgc

SEQ ID NO: 2618 - DNA, 40 bp, Artificial Sequence
  Description of Artificial Sequence: Synthetic primer
taaggcacgaattctaatcatgtaccccacccacctttcc

SEQ ID NO: 2619 - DNA, 40 bp, Artificial Sequence
  Description of Artificial Sequence: Synthetic primer
tctgccaggccttcaggcccacccaccccagccctccagg

SEQ ID NO: 2620 - DNA, 40 bp, Artificial Sequence
  Description of Artificial Sequence: Synthetic primer
cctggcagacccactgcatgaggcaagcaggactcctgac

SEQ ID NO: 2621 - DNA, 40 bp, Artificial Sequence
  Description of Artificial Sequence: Synthetic primer
ttcccagcagcgctgctgccaaggccctggccctgcagcc

SEQ ID NO: 2622 - DNA, 40 bp, Artificial Sequence
  Description of Artificial Sequence: Synthetic primer
tcactcctggggtacagcacacatcccctgaccccactgc

SEQ ID NO: 2623 - DNA, 40 bp, Artificial Sequence
  Description of Artificial Sequence: Synthetic primer
cagggaccccggcttcaggcccagccctggtgctcggctg

SEQ ID NO: 2624 - DNA, 40 bp, Artificial Sequence
  Description of Artificial Sequence: Synthetic primer
ttgtaaacttcccctcattcctttttcctctgtgtatctc

SEQ ID NO: 2625 - DNA, 40 bp, Artificial Sequence
  Description of Artificial Sequence: Synthetic primer
taatgttttaatggcaaaagtggtcctctctgaatctctg

SEQ ID NO: 2626 - DNA, 40 bp, Artificial Sequence
  Description of Artificial Sequence: Synthetic primer
agaacaatcacaaaacctcaaagccgaaggactaatctgc

SEQ ID NO: 2627 - DNA, 40 bp, Artificial Sequence
  Description of Artificial Sequence: Synthetic primer
ttctcctggtgccacatccccagctggcatctatcctgtc

SEQ ID NO: 2628 - DNA, 40 bp, Artificial Sequence
  Description of Artificial Sequence: Synthetic primer
cggacacgtcaccctcagtcacgccaccctgacccactgc

SEQ ID NO: 2629 - DNA, 40 bp, Artificial Sequence
  Description of Artificial Sequence: Synthetic primer
ggtggaagcagattgaactgatgtccttgtgctctgtctg

SEQ ID NO: 2630 - DNA, 40 bp, Artificial Sequence
  Description of Artificial Sequence: Synthetic primer
ggaataaaatcaaacatctatgaaactgcaaaactgttac

SEQ ID NO: 2631 - DNA, 40 bp, Artificial Sequence
  Description of Artificial Sequence: Synthetic primer
acttcagtagatggatgaagtgtctttatttcctccttag

SEQ ID NO: 2632 - DNA, 40 bp, Artificial Sequence
  Description of Artificial Sequence: Synthetic primer
ctcagggccgccgaggcttccactgctgtgtctgtaaacg

SEQ ID NO: 2633 - DNA, 40 bp, Artificial Sequence
  Description of Artificial Sequence: Synthetic primer
agggactcagggagcccggcactcggctcctttctgtagc

SEQ ID NO: 2634 - DNA, 40 bp, Artificial Sequence
  Description of Artificial Sequence: Synthetic primer
cctgggctccacctttcaggagaagtttgtgctcagcttt

SEQ ID NO: 2635 - DNA, 40 bp, Artificial Sequence
  Description of Artificial Sequence: Synthetic primer
cttgttagctgcctttctcagtctgagccatactttctcc

SEQ ID NO: 2636 - DNA, 40 bp, Artificial Sequence
  Description of Artificial Sequence: Synthetic primer
cccgctgggagcccaacaacttctgaggaaagtttggcac

SEQ ID NO: 2637 - DNA, 40 bp, Artificial Sequence
  Description of Artificial Sequence: Synthetic primer
ctgccccagcccctccgaggggatccctgccccaaggagc

SEQ ID NO: 2638 - DNA, 40 bp, Artificial Sequence
  Description of Artificial Sequence: Synthetic primer
ggtcatcgccttcctcatgcccaaaccacttattctgttc

SEQ ID NO: 2639 - DNA, 40 bp, Artificial Sequence
  Description of Artificial Sequence: Synthetic primer
tggagtcacccggggacaacatctcattgctggtctgaac

SEQ ID NO: 2640 - DNA, 40 bp, Artificial Sequence
  Description of Artificial Sequence: Synthetic primer
tggcaggtgagtgaccagggccctccccgccaccgccccc

SEQ ID NO: 2641 - DNA, 40 bp, Artificial Sequence
  Description of Artificial Sequence: Synthetic primer
caggcattcaatgagagctctgggagggacgcgggaatcc

SEQ ID NO: 2642 - DNA, 40 bp, Artificial Sequence
  Description of Artificial Sequence: Synthetic primer
gtgccaatatagtgtgtttgtcttttgctctgcaattctg

SEQ ID NO: 2643 - DNA, 40 bp, Artificial Sequence
  Description of Artificial Sequence: Synthetic primer
tgactgatgtacctgtaagaagaataaatgttgtgtgatc

SEQ ID NO: 2644 - DNA, 40 bp, Artificial Sequence
  Description of Artificial Sequence: Synthetic primer
ccacttcagcagggctctgacatacttgatctgtttctcc

SEQ ID NO: 2645 - DNA, 40 bp, Artificial Sequence
  Description of Artificial Sequence: Synthetic primer
cggccatcagcttcctggatcatgaaagtaaataaagtac

SEQ ID NO: 2646 - DNA, 40 bp, Artificial Sequence
  Description of Artificial Sequence: Synthetic primer
cacccttctccctccccgcctgactctcagcctggctatc

SEQ ID NO: 2647 - DNA, 40 bp, Artificial Sequence
  Description of Artificial Sequence: Synthetic primer
agccctgagcgtgagttctgtggaatgtgctggggaaggg

SEQ ID NO: 2648 - DNA, 40 bp, Artificial Sequence
  Description of Artificial Sequence: Synthetic primer
cgcgggacccgcgcccgtgccctggccacccgcagcctca

SEQ ID NO: 2649 - DNA, 40 bp, Artificial Sequence
  Description of Artificial Sequence: Synthetic primer
tgcgggccgcgctctcggcggcgcgcatgtgcgtgtgtgc

SEQ ID NO: 2650 - DNA, 40 bp, Artificial Sequence
  Description of Artificial Sequence: Synthetic primer
ccatgtacatccatgtcccaggaaagggctgcggctcatc

SEQ ID NO: 2651 - DNA, 40 bp, Artificial Sequence
  Description of Artificial Sequence: Synthetic primer
acttggtcggtggtctcagtgtctgtctttcccttctccc

SEQ ID NO: 2652 - DNA, 40 bp, Artificial Sequence
  Description of Artificial Sequence: Synthetic primer
caaattacttaacaaaaaccttattttcttgtctcctttg

SEQ ID NO: 2653 - DNA, 40 bp, Artificial Sequence
  Description of Artificial Sequence: Synthetic primer
accatgcctggccagaaatcttgccgtttttccccaactc

SEQ ID NO: 2654 - DNA, 40 bp, Artificial Sequence
  Description of Artificial Sequence: Synthetic primer
gaaaccagttaggtaattgcaacattaacccatctcaaag

SEQ ID NO: 2655 - DNA, 40 bp, Artificial Sequence
  Description of Artificial Sequence: Synthetic primer
tggattttcatgtgttgcttaaatgtactattttcctttc

SEQ ID NO: 2656 - DNA, 40 bp, Artificial Sequence
  Description of Artificial Sequence: Synthetic primer
tgggacacacctgtaggtggatgttgatgatgtctttctc

SEQ ID NO: 2657 - DNA, 40 bp, Artificial Sequence
  Description of Artificial Sequence: Synthetic primer
catccctgctctcagggcttagccctcattccctcatccc

SEQ ID NO: 2658 - DNA, 40 bp, Artificial Sequence
  Description of Artificial Sequence: Synthetic primer
cagtgaggtcagccttctcctgatggtggccaaatccttc

SEQ ID NO: 2659 - DNA, 40 bp, Artificial Sequence
  Description of Artificial Sequence: Synthetic primer
ctgttccttagtggaagaaaggagaagggaggcagagacc

SEQ ID NO: 2660 - DNA, 40 bp, Artificial Sequence
  Description of Artificial Sequence: Synthetic primer
ccggcttctgtgctgtccagggtgcctcgggctgtagcaa

SEQ ID NO: 2661 - DNA, 40 bp, Artificial Sequence
  Description of Artificial Sequence: Synthetic primer
agcccagtgtgaaggcctcttctgagactgtcctcttttg

SEQ ID NO: 2662 - DNA, 40 bp, Artificial Sequence
  Description of Artificial Sequence: Synthetic primer
agattcaaagattactgggcagtcaggtttttaaaagtag

SEQ ID NO: 2663 - DNA, 40 bp, Artificial Sequence
  Description of Artificial Sequence: Synthetic primer
ttacttgtataaatcctagaaggaagtacaaaattttcac

SEQ ID NO: 2664 - DNA, 40 bp, Artificial Sequence
  Description of Artificial Sequence: Synthetic primer
gccttctagaagagtctgtggcctcgtggaagaacagagg

SEQ ID NO: 2665 - DNA, 40 bp, Artificial Sequence
  Description of Artificial Sequence: Synthetic primer
aaggtggaaggttcattgatgtcaagtgggtgcttctctg

SEQ ID NO: 2666 - DNA, 40 bp, Artificial Sequence
  Description of Artificial Sequence: Synthetic primer
aatttgattttgcagagagtatgtaatatagagaaaaatg

SEQ ID NO: 2667 - DNA, 40 bp, Artificial Sequence
  Description of Artificial Sequence: Synthetic primer
ctatcaatcttcactagatttgtaaatatatttcaatgtc

SEQ ID NO: 2668 - DNA, 40 bp, Artificial Sequence
  Description of Artificial Sequence: Synthetic primer
gcacagggaaactaggaggacaagtgaggtaatagtaaca

SEQ ID NO: 2669 - DNA, 40 bp, Artificial Sequence
  Description of Artificial Sequence: Synthetic primer
gtttctgggttaaatcctaaagaactgtgcaactgaaagc

SEQ ID NO: 2670 - DNA, 40 bp, Artificial Sequence
  Description of Artificial Sequence: Synthetic primer
aaacggaagttgaccttaactcaaatggtaggaaaacctg

SEQ ID NO: 2671 - DNA, 40 bp, Artificial Sequence
  Description of Artificial Sequence: Synthetic primer
tgcttatttctcgacgatatccttcctcgacatctccttc

SEQ ID NO: 2672 - DNA, 40 bp, Artificial Sequence
  Description of Artificial Sequence: Synthetic primer
cactaagccctaagctctatagcagaatcaaagcaaaaac

SEQ ID NO: 2673 - DNA, 40 bp, Artificial Sequence
  Description of Artificial Sequence: Synthetic primer
tgtgattgtcttcccctttcgtgttcattctcgcttaaac

SEQ ID NO: 2674 - DNA, 40 bp, Artificial Sequence
  Description of Artificial Sequence: Synthetic primer
aattggtgattgctacaattcaggatgagttaatgcgttc

SEQ ID NO: 2675 - DNA, 40 bp, Artificial Sequence
  Description of Artificial Sequence: Synthetic primer
cattttcctaaaatgagaaaaatcttctgctatcaccatc

SEQ ID NO: 2676 - DNA, 40 bp, Artificial Sequence
  Description of Artificial Sequence: Synthetic primer
catagcagagtgtcaatgtatgaaaatctggtatgtttgc

SEQ ID NO: 2677 - DNA, 40 bp, Artificial Sequence
  Description of Artificial Sequence: Synthetic primer
acagcaagtgtatttttacttggaatccaggcactgtggc

SEQ ID NO: 2678 - DNA, 40 bp, Artificial Sequence
  Description of Artificial Sequence: Synthetic primer
ctgattgcttattttaacaaagtcactttgagagccccac

SEQ ID NO: 2679 - DNA, 40 bp, Artificial Sequence
  Description of Artificial Sequence: Synthetic primer
ccaggaagagagtgaaatgtttttgttcctcctgtgctag

SEQ ID NO: 2680 - DNA, 40 bp, Artificial Sequence
  Description of Artificial Sequence: Synthetic primer
ctgggcctcgaggaggagccgctctgtcagggtgccatta

SEQ ID NO: 2681 - DNA, 40 bp, Artificial Sequence
  Description of Artificial Sequence: Synthetic primer
gaggggacagctgctgcgtgcatctccagaggtgttgacc

SEQ ID NO: 2682 - DNA, 40 bp, Artificial Sequence
  Description of Artificial Sequence: Synthetic primer
gacccctccccactcccaggccctgaggcctacaggccac

SEQ ID NO: 2683 - DNA, 40 bp, Artificial Sequence
  Description of Artificial Sequence: Synthetic primer
ctggccagtgctcagtggacttaacggggcttcccctctc

SEQ ID NO: 2684 - DNA, 40 bp, Artificial Sequence
  Description of Artificial Sequence: Synthetic primer
gcctctccatccctccaagctatcgtccagcgcagtccac

SEQ ID NO: 2685 - DNA, 40 bp, Artificial Sequence
  Description of Artificial Sequence: Synthetic primer
ggaggtggcagggaggtggggcaccggggtctgagctgtc

SEQ ID NO: 2686 - DNA, 40 bp, Artificial Sequence
  Description of Artificial Sequence: Synthetic primer
caccccaataaggcccaaatcctctgacaactgtagactg

SEQ ID NO: 2687 - DNA, 40 bp, Artificial Sequence
  Description of Artificial Sequence: Synthetic primer
attttcatgctttaatttgtacacatttttgtgtctcttt

SEQ ID NO: 2688 - DNA, 40 bp, Artificial Sequence
  Description of Artificial Sequence: Synthetic primer
caggtgatcagttgtgttgatcacttcaattccaagattc

SEQ ID NO: 2689 - DNA, 40 bp, Artificial Sequence
  Description of Artificial Sequence: Synthetic primer
ggaatttccccaagcttattatgacccaggtttccaagtc

SEQ ID NO: 2690 - DNA, 40 bp, Artificial Sequence
  Description of Artificial Sequence: Synthetic primer
gaataaaatttaaaaagttgaagaggctatttattttatc

SEQ ID NO: 2691 - DNA, 40 bp, Artificial Sequence
  Description of Artificial Sequence: Synthetic primer
ctaaatacttccactgtgtaacactgagctgcttaattcc

SEQ ID NO: 2692 - DNA, 40 bp, Artificial Sequence
  Description of Artificial Sequence: Synthetic primer
aaaaatgagggtagattttcctcatgtttttaaagggttc

SEQ ID NO: 2693 - DNA, 40 bp, Artificial Sequence
  Description of Artificial Sequence: Synthetic primer
gagccctttccccaaaataggaaaatttaattaagattag

SEQ ID NO: 2694 - DNA, 40 bp, Artificial Sequence
  Description of Artificial Sequence: Synthetic primer
accctttgcctaggtgctccataatgatggccaaagctac

SEQ ID NO: 2695 - DNA, 40 bp, Artificial Sequence
  Description of Artificial Sequence: Synthetic primer
ggaaaaaagaagcaatattttattttgtaaattatgtcat

SEQ ID NO: 2696 - DNA, 40 bp, Artificial Sequence
  Description of Artificial Sequence: Synthetic primer
aaaataaagtcaggtgtttctatttttattttcctctaag

SEQ ID NO: 2697 - DNA, 40 bp, Artificial Sequence
  Description of Artificial Sequence: Synthetic primer
agaaaggctataaataaagcatgagtacatttttagtggc

SEQ ID NO: 2698 - DNA, 40 bp, Artificial Sequence
  Description of Artificial Sequence: Synthetic primer
ctcagtgtggtttgtcttaatttttttaaagcaagttttg

SEQ ID NO: 2699 - DNA, 40 bp, Artificial Sequence
  Description of Artificial Sequence: Synthetic primer
gatctataaatatttctttgagaaatgaaaaacaaagaac

SEQ ID NO: 2700 - DNA, 40 bp, Artificial Sequence
  Description of Artificial Sequence: Synthetic primer
cccttgcacccactccacccctgccacacagcccctccac

SEQ ID NO: 2701 - DNA, 40 bp, Artificial Sequence
  Description of Artificial Sequence: Synthetic primer
cccctacctgcctcagccaacttctctggccggtgcttgg

SEQ ID NO: 2702 - DNA, 40 bp, Artificial Sequence
  Description of Artificial Sequence: Synthetic primer
gggaagagggatgcccatcagccttcccggaattccgggg

SEQ ID NO: 2703 - DNA, 40 bp, Artificial Sequence
  Description of Artificial Sequence: Synthetic primer
gagaaagacctccgcttcactgccccggctggtcccaagg

SEQ ID NO: 2704 - DNA, 40 bp, Artificial Sequence
  Description of Artificial Sequence: Synthetic primer
cagataaattactagagactttcaagtccaaccaactgtc

SEQ ID NO: 2705 - DNA, 40 bp, Artificial Sequence
  Description of Artificial Sequence: Synthetic primer
tcactcagaattcataaatatttagttactctctgtttcc

SEQ ID NO: 2706 - DNA, 40 bp, Artificial Sequence
  Description of Artificial Sequence: Synthetic primer
atttgtgagatggagatttttaaaagggacagacaaacac

SEQ ID NO: 2707 - DNA, 40 bp, Artificial Sequence
  Description of Artificial Sequence: Synthetic primer
gtaatataagacagtatactcaagtggtcagtgtgctaac

SEQ ID NO: 2708 - DNA, 40 bp, Artificial Sequence
  Description of Artificial Sequence: Synthetic primer
agaatagaatgtcccttcaagtaaaatgtctacaatgagc

SEQ ID NO: 2709 - DNA, 40 bp, Artificial Sequence
  Description of Artificial Sequence: Synthetic primer
cataaaaacactcattgcaagttttaagcaaatgtgtatg

SEQ ID NO: 2710 - DNA, 40 bp, Artificial Sequence
  Description of Artificial Sequence: Synthetic primer
catgacctcactgctcatgcctgtgtttccccctccaaac

SEQ ID NO: 2711 - DNA, 40 bp, Artificial Sequence
  Description of Artificial Sequence: Synthetic primer
gttccatgttgccaagagaacccagaacagccgcaaacac

SEQ ID NO: 2712 - DNA, 40 bp, Artificial Sequence
  Description of Artificial Sequence: Synthetic primer
gagggtggggagcgttgaaggaattggggattgggctgag

SEQ ID NO: 2713 - DNA, 40 bp, Artificial Sequence
  Description of Artificial Sequence: Synthetic primer
gcttgcaggctgatttctccccggcccctcctgatttggg

SEQ ID NO: 2714 - DNA, 40 bp, Artificial Sequence
  Description of Artificial Sequence: Synthetic primer
tactttgtctagcacaaatgtcaaataatctcataatatc

SEQ ID NO: 2715 - DNA, 40 bp, Artificial Sequence
  Description of Artificial Sequence: Synthetic primer
cgcaacacctgaataaagaatcttttacctggtatgtgac

SEQ ID NO: 2716 - DNA, 40 bp, Artificial Sequence
  Description of Artificial Sequence: Synthetic primer
tagctctatcctggctggggagagggatggacagaagaac

SEQ ID NO: 2717 - DNA, 40 bp, Artificial Sequence
  Description of Artificial Sequence: Synthetic primer
cggctctataaagaattgtccttattttcgaactttctcc

SEQ ID NO: 2718 - DNA, 40 bp, Artificial Sequence
  Description of Artificial Sequence: Synthetic primer
gcttcatctgatagtgtaccctctactttttgttttgtgc

SEQ ID NO: 2719 - DNA, 40 bp, Artificial Sequence
  Description of Artificial Sequence: Synthetic primer
gatggaaagcatttcccatgcaagaatgagcaggatagtc

SEQ ID NO: 2720 - DNA, 40 bp, Artificial Sequence
  Description of Artificial Sequence: Synthetic primer
gtcctagtggagtcatcagctcaggagttgggtgtcgtga

SEQ ID NO: 2721 - DNA, 40 bp, Artificial Sequence
  Description of Artificial Sequence: Synthetic primer
tcaaagaaccaatcccgtgccccaccgtgcccccgtgctc

SEQ ID NO: 2722 - DNA, 40 bp, Artificial Sequence
  Description of Artificial Sequence: Synthetic primer
acccttggaagtatttttatccttacatttatttattttt

SEQ ID NO: 2723 - DNA, 40 bp, Artificial Sequence
  Description of Artificial Sequence: Synthetic primer
taagaaaaatcagtgaaagttttacatacggctatacgac

SEQ ID NO: 2724 - DNA, 40 bp, Artificial Sequence
  Description of Artificial Sequence: Synthetic primer
aatggattcatcttctctaataccgtggcaaccagaacac

SEQ ID NO: 2725 - DNA, 40 bp, Artificial Sequence
  Description of Artificial Sequence: Synthetic primer
ctcttttgtgaaagtctacaattaaaacaatcttacatag

SEQ ID NO: 2726 - DNA, 40 bp, Artificial Sequence
  Description of Artificial Sequence: Synthetic primer
cactttaagttctagggtaaatactttatagtcttttaac

SEQ ID NO: 2727 - DNA, 40 bp, Artificial Sequence
  Description of Artificial Sequence: Synthetic primer
acaataaatttaaactttttatgtatgtgtactgaaccac

SEQ ID NO: 2728 - DNA, 40 bp, Artificial Sequence
  Description of Artificial Sequence: Synthetic primer
aagaccagaaatacatagctgctgaaactctagaaaattg

SEQ ID NO: 2729 - DNA, 40 bp, Artificial Sequence
  Description of Artificial Sequence: Synthetic primer
taacttgcattctttaaaattacaacataataaactgtgc

SEQ ID NO: 2730 - DNA, 40 bp, Artificial Sequence
  Description of Artificial Sequence: Synthetic primer
taaaacactacgcatgtctcacaagacaaccaaggacaag

SEQ ID NO: 2731 - DNA, 40 bp, Artificial Sequence
  Description of Artificial Sequence: Synthetic primer
cccagtgcatatgaaattaattcaaggaaatccatttttc

SEQ ID NO: 2732 - DNA, 40 bp, Artificial Sequence
  Description of Artificial Sequence: Synthetic primer
tcttagaagcagttctcaaagagcttagttttattttctt

SEQ ID NO: 2733 - DNA, 40 bp, Artificial Sequence
  Description of Artificial Sequence: Synthetic primer
gtcatatgtgatacatactcctcagtaattaaccatcttc

SEQ ID NO: 2734 - DNA, 40 bp, Artificial Sequence
  Description of Artificial Sequence: Synthetic primer
ccctctgggccaggctgaccatcatggtgctctcctgcac

SEQ ID NO: 2735 - DNA, 40 bp, Artificial Sequence
  Description of Artificial Sequence: Synthetic primer
cggcggcgctgggcagggcgggcagggacagagcaagcac

SEQ ID NO: 2736 - DNA, 40 bp, Artificial Sequence
  Description of Artificial Sequence: Synthetic primer
taaaaaagtaaaatatatagaaatattcaattaccttcag

SEQ ID NO: 2737 - DNA, 40 bp, Artificial Sequence
  Description of Artificial Sequence: Synthetic primer
gacaaatgtactttttggtaattgttgcattctttttcag

SEQ ID NO: 2738 - DNA, 40 bp, Artificial Sequence
  Description of Artificial Sequence: Synthetic primer
gagtaaatgtcttatgaggagacacacaagggccacacac

SEQ ID NO: 2739 - DNA, 40 bp, Artificial Sequence
  Description of Artificial Sequence: Synthetic primer
gcttttgcatgttctctaaatactttaacacattcttttc

SEQ ID NO: 2740 - DNA, 40 bp, Artificial Sequence
  Description of Artificial Sequence: Synthetic primer
cgcatgccaccacggccatcctgtctctcagtccaaacac

SEQ ID NO: 2741 - DNA, 40 bp, Artificial Sequence
  Description of Artificial Sequence: Synthetic primer
gaccctgcaaactttgcactaacgagcatgcttgcttctg

SEQ ID NO: 2742 - DNA, 40 bp, Artificial Sequence
  Description of Artificial Sequence: Synthetic primer
caaagatagcacactaattttccctggggaagagggtttt

SEQ ID NO: 2743 - DNA, 40 bp, Artificial Sequence
  Description of Artificial Sequence: Synthetic primer
aaaatccctaaaaatgtgttccttaactttttaactgatg

SEQ ID NO: 2744 - DNA, 40 bp, Artificial Sequence
  Description of Artificial Sequence: Synthetic primer
attgacagttcatacaataaagatattgtaatgagaacac

SEQ ID NO: 2745 - DNA, 40 bp, Artificial Sequence
  Description of Artificial Sequence: Synthetic primer
tttttcgaactgttgcagtatgcagattttgttgttaccc

SEQ ID NO: 2746 - DNA, 40 bp, Artificial Sequence
  Description of Artificial Sequence: Synthetic primer
gggtggctttagcttctcatgcctccactatctcaccaag

SEQ ID NO: 2747 - DNA, 40 bp, Artificial Sequence
  Description of Artificial Sequence: Synthetic primer
cccctaggagcttggaaagccaagccaccaaggattctct

SEQ ID NO: 2748 - DNA, 40 bp, Artificial Sequence
  Description of Artificial Sequence: Synthetic primer
tttttaaatgttattttgtatgtaaaggattatgacaacc

SEQ ID NO: 2749 - DNA, 40 bp, Artificial Sequence
  Description of Artificial Sequence: Synthetic primer
aactttggataattttcaaataaataactgaccttttctc

SEQ ID NO: 2750 - DNA, 40 bp, Artificial Sequence
  Description of Artificial Sequence: Synthetic primer
aggctgcctctgctgcaagcgggtggggcctgaggtgtcc

SEQ ID NO: 2751 - DNA, 40 bp, Artificial Sequence
  Description of Artificial Sequence: Synthetic primer
caggttacacagcccgaacctctcgggtgcatgcgcaggc

SEQ ID NO: 2752 - DNA, 40 bp, Artificial Sequence
  Description of Artificial Sequence: Synthetic primer
tggggaccagacaaggtccccatcccaggagcttacttcc

SEQ ID NO: 2753 - DNA, 40 bp, Artificial Sequence
  Description of Artificial Sequence: Synthetic primer
aatggggagtttagagcttggctttatgcttattttgtcc

SEQ ID NO: 2754 - DNA, 40 bp, Artificial Sequence
  Description of Artificial Sequence: Synthetic primer
ggggacaggaaactcagggtctcaggcctcacggggactc

SEQ ID NO: 2755 - DNA, 40 bp, Artificial Sequence
  Description of Artificial Sequence: Synthetic primer
gctgggcaggcgtgagggtgacccataactctctctgtcc

SEQ ID NO: 2756 - DNA, 40 bp, Artificial Sequence
  Description of Artificial Sequence: Synthetic primer
ccctccttcaggaacaatcctgataagataacataggaag

SEQ ID NO: 2757 - DNA, 40 bp, Artificial Sequence
  Description of Artificial Sequence: Synthetic primer
tggtgtttctaagcctctgtctcaaagaaaacagtgcatc

SEQ ID NO: 2758 - DNA, 40 bp, Artificial Sequence
  Description of Artificial Sequence: Synthetic primer
gcctggcctagcctatgtcatcttgagactccatctctgc

SEQ ID NO: 2759 - DNA, 40 bp, Artificial Sequence
  Description of Artificial Sequence: Synthetic primer
acagaagtggccttggtgagatagtggaggcatgagaagc

SEQ ID NO: 2760 - DNA, 40 bp, Artificial Sequence
  Description of Artificial Sequence: Synthetic primer
cctatggagaaaatccttgatggatacagattagtacacc

SEQ ID NO: 2761 - DNA, 40 bp, Artificial Sequence
  Description of Artificial Sequence: Synthetic primer
attaataacaacttgctaagtatttttccttttatcttac

SEQ ID NO: 2762 - DNA, 40 bp, Artificial Sequence
  Description of Artificial Sequence: Synthetic primer
cagaaccaggcaagctacctgtggagtctttgtttgtatc

SEQ ID NO: 2763 - DNA, 40 bp, Artificial Sequence
  Description of Artificial Sequence: Synthetic primer
gcattgagggagctgttggtataactatggctatttcctg

SEQ ID NO: 2764 - DNA, 40 bp, Artificial Sequence
  Description of Artificial Sequence: Synthetic primer
aagggcagaccaaactcctgcagctgctgaccaccaaatc

SEQ ID NO: 2765 - DNA, 40 bp, Artificial Sequence
  Description of Artificial Sequence: Synthetic primer
tcccacccagtcagttttcccctgcaggaagcttgcattc

SEQ ID NO: 2766 - DNA, 40 bp, Artificial Sequence
  Description of Artificial Sequence: Synthetic primer
gggaccaggaggcccatggagggaggtcagggactaggag

SEQ ID NO: 2767 - DNA, 40 bp, Artificial Sequence
  Description of Artificial Sequence: Synthetic primer
ctctctccagctgcatggacgcctcgctggccatcaaacc

SEQ ID NO: 2768 - DNA, 40 bp, Artificial Sequence
  Description of Artificial Sequence: Synthetic primer
caaggccatgttagtaaatttgcatctgtttgtccacatt

SEQ ID NO: 2769 - DNA, 40 bp, Artificial Sequence
  Description of Artificial Sequence: Synthetic primer
tgccaggcacttttcttccccgcttactctaatcacttac

SEQ ID NO: 2770 - DNA, 40 bp, Artificial Sequence
  Description of Artificial Sequence: Synthetic primer
gtccttcaaaaactaaataataaagtcatcagtcctattc

SEQ ID NO: 2771 - DNA, 40 bp, Artificial Sequence
  Description of Artificial Sequence: Synthetic primer
agtagtgaattgtcttctctcacccagttttgtgacattc

SEQ ID NO: 2772 - DNA, 40 bp, Artificial Sequence
  Description of Artificial Sequence: Synthetic primer
atccagaagcctcttgccctcctcaatcccagctccagac

SEQ ID NO: 2773 - DNA, 40 bp, Artificial Sequence
  Description of Artificial Sequence: Synthetic primer
ggagctgctgctggggtggaagctctcacactctttctcc

SEQ ID NO: 2774 - DNA, 40 bp, Artificial Sequence
  Description of Artificial Sequence: Synthetic primer
gggagggacgtagcagtgactgggctctcctccacaggac

SEQ ID NO: 2775 - DNA, 40 bp, Artificial Sequence
  Description of Artificial Sequence: Synthetic primer
gggtctgggtagaagatggaagaaaggctatggtgagcac

SEQ ID NO: 2776 - DNA, 40 bp, Artificial Sequence
  Description of Artificial Sequence: Synthetic primer
ggttcggagaccgatgccgggtgaggggctctgaccttag

SEQ ID NO: 2777 - DNA, 40 bp, Artificial Sequence
  Description of Artificial Sequence: Synthetic primer
agggaggggctgagcagggcaaggaagtggatccctgatc

SEQ ID NO: 2778 - DNA, 40 bp, Artificial Sequence
  Description of Artificial Sequence: Synthetic primer
ctgcggggtcgtcgccggcctcgaacttccagagtcttac

SEQ ID NO: 2779 - DNA, 40 bp, Artificial Sequence
  Description of Artificial Sequence: Synthetic primer
gctttgcccgcagccacccagggcgcccaggaccaccccg

SEQ ID NO: 2780 - DNA, 40 bp, Artificial Sequence
  Description of Artificial Sequence: Synthetic primer
gccgaagggctgctccgcgtccacgcgcgcctccgggact

SEQ ID NO: 2781 - DNA, 40 bp, Artificial Sequence
  Description of Artificial Sequence: Synthetic primer
ggccgcaggcgcgcgtggcggcacgaagggcaggtaggcg

SEQ ID NO: 2782 - DNA, 40 bp, Artificial Sequence
  Description of Artificial Sequence: Synthetic primer
tgagtgtatcatttggttaattgatatatttttggtcaac

SEQ ID NO: 2783 - DNA, 40 bp, Artificial Sequence
  Description of Artificial Sequence: Synthetic primer
gtcagaaacatagaaagcgtatcaatttactttcttaaag

SEQ ID NO: 2784 - DNA, 40 bp, Artificial Sequence
  Description of Artificial Sequence: Synthetic primer
ccgctgccgaggtccccgcctcgccagccccgccccctac

SEQ ID NO: 2785 - DNA, 40 bp, Artificial Sequence
  Description of Artificial Sequence: Synthetic primer
aggggcggggtcttagccagctccctccctccccaccatg

SEQ ID NO: 2786 - DNA, 40 bp, Artificial Sequence
  Description of Artificial Sequence: Synthetic primer
gtctagttcctctttactttcagccaccccgtatgaacag

SEQ ID NO: 2787 - DNA, 40 bp, Artificial Sequence
  Description of Artificial Sequence: Synthetic primer
gaataaagaatgagcaagttgagtggtatttataaaggtc

SEQ ID NO: 2788 - DNA, 40 bp, Artificial Sequence
  Description of Artificial Sequence: Synthetic primer
ttccctgctcaagactctgggaacgcacagccaagagtgg

SEQ ID NO: 2789 - DNA, 40 bp, Artificial Sequence
  Description of Artificial Sequence: Synthetic primer
cattgggaaggattctcgttgagaggtctctctctctctg

SEQ ID NO: 2790 - DNA, 40 bp, Artificial Sequence
  Description of Artificial Sequence: Synthetic primer
ctggtatattatgctgaagaaatgtattgttttccatctg

SEQ ID NO: 2791 - DNA, 40 bp, Artificial Sequence
  Description of Artificial Sequence: Synthetic primer
aaggtaatacggaacacttgaaatcagtttgtttaccatc

SEQ ID NO: 2792 - DNA, 40 bp, Artificial Sequence
  Description of Artificial Sequence: Synthetic primer
ttttaagtaaaggcaaggtgatatttaagatgtataagaa

SEQ ID NO: 2793 - DNA, 40 bp, Artificial Sequence
  Description of Artificial Sequence: Synthetic primer
tctatataactatatacacaatgaataatttaaagaccag

SEQ ID NO: 2794 - DNA, 40 bp, Artificial Sequence
  Description of Artificial Sequence: Synthetic primer
atctaataaagagaaagaatttgtctccacatccacacac

SEQ ID NO: 2795 - DNA, 40 bp, Artificial Sequence
  Description of Artificial Sequence: Synthetic primer
atttaaaatttagtaacttgtttttaaactggtatttttg

SEQ ID NO: 2796 - DNA, 40 bp, Artificial Sequence
  Description of Artificial Sequence: Synthetic primer
gccacccctccgggtgtccatctgtggcagtcttggttcc

SEQ ID NO: 2797 - DNA, 40 bp, Artificial Sequence
  Description of Artificial Sequence: Synthetic primer
caggcagagtcggcaggtaccagctgcagacccccagccc

SEQ ID NO: 2798 - DNA, 40 bp, Artificial Sequence
  Description of Artificial Sequence: Synthetic primer
gtggccctgctggctcatgtgcagccgccttctcctccac

SEQ ID NO: 2799 - DNA, 40 bp, Artificial Sequence
  Description of Artificial Sequence: Synthetic primer
ggcccggcccagtcttgggctcaagggtactggcatctcg

SEQ ID NO: 2800 - DNA, 40 bp, Artificial Sequence
  Description of Artificial Sequence: Synthetic primer
ccaccagcaccatcaccacttaccttgttgtcttccttcc

SEQ ID NO: 2801 - DNA, 40 bp, Artificial Sequence
  Description of Artificial Sequence: Synthetic primer
attttagcaaaaagcacaactggcaaactgatgtcaagcg

SEQ ID NO: 2802 - DNA, 40 bp, Artificial Sequence
  Description of Artificial Sequence: Synthetic primer
gttccatggcccaattatgctaattcaatttctaagagtg

SEQ ID NO: 2803 - DNA, 40 bp, Artificial Sequence
  Description of Artificial Sequence: Synthetic primer
gtatctatctggagattactctattctttctctctctctc

SEQ ID NO: 2804 - DNA, 40 bp, Artificial Sequence
  Description of Artificial Sequence: Synthetic primer
cccacggacaaacagactgggatggatgcatagacagacg

SEQ ID NO: 2805 - DNA, 40 bp, Artificial Sequence
  Description of Artificial Sequence: Synthetic primer
cactccccaccctcatttttatccctccctccccaaaccc

SEQ ID NO: 2806 - DNA, 40 bp, Artificial Sequence
  Description of Artificial Sequence: Synthetic primer
ggcgcgcgggcaccgcggctcctccgagacctcgggtgcc

SEQ ID NO: 2807 - DNA, 40 bp, Artificial Sequence
  Description of Artificial Sequence: Synthetic primer
ccgccccgcgccgctcgcgcccttcttccgctgcgcttgc

SEQ ID NO: 2808 - DNA, 40 bp, Artificial Sequence
  Description of Artificial Sequence: Synthetic primer
cactaatacgcctagaaaccctgggctgtactatgtgaag

SEQ ID NO: 2809 - DNA, 40 bp, Artificial Sequence
  Description of Artificial Sequence: Synthetic primer
tcagatggggtgactttgtgtctgctttgcttcttttcag

SEQ ID NO: 2810 - DNA, 40 bp, Artificial Sequence
  Description of Artificial Sequence: Synthetic primer
cttgcagtaagagattgttctatgaaaggtatgacattat

SEQ ID NO: 2811 - DNA, 40 bp, Artificial Sequence
  Description of Artificial Sequence: Synthetic primer
tctttaaatggttttagaggattttggttatctctagcac

SEQ ID NO: 2812 - DNA, 40 bp, Artificial Sequence
  Description of Artificial Sequence: Synthetic primer
agggtaatacagtcactctcgtttattcagacagaagtgc

SEQ ID NO: 2813 - DNA, 40 bp, Artificial Sequence
  Description of Artificial Sequence: Synthetic primer
tggaatgccttctttgctctttatgataatatttttctgc

SEQ ID NO: 2814 - DNA, 40 bp, Artificial Sequence
  Description of Artificial Sequence: Synthetic primer
ctaatacacgaacttcctagttagcactcaggccatacac

SEQ ID NO: 2815 - DNA, 40 bp, Artificial Sequence
  Description of Artificial Sequence: Synthetic primer
aatcatgagaagattgaaatatgtctatagaaacccactg

SEQ ID NO: 2816 - DNA, 40 bp, Artificial Sequence
  Description of Artificial Sequence: Synthetic primer
tcataagcttttctgattgaccaagatgtatactgaagac

SEQ ID NO: 2817 - DNA, 40 bp, Artificial Sequence
  Description of Artificial Sequence: Synthetic primer
tgaagccatagaagaaatccctcaccaccaccccctcagc

SEQ ID NO: 2818 - DNA, 40 bp, Artificial Sequence
  Description of Artificial Sequence: Synthetic primer
tttggagttaatcttaacctgtgctttgcctcctgttctg

SEQ ID NO: 2819 - DNA, 40 bp, Artificial Sequence
  Description of Artificial Sequence: Synthetic primer
aaatgaatagtgggaagtataattaattgaaacacaaaaa

SEQ ID NO: 2820 - DNA, 40 bp, Artificial Sequence
  Description of Artificial Sequence: Synthetic primer
tttctttattcttatatgacatcctcgatattgtaaatgg

SEQ ID NO: 2821 - DNA, 40 bp, Artificial Sequence
  Description of Artificial Sequence: Synthetic primer
gatgttgctaggtgttcatgaatgaaggaatataaaactg

SEQ ID NO: 2822 - DNA, 40 bp, Artificial Sequence
  Description of Artificial Sequence: Synthetic primer
cttagaggttagtttcttttccaccctatctccgctatgg

SEQ ID NO: 2823 - DNA, 40 bp, Artificial Sequence
  Description of Artificial Sequence: Synthetic primer
gtagagtctaatctgcattcattttctcataacttctttc

SEQ ID NO: 2824 - DNA, 40 bp, Artificial Sequence
  Description of Artificial Sequence: Synthetic primer
tcaggcaaggcaagcccctctgcagccctgggaaatgtgc

SEQ ID NO: 2825 - DNA, 40 bp, Artificial Sequence
  Description of Artificial Sequence: Synthetic primer
cctctgtctacccagtctttgatgggcatggtctggatgg

SEQ ID NO: 2826 - DNA, 40 bp, Artificial Sequence
  Description of Artificial Sequence: Synthetic primer
caccaattaaaagatggcccttagtgttcatttaattttg

SEQ ID NO: 2827 - DNA, 40 bp, Artificial Sequence
  Description of Artificial Sequence: Synthetic primer
tgaaatataaaactttgttctgtaaatctactttggtctc

SEQ ID NO: 2828 - DNA, 40 bp, Artificial Sequence
  Description of Artificial Sequence: Synthetic primer
cacgggaccccggctcccctgaccaccctctccattaccg

SEQ ID NO: 2829 - DNA, 40 bp, Artificial Sequence
  Description of Artificial Sequence: Synthetic primer
ggggccacggctgggaggcacagggcctggggcgaccact

SEQ ID NO: 2830 - DNA, 40 bp, Artificial Sequence
  Description of Artificial Sequence: Synthetic primer
gtccaggagagaaagaaagcgcggcggtgtcggtggcggc

SEQ ID NO: 2831 - DNA, 40 bp, Artificial Sequence
  Description of Artificial Sequence: Synthetic primer
ggacagcgcatcgccgcccgcccgggtcgccgcgccacag

SEQ ID NO: 2832 - DNA, 40 bp, Artificial Sequence
  Description of Artificial Sequence: Synthetic primer
tatttggggtggtggagaaagatgataatctaaggacaag

SEQ ID NO: 2833 - DNA, 40 bp, Artificial Sequence
  Description of Artificial Sequence: Synthetic primer
gtcgcttagttctggagtgcagcagtgatgtgatttcgtg

SEQ ID NO: 2834 - DNA, 40 bp, Artificial Sequence
  Description of Artificial Sequence: Synthetic primer
aaagtgctgggattataggtgtgagccaccacaagagtat

SEQ ID NO: 2835 - DNA, 40 bp, Artificial Sequence
  Description of Artificial Sequence: Synthetic primer
aatgtttttgttaacatttaaacttgctttcttatatccc

SEQ ID NO: 2836 - DNA, 40 bp, Artificial Sequence
  Description of Artificial Sequence: Synthetic primer
aaagcacattaacttgggaatttttcactttcacaagcag

SEQ ID NO: 2837 - DNA, 40 bp, Artificial Sequence
  Description of Artificial Sequence: Synthetic primer
ttttttttcccctagcaacttctgctgatcgcttttatcg

SEQ ID NO: 2838 - DNA, 40 bp, Artificial Sequence
  Description of Artificial Sequence: Synthetic primer
gaaaaaggaggagttggctggaaccaggattccccctaac

SEQ ID NO: 2839 - DNA, 40 bp, Artificial Sequence
  Description of Artificial Sequence: Synthetic primer
ttgtgagggctcagggtgcaaagtgttgggtaattagaag

SEQ ID NO: 2840 - DNA, 40 bp, Artificial Sequence
  Description of Artificial Sequence: Synthetic primer
tgtggggctgtggccgggcactccccacccgccccagcag

SEQ ID NO: 2841 - DNA, 40 bp, Artificial Sequence
  Description of Artificial Sequence: Synthetic primer
acagcccgcccacggagaaatagccctgagcccccagctg

SEQ ID NO: 2842 - DNA, 40 bp, Artificial Sequence
  Description of Artificial Sequence: Synthetic primer
tgggcaaagaaagccccgctgtgtgcccagagaagaaatg

SEQ ID NO: 2843 - DNA, 40 bp, Artificial Sequence
  Description of Artificial Sequence: Synthetic primer
gctatcgtttccgtggaaattttgagccatttcgaatcac

SEQ ID NO: 2844 - DNA, 40 bp, Artificial Sequence
  Description of Artificial Sequence: Synthetic primer
ggcccttcggcgccagtgcgccgggtgctgcacgcagcgc

SEQ ID NO: 2845 - DNA, 40 bp, Artificial Sequence
  Description of Artificial Sequence: Synthetic primer
tactgtcgccccatccctgcgcgcccagcctgccaagcag

SEQ ID NO: 2846 - DNA, 40 bp, Artificial Sequence
  Description of Artificial Sequence: Synthetic primer
agttatatattcaaataacacccaatgaagaatgtaattg

SEQ ID NO: 2847 - DNA, 40 bp, Artificial Sequence
  Description of Artificial Sequence: Synthetic primer
tataagcctgtaatttgggacatctgttaaaacaataaaa

SEQ ID NO: 2848 - DNA, 40 bp, Artificial Sequence
  Description of Artificial Sequence: Synthetic primer
taacgacacaacacaaaatagccgtataaaaataagtagg

SEQ ID NO: 2849 - DNA, 40 bp, Artificial Sequence
  Description of Artificial Sequence: Synthetic primer
cactccaggataatacacatcacagtaaataacactctgg

SEQ ID NO: 2850 - DNA, 40 bp, Artificial Sequence
  Description of Artificial Sequence: Synthetic primer
tcagcatgcccaggatatgtgggagggctgaagcctagag

SEQ ID NO: 2851 - DNA, 40 bp, Artificial Sequence
  Description of Artificial Sequence: Synthetic primer
ttgagagtgccatgttcttataaagctgtttgtccaactc

SEQ ID NO: 2852 - DNA, 40 bp, Artificial Sequence
  Description of Artificial Sequence: Synthetic primer
gccagaaccaagtagaaaggtggggatgcagagaggagag

SEQ ID NO: 2853 - DNA, 40 bp, Artificial Sequence
  Description of Artificial Sequence: Synthetic primer
gagctggggagtgttggaggcagggctgggatcactgtag

SEQ ID NO: 2854 - DNA, 40 bp, Artificial Sequence
  Description of Artificial Sequence: Synthetic primer
agtcaatgttggtatgagatttacatttgtttccttcttc

SEQ ID NO: 2855 - DNA, 40 bp, Artificial Sequence
  Description of Artificial Sequence: Synthetic primer
cacgttatctacaacatttaggatgaatgacgacaggttg

SEQ ID NO: 2856 - DNA, 40 bp, Artificial Sequence
  Description of Artificial Sequence: Synthetic primer
tgttgagaaaaggaaattgagagaaaacacaattagtaag

SEQ ID NO: 2857 - DNA, 40 bp, Artificial Sequence
  Description of Artificial Sequence: Synthetic primer
tatgtatatggatatttcataggcattgtgtttcttttag

SEQ ID NO: 2858 - DNA, 40 bp, Artificial Sequence
  Description of Artificial Sequence: Synthetic primer
tgttctgtgccaacaatatgcaagttaacactgattgacc

SEQ ID NO: 2859 - DNA, 40 bp, Artificial Sequence
  Description of Artificial Sequence: Synthetic primer
cgaatgtggacagtccaatcaccagctccttttttcctcc

SEQ ID NO: 2860 - DNA, 40 bp, Artificial Sequence
  Description of Artificial Sequence: Synthetic primer
cgagccttcatacccaggaagctttttgaactgggaagtg

SEQ ID NO: 2861 - DNA, 40 bp, Artificial Sequence
  Description of Artificial Sequence: Synthetic primer
cccattcagcagtcggtgggagacgactatgggagaagcg

SEQ ID NO: 2862 - DNA, 40 bp, Artificial Sequence
  Description of Artificial Sequence: Synthetic primer
gggcaaggtgccaggtgcaagacccaccatgagcagatag

SEQ ID NO: 2863 - DNA, 40 bp, Artificial Sequence
  Description of Artificial Sequence: Synthetic primer
gggtgccctgaggccattccctcctcctgccccctcctat

SEQ ID NO: 2864 - DNA, 40 bp, Artificial Sequence
  Description of Artificial Sequence: Synthetic primer
aagatatgcatatcagtatcactgtctatcactattcctc

SEQ ID NO: 2865 - DNA, 40 bp, Artificial Sequence
  Description of Artificial Sequence: Synthetic primer
gttatataataatgtgtgtgcacttgcatggctcttctag

SEQ ID NO: 2866 - DNA, 40 bp, Artificial Sequence
  Description of Artificial Sequence: Synthetic primer
tacggagccccaaacttattttgagaggccgccaccgtgt

SEQ ID NO: 2867 - DNA, 40 bp, Artificial Sequence
  Description of Artificial Sequence: Synthetic primer
ttccccggcggccctgctgcccgcaggcagagtccgccgc

SEQ ID NO: 2868 - DNA, 40 bp, Artificial Sequence
  Description of Artificial Sequence: Synthetic primer
cccagtggggtccatgcaggccttgaggccttcggcccag

SEQ ID NO: 2869 - DNA, 40 bp, Artificial Sequence
  Description of Artificial Sequence: Synthetic primer
gcggtccgcctcactcccgccgcgaacgcgcctcccctct

SEQ ID NO: 2870 - DNA, 40 bp, Artificial Sequence
  Description of Artificial Sequence: Synthetic primer
ccccagccgatcctgactccggggcaaccccagaagatcc

SEQ ID NO: 2871 - DNA, 40 bp, Artificial Sequence
  Description of Artificial Sequence: Synthetic primer
cgagatccaggctgccgatccgcctactccgcggcctact

SEQ ID NO: 2872 - DNA, 40 bp, Artificial Sequence
  Description of Artificial Sequence: Synthetic primer
caggcctggtctggcaccactgaaggctccgggctccatg

SEQ ID NO: 2873 - DNA, 40 bp, Artificial Sequence
  Description of Artificial Sequence: Synthetic primer
aaggaggtctgacagcctcttgggatgggctgccgatggc

SEQ ID NO: 2874 - DNA, 40 bp, Artificial Sequence
  Description of Artificial Sequence: Synthetic primer
ccccggagtcgggatcggctgcgaatgccccggagtcagg

SEQ ID NO: 2875 - DNA, 40 bp, Artificial Sequence
  Description of Artificial Sequence: Synthetic primer
gtacacgcggcggccgcggctgctctcggacttgccccgc

SEQ ID NO: 2876 - DNA, 40 bp, Artificial Sequence
  Description of Artificial Sequence: Synthetic primer
gcccagcctggctgccctgatggccccacctgcctctcac

SEQ ID NO: 2877 - DNA, 40 bp, Artificial Sequence
  Description of Artificial Sequence: Synthetic primer
aggacagaggtgaacagacagggtgacagcacatgctcag

SEQ ID NO: 2878 - DNA, 40 bp, Artificial Sequence
  Description of Artificial Sequence: Synthetic primer
tcaatttccaattataaacggatgcagagaaggtttttac

SEQ ID NO: 2879 - DNA, 40 bp, Artificial Sequence
  Description of Artificial Sequence: Synthetic primer
agcagaggcagttggcctagctaaagcctttcgccttttc

SEQ ID NO: 2880 - DNA, 40 bp, Artificial Sequence
  Description of Artificial Sequence: Synthetic primer
aagtaaattattttctgtttatttctttttaatttttgta

SEQ ID NO: 2881 - DNA, 40 bp, Artificial Sequence
  Description of Artificial Sequence: Synthetic primer
caaaggttgctcctaacgtggttttcttattgagccaagc

SEQ ID NO: 2882 - DNA, 40 bp, Artificial Sequence
  Description of Artificial Sequence: Synthetic primer
tttggaagctctcagggtacaaattctcagatcatcagtc

SEQ ID NO: 2883 - DNA, 40 bp, Artificial Sequence
  Description of Artificial Sequence: Synthetic primer
accctggctctgaccattctgttctctctggcaggtcatg

SEQ ID NO: 2884 - DNA, 40 bp, Artificial Sequence
  Description of Artificial Sequence: Synthetic primer
tctggacctccccaagaccaggctggtgtgatgggattcc

SEQ ID NO: 2885 - DNA, 40 bp, Artificial Sequence
  Description of Artificial Sequence: Synthetic primer
gttgtcctggctgccaacgttctcatgaaggctgttcttc

SEQ ID NO: 2886 - DNA, 40 bp, Artificial Sequence
  Description of Artificial Sequence: Synthetic primer
atgccctggtgaaaagcgagctgtcagatggggagcagag

SEQ ID NO: 2887 - DNA, 40 bp, Artificial Sequence
  Description of Artificial Sequence: Synthetic primer
taagccataacaggccctgtgttttccacattgtctcccg

SEQ ID NO: 2888 - DNA, 40 bp, Artificial Sequence
  Description of Artificial Sequence: Synthetic primer
aaaaaaaaatccttctatactttagattgactcatatttt

SEQ ID NO: 2889 - DNA, 40 bp, Artificial Sequence
  Description of Artificial Sequence: Synthetic primer
atacattcttgaatgttaaaatctgaaagttgtccctttc

SEQ ID NO: 2890 - DNA, 40 bp, Artificial Sequence
  Description of Artificial Sequence: Synthetic primer
aggaaacagatacagaggtcaagaggtgatgtttattaag

SEQ ID NO: 2891 - DNA, 40 bp, Artificial Sequence
  Description of Artificial Sequence: Synthetic primer
ttaataattttccaatataattagaggggaaaaaaaatac

SEQ ID NO: 2892 - DNA, 40 bp, Artificial Sequence
  Description of Artificial Sequence: Synthetic primer
cctgtggaatttagattctcctcttctcttcctgccttcc

SEQ ID NO: 2893 - DNA, 40 bp, Artificial Sequence
  Description of Artificial Sequence: Synthetic primer
ctctccccggacatctcccaaaagagctcccccatctccc

SEQ ID NO: 2894 - DNA, 40 bp, Artificial Sequence
  Description of Artificial Sequence: Synthetic primer
taaattactataaaacattccttcatctgtaaaacatttc

SEQ ID NO: 2895 - DNA, 40 bp, Artificial Sequence
  Description of Artificial Sequence: Synthetic primer
cttacacaaagtcatttattcctgtacttgcatttttcag

SEQ ID NO: 2896 - DNA, 40 bp, Artificial Sequence
  Description of Artificial Sequence: Synthetic primer
ttactttatatgctttaattcttgcacacatatttcatgg

SEQ ID NO: 2897 - DNA, 40 bp, Artificial Sequence
  Description of Artificial Sequence: Synthetic primer
atttgaaatgaaagtttaaatttgtatccttgggattttg

SEQ ID NO: 2898 - DNA, 40 bp, Artificial Sequence
  Description of Artificial Sequence: Synthetic primer
aggctggaggctggggaccagttgccagtggcagggtggg

SEQ ID NO: 2899 - DNA, 40 bp, Artificial Sequence
  Description of Artificial Sequence: Synthetic primer
cagccctctaatctccccttcttccccacccccgcctcat

SEQ ID NO: 2900 - DNA, 40 bp, Artificial Sequence
  Description of Artificial Sequence: Synthetic primer
tcctgaatggcaagagatctctgaactccagcttgttgac

SEQ ID NO: 2901 - DNA, 40 bp, Artificial Sequence
  Description of Artificial Sequence: Synthetic primer
aggcagaaggcaggtagacatgtcgatgatgaaaatggac

SEQ ID NO: 2902 - DNA, 40 bp, Artificial Sequence
  Description of Artificial Sequence: Synthetic primer
tgatccccaaatttgcatctgtggcattaaatggtgatac

SEQ ID NO: 2903 - DNA, 40 bp, Artificial Sequence
  Description of Artificial Sequence: Synthetic primer
caggataactttcaacatacaggttgccttactggttacc

SEQ ID NO: 2904 - DNA, 40 bp, Artificial Sequence
  Description of Artificial Sequence: Synthetic primer
ggctagggaggtggggcgaggcgaggtttgctggggtgag

SEQ ID NO: 2905 - DNA, 40 bp, Artificial Sequence
  Description of Artificial Sequence: Synthetic primer
gcgcgccccgcagtcgcccgcccgccgcgccgccgctcac

SEQ ID NO: 2906 - DNA, 40 bp, Artificial Sequence
  Description of Artificial Sequence: Synthetic primer
agtctcaactaattaaggtttaattcatgctttgcacaaa

SEQ ID NO: 2907 - DNA, 40 bp, Artificial Sequence
  Description of Artificial Sequence: Synthetic primer
tcactctattcatagagaaaggtgaaaaataagagaacac

SEQ ID NO: 2908 - DNA, 40 bp, Artificial Sequence
  Description of Artificial Sequence: Synthetic primer
tttcccaacattttccaagaatactaactcctgtgttttg

SEQ ID NO: 2909 - DNA, 40 bp, Artificial Sequence
  Description of Artificial Sequence: Synthetic primer
cctgtatatgtggatgtctttgcatctcctgatcctatcc

SEQ ID NO: 2910 - DNA, 40 bp, Artificial Sequence
  Description of Artificial Sequence: Synthetic primer
tagacctaaagcattagtcataataatttcaactttcttg

SEQ ID NO: 2911 - DNA, 40 bp, Artificial Sequence
  Description of Artificial Sequence: Synthetic primer
gagatgaaggcatttggaaagagaacacagaaaatatagc

SEQ ID NO: 2912 - DNA, 40 bp, Artificial Sequence
  Description of Artificial Sequence: Synthetic primer
ccccttccctttcagaaaatggttacatttcttaatactt

SEQ ID NO: 2913 - DNA, 40 bp, Artificial Sequence
  Description of Artificial Sequence: Synthetic primer
tggagagaaaagaaatctaaaagacactcaatattacata

SEQ ID NO: 2914 - DNA, 40 bp, Artificial Sequence
  Description of Artificial Sequence: Synthetic primer
gaagagtaactcttgaaattactgtaaagaataaacacag

SEQ ID NO: 2915 - DNA, 40 bp, Artificial Sequence
  Description of Artificial Sequence: Synthetic primer
agcatcattttcatttgttttcaaatgtgtttcttctttg

SEQ ID NO: 2916 - DNA, 40 bp, Artificial Sequence
  Description of Artificial Sequence: Synthetic primer
tctgtccttatttttgtttttaacatacaaggtcatttgc

SEQ ID NO: 2917 - DNA, 40 bp, Artificial Sequence
  Description of Artificial Sequence: Synthetic primer
caaaatattttctgtcatcacactcaaagatgcttctcac

SEQ ID NO: 2918 - DNA, 40 bp, Artificial Sequence
  Description of Artificial Sequence: Synthetic primer
ggtggttgtggaaatgagaaacagaaatagcccatatacc

SEQ ID NO: 2919 - DNA, 40 bp, Artificial Sequence
  Description of Artificial Sequence: Synthetic primer
tttccaaaagacattccatctgaagtctgatttccatttc

SEQ ID NO: 2920 - DNA, 40 bp, Artificial Sequence
  Description of Artificial Sequence: Synthetic primer
tctgtagactttggtaatctgtccctatgtgtcatctatc

SEQ ID NO: 2921 - DNA, 40 bp, Artificial Sequence
  Description of Artificial Sequence: Synthetic primer
agccggccgggtgctgcaggcaggaggatgcacctctgac

SEQ ID NO: 2922 - DNA, 40 bp, Artificial Sequence
  Description of Artificial Sequence: Synthetic primer
ggggccaggccctgctccctagctcaggctgcctcatttg

SEQ ID NO: 2923 - DNA, 40 bp, Artificial Sequence
  Description of Artificial Sequence: Synthetic primer
ggagaatgtgggaggaggagggtccagggtcagggtgttc

SEQ ID NO: 2924 - DNA, 40 bp, Artificial Sequence
  Description of Artificial Sequence: Synthetic primer
ggggtgagggcaggacctctgatcttggccacacctccac

SEQ ID NO: 2925 - DNA, 40 bp, Artificial Sequence
  Description of Artificial Sequence: Synthetic primer
gagtgcactgtatgcggtgtgtgtgcctcatgggctgtac

SEQ ID NO: 2926 - DNA, 40 bp, Artificial Sequence
  Description of Artificial Sequence: Synthetic primer
ttaaaagatcagcatatgtaggtgacatgaaagttcacag

SEQ ID NO: 2927 - DNA, 40 bp, Artificial Sequence
  Description of Artificial Sequence: Synthetic primer
taaaatggggacattgttgacctttgtggtcagtgacatc

SEQ ID NO: 2928 - DNA, 40 bp, Artificial Sequence
  Description of Artificial Sequence: Synthetic primer
ggcagggaaggcggggctctgaccagctctttccccatgc

SEQ ID NO: 2929 - DNA, 40 bp, Artificial Sequence
  Description of Artificial Sequence: Synthetic primer
cactggtttcctcattctccaccttggggacaccctcatg

SEQ ID NO: 2930 - DNA, 40 bp, Artificial Sequence
  Description of Artificial Sequence: Synthetic primer
cattttgtatctgcatatatcaaactataacataatttct

SEQ ID NO: 2931 - DNA, 40 bp, Artificial Sequence
  Description of Artificial Sequence: Synthetic primer
ttgattgtttctaatagagcagccagaactctttattttg

SEQ ID NO: 2932 - DNA, 40 bp, Artificial Sequence
  Description of Artificial Sequence: Synthetic primer
ctgaggccgggctggtgttccaggacttcgagaagcagag

SEQ ID NO: 2933 - DNA, 40 bp, Artificial Sequence
  Description of Artificial Sequence: Synthetic primer
accaggccctcggtgatctggatgtggcatgtccttctcg

SEQ ID NO: 2934 - DNA, 40 bp, Artificial Sequence
  Description of Artificial Sequence: Synthetic primer
ttcacaatttggatcagtcagagacaggattccaggcaac

SEQ ID NO: 2935 - DNA, 40 bp, Artificial Sequence
  Description of Artificial Sequence: Synthetic primer
gatatcccgtttctttgtggggaagcagatgttgaccagc

SEQ ID NO: 2936 - DNA, 40 bp, Artificial Sequence
  Description of Artificial Sequence: Synthetic primer
ccaattttaataaaatatataaatgtcccaaagctaaatc

SEQ ID NO: 2937 - DNA, 40 bp, Artificial Sequence
  Description of Artificial Sequence: Synthetic primer
catttgacttacttaaacacatctgcacttattttaccag

SEQ ID NO: 2938 - DNA, 40 bp, Artificial Sequence
  Description of Artificial Sequence: Synthetic primer
aggaatattattttgttgatttaatatttcttatttttcc

SEQ ID NO: 2939 - DNA, 40 bp, Artificial Sequence
  Description of Artificial Sequence: Synthetic primer
ctttcctaactagagttcacaacacaggataaaggattac

SEQ ID NO: 2940 - DNA, 40 bp, Artificial Sequence
  Description of Artificial Sequence: Synthetic primer
atgggcaggtgtgcctgccctcctgtgtggccggtaccta

SEQ ID NO: 2941 - DNA, 40 bp, Artificial Sequence
  Description of Artificial Sequence: Synthetic primer
ggggtggatgctgaagggccctgtcttgcctgaccacacc

SEQ ID NO: 2942 - DNA, 40 bp, Artificial Sequence
  Description of Artificial Sequence: Synthetic primer
ccgtggcgagggcaggacatcgagaggagaagttacagtg

SEQ ID NO: 2943 - DNA, 40 bp, Artificial Sequence
  Description of Artificial Sequence: Synthetic primer
gtctcttagaggtctcatgtcctgtgcttgtccattttgc

SEQ ID NO: 2944 - DNA, 40 bp, Artificial Sequence
  Description of Artificial Sequence: Synthetic primer
gtgttagaactggcccagatgactaaaaacgtttttaatc

SEQ ID NO: 2945 - DNA, 40 bp, Artificial Sequence
  Description of Artificial Sequence: Synthetic primer
gggctccatgtccatgggcgccgtgggttagttccacctg

SEQ ID NO: 2946 - DNA, 40 bp, Artificial Sequence
  Description of Artificial Sequence: Synthetic primer
gttattacgtattgtgcatagttatcattcttttcatttg

SEQ ID NO: 2947 - DNA, 40 bp, Artificial Sequence
  Description of Artificial Sequence: Synthetic primer
gaatgttaccctttcaaaagaaaaaaaaccacttcccttc

SEQ ID NO: 2948 - DNA, 40 bp, Artificial Sequence
  Description of Artificial Sequence: Synthetic primer
tcaggcatcaattcaagaacacagagaaactgctcctagc

SEQ ID NO: 2949 - DNA, 40 bp, Artificial Sequence
  Description of Artificial Sequence: Synthetic primer
cttcattgctgttttctgtcttctatatttaccattcaag

SEQ ID NO: 2950 - DNA, 40 bp, Artificial Sequence
  Description of Artificial Sequence: Synthetic primer
tgaacaaaatacatacttaactagtaacctgaaaaattac

SEQ ID NO: 2951 - DNA, 40 bp, Artificial Sequence
  Description of Artificial Sequence: Synthetic primer
attagcacttcggatatacttgtttatttaatatcttttt

SEQ ID NO: 2952 - DNA, 40 bp, Artificial Sequence
  Description of Artificial Sequence: Synthetic primer
gctggtagtcctccaagctgaaaaagttctgttaaaaagc

SEQ ID NO: 2953 - DNA, 40 bp, Artificial Sequence
  Description of Artificial Sequence: Synthetic primer
ctcttactttggcagataggttgtgttctgctagagtatg

SEQ ID NO: 2954 - DNA, 40 bp, Artificial Sequence
  Description of Artificial Sequence: Synthetic primer
gggctgcctgggcctccatgctgtcatctataccccttgc

SEQ ID NO: 2955 - DNA, 40 bp, Artificial Sequence
  Description of Artificial Sequence: Synthetic primer
gcctctgggcctgatggctgggcttagggctgctcaaggg

SEQ ID NO: 2956 - DNA, 40 bp, Artificial Sequence
  Description of Artificial Sequence: Synthetic primer
tgaagcaccacttccacagtttctttgtattctcttgctc

SEQ ID NO: 2957 - DNA, 40 bp, Artificial Sequence
  Description of Artificial Sequence: Synthetic primer
gatgcccagatttccctccgatctgggcattttatgattc

SEQ ID NO: 2958 - DNA, 40 bp, Artificial Sequence
  Description of Artificial Sequence: Synthetic primer
gtgtctcaaggggcagctggtgagtggtgcctcctccttg

SEQ ID NO: 2959 - DNA, 40 bp, Artificial Sequence
  Description of Artificial Sequence: Synthetic primer
agacaggctagcagacacacgtcatcaccatccacaccac

SEQ ID NO: 2960 - DNA, 40 bp, Artificial Sequence
  Description of Artificial Sequence: Synthetic primer
tggagtgagtttggatggggtggccaggtctgagaaggtc

SEQ ID NO: 2961 - DNA, 40 bp, Artificial Sequence
  Description of Artificial Sequence: Synthetic primer
acagagggctcagcccagctggaggcagggcctggctggg

SEQ ID NO: 2962 - DNA, 40 bp, Artificial Sequence
  Description of Artificial Sequence: Synthetic primer
agcttcccctcttccctgtcctccagtgcccctgggcccc

SEQ ID NO: 2963 - DNA, 40 bp, Artificial Sequence
  Description of Artificial Sequence: Synthetic primer
ctgatatgttctcctccctcctccccaagccactccactc

SEQ ID NO: 2964 - DNA, 40 bp, Artificial Sequence
  Description of Artificial Sequence: Synthetic primer
aggatatcaaattttacaacattttactaacagaaggaag

SEQ ID NO: 2965 - DNA, 40 bp, Artificial Sequence
  Description of Artificial Sequence: Synthetic primer
tccctctgcttaaccattgaagcccgtcttgatcccaatg

SEQ ID NO: 2966 - DNA, 40 bp, Artificial Sequence
  Description of Artificial Sequence: Synthetic primer
tgtagagtcccctttaactcatgccatgcttctacttgag

SEQ ID NO: 2967 - DNA, 40 bp, Artificial Sequence
  Description of Artificial Sequence: Synthetic primer
tgccttctccactcccagcgtgggccagaggcagctcgtg

SEQ ID NO: 2968 - DNA, 40 bp, Artificial Sequence
  Description of Artificial Sequence: Synthetic primer
ccaggtggccccaccaggttccccattgctcaggtttccg

SEQ ID NO: 2969 - DNA, 40 bp, Artificial Sequence
  Description of Artificial Sequence: Synthetic primer
atgtgatttccatttgcaaaactccttttttttgtttttg

SEQ ID NO: 2970 - DNA, 40 bp, Artificial Sequence
  Description of Artificial Sequence: Synthetic primer
gactttctgaatgccaactcataaaatctcaataaaaatc

SEQ ID NO: 2971 - DNA, 40 bp, Artificial Sequence
  Description of Artificial Sequence: Synthetic primer
agacgggcgggcagcccacaccctcacactcgcccctctg

SEQ ID NO: 2972 - DNA, 40 bp, Artificial Sequence
  Description of Artificial Sequence: Synthetic primer
ggtagcctggggcaggcagcctccctgacccctggcactc

SEQ ID NO: 2973 - DNA, 40 bp, Artificial Sequence
  Description of Artificial Sequence: Synthetic primer
aaagtggtttaagaggagtgacctcctgcaacagaagatg

SEQ ID NO: 2974 - DNA, 40 bp, Artificial Sequence
  Description of Artificial Sequence: Synthetic primer
ttttttcctcatatataaaaaccttccaacttgtttctgt

SEQ ID NO: 2975 - DNA, 40 bp, Artificial Sequence
  Description of Artificial Sequence: Synthetic primer
tgagtgggattctaaatacccacactccctcctacacttg

SEQ ID NO: 2976 - DNA, 40 bp, Artificial Sequence
  Description of Artificial Sequence: Synthetic primer
ttcagaacccttgtctcattctctacctttgatttgttac

SEQ ID NO: 2977 - DNA, 40 bp, Artificial Sequence
  Description of Artificial Sequence: Synthetic primer
accagtgatggtacatttagcccacacatcccacaatgac

SEQ ID NO: 2978 - DNA, 40 bp, Artificial Sequence
  Description of Artificial Sequence: Synthetic primer
tccagaatattaaaggaaacttctctctaaagaacctcag

SEQ ID NO: 2979 - DNA, 40 bp, Artificial Sequence
  Description of Artificial Sequence: Synthetic primer
ggcagagcggttgccacgcctcccagacttactgcccaag

SEQ ID NO: 2980 - DNA, 40 bp, Artificial Sequence
  Description of Artificial Sequence: Synthetic primer
tttcactgacaggcaataccgtccaaggccagtgcaggag

SEQ ID NO: 2981 - DNA, 40 bp, Artificial Sequence
  Description of Artificial Sequence: Synthetic primer
gtcccaggcgcccctggaattgatgcagtgtccgcccgtg

SEQ ID NO: 2982 - DNA, 40 bp, Artificial Sequence
  Description of Artificial Sequence: Synthetic primer
aaaggaacctgaaggggcatgggacggggaggccagcaag

SEQ ID NO: 2983 - DNA, 40 bp, Artificial Sequence
  Description of Artificial Sequence: Synthetic primer
tacagtatttttgcagctcaagcccaggaaaaagccagag

SEQ ID NO: 2984 - DNA, 40 bp, Artificial Sequence
  Description of Artificial Sequence: Synthetic primer
tttaaatatatttagtttttgcattttcctctacatttgc

SEQ ID NO: 2985 - DNA, 40 bp, Artificial Sequence
  Description of Artificial Sequence: Synthetic primer
aaattagtgttgcgattctcttcctgcctgaaaggaggtc

SEQ ID NO: 2986 - DNA, 40 bp, Artificial Sequence
  Description of Artificial Sequence: Synthetic primer
gtagcctctggtctgcagaagccctaacgcagggcacttg

SEQ ID NO: 2987 - DNA, 40 bp, Artificial Sequence
  Description of Artificial Sequence: Synthetic primer
ttcttggctgagcttcaagacagagacagacagacaagag

SEQ ID NO: 2988 - DNA, 40 bp, Artificial Sequence
  Description of Artificial Sequence: Synthetic primer
ctcctctctgtggtgcacctgccccacgcccccatctcct

SEQ ID NO: 2989 - DNA, 40 bp, Artificial Sequence
  Description of Artificial Sequence: Synthetic primer
ccgcagggcagcggtgccgctctccattgcagccccaccc

SEQ ID NO: 2990 - DNA, 40 bp, Artificial Sequence
  Description of Artificial Sequence: Synthetic primer
gagggccaaggagctgggtggggtgccaagcctctgtccc

SEQ ID NO: 2991 - DNA, 40 bp, Artificial Sequence
  Description of Artificial Sequence: Synthetic primer
tttttttttatttccaggagagcaaataaagtaatgcctt

SEQ ID NO: 2992 - DNA, 40 bp, Artificial Sequence
  Description of Artificial Sequence: Synthetic primer
ttaatttctgattctgacctctatgtaaactgagctgatg

SEQ ID NO: 2993 - DNA, 40 bp, Artificial Sequence
  Description of Artificial Sequence: Synthetic primer
tatattctagtagaacagtacagaactttgtaaataagaa

SEQ ID NO: 2994 - DNA, 40 bp, Artificial Sequence
  Description of Artificial Sequence: Synthetic primer
agcttatcctatatagttattctaaaaacaggtttttaac

SEQ ID NO: 2995 - DNA, 40 bp, Artificial Sequence
  Description of Artificial Sequence: Synthetic primer
tcgttgctgttaacctttaatgtgagttacagttctacac

SEQ ID NO: 2996 - DNA, 40 bp, Artificial Sequence
  Description of Artificial Sequence: Synthetic primer
gcaaaaaaaagttgcatgctcttatactgtaatgattatc

SEQ ID NO: 2997 - DNA, 40 bp, Artificial Sequence
  Description of Artificial Sequence: Synthetic primer
tgcttcctgctacaggatccctgctgggcaccaacagctc

SEQ ID NO: 2998 - DNA, 40 bp, Artificial Sequence
  Description of Artificial Sequence: Synthetic primer
tcttccttgtccctccttcccctaaaggtgccacacaaac

SEQ ID NO: 2999 - DNA, 40 bp, Artificial Sequence
  Description of Artificial Sequence: Synthetic primer
ctcccacaggaagcaataatttaagaaaaatcatttagag

SEQ ID NO: 3000 - DNA, 40 bp, Artificial Sequence
  Description of Artificial Sequence: Synthetic primer
ttccataaagaatagatcaacatgtaggtataatgcctgc

SEQ ID NO: 3001 - DNA, 40 bp, Artificial Sequence
  Description of Artificial Sequence: Synthetic primer
ctgttcagggccactgatgagtcgatgctctcttccttcc

SEQ ID NO: 3002 - DNA, 40 bp, Artificial Sequence
  Description of Artificial Sequence: Synthetic primer
actgactttagagggaactccacaggaaagatatccaaag

SEQ ID NO: 3003 - DNA, 40 bp, Artificial Sequence
  Description of Artificial Sequence: Synthetic primer
tgccccaatcacgcagggcttcctccagacacactagaac

SEQ ID NO: 3004 - DNA, 40 bp, Artificial Sequence
  Description of Artificial Sequence: Synthetic primer
agtctctacaggctctttttaaaatcagtttttctgtttc

SEQ ID NO: 3005 - DNA, 40 bp, Artificial Sequence
  Description of Artificial Sequence: Synthetic primer
ttccacctggcaagtgacatcctgtctgtcttggtgtttc

SEQ ID NO: 3006 - DNA, 40 bp, Artificial Sequence
  Description of Artificial Sequence: Synthetic primer
tcctgccccattcatgggcccctggccctcttggcttccc

SEQ ID NO: 3007 - DNA, 40 bp, Artificial Sequence
  Description of Artificial Sequence: Synthetic primer
tcagccctcccattcccttagctttcatattcatttgttg

SEQ ID NO: 3008 - DNA, 40 bp, Artificial Sequence
  Description of Artificial Sequence: Synthetic primer
tcatgctatgaaaccaactaaaaatattcattgaacttac

SEQ ID NO: 3009 - DNA, 40 bp, Artificial Sequence
  Description of Artificial Sequence: Synthetic primer
atgaaagtgagtttttctcacttctgtggctcccccttgg

SEQ ID NO: 3010 - DNA, 40 bp, Artificial Sequence
  Description of Artificial Sequence: Synthetic primer
agataaagcatctctgtttactgacactcttttgattatg

SEQ ID NO: 3011 - DNA, 40 bp, Artificial Sequence
  Description of Artificial Sequence: Synthetic primer
aggcagtttttgacagaatgagttactatgaggaataata

SEQ ID NO: 3012 - DNA, 40 bp, Artificial Sequence
  Description of Artificial Sequence: Synthetic primer
aatttgtttcaataaattctagttttgtgtatgaaaaaag

SEQ ID NO: 3013 - DNA, 40 bp, Artificial Sequence
  Description of Artificial Sequence: Synthetic primer
tagaaatttccttaaactttccaacaaaacaaaataacag

SEQ ID NO: 3014 - DNA, 40 bp, Artificial Sequence
  Description of Artificial Sequence: Synthetic primer
ttttcaaaaggagtgaaaagagccttatgcatctcttttc

SEQ ID NO: 3015 - DNA, 40 bp, Artificial Sequence
  Description of Artificial Sequence: Synthetic primer
ctgaggaggcgtctggagtttttgggtgttaatgattctg

SEQ ID NO: 3016 - DNA, 40 bp, Artificial Sequence
  Description of Artificial Sequence: Synthetic primer
ctcaaaaaatccccgtgctcaaaaaatccccaggaaggag

SEQ ID NO: 3017 - DNA, 40 bp, Artificial Sequence
  Description of Artificial Sequence: Synthetic primer
tggttttatgcagcagatgcaaggtattctgtaaaggttc

SEQ ID NO: 3018 - DNA, 40 bp, Artificial Sequence
  Description of Artificial Sequence: Synthetic primer
ttctgagctgtgtgctagaggtaactcatgataatggaat

SEQ ID NO: 3019 - DNA, 40 bp, Artificial Sequence
  Description of Artificial Sequence: Synthetic primer
acacttccccgccgctgccaggacccgcttctctgaaagg

SEQ ID NO: 3020 - DNA, 40 bp, Artificial Sequence
  Description of Artificial Sequence: Synthetic primer
aaaaaaataaattaaaaggcaagtggacttcggtgcttac

SEQ ID NO: 3021 - DNA, 40 bp, Artificial Sequence
  Description of Artificial Sequence: Synthetic primer
atccacatcgctttagagtacagactcattcggggactgc

SEQ ID NO: 3022 - DNA, 40 bp, Artificial Sequence
  Description of Artificial Sequence: Synthetic primer
cccattagaatcaccactgtctactcttgcatgtcatttg

SEQ ID NO: 3023 - DNA, 40 bp, Artificial Sequence
  Description of Artificial Sequence: Synthetic primer
cactgcgcctgaccaacttttcccagtttctcaatgaagc

SEQ ID NO: 3024 - DNA, 40 bp, Artificial Sequence
  Description of Artificial Sequence: Synthetic primer
tttaactgtagacttggaatctactgatatccctgttttt

SEQ ID NO: 3025 - DNA, 40 bp, Artificial Sequence
  Description of Artificial Sequence: Synthetic primer
ctggcccgggtgctcacgctcgactctctttcttcttttc

SEQ ID NO: 3026 - DNA, 40 bp, Artificial Sequence
  Description of Artificial Sequence: Synthetic primer
cccattcacttctagaccttcgggaccaacggtcagttcc

SEQ ID NO: 3027 - DNA, 40 bp, Artificial Sequence
  Description of Artificial Sequence: Synthetic primer
gcgcgctccctcccgacgcgcgggccgcagcggccaagcc

SEQ ID NO: 3028 - DNA, 40 bp, Artificial Sequence
  Description of Artificial Sequence: Synthetic primer
ggccgcccctgccccgccccgccgccgccgctcaccttcg

SEQ ID NO: 3029 - DNA, 40 bp, Artificial Sequence
  Description of Artificial Sequence: Synthetic primer
aggaaaacatcagctggttaaagataccctatgaatacag

SEQ ID NO: 3030 - DNA, 40 bp, Artificial Sequence
  Description of Artificial Sequence: Synthetic primer
ctgaagagtgttgcctcatacctttatttctcttaattca

SEQ ID NO: 3031 - DNA, 40 bp, Artificial Sequence
  Description of Artificial Sequence: Synthetic primer
ctcaatatgatcagaaacattatccatctatcctattagc

SEQ ID NO: 3032 - DNA, 40 bp, Artificial Sequence
  Description of Artificial Sequence: Synthetic primer
ctgaaagggaaagaaagaaaaccctgtggggactaacttg

SEQ ID NO: 3033 - DNA, 40 bp, Artificial Sequence
  Description of Artificial Sequence: Synthetic primer
gccaaagcaagaattatgagtcttaaaccaaatatactaa

SEQ ID NO: 3034 - DNA, 40 bp, Artificial Sequence
  Description of Artificial Sequence: Synthetic primer
ttgaatatatcaatgaaagaaaaaaatctactttttcttg

SEQ ID NO: 3035 - DNA, 40 bp, Artificial Sequence
  Description of Artificial Sequence: Synthetic primer
ggaaaaattaggaagtctacaatgttgttcttcaaagctg

SEQ ID NO: 3036 - DNA, 40 bp, Artificial Sequence
  Description of Artificial Sequence: Synthetic primer
attaagatgatccttagctaaatgaaagttcgaaacactc

SEQ ID NO: 3037 - DNA, 40 bp, Artificial Sequence
  Description of Artificial Sequence: Synthetic primer
gcttgctcctttctgattaaatatttttccccctcctaaa

SEQ ID NO: 3038 - DNA, 40 bp, Artificial Sequence
  Description of Artificial Sequence: Synthetic primer
cactgattgttgagaatttgtttaaagctagctcatctgt

SEQ ID NO: 3039 - DNA, 40 bp, Artificial Sequence
  Description of Artificial Sequence: Synthetic primer
gggctctgctggagcaggcagcagagtggacgcacagtaa

SEQ ID NO: 3040 - DNA, 40 bp, Artificial Sequence
  Description of Artificial Sequence: Synthetic primer
ggcttcaggccttgacaccacccttgttgcccacctgctc

SEQ ID NO: 3041 - DNA, 40 bp, Artificial Sequence
  Description of Artificial Sequence: Synthetic primer
tcatatttgatattttggcatcattttacacaatctcttc

SEQ ID NO: 3042 - DNA, 40 bp, Artificial Sequence
  Description of Artificial Sequence: Synthetic primer
gaactagaaaagcttgtacctaagtgaggctcacatggac

SEQ ID NO: 3043 - DNA, 40 bp, Artificial Sequence
  Description of Artificial Sequence: Synthetic primer
attctgctcaaacccctcctccccacctcctctccaaatc

SEQ ID NO: 3044 - DNA, 40 bp, Artificial Sequence
  Description of Artificial Sequence: Synthetic primer
gaggccttgttctctccctctgtcccagcctcacattcag

SEQ ID NO: 3045 - DNA, 40 bp, Artificial Sequence
  Description of Artificial Sequence: Synthetic primer
ccccgccgccgcctcaccccgcgccgccccgcaggcctca

SEQ ID NO: 3046 - DNA, 40 bp, Artificial Sequence
  Description of Artificial Sequence: Synthetic primer
cgggcactcaccgctccctgcgctccctcggcatgatggg

SEQ ID NO: 3047 - DNA, 40 bp, Artificial Sequence
  Description of Artificial Sequence: Synthetic primer
ggggctgatgaaagatgagaaataataaatggaagaaaaa

SEQ ID NO: 3048 - DNA, 40 bp, Artificial Sequence
  Description of Artificial Sequence: Synthetic primer
catagacaatacaagaataaagttgacgagtaatcacagc

SEQ ID NO: 3049 - DNA, 40 bp, Artificial Sequence
  Description of Artificial Sequence: Synthetic primer
tcttttaccatagatattcttatctttaactgcacatttc

SEQ ID NO: 3050 - DNA, 40 bp, Artificial Sequence
  Description of Artificial Sequence: Synthetic primer
attttgaagcattagttttaactacacagttgcttcactg

SEQ ID NO: 3051 - DNA, 40 bp, Artificial Sequence
  Description of Artificial Sequence: Synthetic primer
agtccccgtaagccaaatctgtataaaaattaataaaacg

SEQ ID NO: 3052 - DNA, 40 bp, Artificial Sequence
  Description of Artificial Sequence: Synthetic primer
aagtgatagaaacataccattttattactcctatgaacag

SEQ ID NO: 3053 - DNA, 40 bp, Artificial Sequence
  Description of Artificial Sequence: Synthetic primer
tcaaatgctgcccagttactcatagagaagacacagactc

SEQ ID NO: 3054 - DNA, 40 bp, Artificial Sequence
  Description of Artificial Sequence: Synthetic primer
aagaagagaaagagcagacctctgactgctgtgacttggg

SEQ ID NO: 3055 - DNA, 40 bp, Artificial Sequence
  Description of Artificial Sequence: Synthetic primer
tagaagtgggttggaaataaatattgttttatttataatg

SEQ ID NO: 3056 - DNA, 40 bp, Artificial Sequence
  Description of Artificial Sequence: Synthetic primer
tgcttgtaattacctgaatctatgcaaccacaaaaagttc

SEQ ID NO: 3057 - DNA, 40 bp, Artificial Sequence
  Description of Artificial Sequence: Synthetic primer
cctgtcctgagccctgcctccctgccccgagccctcccta

SEQ ID NO: 3058 - DNA, 40 bp, Artificial Sequence
  Description of Artificial Sequence: Synthetic primer
tgactggcagaggagcagctccaggaccactctgttttcc

SEQ ID NO: 3059 - DNA, 40 bp, Artificial Sequence
  Description of Artificial Sequence: Synthetic primer
tcaaatcttttttttggtttgttttttctttaaaaggagc

SEQ ID NO: 3060 - DNA, 40 bp, Artificial Sequence
  Description of Artificial Sequence: Synthetic primer
taaggcaacttcttagagttttggcaaaagtgaagactgg

SEQ ID NO: 3061 - DNA, 40 bp, Artificial Sequence
  Description of Artificial Sequence: Synthetic primer
ggaggaagtagggtcagcaagtgctcagccccctcctcag

SEQ ID NO: 3062 - DNA, 40 bp, Artificial Sequence
  Description of Artificial Sequence: Synthetic primer
gccaagagcccagagggtctgggacccaggggtgttcagg

SEQ ID NO: 3063 - DNA, 40 bp, Artificial Sequence
  Description of Artificial Sequence: Synthetic primer
tagtagcatgggacgcctgccccacctcccgctggcctga

SEQ ID NO: 3064 - DNA, 40 bp, Artificial Sequence
  Description of Artificial Sequence: Synthetic primer
ccatttttggctaattgacaactctttctcccactctttc

SEQ ID NO: 3065 - DNA, 40 bp, Artificial Sequence
  Description of Artificial Sequence: Synthetic primer
gccccaggccctgctgtgaccccagagcatgtcccccacc

SEQ ID NO: 3066 - DNA, 40 bp, Artificial Sequence
  Description of Artificial Sequence: Synthetic primer
cagaggggcatctcgcagcatctcctggcccttcaggtgc

SEQ ID NO: 3067 - DNA, 40 bp, Artificial Sequence
  Description of Artificial Sequence: Synthetic primer
agcgtgaggggcaggtacaacggtggggtggggcagactc

SEQ ID NO: 3068 - DNA, 40 bp, Artificial Sequence
  Description of Artificial Sequence: Synthetic primer
ccctcccctcaacatgggatcttgtgatctgcccgttccc

SEQ ID NO: 3069 - DNA, 40 bp, Artificial Sequence
  Description of Artificial Sequence: Synthetic primer
gcagggcctgcctggagtcatagcagcctgatgccccaac

SEQ ID NO: 3070 - DNA, 40 bp, Artificial Sequence
  Description of Artificial Sequence: Synthetic primer
aggagatccctgtggaaagtgggtgttaggcagagcatcc

SEQ ID NO: 3071 - DNA, 40 bp, Artificial Sequence
  Description of Artificial Sequence: Synthetic primer
aaaaatggtagtaggtatttatggaatactttttcttttc

SEQ ID NO: 3072 - DNA, 40 bp, Artificial Sequence
  Description of Artificial Sequence: Synthetic primer
atttagggaattaataaagggttaaaaatataataacgac

SEQ ID NO: 3073 - DNA, 40 bp, Artificial Sequence
  Description of Artificial Sequence: Synthetic primer
agccctctgcccgccctgccgggcctgaacccccaagtgc

SEQ ID NO: 3074 - DNA, 40 bp, Artificial Sequence
  Description of Artificial Sequence: Synthetic primer
agccttcttctcttactaacaccaccttccctgtcttggc

SEQ ID NO: 3075 - DNA, 40 bp, Artificial Sequence
  Description of Artificial Sequence: Synthetic primer
tggtcacagtgccttttggggaagagacagatgtgggaag

SEQ ID NO: 3076 - DNA, 40 bp, Artificial Sequence
  Description of Artificial Sequence: Synthetic primer
cccgggtcttctttattgtgcccttgagttaagtttcttg

SEQ ID NO: 3077 - DNA, 40 bp, Artificial Sequence
  Description of Artificial Sequence: Synthetic primer
ggcctcagagggaccccagcctctaccactgcccaccccg

SEQ ID NO: 3078 - DNA, 40 bp, Artificial Sequence
  Description of Artificial Sequence: Synthetic primer
ccttgctcctgacttcagccctgcccggccccctattcgg

SEQ ID NO: 3079 - DNA, 40 bp, Artificial Sequence
  Description of Artificial Sequence: Synthetic primer
cactctgtcctgggtgctggcgtctgagccttcgggacag

SEQ ID NO: 3080 - DNA, 40 bp, Artificial Sequence
  Description of Artificial Sequence: Synthetic primer
gctcttgcccaagtaccccacccaggctgccccccatagc

SEQ ID NO: 3081 - DNA, 40 bp, Artificial Sequence
  Description of Artificial Sequence: Synthetic primer
gtaaagacaacagggacttcagaacagaaaagaagtatag

SEQ ID NO: 3082 - DNA, 40 bp, Artificial Sequence
  Description of Artificial Sequence: Synthetic primer
tcctctactttttctccactctccaaaatgatagtttctc

SEQ ID NO: 3083 - DNA, 40 bp, Artificial Sequence
  Description of Artificial Sequence: Synthetic primer
agaatgacttgctcctgaataaccacatcacatccaatac

SEQ ID NO: 3084 - DNA, 40 bp, Artificial Sequence
  Description of Artificial Sequence: Synthetic primer
acttttattatgtattgattttctgataggtttatttggg

SEQ ID NO: 3085 - DNA, 40 bp, Artificial Sequence
  Description of Artificial Sequence: Synthetic primer
agggttggagaccaaaaccctgatccctgcctctaactgg

SEQ ID NO: 3086 - DNA, 40 bp, Artificial Sequence
  Description of Artificial Sequence: Synthetic primer
tggctgagccccacaccctgcccaggagcccctgcctctc

SEQ ID NO: 3087 - DNA, 40 bp, Artificial Sequence
  Description of Artificial Sequence: Synthetic primer
ccctcacttctcttggtccacaattcatttctccagcttc

SEQ ID NO: 3088 - DNA, 40 bp, Artificial Sequence
  Description of Artificial Sequence: Synthetic primer
tttttttttgaaattatagtttccttgtttttcccgtccg

SEQ ID NO: 3089 - DNA, 40 bp, Artificial Sequence
  Description of Artificial Sequence: Synthetic primer
agccctcccaagactggggctaccgtctgaccctgcaagc

SEQ ID NO: 3090 - DNA, 40 bp, Artificial Sequence
  Description of Artificial Sequence: Synthetic primer
cccggggcagggtctcaccttgacagccaccagcatcttg

SEQ ID NO: 3091 - DNA, 40 bp, Artificial Sequence
  Description of Artificial Sequence: Synthetic primer
ggccccttctcccatgttttcttcctcatcagagctcaag

SEQ ID NO: 3092 - DNA, 40 bp, Artificial Sequence
  Description of Artificial Sequence: Synthetic primer
agaacctaagagtctttctgagtattcagattctcattag

SEQ ID NO: 3093 - DNA, 40 bp, Artificial Sequence
  Description of Artificial Sequence: Synthetic primer
cctgccttggacaggtgcattcggtgcccgagccccatcc

SEQ ID NO: 3094 - DNA, 40 bp, Artificial Sequence
  Description of Artificial Sequence: Synthetic primer
tcacgtaattttgtactttttcttcctattggtctttgtt

SEQ ID NO: 3095 - DNA, 40 bp, Artificial Sequence
  Description of Artificial Sequence: Synthetic primer
aaaaaatgcaatagaaaggaggtgagattcaaaattcgtg

SEQ ID NO: 3096 - DNA, 40 bp, Artificial Sequence
  Description of Artificial Sequence: Synthetic primer
gaactaaagcttaaatttatccatggttttcttcatttgc

SEQ ID NO: 3097 - DNA, 40 bp, Artificial Sequence
  Description of Artificial Sequence: Synthetic primer
ttgtactattcccactaatgcctccctaggttaagtaagc

SEQ ID NO: 3098 - DNA, 40 bp, Artificial Sequence
  Description of Artificial Sequence: Synthetic primer
actcttttgaaatgacttttcaacttgaatgttaaattac

SEQ ID NO: 3099 - DNA, 40 bp, Artificial Sequence
  Description of Artificial Sequence: Synthetic primer
ttatttaaaatataatgtattgcaggtaaagcaatgaaaa

SEQ ID NO: 3100 - DNA, 40 bp, Artificial Sequence
  Description of Artificial Sequence: Synthetic primer
cccggctcccaggcgaggccccggcggcgcgaggaggccg

SEQ ID NO: 3101 - DNA, 40 bp, Artificial Sequence
  Description of Artificial Sequence: Synthetic primer
ccaccgccgccgcggttgatgtggttgggccggggctgag

SEQ ID NO: 3102 - DNA, 40 bp, Artificial Sequence
  Description of Artificial Sequence: Synthetic primer
ctatcccacagcacagcatggggactggggaggggctgag

SEQ ID NO: 3103 - DNA, 40 bp, Artificial Sequence
  Description of Artificial Sequence: Synthetic primer
gccaatggaacttccgcctgacagtttgtccctttctctc

SEQ ID NO: 3104 - DNA, 40 bp, Artificial Sequence
  Description of Artificial Sequence: Synthetic primer
ctttcatataattactgatttttaaatattgagaatatac

SEQ ID NO: 3105 - DNA, 40 bp, Artificial Sequence
  Description of Artificial Sequence: Synthetic primer
ggaagaatttctgattgcattttttatatatactcttaaa

SEQ ID NO: 3106 - DNA, 40 bp, Artificial Sequence
  Description of Artificial Sequence: Synthetic primer
ccttgtgggtcagggcctgaccgtgtctctctctatttcc

SEQ ID NO: 3107 - DNA, 40 bp, Artificial Sequence
  Description of Artificial Sequence: Synthetic primer
accaacgccttagggctagcttgatacttccacaagaaac

SEQ ID NO: 3108 - DNA, 40 bp, Artificial Sequence
  Description of Artificial Sequence: Synthetic primer
ttatttttcatatatacatttctcattttatttgtttctg

SEQ ID NO: 3109 - DNA, 40 bp, Artificial Sequence
  Description of Artificial Sequence: Synthetic primer
cctcctatgctttcttccttataactggtaacccatagcc

SEQ ID NO: 3110 - DNA, 40 bp, Artificial Sequence
  Description of Artificial Sequence: Synthetic primer
ggccttctctttttcaaatgagtcctatttccaaattaac

SEQ ID NO: 3111 - DNA, 40 bp, Artificial Sequence
  Description of Artificial Sequence: Synthetic primer
tgcctcctgccaaattctgctgtactccttttagcacaaa

SEQ ID NO: 3112 - DNA, 40 bp, Artificial Sequence
  Description of Artificial Sequence: Synthetic primer
ggaactgtctgcatcatcaaagctgcttctgtcatctgtg

SEQ ID NO: 3113 - DNA, 40 bp, Artificial Sequence
  Description of Artificial Sequence: Synthetic primer
ctgccagcagcagcctccctgacgagggcacacagagacc

SEQ ID NO: 3114 - DNA, 40 bp, Artificial Sequence
  Description of Artificial Sequence: Synthetic primer
tgtcatgtccctgctgtggggcagctctggctgggaactg

SEQ ID NO: 3115 - DNA, 40 bp, Artificial Sequence
  Description of Artificial Sequence: Synthetic primer
tgctgcttgcatgggacatgtgtctctgtgtgtgtcctcg

SEQ ID NO: 3116 - DNA, 40 bp, Artificial Sequence
  Description of Artificial Sequence: Synthetic primer
ctccccgctcctgcgcacccgccaggtacccaggcgccag

SEQ ID NO: 3117 - DNA, 40 bp, Artificial Sequence
  Description of Artificial Sequence: Synthetic primer
ggcggacgcgcagcctctcacgcatcgttccccgcaaccc

SEQ ID NO: 3118 - DNA, 40 bp, Artificial Sequence
  Description of Artificial Sequence: Synthetic primer
gtagaaagactttcaggatttgctctgaaaggaatagctc

SEQ ID NO: 3119 - DNA, 40 bp, Artificial Sequence
  Description of Artificial Sequence: Synthetic primer
cttccgttttctaatgggcctcataatttgctacatagtg

SEQ ID NO: 3120 - DNA, 40 bp, Artificial Sequence
  Description of Artificial Sequence: Synthetic primer
aacctctacctcgccttgcttaagcccggagcccctaaag

SEQ ID NO: 3121 - DNA, 40 bp, Artificial Sequence
  Description of Artificial Sequence: Synthetic primer
ggtgggaggtgtcgggcaagtgcaagacgagtgggctctc

SEQ ID NO: 3122 - DNA, 40 bp, Artificial Sequence
  Description of Artificial Sequence: Synthetic primer
tcctcctcctcctcttcttcctctgcagcgtgggctgtgg

SEQ ID NO: 3123 - DNA, 40 bp, Artificial Sequence
  Description of Artificial Sequence: Synthetic primer
ggtgagaggcccaaagctccgctctttgacgttcagttgc

SEQ ID NO: 3124 - DNA, 40 bp, Artificial Sequence
  Description of Artificial Sequence: Synthetic primer
cagattttatgtcccttttaagtaaacacatgacacactc

SEQ ID NO: 3125 - DNA, 40 bp, Artificial Sequence
  Description of Artificial Sequence: Synthetic primer
ttgctcccattcttacagttatttctacttttgtgtattc

SEQ ID NO: 3126 - DNA, 40 bp, Artificial Sequence
  Description of Artificial Sequence: Synthetic primer
ccaacacctcgagggaggtctgggctgacagctccatttc

SEQ ID NO: 3127 - DNA, 40 bp, Artificial Sequence
  Description of Artificial Sequence: Synthetic primer
ggggcttctcacctgaggtcacgctctgtacaacattctc

SEQ ID NO: 3128 - DNA, 40 bp, Artificial Sequence
  Description of Artificial Sequence: Synthetic primer
accgaccgccccagggaggggcatgggcggccagcgtgac

SEQ ID NO: 3129 - DNA, 40 bp, Artificial Sequence
  Description of Artificial Sequence: Synthetic primer
tccccgaaggcaccgccccagagccttacttggtttcatc

SEQ ID NO: 3130 - DNA, 40 bp, Artificial Sequence
  Description of Artificial Sequence: Synthetic primer
tctgtgcatccttctgtaggaatgatcgagattgtgaaag

SEQ ID NO: 3131 - DNA, 40 bp, Artificial Sequence
  Description of Artificial Sequence: Synthetic primer
caacttgtaaggagccattagactgggaaaaagcatgagc

SEQ ID NO: 3132 - DNA, 40 bp, Artificial Sequence
  Description of Artificial Sequence: Synthetic primer
ttgtctgtggtgagatacgaggcataaatttgtttgtatg

SEQ ID NO: 3133 - DNA, 40 bp, Artificial Sequence
  Description of Artificial Sequence: Synthetic primer
ccagccacagagccaccagggccctttttagctacaaaac

SEQ ID NO: 3134 - DNA, 40 bp, Artificial Sequence
  Description of Artificial Sequence: Synthetic primer
aatgctgctcatggtggtgcacgaagggccagggtatgtg

SEQ ID NO: 3135 - DNA, 40 bp, Artificial Sequence
  Description of Artificial Sequence: Synthetic primer
gctgcatgcgcagagggacaggaactgcagctggcctcgg

SEQ ID NO: 3136 - DNA, 40 bp, Artificial Sequence
  Description of Artificial Sequence: Synthetic primer
ggcctcccctgaaacacctggccctcggctgccaggtggg

SEQ ID NO: 3137 - DNA, 40 bp, Artificial Sequence
  Description of Artificial Sequence: Synthetic primer
cctttgcacttagcctgcttcaccgactctttctttctcc

SEQ ID NO: 3138 - DNA, 40 bp, Artificial Sequence
  Description of Artificial Sequence: Synthetic primer
tgtttcatatagagtaaatgttgaccaaagggagaaaatg

SEQ ID NO: 3139 - DNA, 40 bp, Artificial Sequence
  Description of Artificial Sequence: Synthetic primer
gtgcttctccttattttaattaatgtgcttcttcttttag

SEQ ID NO: 3140 - DNA, 40 bp, Artificial Sequence
  Description of Artificial Sequence: Synthetic primer
gcatttccattatttcatggtccatttcttaagaggtttt

SEQ ID NO: 3141 - DNA, 40 bp, Artificial Sequence
  Description of Artificial Sequence: Synthetic primer
ttacattacgaatactgtttattgaatagtctgggcatat

SEQ ID NO: 3142 - DNA, 40 bp, Artificial Sequence
  Description of Artificial Sequence: Synthetic primer
cagcctgtttggatgtggggtactatgtcactatgtccac

SEQ ID NO: 3143 - DNA, 40 bp, Artificial Sequence
  Description of Artificial Sequence: Synthetic primer
aaggcaaagcctgcaggctctcctgtgatgctcctttacc

SEQ ID NO: 3144 - DNA, 40 bp, Artificial Sequence
  Description of Artificial Sequence: Synthetic primer
atgaaatgtaaatttcatggtgctgtgattttatctttac

SEQ ID NO: 3145 - DNA, 40 bp, Artificial Sequence
  Description of Artificial Sequence: Synthetic primer
ttcttaattctaagcatgaatgtactgttgcatatttcac

SEQ ID NO: 3146 - DNA, 40 bp, Artificial Sequence
  Description of Artificial Sequence: Synthetic primer
ggtggggcggcctcctgtggacgggcgtctggggctcagg

SEQ ID NO: 3147 - DNA, 40 bp, Artificial Sequence
  Description of Artificial Sequence: Synthetic primer
ctgcaggctgaggcccagctggccctgtccaggcacctag

SEQ ID NO: 3148 - DNA, 40 bp, Artificial Sequence
  Description of Artificial Sequence: Synthetic primer
tgcccacctggccctaagaagctcacacccagtattaccc

SEQ ID NO: 3149 - DNA, 40 bp, Artificial Sequence
  Description of Artificial Sequence: Synthetic primer
gggaacggtgggtgggctgtcctcaccaagcccccaccct

SEQ ID NO: 3150 - DNA, 40 bp, Artificial Sequence
  Description of Artificial Sequence: Synthetic primer
caccatgtatattcgttattcattgtgtgtggggaatatg

SEQ ID NO: 3151 - DNA, 40 bp, Artificial Sequence
  Description of Artificial Sequence: Synthetic primer
tgttttcagataattgaaaacaatcttaaaattagcatac

SEQ ID NO: 3152 - DNA, 40 bp, Artificial Sequence
  Description of Artificial Sequence: Synthetic primer
agggagatccagctccgtcctgcctgcagcagcacaaccc

SEQ ID NO: 3153 - DNA, 40 bp, Artificial Sequence
  Description of Artificial Sequence: Synthetic primer
ttggccaccacactgtcccaccctgccatgccccacttac

SEQ ID NO: 3154 - DNA, 40 bp, Artificial Sequence
  Description of Artificial Sequence: Synthetic primer
acagactatttaaatagacctagacactcaaattagttac

SEQ ID NO: 3155 - DNA, 40 bp, Artificial Sequence
  Description of Artificial Sequence: Synthetic primer
tataattattttgtaaggaataaaaactatttctgcatcc

SEQ ID NO: 3156 - DNA, 40 bp, Artificial Sequence
  Description of Artificial Sequence: Synthetic primer
taaaaatgtagatcagttatttgagttcattcttgctgag

SEQ ID NO: 3157 - DNA, 40 bp, Artificial Sequence
  Description of Artificial Sequence: Synthetic primer
agtagcaatcttcctgtgatagaacaaattacagacatag

SEQ ID NO: 3158 - DNA, 40 bp, Artificial Sequence
  Description of Artificial Sequence: Synthetic primer
gcccgctcagtgcccggcacctgcgcgccccgagggcggc

SEQ ID NO: 3159 - DNA, 40 bp, Artificial Sequence
  Description of Artificial Sequence: Synthetic primer
gctccgggctgggcgcggggcgatggacctgagcatgaag

SEQ ID NO: 3160 - DNA, 40 bp, Artificial Sequence
  Description of Artificial Sequence: Synthetic primer
tctaggaatccagaaaacaatacctggcttaatctttaac

SEQ ID NO: 3161 - DNA, 40 bp, Artificial Sequence
  Description of Artificial Sequence: Synthetic primer
caaaataacctttttttcctgtttttcttccaaatttccc

SEQ ID NO: 3162 - DNA, 40 bp, Artificial Sequence
  Description of Artificial Sequence: Synthetic primer
tgagcctcctgagacgtgcacagaccacactccacacacc

SEQ ID NO: 3163 - DNA, 40 bp, Artificial Sequence
  Description of Artificial Sequence: Synthetic primer
gtgaagaattcataaaacatgagaataatctttgcaacta

SEQ ID NO: 3164 - DNA, 40 bp, Artificial Sequence
  Description of Artificial Sequence: Synthetic primer
tgttctatctacaatagcatttattactttttctctcttg

SEQ ID NO: 3165 - DNA, 40 bp, Artificial Sequence
  Description of Artificial Sequence: Synthetic primer
acaacatgaaatcccacagacccagcctagctagtatttg

SEQ ID NO: 3166 - DNA, 40 bp, Artificial Sequence
  Description of Artificial Sequence: Synthetic primer
tttaaagggagagaagaccaaagtgctgagttccaagagc

SEQ ID NO: 3167 - DNA, 40 bp, Artificial Sequence
  Description of Artificial Sequence: Synthetic primer
ccagagtttatggatgaggttttgactcctgagtatatgg

SEQ ID NO: 3168 - DNA, 40 bp, Artificial Sequence
  Description of Artificial Sequence: Synthetic primer
cagtgcccgtgcacgttctaacatgttttttgggcttacc

SEQ ID NO: 3169 - DNA, 40 bp, Artificial Sequence
  Description of Artificial Sequence: Synthetic primer
acaaaaatgagccaaagatggataactgccattctgtaag

SEQ ID NO: 3170 - DNA, 40 bp, Artificial Sequence
  Description of Artificial Sequence: Synthetic primer
acccggagtcccactgtccccagccagaatcccagtagac

SEQ ID NO: 3171 - DNA, 40 bp, Artificial Sequence
  Description of Artificial Sequence: Synthetic primer
ttatgttctccaaactcttccaaatggagtgacccaaaaa

SEQ ID NO: 3172 - DNA, 40 bp, Artificial Sequence
  Description of Artificial Sequence: Synthetic primer
cattgattaacttcacaccctcccagcttcctaatcatcc

SEQ ID NO: 3173 - DNA, 40 bp, Artificial Sequence
  Description of Artificial Sequence: Synthetic primer
atgtttccacaactggggacatcacagaccccctctactg

SEQ ID NO: 3174 - DNA, 40 bp, Artificial Sequence
  Description of Artificial Sequence: Synthetic primer
tctctagatgttgtgttatgaacctgtggggccagtttag

SEQ ID NO: 3175 - DNA, 40 bp, Artificial Sequence
  Description of Artificial Sequence: Synthetic primer
tagaaaggcctttatcaccaatcttatcagaagaaacatt

SEQ ID NO: 3176 - DNA, 40 bp, Artificial Sequence
  Description of Artificial Sequence: Synthetic primer
tcttcccagttgagctgctgtagaatggaatgtcttcttc

SEQ ID NO: 3177 - DNA, 40 bp, Artificial Sequence
  Description of Artificial Sequence: Synthetic primer
gtacttgtgtggactctgcggcttgactccaatgagctga

SEQ ID NO: 3178 - DNA, 40 bp, Artificial Sequence
  Description of Artificial Sequence: Synthetic primer
ctttcagaggaggctacagatttttctgtgatggttactc

SEQ ID NO: 3179 - DNA, 40 bp, Artificial Sequence
  Description of Artificial Sequence: Synthetic primer
cccaatactgaagtatttgtctccatcacactgggtgtag

SEQ ID NO: 3180 - DNA, 40 bp, Artificial Sequence
  Description of Artificial Sequence: Synthetic primer
cggtgagatgaagtattaagtgaccccaaatctaacagac

SEQ ID NO: 3181 - DNA, 40 bp, Artificial Sequence
  Description of Artificial Sequence: Synthetic primer
gaaggtgaagcggctgttatgcccgtagtctgagtggagg

SEQ ID NO: 3182 - DNA, 40 bp, Artificial Sequence
  Description of Artificial Sequence: Synthetic primer
atctcccaccattgtgacctgacctccccacttctctttc

SEQ ID NO: 3183 - DNA, 40 bp, Artificial Sequence
  Description of Artificial Sequence: Synthetic primer
ctgactgtgtcaagctagcaccgccctgtggcccgaatgc

SEQ ID NO: 3184 - DNA, 40 bp, Artificial Sequence
  Description of Artificial Sequence: Synthetic primer
aatcttttaaatgtaaaaaggatcaactcgttttcttcca

SEQ ID NO: 3185 - DNA, 40 bp, Artificial Sequence
  Description of Artificial Sequence: Synthetic primer
agtcccctgacacagccctgcaaggaaccaagcccagcac

SEQ ID NO: 3186 - DNA, 40 bp, Artificial Sequence
  Description of Artificial Sequence: Synthetic primer
ctctccaagtgcaaatagacaagaagggtaatttctgtcc

SEQ ID NO: 3187 - DNA, 40 bp, Artificial Sequence
  Description of Artificial Sequence: Synthetic primer
attgtttttaaaaaatatgtctgcattttgcagaaggagc

SEQ ID NO: 3188 - DNA, 40 bp, Artificial Sequence
  Description of Artificial Sequence: Synthetic primer
gaaggttctactacaaaggtcccaatccacctctcaatgc

SEQ ID NO: 3189 - DNA, 40 bp, Artificial Sequence
  Description of Artificial Sequence: Synthetic primer
tgttgggttaaaggggattgaaaagtgagcatttactctg

SEQ ID NO: 3190 - DNA, 40 bp, Artificial Sequence
  Description of Artificial Sequence: Synthetic primer
agaacatcttgtgaaaagacaaagaccactagttccaatc

SEQ ID NO: 3191 - DNA, 40 bp, Artificial Sequence
  Description of Artificial Sequence: Synthetic primer
tagtatagatatttaatcttttggtttcttcttattttag

SEQ ID NO: 3192 - DNA, 40 bp, Artificial Sequence
  Description of Artificial Sequence: Synthetic primer
aagaatttagttctgcatatttgcaggtatagattgtaag

SEQ ID NO: 3193 - DNA, 40 bp, Artificial Sequence
  Description of Artificial Sequence: Synthetic primer
aacattccttatatatacatataaatgtatgtcttccctg

SEQ ID NO: 3194 - DNA, 40 bp, Artificial Sequence
  Description of Artificial Sequence: Synthetic primer
ctctgtttttcgtggttgttacttttctgtgaaacacttg

SEQ ID NO: 3195 - DNA, 40 bp, Artificial Sequence
  Description of Artificial Sequence: Synthetic primer
ttctctgttcaacagagtctgaggaaaggcccccggtggc

SEQ ID NO: 3196 - DNA, 40 bp, Artificial Sequence
  Description of Artificial Sequence: Synthetic primer
tttttaattaatataaacttgttcttaacctttttgaatg

SEQ ID NO: 3197 - DNA, 40 bp, Artificial Sequence
  Description of Artificial Sequence: Synthetic primer
taattttattatagtacttattatgtggtcattgtcttgc

SEQ ID NO: 3198 - DNA, 40 bp, Artificial Sequence
  Description of Artificial Sequence: Synthetic primer
ggtggggcgcccctgagcccgtctgtgccctcccctctgc

SEQ ID NO: 3199 - DNA, 40 bp, Artificial Sequence
  Description of Artificial Sequence: Synthetic primer
tctgtctttgggagctaagggctccatgctgtgctcactg

SEQ ID NO: 3200 - DNA, 40 bp, Artificial Sequence
  Description of Artificial Sequence: Synthetic primer
cccctcctcctctctctcggttatttctactttttattat

SEQ ID NO: 3201 - DNA, 40 bp, Artificial Sequence
  Description of Artificial Sequence: Synthetic primer
cctttgtttgggactttctttgacaaaccttttctttacc

SEQ ID NO: 3202 - DNA, 40 bp, Artificial Sequence
  Description of Artificial Sequence: Synthetic primer
agatcatgggaaagccacctcaggctgcccagatgactgc

SEQ ID NO: 3203 - DNA, 40 bp, Artificial Sequence
  Description of Artificial Sequence: Synthetic primer
gtctgtgggttccagtgtgtcctgtgatgtgctgtatgtc

SEQ ID NO: 3204 - DNA, 40 bp, Artificial Sequence
  Description of Artificial Sequence: Synthetic primer
aggggagtagcaggaaacatctgtggcgactttctactgc

SEQ ID NO: 3205 - DNA, 40 bp, Artificial Sequence
  Description of Artificial Sequence: Synthetic primer
gctgcaggagtggggaagggtccaggccaggggcactcac

SEQ ID NO: 3206 - DNA, 40 bp, Artificial Sequence
  Description of Artificial Sequence: Synthetic primer
tgtgggaatacagtggggaggagggtggcctgtaactttc

SEQ ID NO: 3207 - DNA, 40 bp, Artificial Sequence
  Description of Artificial Sequence: Synthetic primer
gcaaatttaataaaaaggctcaatcttcctttgccatctc

SEQ ID NO: 3208 - DNA, 40 bp, Artificial Sequence
  Description of Artificial Sequence: Synthetic primer
tacaggaaacaagaacatttttgccagtacacaaaatgac

SEQ ID NO: 3209 - DNA, 40 bp, Artificial Sequence
  Description of Artificial Sequence: Synthetic primer
tgctggagagcagaaaaatgactggcttctgtgttgtcag

SEQ ID NO: 3210 - DNA, 40 bp, Artificial Sequence
  Description of Artificial Sequence: Synthetic primer
cctggggtggtcaggcgccccaggaggctgagtgggctac

SEQ ID NO: 3211 - DNA, 40 bp, Artificial Sequence
  Description of Artificial Sequence: Synthetic primer
tgtgctgttgagacctctgtggggctgggaggtggtggtg

SEQ ID NO: 3212 - DNA, 40 bp, Artificial Sequence
  Description of Artificial Sequence: Synthetic primer
gccatgaaacgtgtttcaagcatagttttgacagataacg

SEQ ID NO: 3213 - DNA, 40 bp, Artificial Sequence
  Description of Artificial Sequence: Synthetic primer
gtgtatgtataacatccctgatgtctgcatttgtcctttg

SEQ ID NO: 3214 - DNA, 40 bp, Artificial Sequence
  Description of Artificial Sequence: Synthetic primer
aaagacagtggagtgtgaaggcactgagctgtcctctctg

SEQ ID NO: 3215 - DNA, 40 bp, Artificial Sequence
  Description of Artificial Sequence: Synthetic primer
aatcttctacatcaacagcaaagaacactcaatgacaagc

SEQ ID NO: 3216 - DNA, 40 bp, Artificial Sequence
  Description of Artificial Sequence: Synthetic primer
gacaggaactgttaatgtcctatttactgaaattcctttt

SEQ ID NO: 3217 - DNA, 40 bp, Artificial Sequence
  Description of Artificial Sequence: Synthetic primer
ctaccaggtactctactgctccaaggagatctgaaaatac

SEQ ID NO: 3218 - DNA, 40 bp, Artificial Sequence
  Description of Artificial Sequence: Synthetic primer
ggcctctcctcactgggatttcttcatgtgggttttcttc

SEQ ID NO: 3219 - DNA, 40 bp, Artificial Sequence
  Description of Artificial Sequence: Synthetic primer
caggcacagcctcaggcctgcagaaccccttgcccttccc

SEQ ID NO: 3220 - DNA, 40 bp, Artificial Sequence
  Description of Artificial Sequence: Synthetic primer
agaagggtggtctccacccaccaccgggaccagcctcggg

SEQ ID NO: 3221 - DNA, 40 bp, Artificial Sequence
  Description of Artificial Sequence: Synthetic primer
actctggacaggcctacgctcctgacccaggtttcgtctc

SEQ ID NO: 3222 - DNA, 40 bp, Artificial Sequence
  Description of Artificial Sequence: Synthetic primer
gacagcctttcctctgagcctgcgcagaccacccccactg

SEQ ID NO: 3223 - DNA, 40 bp, Artificial Sequence
  Description of Artificial Sequence: Synthetic primer
tgaaatgaactgtgaggggtgcgtgggctggggtctaagg

SEQ ID NO: 3224 - DNA, 40 bp, Artificial Sequence
  Description of Artificial Sequence: Synthetic primer
ggataaattaggggttactgttatgaaaaaaattgctaag

SEQ ID NO: 3225 - DNA, 40 bp, Artificial Sequence
  Description of Artificial Sequence: Synthetic primer
ttttgtggttttgaataaacaatccactagcccatttaca

SEQ ID NO: 3226 - DNA, 40 bp, Artificial Sequence
  Description of Artificial Sequence: Synthetic primer
cctggcaatcatctttgcaataaattcttcagattgaaac

SEQ ID NO: 3227 - DNA, 40 bp, Artificial Sequence
  Description of Artificial Sequence: Synthetic primer
tccttttcttcttcttcttcttcttcttcctcttaaccac

SEQ ID NO: 3228 - DNA, 40 bp, Artificial Sequence
  Description of Artificial Sequence: Synthetic primer
gaaagttaaaaccagctctggactctggctccccacatgc

SEQ ID NO: 3229 - DNA, 40 bp, Artificial Sequence
  Description of Artificial Sequence: Synthetic primer
ctgagaatcctgaatggggcctcttttccatcctgacacc

SEQ ID NO: 3230 - DNA, 40 bp, Artificial Sequence
  Description of Artificial Sequence: Synthetic primer
cactcaggccagaacaacagttttccatccacagttatac

SEQ ID NO: 3231 - DNA, 40 bp, Artificial Sequence
  Description of Artificial Sequence: Synthetic primer
gacagcatgataaaattcccaagccagaccaaagtcaagg

SEQ ID NO: 3232 - DNA, 40 bp, Artificial Sequence
  Description of Artificial Sequence: Synthetic primer
acagcaactctgctgactcctgatctgtctccctttggtg

SEQ ID NO: 3233 - DNA, 40 bp, Artificial Sequence
  Description of Artificial Sequence: Synthetic primer
tcatgtcaagccaagaaagttcaaaagaatccttcattct

SEQ ID NO: 3234 - DNA, 40 bp, Artificial Sequence
  Description of Artificial Sequence: Synthetic primer
gcaggggccatggacctaatgcaatcctcaccgcctgttg

SEQ ID NO: 3235 - DNA, 40 bp, Artificial Sequence
  Description of Artificial Sequence: Synthetic primer
gtggcaccactgccaccaatatgggaaggccgaggaagag

SEQ ID NO: 3236 - DNA, 40 bp, Artificial Sequence
  Description of Artificial Sequence: Synthetic primer
attcaagcccagcgtccatccacccatccacacacaactc

SEQ ID NO: 3237 - DNA, 40 bp, Artificial Sequence
  Description of Artificial Sequence: Synthetic primer
aaggtggcagatgctaggaccaaggctgaaggttaagagc

SEQ ID NO: 3238 - DNA, 40 bp, Artificial Sequence
  Description of Artificial Sequence: Synthetic primer
aatgatgagtttagtgtacttaatcttttgcctctttgac

SEQ ID NO: 3239 - DNA, 40 bp, Artificial Sequence
  Description of Artificial Sequence: Synthetic primer
tagagatcgagttttccaattaaaaaaaaaaattaagact

SEQ ID NO: 3240 - DNA, 40 bp, Artificial Sequence
  Description of Artificial Sequence: Synthetic primer
cgctgtcccatgaggtattcgccatccctctgtcatcctc

SEQ ID NO: 3241 - DNA, 40 bp, Artificial Sequence
  Description of Artificial Sequence: Synthetic primer
tgattgagttaatggccatcagcaaagtgtgtatctaaac

SEQ ID NO: 3242 - DNA, 40 bp, Artificial Sequence
  Description of Artificial Sequence: Synthetic primer
tgtttgcaggcccctgtgtgagcagagccctgacaccatc

SEQ ID NO: 3243 - DNA, 40 bp, Artificial Sequence
  Description of Artificial Sequence: Synthetic primer
ccctaagcccagagaaaggaacagaggcccctgcagctgc

SEQ ID NO: 3244 - DNA, 40 bp, Artificial Sequence
  Description of Artificial Sequence: Synthetic primer
agaaatggctagcaactataattcagaatgaagactggac

SEQ ID NO: 3245 - DNA, 40 bp, Artificial Sequence
  Description of Artificial Sequence: Synthetic primer
tgtgcctcttcttgcaaggtgttttctcagctgttatctc

SEQ ID NO: 3246 - DNA, 40 bp, Artificial Sequence
  Description of Artificial Sequence: Synthetic primer
ttagtgtaatgtacaaaaattaccacttgtactagtatgc

SEQ ID NO: 3247 - DNA, 40 bp, Artificial Sequence
  Description of Artificial Sequence: Synthetic primer
ttgttacctgtacacatgaagccatcgtatatattcacat

SEQ ID NO: 3248 - DNA, 40 bp, Artificial Sequence
  Description of Artificial Sequence: Synthetic primer
aggcaggtcgtgcgacctggactgagcctgcactgacacc

SEQ ID NO: 3249 - DNA, 40 bp, Artificial Sequence
  Description of Artificial Sequence: Synthetic primer
atcttccagccgagcatgtctctacctctatctcctctcc

SEQ ID NO: 3250 - DNA, 40 bp, Artificial Sequence
  Description of Artificial Sequence: Synthetic primer
taccattagaatagaacaaaactaagcagcatgtaccatc

SEQ ID NO: 3251 - DNA, 40 bp, Artificial Sequence
  Description of Artificial Sequence: Synthetic primer
gtattgtacaatgtttatgtttcacattttctaataaagc

SEQ ID NO: 3252 - DNA, 40 bp, Artificial Sequence
  Description of Artificial Sequence: Synthetic primer
cccaaccgcccgcctagcatggtgcggcggccgcgcgcgc

SEQ ID NO: 3253 - DNA, 40 bp, Artificial Sequence
  Description of Artificial Sequence: Synthetic primer
tgtccccaggggcggcggaggaggggaggccgggaggtag

SEQ ID NO: 3254 - DNA, 40 bp, Artificial Sequence
  Description of Artificial Sequence: Synthetic primer
tatttcagaatctgaatatttaaaagcaacgctgggacat

SEQ ID NO: 3255 - DNA, 40 bp, Artificial Sequence
  Description of Artificial Sequence: Synthetic primer
tttaggttgtaaaatacaagctcattaccacaaatttgtc

SEQ ID NO: 3256 - DNA, 40 bp, Artificial Sequence
  Description of Artificial Sequence: Synthetic primer
tgggacagccctcctggggcacggagcggggcagactgtg

SEQ ID NO: 3257 - DNA, 40 bp, Artificial Sequence
  Description of Artificial Sequence: Synthetic primer
gtgccctgggcccgcgtgtccatggcgccacccttacccc

SEQ ID NO: 3258 - DNA, 40 bp, Artificial Sequence
  Description of Artificial Sequence: Synthetic primer
gtgtgccaccgccaccagcagagtgacccagtgatgtttg

SEQ ID NO: 3259 - DNA, 40 bp, Artificial Sequence
  Description of Artificial Sequence: Synthetic primer
tgagtctcagaaaagaccccacaggtgtccccagagatgc

SEQ ID NO: 3260 - DNA, 40 bp, Artificial Sequence
  Description of Artificial Sequence: Synthetic primer
gagttggcggggttggccatggccgctgcccgcccagcgc

SEQ ID NO: 3261 - DNA, 40 bp, Artificial Sequence
  Description of Artificial Sequence: Synthetic primer
ccccagacccggctccgccgcacttacccgaccagagcac

SEQ ID NO: 3262 - DNA, 40 bp, Artificial Sequence
  Description of Artificial Sequence: Synthetic primer
tccagcacacacagtgacaacactgagcctgtgttttagg

SEQ ID NO: 3263 - DNA, 40 bp, Artificial Sequence
  Description of Artificial Sequence: Synthetic primer
gcacctgcagctccatatttaaaaggtgatgatattcttg

SEQ ID NO: 3264 - DNA, 40 bp, Artificial Sequence
  Description of Artificial Sequence: Synthetic primer
aggatctagggaaaccatgtgtgaagtagatttgggagtg

SEQ ID NO: 3265 - DNA, 40 bp, Artificial Sequence
  Description of Artificial Sequence: Synthetic primer
cttgacatttcctcagttgccctctgacgtatctctctcc

SEQ ID NO: 3266 - DNA, 40 bp, Artificial Sequence
  Description of Artificial Sequence: Synthetic primer
cctaagcctggccacccgctgacgtctgtccctggcctca

SEQ ID NO: 3267 - DNA, 40 bp, Artificial Sequence
  Description of Artificial Sequence: Synthetic primer
aggacatcccagtgattaaactcgaaacacaacagtaggg

SEQ ID NO: 3268 - DNA, 40 bp, Artificial Sequence
  Description of Artificial Sequence: Synthetic primer
caaacaaaaccactcattatggtcacagccccctagagaa

SEQ ID NO: 3269 - DNA, 40 bp, Artificial Sequence
  Description of Artificial Sequence: Synthetic primer
actcgctgcggctccggaggcagtgattccaagctgctcg

SEQ ID NO: 3270 - DNA, 40 bp, Artificial Sequence
  Description of Artificial Sequence: Synthetic primer
cccaggagctgcggggaggcccaggcagggatgggaggtg

SEQ ID NO: 3271 - DNA, 40 bp, Artificial Sequence
  Description of Artificial Sequence: Synthetic primer
tctataatctgatacctcacctcccggctgccctgtatcc

SEQ ID NO: 3272 - DNA, 40 bp, Artificial Sequence
  Description of Artificial Sequence: Synthetic primer
gcggagaagagaactgcgggactgggaaggccgtggtagg

SEQ ID NO: 3273 - DNA, 40 bp, Artificial Sequence
  Description of Artificial Sequence: Synthetic primer
atgcagtgtaacctctgtgtatgcgggacccgtggtgatc

SEQ ID NO: 3274 - DNA, 40 bp, Artificial Sequence
  Description of Artificial Sequence: Synthetic primer
tttagctttagatttaattaggttttgtttgtgttttctc

SEQ ID NO: 3275 - DNA, 40 bp, Artificial Sequence
  Description of Artificial Sequence: Synthetic primer
aggaaaaactgagacttcaatgtacacatctgctaaaggc

SEQ ID NO: 3276 - DNA, 40 bp, Artificial Sequence
  Description of Artificial Sequence: Synthetic primer
gaaggctgcaggttttaacctggctctgggctcttcttcc

SEQ ID NO: 3277 - DNA, 40 bp, Artificial Sequence
  Description of Artificial Sequence: Synthetic primer
cccagtgctagtcaggcacccataagctctctctctgttc

SEQ ID NO: 3278 - DNA, 40 bp, Artificial Sequence
  Description of Artificial Sequence: Synthetic primer
ctttcccgggacaacagaagctgacctctttgatctcttg

SEQ ID NO: 3279 - DNA, 40 bp, Artificial Sequence
  Description of Artificial Sequence: Synthetic primer
gaccctggctcggccgctgcaaccctcctccccaaaccag

SEQ ID NO: 3280 - DNA, 40 bp, Artificial Sequence
  Description of Artificial Sequence: Synthetic primer
ggcgagtatccctgtccagacctaatgagcaaacctcttc

SEQ ID NO: 3281 - DNA, 40 bp, Artificial Sequence
  Description of Artificial Sequence: Synthetic primer
gctgggctgactgaccgcaagacgcacacgttcatggtcc

SEQ ID NO: 3282 - DNA, 40 bp, Artificial Sequence
  Description of Artificial Sequence: Synthetic primer
ctggccctgccctgcccctgccccatttcctcctcatctg

SEQ ID NO: 3283 - DNA, 40 bp, Artificial Sequence
  Description of Artificial Sequence: Synthetic primer
cccagtggtggccctgccctggggtccaggcccttcatac

SEQ ID NO: 3284 - DNA, 40 bp, Artificial Sequence
  Description of Artificial Sequence: Synthetic primer
gagggaaggggcgcgatttacctacggagtctatctccag

SEQ ID NO: 3285 - DNA, 40 bp, Artificial Sequence
  Description of Artificial Sequence: Synthetic primer
gggtcggggccgcgggcgctgaccgtgtggcctctgcttg

SEQ ID NO: 3286 - DNA, 40 bp, Artificial Sequence
  Description of Artificial Sequence: Synthetic primer
ggctgatgggagggaccaggaggaaggttggttggttatg

SEQ ID NO: 3287 - DNA, 40 bp, Artificial Sequence
  Description of Artificial Sequence: Synthetic primer
ttaagaatcagaacattttacttcgaagcattgtaatttg

SEQ ID NO: 3288 - DNA, 40 bp, Artificial Sequence
  Description of Artificial Sequence: Synthetic primer
atcgtaagtcaagtagcatctgtatcaggcaaagtcatag

SEQ ID NO: 3289 - DNA, 40 bp, Artificial Sequence
  Description of Artificial Sequence: Synthetic primer
ctggttgtagctaactaacttcagaacaccaacttatacc

SEQ ID NO: 3290 - DNA, 40 bp, Artificial Sequence
  Description of Artificial Sequence: Synthetic primer
ggtggcagtcactcaatcacacctgttccctgtatgtcac

SEQ ID NO: 3291 - DNA, 40 bp, Artificial Sequence
  Description of Artificial Sequence: Synthetic primer
gctggctatgcccctgaccatgaaaccagccatatttagg

SEQ ID NO: 3292 - DNA, 40 bp, Artificial Sequence
  Description of Artificial Sequence: Synthetic primer
ctttactttgaatctgatgttgaaaatgtgaatggccaag

SEQ ID NO: 3293 - DNA, 40 bp, Artificial Sequence
  Description of Artificial Sequence: Synthetic primer
ttacacaacctattcacatatgtgttgataaatttaatac

SEQ ID NO: 3294 - DNA, 40 bp, Artificial Sequence
  Description of Artificial Sequence: Synthetic primer
agcggaggtcttgtgccctctcagcttcttctctgctttc

SEQ ID NO: 3295 - DNA, 40 bp, Artificial Sequence
  Description of Artificial Sequence: Synthetic primer
gcaggagaagtggcaggtcctggggtggctgggtcacctg

SEQ ID NO: 3296 - DNA, 40 bp, Artificial Sequence
  Description of Artificial Sequence: Synthetic primer
gtttaaaagtgataggacacacatgagtcaaataaacatc

SEQ ID NO: 3297 - DNA, 40 bp, Artificial Sequence
  Description of Artificial Sequence: Synthetic primer
gaaattagttggttaggttaaggaaatgcattgattatgc

SEQ ID NO: 3298 - DNA, 40 bp, Artificial Sequence
  Description of Artificial Sequence: Synthetic primer
cccctaccacccttccaggctgacttctgtctatttctcc

SEQ ID NO: 3299 - DNA, 40 bp, Artificial Sequence
  Description of Artificial Sequence: Synthetic primer
accctgccccatcccgccctgctcagctccctaaatcctc

SEQ ID NO: 3300 - DNA, 40 bp, Artificial Sequence
  Description of Artificial Sequence: Synthetic primer
tgttctagaaccatcattttaacattaccatctgctttcg

SEQ ID NO: 3301 - DNA, 40 bp, Artificial Sequence
  Description of Artificial Sequence: Synthetic primer
ctgggtgtaaaacactctcttagcctttaatcctcttttg

SEQ ID NO: 3302 - DNA, 40 bp, Artificial Sequence
  Description of Artificial Sequence: Synthetic primer
aggccttattagcactaagtacttcctcagtactcttttt

SEQ ID NO: 3303 - DNA, 40 bp, Artificial Sequence
  Description of Artificial Sequence: Synthetic primer
gcaagggctctgtgagtgagaacttggcaagtctttcatg

SEQ ID NO: 3304 - DNA, 40 bp, Artificial Sequence
  Description of Artificial Sequence: Synthetic primer
cgtgatacttgttgtaatcatgttgtgatgaatgttttct

SEQ ID NO: 3305 - DNA, 40 bp, Artificial Sequence
  Description of Artificial Sequence: Synthetic primer
gatggaacagaactcagaagcagccaccacaagcctcctg

SEQ ID NO: 3306 - DNA, 40 bp, Artificial Sequence
  Description of Artificial Sequence: Synthetic primer
aagtaaaagtttcctttctcaacgctgagcacttgttttc

SEQ ID NO: 3307 - DNA, 40 bp, Artificial Sequence
  Description of Artificial Sequence: Synthetic primer
ttaggggcggccagggtggggaaggcctgagagagactcc

SEQ ID NO: 3308 - DNA, 40 bp, Artificial Sequence
  Description of Artificial Sequence: Synthetic primer
ctcttacacacacacacacacacgccggcccctttctgcc

SEQ ID NO: 3309 - DNA, 40 bp, Artificial Sequence
  Description of Artificial Sequence: Synthetic primer
ggccacaagcccttcctgccctcagccttgctacctctgg

SEQ ID NO: 3310 - DNA, 40 bp, Artificial Sequence
  Description of Artificial Sequence: Synthetic primer
gagccctccaggctgggctgggctgcaggctgggtggacc

SEQ ID NO: 3311 - DNA, 40 bp, Artificial Sequence
  Description of Artificial Sequence: Synthetic primer
gacggccccatggcaccctccggagggccggcccgagagc

SEQ ID NO: 3312 - DNA, 40 bp, Artificial Sequence
  Description of Artificial Sequence: Synthetic primer
cgccaaatttctcccctgaagcagaggtggtagccaacgg

SEQ ID NO: 3313 - DNA, 40 bp, Artificial Sequence
  Description of Artificial Sequence: Synthetic primer
caatcaagcaagtctcaccctggaaagcaaaaaggttatc

SEQ ID NO: 3314 - DNA, 40 bp, Artificial Sequence
  Description of Artificial Sequence: Synthetic primer
attttgatctctaagtctcaaaagcaaacatttaatctac

SEQ ID NO: 3315 - DNA, 40 bp, Artificial Sequence
  Description of Artificial Sequence: Synthetic primer
atttcaagtaatatgcatttcttaaaagactaaaagcaaa

SEQ ID NO: 3316 - DNA, 40 bp, Artificial Sequence
  Description of Artificial Sequence: Synthetic primer
aagtcgtctgtgacaatctggcaacctctgaaactctttg

SEQ ID NO: 3317 - DNA, 40 bp, Artificial Sequence
  Description of Artificial Sequence: Synthetic primer
cggggcccagctgaaggcctgggagaggttctgggagagg

SEQ ID NO: 3318 - DNA, 40 bp, Artificial Sequence
  Description of Artificial Sequence: Synthetic primer
gggaagcacagctcggtttctcaatgtctgaatgtctccc

SEQ ID NO: 3319 - DNA, 40 bp, Artificial Sequence
  Description of Artificial Sequence: Synthetic primer
gtagcagttaatgaatctaacagatgccagcaataaccac

SEQ ID NO: 3320 - DNA, 40 bp, Artificial Sequence
  Description of Artificial Sequence: Synthetic primer
attaaagacatttaggacaagaatctttagggtttactac

SEQ ID NO: 3321 - DNA, 40 bp, Artificial Sequence
  Description of Artificial Sequence: Synthetic primer
cagcctcgactcggtttcccgccctggccccggccgacgc

SEQ ID NO: 3322 - DNA, 40 bp, Artificial Sequence
  Description of Artificial Sequence: Synthetic primer
aggtgttgcaggggccagggtgcctggagcagcctctcac

SEQ ID NO: 3323 - DNA, 40 bp, Artificial Sequence
  Description of Artificial Sequence: Synthetic primer
gttcttggttaaacacaagtcgtctcgttctctccctcac

SEQ ID NO: 3324 - DNA, 40 bp, Artificial Sequence
  Description of Artificial Sequence: Synthetic primer
agcccggagcgcccttcacattccgggtggccgtggcggc

SEQ ID NO: 3325 - DNA, 40 bp, Artificial Sequence
  Description of Artificial Sequence: Synthetic primer
ggggtgaccgccggagcgcggcgtgagccctcccccttgg

SEQ ID NO: 3326 - DNA, 40 bp, Artificial Sequence
  Description of Artificial Sequence: Synthetic primer
gagaggcgctcgcagcggcccgcggcgccagcagggcacg

SEQ ID NO: 3327 - DNA, 40 bp, Artificial Sequence
  Description of Artificial Sequence: Synthetic primer
cgagccgagcggagccgcgagaagtgctagctcgggccgg

SEQ ID NO: 3328 - DNA, 40 bp, Artificial Sequence
  Description of Artificial Sequence: Synthetic primer
gcctcacccgtccatgagcccggcttccgagcgccgagtc

SEQ ID NO: 3329 - DNA, 40 bp, Artificial Sequence
  Description of Artificial Sequence: Synthetic primer
aaaattatcttctaagagtcttggcccaaaaacagcagag

SEQ ID NO: 3330 - DNA, 40 bp, Artificial Sequence
  Description of Artificial Sequence: Synthetic primer
ggggaaataattttaccatactctgtccatttctggtagg

SEQ ID NO: 3331 - DNA, 40 bp, Artificial Sequence
  Description of Artificial Sequence: Synthetic primer
tcctagattttggcctcctaactagatctccccttagcac

SEQ ID NO: 3332 - DNA, 40 bp, Artificial Sequence
  Description of Artificial Sequence: Synthetic primer
tgtggtttgcctgtgctgggaaccctcaccttctgagacc

SEQ ID NO: 3333 - DNA, 40 bp, Artificial Sequence
  Description of Artificial Sequence: Synthetic primer
cagcaatgcagcccgtcttatagttaatacatctctaatg

SEQ ID NO: 3334 - DNA, 40 bp, Artificial Sequence
  Description of Artificial Sequence: Synthetic primer
tggttgatttacttaacaaatgagaataaataaaacattt

SEQ ID NO: 3335 - DNA, 40 bp, Artificial Sequence
  Description of Artificial Sequence: Synthetic primer
ttttggaactataaggaaaaatacgttttaaaacaacttc

SEQ ID NO: 3336 - DNA, 40 bp, Artificial Sequence
  Description of Artificial Sequence: Synthetic primer
agggttttctttgaattctcttagaataattgttagtatt

SEQ ID NO: 3337 - DNA, 40 bp, Artificial Sequence
  Description of Artificial Sequence: Synthetic primer
aagcacaacccgatagacgagaaagtggagtgggaatttg

SEQ ID NO: 3338 - DNA, 40 bp, Artificial Sequence
  Description of Artificial Sequence: Synthetic primer
ccctcggtctcctctggatcttaactactgagcgcaatgc

SEQ ID NO: 3339 - DNA, 40 bp, Artificial Sequence
  Description of Artificial Sequence: Synthetic primer
cagcaagggccacctgaccctctgagtctttctctttttg

SEQ ID NO: 3340 - DNA, 40 bp, Artificial Sequence
  Description of Artificial Sequence: Synthetic primer
caggccaggcaacatgcaataccggtggaaatgaaaactg

SEQ ID NO: 3341 - DNA, 40 bp, Artificial Sequence
  Description of Artificial Sequence: Synthetic primer
gttaatgagtaatttttctctatttcatatttaaccacag

SEQ ID NO: 3342 - DNA, 40 bp, Artificial Sequence
  Description of Artificial Sequence: Synthetic primer
ctatgtaagacattctactgccatctgcagcattccaaat

SEQ ID NO: 3343 - DNA, 40 bp, Artificial Sequence
  Description of Artificial Sequence: Synthetic primer
tgcagagtgccatctccattaaagcatcctacagccactg

SEQ ID NO: 3344 - DNA, 40 bp, Artificial Sequence
  Description of Artificial Sequence: Synthetic primer
atgaatgacacccgtttcttctccctcaccctcccttccc

SEQ ID NO: 3345 - DNA, 40 bp, Artificial Sequence
  Description of Artificial Sequence: Synthetic primer
ccccttgctctggcttcccacatatgctggagatcactac

SEQ ID NO: 3346 - DNA, 40 bp, Artificial Sequence
  Description of Artificial Sequence: Synthetic primer
cgaacaaggtggggctccttgttcaatcctgcccctttcc

SEQ ID NO: 3347 - DNA, 40 bp, Artificial Sequence
  Description of Artificial Sequence: Synthetic primer
aaaaattaacagagattcttcactgattgttccttaaatc

SEQ ID NO: 3348 - DNA, 40 bp, Artificial Sequence
  Description of Artificial Sequence: Synthetic primer
atacagtatgactcacaaacagaataaaatataagtaagc

SEQ ID NO: 3349 - DNA, 40 bp, Artificial Sequence
  Description of Artificial Sequence: Synthetic primer
gggtctcctagacctcatcctctttgagcttctctctctc

SEQ ID NO: 3350 - DNA, 40 bp, Artificial Sequence
  Description of Artificial Sequence: Synthetic primer
gttttctttatgtctctcctgtaggaagcccacagatgcc

SEQ ID NO: 3351 - DNA, 40 bp, Artificial Sequence
  Description of Artificial Sequence: Synthetic primer
tattctttgttattggtttaattaatagttttgtaaggtg

SEQ ID NO: 3352 - DNA, 40 bp, Artificial Sequence
  Description of Artificial Sequence: Synthetic primer
cttgtttttctcctttcctcatttcattgtgttctgcatc

SEQ ID NO: 3353 - DNA, 40 bp, Artificial Sequence
  Description of Artificial Sequence: Synthetic primer
cccggggcaataatgcccttctctgcccttaatccttaca

SEQ ID NO: 3354 - DNA, 40 bp, Artificial Sequence
  Description of Artificial Sequence: Synthetic primer
gattaactgacaagtttggaaagaaaacctgatctgatac

SEQ ID NO: 3355 - DNA, 40 bp, Artificial Sequence
  Description of Artificial Sequence: Synthetic primer
aattaatgtttctccctgtgtttttctactcctcgatttc

SEQ ID NO: 3356 - DNA, 40 bp, Artificial Sequence
  Description of Artificial Sequence: Synthetic primer
cacgagctttttctagccagctggggacactgggagactg

SEQ ID NO: 3357 - DNA, 40 bp, Artificial Sequence
  Description of Artificial Sequence: Synthetic primer
ctgtcctgttaactgtcctgaccctcccgcctcctaactc

SEQ ID NO: 3358 - DNA, 40 bp, Artificial Sequence
  Description of Artificial Sequence: Synthetic primer
cctacgctcttgctgggaggcaggggcggggccagcatta

SEQ ID NO: 3359 - DNA, 40 bp, Artificial Sequence
  Description of Artificial Sequence: Synthetic primer
tttttttcattttgatgtcgctttttgttttgttttgtag

SEQ ID NO: 3360 - DNA, 40 bp, Artificial Sequence
  Description of Artificial Sequence: Synthetic primer
tggctctttaatttggcagacacctccctgctgcacactc

SEQ ID NO: 3361 - DNA, 40 bp, Artificial Sequence
  Description of Artificial Sequence: Synthetic primer
cgtgtgctgacatctgttttctgttcctggctctgtcttc

SEQ ID NO: 3362 - DNA, 40 bp, Artificial Sequence
  Description of Artificial Sequence: Synthetic primer
atttttttcatttcaaggatatggaaagagtttgtgcttc

SEQ ID NO: 3363 - DNA, 40 bp, Artificial Sequence
  Description of Artificial Sequence: Synthetic primer
aaaaagagggtgatattgtggcaatgataacatgacttac

SEQ ID NO: 3364 - DNA, 40 bp, Artificial Sequence
  Description of Artificial Sequence: Synthetic primer
cttgtggctgacggctcccttctcctttcctccctccttc

SEQ ID NO: 3365 - DNA, 40 bp, Artificial Sequence
  Description of Artificial Sequence: Synthetic primer
gcagtgtccagggacgacgggtagaggcagccagagacgg

SEQ ID NO: 3366 - DNA, 40 bp, Artificial Sequence
  Description of Artificial Sequence: Synthetic primer
ggggcaggggaggagagatgctctccacaaccccagtctt

SEQ ID NO: 3367 - DNA, 40 bp, Artificial Sequence
  Description of Artificial Sequence: Synthetic primer
tgccttgttgctgtgctggaaaagctaaccctgctttggc

SEQ ID NO: 3368 - DNA, 40 bp, Artificial Sequence
  Description of Artificial Sequence: Synthetic primer
aaccactgatatcttcatagtggcatttggggttgttaat

SEQ ID NO: 3369 - DNA, 40 bp, Artificial Sequence
  Description of Artificial Sequence: Synthetic primer
ttgaactcaaagctgtgatacagactgaagaaatatgatg

SEQ ID NO: 3370 - DNA, 40 bp, Artificial Sequence
  Description of Artificial Sequence: Synthetic primer
cccacgttgctcactcccaagcagaggccgtccccacagc

SEQ ID NO: 3371 - DNA, 40 bp, Artificial Sequence
  Description of Artificial Sequence: Synthetic primer
gcaggttaacaacagggcttgaagttgggtggcctcagct

SEQ ID NO: 3372 - DNA, 40 bp, Artificial Sequence
  Description of Artificial Sequence: Synthetic primer
aagttaatgagagacaaattccaactctaattagatgacc

SEQ ID NO: 3373 - DNA, 40 bp, Artificial Sequence
  Description of Artificial Sequence: Synthetic primer
ttgagagtatgaattctgtactttaaaagtaatataaaac

SEQ ID NO: 3374 - DNA, 40 bp, Artificial Sequence
  Description of Artificial Sequence: Synthetic primer
agggaagggtgcaggtagccatggctggggatctgcgtgc

SEQ ID NO: 3375 - DNA, 40 bp, Artificial Sequence
  Description of Artificial Sequence: Synthetic primer
ctggctggccacactgggtctccctaacacactcctcttc

SEQ ID NO: 3376 - DNA, 40 bp, Artificial Sequence
  Description of Artificial Sequence: Synthetic primer
caaccccgtgtggcttggccatccaattgcacctgtcatc

SEQ ID NO: 3377 - DNA, 40 bp, Artificial Sequence
  Description of Artificial Sequence: Synthetic primer
gcagtccagactgtggacttaaactgttgtgtctgattcc

SEQ ID NO: 3378 - DNA, 40 bp, Artificial Sequence
  Description of Artificial Sequence: Synthetic primer
tggtattaccttttaagcagtcatgtttaatttttgattc

SEQ ID NO: 3379 - DNA, 40 bp, Artificial Sequence
  Description of Artificial Sequence: Synthetic primer
agggaaaaaaggtgatttcagaagatattaaatatagttg

SEQ ID NO: 3380 - DNA, 40 bp, Artificial Sequence
  Description of Artificial Sequence: Synthetic primer
caggagggagagggtgacatgggtcagctgactcccagag

SEQ ID NO: 3381 - DNA, 40 bp, Artificial Sequence
  Description of Artificial Sequence: Synthetic primer
cttacagaaagggcaagcagaagtgtccgctcctactcac

SEQ ID NO: 3382 - DNA, 40 bp, Artificial Sequence
  Description of Artificial Sequence: Synthetic primer
gaccatatcttgatgaagaaacttggggaagtaagtgaag

SEQ ID NO: 3383 - DNA, 40 bp, Artificial Sequence
  Description of Artificial Sequence: Synthetic primer
tttcttatgcatgagaacaggccctcctctgacatgtttc

SEQ ID NO: 3384 - DNA, 40 bp, Artificial Sequence
  Description of Artificial Sequence: Synthetic primer
tattttaagggcgaggtggaaaaggggtgtaaaataaaac

SEQ ID NO: 3385 - DNA, 40 bp, Artificial Sequence
  Description of Artificial Sequence: Synthetic primer
acaaaaggaagaaaaggaggaaggaaggaaaaggtgattc

SEQ ID NO: 3386 - DNA, 40 bp, Artificial Sequence
  Description of Artificial Sequence: Synthetic primer
agcttgagtctttgccctgtgccttcaccaccatgacctc

SEQ ID NO: 3387 - DNA, 40 bp, Artificial Sequence
  Description of Artificial Sequence: Synthetic primer
tgtgacacgatagcagtgtctccaggtgttccccgaactc

SEQ ID NO: 3388 - DNA, 40 bp, Artificial Sequence
  Description of Artificial Sequence: Synthetic primer
agggcatttgcattatgaaaccaatattatggatcccaac

SEQ ID NO: 3389 - DNA, 40 bp, Artificial Sequence
  Description of Artificial Sequence: Synthetic primer
gactcctgcttctgtcatatcatccagcctgtgtctttcc

SEQ ID NO: 3390 - DNA, 40 bp, Artificial Sequence
  Description of Artificial Sequence: Synthetic primer
aataaacattcaccaacttatgccaattctcttgttttag

SEQ ID NO: 3391 - DNA, 40 bp, Artificial Sequence
  Description of Artificial Sequence: Synthetic primer
tttgtcaaaaggagactcaatatctttactctttcatcag

SEQ ID NO: 3392 - DNA, 40 bp, Artificial Sequence
  Description of Artificial Sequence: Synthetic primer
ttagaaattgaatcatagctgtcattttataaacattgac

SEQ ID NO: 3393 - DNA, 40 bp, Artificial Sequence
  Description of Artificial Sequence: Synthetic primer
tttttcttctttgacaaaaacacagaacacattttaagcc

SEQ ID NO: 3394 - DNA, 40 bp, Artificial Sequence
  Description of Artificial Sequence: Synthetic primer
ccggcctcccaggagtctgagcatcctccgtggcctttgc

SEQ ID NO: 3395 - DNA, 40 bp, Artificial Sequence
  Description of Artificial Sequence: Synthetic primer
cttcccctccccagaaggccccagcccggaagggagttgg

SEQ ID NO: 3396 - DNA, 40 bp, Artificial Sequence
  Description of Artificial Sequence: Synthetic primer
gcagaaagcaaagctttgatgccaggaaggctgtttactc

SEQ ID NO: 3397 - DNA, 40 bp, Artificial Sequence
  Description of Artificial Sequence: Synthetic primer
ctctttgtttatagttctgaagaggcccattgtttctgac

SEQ ID NO: 3398 - DNA, 40 bp, Artificial Sequence
  Description of Artificial Sequence: Synthetic primer
gcacctgctagtccctgatacacccaagttgagggctgac

SEQ ID NO: 3399 - DNA, 40 bp, Artificial Sequence
  Description of Artificial Sequence: Synthetic primer
ggccagaggtggttgttagcctggcaagacaggtctgggc

SEQ ID NO: 3400 - DNA, 40 bp, Artificial Sequence
  Description of Artificial Sequence: Synthetic primer
gttgttaatgaaatttgctctaagttaacctgtcttcttc

SEQ ID NO: 3401 - DNA, 40 bp, Artificial Sequence
  Description of Artificial Sequence: Synthetic primer
gaaaaccagaccaaatacccatacccttctacagcataag

SEQ ID NO: 3402 - DNA, 40 bp, Artificial Sequence
  Description of Artificial Sequence: Synthetic primer
tcatatgatgtatactttttttgaaattcaaattgtttac

SEQ ID NO: 3403 - DNA, 40 bp, Artificial Sequence
  Description of Artificial Sequence: Synthetic primer
acaactgtgtaaagaattttttaaatacattatctaatac

SEQ ID NO: 3404 - DNA, 40 bp, Artificial Sequence
  Description of Artificial Sequence: Synthetic primer
aaaatatttagtgaatgtgattgatggtactttaattttg

SEQ ID NO: 3405 - DNA, 40 bp, Artificial Sequence
  Description of Artificial Sequence: Synthetic primer
gaataaacactttaaaaatagtgattggcaacacgaaagg

SEQ ID NO: 3406 - DNA, 40 bp, Artificial Sequence
  Description of Artificial Sequence: Synthetic primer
tagtcatgatttctagaggcaaagaatcatacaaaatgtc

SEQ ID NO: 3407 - DNA, 40 bp, Artificial Sequence
  Description of Artificial Sequence: Synthetic primer
ggtttatgttcttgcagaggagaacaaaaatagtgtaaag

SEQ ID NO: 3408 - DNA, 40 bp, Artificial Sequence
  Description of Artificial Sequence: Synthetic primer
tatattagaagaatcaggaagtcagtttgaatttactcag

SEQ ID NO: 3409 - DNA, 40 bp, Artificial Sequence
  Description of Artificial Sequence: Synthetic primer
atcataatgataaaactgtaagtgaaaaaaataataaatg

SEQ ID NO: 3410 - DNA, 40 bp, Artificial Sequence
  Description of Artificial Sequence: Synthetic primer
taaaattgtaaatttctttgatcagaaaccagaagaattg

SEQ ID NO: 3411 - DNA, 40 bp, Artificial Sequence
  Description of Artificial Sequence: Synthetic primer
gactgtggtgccacctaagctcttaagtgataatttatgt

SEQ ID NO: 3412 - DNA, 40 bp, Artificial Sequence
  Description of Artificial Sequence: Synthetic primer
cttgattctggtattgagccagtattgaagaatgttgaag

SEQ ID NO: 3413 - DNA, 40 bp, Artificial Sequence
  Description of Artificial Sequence: Synthetic primer
accaaaatatgtctggattggagaaagtttctaaaatatc

SEQ ID NO: 3414 - DNA, 40 bp, Artificial Sequence
  Description of Artificial Sequence: Synthetic primer
tagacaaaatgtatcaaaaatacttcctcgtgttgataag

SEQ ID NO: 3415 - DNA, 40 bp, Artificial Sequence
  Description of Artificial Sequence: Synthetic primer
attcttttccatgggaatatttttggttaattcaacatca

SEQ ID NO: 3416 - DNA, 40 bp, Artificial Sequence
  Description of Artificial Sequence: Synthetic primer
tatttttttctggtattttatctatattcaaggagatgtc

SEQ ID NO: 3417 - DNA, 40 bp, Artificial Sequence
  Description of Artificial Sequence: Synthetic primer
acttcaaatgtactcttctgcaatatgtagcttggttttc

SEQ ID NO: 3418 - DNA, 40 bp, Artificial Sequence
  Description of Artificial Sequence: Synthetic primer
ttctcttgtaattttcagtaatttcttcaacaaaagtgcc

SEQ ID NO: 3419 - DNA, 40 bp, Artificial Sequence
  Description of Artificial Sequence: Synthetic primer
ctttcttatgtcagaatgtaattcagaatttaaggaaaag

SEQ ID NO: 3420 - DNA, 40 bp, Artificial Sequence
  Description of Artificial Sequence: Synthetic primer
tcaaaaagatactttttgatgttttgagattttcagtttg

SEQ ID NO: 3421 - DNA, 40 bp, Artificial Sequence
  Description of Artificial Sequence: Synthetic primer
tttgtgggtatgcatttgcatcttttacattggatattac

SEQ ID NO: 3422 - DNA, 40 bp, Artificial Sequence
  Description of Artificial Sequence: Synthetic primer
tttgcagatgagactgacttatgaagcttccctatactac

SEQ ID NO: 3423 - DNA, 40 bp, Artificial Sequence
  Description of Artificial Sequence: Synthetic primer
taatttaaattctttactgcaggttttttccatttctgag

SEQ ID NO: 3424 - DNA, 40 bp, Artificial Sequence
  Description of Artificial Sequence: Synthetic primer
cccaatgtttaaagagaatacgaccaagcctaactaactg

SEQ ID NO: 3425 - DNA, 40 bp, Artificial Sequence
  Description of Artificial Sequence: Synthetic primer
caccagtgctggcctgtgatacactcactgcaaacaccac

SEQ ID NO: 3426 - DNA, 40 bp, Artificial Sequence
  Description of Artificial Sequence: Synthetic primer
gcagggtagggagggccctactgggagccgagggctgatg

SEQ ID NO: 3427 - DNA, 40 bp, Artificial Sequence
  Description of Artificial Sequence: Synthetic primer
agcaaaaagctatacataatgcttgtggtttccccaatcc

SEQ ID NO: 3428 - DNA, 40 bp, Artificial Sequence
  Description of Artificial Sequence: Synthetic primer
cctgctctatagccctctccaagctcacaccctgactgtc

SEQ ID NO: 3429 - DNA, 40 bp, Artificial Sequence
  Description of Artificial Sequence: Synthetic primer
cttcttggcgactggtggggatgcacccttttcccgtctg

SEQ ID NO: 3430 - DNA, 40 bp, Artificial Sequence
  Description of Artificial Sequence: Synthetic primer
ggtagatggaggccgcggaggaggcgcctcctgagcccac

SEQ ID NO: 3431 - DNA, 40 bp, Artificial Sequence
  Description of Artificial Sequence: Synthetic primer
ccacccacctccatgtcatctcatcgtgtttttccagatg

SEQ ID NO: 3432 - DNA, 40 bp, Artificial Sequence
  Description of Artificial Sequence: Synthetic primer
tggggaggatacaacaggcggtgaggattgcattaggtcc

SEQ ID NO: 3433 - DNA, 40 bp, Artificial Sequence
  Description of Artificial Sequence: Synthetic primer
acacagcggatcatggacatgagcagaaccggctcctcag

SEQ ID NO: 3434 - DNA, 40 bp, Artificial Sequence
  Description of Artificial Sequence: Synthetic primer
tctttcagctgacccagtaacgccttctcctgtcctttgc

SEQ ID NO: 3435 - DNA, 40 bp, Artificial Sequence
  Description of Artificial Sequence: Synthetic primer
acagaataatatccaagattgtttacctgcatggcttgac

SEQ ID NO: 3436 - DNA, 40 bp, Artificial Sequence
  Description of Artificial Sequence: Synthetic primer
cctttacacagtgcagagtatatgggcttaggttatgtag

SEQ ID NO: 3437 - DNA, 40 bp, Artificial Sequence
  Description of Artificial Sequence: Synthetic primer
gaggccacctctgtcaggtcagggttgcatgggctggagc

SEQ ID NO: 3438 - DNA, 40 bp, Artificial Sequence
  Description of Artificial Sequence: Synthetic primer
tgacctgaacccggggcggggctcactgtgtgcctattcc

SEQ ID NO: 3439 - DNA, 40 bp, Artificial Sequence
  Description of Artificial Sequence: Synthetic primer
acttggaggcaagaccttatgggaccttcagggagattgg

SEQ ID NO: 3440 - DNA, 40 bp, Artificial Sequence
  Description of Artificial Sequence: Synthetic primer
tcacagcaatgtttctagtggtctaatatcctgaagtgag

SEQ ID NO: 3441 - DNA, 40 bp, Artificial Sequence
  Description of Artificial Sequence: Synthetic primer
cttttttaaaacttcatctctaacacgactataattttcc

SEQ ID NO: 3442 - DNA, 40 bp, Artificial Sequence
  Description of Artificial Sequence: Synthetic primer
tctgatgaggaaacagatcttgctgcagcgggcaccatac

SEQ ID NO: 3443 - DNA, 40 bp, Artificial Sequence
  Description of Artificial Sequence: Synthetic primer
cctggcttgtattgattctggattgagacttttcagtgtc

SEQ ID NO: 3444 - DNA, 40 bp, Artificial Sequence
  Description of Artificial Sequence: Synthetic primer
ccccgggcgccgcggacagcgcccctcagcccgatactca

SEQ ID NO: 3445 - DNA, 40 bp, Artificial Sequence
  Description of Artificial Sequence: Synthetic primer
ggcggcggcggcggcggcggaggaggaggcgaccgagaag

SEQ ID NO: 3446 - DNA, 40 bp, Artificial Sequence
  Description of Artificial Sequence: Synthetic primer
tacagacgtgagccaccacacccagccgctatagttctaa

SEQ ID NO: 3447 - DNA, 40 bp, Artificial Sequence
  Description of Artificial Sequence: Synthetic primer
ctaaatgtttgacttcaggatatggtttgaatcatttttg

SEQ ID NO: 3448 - DNA, 40 bp, Artificial Sequence
  Description of Artificial Sequence: Synthetic primer
catggatggccaacaccagccctccgtgcagcggccctta

SEQ ID NO: 3449 - DNA, 40 bp, Artificial Sequence
  Description of Artificial Sequence: Synthetic primer
gcactgcatcctggcgccggctgagccgaagggcccctcg

SEQ ID NO: 3450 - DNA, 40 bp, Artificial Sequence
  Description of Artificial Sequence: Synthetic primer
ggattgtgaggattaaatcagaatatataaaagtgtcttg

SEQ ID NO: 3451 - DNA, 40 bp, Artificial Sequence
  Description of Artificial Sequence: Synthetic primer
cttttccctttatgtttcttaggatgaaagcaaagtctac

SEQ ID NO: 3452 - DNA, 40 bp, Artificial Sequence
  Description of Artificial Sequence: Synthetic primer
ccttaggcatggcaactagattattcccaaaccaacacag

SEQ ID NO: 3453 - DNA, 40 bp, Artificial Sequence
  Description of Artificial Sequence: Synthetic primer
cttaaaaaaaggtaagaagacaatttacaaataatacatt

SEQ ID NO: 3454 - DNA, 40 bp, Artificial Sequence
  Description of Artificial Sequence: Synthetic primer
cgcccggccccaacggcggaatgcggcggggctggcgtta

SEQ ID NO: 3455 - DNA, 40 bp, Artificial Sequence
  Description of Artificial Sequence: Synthetic primer
gacagctccattgccgggtttttattttttttctctccgc

SEQ ID NO: 3456 - DNA, 40 bp, Artificial Sequence
  Description of Artificial Sequence: Synthetic primer
atgagaaggcccatggtgttggtggggctgcagagggaag

SEQ ID NO: 3457 - DNA, 40 bp, Artificial Sequence
  Description of Artificial Sequence: Synthetic primer
cccctctccctggcccacctccctggcctgactaccttcc

SEQ ID NO: 3458 - DNA, 40 bp, Artificial Sequence
  Description of Artificial Sequence: Synthetic primer
agaggcttctgcctgcaacctttgctttttcccagacagc

SEQ ID NO: 3459 - DNA, 40 bp, Artificial Sequence
  Description of Artificial Sequence: Synthetic primer
gcccggtgccacttcacttcccgtgtctgcgtcctctttg

SEQ ID NO: 3460 - DNA, 40 bp, Artificial Sequence
  Description of Artificial Sequence: Synthetic primer
atctttggaagttttagaagaaatggaattctgtaatgtt

SEQ ID NO: 3461 - DNA, 40 bp, Artificial Sequence
  Description of Artificial Sequence: Synthetic primer
cttaaatttcttccatacctattctgtcaaaaagctctcc

SEQ ID NO: 3462 - DNA, 40 bp, Artificial Sequence
  Description of Artificial Sequence: Synthetic primer
ttgacaaaaacaaattaaaaatctgtacctaggcatctgg

SEQ ID NO: 3463 - DNA, 40 bp, Artificial Sequence
  Description of Artificial Sequence: Synthetic primer
gcagcttgactatatctttaaggatttttatttatttatc

SEQ ID NO: 3464 - DNA, 40 bp, Artificial Sequence
  Description of Artificial Sequence: Synthetic primer
ttcccttgctctctttccccaagcccaggcagaacactcc

SEQ ID NO: 3465 - DNA, 40 bp, Artificial Sequence
  Description of Artificial Sequence: Synthetic primer
catccccttggggtgccaggtgcccatctttggccctctc

SEQ ID NO: 3466 - DNA, 40 bp, Artificial Sequence
  Description of Artificial Sequence: Synthetic primer
acaagattgtaagaacgacgtgtatgactgtaacatagtg

SEQ ID NO: 3467 - DNA, 40 bp, Artificial Sequence
  Description of Artificial Sequence: Synthetic primer
tcagaaagtctttgtaaagaacatactttgtttcagcttg

SEQ ID NO: 3468 - DNA, 40 bp, Artificial Sequence
  Description of Artificial Sequence: Synthetic primer
ctggctcagtacactaaagctccctctggccctcccactc

SEQ ID NO: 3469 - DNA, 40 bp, Artificial Sequence
  Description of Artificial Sequence: Synthetic primer
acccaggacctcccaccctcctccaggcagccagcacagc

SEQ ID NO: 3470 - DNA, 40 bp, Artificial Sequence
  Description of Artificial Sequence: Synthetic primer
cttttcttaatcctctggcttccccaggccactgattctg

SEQ ID NO: 3471 - DNA, 40 bp, Artificial Sequence
  Description of Artificial Sequence: Synthetic primer
gtttctccattttattccttgaaagtgcttcagtaccaac

SEQ ID NO: 3472 - DNA, 40 bp, Artificial Sequence
  Description of Artificial Sequence: Synthetic primer
gggaattttcagttgcatttttaaagttgtgggtccaatc

SEQ ID NO: 3473 - DNA, 40 bp, Artificial Sequence
  Description of Artificial Sequence: Synthetic primer
attttcccacctgcgtttgttgtttctatctggattattg

SEQ ID NO: 3474 - DNA, 40 bp, Artificial Sequence
  Description of Artificial Sequence: Synthetic primer
ggtgtccactggcgcgacccacactgaccagccccctatc

SEQ ID NO: 3475 - DNA, 40 bp, Artificial Sequence
  Description of Artificial Sequence: Synthetic primer
aggagaggggagcggtagttacgttgcatagtggtcaaag

SEQ ID NO: 3476 - DNA, 40 bp, Artificial Sequence
  Description of Artificial Sequence: Synthetic primer
tgaagaatattctctccagaaaactggaaattttaggatg

SEQ ID NO: 3477 - DNA, 40 bp, Artificial Sequence
  Description of Artificial Sequence: Synthetic primer
gaagaatagactttcctggatgtagaactctagttagcac

SEQ ID NO: 3478 - DNA, 40 bp, Artificial Sequence
  Description of Artificial Sequence: Synthetic primer
tccaaaggaaggtcaaatgcctacagccactgaagaaagg

SEQ ID NO: 3479 - DNA, 40 bp, Artificial Sequence
  Description of Artificial Sequence: Synthetic primer
gattgttgaggcagcacatttgatgtgtctcttccttccc

SEQ ID NO: 3480 - DNA, 40 bp, Artificial Sequence
  Description of Artificial Sequence: Synthetic primer
gaaagatgtgtgtttctcacatcaacttttatgaatctgg

SEQ ID NO: 3481 - DNA, 40 bp, Artificial Sequence
  Description of Artificial Sequence: Synthetic primer
aaactgagcagacaactatatttggaattgctatacttgc

SEQ ID NO: 3482 - DNA, 40 bp, Artificial Sequence
  Description of Artificial Sequence: Synthetic primer
ggcaagtaataacaaaataacacggcatcccagttaatgc

SEQ ID NO: 3483 - DNA, 40 bp, Artificial Sequence
  Description of Artificial Sequence: Synthetic primer
cccggacgctatggcccacccctccggctggccccttctg

SEQ ID NO: 3484 - DNA, 40 bp, Artificial Sequence
  Description of Artificial Sequence: Synthetic primer
gggtcccgaggccatcttcacgctaagggcgaaaaagcag

SEQ ID NO: 3485 - DNA, 40 bp, Artificial Sequence
  Description of Artificial Sequence: Synthetic primer
cgagcggctgcgcgccgagcccgtgggcaccttcctggtg

SEQ ID NO: 3486 - DNA, 40 bp, Artificial Sequence
  Description of Artificial Sequence: Synthetic primer
tttcgagtggatgcgtgctttaacttcactcttattctgc

SEQ ID NO: 3487 - DNA, 40 bp, Artificial Sequence
  Description of Artificial Sequence: Synthetic primer
ccttatttaatgcttttaattaaggtgagactcaaaaagg

SEQ ID NO: 3488 - DNA, 40 bp, Artificial Sequence
  Description of Artificial Sequence: Synthetic primer
cacacacacacaaaatcaattacaagcacaaaagtgaatc

SEQ ID NO: 3489 - DNA, 40 bp, Artificial Sequence
  Description of Artificial Sequence: Synthetic primer
gctgttatttctagtaagagaatccagggcaacctctgcc

SEQ ID NO: 3490 - DNA, 40 bp, Artificial Sequence
  Description of Artificial Sequence: Synthetic primer
gttcactattttgttcttatagatgatctcttttccttta

SEQ ID NO: 3491 - DNA, 40 bp, Artificial Sequence
  Description of Artificial Sequence: Synthetic primer
gtttctggagcaaatgcaaataattacaccaaactctgtg

SEQ ID NO: 3492 - DNA, 40 bp, Artificial Sequence
  Description of Artificial Sequence: Synthetic primer
gggcaggtgagggaccccaccctgaccctgccctcccccc

SEQ ID NO: 3493 - DNA, 40 bp, Artificial Sequence
  Description of Artificial Sequence: Synthetic primer
gcccaccaggccaggcactcaccgctgccggcgccacctc

SEQ ID NO: 3494 - DNA, 40 bp, Artificial Sequence
  Description of Artificial Sequence: Synthetic primer
agactcccctgcacacaagcagaaaaaacaacagccatcc

SEQ ID NO: 3495 - DNA, 40 bp, Artificial Sequence
  Description of Artificial Sequence: Synthetic primer
actcagcacacagcgcctgcctgtctgtctgtccccacag

SEQ ID NO: 3496 - DNA, 40 bp, Artificial Sequence
  Description of Artificial Sequence: Synthetic primer
ttaccagtaagcagttttcagtgaatatacatttctcttt

SEQ ID NO: 3497 - DNA, 40 bp, Artificial Sequence
  Description of Artificial Sequence: Synthetic primer
catgttacttctatatcaggaacaaattagtacacaaaaa

SEQ ID NO: 3498 - DNA, 40 bp, Artificial Sequence
  Description of Artificial Sequence: Synthetic primer
ccaatcacaatgatttctaaaacatgtctccttgcacacg

SEQ ID NO: 3499 - DNA, 40 bp, Artificial Sequence
  Description of Artificial Sequence: Synthetic primer
gcatttaccaggtgaagtccagcaacctgatcttgtgaac

SEQ ID NO: 3500 - DNA, 40 bp, Artificial Sequence
  Description of Artificial Sequence: Synthetic primer
ccttatggctgccattttattggctgctaggtttcctagt

SEQ ID NO: 3501 - DNA, 40 bp, Artificial Sequence
  Description of Artificial Sequence: Synthetic primer
gaaggtttgcattggacagttcctcttttatcctgctctc

SEQ ID NO: 3502 - DNA, 40 bp, Artificial Sequence
  Description of Artificial Sequence: Synthetic primer
caggtaggcacccacccagggcccctccttcgggcacctc

SEQ ID NO: 3503 - DNA, 40 bp, Artificial Sequence
  Description of Artificial Sequence: Synthetic primer
tctgctggagcggggacccaccaatgccctccactcagcc

SEQ ID NO: 3504 - DNA, 40 bp, Artificial Sequence
  Description of Artificial Sequence: Synthetic primer
gtttaaaaaagtcaaaggcaccattcccatcaagcaattt

SEQ ID NO: 3505 - DNA, 40 bp, Artificial Sequence
  Description of Artificial Sequence: Synthetic primer
aacactggaaattagcgagttacctggaggcggattacgg

SEQ ID NO: 3506 - DNA, 40 bp, Artificial Sequence
  Description of Artificial Sequence: Synthetic primer
gtggcctgagcactggcccctttttcttctttcatctctc

SEQ ID NO: 3507 - DNA, 40 bp, Artificial Sequence
  Description of Artificial Sequence: Synthetic primer
gcaaactcaggctctgaatagtctacgtgcctctctctag

SEQ ID NO: 3508 - DNA, 40 bp, Artificial Sequence
  Description of Artificial Sequence: Synthetic primer
aaaatagacaattatgtctcccaactgatattcttctcac

SEQ ID NO: 3509 - DNA, 40 bp, Artificial Sequence
  Description of Artificial Sequence: Synthetic primer
caaaaggaagtttccatccaaatttacttgttaaaccatc

SEQ ID NO: 3510 - DNA, 40 bp, Artificial Sequence
  Description of Artificial Sequence: Synthetic primer
ggagaggtggagaggcttcagccctgcctcccaccccttc

SEQ ID NO: 3511 - DNA, 40 bp, Artificial Sequence
  Description of Artificial Sequence: Synthetic primer
ccccagggccgggctcacgttggtcgtcttcttgtagtag

SEQ ID NO: 3512 - DNA, 40 bp, Artificial Sequence
  Description of Artificial Sequence: Synthetic primer
gagtgtgttatttataatacagtatgtgtgtgtgaggttt

SEQ ID NO: 3513 - DNA, 40 bp, Artificial Sequence
  Description of Artificial Sequence: Synthetic primer
aaaatgcagcttctctacatattcagctagcagtactcac

SEQ ID NO: 3514 - DNA, 40 bp, Artificial Sequence
  Description of Artificial Sequence: Synthetic primer
catatatcacaatattctgcttgagaaacccacaacaagc

SEQ ID NO: 3515 - DNA, 40 bp, Artificial Sequence
  Description of Artificial Sequence: Synthetic primer
tgttaaaaataagatgttgatttttaaaaaatcaattaca

SEQ ID NO: 3516 - DNA, 40 bp, Artificial Sequence
  Description of Artificial Sequence: Synthetic primer
gcagccttggagtgcttctgcccctcaggtctttgctgag

SEQ ID NO: 3517 - DNA, 40 bp, Artificial Sequence
  Description of Artificial Sequence: Synthetic primer
ggcccaccacaggcatgagtatcctcagggagcgcgatga

SEQ ID NO: 3518 - DNA, 40 bp, Artificial Sequence
  Description of Artificial Sequence: Synthetic primer
gcatgtccttgacctgcctgtgaccttctttgtgttctac

SEQ ID NO: 3519 - DNA, 40 bp, Artificial Sequence
  Description of Artificial Sequence: Synthetic primer
tgggccccaccaccaccccttcagacctcaaacccatctc

SEQ ID NO: 3520 - DNA, 40 bp, Artificial Sequence
  Description of Artificial Sequence: Synthetic primer
agtaactttaccgatttcaaaccaaaactgaaagtaaaaa

SEQ ID NO: 3521 - DNA, 40 bp, Artificial Sequence
  Description of Artificial Sequence: Synthetic primer
taaattttagttaataaaacatgttttcttattttaaaac

SEQ ID NO: 3522 - DNA, 40 bp, Artificial Sequence
  Description of Artificial Sequence: Synthetic primer
gtgggcatgaagatgggcaccagagagaaggcaggagagc

SEQ ID NO: 3523 - DNA, 40 bp, Artificial Sequence
  Description of Artificial Sequence: Synthetic primer
ttggcatattttgcctttagtggtcctgaaaatgatggtg

SEQ ID NO: 3524 - DNA, 40 bp, Artificial Sequence
  Description of Artificial Sequence: Synthetic primer
ggtgagtgggagatgtagattcggcgtcctcgcaaactgc

SEQ ID NO: 3525 - DNA, 40 bp, Artificial Sequence
  Description of Artificial Sequence: Synthetic primer
actgcggagctgaacttaggaccattatcagaacaggatc

SEQ ID NO: 3526 - DNA, 40 bp, Artificial Sequence
  Description of Artificial Sequence: Synthetic primer
tgcctggcgaggcacagctgccacactgataatgttcttc

SEQ ID NO: 3527 - DNA, 40 bp, Artificial Sequence
  Description of Artificial Sequence: Synthetic primer
aaggccccaggccatgtggggacgcggagccgtcctactc

SEQ ID NO: 3528 - DNA, 40 bp, Artificial Sequence
  Description of Artificial Sequence: Synthetic primer
atggctattttacacaaaagaaggcttctcagtttttaag

SEQ ID NO: 3529 - DNA, 40 bp, Artificial Sequence
  Description of Artificial Sequence: Synthetic primer
attaaaaatttttaccttcatatgccaacacacactaagc

SEQ ID NO: 3530 - DNA, 40 bp, Artificial Sequence
  Description of Artificial Sequence: Synthetic primer
aaaaattcaacaaactaaacttgaaataactttactgttt

SEQ ID NO: 3531 - DNA, 40 bp, Artificial Sequence
  Description of Artificial Sequence: Synthetic primer
taaaaatgtttcatgtattttgtctttgtgatgttcaagg

SEQ ID NO: 3532 - DNA, 40 bp, Artificial Sequence
  Description of Artificial Sequence: Synthetic primer
ctggaaagaaagtaaattagctgtcaaacctcctaacttc

SEQ ID NO: 3533 - DNA, 40 bp, Artificial Sequence
  Description of Artificial Sequence: Synthetic primer
attttgacatcaaaaattatttccctcctttacttcatat

SEQ ID NO: 3534 - DNA, 40 bp, Artificial Sequence
  Description of Artificial Sequence: Synthetic primer
cctccgcaggagtgactcggaggtctgaggctggactttc

SEQ ID NO: 3535 - DNA, 40 bp, Artificial Sequence
  Description of Artificial Sequence: Synthetic primer
taaaaactgccctgtattaaatagcctactaatcaagttt

SEQ ID NO: 3536 - DNA, 40 bp, Artificial Sequence
  Description of Artificial Sequence: Synthetic primer
aaaagtacaaatttacatactaataataagatttcaaatt

SEQ ID NO: 3537 - DNA, 40 bp, Artificial Sequence
  Description of Artificial Sequence: Synthetic primer
tttattttcctagagtaagccagggcttttgttttcttcc

SEQ ID NO: 3538 - DNA, 40 bp, Artificial Sequence
  Description of Artificial Sequence: Synthetic primer
ctgatatggtagacagagcctaaacatccccttaaattgg

SEQ ID NO: 3539 - DNA, 40 bp, Artificial Sequence
  Description of Artificial Sequence: Synthetic primer
gcctacctgtccccttcctgacttttcggttccccaaacc

SEQ ID NO: 3540 - DNA, 40 bp, Artificial Sequence
  Description of Artificial Sequence: Synthetic primer
gagtcctggcactggagtttgctgactccctctggtttcc

SEQ ID NO: 3541 - DNA, 40 bp, Artificial Sequence
  Description of Artificial Sequence: Synthetic primer
ctctagagccaggggtcagccacaatttttggtctcctac

SEQ ID NO: 3542 - DNA, 40 bp, Artificial Sequence
  Description of Artificial Sequence: Synthetic primer
cccaacccagcagccttggccgagacgtggtcaggaggcc

SEQ ID NO: 3543 - DNA, 40 bp, Artificial Sequence
  Description of Artificial Sequence: Synthetic primer
atccaatatatatgttgaaatagtaatccttacgtgaatc

SEQ ID NO: 3544 - DNA, 40 bp, Artificial Sequence
  Description of Artificial Sequence: Synthetic primer
taaataaatgtgtagttttggaatgggcttctgaaagttc

SEQ ID NO: 3545 - DNA, 40 bp, Artificial Sequence
  Description of Artificial Sequence: Synthetic primer
tgcaggatcattttaatgttttgattgtagatgaagtgac

SEQ ID NO: 3546 - DNA, 40 bp, Artificial Sequence
  Description of Artificial Sequence: Synthetic primer
aaacctacttaacctggcttcctcagcaagaagtcgaaac

SEQ ID NO: 3547 - DNA, 40 bp, Artificial Sequence
  Description of Artificial Sequence: Synthetic primer
ttgttaaaagctaaaaaatggtcctcatttgtcatttttc

SEQ ID NO: 3548 - DNA, 40 bp, Artificial Sequence
  Description of Artificial Sequence: Synthetic primer
aatattaactgcaataagaaaatccccagtctaatactta

SEQ ID NO: 3549 - DNA, 40 bp, Artificial Sequence
  Description of Artificial Sequence: Synthetic primer
acccttttgtgattttcatctaccttcacaccttttcata

SEQ ID NO: 3550 - DNA, 40 bp, Artificial Sequence
  Description of Artificial Sequence: Synthetic primer
attctttatcagtctccagctctttaaaatccatacctcc

SEQ ID NO: 3551 - DNA, 40 bp, Artificial Sequence
  Description of Artificial Sequence: Synthetic primer
ggggcatggagccggcgtggaaccagagccctcactcctg

SEQ ID NO: 3552 - DNA, 40 bp, Artificial Sequence
  Description of Artificial Sequence: Synthetic primer
cgcctccccacccacctgggccacatcctcatgcttgttc

SEQ ID NO: 3553 - DNA, 40 bp, Artificial Sequence
  Description of Artificial Sequence: Synthetic primer
tcccaaagtgcagcttgtctaaaccttcatctccttgaac

SEQ ID NO: 3554 - DNA, 40 bp, Artificial Sequence
  Description of Artificial Sequence: Synthetic primer
ctaatacacatttgtcctccacaccctctggatcctcctg

SEQ ID NO: 3555 - DNA, 40 bp, Artificial Sequence
  Description of Artificial Sequence: Synthetic primer
ccctcctctggtatcctgggcctcactgagatgcttttcc

SEQ ID NO: 3556 - DNA, 40 bp, Artificial Sequence
  Description of Artificial Sequence: Synthetic primer
ggaagagttcatggggaccagctgcagggaccgcactcac

SEQ ID NO: 3557 - DNA, 40 bp, Artificial Sequence
  Description of Artificial Sequence: Synthetic primer
catgtagtgaaaaataaagcatgtctggatgaaatactac

SEQ ID NO: 3558 - DNA, 40 bp, Artificial Sequence
  Description of Artificial Sequence: Synthetic primer
aaaacttttttctaaaaatgatatttttgccattttttcc

SEQ ID NO: 3559 - DNA, 40 bp, Artificial Sequence
  Description of Artificial Sequence: Synthetic primer
tattaagtaggtgatacagtataaaaatgatgaggggaac

SEQ ID NO: 3560 - DNA, 40 bp, Artificial Sequence
  Description of Artificial Sequence: Synthetic primer
ctggaaatacttcatttatttttaaatccttttgttttag

SEQ ID NO: 3561 - DNA, 40 bp, Artificial Sequence
  Description of Artificial Sequence: Synthetic primer
ctgttgactgcgctcctcacttccctggtgcttctgattc

SEQ ID NO: 3562 - DNA, 40 bp, Artificial Sequence
  Description of Artificial Sequence: Synthetic primer
gagataagaaaatcgagacccaaaactgctgacagaaaag

SEQ ID NO: 3563 - DNA, 40 bp, Artificial Sequence
  Description of Artificial Sequence: Synthetic primer
cacactaaaatccagtagttgcaatatatttaatttctgc

SEQ ID NO: 3564 - DNA, 40 bp, Artificial Sequence
  Description of Artificial Sequence: Synthetic primer
ttaataaatgtttatgggaattggttaacttgaactgtac

SEQ ID NO: 3565 - DNA, 40 bp, Artificial Sequence
  Description of Artificial Sequence: Synthetic primer
ataccataatttactttgccagaaatttgatttttgtttc

SEQ ID NO: 3566 - DNA, 40 bp, Artificial Sequence
  Description of Artificial Sequence: Synthetic primer
gatatacaatttttgtcaattaaaaataaaatcaagttac

SEQ ID NO: 3567 - DNA, 40 bp, Artificial Sequence
  Description of Artificial Sequence: Synthetic primer
aattagcaacaagaaaaactaagcaagttgacatgatagg

SEQ ID NO: 3568 - DNA, 40 bp, Artificial Sequence
  Description of Artificial Sequence: Synthetic primer
aaagtcacactgaaatagtaaatgttacaaaactaatctc

SEQ ID NO: 3569 - DNA, 40 bp, Artificial Sequence
  Description of Artificial Sequence: Synthetic primer
tcagatggacctaccaaggagatgaaaagtgagaagaatc

SEQ ID NO: 3570 - DNA, 40 bp, Artificial Sequence
  Description of Artificial Sequence: Synthetic primer
aagataatcctttgactcatgttaccactgtccctttttg

SEQ ID NO: 3571 - DNA, 40 bp, Artificial Sequence
  Description of Artificial Sequence: Synthetic primer
tcccgccccaccctaaagaaggaggccccagagggcaaag

SEQ ID NO: 3572 - DNA, 40 bp, Artificial Sequence
  Description of Artificial Sequence: Synthetic primer
ccctcctccctcccacctcccaccctgctgccttcatccc

SEQ ID NO: 3573 - DNA, 40 bp, Artificial Sequence
  Description of Artificial Sequence: Synthetic primer
gcatttgtcaacggacagcagataaatggctcctttagta

SEQ ID NO: 3574 - DNA, 40 bp, Artificial Sequence
  Description of Artificial Sequence: Synthetic primer
acacattctaatgttcggcttttgttctgtgcccccattg

SEQ ID NO: 3575 - DNA, 40 bp, Artificial Sequence
  Description of Artificial Sequence: Synthetic primer
ggggagtggggttagaagcagaacactttcgctgtgtgtg

SEQ ID NO: 3576 - DNA, 40 bp, Artificial Sequence
  Description of Artificial Sequence: Synthetic primer
tttttaggcaaaaacgagtcctttatttgctcccctgtag

SEQ ID NO: 3577 - DNA, 40 bp, Artificial Sequence
  Description of Artificial Sequence: Synthetic primer
agatttttctgaccctaaattgggagaacaagctgattac

SEQ ID NO: 3578 - DNA, 40 bp, Artificial Sequence
  Description of Artificial Sequence: Synthetic primer
aaaatgtaagatattaattttgttctttatattccttatg

SEQ ID NO: 3579 - DNA, 40 bp, Artificial Sequence
  Description of Artificial Sequence: Synthetic primer
gggttagatgggcactgccaccctccgcccaccccctgcc

SEQ ID NO: 3580 - DNA, 40 bp, Artificial Sequence
  Description of Artificial Sequence: Synthetic primer
tagggcagggctggggttccccactcggcccccaccttac

SEQ ID NO: 3581 - DNA, 40 bp, Artificial Sequence
  Description of Artificial Sequence: Synthetic primer
tgttgctgtatgtagtcggtgctgtgacttgtttgtgctc

SEQ ID NO: 3582 - DNA, 40 bp, Artificial Sequence
  Description of Artificial Sequence: Synthetic primer
ttgctttgaaagaaacagctaataaaaagttctccaaact

SEQ ID NO: 3583 - DNA, 40 bp, Artificial Sequence
  Description of Artificial Sequence: Synthetic primer
attcagggaaaaaaggatattttaaaaagtaaaaatattc

SEQ ID NO: 3584 - DNA, 40 bp, Artificial Sequence
  Description of Artificial Sequence: Synthetic primer
aatgtactactggttcagatttgtcattttggctttacag

SEQ ID NO: 3585 - DNA, 40 bp, Artificial Sequence
  Description of Artificial Sequence: Synthetic primer
atttctctagtgtttatactgataagcatttgtatttttc

SEQ ID NO: 3586 - DNA, 40 bp, Artificial Sequence
  Description of Artificial Sequence: Synthetic primer
atctagtatataattccaaaattagcaactaaccacatac

SEQ ID NO: 3587 - DNA, 40 bp, Artificial Sequence
  Description of Artificial Sequence: Synthetic primer
ccgggctggggccttctggggaggggaaggatggaggcta

SEQ ID NO: 3588 - DNA, 40 bp, Artificial Sequence
  Description of Artificial Sequence: Synthetic primer
ctacctctggagcaaagcagcaccagactagtggccaagc

SEQ ID NO: 3589 - DNA, 40 bp, Artificial Sequence
  Description of Artificial Sequence: Synthetic primer
actgtgtcaccaccgctgcctcctcagggccccttggcag

SEQ ID NO: 3590 - DNA, 40 bp, Artificial Sequence
  Description of Artificial Sequence: Synthetic primer
tggggcccctcctgagctgcctgtgaccccaccccttctc

SEQ ID NO: 3591 - DNA, 40 bp, Artificial Sequence
  Description of Artificial Sequence: Synthetic primer
tgtcctggacgggaaggagcttacagcctctcaccttgtc

SEQ ID NO: 3592 - DNA, 40 bp, Artificial Sequence
  Description of Artificial Sequence: Synthetic primer
cccgcccgagcccttagctgagaggcaaggccgcgttcac

SEQ ID NO: 3593 - DNA, 40 bp, Artificial Sequence
  Description of Artificial Sequence: Synthetic primer
gagtgtttggatctcatgcttgtggtttttctttcttttc

SEQ ID NO: 3594 - DNA, 40 bp, Artificial Sequence
  Description of Artificial Sequence: Synthetic primer
tcatcagcagccctggagatgacaaagatagtgctgaggg

SEQ ID NO: 3595 - DNA, 40 bp, Artificial Sequence
  Description of Artificial Sequence: Synthetic primer
ggctgggagttcccagagcctcacttcctctgtcccctac

SEQ ID NO: 3596 - DNA, 40 bp, Artificial Sequence
  Description of Artificial Sequence: Synthetic primer
gaagtccactggcgacagcagtctcctgcccggcacatac

SEQ ID NO: 3597 - DNA, 40 bp, Artificial Sequence
  Description of Artificial Sequence: Synthetic primer
agaacatatcattttccctctcccaggttcagtgtgagtc

SEQ ID NO: 3598 - DNA, 40 bp, Artificial Sequence
  Description of Artificial Sequence: Synthetic primer
ctaatgtgtgttcaacgtcattttgagaagagcatgaaac

SEQ ID NO: 3599 - DNA, 40 bp, Artificial Sequence
  Description of Artificial Sequence: Synthetic primer
ttaattaagaaatgagaaacgtacctaataaaaaaaaatg

SEQ ID NO: 3600 - DNA, 40 bp, Artificial Sequence
  Description of Artificial Sequence: Synthetic primer
catatactactactaataaagtataaaatggtgacgaatc

SEQ ID NO: 3601 - DNA, 40 bp, Artificial Sequence
  Description of Artificial Sequence: Synthetic primer
aaagacaaagaaggtgtatttaacaaacttgaattgtttc

SEQ ID NO: 3602 - DNA, 40 bp, Artificial Sequence
  Description of Artificial Sequence: Synthetic primer
gattccagccaaggaaagactgtgtaacatctccagtatg

SEQ ID NO: 3603 - DNA, 40 bp, Artificial Sequence
  Description of Artificial Sequence: Synthetic primer
ggtctcactacctttccactgtttttacctcatgtgttcc

SEQ ID NO: 3604 - DNA, 40 bp, Artificial Sequence
  Description of Artificial Sequence: Synthetic primer
gccacagctcatcctggacaaggagaagtaagacgttcag

SEQ ID NO: 3605 - DNA, 40 bp, Artificial Sequence
  Description of Artificial Sequence: Synthetic primer
tggaaataaggtaatatatgccttttgagctgtcttgacg

SEQ ID NO: 3606 - DNA, 40 bp, Artificial Sequence
  Description of Artificial Sequence: Synthetic primer
caataaacttctttaaaaacttgtgaagttagagctagtt

SEQ ID NO: 3607 - DNA, 40 bp, Artificial Sequence
  Description of Artificial Sequence: Synthetic primer
ctctcgccagcgggtccaccttcctgggctgtgtgttttc

SEQ ID NO: 3608 - DNA, 40 bp, Artificial Sequence
  Description of Artificial Sequence: Synthetic primer
cctctcctacctcccagcctcccggctctctccagactcc

SEQ ID NO: 3609 - DNA, 40 bp, Artificial Sequence
  Description of Artificial Sequence: Synthetic primer
gcaggaggcccggctgccaccgtgcgcatgcgcagaggag

SEQ ID NO: 3610 - DNA, 40 bp, Artificial Sequence
  Description of Artificial Sequence: Synthetic primer
ttgggaggcgattacaattctgttattctgatgctatttg

SEQ ID NO: 3611 - DNA, 40 bp, Artificial Sequence
  Description of Artificial Sequence: Synthetic primer
tgaagatttttggcttaacaatgaagaggaacactcactg

SEQ ID NO: 3612 - DNA, 40 bp, Artificial Sequence
  Description of Artificial Sequence: Synthetic primer
cgtgctcctggttgggtgaccacagacccacctggaaccc

SEQ ID NO: 3613 - DNA, 40 bp, Artificial Sequence
  Description of Artificial Sequence: Synthetic primer
ttaaagttcttctgcttaattggtaactaatttcaaatgc

SEQ ID NO: 3614 - DNA, 40 bp, Artificial Sequence
  Description of Artificial Sequence: Synthetic primer
atcaaattaaaaaataaaatcaaaagtaccaccaaatact

SEQ ID NO: 3615 - DNA, 40 bp, Artificial Sequence
  Description of Artificial Sequence: Synthetic primer
taaaaaaagaaagaaaaaatcctcattactgtaatattcc

SEQ ID NO: 3616 - DNA, 40 bp, Artificial Sequence
  Description of Artificial Sequence: Synthetic primer
tgtgttctaagcctgctggagtgaccacacttccaagacc

SEQ ID NO: 3617 - DNA, 40 bp, Artificial Sequence
  Description of Artificial Sequence: Synthetic primer
acctgtaggcgtgcaggcccaaatcttccttgctcagtgg

SEQ ID NO: 3618 - DNA, 40 bp, Artificial Sequence
  Description of Artificial Sequence: Synthetic primer
atcatccttctcctccgggcctgttgctgatggcataatc

SEQ ID NO: 3619 - DNA, 40 bp, Artificial Sequence
  Description of Artificial Sequence: Synthetic primer
tccaccagtggaatgcacctactgtgaagttgtgtctcag

SEQ ID NO: 3620 - DNA, 40 bp, Artificial Sequence
  Description of Artificial Sequence: Synthetic primer
ggcggctggtgcccttcccagaaacaaacaagtcactcac

SEQ ID NO: 3621 - DNA, 40 bp, Artificial Sequence
  Description of Artificial Sequence: Synthetic primer
ctctagggtccagaaggccctgtcctgacgcctcctctcc

SEQ ID NO: 3622 - DNA, 40 bp, Artificial Sequence
  Description of Artificial Sequence: Synthetic primer
agggtctcactcgctctgcccagaggctcgcagtcttttg

SEQ ID NO: 3623 - DNA, 40 bp, Artificial Sequence
  Description of Artificial Sequence: Synthetic primer
caaccccacgttccttctcctctcggctgccccccagacc

SEQ ID NO: 3624 - DNA, 40 bp, Artificial Sequence
  Description of Artificial Sequence: Synthetic primer
aaacatatgttcatttattttccttttgttgctactctcc

SEQ ID NO: 3625 - DNA, 40 bp, Artificial Sequence
  Description of Artificial Sequence: Synthetic primer
aatactccactatgtaagacaaaggctggtgctggaactc

SEQ ID NO: 3626 - DNA, 40 bp, Artificial Sequence
  Description of Artificial Sequence: Synthetic primer
ttttataactagattttccttctctccattcccctgtccc

SEQ ID NO: 3627 - DNA, 40 bp, Artificial Sequence
  Description of Artificial Sequence: Synthetic primer
accttattgttttaactctattgttctgtttgttttctcc

SEQ ID NO: 3628 - DNA, 40 bp, Artificial Sequence
  Description of Artificial Sequence: Synthetic primer
tcatctgtgtgcatggcaaaagcacaagctttttcttaac

SEQ ID NO: 3629 - DNA, 40 bp, Artificial Sequence
  Description of Artificial Sequence: Synthetic primer
gggctggcccgcacctcccctgatggccgctcaccctgtg

SEQ ID NO: 3630 - DNA, 40 bp, Artificial Sequence
  Description of Artificial Sequence: Synthetic primer
agggtcacctaaggagccggctctcaaggggaggccgggg

SEQ ID NO: 3631 - DNA, 40 bp, Artificial Sequence
  Description of Artificial Sequence: Synthetic primer
atgacacaagtgtatttcgacaaaacatgagcccacattg

SEQ ID NO: 3632 - DNA, 40 bp, Artificial Sequence
  Description of Artificial Sequence: Synthetic primer
tgcgctgtaactgaggtggttttaaattatctgtctcttg

SEQ ID NO: 3633 - DNA, 40 bp, Artificial Sequence
  Description of Artificial Sequence: Synthetic primer
ataaacttaaaatattgcatttaaaatattcttttttttc

SEQ ID NO: 3634 - DNA, 40 bp, Artificial Sequence
  Description of Artificial Sequence: Synthetic primer
ctcatagcacagtgtttagtaattcaacttaggtaatctg

SEQ ID NO: 3635 - DNA, 40 bp, Artificial Sequence
  Description of Artificial Sequence: Synthetic primer
aacaaacaaacaaaaaacgaagaagtttagaaactgtttc

SEQ ID NO: 3636 - DNA, 40 bp, Artificial Sequence
  Description of Artificial Sequence: Synthetic primer
gaatacaaacagtaaatatgcctaaaattcttgttttaca

SEQ ID NO: 3637 - DNA, 40 bp, Artificial Sequence
  Description of Artificial Sequence: Synthetic primer
gattggtttaggatttgtttcatttgatactttattttcc

SEQ ID NO: 3638 - DNA, 40 bp, Artificial Sequence
  Description of Artificial Sequence: Synthetic primer
atacataacatgtcattagaggtcagcccaataagaaaag

SEQ ID NO: 3639 - DNA, 40 bp, Artificial Sequence
  Description of Artificial Sequence: Synthetic primer
tgcatatttcaaataggaaacaaattgttgaattgtcttc

SEQ ID NO: 3640 - DNA, 40 bp, Artificial Sequence
  Description of Artificial Sequence: Synthetic primer
attatatcaaagaaatatactccccaaattgtttccatac

SEQ ID NO: 3641 - DNA, 40 bp, Artificial Sequence
  Description of Artificial Sequence: Synthetic primer
actgtatctacccactctcttttcagtgcctgttaagttg

SEQ ID NO: 3642 - DNA, 40 bp, Artificial Sequence
  Description of Artificial Sequence: Synthetic primer
catgtaactagtgtttcttattaggactctgtcttttccc

SEQ ID NO: 3643 - DNA, 40 bp, Artificial Sequence
  Description of Artificial Sequence: Synthetic primer
aggggttgcatatttgactctgaatcatcttttcttttcc

SEQ ID NO: 3644 - DNA, 40 bp, Artificial Sequence
  Description of Artificial Sequence: Synthetic primer
ctggatctcctttatatacctgctagaacatcctctgtcc

SEQ ID NO: 3645 - DNA, 40 bp, Artificial Sequence
  Description of Artificial Sequence: Synthetic primer
ttacagcactaaaataacagacaattgcatcacacatttc

SEQ ID NO: 3646 - DNA, 40 bp, Artificial Sequence
  Description of Artificial Sequence: Synthetic primer
aaacattttcaagtttcttctctgttctgttttgttttag

SEQ ID NO: 3647 - DNA, 40 bp, Artificial Sequence
  Description of Artificial Sequence: Synthetic primer
gggtctcttgtccccgcagtcctggatcagtgagagtgtg

SEQ ID NO: 3648 - DNA, 40 bp, Artificial Sequence
  Description of Artificial Sequence: Synthetic primer
ttggagctggagctcttgtgccggccggcatgggacagag

SEQ ID NO: 3649 - DNA, 40 bp, Artificial Sequence
  Description of Artificial Sequence: Synthetic primer
agtgggacaagggacaggcagaggaaggctgggaagagag

SEQ ID NO: 3650 - DNA, 40 bp, Artificial Sequence
  Description of Artificial Sequence: Synthetic primer
tgctctctgagtgccatcatctgtgttcctgctcccacag

SEQ ID NO: 3651 - DNA, 40 bp, Artificial Sequence
  Description of Artificial Sequence: Synthetic primer
caaaaatgcaacttcaaaaagtagattatccaaaaattcc

SEQ ID NO: 3652 - DNA, 40 bp, Artificial Sequence
  Description of Artificial Sequence: Synthetic primer
ttaaaacatttaacataatctgggaaatttttttctcttc

SEQ ID NO: 3653 - DNA, 40 bp, Artificial Sequence
  Description of Artificial Sequence: Synthetic primer
cggcctccctccctctgcctggccttccgtgcccacactc

SEQ ID NO: 3654 - DNA, 40 bp, Artificial Sequence
  Description of Artificial Sequence: Synthetic primer
tgtgtggagcctgggctctgaccgtctgtctcctccttcc

SEQ ID NO: 3655 - DNA, 40 bp, Artificial Sequence
  Description of Artificial Sequence: Synthetic primer
ttgtttttttcatggttcttcttttctttgctggatctgg

SEQ ID NO: 3656 - DNA, 40 bp, Artificial Sequence
  Description of Artificial Sequence: Synthetic primer
taaagttaacttgtgcataaaacttatcaataaaaatgtt

SEQ ID NO: 3657 - DNA, 40 bp, Artificial Sequence
  Description of Artificial Sequence: Synthetic primer
aaaaaagaaggagcccaggcaaggcccggtcagtcaggtg

SEQ ID NO: 3658 - DNA, 40 bp, Artificial Sequence
  Description of Artificial Sequence: Synthetic primer
cttgtcgtcttcctgtcagtgtttctttcctttctgtctc

SEQ ID NO: 3659 - DNA, 40 bp, Artificial Sequence
  Description of Artificial Sequence: Synthetic primer
tatgaattagttttcatttgtatatttatttatatttgtt

SEQ ID NO: 3660 - DNA, 40 bp, Artificial Sequence
  Description of Artificial Sequence: Synthetic primer
gcaataccagcattggtttatgatcagtctttcaatcaac

SEQ ID NO: 3661 - DNA, 40 bp, Artificial Sequence
  Description of Artificial Sequence: Synthetic primer
aacctttgtttctaggccttcatatttcatgcttttgaca

SEQ ID NO: 3662 - DNA, 40 bp, Artificial Sequence
  Description of Artificial Sequence: Synthetic primer
cagtatttctaactaataccctgctatttatctttcacag

SEQ ID NO: 3663 - DNA, 40 bp, Artificial Sequence
  Description of Artificial Sequence: Synthetic primer
gataaatatttttgaagataagcaaaaacaaattgtaatg

SEQ ID NO: 3664 - DNA, 40 bp, Artificial Sequence
  Description of Artificial Sequence: Synthetic primer
aaaaaaaagccattatcatgaacaatatcaagtttacaaa

SEQ ID NO: 3665 - DNA, 40 bp, Artificial Sequence
  Description of Artificial Sequence: Synthetic primer
tttattttacaggtttttaatgaagataccagatccttgg

SEQ ID NO: 3666 - DNA, 40 bp, Artificial Sequence
  Description of Artificial Sequence: Synthetic primer
taacatacaagagattaaaatgacactgaatgagaaaatg

SEQ ID NO: 3667 - DNA, 40 bp, Artificial Sequence
  Description of Artificial Sequence: Synthetic primer
aatccacaaaagtatgtttttagatatatcttttattttc

SEQ ID NO: 3668 - DNA, 40 bp, Artificial Sequence
  Description of Artificial Sequence: Synthetic primer
caaattacagctttaatcaagggttgatcagcaaacttac

SEQ ID NO: 3669 - DNA, 40 bp, Artificial Sequence
  Description of Artificial Sequence: Synthetic primer
ccactcaaatcccagggagagagggctcttctgtatggac

SEQ ID NO: 3670 - DNA, 40 bp, Artificial Sequence
  Description of Artificial Sequence: Synthetic primer
cgtgaactcataggtatttgttctctctctccctttctct

SEQ ID NO: 3671 - DNA, 40 bp, Artificial Sequence
  Description of Artificial Sequence: Synthetic primer
tggtgctttgctgattacttcacctctgatttctttccac

SEQ ID NO: 3672 - DNA, 40 bp, Artificial Sequence
  Description of Artificial Sequence: Synthetic primer
tatcgaaagagtctggatttttagggctcatactatcctc

SEQ ID NO: 3673 - DNA, 40 bp, Artificial Sequence
  Description of Artificial Sequence: Synthetic primer
gggtcttgttctccctccctaggaccttaagccagttatc

SEQ ID NO: 3674 - DNA, 40 bp, Artificial Sequence
  Description of Artificial Sequence: Synthetic primer
aggaggccccagggcagcgcgttcccgggcccccgggccc

SEQ ID NO: 3675 - DNA, 40 bp, Artificial Sequence
  Description of Artificial Sequence: Synthetic primer
cctcatcccaaacccacccaagttattccttgccccaaag

SEQ ID NO: 3676 - DNA, 40 bp, Artificial Sequence
  Description of Artificial Sequence: Synthetic primer
gtgtcaaggaaaattagattacttttgtcccccattattt

SEQ ID NO: 3677 - DNA, 40 bp, Artificial Sequence
  Description of Artificial Sequence: Synthetic primer
ttcctacctaagaataaaaatgggattgtttgcactaacc

SEQ ID NO: 3678 - DNA, 40 bp, Artificial Sequence
  Description of Artificial Sequence: Synthetic primer
cttgacatacctcagcacacacatacacacaaaatgaatg

SEQ ID NO: 3679 - DNA, 40 bp, Artificial Sequence
  Description of Artificial Sequence: Synthetic primer
tcaagggttaatatttcataaatagttacttttttttttc

SEQ ID NO: 3680 - DNA, 40 bp, Artificial Sequence
  Description of Artificial Sequence: Synthetic primer
taacaataatttgttagccatatgcacatgaatgaatttc

SEQ ID NO: 3681 - DNA, 40 bp, Artificial Sequence
  Description of Artificial Sequence: Synthetic primer
aagaccagctgcccctagcctgtcccagcccctggatcac

SEQ ID NO: 3682 - DNA, 40 bp, Artificial Sequence
  Description of Artificial Sequence: Synthetic primer
atccctctatccatcctcaaactgattccaataaccattc

SEQ ID NO: 3683 - DNA, 40 bp, Artificial Sequence
  Description of Artificial Sequence: Synthetic primer
gactggaaactttccacttgataagaggtcccaagactta

SEQ ID NO: 3684 - DNA, 40 bp, Artificial Sequence
  Description of Artificial Sequence: Synthetic primer
agggtgcagttatgcctcagattcacttttatcacctttc

SEQ ID NO: 3685 - DNA, 40 bp, Artificial Sequence
  Description of Artificial Sequence: Synthetic primer
aacatcatttgctccaaactgaccaaactgttcttattac

SEQ ID NO: 3686 - DNA, 40 bp, Artificial Sequence
  Description of Artificial Sequence: Synthetic primer
agtgtggaatccagagtgagctttcattttctcagttatc

SEQ ID NO: 3687 - DNA, 40 bp, Artificial Sequence
  Description of Artificial Sequence: Synthetic primer
ggtggcccaggtgcaggagaggcgggcagtgggctccatc

SEQ ID NO: 3688 - DNA, 40 bp, Artificial Sequence
  Description of Artificial Sequence: Synthetic primer
ctgctccccacaataggacatcggcagaaactagatgatc

SEQ ID NO: 3689 - DNA, 40 bp, Artificial Sequence
  Description of Artificial Sequence: Synthetic primer
ttgtggtattccaggctggaatactagtagcaggctggac

SEQ ID NO: 3690 - DNA, 40 bp, Artificial Sequence
  Description of Artificial Sequence: Synthetic primer
tttgtttttagtttcacacattttccaaaataactagttc

SEQ ID NO: 3691 - DNA, 40 bp, Artificial Sequence
  Description of Artificial Sequence: Synthetic primer
ggcccctctgcctccagccctgacgtctccctctctggac

SEQ ID NO: 3692 - DNA, 40 bp, Artificial Sequence
  Description of Artificial Sequence: Synthetic primer
cccctgggcagtcctgggcatggctccctgctgcccctgg

SEQ ID NO: 3693 - DNA, 40 bp, Artificial Sequence
  Description of Artificial Sequence: Synthetic primer
taaagaaccagcctgtttcccgtctgaagtctgtgcactc

SEQ ID NO: 3694 - DNA, 40 bp, Artificial Sequence
  Description of Artificial Sequence: Synthetic primer
ttgcctagggaatcttactttacatggggtcatctgagtg

SEQ ID NO: 3695 - DNA, 40 bp, Artificial Sequence
  Description of Artificial Sequence: Synthetic primer
gaattattctcatgtcctcatctagctttgccacctacac

SEQ ID NO: 3696 - DNA, 40 bp, Artificial Sequence
  Description of Artificial Sequence: Synthetic primer
gtctgtgttagtcctcagattggtatctgtgtgttttcac

SEQ ID NO: 3697 - DNA, 40 bp, Artificial Sequence
  Description of Artificial Sequence: Synthetic primer
ccttggggccagcccaggagccccagcggcggcacccacg

SEQ ID NO: 3698 - DNA, 40 bp, Artificial Sequence
  Description of Artificial Sequence: Synthetic primer
catcatacttgacagaacttatggaaataacaagaaaatg

SEQ ID NO: 3699 - DNA, 40 bp, Artificial Sequence
  Description of Artificial Sequence: Synthetic primer
acacaaaataatcttcatcatgaaaattatatatatattg

SEQ ID NO: 3700 - DNA, 40 bp, Artificial Sequence
  Description of Artificial Sequence: Synthetic primer
ctatatatatatatttttaattttgcacgattcttttaga

SEQ ID NO: 3701 - DNA, 40 bp, Artificial Sequence
  Description of Artificial Sequence: Synthetic primer
gcagtgaaaagagtctcaaacacaaactagagtcacacac

SEQ ID NO: 3702 - DNA, 40 bp, Artificial Sequence
  Description of Artificial Sequence: Synthetic primer
ctcttcttccttgactttagaaaaagaaaactgccaaaag

SEQ ID NO: 3703 - DNA, 40 bp, Artificial Sequence
  Description of Artificial Sequence: Synthetic primer
taattttgaggatactgagttttacagtttggtatttttc

SEQ ID NO: 3704 - DNA, 40 bp, Artificial Sequence
  Description of Artificial Sequence: Synthetic primer
actggatccagtggtatagaaatcttcgatttttaaattc

SEQ ID NO: 3705 - DNA, 40 bp, Artificial Sequence
  Description of Artificial Sequence: Synthetic primer
tttttttttacctgaaaaaggttaagggctctgactgctg

SEQ ID NO: 3706 - DNA, 40 bp, Artificial Sequence
  Description of Artificial Sequence: Synthetic primer
ggacagggccctgctcacattccgtctctctggggaacac

SEQ ID NO: 3707 - DNA, 40 bp, Artificial Sequence
  Description of Artificial Sequence: Synthetic primer
aggcgtgaggggagctctcccgttcctgccagctcactgc

SEQ ID NO: 3708 - DNA, 40 bp, Artificial Sequence
  Description of Artificial Sequence: Synthetic primer
tgctttctggaatagcattgcctaacagtcttcgtacagc

SEQ ID NO: 3709 - DNA, 40 bp, Artificial Sequence
  Description of Artificial Sequence: Synthetic primer
agggcagtgggtttgggtatgtacagtgccatgatgtttc

SEQ ID NO: 3710 - DNA, 40 bp, Artificial Sequence
  Description of Artificial Sequence: Synthetic primer
atgtggccttggcatcaggaggcctggcacggacgcagag

SEQ ID NO: 3711 - DNA, 40 bp, Artificial Sequence
  Description of Artificial Sequence: Synthetic primer
ctgagtggactggggtctcactgtgcctgtttattcctgc

SEQ ID NO: 3712 - DNA, 40 bp, Artificial Sequence
  Description of Artificial Sequence: Synthetic primer
gatcagagagtgatttgagcaaccaaggaacattctggag

SEQ ID NO: 3713 - DNA, 40 bp, Artificial Sequence
  Description of Artificial Sequence: Synthetic primer
gtgagagatcctgagtaaaagtctcctttctgttctttcc

SEQ ID NO: 3714 - DNA, 40 bp, Artificial Sequence
  Description of Artificial Sequence: Synthetic primer
gttagtaagaggtttatttgaggggaagtgaaagaacttg

SEQ ID NO: 3715 - DNA, 40 bp, Artificial Sequence
  Description of Artificial Sequence: Synthetic primer
ggggctttatttgctttttgctttatgttttttggtgact

SEQ ID NO: 3716 - DNA, 40 bp, Artificial Sequence
  Description of Artificial Sequence: Synthetic primer
cgccctcaaccccagccggacgccgaccccggggaggccc

SEQ ID NO: 3717 - DNA, 40 bp, Artificial Sequence
  Description of Artificial Sequence: Synthetic primer
gtcctgctgcgcacgtgggaagccctggccccggccaccc

SEQ ID NO: 3718 - DNA, 40 bp, Artificial Sequence
  Description of Artificial Sequence: Synthetic primer
tggttaggttcgtttgtacttgtgtccctctaaaggaaag

SEQ ID NO: 3719 - DNA, 40 bp, Artificial Sequence
  Description of Artificial Sequence: Synthetic primer
caggtaacaaactgtggaaagcgaaaccatagatacgagc

SEQ ID NO: 3720 - DNA, 40 bp, Artificial Sequence
  Description of Artificial Sequence: Synthetic primer
aagaaggccttccgttggggcaatcagcttactcaacatc

SEQ ID NO: 3721 - DNA, 40 bp, Artificial Sequence
  Description of Artificial Sequence: Synthetic primer
tcgagtcaattaccttactcagcatcagaagatccacacc

SEQ ID NO: 3722 - DNA, 40 bp, Artificial Sequence
  Description of Artificial Sequence: Synthetic primer
ttatgaataacgaggcttgagccccatcgaaaagccttcc

SEQ ID NO: 3723 - DNA, 40 bp, Artificial Sequence
  Description of Artificial Sequence: Synthetic primer
accccagcgaaaggccttcccacactccttacattcgtga

SEQ ID NO: 3724 - DNA, 40 bp, Artificial Sequence
  Description of Artificial Sequence: Synthetic primer
ccagtagcttggagctcggcggcacaaccagcaccatctg

SEQ ID NO: 3725 - DNA, 40 bp, Artificial Sequence
  Description of Artificial Sequence: Synthetic primer
acatttctaaataaaactttctaggaaacggcacacttac

SEQ ID NO: 3726 - DNA, 40 bp, Artificial Sequence
  Description of Artificial Sequence: Synthetic primer
agggttaaatcccgagtccagggatccagaggaaaggaag

SEQ ID NO: 3727 - DNA, 40 bp, Artificial Sequence
  Description of Artificial Sequence: Synthetic primer
ggagatatgggaagggcccagacagaggcaggagggttcc

SEQ ID NO: 3728 - DNA, 40 bp, Artificial Sequence
  Description of Artificial Sequence: Synthetic primer
acagggaaagtcctacttatgctgatcatgatgctttcag

SEQ ID NO: 3729 - DNA, 40 bp, Artificial Sequence
  Description of Artificial Sequence: Synthetic primer
agactcattatcattatgtctcattaaaatgctatttgcc

SEQ ID NO: 3730 - DNA, 40 bp, Artificial Sequence
  Description of Artificial Sequence: Synthetic primer
tagtttgctttaaaaaaatcatctcaaagaaaatattatc

SEQ ID NO: 3731 - DNA, 40 bp, Artificial Sequence
  Description of Artificial Sequence: Synthetic primer
ggaaaatgagcggtgactctgtttgctgattgttggtttc

SEQ ID NO: 3732 - DNA, 40 bp, Artificial Sequence
  Description of Artificial Sequence: Synthetic primer
tgcctagagtctcacctggtagataaacatagatactcac

SEQ ID NO: 3733 - DNA, 40 bp, Artificial Sequence
  Description of Artificial Sequence: Synthetic primer
tgtacaacttctgggaaagactgtgtgtggattagatgtg

SEQ ID NO: 3734 - DNA, 40 bp, Artificial Sequence
  Description of Artificial Sequence: Synthetic primer
tcaattgatttttcttttcttcttaaatttctattttccc

SEQ ID NO: 3735 - DNA, 40 bp, Artificial Sequence
  Description of Artificial Sequence: Synthetic primer
ttgcttttttaaaagttactgaatgagcccttttgttttt

SEQ ID NO: 3736 - DNA, 40 bp, Artificial Sequence
  Description of Artificial Sequence: Synthetic primer
actgatctacctgtaaattcagtgtttctatttttcttaa

SEQ ID NO: 3737 - DNA, 40 bp, Artificial Sequence
  Description of Artificial Sequence: Synthetic primer
ttaagaaataggaacgtatcttaattgtacatttgaaatg

SEQ ID NO: 3738 - DNA, 40 bp, Artificial Sequence
  Description of Artificial Sequence: Synthetic primer
acaaatcaacatgatacaagatggaaaacaatgataaaaa

SEQ ID NO: 3739 - DNA, 40 bp, Artificial Sequence
  Description of Artificial Sequence: Synthetic primer
ctaaattagggcacgttgtgcactgaaacactaaacagac

SEQ ID NO: 3740 - DNA, 40 bp, Artificial Sequence
  Description of Artificial Sequence: Synthetic primer
ccagtgttgtgcagccctcagcgccacccaccaccagaac

SEQ ID NO: 3741 - DNA, 40 bp, Artificial Sequence
  Description of Artificial Sequence: Synthetic primer
gtacaagtgcacatatacccactcctatgatttgtttctc

SEQ ID NO: 3742 - DNA, 40 bp, Artificial Sequence
  Description of Artificial Sequence: Synthetic primer
gcaagattaactttcggcctattaatctgtgccacgtaac

SEQ ID NO: 3743 - DNA, 40 bp, Artificial Sequence
  Description of Artificial Sequence: Synthetic primer
cggacccggcgagaggcggcggcgggagcggcggtgatgg

SEQ ID NO: 3744 - DNA, 40 bp, Artificial Sequence
  Description of Artificial Sequence: Synthetic primer
ggggctcgccctcctcccgcccgtctgcctcccgcctcac

SEQ ID NO: 3745 - DNA, 40 bp, Artificial Sequence
  Description of Artificial Sequence: Synthetic primer
tctggggccagagcacagggctgaaagcgggtggctcgtc

SEQ ID NO: 3746 - DNA, 40 bp, Artificial Sequence
  Description of Artificial Sequence: Synthetic primer
cacctcacatctttctcctccctgggaccgtctcccacag

SEQ ID NO: 3747 - DNA, 40 bp, Artificial Sequence
  Description of Artificial Sequence: Synthetic primer
gaagtcagcattaacagcataagaaatatgtgttttcgag

SEQ ID NO: 3748 - DNA, 40 bp, Artificial Sequence
  Description of Artificial Sequence: Synthetic primer
cagcaaaatctttaattgtgatgatttatatgctcttccc

SEQ ID NO: 3749 - DNA, 40 bp, Artificial Sequence
  Description of Artificial Sequence: Synthetic primer
gtctcaaagagggcgcgcgagaggggacaccggaagactg

SEQ ID NO: 3750 - DNA, 40 bp, Artificial Sequence
  Description of Artificial Sequence: Synthetic primer
ggagcgcctgtgggagccctggagggaactttcccagtcc

SEQ ID NO: 3751 - DNA, 40 bp, Artificial Sequence
  Description of Artificial Sequence: Synthetic primer
tctgtacaaccaggctcaactgttgcatggtagcagattt

SEQ ID NO: 3752 - DNA, 40 bp, Artificial Sequence
  Description of Artificial Sequence: Synthetic primer
gacttttccttaaaaagaaaaagaaagggagtcattaagc

SEQ ID NO: 3753 - DNA, 40 bp, Artificial Sequence
  Description of Artificial Sequence: Synthetic primer
tcaaaaaaagagagaggaaaagaaaggaaagcctcacctg

SEQ ID NO: 3754 - DNA, 40 bp, Artificial Sequence
  Description of Artificial Sequence: Synthetic primer
tggggtcccaaggctgagggtgaggcgggcagggcaggag

SEQ ID NO: 3755 - DNA, 40 bp, Artificial Sequence
  Description of Artificial Sequence: Synthetic primer
gtaaatatgtatagacattgaaaaggactcctcaacttgc

SEQ ID NO: 3756 - DNA, 40 bp, Artificial Sequence
  Description of Artificial Sequence: Synthetic primer
ccctcttctttgatccacaagagcctctgacttccctgac

SEQ ID NO: 3757 - DNA, 40 bp, Artificial Sequence
  Description of Artificial Sequence: Synthetic primer
tgacgctcataatcttctctaatcggttcttctttccttg

SEQ ID NO: 3758 - DNA, 40 bp, Artificial Sequence
  Description of Artificial Sequence: Synthetic primer
tgtgttcaggttgtggggctgctctcttctctttatagtg

SEQ ID NO: 3759 - DNA, 40 bp, Artificial Sequence
  Description of Artificial Sequence: Synthetic primer
gccaaggaggccaggctgagccgaggcagatgagggagag

SEQ ID NO: 3760 - DNA, 40 bp, Artificial Sequence
  Description of Artificial Sequence: Synthetic primer
cgcgggagggctggcgcccatcggggctgctccctttcag

SEQ ID NO: 3761 - DNA, 40 bp, Artificial Sequence
  Description of Artificial Sequence: Synthetic primer
ccgcacagagcagatgctcagtaaaagtttgctgcacgag

SEQ ID NO: 3762 - DNA, 40 bp, Artificial Sequence
  Description of Artificial Sequence: Synthetic primer
ggcggcagcgcgccgcgggcccgagacttagtctcgggcc

SEQ ID NO: 3763 - DNA, 40 bp, Artificial Sequence
  Description of Artificial Sequence: Synthetic primer
ccaaataactcatagcttactacctgatttctgctttaac

SEQ ID NO: 3764 - DNA, 40 bp, Artificial Sequence
  Description of Artificial Sequence: Synthetic primer
gattcaataagttttcttctctggttttcctttttaatcc

SEQ ID NO: 3765 - DNA, 40 bp, Artificial Sequence
  Description of Artificial Sequence: Synthetic primer
ttcatggcctatttttattatctccttctcttaaatctgg

SEQ ID NO: 3766 - DNA, 40 bp, Artificial Sequence
  Description of Artificial Sequence: Synthetic primer
tctagataataaagagattaagaaaccctctccatatttg

SEQ ID NO: 3767 - DNA, 40 bp, Artificial Sequence
  Description of Artificial Sequence: Synthetic primer
tacattttagtgggcaaattatgtgtattcataagttttg

SEQ ID NO: 3768 - DNA, 40 bp, Artificial Sequence
  Description of Artificial Sequence: Synthetic primer
taatcacaagaatttgcaaagagaatttcaaaacaattac

SEQ ID NO: 3769 - DNA, 40 bp, Artificial Sequence
  Description of Artificial Sequence: Synthetic primer
ccccaagctgagcattccaggtacccttccctccctgttc

SEQ ID NO: 3770 - DNA, 40 bp, Artificial Sequence
  Description of Artificial Sequence: Synthetic primer
ctccgggccccatgagccggggcgcgggcgcgcttcagcg

SEQ ID NO: 3771 - DNA, 40 bp, Artificial Sequence
  Description of Artificial Sequence: Synthetic primer
tccaaggtcttactcttgcctttccgaggggacaacttcc

SEQ ID NO: 3772 - DNA, 40 bp, Artificial Sequence
  Description of Artificial Sequence: Synthetic primer
gcccgcccggccttcgggctccgggccgccccagctcggg

SEQ ID NO: 3773 - DNA, 40 bp, Artificial Sequence
  Description of Artificial Sequence: Synthetic primer
gggctctacagcttcgacctctggtggggtcggggctggg

SEQ ID NO: 3774 - DNA, 40 bp, Artificial Sequence
  Description of Artificial Sequence: Synthetic primer
gcctctccctctgggccgtccctccgggacccccgctctc

SEQ ID NO: 3775 - DNA, 40 bp, Artificial Sequence
  Description of Artificial Sequence: Synthetic primer
tggtgttttttgtttttgtttttaccccttgtcttatgcc

SEQ ID NO: 3776 - DNA, 40 bp, Artificial Sequence
  Description of Artificial Sequence: Synthetic primer
ttttgaagtttagagacagcatgaacaaagagccaaatag

SEQ ID NO: 3777 - DNA, 40 bp, Artificial Sequence
  Description of Artificial Sequence: Synthetic primer
atataatgttaaacaaaatactgatctggcatttggatgg

SEQ ID NO: 3778 - DNA, 40 bp, Artificial Sequence
  Description of Artificial Sequence: Synthetic primer
ggcctggtttaaaacagcccctgccccgcaactttatcaa

SEQ ID NO: 3779 - DNA, 40 bp, Artificial Sequence
  Description of Artificial Sequence: Synthetic primer
ttttttttatattcctaattatatctgtattttaattaag

SEQ ID NO: 3780 - DNA, 40 bp, Artificial Sequence
  Description of Artificial Sequence: Synthetic primer
tggactatagttatgtgtatctggttagaaatgtgtattc

SEQ ID NO: 3781 - DNA, 40 bp, Artificial Sequence
  Description of Artificial Sequence: Synthetic primer
ctggcgctctctctgcagaggagatggccacgtacctgcg

SEQ ID NO: 3782 - DNA, 40 bp, Artificial Sequence
  Description of Artificial Sequence: Synthetic primer
ggctgcagcgccggttcccatctccctcagggcagtttcc

SEQ ID NO: 3783 - DNA, 40 bp, Artificial Sequence
  Description of Artificial Sequence: Synthetic primer
acaaggagagttttccagcagctgccctgaacctgtcttg

SEQ ID NO: 3784 - DNA, 40 bp, Artificial Sequence
  Description of Artificial Sequence: Synthetic primer
aaattttctagatgactgaaggctgactttcccctttctg

SEQ ID NO: 3785 - DNA, 40 bp, Artificial Sequence
  Description of Artificial Sequence: Synthetic primer
ccagcctgtaggccctctgcccgtgtttcccagggaggtc

SEQ ID NO: 3786 - DNA, 40 bp, Artificial Sequence
  Description of Artificial Sequence: Synthetic primer
gttggggatctgaaagtaggggccagcctactggctggtc

SEQ ID NO: 3787 - DNA, 40 bp, Artificial Sequence
  Description of Artificial Sequence: Synthetic primer
agcatgtccctaaatcaaatcaagaactctccttcaatag

SEQ ID NO: 3788 - DNA, 40 bp, Artificial Sequence
  Description of Artificial Sequence: Synthetic primer
atttctaatttttttttcctttttgtgaactttaaaaaat

SEQ ID NO: 3789 - DNA, 40 bp, Artificial Sequence
  Description of Artificial Sequence: Synthetic primer
aaagaatgcattcacatcctttctaacttcatttcctcca

SEQ ID NO: 3790 - DNA, 40 bp, Artificial Sequence
  Description of Artificial Sequence: Synthetic primer
gtgaaatttggtgagactggctaaagtaacaaagaactag

SEQ ID NO: 3791 - DNA, 40 bp, Artificial Sequence
  Description of Artificial Sequence: Synthetic primer
ttaaattacagttgttgttataaagtaacagcccttctgc

SEQ ID NO: 3792 - DNA, 40 bp, Artificial Sequence
  Description of Artificial Sequence: Synthetic primer
gtactccggcttctgcttttaaccctgaattcttccaaag

SEQ ID NO: 3793 - DNA, 40 bp, Artificial Sequence
  Description of Artificial Sequence: Synthetic primer
taaaaaaataatgaaaaataaatgtgaagaaaagtttacg

SEQ ID NO: 3794 - DNA, 40 bp, Artificial Sequence
  Description of Artificial Sequence: Synthetic primer
ctgtgcccacattgttagggccgaggctagaccttctctg

SEQ ID NO: 3795 - DNA, 40 bp, Artificial Sequence
  Description of Artificial Sequence: Synthetic primer
aataggcctgtggatatagcctcaaaagccaacatccttg

SEQ ID NO: 3796 - DNA, 40 bp, Artificial Sequence
  Description of Artificial Sequence: Synthetic primer
agctgaggcctgacccctgcctggctgccctccctctcag

SEQ ID NO: 3797 - DNA, 40 bp, Artificial Sequence
  Description of Artificial Sequence: Synthetic primer
caggcgcgatggtaacctcaggccgctcttcccgctgtgc

SEQ ID NO: 3798 - DNA, 40 bp, Artificial Sequence
  Description of Artificial Sequence: Synthetic primer
ggtccacaccgtccttgcataggtctcgcggttgaggtag

SEQ ID NO: 3799 - DNA, 40 bp, Artificial Sequence
  Description of Artificial Sequence: Synthetic primer
cgcctggagcagaaatgagtactaggatgctggaccacag

SEQ ID NO: 3800 - DNA, 40 bp, Artificial Sequence
  Description of Artificial Sequence: Synthetic primer
gtctgtcctgcctcttcctaacctctcccctgtgaaatac

SEQ ID NO: 3801 - DNA, 40 bp, Artificial Sequence
  Description of Artificial Sequence: Synthetic primer
actattttatttttggccctcaacttggaccttggctttc

SEQ ID NO: 3802 - DNA, 40 bp, Artificial Sequence
  Description of Artificial Sequence: Synthetic primer
tgatgagtaaatcaacataatcagaaactactcaaactcc

SEQ ID NO: 3803 - DNA, 40 bp, Artificial Sequence
  Description of Artificial Sequence: Synthetic primer
cccagccaccggtgtggctctttaacaacctttgcttgtc

SEQ ID NO: 3804 - DNA, 40 bp, Artificial Sequence
  Description of Artificial Sequence: Synthetic primer
ttcaagtggtctatcctgtacttaccacaacaaccttatc

SEQ ID NO: 3805 - DNA, 40 bp, Artificial Sequence
  Description of Artificial Sequence: Synthetic primer
cgccatgaatactgttctgtctcttaaaatctgggccttc

SEQ ID NO: 3806 - DNA, 40 bp, Artificial Sequence
  Description of Artificial Sequence: Synthetic primer
acacacactgactcttgaccggcctctcagttcttaggcc

SEQ ID NO: 3807 - DNA, 40 bp, Artificial Sequence
  Description of Artificial Sequence: Synthetic primer
tttacataataaagttgctaacgaatcaataaaataatgc

SEQ ID NO: 3808 - DNA, 40 bp, Artificial Sequence
  Description of Artificial Sequence: Synthetic primer
gaataaaagttgctagttttaatatattatcatacttaaa

SEQ ID NO: 3809 - DNA, 40 bp, Artificial Sequence
  Description of Artificial Sequence: Synthetic primer
cctggccaggtccggccgaacccgggcggcggcgacactc

SEQ ID NO: 3810 - DNA, 40 bp, Artificial Sequence
  Description of Artificial Sequence: Synthetic primer
gcaggggccgctaacggtccggcgcccctcggcgtccgcg

SEQ ID NO: 3811 - DNA, 40 bp, Artificial Sequence
  Description of Artificial Sequence: Synthetic primer
aaaatgcaatggatttcacaggtaagtgatccttggtaag

SEQ ID NO: 3812 - DNA, 40 bp, Artificial Sequence
  Description of Artificial Sequence: Synthetic primer
cttgttccgaattctgcctgagcttctttttgtatgtctc

SEQ ID NO: 3813 - DNA, 40 bp, Artificial Sequence
  Description of Artificial Sequence: Synthetic primer
aaatatatatatttttatttgtggtttactttaagattac

SEQ ID NO: 3814 - DNA, 40 bp, Artificial Sequence
  Description of Artificial Sequence: Synthetic primer
gaatacatttcattcaaatttatccgaaactttattagta

SEQ ID NO: 3815 - DNA, 40 bp, Artificial Sequence
  Description of Artificial Sequence: Synthetic primer
tgctcggccaggtcccacctcccaccggggacccagaagc

SEQ ID NO: 3816 - DNA, 40 bp, Artificial Sequence
  Description of Artificial Sequence: Synthetic primer
cctgctgcgtagccgctgcctgatgtccgggcacctgccc

SEQ ID NO: 3817 - DNA, 40 bp, Artificial Sequence
  Description of Artificial Sequence: Synthetic primer
gacctctgaggaagcaattctgtgtctcagagtggagtta

SEQ ID NO: 3818 - DNA, 40 bp, Artificial Sequence
  Description of Artificial Sequence: Synthetic primer
gagttgtgacccctcttggttccttccccacctctttttc

SEQ ID NO: 3819 - DNA, 40 bp, Artificial Sequence
  Description of Artificial Sequence: Synthetic primer
cagtgacatggctgaatttgttttgtctcctctgcctttg

SEQ ID NO: 3820 - DNA, 40 bp, Artificial Sequence
  Description of Artificial Sequence: Synthetic primer
gcctagattagggcaaccctcacaatcatgaatagaaacc

SEQ ID NO: 3821 - DNA, 40 bp, Artificial Sequence
  Description of Artificial Sequence: Synthetic primer
atgtgaaaaattataatatattgggtttttttaaaagttc

SEQ ID NO: 3822 - DNA, 40 bp, Artificial Sequence
  Description of Artificial Sequence: Synthetic primer
caaaaacaaaacctattttccaagcacaccccagcaaagc

SEQ ID NO: 3823 - DNA, 40 bp, Artificial Sequence
  Description of Artificial Sequence: Synthetic primer
agtggctgccttgggtggaggggctgaccggtgactgtcc

SEQ ID NO: 3824 - DNA, 40 bp, Artificial Sequence
  Description of Artificial Sequence: Synthetic primer
ggtcagcgggtggggcaggcagggccagcccggccacacg

SEQ ID NO: 3825 - DNA, 40 bp, Artificial Sequence
  Description of Artificial Sequence: Synthetic primer
ccatcgagtctgtgattgtgttttctccgcctttcccttg

SEQ ID NO: 3826 - DNA, 40 bp, Artificial Sequence
  Description of Artificial Sequence: Synthetic primer
aggcactggacatgcacttctcccgtgcccatctgaaaac

SEQ ID NO: 3827 - DNA, 40 bp, Artificial Sequence
  Description of Artificial Sequence: Synthetic primer
ctatcagagaggcatgttaaaattgggtgaccaaaaccac

SEQ ID NO: 3828 - DNA, 40 bp, Artificial Sequence
  Description of Artificial Sequence: Synthetic primer
gtccatacctatgatttccctctttgtactgtatttgtag

SEQ ID NO: 3829 - DNA, 40 bp, Artificial Sequence
  Description of Artificial Sequence: Synthetic primer
ttaaggcactatacattcatttttgggtctatgtaatgtg

SEQ ID NO: 3830 - DNA, 40 bp, Artificial Sequence
  Description of Artificial Sequence: Synthetic primer
atcttgtggacttcaaatgacaattgttttattttatacc

SEQ ID NO: 3831 - DNA, 40 bp, Artificial Sequence
  Description of Artificial Sequence: Synthetic primer
cctttccttgtttatcttccttagttcaattggtgatttc

SEQ ID NO: 3832 - DNA, 40 bp, Artificial Sequence
  Description of Artificial Sequence: Synthetic primer
aagaaaagaggtttagcaccaggaagctgaggggacactc

SEQ ID NO: 3833 - DNA, 40 bp, Artificial Sequence
  Description of Artificial Sequence: Synthetic primer
agagagttttatgttcttccattataagaggcatcaatgt

SEQ ID NO: 3834 - DNA, 40 bp, Artificial Sequence
  Description of Artificial Sequence: Synthetic primer
ataggagtgaaccactatgcccagccagtgagcttatttc

SEQ ID NO: 3835 - DNA, 40 bp, Artificial Sequence
  Description of Artificial Sequence: Synthetic primer
gtaatgaatgaagaaccagccccagccgccgtggcaactc

SEQ ID NO: 3836 - DNA, 40 bp, Artificial Sequence
  Description of Artificial Sequence: Synthetic primer
gcccggagtcggcatgaatcgctgctgggcgctcttcctg

SEQ ID NO: 3837 - DNA, 40 bp, Artificial Sequence
  Description of Artificial Sequence: Synthetic primer
aggcatgctttgcaggtaagaatccaaatccctgcctttc

SEQ ID NO: 3838 - DNA, 40 bp, Artificial Sequence
  Description of Artificial Sequence: Synthetic primer
tcattattttccttcatccaggtgactctcttttctgtac

SEQ ID NO: 3839 - DNA, 40 bp, Artificial Sequence
  Description of Artificial Sequence: Synthetic primer
ctagtcatccctacttatactgtgaatagtggcttattgg

SEQ ID NO: 3840 - DNA, 40 bp, Artificial Sequence
  Description of Artificial Sequence: Synthetic primer
tgctgacattgagaggttaatgttttattcagcactttcc

SEQ ID NO: 3841 - DNA, 40 bp, Artificial Sequence
  Description of Artificial Sequence: Synthetic primer
agccagaatctgggagctgaaaaagactccccaggaggtg

SEQ ID NO: 3842 - DNA, 40 bp, Artificial Sequence
  Description of Artificial Sequence: Synthetic primer
ctgatttgtgtggcttgaaggcgtttactggtaacctgac

SEQ ID NO: 3843 - DNA, 40 bp, Artificial Sequence
  Description of Artificial Sequence: Synthetic primer
tcccaggaattaacacagcatttctgttccctttctccac

SEQ ID NO: 3844 - DNA, 40 bp, Artificial Sequence
  Description of Artificial Sequence: Synthetic primer
taaaggcagcagaataaaggaatcagcaactacgcaaatc

SEQ ID NO: 3845 - DNA, 40 bp, Artificial Sequence
  Description of Artificial Sequence: Synthetic primer
tgtagctatcaacactattatcatcagggctttagagacg

SEQ ID NO: 3846 - DNA, 40 bp, Artificial Sequence
  Description of Artificial Sequence: Synthetic primer
attccacctgctagccccagtgagctttctttctctctgc

SEQ ID NO: 3847 - DNA, 40 bp, Artificial Sequence
  Description of Artificial Sequence: Synthetic primer
gcgtggaaggtgcccgtgcaggagacctcccggcccacag

SEQ ID NO: 3848 - DNA, 40 bp, Artificial Sequence
  Description of Artificial Sequence: Synthetic primer
tggggcagtgcgctgggtaaactaaaccatctgtctttgc

SEQ ID NO: 3849 - DNA, 40 bp, Artificial Sequence
  Description of Artificial Sequence: Synthetic primer
taaaacttttgcattcatttccattttaaagtgctactac

SEQ ID NO: 3850 - DNA, 40 bp, Artificial Sequence
  Description of Artificial Sequence: Synthetic primer
taaaatgtctgctgagaagaataatgtaaataatgaaaaa

SEQ ID NO: 3851 - DNA, 40 bp, Artificial Sequence
  Description of Artificial Sequence: Synthetic primer
cggaaagcgctcggcgcctcctcctcctctcccgcgaagc

SEQ ID NO: 3852 - DNA, 40 bp, Artificial Sequence
  Description of Artificial Sequence: Synthetic primer
ccgccgtggggaggagggcggtgggaggggaggagtggag

SEQ ID NO: 3853 - DNA, 40 bp, Artificial Sequence
  Description of Artificial Sequence: Synthetic primer
tagaccaaccatttactgtgactgtctctctctccttgtc

SEQ ID NO: 3854 - DNA, 40 bp, Artificial Sequence
  Description of Artificial Sequence: Synthetic primer
ctgctttcctagatccagaaactcggagccccatcagttc

SEQ ID NO: 3855 - DNA, 40 bp, Artificial Sequence
  Description of Artificial Sequence: Synthetic primer
cagttagttttatcttttattaagtcagtttcttactgtg

SEQ ID NO: 3856 - DNA, 40 bp, Artificial Sequence
  Description of Artificial Sequence: Synthetic primer
aggtatttatttaaatatatcaatgaaacccccaagaaag

SEQ ID NO: 3857 - DNA, 40 bp, Artificial Sequence
  Description of Artificial Sequence: Synthetic primer
tgatgatttctggaactcacataactcttgtgtacttttg

SEQ ID NO: 3858 - DNA, 40 bp, Artificial Sequence
  Description of Artificial Sequence: Synthetic primer
ttagacatcttcaagacataaagaccacatggagacatcc

SEQ ID NO: 3859 - DNA, 40 bp, Artificial Sequence
  Description of Artificial Sequence: Synthetic primer
ccatgaccattctgattatgctgtgccttcttgtcctctc

SEQ ID NO: 3860 - DNA, 40 bp, Artificial Sequence
  Description of Artificial Sequence: Synthetic primer
cccacttctccccactctcccactcccagaggcagtgctg

SEQ ID NO: 3861 - DNA, 40 bp, Artificial Sequence
  Description of Artificial Sequence: Synthetic primer
actctaggacaccaactgcccctcagccccaagccagcag

SEQ ID NO: 3862 - DNA, 40 bp, Artificial Sequence
  Description of Artificial Sequence: Synthetic primer
atgtcaagttctaagactctgtactctgggctggggctac

SEQ ID NO: 3863 - DNA, 40 bp, Artificial Sequence
  Description of Artificial Sequence: Synthetic primer
tgaataatgatctcatttttaatgaacaaaacgaaaggtg

SEQ ID NO: 3864 - DNA, 40 bp, Artificial Sequence
  Description of Artificial Sequence: Synthetic primer
gtatccatacttctattctaataaactgtgtcttttgtag

SEQ ID NO: 3865 - DNA, 40 bp, Artificial Sequence
  Description of Artificial Sequence: Synthetic primer
agtagaaataacatgaaaaacagatttgggaaacattttg

SEQ ID NO: 3866 - DNA, 40 bp, Artificial Sequence
  Description of Artificial Sequence: Synthetic primer
catgggagtagaaattaattatgataaaagagttgtgtat

SEQ ID NO: 3867 - DNA, 40 bp, Artificial Sequence
  Description of Artificial Sequence: Synthetic primer
tgtttaaagtcagaatgcatgttcttggcttctccacacc

SEQ ID NO: 3868 - DNA, 40 bp, Artificial Sequence
  Description of Artificial Sequence: Synthetic primer
aattttcgttttcttacctgtttatctgtcataaactctg

SEQ ID NO: 3869 - DNA, 40 bp, Artificial Sequence
  Description of Artificial Sequence: Synthetic primer
tctgtctctactccgcctttttcagaggagaaaagacctg

SEQ ID NO: 3870 - DNA, 40 bp, Artificial Sequence
  Description of Artificial Sequence: Synthetic primer
ccgctcctgtctctgcacccctgagtgtcacgccttctcc

SEQ ID NO: 3871 - DNA, 40 bp, Artificial Sequence
  Description of Artificial Sequence: Synthetic primer
ggttggggaagtactgcagccagggcatcacgtccaccag

SEQ ID NO: 3872 - DNA, 40 bp, Artificial Sequence
  Description of Artificial Sequence: Synthetic primer
agtagtggccgaaagccatgctgcggccgccggacaccac

SEQ ID NO: 3873 - DNA, 40 bp, Artificial Sequence
  Description of Artificial Sequence: Synthetic primer
gctgccgctacagccacgacgaccccgagttccgtgagct

SEQ ID NO: 3874 - DNA, 40 bp, Artificial Sequence
  Description of Artificial Sequence: Synthetic primer
catccaccaggccctggtgcagcagggctcggccttcgcc

SEQ ID NO: 3875 - DNA, 40 bp, Artificial Sequence
  Description of Artificial Sequence: Synthetic primer
ttctcatagaaataatctgcttttttttttctttttctat

SEQ ID NO: 3876 - DNA, 40 bp, Artificial Sequence
  Description of Artificial Sequence: Synthetic primer
aaagaaaaaaatttttttagtaatttagcaataccttttg

SEQ ID NO: 3877 - DNA, 40 bp, Artificial Sequence
  Description of Artificial Sequence: Synthetic primer
cagcaagtgaaagaaagctcatagaaagaactatgaatgg

SEQ ID NO: 3878 - DNA, 40 bp, Artificial Sequence
  Description of Artificial Sequence: Synthetic primer
attctaaacttttatttatgcctggggaactttctactag

SEQ ID NO: 3879 - DNA, 40 bp, Artificial Sequence
  Description of Artificial Sequence: Synthetic primer
tttatatgatggatgtacaattgttcttatctaatttacc

SEQ ID NO: 3880 - DNA, 40 bp, Artificial Sequence
  Description of Artificial Sequence: Synthetic primer
ttacatctaaatctactttaactgttttaaagaaatcatg

SEQ ID NO: 3881 - DNA, 40 bp, Artificial Sequence
  Description of Artificial Sequence: Synthetic primer
ggttaatttaattttcatcactgcctgaagggttgtaacg

SEQ ID NO: 3882 - DNA, 40 bp, Artificial Sequence
  Description of Artificial Sequence: Synthetic primer
cctccattttgaaatgtgttcttgtcttgtaatttttctc

SEQ ID NO: 3883 - DNA, 40 bp, Artificial Sequence
  Description of Artificial Sequence: Synthetic primer
cgacccgcggatcccgcggcgtccggcccgggtggtctgg

SEQ ID NO: 3884 - DNA, 40 bp, Artificial Sequence
  Description of Artificial Sequence: Synthetic primer
ttcagaccgtgctatcgtccctgctgggtcgggcctaagc

SEQ ID NO: 3885 - DNA, 40 bp, Artificial Sequence
  Description of Artificial Sequence: Synthetic primer
acccagtctgctcactgtaatggagaaacacagtcctctc

SEQ ID NO: 3886 - DNA, 40 bp, Artificial Sequence
  Description of Artificial Sequence: Synthetic primer
ctttgtgaataccctagttaacacctcttgggaagctcag

SEQ ID NO: 3887 - DNA, 40 bp, Artificial Sequence
  Description of Artificial Sequence: Synthetic primer
cttttaataacctgcatcccaattgggttacatttaattg

SEQ ID NO: 3888 - DNA, 40 bp, Artificial Sequence
  Description of Artificial Sequence: Synthetic primer
gacaatcctccaacccaattttctatcacttcataatcgg

SEQ ID NO: 3889 - DNA, 40 bp, Artificial Sequence
  Description of Artificial Sequence: Synthetic primer
gcacttttctgtctcccagcatcccagccatcactcttcc

SEQ ID NO: 3890 - DNA, 40 bp, Artificial Sequence
  Description of Artificial Sequence: Synthetic primer
acctccctagccccaaagggtaaaccaagtgaagcaaagg

SEQ ID NO: 3891 - DNA, 40 bp, Artificial Sequence
  Description of Artificial Sequence: Synthetic primer
cgattcattactgcttgggtcttggtcttacctgttctac

SEQ ID NO: 3892 - DNA, 40 bp, Artificial Sequence
  Description of Artificial Sequence: Synthetic primer
ccttctcctcactgcatttccctccctcattctcttgctc

SEQ ID NO: 3893 - DNA, 40 bp, Artificial Sequence
  Description of Artificial Sequence: Synthetic primer
aatttttttcagatgtttcttttgcagaaaatcactgcac

SEQ ID NO: 3894 - DNA, 40 bp, Artificial Sequence
  Description of Artificial Sequence: Synthetic primer
atttttattcagagtctattctcacaaaaactgtttgttg

SEQ ID NO: 3895 - DNA, 40 bp, Artificial Sequence
  Description of Artificial Sequence: Synthetic primer
ccacaagaaagcgttaactggggacgggaagggagttgag

SEQ ID NO: 3896 - DNA, 40 bp, Artificial Sequence
  Description of Artificial Sequence: Synthetic primer
cgaggccgacgatcccaaacccaggtggacccgcacctcc

SEQ ID NO: 3897 - DNA, 40 bp, Artificial Sequence
  Description of Artificial Sequence: Synthetic primer
gtcttgctcacaggagagaatattgtgtcctccctctctg

SEQ ID NO: 3898 - DNA, 40 bp, Artificial Sequence
  Description of Artificial Sequence: Synthetic primer
gggcctgggttaagtatgcagattactgcagtgattttac

SEQ ID NO: 3899 - DNA, 40 bp, Artificial Sequence
  Description of Artificial Sequence: Synthetic primer
atctatatatctcaccttctttctaaccttttcttatgtg

SEQ ID NO: 3900 - DNA, 40 bp, Artificial Sequence
  Description of Artificial Sequence: Synthetic primer
aaacccttatgaccccatgaactgcctgtcaacagctaac

SEQ ID NO: 3901 - DNA, 40 bp, Artificial Sequence
  Description of Artificial Sequence: Synthetic primer
catgtatttgttaaaatataatcctctaagttgctttttc

SEQ ID NO: 3902 - DNA, 40 bp, Artificial Sequence
  Description of Artificial Sequence: Synthetic primer
ttgatgccatttgtgacaattcagtcattctttttcttac

SEQ ID NO: 3903 - DNA, 40 bp, Artificial Sequence
  Description of Artificial Sequence: Synthetic primer
ccaatctgttaggctagtatatgtgctttttctgttactc

SEQ ID NO: 3904 - DNA, 40 bp, Artificial Sequence
  Description of Artificial Sequence: Synthetic primer
taacctttttatttttctcttcaaaatatacacatccaac

SEQ ID NO: 3905 - DNA, 40 bp, Artificial Sequence
  Description of Artificial Sequence: Synthetic primer
aaatctagctacaattgcgcctttctttctttcctcaaac

SEQ ID NO: 3906 - DNA, 40 bp, Artificial Sequence
  Description of Artificial Sequence: Synthetic primer
ttcagagactgagcaatcgtgattcacatacagtactaag

SEQ ID NO: 3907 - DNA, 40 bp, Artificial Sequence
  Description of Artificial Sequence: Synthetic primer
gtactttatgggtcataagtatctatatcttaataaaaac

SEQ ID NO: 3908 - DNA, 40 bp, Artificial Sequence
  Description of Artificial Sequence: Synthetic primer
tgtctcaatatttgacattttcatttctgttgtagttagg

SEQ ID NO: 3909 - DNA, 40 bp, Artificial Sequence
  Description of Artificial Sequence: Synthetic primer
ggacggacagttctttctttttctctctagcttacccttt

SEQ ID NO: 3910 - DNA, 40 bp, Artificial Sequence
  Description of Artificial Sequence: Synthetic primer
gcgggatgtgcgtcttctgctcctaaacccagtgtttctc

SEQ ID NO: 3911 - DNA, 40 bp, Artificial Sequence
  Description of Artificial Sequence: Synthetic primer
acggctgcctgttaaataattttgtctctttctttattcc

SEQ ID NO: 3912 - DNA, 40 bp, Artificial Sequence
  Description of Artificial Sequence: Synthetic primer
atgaactcgttatactttccttgaagatttaggaactcac

SEQ ID NO: 3913 - DNA, 40 bp, Artificial Sequence
  Description of Artificial Sequence: Synthetic primer
gagcgcggagggtccctggaggctgggcctgcaccccttg

SEQ ID NO: 3914 - DNA, 40 bp, Artificial Sequence
  Description of Artificial Sequence: Synthetic primer
aaacttaaaatcccagagaggtttctaccgtttctcactc

SEQ ID NO: 3915 - DNA, 40 bp, Artificial Sequence
  Description of Artificial Sequence: Synthetic primer
acacacacacacatacagccacatctgagcccccaggaag

SEQ ID NO: 3916 - DNA, 40 bp, Artificial Sequence
  Description of Artificial Sequence: Synthetic primer
ccacccttatctccactccctatcttgccttctgatacag

SEQ ID NO: 3917 - DNA, 40 bp, Artificial Sequence
  Description of Artificial Sequence: Synthetic primer
ttcataattgttttgctccatcatttctgacactataaac

SEQ ID NO: 3918 - DNA, 40 bp, Artificial Sequence
  Description of Artificial Sequence: Synthetic primer
gtaagctagtttcaaaattttaaccatgacaattgatttc

SEQ ID NO: 3919 - DNA, 40 bp, Artificial Sequence
  Description of Artificial Sequence: Synthetic primer
ggggagcagcagcacctgtcccactctctcttccttcctc

SEQ ID NO: 3920 - DNA, 40 bp, Artificial Sequence
  Description of Artificial Sequence: Synthetic primer
agtcagcggtgcacctgtctgaacggcatcaaggcattac

SEQ ID NO: 3921 - DNA, 40 bp, Artificial Sequence
  Description of Artificial Sequence: Synthetic primer
tttacattcaacatttacatctccatgagtaggaagaagg

SEQ ID NO: 3922 - DNA, 40 bp, Artificial Sequence
  Description of Artificial Sequence: Synthetic primer
gctaatattggttcacatttcagttatgcatatttgtttc

SEQ ID NO: 3923 - DNA, 40 bp, Artificial Sequence
  Description of Artificial Sequence: Synthetic primer
ggagaagggctgtgtgttgactcgcccttgcccccagcac

SEQ ID NO: 3924 - DNA, 40 bp, Artificial Sequence
  Description of Artificial Sequence: Synthetic primer
gcagcccgggcttacagactcacagggcccgtcttgttcc

SEQ ID NO: 3925 - DNA, 40 bp, Artificial Sequence
  Description of Artificial Sequence: Synthetic primer
agatgggtaaggggaggtactggcctcaggccaaaggtgc

SEQ ID NO: 3926 - DNA, 40 bp, Artificial Sequence
  Description of Artificial Sequence: Synthetic primer
cgggagcaccaggccagtgggagcagagcccgtgccaagg

SEQ ID NO: 3927 - DNA, 40 bp, Artificial Sequence
  Description of Artificial Sequence: Synthetic primer
tgtatattatatgttctatgcattgctgatttatgtagac

SEQ ID NO: 3928 - DNA, 40 bp, Artificial Sequence
  Description of Artificial Sequence: Synthetic primer
atcttttcatctgaactcataactcatagaccacaaatac

SEQ ID NO: 3929 - DNA, 40 bp, Artificial Sequence
  Description of Artificial Sequence: Synthetic primer
ctatcacgttggaatctctagttatagactaattattttc

SEQ ID NO: 3930 - DNA, 40 bp, Artificial Sequence
  Description of Artificial Sequence: Synthetic primer
gatcatgatgataagctttagcaatttccatccaccatac

SEQ ID NO: 3931 - DNA, 40 bp, Artificial Sequence
  Description of Artificial Sequence: Synthetic primer
tcattatgtggtaccataaaacattcagtaacctttcagg

SEQ ID NO: 3932 - DNA, 40 bp, Artificial Sequence
  Description of Artificial Sequence: Synthetic primer
tttaaatgcatttgtcatgactgtgttctcctttggtgag

SEQ ID NO: 3933 - DNA, 40 bp, Artificial Sequence
  Description of Artificial Sequence: Synthetic primer
agactaaaacaaccaaaccaaactccagcccccaggagca

SEQ ID NO: 3934 - DNA, 40 bp, Artificial Sequence
  Description of Artificial Sequence: Synthetic primer
ttgtggaagtgttcattgcatttgggcatttcgcattctg

SEQ ID NO: 3935 - DNA, 40 bp, Artificial Sequence
  Description of Artificial Sequence: Synthetic primer
aataaaaatatgaagattgttactagtttttactctaagc

SEQ ID NO: 3936 - DNA, 40 bp, Artificial Sequence
  Description of Artificial Sequence: Synthetic primer
tggatttatttccgatgttataattatttgactttttccc

SEQ ID NO: 3937 - DNA, 40 bp, Artificial Sequence
  Description of Artificial Sequence: Synthetic primer
acccaccctccaaccaccacactgggtccacacccagaac

SEQ ID NO: 3938 - DNA, 40 bp, Artificial Sequence
  Description of Artificial Sequence: Synthetic primer
agaactgtccacaccctttgcatcaagcctgagtcctttc

SEQ ID NO: 3939 - DNA, 40 bp, Artificial Sequence
  Description of Artificial Sequence: Synthetic primer
aattgataaataaaggccgcaatgtatagttatcatctta

SEQ ID NO: 3940 - DNA, 40 bp, Artificial Sequence
  Description of Artificial Sequence: Synthetic primer
taatatttttcttttaaaacagtgttgtttttcccattcc

SEQ ID NO: 3941 - DNA, 40 bp, Artificial Sequence
  Description of Artificial Sequence: Synthetic primer
aggggcaggcaggctgcaggcggcaggagtgggactgaag

SEQ ID NO: 3942 - DNA, 40 bp, Artificial Sequence
  Description of Artificial Sequence: Synthetic primer
ttgccactttctaacctcagagtccttgcctgttgctgac

SEQ ID NO: 3943 - DNA, 40 bp, Artificial Sequence
  Description of Artificial Sequence: Synthetic primer
ctttcccttttcttatagttttttatgctaattctgtttc

SEQ ID NO: 3944 - DNA, 40 bp, Artificial Sequence
  Description of Artificial Sequence: Synthetic primer
ggggcttatttcccaggctcaaagtgatttaggggtggtg

SEQ ID NO: 3945 - DNA, 40 bp, Artificial Sequence
  Description of Artificial Sequence: Synthetic primer
tgaagaaattgaccttcgcaaccccaaggggaacaaaaag

SEQ ID NO: 3946 - DNA, 40 bp, Artificial Sequence
  Description of Artificial Sequence: Synthetic primer
acagcctgcagtaattccccgaagccttggcgctcttgtg

SEQ ID NO: 3947 - DNA, 40 bp, Artificial Sequence
  Description of Artificial Sequence: Synthetic primer
ttgcaaacactgaagttggggcagccctgaccggagtaac

SEQ ID NO: 3948 - DNA, 40 bp, Artificial Sequence
  Description of Artificial Sequence: Synthetic primer
agtgggtcgaggaggttgaggagcaggactgtttccagac

SEQ ID NO: 3949 - DNA, 40 bp, Artificial Sequence
  Description of Artificial Sequence: Synthetic primer
ccagagtatatacattctcactgaattattgtactgtttc

SEQ ID NO: 3950 - DNA, 40 bp, Artificial Sequence
  Description of Artificial Sequence: Synthetic primer
gcttcatcatacctttcactaagacaagaatttagaagtg

SEQ ID NO: 3951 - DNA, 40 bp, Artificial Sequence
  Description of Artificial Sequence: Synthetic primer
tctgcaccccagctgagcgcccctcccggctccccacttg

SEQ ID NO: 3952 - DNA, 40 bp, Artificial Sequence
  Description of Artificial Sequence: Synthetic primer
tttctctgttctgctctccattctatctctatctccttcg

SEQ ID NO: 3953 - DNA, 40 bp, Artificial Sequence
  Description of Artificial Sequence: Synthetic primer
tagcagacattggcaatatgtgctacaaaacattatgctg

SEQ ID NO: 3954 - DNA, 40 bp, Artificial Sequence
  Description of Artificial Sequence: Synthetic primer
gatgactttaccctaagtgataaaatctgtattttgttgc

SEQ ID NO: 3955 - DNA, 40 bp, Artificial Sequence
  Description of Artificial Sequence: Synthetic primer
gtagccgagtatctaattaaacaagtttttactaaatctg

SEQ ID NO: 3956 - DNA, 40 bp, Artificial Sequence
  Description of Artificial Sequence: Synthetic primer
gcaaaaaaacaggaagaacaggatagaaagactgcttata

SEQ ID NO: 3957 - DNA, 40 bp, Artificial Sequence
  Description of Artificial Sequence: Synthetic primer
tgggtccataagcttttctttacattgaattcatcgtgtg

SEQ ID NO: 3958 - DNA, 40 bp, Artificial Sequence
  Description of Artificial Sequence: Synthetic primer
accatcaaaaaaccccaaacccataatgatatgattatgg

SEQ ID NO: 3959 - DNA, 40 bp, Artificial Sequence
  Description of Artificial Sequence: Synthetic primer
gtgctgagggccctggagtcccgagcggggccaggtcagc

SEQ ID NO: 3960 - DNA, 40 bp, Artificial Sequence
  Description of Artificial Sequence: Synthetic primer
cagtgccggggctgccccgccacgcctggcgttcaccgtg

SEQ ID NO: 3961 - DNA, 40 bp, Artificial Sequence
  Description of Artificial Sequence: Synthetic primer
ttctagtggggaattcctgatggtggaatatcacaagaac

SEQ ID NO: 3962 - DNA, 40 bp, Artificial Sequence
  Description of Artificial Sequence: Synthetic primer
cttccaatctgatgacagctcacctgtctaaattctttgc

SEQ ID NO: 3963 - DNA, 40 bp, Artificial Sequence
  Description of Artificial Sequence: Synthetic primer
aggctctgccctccggccgccccatcgcagcccgcctcag

SEQ ID NO: 3964 - DNA, 40 bp, Artificial Sequence
  Description of Artificial Sequence: Synthetic primer
ccgcggggagcgcgggcaccgggcgagcaggccgcgtcgc

SEQ ID NO: 3965 - DNA, 40 bp, Artificial Sequence
  Description of Artificial Sequence: Synthetic primer
caccccttttcttcagacttctgatcccctgtctcctctc

SEQ ID NO: 3966 - DNA, 40 bp, Artificial Sequence
  Description of Artificial Sequence: Synthetic primer
gcccaggcgcgactcaggagaagtcgccagcgacaaggag

SEQ ID NO: 3967 - DNA, 40 bp, Artificial Sequence
  Description of Artificial Sequence: Synthetic primer
aatagagaacaagatcaaatactgttattttcatttgcag

SEQ ID NO: 3968 - DNA, 40 bp, Artificial Sequence
  Description of Artificial Sequence: Synthetic primer
ttatcttgtagtttcttaacatagttattttatttcctag

SEQ ID NO: 3969 - DNA, 40 bp, Artificial Sequence
  Description of Artificial Sequence: Synthetic primer
cccaagactcctgggttcctaccctcctgccatcccctta

SEQ ID NO: 3970 - DNA, 40 bp, Artificial Sequence
  Description of Artificial Sequence: Synthetic primer
ataggaacaatagagggactgacgggtgatctctttgacc

SEQ ID NO: 3971 - DNA, 40 bp, Artificial Sequence
  Description of Artificial Sequence: Synthetic primer
tgagagtaggggctgggtgcggggcggggcgggcgtggag

SEQ ID NO: 3972 - DNA, 40 bp, Artificial Sequence
  Description of Artificial Sequence: Synthetic primer
ccgcttggggccccggccgtgcggccggagggagcggccg

SEQ ID NO: 3973 - DNA, 40 bp, Artificial Sequence
  Description of Artificial Sequence: Synthetic primer
tgccacctacagtgtttttgtcgttgttgatgtttatttc

SEQ ID NO: 3974 - DNA, 40 bp, Artificial Sequence
  Description of Artificial Sequence: Synthetic primer
cgcttaattttaaaaagatgtcttaggaaaaaggagaaac

SEQ ID NO: 3975 - DNA, 40 bp, Artificial Sequence
  Description of Artificial Sequence: Synthetic primer
gggaggccactctgtttcttcaagtattcttggccgatgg

SEQ ID NO: 3976 - DNA, 40 bp, Artificial Sequence
  Description of Artificial Sequence: Synthetic primer
tccagcccctaactctccctctctccctcccggcccacag

SEQ ID NO: 3977 - DNA, 40 bp, Artificial Sequence
  Description of Artificial Sequence: Synthetic primer
ccctgtcaccctgacactgccacatgcaccccctttcttc

SEQ ID NO: 3978 - DNA, 40 bp, Artificial Sequence
  Description of Artificial Sequence: Synthetic primer
gttcctggtccccaccccagtcttaaggacccccactcac

SEQ ID NO: 3979 - DNA, 40 bp, Artificial Sequence
  Description of Artificial Sequence: Synthetic primer
attaagaaaatttaagtgtaaaatggtaggtagaaaagag

SEQ ID NO: 3980 - DNA, 40 bp, Artificial Sequence
  Description of Artificial Sequence: Synthetic primer
tttctagaaagttttcttgtgagtttttgaaatctctgtg

SEQ ID NO: 3981 - DNA, 40 bp, Artificial Sequence
  Description of Artificial Sequence: Synthetic primer
catcaccccaggctggccctgaccccagccttccctgtgc

SEQ ID NO: 3982 - DNA, 40 bp, Artificial Sequence
  Description of Artificial Sequence: Synthetic primer
tgacctggagagtcagggtggggtcactgctgggacaggg

SEQ ID NO: 3983 - DNA, 40 bp, Artificial Sequence
  Description of Artificial Sequence: Synthetic primer
atgcaagaagacagactcaattatgtgtgtttttgatttt

SEQ ID NO: 3984 - DNA, 40 bp, Artificial Sequence
  Description of Artificial Sequence: Synthetic primer
tcaacaaaagaaaaccatgagatctagccgtttttccagg

SEQ ID NO: 3985 - DNA, 40 bp, Artificial Sequence
  Description of Artificial Sequence: Synthetic primer
cttcaaacatccctattataaagcttctctctgttctttg

SEQ ID NO: 3986 - DNA, 40 bp, Artificial Sequence
  Description of Artificial Sequence: Synthetic primer
tcattagcaaaaaataaacagagcaagtactaaagctggc

SEQ ID NO: 3987 - DNA, 40 bp, Artificial Sequence
  Description of Artificial Sequence: Synthetic primer
gcctcgtgagcgccgccaccggctttattcccggcagatg

SEQ ID NO: 3988 - DNA, 40 bp, Artificial Sequence
  Description of Artificial Sequence: Synthetic primer
attttgatattttctgaaacaattaaacaaacgatcttgt

SEQ ID NO: 3989 - DNA, 40 bp, Artificial Sequence
  Description of Artificial Sequence: Synthetic primer
tggggccgccccaccagccgctcaccctgcaccccgtctc

SEQ ID NO: 3990 - DNA, 40 bp, Artificial Sequence
  Description of Artificial Sequence: Synthetic primer
tggagttggacgccaggtggaaagaaggggtggctcagag

SEQ ID NO: 3991 - DNA, 40 bp, Artificial Sequence
  Description of Artificial Sequence: Synthetic primer
gggagaggggagaggctcaacagagaggcgggtgatactc

SEQ ID NO: 3992 - DNA, 40 bp, Artificial Sequence
  Description of Artificial Sequence: Synthetic primer
ggctgggacccaggacgggtccaggcttgatgcctctgtg

SEQ ID NO: 3993 - DNA, 40 bp, Artificial Sequence
  Description of Artificial Sequence: Synthetic primer
tgggactgacactaagtccagtggatgaggctcttacttg

SEQ ID NO: 3994 - DNA, 40 bp, Artificial Sequence
  Description of Artificial Sequence: Synthetic primer
gagatttgaataggactttgttttgcttctgtttaaagtc

SEQ ID NO: 3995 - DNA, 40 bp, Artificial Sequence
  Description of Artificial Sequence: Synthetic primer
tcccgcggggtagtgtctacaagaaccctctcccagtaac

SEQ ID NO: 3996 - DNA, 40 bp, Artificial Sequence
  Description of Artificial Sequence: Synthetic primer
ccctgtgtgctccgagaggggccagggcagcggcactcac

SEQ ID NO: 3997 - DNA, 40 bp, Artificial Sequence
  Description of Artificial Sequence: Synthetic primer
aggaatcctaaagtcatctggatgtttttcctttgctgtc

SEQ ID NO: 3998 - DNA, 40 bp, Artificial Sequence
  Description of Artificial Sequence: Synthetic primer
aatccccaccaacatattattataaacttctgatacctgt

SEQ ID NO: 3999 - DNA, 40 bp, Artificial Sequence
  Description of Artificial Sequence: Synthetic primer
aaaaaacccaccttgaaaagtctccctcttactttctttc

SEQ ID NO: 4000 - DNA, 40 bp, Artificial Sequence
  Description of Artificial Sequence: Synthetic primer
tacagagtcctaattacatttcaaagaaaatgcataaagg

SEQ ID NO: 4001 - DNA, 40 bp, Artificial Sequence
  Description of Artificial Sequence: Synthetic primer
ttcaatcatttcatgcatagaggtcctttaaataattagc

SEQ ID NO: 4002 - DNA, 40 bp, Artificial Sequence
  Description of Artificial Sequence: Synthetic primer
ctagttttaaagacattttttaagaaccaaaattatttgc

SEQ ID NO: 4003 - DNA, 40 bp, Artificial Sequence
  Description of Artificial Sequence: Synthetic primer
aagtagacagactgtacctttctgatttcaaccaaattac

SEQ ID NO: 4004 - DNA, 40 bp, Artificial Sequence
  Description of Artificial Sequence: Synthetic primer
agaaatggatgaatggctgcaattgtctaatgttttcctc

SEQ ID NO: 4005 - DNA, 40 bp, Artificial Sequence
  Description of Artificial Sequence: Synthetic primer
taaatatctttcaaaatatttataagtcttaactgcatgc

SEQ ID NO: 4006 - DNA, 40 bp, Artificial Sequence
  Description of Artificial Sequence: Synthetic primer
ccttcatcctgaacttaggagaagggtccaccatgattac

SEQ ID NO: 4007 - DNA, 40 bp, Artificial Sequence
  Description of Artificial Sequence: Synthetic primer
atggagtcccctgtccctgactgccatggctgctccctac

SEQ ID NO: 4008 - DNA, 40 bp, Artificial Sequence
  Description of Artificial Sequence: Synthetic primer
aagaagggatattggagccccttctggacacccccacaag

SEQ ID NO: 4009 - DNA, 40 bp, Artificial Sequence
  Description of Artificial Sequence: Synthetic primer
catgcagggcagcgtccagtaggcggcagtggcaggaagg

SEQ ID NO: 4010 - DNA, 40 bp, Artificial Sequence
  Description of Artificial Sequence: Synthetic primer
tggctctgcctccttcctgtcctggcccttcacccatccc

SEQ ID NO: 4011 - DNA, 40 bp, Artificial Sequence
  Description of Artificial Sequence: Synthetic primer
gcccagcccagaatatgtttttatagaagagacttagaac

SEQ ID NO: 4012 - DNA, 40 bp, Artificial Sequence
  Description of Artificial Sequence: Synthetic primer
aagttaagagtggactctaacatttgtgtcttaaccttct

SEQ ID NO: 4013 - DNA, 40 bp, Artificial Sequence
  Description of Artificial Sequence: Synthetic primer
cgtaataccagcataatctactaaagcttctgtttatgtc

SEQ ID NO: 4014 - DNA, 40 bp, Artificial Sequence
  Description of Artificial Sequence: Synthetic primer
gaggttggacagcccctaagttcccagactctaacagatg

SEQ ID NO: 4015 - DNA, 40 bp, Artificial Sequence
  Description of Artificial Sequence: Synthetic primer
ttactattggtgattccagtctgaatgagttatgttgtgg

SEQ ID NO: 4016 - DNA, 40 bp, Artificial Sequence
  Description of Artificial Sequence: Synthetic primer
aagttggaactcccacacaaatccggagctagccactgtg

SEQ ID NO: 4017 - DNA, 40 bp, Artificial Sequence
  Description of Artificial Sequence: Synthetic primer
gttaacatgactatttacatcaccttcctattttgcattg

SEQ ID NO: 4018 - DNA, 40 bp, Artificial Sequence
  Description of Artificial Sequence: Synthetic primer
ccttgtttaaaataatcagagaaatatggttctcccacag

SEQ ID NO: 4019 - DNA, 40 bp, Artificial Sequence
  Description of Artificial Sequence: Synthetic primer
tgttatatgatataaagaaaatatctgtgaataattctac

SEQ ID NO: 4020 - DNA, 40 bp, Artificial Sequence
  Description of Artificial Sequence: Synthetic primer
tagaattttctaaccatttttgtatgtgcttatcttcatc

SEQ ID NO: 4021 - DNA, 40 bp, Artificial Sequence
  Description of Artificial Sequence: Synthetic primer
ctgctcagtgtagctaggttcccagtgctgtcctgtttgg

SEQ ID NO: 4022 - DNA, 40 bp, Artificial Sequence
  Description of Artificial Sequence: Synthetic primer
cgtattcaccttgttatcctgacccaagatgaaataaaac

SEQ ID NO: 4023 - DNA, 40 bp, Artificial Sequence
  Description of Artificial Sequence: Synthetic primer
aaccatcctccaaggcagagtggccaggaggctagagagc

SEQ ID NO: 4024 - DNA, 40 bp, Artificial Sequence
  Description of Artificial Sequence: Synthetic primer
ggttaaaaggattttcataattctgtacctcttctctttc

SEQ ID NO: 4025 - DNA, 40 bp, Artificial Sequence
  Description of Artificial Sequence: Synthetic primer
gatgatctgatgcctgagtcactgcaatctttctgatatg

SEQ ID NO: 4026 - DNA, 40 bp, Artificial Sequence
  Description of Artificial Sequence: Synthetic primer
cctgtaatggttatgtttccaacggttgtttctttccaag

SEQ ID NO: 4027 - DNA, 40 bp, Artificial Sequence
  Description of Artificial Sequence: Synthetic primer
gtcaatctttgtagatatggtgatataatgtgtcaaggag

SEQ ID NO: 4028 - DNA, 40 bp, Artificial Sequence
  Description of Artificial Sequence: Synthetic primer
atgtggagggtggggagacaaaaatgttgctattttacag

SEQ ID NO: 4029 - DNA, 40 bp, Artificial Sequence
  Description of Artificial Sequence: Synthetic primer
aattcctatagtcattataacctaccataatatttttttc

SEQ ID NO: 4030 - DNA, 40 bp, Artificial Sequence
  Description of Artificial Sequence: Synthetic primer
tcataaagcttgagtctcaatttccagaaatggaggagcc

SEQ ID NO: 4031 - DNA, 40 bp, Artificial Sequence
  Description of Artificial Sequence: Synthetic primer
gtgctctccccgtcgtttgccctctccagttcccccagtg

SEQ ID NO: 4032 - DNA, 40 bp, Artificial Sequence
  Description of Artificial Sequence: Synthetic primer
tttccagcccgcgcctgtccgtctccccgcggcccagagc

SEQ ID NO: 4033 - DNA, 40 bp, Artificial Sequence
  Description of Artificial Sequence: Synthetic primer
tcagatggggctgcggggtctgctgacctctgccctctgc

SEQ ID NO: 4034 - DNA, 40 bp, Artificial Sequence
  Description of Artificial Sequence: Synthetic primer
taaggtccaagaggggcaggtctgtctccccaggcatccc

SEQ ID NO: 4035 - DNA, 40 bp, Artificial Sequence
  Description of Artificial Sequence: Synthetic primer
gacaaccacccttaacccctcctcccagagaccccagttg

SEQ ID NO: 4036 - DNA, 40 bp, Artificial Sequence
  Description of Artificial Sequence: Synthetic primer
gctggttgcccagggtccccaggcctctgattcctcactg

SEQ ID NO: 4037 - DNA, 40 bp, Artificial Sequence
  Description of Artificial Sequence: Synthetic primer
ggcctgaaaatcttaagtgttgaatttttgttcttttaac

SEQ ID NO: 4038 - DNA, 40 bp, Artificial Sequence
  Description of Artificial Sequence: Synthetic primer
tatgtctaagattacattaagtagaggaccacattgatac

SEQ ID NO: 4039 - DNA, 40 bp, Artificial Sequence
  Description of Artificial Sequence: Synthetic primer
taaatgattatttaaaggcaaaagaaacaataaatattcc

SEQ ID NO: 4040 - DNA, 40 bp, Artificial Sequence
  Description of Artificial Sequence: Synthetic primer
aaataaatactaatttccatgcctttttcaggcataactc

SEQ ID NO: 4041 - DNA, 40 bp, Artificial Sequence
  Description of Artificial Sequence: Synthetic primer
aaaaaatttaagtttctatgttttaaatgtctgagtaatg

SEQ ID NO: 4042 - DNA, 40 bp, Artificial Sequence
  Description of Artificial Sequence: Synthetic primer
gtgacagccttattttactccggaatgcgtttcatggttc

SEQ ID NO: 4043 - DNA, 40 bp, Artificial Sequence
  Description of Artificial Sequence: Synthetic primer
ctctatcccacacctccctggcaattgctattacaaactc

SEQ ID NO: 4044 - DNA, 40 bp, Artificial Sequence
  Description of Artificial Sequence: Synthetic primer
ccctgcctggggccactccaacctcccctgtgctgctttc

SEQ ID NO: 4045 - DNA, 40 bp, Artificial Sequence
  Description of Artificial Sequence: Synthetic primer
tgatataatgaccttaaaatgctattactgcaaggaggag

SEQ ID NO: 4046 - DNA, 40 bp, Artificial Sequence
  Description of Artificial Sequence: Synthetic primer
acattcttcatactgagctcactgttgtgttttcattccc

SEQ ID NO: 4047 - DNA, 40 bp, Artificial Sequence
  Description of Artificial Sequence: Synthetic primer
ccactatgagccacaacctcactaattttcttctctgttc

SEQ ID NO: 4048 - DNA, 40 bp, Artificial Sequence
  Description of Artificial Sequence: Synthetic primer
tgagtttgttctgtttgtggagtctgtgccctcctcttgc

SEQ ID NO: 4049 - DNA, 40 bp, Artificial Sequence
  Description of Artificial Sequence: Synthetic primer
ttggtagcagctggacagatcacaacatggtattttattc

SEQ ID NO: 4050 - DNA, 40 bp, Artificial Sequence
  Description of Artificial Sequence: Synthetic primer
tagaaattaagtggctaggtataagcacccaaaaagatac

SEQ ID NO: 4051 - DNA, 40 bp, Artificial Sequence
  Description of Artificial Sequence: Synthetic primer
agaatggttattaccagggaaggttttccttttgttttac

SEQ ID NO: 4052 - DNA, 40 bp, Artificial Sequence
  Description of Artificial Sequence: Synthetic primer
agaaggggccactctgtacaacaaaagaagtcaccgtgtg

SEQ ID NO: 4053 - DNA, 40 bp, Artificial Sequence
  Description of Artificial Sequence: Synthetic primer
ggccgccaagtacagggcctgacccaggccctcggatgcc

SEQ ID NO: 4054 - DNA, 40 bp, Artificial Sequence
  Description of Artificial Sequence: Synthetic primer
agcctataccccatcccacaactgcagcctcatcactgtc

SEQ ID NO: 4055 - DNA, 40 bp, Artificial Sequence
  Description of Artificial Sequence: Synthetic primer
ccggttaagattggtactaatgtgttcacagaatgctgac

SEQ ID NO: 4056 - DNA, 40 bp, Artificial Sequence
  Description of Artificial Sequence: Synthetic primer
atgatggagagaacgagtagcggtacaaatggattttggc

SEQ ID NO: 4057 - DNA, 40 bp, Artificial Sequence
  Description of Artificial Sequence: Synthetic primer
agcacatggtgggtggtgatcttacaaatacgggttcatc

SEQ ID NO: 4058 - DNA, 40 bp, Artificial Sequence
  Description of Artificial Sequence: Synthetic primer
tatatagagaaagcaaactagataataaatgccaaattac

SEQ ID NO: 4059 - DNA, 40 bp, Artificial Sequence
  Description of Artificial Sequence: Synthetic primer
cctgaaagtaactttaaggtgtttgaaggattttcttcct

SEQ ID NO: 4060 - DNA, 40 bp, Artificial Sequence
  Description of Artificial Sequence: Synthetic primer
ctgacatgtctgatactttaaaaacagtttagcagaaaag

SEQ ID NO: 4061 - DNA, 40 bp, Artificial Sequence
  Description of Artificial Sequence: Synthetic primer
gtgctttatttcgccaaggaagaagatcatactcaacacg

SEQ ID NO: 4062 - DNA, 40 bp, Artificial Sequence
  Description of Artificial Sequence: Synthetic primer
caaaattaagagcaggatattaaattcttgaaagcacagc

SEQ ID NO: 4063 - DNA, 40 bp, Artificial Sequence
  Description of Artificial Sequence: Synthetic primer
gcagaggggagttggggtgagggtgtctctctgtggcttt

SEQ ID NO: 4064 - DNA, 40 bp, Artificial Sequence
  Description of Artificial Sequence: Synthetic primer
tcacagcctcctcctcctccccaccctccccttctctgcc

SEQ ID NO: 4065 - DNA, 40 bp, Artificial Sequence
  Description of Artificial Sequence: Synthetic primer
tttgaaacaatatccctttggcttttctctttccctctcc

SEQ ID NO: 4066 - DNA, 40 bp, Artificial Sequence
  Description of Artificial Sequence: Synthetic primer
ggctgggactcaccatattctggaagtcgcacaaactccg

SEQ ID NO: 4067 - DNA, 40 bp, Artificial Sequence
  Description of Artificial Sequence: Synthetic primer
tccttaaaatttggatgcaatacaagtgtaagactcaaag

SEQ ID NO: 4068 - DNA, 40 bp, Artificial Sequence
  Description of Artificial Sequence: Synthetic primer
gtgaaccatttgtatcagttttgtgttatttcttttcttc

SEQ ID NO: 4069 - DNA, 40 bp, Artificial Sequence
  Description of Artificial Sequence: Synthetic primer
aagttttatttcacaggcttaaccaatacgtgttaaaagc

SEQ ID NO: 4070 - DNA, 40 bp, Artificial Sequence
  Description of Artificial Sequence: Synthetic primer
atattctttcaaaaagaaacaggtagaaatagcccatgtc

SEQ ID NO: 4071 - DNA, 40 bp, Artificial Sequence
  Description of Artificial Sequence: Synthetic primer
agacgaagtctcttgcagccacacatgccatcattctagg

SEQ ID NO: 4072 - DNA, 40 bp, Artificial Sequence
  Description of Artificial Sequence: Synthetic primer
cttctgtgtacctcacagcagtctttctttcccatgtaac

SEQ ID NO: 4073 - DNA, 40 bp, Artificial Sequence
  Description of Artificial Sequence: Synthetic primer
catgggccaccacacccagccagaagtgccagttaataat

SEQ ID NO: 4074 - DNA, 40 bp, Artificial Sequence
  Description of Artificial Sequence: Synthetic primer
ggatatacatgagtagccaagaaccacgctcatcccttcc

SEQ ID NO: 4075 - DNA, 40 bp, Artificial Sequence
  Description of Artificial Sequence: Synthetic primer
tattaaaatatgtacattagagtagttgcagactgataaa

SEQ ID NO: 4076 - DNA, 40 bp, Artificial Sequence
  Description of Artificial Sequence: Synthetic primer
gaagcgcacaaacatcctgctactttgaggttttacttac

SEQ ID NO: 4077 - DNA, 40 bp, Artificial Sequence
  Description of Artificial Sequence: Synthetic primer
acctgtccgtgatgggaggagccctcacctctccgtgatg

SEQ ID NO: 4078 - DNA, 40 bp, Artificial Sequence
  Description of Artificial Sequence: Synthetic primer
agctcagactctgccccttgatttctgcagtgttttaccc

SEQ ID NO: 4079 - DNA, 40 bp, Artificial Sequence
  Description of Artificial Sequence: Synthetic primer
gacactaatccaaactatatcagccatatataaaaataat

SEQ ID NO: 4080 - DNA, 40 bp, Artificial Sequence
  Description of Artificial Sequence: Synthetic primer
ccccttattgctcagatgaggctggagcagcatgaattac

SEQ ID NO: 4081 - DNA, 40 bp, Artificial Sequence
  Description of Artificial Sequence: Synthetic primer
atacaatagcaggcagtctttaagccatctacttgaaggt

SEQ ID NO: 4082 - DNA, 40 bp, Artificial Sequence
  Description of Artificial Sequence: Synthetic primer
acatgaccactctccagtccattgtttttgcctcttgttc

SEQ ID NO: 4083 - DNA, 40 bp, Artificial Sequence
  Description of Artificial Sequence: Synthetic primer
ttcatgagccgactgaaactgccctcacagaggccaaagc

SEQ ID NO: 4084 - DNA, 40 bp, Artificial Sequence
  Description of Artificial Sequence: Synthetic primer
ggctccctctgctctgggagatctcacccacctgctctgc

SEQ ID NO: 4085 - DNA, 40 bp, Artificial Sequence
  Description of Artificial Sequence: Synthetic primer
gttatgagcatgggctgggctcaggcagggtggggcagcc

SEQ ID NO: 4086 - DNA, 40 bp, Artificial Sequence
  Description of Artificial Sequence: Synthetic primer
gggccatgcaaacttaccatggttgtgtgtctgtgtgctc

SEQ ID NO: 4087 - DNA, 40 bp, Artificial Sequence
  Description of Artificial Sequence: Synthetic primer
ttttgtcaggttaatgtataaaattgaaattgtttactac

SEQ ID NO: 4088 - DNA, 40 bp, Artificial Sequence
  Description of Artificial Sequence: Synthetic primer
ttaaaataatgatataaatacaaaccttttctggagtgac

SEQ ID NO: 4089 - DNA, 40 bp, Artificial Sequence
  Description of Artificial Sequence: Synthetic primer
aagatcatacatttaaaaataataataaaagcctgccttg

SEQ ID NO: 4090 - DNA, 40 bp, Artificial Sequence
  Description of Artificial Sequence: Synthetic primer
cccagagacgggacctgttgtcaggaaaagtcaaacaagc

SEQ ID NO: 4091 - DNA, 40 bp, Artificial Sequence
  Description of Artificial Sequence: Synthetic primer
ctctggggcccgcagatccgttggaagtacatgattgtgg

SEQ ID NO: 4092 - DNA, 40 bp, Artificial Sequence
  Description of Artificial Sequence: Synthetic primer
ccaaccagcaaagccagccgcacctggaaccgtcagcatg

SEQ ID NO: 4093 - DNA, 40 bp, Artificial Sequence
  Description of Artificial Sequence: Synthetic primer
tggggcccagttccctccccactaccacctccacatactc

SEQ ID NO: 4094 - DNA, 40 bp, Artificial Sequence
  Description of Artificial Sequence: Synthetic primer
caaatttggggtgagttgagtcccctcacctccccctttc

SEQ ID NO: 4095 - DNA, 40 bp, Artificial Sequence
  Description of Artificial Sequence: Synthetic primer
cagggacggcgctggagtcctccgttcccctcagcctctg

SEQ ID NO: 4096 - DNA, 40 bp, Artificial Sequence
  Description of Artificial Sequence: Synthetic primer
ccccgcctcccatacctgctaaggggccgcgggcgaggac

SEQ ID NO: 4097 - DNA, 40 bp, Artificial Sequence
  Description of Artificial Sequence: Synthetic primer
atgaaacattaaaatatttttctcatatatatattaattc

SEQ ID NO: 4098 - DNA, 40 bp, Artificial Sequence
  Description of Artificial Sequence: Synthetic primer
attttaaagcaaaacataaatgatttcttttgataagatc

SEQ ID NO: 4099 - DNA, 40 bp, Artificial Sequence
  Description of Artificial Sequence: Synthetic primer
tccacgtaactgtgtctgccctgcaggagaggtgcggatg

SEQ ID NO: 4100 - DNA, 40 bp, Artificial Sequence
  Description of Artificial Sequence: Synthetic primer
gctcctctcacccaagccccagcccagcccagcccctaac

SEQ ID NO: 4101 - DNA, 40 bp, Artificial Sequence
  Description of Artificial Sequence: Synthetic primer
ttaaccattgttttatgtttatataaaattttaattgttc

SEQ ID NO: 4102 - DNA, 40 bp, Artificial Sequence
  Description of Artificial Sequence: Synthetic primer
tggtagttatcaaaactaaaattttgtctctgtcttttga

SEQ ID NO: 4103 - DNA, 40 bp, Artificial Sequence
  Description of Artificial Sequence: Synthetic primer
cccgaggaaataaaaaggcagaaagtaagcaaagagagac

SEQ ID NO: 4104 - DNA, 40 bp, Artificial Sequence
  Description of Artificial Sequence: Synthetic primer
aaaagtatttgcatgaaccttaatgaagatgaccacattc

SEQ ID NO: 4105 - DNA, 40 bp, Artificial Sequence
  Description of Artificial Sequence: Synthetic primer
ggttctgaaggcaagtttccagtgggaatcccggatgctg

SEQ ID NO: 4106 - DNA, 40 bp, Artificial Sequence
  Description of Artificial Sequence: Synthetic primer
gccatcagattccagccccttttccacacctcctctgttc

SEQ ID NO: 4107 - DNA, 40 bp, Artificial Sequence
  Description of Artificial Sequence: Synthetic primer
aaattatatacataattacccaacatcagtttataagcac

SEQ ID NO: 4108 - DNA, 40 bp, Artificial Sequence
  Description of Artificial Sequence: Synthetic primer
taaaaatcctgtataaactcttttttatgacatttaactc

SEQ ID NO: 4109 - DNA, 40 bp, Artificial Sequence
  Description of Artificial Sequence: Synthetic primer
attttttcatttcaattgtttacattgtttacttttattg

SEQ ID NO: 4110 - DNA, 40 bp, Artificial Sequence
  Description of Artificial Sequence: Synthetic primer
cagcggttgacatctaatatttgacaaaatattttgcttc

SEQ ID NO: 4111 - DNA, 40 bp, Artificial Sequence
  Description of Artificial Sequence: Synthetic primer
ctggggaaactgcggaaggccattcacctgtgtgcttgtc

SEQ ID NO: 4112 - DNA, 40 bp, Artificial Sequence
  Description of Artificial Sequence: Synthetic primer
gcctgaggtacagagcagaaaggcgaagggaggacagtgc

SEQ ID NO: 4113 - DNA, 40 bp, Artificial Sequence
  Description of Artificial Sequence: Synthetic primer
ggtgaggggcacagtctcccttgtgtcccaaccccgtgac

SEQ ID NO: 4114 - DNA, 40 bp, Artificial Sequence
  Description of Artificial Sequence: Synthetic primer
gggacaccctggaaggctttcccagcaccccgccctgtac

SEQ ID NO: 4115 - DNA, 40 bp, Artificial Sequence
  Description of Artificial Sequence: Synthetic primer
tccctcctaggatcccaggcaggctcctcccccaggtccc

SEQ ID NO: 4116 - DNA, 40 bp, Artificial Sequence
  Description of Artificial Sequence: Synthetic primer
gggcggagcctgatcctccctcccactccttccgctccag

SEQ ID NO: 4117 - DNA, 40 bp, Artificial Sequence
  Description of Artificial Sequence: Synthetic primer
atcagcctgatgcctgctccccggcactggttctcctctc

SEQ ID NO: 4118 - DNA, 40 bp, Artificial Sequence
  Description of Artificial Sequence: Synthetic primer
ctgccctgcagctgcccaccttgagcaccagtttgctggc

SEQ ID NO: 4119 - DNA, 40 bp, Artificial Sequence
  Description of Artificial Sequence: Synthetic primer
caggtaagtctaatgcctgccccagctctgaggtccaaag

SEQ ID NO: 4120 - DNA, 40 bp, Artificial Sequence
  Description of Artificial Sequence: Synthetic primer
aggccctgtgtttaccttcctgctgacacactcctgtccc

SEQ ID NO: 4121 - DNA, 40 bp, Artificial Sequence
  Description of Artificial Sequence: Synthetic primer
tcaaagaaggggttatgctctttactaataatatgttctg

SEQ ID NO: 4122 - DNA, 40 bp, Artificial Sequence
  Description of Artificial Sequence: Synthetic primer
ataagtttcttattatacactttctgaggacctacatttc

SEQ ID NO: 4123 - DNA, 40 bp, Artificial Sequence
  Description of Artificial Sequence: Synthetic primer
ttactgttgccaagctgccacattttctgtgtattttctc

SEQ ID NO: 4124 - DNA, 40 bp, Artificial Sequence
  Description of Artificial Sequence: Synthetic primer
gggaagcatggcagttggagcaaagttgccaaaataaaac

SEQ ID NO: 4125 - DNA, 40 bp, Artificial Sequence
  Description of Artificial Sequence: Synthetic primer
cctgccacctttgcccacagggatgccataaagaggatcg

SEQ ID NO: 4126 - DNA, 40 bp, Artificial Sequence
  Description of Artificial Sequence: Synthetic primer
cagttaaagggtcaatcacgcgtgtccacgacagagacgc

SEQ ID NO: 4127 - DNA, 40 bp, Artificial Sequence
  Description of Artificial Sequence: Synthetic primer
accaacctccatgtgggtttataaatgtgaatgagattac

SEQ ID NO: 4128 - DNA, 40 bp, Artificial Sequence
  Description of Artificial Sequence: Synthetic primer
aagcaggtggctttgttcaaattaaaggttcttctttttc

SEQ ID NO: 4129 - DNA, 40 bp, Artificial Sequence
  Description of Artificial Sequence: Synthetic primer
atttttcttatcaccagtattttcttttcttttacattcc

SEQ ID NO: 4130 - DNA, 40 bp, Artificial Sequence
  Description of Artificial Sequence: Synthetic primer
ctaaaattcaaagcaaaataactagcaaataacttcttac

SEQ ID NO: 4131 - DNA, 40 bp, Artificial Sequence
  Description of Artificial Sequence: Synthetic primer
taacccacctcttgataggcggagctgcaaaatggtatgg

SEQ ID NO: 4132 - DNA, 40 bp, Artificial Sequence
  Description of Artificial Sequence: Synthetic primer
gccaagtccccacagcagccgccagcaccagcccctgtac

SEQ ID NO: 4133 - DNA, 40 bp, Artificial Sequence
  Description of Artificial Sequence: Synthetic primer
gtttaaagtattctttacatggcttttggtcttctaagtg

SEQ ID NO: 4134 - DNA, 40 bp, Artificial Sequence
  Description of Artificial Sequence: Synthetic primer
tatagcttaaaatgataaagagcattattagataacatac

SEQ ID NO: 4135 - DNA, 40 bp, Artificial Sequence
  Description of Artificial Sequence: Synthetic primer
ctccctctgactgctttctctcctccctctgactgctttc

SEQ ID NO: 4136 - DNA, 40 bp, Artificial Sequence
  Description of Artificial Sequence: Synthetic primer
cagcctcagctccagagaccaggcagaacctgccctccac

SEQ ID NO: 4137 - DNA, 40 bp, Artificial Sequence
  Description of Artificial Sequence: Synthetic primer
catccagttgtcagcctcagattaagcccacgatgtcttc

SEQ ID NO: 4138 - DNA, 40 bp, Artificial Sequence
  Description of Artificial Sequence: Synthetic primer
aggcagttttaagaatttggccaagaaggactgaaagaag

SEQ ID NO: 4139 - DNA, 40 bp, Artificial Sequence
  Description of Artificial Sequence: Synthetic primer
atttgtgacaagaatctagtaaaggccttttccctcctgc

SEQ ID NO: 4140 - DNA, 40 bp, Artificial Sequence
  Description of Artificial Sequence: Synthetic primer
cgttcgtgaactttctgtaccactaacctgattttgtttg

SEQ ID NO: 4141 - DNA, 40 bp, Artificial Sequence
  Description of Artificial Sequence: Synthetic primer
catctattaaattattaataacaaatctttcttcattttg

SEQ ID NO: 4142 - DNA, 40 bp, Artificial Sequence
  Description of Artificial Sequence: Synthetic primer
tcaatcattataatgtagttggtactatagtaatgtagag

SEQ ID NO: 4143 - DNA, 40 bp, Artificial Sequence
  Description of Artificial Sequence: Synthetic primer
aaggaaacaggctaagggatggcagtaggaaataaaatcc

SEQ ID NO: 4144 - DNA, 40 bp, Artificial Sequence
  Description of Artificial Sequence: Synthetic primer
ctttttacagttttaactgtttcatattgaatattattgc

SEQ ID NO: 4145 - DNA, 40 bp, Artificial Sequence
  Description of Artificial Sequence: Synthetic primer
tccctgccattggtgagtctcaggcaacatccacagttac

SEQ ID NO: 4146 - DNA, 40 bp, Artificial Sequence
  Description of Artificial Sequence: Synthetic primer
catattatttttaaatttacagtgttctatcttatttccc

SEQ ID NO: 4147 - DNA, 40 bp, Artificial Sequence
  Description of Artificial Sequence: Synthetic primer
ttttccctcaccccatctcactttttccttctctctgttc

SEQ ID NO: 4148 - DNA, 40 bp, Artificial Sequence
  Description of Artificial Sequence: Synthetic primer
ccaaagagatgggagcagagactttcatgctttctttcag

SEQ ID NO: 4149 - DNA, 40 bp, Artificial Sequence
  Description of Artificial Sequence: Synthetic primer
tccaaccccaccaccccaaataactttctaaaagaaaagc

SEQ ID NO: 4150 - DNA, 40 bp, Artificial Sequence
  Description of Artificial Sequence: Synthetic primer
ctctgtaagattactgcaagcctaaaaaccagtctttccc

SEQ ID NO: 4151 - DNA, 40 bp, Artificial Sequence
  Description of Artificial Sequence: Synthetic primer
ccaacggcctgtgcccttggccggcaccttcagcccacac

SEQ ID NO: 4152 - DNA, 40 bp, Artificial Sequence
  Description of Artificial Sequence: Synthetic primer
tgagcagctgaggactgaacccactgtttcctctggtttc

SEQ ID NO: 4153 - DNA, 40 bp, Artificial Sequence
  Description of Artificial Sequence: Synthetic primer
cggtattaaaacgaacggggcggaaagaagccctcagtcg

SEQ ID NO: 4154 - DNA, 40 bp, Artificial Sequence
  Description of Artificial Sequence: Synthetic primer
gtgccccagggaggcagccggacccgagttcggtctttac

SEQ ID NO: 4155 - DNA, 40 bp, Artificial Sequence
  Description of Artificial Sequence: Synthetic primer
gcggcttctccgcccgcgagaagctggagcgcgccgtgag

SEQ ID NO: 4156 - DNA, 40 bp, Artificial Sequence
  Description of Artificial Sequence: Synthetic primer
ggaaccggcggttggcggcccgcggccgtgctgcagcttc

SEQ ID NO: 4157 - DNA, 40 bp, Artificial Sequence
  Description of Artificial Sequence: Synthetic primer
gtgccatagcccggtgtggcagcataagcaggacttcagc

SEQ ID NO: 4158 - DNA, 40 bp, Artificial Sequence
  Description of Artificial Sequence: Synthetic primer
tcaaaactaactccctactccagtaactcccgactttgcc

SEQ ID NO: 4159 - DNA, 40 bp, Artificial Sequence
  Description of Artificial Sequence: Synthetic primer
attaagactcttattacagatatcaactgacccaggcaaa

SEQ ID NO: 4160 - DNA, 40 bp, Artificial Sequence
  Description of Artificial Sequence: Synthetic primer
tttaattagatatattataaatagatgttctttcattttt

SEQ ID NO: 4161 - DNA, 40 bp, Artificial Sequence
  Description of Artificial Sequence: Synthetic primer
tactgagcaagaagacaaaatttccatttacatgatgagc

SEQ ID NO: 4162 - DNA, 40 bp, Artificial Sequence
  Description of Artificial Sequence: Synthetic primer
tttaaaagttttgccacttaattagcactttctttgcatc

SEQ ID NO: 4163 - DNA, 40 bp, Artificial Sequence
  Description of Artificial Sequence: Synthetic primer
cttaggttgtgtactaactgtttcctacagcttcttttct

SEQ ID NO: 4164 - DNA, 40 bp, Artificial Sequence
  Description of Artificial Sequence: Synthetic primer
aacatcagattattttccctttctgtgttccctccttgcc

SEQ ID NO: 4165 - DNA, 40 bp, Artificial Sequence
  Description of Artificial Sequence: Synthetic primer
agaggtggcacccagaggagccccaccactcagggagctg

SEQ ID NO: 4166 - DNA, 40 bp, Artificial Sequence
  Description of Artificial Sequence: Synthetic primer
tccttcctgctgctcccgtccccaggacaccacgctcatg

SEQ ID NO: 4167 - DNA, 40 bp, Artificial Sequence
  Description of Artificial Sequence: Synthetic primer
ataatttccactttcaattcttttttttttcttattctct

SEQ ID NO: 4168 - DNA, 40 bp, Artificial Sequence
  Description of Artificial Sequence: Synthetic primer
tattcagaatactctgacaaacagcacagatcaacacagg

SEQ ID NO: 4169 - DNA, 40 bp, Artificial Sequence
  Description of Artificial Sequence: Synthetic primer
gaatctgcctttcatggccaatgagccttgggccacaacc

SEQ ID NO: 4170 - DNA, 40 bp, Artificial Sequence
  Description of Artificial Sequence: Synthetic primer
ctcattgtgactgactgctttggctgggtctttttgtttc

SEQ ID NO: 4171 - DNA, 40 bp, Artificial Sequence
  Description of Artificial Sequence: Synthetic primer
ttttcagcttctatatccagctttctttttaaaaaaagac

SEQ ID NO: 4172 - DNA, 40 bp, Artificial Sequence
  Description of Artificial Sequence: Synthetic primer
cctggttggccgttatattgttctcctgtgtctgttctag

SEQ ID NO: 4173 - DNA, 40 bp, Artificial Sequence
  Description of Artificial Sequence: Synthetic primer
gccctgtccttttgcttcaccccagctactctggactctc

SEQ ID NO: 4174 - DNA, 40 bp, Artificial Sequence
  Description of Artificial Sequence: Synthetic primer
gctgggcagcagctggagaaggagctgctgtgcccttgcc

SEQ ID NO: 4175 - DNA, 40 bp, Artificial Sequence
  Description of Artificial Sequence: Synthetic primer
ggataggtggagggatgaagtccttaaaactaaattgttc

SEQ ID NO: 4176 - DNA, 40 bp, Artificial Sequence
  Description of Artificial Sequence: Synthetic primer
catgtgcatctacatcagatggtaatcagtgttctgtctc

SEQ ID NO: 4177 - DNA, 40 bp, Artificial Sequence
  Description of Artificial Sequence: Synthetic primer
tggaccagtgcgacatcacctgtaaacatctgcattttcc

SEQ ID NO: 4178 - DNA, 40 bp, Artificial Sequence
  Description of Artificial Sequence: Synthetic primer
tgttgcacttttgtcctttcttcccttgttccctatattg

SEQ ID NO: 4179 - DNA, 40 bp, Artificial Sequence
  Description of Artificial Sequence: Synthetic primer
cattcctttcccaaagtttccagcatctctcactatcttg

SEQ ID NO: 4180 - DNA, 40 bp, Artificial Sequence
  Description of Artificial Sequence: Synthetic primer
agtgtcatgtgcccagcccttatgtgacttgtttccttcc

SEQ ID NO: 4181 - DNA, 40 bp, Artificial Sequence
  Description of Artificial Sequence: Synthetic primer
tatgacaattattcctcaaatattgctatatgtaactttc

SEQ ID NO: 4182 - DNA, 40 bp, Artificial Sequence
  Description of Artificial Sequence: Synthetic primer
ttttctcatactgagtttacttgcctcttatgcacagatg

SEQ ID NO: 4183 - DNA, 40 bp, Artificial Sequence
  Description of Artificial Sequence: Synthetic primer
cccatgaatgattctgttgtccctgctttttgtccttctg

SEQ ID NO: 4184 - DNA, 40 bp, Artificial Sequence
  Description of Artificial Sequence: Synthetic primer
ttccttccataaactaaaaacagaaactgtcgcttcttgc

SEQ ID NO: 4185 - DNA, 40 bp, Artificial Sequence
  Description of Artificial Sequence: Synthetic primer
tcccctccccaggagggagagcattccatcccagtactta

SEQ ID NO: 4186 - DNA, 40 bp, Artificial Sequence
  Description of Artificial Sequence: Synthetic primer
atgtgacgtcaccaggtcctgcgtctctcttggtgtgtgc

SEQ ID NO: 4187 - DNA, 40 bp, Artificial Sequence
  Description of Artificial Sequence: Synthetic primer
tggccagtgctgaccccagccagcctgtcccccaccacct

SEQ ID NO: 4188 - DNA, 40 bp, Artificial Sequence
  Description of Artificial Sequence: Synthetic primer
acctgtcacctctgacctgttaccccttccaactcttctg

SEQ ID NO: 4189 - DNA, 40 bp, Artificial Sequence
  Description of Artificial Sequence: Synthetic primer
ctttggctgtaactaaatgggcacaagtaaaataacatcc

SEQ ID NO: 4190 - DNA, 40 bp, Artificial Sequence
  Description of Artificial Sequence: Synthetic primer
agaaaaaataaacaaaatttaaaaagaaaaagttagcatc

SEQ ID NO: 4191 - DNA, 40 bp, Artificial Sequence
  Description of Artificial Sequence: Synthetic primer
tgttttttccttagcagtcaaaagagaaaaatctttaaag

SEQ ID NO: 4192 - DNA, 40 bp, Artificial Sequence
  Description of Artificial Sequence: Synthetic primer
taatttggttatgctgtcaccagtgtcagttgtactttac

SEQ ID NO: 4193 - DNA, 40 bp, Artificial Sequence
  Description of Artificial Sequence: Synthetic primer
tcttgccacctggccacccggctccaaaagccgagctgtg

SEQ ID NO: 4194 - DNA, 40 bp, Artificial Sequence
  Description of Artificial Sequence: Synthetic primer
gacccacgtgtgagcactcggcccatggcctggcatttcc

SEQ ID NO: 4195 - DNA, 40 bp, Artificial Sequence
  Description of Artificial Sequence: Synthetic primer
ggagggaggcggaggccacctggcacatgcacctcaacac

SEQ ID NO: 4196 - DNA, 40 bp, Artificial Sequence
  Description of Artificial Sequence: Synthetic primer
gtctctgcaggacaaggacagcagggctccccccagctcc

SEQ ID NO: 4197 - DNA, 40 bp, Artificial Sequence
  Description of Artificial Sequence: Synthetic primer
aatagggtccctcttaaacccaatacacagctttgaattg

SEQ ID NO: 4198 - DNA, 40 bp, Artificial Sequence
  Description of Artificial Sequence: Synthetic primer
aaatttaaattcttatacaacaatttcattgtttcactgt

SEQ ID NO: 4199 - DNA, 40 bp, Artificial Sequence
  Description of Artificial Sequence: Synthetic primer
gcctggcctgcgttctcccagcactgatggcgtcctctcc

SEQ ID NO: 4200 - DNA, 40 bp, Artificial Sequence
  Description of Artificial Sequence: Synthetic primer
acccgaccaccgcctgcctcctgctccaccctcagacacg

SEQ ID NO: 4201 - DNA, 40 bp, Artificial Sequence
  Description of Artificial Sequence: Synthetic primer
ccaagcctttcttgtgattactgctccatctcccaatgtg

SEQ ID NO: 4202 - DNA, 40 bp, Artificial Sequence
  Description of Artificial Sequence: Synthetic primer
ctgccagcaggaccagccccaaggccctatcaatactcac

SEQ ID NO: 4203 - DNA, 40 bp, Artificial Sequence
  Description of Artificial Sequence: Synthetic primer
agaaggtgctcgcaggtctctggggtggctcccacactac

SEQ ID NO: 4204 - DNA, 40 bp, Artificial Sequence
  Description of Artificial Sequence: Synthetic primer
ccgtgaagccgggtccatctggatgaatgaactcactgtg

SEQ ID NO: 4205 - DNA, 40 bp, Artificial Sequence
  Description of Artificial Sequence: Synthetic primer
tatatggaaatttcttggcataaccagccatttctcatac

SEQ ID NO: 4206 - DNA, 40 bp, Artificial Sequence
  Description of Artificial Sequence: Synthetic primer
tctactcttagagtagactggataaactcttctgtttgtc

SEQ ID NO: 4207 - DNA, 40 bp, Artificial Sequence
  Description of Artificial Sequence: Synthetic primer
ttgagagtgcgagagaggcggtcgtgcagacccgggagaa

SEQ ID NO: 4208 - DNA, 40 bp, Artificial Sequence
  Description of Artificial Sequence: Synthetic primer
cctccagcaggcaaagcggggccccaaacacattctatgg

SEQ ID NO: 4209 - DNA, 40 bp, Artificial Sequence
  Description of Artificial Sequence: Synthetic primer
atgtaaaaacattaacctgctcttgaaaaaatatgttttc

SEQ ID NO: 4210 - DNA, 40 bp, Artificial Sequence
  Description of Artificial Sequence: Synthetic primer
aaacttttcatataaaccttcaaaagatttcatcacttac

SEQ ID NO: 4211 - DNA, 40 bp, Artificial Sequence
  Description of Artificial Sequence: Synthetic primer
ggccgcaaagcccgggcctaggtttcaccgagccctcctc

SEQ ID NO: 4212 - DNA, 40 bp, Artificial Sequence
  Description of Artificial Sequence: Synthetic primer
agaccccgcccctgctaaggccccgctccctcccagctcc

SEQ ID NO: 4213 - DNA, 40 bp, Artificial Sequence
  Description of Artificial Sequence: Synthetic primer
ttgcatgtgctttctttgcttccagtgccctcaccaacag

SEQ ID NO: 4214 - DNA, 40 bp, Artificial Sequence
  Description of Artificial Sequence: Synthetic primer
ctgataaggttcagttcactaattttagctttctttatgc

SEQ ID NO: 4215 - DNA, 40 bp, Artificial Sequence
  Description of Artificial Sequence: Synthetic primer
cctcattacctggggctgaaccaccagtgagtgaagcaag

SEQ ID NO: 4216 - DNA, 40 bp, Artificial Sequence
  Description of Artificial Sequence: Synthetic primer
atctttgatttttacagatattatcactacctatactccc

SEQ ID NO: 4217 - DNA, 40 bp, Artificial Sequence
  Description of Artificial Sequence: Synthetic primer
aaataataaagggtacctgtatattgtatacttgctttac

SEQ ID NO: 4218 - DNA, 40 bp, Artificial Sequence
  Description of Artificial Sequence: Synthetic primer
tataaaacttgactagtataaagaagcaatattaaaaacc

SEQ ID NO: 4219 - DNA, 40 bp, Artificial Sequence
  Description of Artificial Sequence: Synthetic primer
tcacggccaggcccatcatcactcactggctttttccttc

SEQ ID NO: 4220 - DNA, 40 bp, Artificial Sequence
  Description of Artificial Sequence: Synthetic primer
tcttgccggaactacacctaagcttagaagccctttcccc

SEQ ID NO: 4221 - DNA, 40 bp, Artificial Sequence
  Description of Artificial Sequence: Synthetic primer
tgtgtgagtgtgcattatagtttcttgctttctctcttgg

SEQ ID NO: 4222 - DNA, 40 bp, Artificial Sequence
  Description of Artificial Sequence: Synthetic primer
actgagatttgcatgccactaattcatttctgcctctttg

SEQ ID NO: 4223 - DNA, 40 bp, Artificial Sequence
  Description of Artificial Sequence: Synthetic primer
tgtttcgacaaacagagcacctcgggcagcgggtgggcgc

SEQ ID NO: 4224 - DNA, 40 bp, Artificial Sequence
  Description of Artificial Sequence: Synthetic primer
aagcgccgagcagtaacctctccctttcccgtgtctttgc

SEQ ID NO: 4225 - DNA, 40 bp, Artificial Sequence
  Description of Artificial Sequence: Synthetic primer
ctggcctttccccttgacattcacggtccctctgtagtcg

SEQ ID NO: 4226 - DNA, 40 bp, Artificial Sequence
  Description of Artificial Sequence: Synthetic primer
tgctgctgtagtccggcttgcttaggagctcgtcaaagtc

SEQ ID NO: 4227 - DNA, 40 bp, Artificial Sequence
  Description of Artificial Sequence: Synthetic primer
cgtggagtgccgcatccaggtgagcgaagagagctaccgc

SEQ ID NO: 4228 - DNA, 40 bp, Artificial Sequence
  Description of Artificial Sequence: Synthetic primer
ctacgaggagaactacgagggcggcaaggagtgctaccgg

SEQ ID NO: 4229 - DNA, 40 bp, Artificial Sequence
  Description of Artificial Sequence: Synthetic primer
gacaagctgcactttgagccgtgttaacagccctgcttcc

SEQ ID NO: 4230 - DNA, 40 bp, Artificial Sequence
  Description of Artificial Sequence: Synthetic primer
agccaccttgtttgtgcaaaaaaacagtgtctctcccacc

SEQ ID NO: 4231 - DNA, 40 bp, Artificial Sequence
  Description of Artificial Sequence: Synthetic primer
tgttagtataaattcaacggtttatctaagttgtgtaagc

SEQ ID NO: 4232 - DNA, 40 bp, Artificial Sequence
  Description of Artificial Sequence: Synthetic primer
tttcttatctaggcttcagataagttttgccaaaatttac

SEQ ID NO: 4233 - DNA, 40 bp, Artificial Sequence
  Description of Artificial Sequence: Synthetic primer
ctcaggcctgtgcccagctgacaggctcctcgccggcttc

SEQ ID NO: 4234 - DNA, 40 bp, Artificial Sequence
  Description of Artificial Sequence: Synthetic primer
cccacatggccggcctccctgcagcctcggccccactgcc

SEQ ID NO: 4235 - DNA, 40 bp, Artificial Sequence
  Description of Artificial Sequence: Synthetic primer
cagggagtaattcaactaaaagaaaggcagctgtcaaaag

SEQ ID NO: 4236 - DNA, 40 bp, Artificial Sequence
  Description of Artificial Sequence: Synthetic primer
ttgtcttaatgaatttgttttgttgttttattgtcttctg

SEQ ID NO: 4237 - DNA, 40 bp, Artificial Sequence
  Description of Artificial Sequence: Synthetic primer
ggaaggctagagaacatcttcaaaagagggtagcaagacg

SEQ ID NO: 4238 - DNA, 40 bp, Artificial Sequence
  Description of Artificial Sequence: Synthetic primer
atcactgaaaacagttctcctgacctatctcttgtctttc

SEQ ID NO: 4239 - DNA, 40 bp, Artificial Sequence
  Description of Artificial Sequence: Synthetic primer
acaaaacaaaaagcaagctccacctgtcccctccccagtc

SEQ ID NO: 4240 - DNA, 40 bp, Artificial Sequence
  Description of Artificial Sequence: Synthetic primer
atctgtaaaaggcatttctgccaccctccctctgctttac

SEQ ID NO: 4241 - DNA, 40 bp, Artificial Sequence
  Description of Artificial Sequence: Synthetic primer
cagctgaggacgcggtggacagcccagggaggaggagcac

SEQ ID NO: 4242 - DNA, 40 bp, Artificial Sequence
  Description of Artificial Sequence: Synthetic primer
ggcagcagcgtgggaggctgagggtacgagggtgtcgtgc

SEQ ID NO: 4243 - DNA, 40 bp, Artificial Sequence
  Description of Artificial Sequence: Synthetic primer
cctagtaaatcatttctcatttgtattgttaccacggcta

SEQ ID NO: 4244 - DNA, 40 bp, Artificial Sequence
  Description of Artificial Sequence: Synthetic primer
tgcgttgttatggttagatttgaaacaaccctttgtctac

SEQ ID NO: 4245 - DNA, 40 bp, Artificial Sequence
  Description of Artificial Sequence: Synthetic primer
aggcagtgaggagggaccccatggccagcccaggccctca

SEQ ID NO: 4246 - DNA, 40 bp, Artificial Sequence
  Description of Artificial Sequence: Synthetic primer
ccggggccctcccgctagggcacccatgacctggctctcc

SEQ ID NO: 4247 - DNA, 40 bp, Artificial Sequence
  Description of Artificial Sequence: Synthetic primer
tattttaagtattttcagatgcatctgttactatcttttg

SEQ ID NO: 4248 - DNA, 40 bp, Artificial Sequence
  Description of Artificial Sequence: Synthetic primer
tagaagacaactcacaatggattttgccagtctcctaaac

SEQ ID NO: 4249 - DNA, 40 bp, Artificial Sequence
  Description of Artificial Sequence: Synthetic primer
tttcctgtacctaagttcccgctgtaggtggtacctttgc

SEQ ID NO: 4250 - DNA, 40 bp, Artificial Sequence
  Description of Artificial Sequence: Synthetic primer
ctacgccccagcaatcccactccctgtcccgagtgttctc

SEQ ID NO: 4251 - DNA, 40 bp, Artificial Sequence
  Description of Artificial Sequence: Synthetic primer
tctgtgaatccagaggggaaaaatatgacaaagaaagcta

SEQ ID NO: 4252 - DNA, 40 bp, Artificial Sequence
  Description of Artificial Sequence: Synthetic primer
tctgtaataaagaaaaagaaacagagaatctccattttag

SEQ ID NO: 4253 - DNA, 40 bp, Artificial Sequence
  Description of Artificial Sequence: Synthetic primer
cttactataaataagcagcaaacgccctctcagcccatgc

SEQ ID NO: 4254 - DNA, 40 bp, Artificial Sequence
  Description of Artificial Sequence: Synthetic primer
gtatcaatgtcagctgcaacctagtaacaagcccattttg

SEQ ID NO: 4255 - DNA, 40 bp, Artificial Sequence
  Description of Artificial Sequence: Synthetic primer
gacacaggatagtgatgcctggactattcatccgtctctc

SEQ ID NO: 4256 - DNA, 40 bp, Artificial Sequence
  Description of Artificial Sequence: Synthetic primer
atggtggcggccaccaggccctgttccagctcccctctac

SEQ ID NO: 4257 - DNA, 40 bp, Artificial Sequence
  Description of Artificial Sequence: Synthetic primer
gcctggcaggcgcggtggttgctgcctccgctcactcacc

SEQ ID NO: 4258 - DNA, 40 bp, Artificial Sequence
  Description of Artificial Sequence: Synthetic primer
gccgccccagggccctcacccagcacgtccagcgtgtacg

SEQ ID NO: 4259 - DNA, 40 bp, Artificial Sequence
  Description of Artificial Sequence: Synthetic primer
tttttaagtcagtactataccatcatctctgcaaggtaac

SEQ ID NO: 4260 - DNA, 40 bp, Artificial Sequence
  Description of Artificial Sequence: Synthetic primer
cctgtgtactgtggaaatgtagggagaaattacttatcag

SEQ ID NO: 4261 - DNA, 40 bp, Artificial Sequence
  Description of Artificial Sequence: Synthetic primer
gtatctatctctctactggatattaatttgttatattttc

SEQ ID NO: 4262 - DNA, 40 bp, Artificial Sequence
  Description of Artificial Sequence: Synthetic primer
tccaatatttatacaaacaaagcttcaacaatttactctc

SEQ ID NO: 4263 - DNA, 40 bp, Artificial Sequence
  Description of Artificial Sequence: Synthetic primer
tgtcatcttctcataataaatctaaataagcagtctcatc

SEQ ID NO: 4264 - DNA, 40 bp, Artificial Sequence
  Description of Artificial Sequence: Synthetic primer
aatttgttattaattattcttccattttctcctctataag

SEQ ID NO: 4265 - DNA, 40 bp, Artificial Sequence
  Description of Artificial Sequence: Synthetic primer
ccaaccaagtaccatacacccaaaaaaagttatagaaacg

SEQ ID NO: 4266 - DNA, 40 bp, Artificial Sequence
  Description of Artificial Sequence: Synthetic primer
gttcgctgtggtgtttgcacaattaaattctataatgagc

SEQ ID NO: 4267 - DNA, 40 bp, Artificial Sequence
  Description of Artificial Sequence: Synthetic primer
aagaataattgtttttatttctttgttgcttggttctttg

SEQ ID NO: 4268 - DNA, 40 bp, Artificial Sequence
  Description of Artificial Sequence: Synthetic primer
ctattagaatcaaaatatgatagcaaaacaggaagcatac

SEQ ID NO: 4269 - DNA, 40 bp, Artificial Sequence
  Description of Artificial Sequence: Synthetic primer
ccccacacacagggcccactggtggctctgagccaggcac

SEQ ID NO: 4270 - DNA, 40 bp, Artificial Sequence
  Description of Artificial Sequence: Synthetic primer
gggcacctggctgatcctccaccttccttcacccccacac

SEQ ID NO: 4271 - DNA, 40 bp, Artificial Sequence
  Description of Artificial Sequence: Synthetic primer
tctttcagctcctagttggtctgtatctaacactgttctg

SEQ ID NO: 4272 - DNA, 40 bp, Artificial Sequence
  Description of Artificial Sequence: Synthetic primer
gatatcagtacttggaagagaataaagggagttaaaagac

SEQ ID NO: 4273 - DNA, 40 bp, Artificial Sequence
  Description of Artificial Sequence: Synthetic primer
tgttctccaagcctggctcttcccactaaactcattcctc

SEQ ID NO: 4274 - DNA, 40 bp, Artificial Sequence
  Description of Artificial Sequence: Synthetic primer
ggcctgcattttcctctggaccctcaatgtatccctttgg

SEQ ID NO: 4275 - DNA, 40 bp, Artificial Sequence
  Description of Artificial Sequence: Synthetic primer
tcagaaacagatttgggaagcctcagcacttggctcaaac

SEQ ID NO: 4276 - DNA, 40 bp, Artificial Sequence
  Description of Artificial Sequence: Synthetic primer
aagccgaagtaagaaaacaatttaaaaataatgtaatgtc

SEQ ID NO: 4277 - DNA, 40 bp, Artificial Sequence
  Description of Artificial Sequence: Synthetic primer
actgctgtgaagcagagctcctttgcagacacccctgaag

SEQ ID NO: 4278 - DNA, 40 bp, Artificial Sequence
  Description of Artificial Sequence: Synthetic primer
gcccagcctccttcctcccagcccaggctaactctttggc

SEQ ID NO: 4279 - DNA, 40 bp, Artificial Sequence
  Description of Artificial Sequence: Synthetic primer
aatgatttaccttttctgtctcttttctttataattttgc

SEQ ID NO: 4280 - DNA, 40 bp, Artificial Sequence
  Description of Artificial Sequence: Synthetic primer
ttagaagcattatttacacgactgacttagcctattatgc

SEQ ID NO: 4281 - DNA, 40 bp, Artificial Sequence
  Description of Artificial Sequence: Synthetic primer
tactggtgtaactctttatttgtccccttgcctccctttc

SEQ ID NO: 4282 - DNA, 40 bp, Artificial Sequence
  Description of Artificial Sequence: Synthetic primer
tttctgacactcagggcacaagggagcagcagactttgtg

SEQ ID NO: 4283 - DNA, 40 bp, Artificial Sequence
  Description of Artificial Sequence: Synthetic primer
ttgtttgcagcacaaaatcctcccaaatgcatgagactcc

SEQ ID NO: 4284 - DNA, 40 bp, Artificial Sequence
  Description of Artificial Sequence: Synthetic primer
ttttccacccctgagcctgtgtatctcttgtctctgctcc

SEQ ID NO: 4285 - DNA, 40 bp, Artificial Sequence
  Description of Artificial Sequence: Synthetic primer
cctccctgggccatcagcagagccactgccctccccttgg

SEQ ID NO: 4286 - DNA, 40 bp, Artificial Sequence
  Description of Artificial Sequence: Synthetic primer
tcccatctcaccacttgcacactggctgtgctcaccatcc

SEQ ID NO: 4287 - DNA, 40 bp, Artificial Sequence
  Description of Artificial Sequence: Synthetic primer
ttacttcatgtgtaggttttttattttgctctattttttg

SEQ ID NO: 4288 - DNA, 40 bp, Artificial Sequence
  Description of Artificial Sequence: Synthetic primer
aaaaaaagcccataaaggaatgtaaaccaacaatgaatgg

SEQ ID NO: 4289 - DNA, 40 bp, Artificial Sequence
  Description of Artificial Sequence: Synthetic primer
tattgactaaatatttttataattgtattcactacttaac

SEQ ID NO: 4290 - DNA, 40 bp, Artificial Sequence
  Description of Artificial Sequence: Synthetic primer
aagaatggtttttggacacttggcaatgtgagttcatagc

SEQ ID NO: 4291 - DNA, 40 bp, Artificial Sequence
  Description of Artificial Sequence: Synthetic primer
gaactgtaaaacacagaaagaatgagaataaaaaccagac

SEQ ID NO: 4292 - DNA, 40 bp, Artificial Sequence
  Description of Artificial Sequence: Synthetic primer
ccttaatgctttttaatttccgttttgttcatttttctag

SEQ ID NO: 4293 - DNA, 40 bp, Artificial Sequence
  Description of Artificial Sequence: Synthetic primer
aaacgatggttgtatttgtcaccatattaattgatttttc

SEQ ID NO: 4294 - DNA, 40 bp, Artificial Sequence
  Description of Artificial Sequence: Synthetic primer
tagataaactaaccaagcaacttcttagtgttggcctgag

SEQ ID NO: 4295 - DNA, 40 bp, Artificial Sequence
  Description of Artificial Sequence: Synthetic primer
atctttaaaggttattctgatctgttgctaatttgtactc

SEQ ID NO: 4296 - DNA, 40 bp, Artificial Sequence
  Description of Artificial Sequence: Synthetic primer
tatgtttgactataacaaaattcatcttaattccaatgtt

SEQ ID NO: 4297 - DNA, 40 bp, Artificial Sequence
  Description of Artificial Sequence: Synthetic primer
tgggataataacagaagttcgtgaaaatcaaaatgaatac

SEQ ID NO: 4298 - DNA, 40 bp, Artificial Sequence
  Description of Artificial Sequence: Synthetic primer
tatagctatggccagtattcaagtatatttggctgtttaa

SEQ ID NO: 4299 - DNA, 40 bp, Artificial Sequence
  Description of Artificial Sequence: Synthetic primer
tatttcagagtaattttccagaacttactggttgttgttg

SEQ ID NO: 4300 - DNA, 40 bp, Artificial Sequence
  Description of Artificial Sequence: Synthetic primer
atattttaaataccattttgaagatgagtcagaaaattac

SEQ ID NO: 4301 - DNA, 40 bp, Artificial Sequence
  Description of Artificial Sequence: Synthetic primer
tgaaatttcagcttgtgattacatcttgttctgccttatc

SEQ ID NO: 4302 - DNA, 40 bp, Artificial Sequence
  Description of Artificial Sequence: Synthetic primer
agcttaagaatgctacaagattgaagttacacaacttagg

SEQ ID NO: 4303 - DNA, 40 bp, Artificial Sequence
  Description of Artificial Sequence: Synthetic primer
ctgattacacagtatcctcgacattgatttctgtttttac

SEQ ID NO: 4304 - DNA, 40 bp, Artificial Sequence
  Description of Artificial Sequence: Synthetic primer
ttaatattattactctatagtaccacgaattacaatgaat

SEQ ID NO: 4305 - DNA, 40 bp, Artificial Sequence
  Description of Artificial Sequence: Synthetic primer
cagccatcctgtgagcaccagaacactgacccactcatcc

SEQ ID NO: 4306 - DNA, 40 bp, Artificial Sequence
  Description of Artificial Sequence: Synthetic primer
tcactcaaccttgtcctaacctctctccctcccttcctgc

SEQ ID NO: 4307 - DNA, 40 bp, Artificial Sequence
  Description of Artificial Sequence: Synthetic primer
ggggatctgaaagagggagcagtatttttaaagaatatgc

SEQ ID NO: 4308 - DNA, 40 bp, Artificial Sequence
  Description of Artificial Sequence: Synthetic primer
agcaattcttaaaccaacacaaaacatgacggggagagcc

SEQ ID NO: 4309 - DNA, 40 bp, Artificial Sequence
  Description of Artificial Sequence: Synthetic primer
taagaaacaaacagcatggctttgtttttctccttcttta

SEQ ID NO: 4310 - DNA, 40 bp, Artificial Sequence
  Description of Artificial Sequence: Synthetic primer
atgccaggctacttctcacacccacacacatagtgatacc

SEQ ID NO: 4311 - DNA, 40 bp, Artificial Sequence
  Description of Artificial Sequence: Synthetic primer
ttaccacattttatgtgatgggaaatttcatgtaattatg

SEQ ID NO: 4312 - DNA, 40 bp, Artificial Sequence
  Description of Artificial Sequence: Synthetic primer
tttcaagggtagtaagtttcccattaccaagttctgaatt

SEQ ID NO: 4313 - DNA, 40 bp, Artificial Sequence
  Description of Artificial Sequence: Synthetic primer
agagttttgattttctgtagcttcgtgactcggtaaaaag

SEQ ID NO: 4314 - DNA, 40 bp, Artificial Sequence
  Description of Artificial Sequence: Synthetic primer
cagcccttcagcagacggcgttgattttaaagcatgtgtc

SEQ ID NO: 4315 - DNA, 40 bp, Artificial Sequence
  Description of Artificial Sequence: Synthetic primer
atttgaactctagaggtgaattctttttagttttattttt

SEQ ID NO: 4316 - DNA, 40 bp, Artificial Sequence
  Description of Artificial Sequence: Synthetic primer
aaaaaaaaatggaaagtgagatcttaagcaaatcaaaaat

SEQ ID NO: 4317 - DNA, 40 bp, Artificial Sequence
  Description of Artificial Sequence: Synthetic primer
ggctgtgtaactgccctctcactggccaccatttttaccc

SEQ ID NO: 4318 - DNA, 40 bp, Artificial Sequence
  Description of Artificial Sequence: Synthetic primer
ctgcaatgacaaataagatttgattgaacgcgactcacag

SEQ ID NO: 4319 - DNA, 40 bp, Artificial Sequence
  Description of Artificial Sequence: Synthetic primer
agcatgttcctgtcaggttatatggcagccctggctcaag

SEQ ID NO: 4320 - DNA, 40 bp, Artificial Sequence
  Description of Artificial Sequence: Synthetic primer
ctaacctgtgttttgtgatattttatcatttgttgtactc

SEQ ID NO: 4321 - DNA, 40 bp, Artificial Sequence
  Description of Artificial Sequence: Synthetic primer
ggctggccctgcctgccccacccgctgacccagccctccc

SEQ ID NO: 4322 - DNA, 40 bp, Artificial Sequence
  Description of Artificial Sequence: Synthetic primer
cacagaggaagtgctccccatggacagagcagcctggatg

SEQ ID NO: 4323 - DNA, 40 bp, Artificial Sequence
  Description of Artificial Sequence: Synthetic primer
gcaaaactagtttgtaatctcttgcctctttgtgttcctg

SEQ ID NO: 4324 - DNA, 40 bp, Artificial Sequence
  Description of Artificial Sequence: Synthetic primer
tatacgcagaaccactaatgtagagtttactaggaggtac

SEQ ID NO: 4325 - DNA, 40 bp, Artificial Sequence
  Description of Artificial Sequence: Synthetic primer
ggctggctgggtcactaacctctgtgatctgcttccttcc

SEQ ID NO: 4326 - DNA, 40 bp, Artificial Sequence
  Description of Artificial Sequence: Synthetic primer
acagatcaggcaccctgcagccacttgctgataatgaatc

SEQ ID NO: 4327 - DNA, 40 bp, Artificial Sequence
  Description of Artificial Sequence: Synthetic primer
ctttaagataattctggaaacaaatgagtttcttgtcaac

SEQ ID NO: 4328 - DNA, 40 bp, Artificial Sequence
  Description of Artificial Sequence: Synthetic primer
ttctataaaataaaataaatttacccaaattctctgtgcc

SEQ ID NO: 4329 - DNA, 40 bp, Artificial Sequence
  Description of Artificial Sequence: Synthetic primer
tttatttttcccttaaaaggcaagaaggcagtagttcagc

SEQ ID NO: 4330 - DNA, 40 bp, Artificial Sequence
  Description of Artificial Sequence: Synthetic primer
ttaatatattttttgcttagttgttattttcctattttcc

SEQ ID NO: 4331 - DNA, 40 bp, Artificial Sequence
  Description of Artificial Sequence: Synthetic primer
agtgcttgaaggagaggaaatgcaaaggatggggccaacg

SEQ ID NO: 4332 - DNA, 40 bp, Artificial Sequence
  Description of Artificial Sequence: Synthetic primer
caggtgccatctcgggcatctgcttactccttgctcctgc

SEQ ID NO: 4333 - DNA, 40 bp, Artificial Sequence
  Description of Artificial Sequence: Synthetic primer
gatttgtgttcctgcaataatgtctcaggggtgggctgac

SEQ ID NO: 4334 - DNA, 40 bp, Artificial Sequence
  Description of Artificial Sequence: Synthetic primer
tgaaggcccttcccatgaaatggacgtggatagcagcaag

SEQ ID NO: 4335 - DNA, 40 bp, Artificial Sequence
  Description of Artificial Sequence: Synthetic primer
gtgacatgggcttgtctcttggtaggaggaggaggaagag

SEQ ID NO: 4336 - DNA, 40 bp, Artificial Sequence
  Description of Artificial Sequence: Synthetic primer
ccaccagcgccacctcacaggaagctggcacagaacaacc

SEQ ID NO: 4337 - DNA, 40 bp, Artificial Sequence
  Description of Artificial Sequence: Synthetic primer
tgtcccatccccactgtcttgagagaatagctctgtgtaa

SEQ ID NO: 4338 - DNA, 40 bp, Artificial Sequence
  Description of Artificial Sequence: Synthetic primer
tcatttaaaaaggaaataaggaagaaggaacagaaagtac

SEQ ID NO: 4339 - DNA, 40 bp, Artificial Sequence
  Description of Artificial Sequence: Synthetic primer
tttcagttttatgtatgatctcttacctatgactctactg

SEQ ID NO: 4340 - DNA, 40 bp, Artificial Sequence
  Description of Artificial Sequence: Synthetic primer
ttctccatgaatgtcatattgagattacatataaggtatc

SEQ ID NO: 4341 - DNA, 40 bp, Artificial Sequence
  Description of Artificial Sequence: Synthetic primer
taacttttatacattttttctacataggctttttatttgg

SEQ ID NO: 4342 - DNA, 40 bp, Artificial Sequence
  Description of Artificial Sequence: Synthetic primer
aatcttaatacacttgacaccatgtttttcagcatttttt

SEQ ID NO: 4343 - DNA, 40 bp, Artificial Sequence
  Description of Artificial Sequence: Synthetic primer
cactcttttttcaattctgtttatgcttttttcgttcgtc

SEQ ID NO: 4344 - DNA, 40 bp, Artificial Sequence
  Description of Artificial Sequence: Synthetic primer
tactacacagttctttatttcttaagtgaaaatgtcagag

SEQ ID NO: 4345 - DNA, 40 bp, Artificial Sequence
  Description of Artificial Sequence: Synthetic primer
gatgaacaagttactttgttttgtttttatctcccctcca

SEQ ID NO: 4346 - DNA, 40 bp, Artificial Sequence
  Description of Artificial Sequence: Synthetic primer
ggtacagatattaattcaaattgacagatgcaacaaaaaa

SEQ ID NO: 4347 - DNA, 40 bp, Artificial Sequence
  Description of Artificial Sequence: Synthetic primer
cctctggttaccaatccatatcccattctggtggattctc

SEQ ID NO: 4348 - DNA, 40 bp, Artificial Sequence
  Description of Artificial Sequence: Synthetic primer
tgtatgagatttcatcattttcatttgttcttcatttacc

SEQ ID NO: 4349 - DNA, 40 bp, Artificial Sequence
  Description of Artificial Sequence: Synthetic primer
tgcctttgcaaaggataggaaaatgggaggtcagggagag

SEQ ID NO: 4350 - DNA, 40 bp, Artificial Sequence
  Description of Artificial Sequence: Synthetic primer
actgtctgttggagtgtcttgaattatgtgtttctttggg

SEQ ID NO: 4351 - DNA, 40 bp, Artificial Sequence
  Description of Artificial Sequence: Synthetic primer
atttatgtcagtgatttacaaatacatataaatttttttc

SEQ ID NO: 4352 - DNA, 40 bp, Artificial Sequence
  Description of Artificial Sequence: Synthetic primer
taaactgttaagttcaaataaaagacaacagacatattac

SEQ ID NO: 4353 - DNA, 40 bp, Artificial Sequence
  Description of Artificial Sequence: Synthetic primer
gcagaaagcaagcacaatccacatttccctctctttctgc

SEQ ID NO: 4354 - DNA, 40 bp, Artificial Sequence
  Description of Artificial Sequence: Synthetic primer
gggagccggggagaggtgatgacccctggcacctgctgtc

SEQ ID NO: 4355 - DNA, 40 bp, Artificial Sequence
  Description of Artificial Sequence: Synthetic primer
gtgggtaattcatgccacctggtgacagcgcccccatgtc

SEQ ID NO: 4356 - DNA, 40 bp, Artificial Sequence
  Description of Artificial Sequence: Synthetic primer
gacctgcagatcccttcttcctgtaagaggatcgaagagg

SEQ ID NO: 4357 - DNA, 40 bp, Artificial Sequence
  Description of Artificial Sequence: Synthetic primer
agaagggcccaacagaggagtctagggactagggaagatg

SEQ ID NO: 4358 - DNA, 40 bp, Artificial Sequence
  Description of Artificial Sequence: Synthetic primer
attccccataacgagatatgagtgtagcttggtggagtag

SEQ ID NO: 4359 - DNA, 40 bp, Artificial Sequence
  Description of Artificial Sequence: Synthetic primer
acactcatcctatttgggtgtggaagacagcagatggaag

SEQ ID NO: 4360 - DNA, 40 bp, Artificial Sequence
  Description of Artificial Sequence: Synthetic primer
gggaccacataaggaatggggccagaagaaagaggctcac

SEQ ID NO: 4361 - DNA, 40 bp, Artificial Sequence
  Description of Artificial Sequence: Synthetic primer
aaaaaaaaagctctcaggataaaatgttcaattgtagttc

SEQ ID NO: 4362 - DNA, 40 bp, Artificial Sequence
  Description of Artificial Sequence: Synthetic primer
cagattaagtccactctgtctttattaggaagtaactgtg

SEQ ID NO: 4363 - DNA, 40 bp, Artificial Sequence
  Description of Artificial Sequence: Synthetic primer
gggcaggcagccagccagtcgcaactgtcccatccctatc

SEQ ID NO: 4364 - DNA, 40 bp, Artificial Sequence
  Description of Artificial Sequence: Synthetic primer
acgtcacagggaggctgatgggagaggctcggacaccacg

SEQ ID NO: 4365 - DNA, 40 bp, Artificial Sequence
  Description of Artificial Sequence: Synthetic primer
cctgtcccagaagcatgggctctggggtctgcgtagtgtg

SEQ ID NO: 4366 - DNA, 40 bp, Artificial Sequence
  Description of Artificial Sequence: Synthetic primer
aggtccagcatgttttgatattctgctttccctttatacc

SEQ ID NO: 4367 - DNA, 40 bp, Artificial Sequence
  Description of Artificial Sequence: Synthetic primer
ccctcatcccctcccctcactcacacttcagcatcttcac

SEQ ID NO: 4368 - DNA, 40 bp, Artificial Sequence
  Description of Artificial Sequence: Synthetic primer
gaggccctttggtgcccagggacttaagggacctgtgtgc

SEQ ID NO: 4369 - DNA, 40 bp, Artificial Sequence
  Description of Artificial Sequence: Synthetic primer
ttttatacttcaaagtttactggtttgttacttctttttc

SEQ ID NO: 4370 - DNA, 40 bp, Artificial Sequence
  Description of Artificial Sequence: Synthetic primer
attacccacataaaggtatagggcccaaaaagggttgttg

SEQ ID NO: 4371 - DNA, 40 bp, Artificial Sequence
  Description of Artificial Sequence: Synthetic primer
atactgctactttatcaagaagagtaggtataaataataa

SEQ ID NO: 4372 - DNA, 40 bp, Artificial Sequence
  Description of Artificial Sequence: Synthetic primer
ttgtcacaggagccaagggagaacccaagacagagaatag

SEQ ID NO: 4373 - DNA, 40 bp, Artificial Sequence
  Description of Artificial Sequence: Synthetic primer
tgccacactgcagctcgcttaccagtccacagtgaatacg

SEQ ID NO: 4374 - DNA, 40 bp, Artificial Sequence
  Description of Artificial Sequence: Synthetic primer
aaaggaaagttgagaacaaggtcgatttcactgaagcagc

SEQ ID NO: 4375 - DNA, 40 bp, Artificial Sequence
  Description of Artificial Sequence: Synthetic primer
agatgcacaggaacctggtggaaatctggcagcacacacc

SEQ ID NO: 4376 - DNA, 40 bp, Artificial Sequence
  Description of Artificial Sequence: Synthetic primer
tggtttggccacaaacctaacgtgctttttgtttctacag

SEQ ID NO: 4377 - DNA, 40 bp, Artificial Sequence
  Description of Artificial Sequence: Synthetic primer
cccacaaccctggccccaggccctgcccctgcccacctca

SEQ ID NO: 4378 - DNA, 40 bp, Artificial Sequence
  Description of Artificial Sequence: Synthetic primer
agtcccctagccctgggtccttgtctccatccccattttg

SEQ ID NO: 4379 - DNA, 40 bp, Artificial Sequence
  Description of Artificial Sequence: Synthetic primer
gaaaaaacacctgggcccatgagcagtgggtttccctgtc

SEQ ID NO: 4380 - DNA, 40 bp, Artificial Sequence
  Description of Artificial Sequence: Synthetic primer
gggttcaaagatgctttccagcttctctgccccctcaccc

SEQ ID NO: 4381 - DNA, 40 bp, Artificial Sequence
  Description of Artificial Sequence: Synthetic primer
aataatatccaaataccaaattcaagataagtgacatttt

SEQ ID NO: 4382 - DNA, 40 bp, Artificial Sequence
  Description of Artificial Sequence: Synthetic primer
tgagattaataaggctgaatatgataacattttaacatag

SEQ ID NO: 4383 - DNA, 40 bp, Artificial Sequence
  Description of Artificial Sequence: Synthetic primer
gttttgtttttgaatgaatattgggtttgactttaggaaa

SEQ ID NO: 4384 - DNA, 40 bp, Artificial Sequence
  Description of Artificial Sequence: Synthetic primer
gccagtatccgaaactacaggagccacgggtagaaataac

SEQ ID NO: 4385 - DNA, 40 bp, Artificial Sequence
  Description of Artificial Sequence: Synthetic primer
gactcaatgaaaattcagaagatagtccaattattatttc

SEQ ID NO: 4386 - DNA, 40 bp, Artificial Sequence
  Description of Artificial Sequence: Synthetic primer
ctctcactgctgatcacatggatctgtttctttgtatttc

SEQ ID NO: 4387 - DNA, 40 bp, Artificial Sequence
  Description of Artificial Sequence: Synthetic primer
ttttctttatcagtgtctcccttttttttcttaaatcttg

SEQ ID NO: 4388 - DNA, 40 bp, Artificial Sequence
  Description of Artificial Sequence: Synthetic primer
aaactgtacagaggttgcaacagttaagtaattagaatat

SEQ ID NO: 4389 - DNA, 40 bp, Artificial Sequence
  Description of Artificial Sequence: Synthetic primer
ggcagaggagatggagaggaggagggaagagaagcaggtg

SEQ ID NO: 4390 - DNA, 40 bp, Artificial Sequence
  Description of Artificial Sequence: Synthetic primer
tcaaggctatctctgcttccctctcttccacccccaacag

SEQ ID NO: 4391 - DNA, 40 bp, Artificial Sequence
  Description of Artificial Sequence: Synthetic primer
agctttcaaaaagaaaattgttaaagagagcatgaaaatg

SEQ ID NO: 4392 - DNA, 40 bp, Artificial Sequence
  Description of Artificial Sequence: Synthetic primer
aattttatttcctagggagccacggtcccagtggggcaca

SEQ ID NO: 4393 - DNA, 40 bp, Artificial Sequence
  Description of Artificial Sequence: Synthetic primer
ctggccgtcagcttccgaactacagctctggtggtgcttg

SEQ ID NO: 4394 - DNA, 40 bp, Artificial Sequence
  Description of Artificial Sequence: Synthetic primer
cacacaggcaccagccaggcaatgagggtggagcgggagg

SEQ ID NO: 4395 - DNA, 40 bp, Artificial Sequence
  Description of Artificial Sequence: Synthetic primer
ggcccctcaccacaggccgcctcctcctctcggccctctc

SEQ ID NO: 4396 - DNA, 40 bp, Artificial Sequence
  Description of Artificial Sequence: Synthetic primer
gagaggataatgggtgatttttattttctcctttttcata

SEQ ID NO: 4397 - DNA, 40 bp, Artificial Sequence
  Description of Artificial Sequence: Synthetic primer
gcccatcgactttttatataatcttttcaaaaacaaaaag

SEQ ID NO: 4398 - DNA, 40 bp, Artificial Sequence
  Description of Artificial Sequence: Synthetic primer
tctacaagtttctaaaatgtgcagtccaggaaacagaaag

SEQ ID NO: 4399 - DNA, 40 bp, Artificial Sequence
  Description of Artificial Sequence: Synthetic primer
ttgacaatttacatcattatatacagtctcatcataccac

SEQ ID NO: 4400 - DNA, 40 bp, Artificial Sequence
  Description of Artificial Sequence: Synthetic primer
ggagccacatctttacagccgtgaccatgcccaggcactc

SEQ ID NO: 4401 - DNA, 40 bp, Artificial Sequence
  Description of Artificial Sequence: Synthetic primer
ggtgggaagccggtgtgtctgtgcctccttttgaacttgc

SEQ ID NO: 4402 - DNA, 40 bp, Artificial Sequence
  Description of Artificial Sequence: Synthetic primer
gcaagtacactctgcactgccctttttgtttgtttgcttc

SEQ ID NO: 4403 - DNA, 40 bp, Artificial Sequence
  Description of Artificial Sequence: Synthetic primer
tgatgtaacttcaccagtgcaaccaagccagcaggtaaac

SEQ ID NO: 4404 - DNA, 40 bp, Artificial Sequence
  Description of Artificial Sequence: Synthetic primer
acagcttcctcaaataatacatttaaaactgagaacatac

SEQ ID NO: 4405 - DNA, 40 bp, Artificial Sequence
  Description of Artificial Sequence: Synthetic primer
tggtagttttcttccttaacctaaatatgattgctttttc

SEQ ID NO: 4406 - DNA, 40 bp, Artificial Sequence
  Description of Artificial Sequence: Synthetic primer
tggtcttgtcattgaggacctagtaaaaccctctgaaatc

SEQ ID NO: 4407 - DNA, 40 bp, Artificial Sequence
  Description of Artificial Sequence: Synthetic primer
ttatgagaaaaattatctataggtcttggtgtcaaagcag

SEQ ID NO: 4408 - DNA, 40 bp, Artificial Sequence
  Description of Artificial Sequence: Synthetic primer
gataccgatgataaaggtgtacagttttccactggtgcag

SEQ ID NO: 4409 - DNA, 40 bp, Artificial Sequence
  Description of Artificial Sequence: Synthetic primer
tggaacaccaagacctggaatttctgtcccttactctcag

SEQ ID NO: 4410 - DNA, 40 bp, Artificial Sequence
  Description of Artificial Sequence: Synthetic primer
atccttatggatcagtgtcacaggcatcaaggcgattgtc

SEQ ID NO: 4411 - DNA, 40 bp, Artificial Sequence
  Description of Artificial Sequence: Synthetic primer
tggatccatatgcaaaaatggttggtacccctcgaccacc

SEQ ID NO: 4412 - DNA, 40 bp, Artificial Sequence
  Description of Artificial Sequence: Synthetic primer
ttcattttaccaataaaacagaacctactatctgcctttg

SEQ ID NO: 4413 - DNA, 40 bp, Artificial Sequence
  Description of Artificial Sequence: Synthetic primer
ttttatgtttttttcagtcattcattaatattcagaattg

SEQ ID NO: 4414 - DNA, 40 bp, Artificial Sequence
  Description of Artificial Sequence: Synthetic primer
tcctgggctcgcccgcagcagctgctggcacctggacggc

SEQ ID NO: 4415 - DNA, 40 bp, Artificial Sequence
  Description of Artificial Sequence: Synthetic primer
cctccttggcaggtggggcaggagaccctgtaggaggacc

SEQ ID NO: 4416 - DNA, 40 bp, Artificial Sequence
  Description of Artificial Sequence: Synthetic primer
cagaaataccaacattttctctgcaatggatcaaccaacc

SEQ ID NO: 4417 - DNA, 40 bp, Artificial Sequence
  Description of Artificial Sequence: Synthetic primer
cttcctccatctcagggcagccagcttggggtctcacctc

SEQ ID NO: 4418 - DNA, 40 bp, Artificial Sequence
  Description of Artificial Sequence: Synthetic primer
cttgtcctctctgagcacatctcctctctgtcctttcttc

SEQ ID NO: 4419 - DNA, 40 bp, Artificial Sequence
  Description of Artificial Sequence: Synthetic primer
aggtgttgagggtagggaaggaggagatggggtgtggaag

SEQ ID NO: 4420 - DNA, 40 bp, Artificial Sequence
  Description of Artificial Sequence: Synthetic primer
aagtggctaaatgaatatctctgctttgtggtttgaaaat

SEQ ID NO: 4421 - DNA, 40 bp, Artificial Sequence
  Description of Artificial Sequence: Synthetic primer
ataaaaaaataaacagaattgatttaagttaaaaaaaaaa

SEQ ID NO: 4422 - DNA, 40 bp, Artificial Sequence
  Description of Artificial Sequence: Synthetic primer
atcagtggcatgcttcatggagatatgctcctctcactgc

SEQ ID NO: 4423 - DNA, 40 bp, Artificial Sequence
  Description of Artificial Sequence: Synthetic primer
ccgcggggcagagctccgtgcgtcgcggtacctggcttac

SEQ ID NO: 4424 - DNA, 40 bp, Artificial Sequence
  Description of Artificial Sequence: Synthetic primer
ctgcgcggggagcggccagaggctcgctggcgcgcacgcc

SEQ ID NO: 4425 - DNA, 40 bp, Artificial Sequence
  Description of Artificial Sequence: Synthetic primer
cccagtacccggtgcctacctgcgctgctgctcttctcgg

SEQ ID NO: 4426 - DNA, 40 bp, Artificial Sequence
  Description of Artificial Sequence: Synthetic primer
ggccgcggcggccgaggaggcggccatgcaacgcgagctt

SEQ ID NO: 4427 - DNA, 40 bp, Artificial Sequence
  Description of Artificial Sequence: Synthetic primer
ccggcgcagcgcacaccggctcaggcgccttgaagagcac

SEQ ID NO: 4428 - DNA, 40 bp, Artificial Sequence
  Description of Artificial Sequence: Synthetic primer
caaaggtggctagtgttcctggtcctgacttggttgtgtc

SEQ ID NO: 4429 - DNA, 40 bp, Artificial Sequence
  Description of Artificial Sequence: Synthetic primer
gacctttctttggaaaccctctaaggagttatagaattac

SEQ ID NO: 4430 - DNA, 40 bp, Artificial Sequence
  Description of Artificial Sequence: Synthetic primer
cattattttaattcttgcacaaaatatataacacctttgc

SEQ ID NO: 4431 - DNA, 40 bp, Artificial Sequence
  Description of Artificial Sequence: Synthetic primer
gtaccagacagtataattagaacaaaaagaaaaatcatac

SEQ ID NO: 4432 - DNA, 40 bp, Artificial Sequence
  Description of Artificial Sequence: Synthetic primer
actcccaattgtcctaagctccttaactcccctagattcc

SEQ ID NO: 4433 - DNA, 40 bp, Artificial Sequence
  Description of Artificial Sequence: Synthetic primer
agcagtgtttattctgttttctctctgcctttctatccag

SEQ ID NO: 4434 - DNA, 40 bp, Artificial Sequence
  Description of Artificial Sequence: Synthetic primer
cggcccctaaaaaaggcagccgccaatttatcgtatactg

SEQ ID NO: 4435 - DNA, 40 bp, Artificial Sequence
  Description of Artificial Sequence: Synthetic primer
ggctttctattgatagtggcttttttttttctttttaatg

SEQ ID NO: 4436 - DNA, 40 bp, Artificial Sequence
  Description of Artificial Sequence: Synthetic primer
cagcctcagagcctggctgcacccaggcccatttgtgctc

SEQ ID NO: 4437 - DNA, 40 bp, Artificial Sequence
  Description of Artificial Sequence: Synthetic primer
ggtgtggggtggtggtgatgggtccttccacccgagcatc

SEQ ID NO: 4438 - DNA, 40 bp, Artificial Sequence
  Description of Artificial Sequence: Synthetic primer
ccccgctccgtgcacagacgatgccactgacaaggacctg

SEQ ID NO: 4439 - DNA, 40 bp, Artificial Sequence
  Description of Artificial Sequence: Synthetic primer
agggccgcccagccggcaccaccgccgctaccgcacctac

SEQ ID NO: 4440 - DNA, 40 bp, Artificial Sequence
  Description of Artificial Sequence: Synthetic primer
agcgggtgctccaccgagtaccccgctgggtcccccgaag

SEQ ID NO: 4441 - DNA, 40 bp, Artificial Sequence
  Description of Artificial Sequence: Synthetic primer
atcacggaccctcctccaagaaccctggttgcttgctctg

SEQ ID NO: 4442 - DNA, 40 bp, Artificial Sequence
  Description of Artificial Sequence: Synthetic primer
cagaaagtacttctttaatcagtgacagtgattatttttc

SEQ ID NO: 4443 - DNA, 40 bp, Artificial Sequence
  Description of Artificial Sequence: Synthetic primer
tcttctataatgcattgttcattggtacttagtgtatctg

SEQ ID NO: 4444 - DNA, 40 bp, Artificial Sequence
  Description of Artificial Sequence: Synthetic primer
ttaatcataatcataccgaagatgatagtgagatctgtcc

SEQ ID NO: 4445 - DNA, 40 bp, Artificial Sequence
  Description of Artificial Sequence: Synthetic primer
aatataattagctttatctaaattgttttattttcttccc

SEQ ID NO: 4446 - DNA, 40 bp, Artificial Sequence
  Description of Artificial Sequence: Synthetic primer
aagcccattccaaaactacacatttatttacttctctttc

SEQ ID NO: 4447 - DNA, 40 bp, Artificial Sequence
  Description of Artificial Sequence: Synthetic primer
gttactaaagaatcccaatttcaataacaatataaataaa

SEQ ID NO: 4448 - DNA, 40 bp, Artificial Sequence
  Description of Artificial Sequence: Synthetic primer
tggccagcctaggactgagggagatgtgttccttgctttc

SEQ ID NO: 4449 - DNA, 40 bp, Artificial Sequence
  Description of Artificial Sequence: Synthetic primer
aacctcagagccccagcctcctggcctccctgtctctcgc

SEQ ID NO: 4450 - DNA, 40 bp, Artificial Sequence
  Description of Artificial Sequence: Synthetic primer
aaaaaagacagaggcttcatctcttttcttcatactgttc

SEQ ID NO: 4451 - DNA, 40 bp, Artificial Sequence
  Description of Artificial Sequence: Synthetic primer
tatgttttgcatagttgcaataattttatctactttcttc

SEQ ID NO: 4452 - DNA, 40 bp, Artificial Sequence
  Description of Artificial Sequence: Synthetic primer
caagattcagttgctgaattctctccaatatttttctttt

SEQ ID NO: 4453 - DNA, 40 bp, Artificial Sequence
  Description of Artificial Sequence: Synthetic primer
aaattctgagatgatcttcttagggcaagagtatctgatc

SEQ ID NO: 4454 - DNA, 40 bp, Artificial Sequence
  Description of Artificial Sequence: Synthetic primer
ttttgtgtgtcgatttccaagcttctgaagaaggcaaagg

SEQ ID NO: 4455 - DNA, 40 bp, Artificial Sequence
  Description of Artificial Sequence: Synthetic primer
ctggaagaaagttaacacatagctaatcaatgttctcatc

SEQ ID NO: 4456 - DNA, 40 bp, Artificial Sequence
  Description of Artificial Sequence: Synthetic primer
ttgttttaaaatggctctgtaaattctacccgtttttaat

SEQ ID NO: 4457 - DNA, 40 bp, Artificial Sequence
  Description of Artificial Sequence: Synthetic primer
tataaaatgaaaccattattcaatcataaagcaaacttac

SEQ ID NO: 4458 - DNA, 40 bp, Artificial Sequence
  Description of Artificial Sequence: Synthetic primer
aagagatttcctgaggattctggttttcctcgcttgtatc

SEQ ID NO: 4459 - DNA, 40 bp, Artificial Sequence
  Description of Artificial Sequence: Synthetic primer
aaggcgcaccgagtagaaaagattaaagggaacgtggaag

SEQ ID NO: 4460 - DNA, 40 bp, Artificial Sequence
  Description of Artificial Sequence: Synthetic primer
tccttttttgccattaagtcaggaggtatttcttgttcta

SEQ ID NO: 4461 - DNA, 40 bp, Artificial Sequence
  Description of Artificial Sequence: Synthetic primer
caatcttgtaacagtgaaaacagcatttcccattacttac

SEQ ID NO: 4462 - DNA, 40 bp, Artificial Sequence
  Description of Artificial Sequence: Synthetic primer
gaacagcctagacttgggtgaggcaggggtggggtgggtg

SEQ ID NO: 4463 - DNA, 40 bp, Artificial Sequence
  Description of Artificial Sequence: Synthetic primer
ggaagaaacccacgcatcttctctcccttcccaccttccc

SEQ ID NO: 4464 - DNA, 40 bp, Artificial Sequence
  Description of Artificial Sequence: Synthetic primer
aaaaactgagaatcatgagataatcattatatttaatatt

SEQ ID NO: 4465 - DNA, 40 bp, Artificial Sequence
  Description of Artificial Sequence: Synthetic primer
aagatttgatagttagacgatttttaaaaaacatatcttg

SEQ ID NO: 4466 - DNA, 40 bp, Artificial Sequence
  Description of Artificial Sequence: Synthetic primer
ccagcccacgttgagcaccgcctggcctcacactcttctc

SEQ ID NO: 4467 - DNA, 40 bp, Artificial Sequence
  Description of Artificial Sequence: Synthetic primer
cgccaaccaccctggcccacaccaagaagaggagagaaag

SEQ ID NO: 4468 - DNA, 40 bp, Artificial Sequence
  Description of Artificial Sequence: Synthetic primer
gtgcgcggctcccagcctcccaggcccagctggccagcag

SEQ ID NO: 4469 - DNA, 40 bp, Artificial Sequence
  Description of Artificial Sequence: Synthetic primer
atgacctggggtgggcttggtggctgcctgggccctgctg

SEQ ID NO: 4470 - DNA, 40 bp, Artificial Sequence
  Description of Artificial Sequence: Synthetic primer
gcagccccgccccggctaccccgccctgcggcgacccgta

SEQ ID NO: 4471 - DNA, 40 bp, Artificial Sequence
  Description of Artificial Sequence: Synthetic primer
gggtccaggcaggagccggactggacctcagggaagaggc

SEQ ID NO: 4472 - DNA, 40 bp, Artificial Sequence
  Description of Artificial Sequence: Synthetic primer
tctatacacatggacatttgtagaagaaataaggctcaac

SEQ ID NO: 4473 - DNA, 40 bp, Artificial Sequence
  Description of Artificial Sequence: Synthetic primer
tcctgtggtttatgatgcacgttgtttgtagctgtagtgc

SEQ ID NO: 4474 - DNA, 40 bp, Artificial Sequence
  Description of Artificial Sequence: Synthetic primer
ttgcccgccacagccctggaacaacttagaaggtgcaatc

SEQ ID NO: 4475 - DNA, 40 bp, Artificial Sequence
  Description of Artificial Sequence: Synthetic primer
ttctttttccaaaagatgcttgtctttcctttcttgtcac

SEQ ID NO: 4476 - DNA, 40 bp, Artificial Sequence
  Description of Artificial Sequence: Synthetic primer
ctacactttgtaaaataacttgcacaaaaatttaatactg

SEQ ID NO: 4477 - DNA, 40 bp, Artificial Sequence
  Description of Artificial Sequence: Synthetic primer
gccaaaaataagtttctcaatcccctaactctgagtcttg

SEQ ID NO: 4478 - DNA, 40 bp, Artificial Sequence
  Description of Artificial Sequence: Synthetic primer
cagtaaatacattggttgaagtttaaaagtctatccgtag

SEQ ID NO: 4479 - DNA, 40 bp, Artificial Sequence
  Description of Artificial Sequence: Synthetic primer
tcaaggttttataaagagatttctctcctttacccctttc

SEQ ID NO: 4480 - DNA, 40 bp, Artificial Sequence
  Description of Artificial Sequence: Synthetic primer
aagcctctttctaaaaaagcttttttttttttctcttctc

SEQ ID NO: 4481 - DNA, 40 bp, Artificial Sequence
  Description of Artificial Sequence: Synthetic primer
aaaaactctaaacacattcattcttatttggttttctctc

SEQ ID NO: 4482 - DNA, 40 bp, Artificial Sequence
  Description of Artificial Sequence: Synthetic primer
tctgttatgcctggcaaagccctcaacatgccagaaagag

SEQ ID NO: 4483 - DNA, 40 bp, Artificial Sequence
  Description of Artificial Sequence: Synthetic primer
ctttgatcttgtttaaacatttcatgttttttttaaatcc

SEQ ID NO: 4484 - DNA, 40 bp, Artificial Sequence
  Description of Artificial Sequence: Synthetic primer
tttaacaactaaattttaaaatcatagtcatataaaactg

SEQ ID NO: 4485 - DNA, 40 bp, Artificial Sequence
  Description of Artificial Sequence: Synthetic primer
ttttgttatagtggaatttaaggtaaaaacaaattaaaat

SEQ ID NO: 4486 - DNA, 40 bp, Artificial Sequence
  Description of Artificial Sequence: Synthetic primer
ctgccgtgcctaggactgaagcacagttatagaattaacc

SEQ ID NO: 4487 - DNA, 40 bp, Artificial Sequence
  Description of Artificial Sequence: Synthetic primer
gggcacatcaggtattccaattaaagatctcctgcctgac

SEQ ID NO: 4488 - DNA, 40 bp, Artificial Sequence
  Description of Artificial Sequence: Synthetic primer
gtatacgatactgataagtcacagcaatcctaagttatag

SEQ ID NO: 4489 - DNA, 40 bp, Artificial Sequence
  Description of Artificial Sequence: Synthetic primer
aggcgttgtcatgtagaatttgatactatccccctttctg

SEQ ID NO: 4490 - DNA, 40 bp, Artificial Sequence
  Description of Artificial Sequence: Synthetic primer
aaaccaaagacagagcagatacattcttcccccagagaaa

SEQ ID NO: 4491 - DNA, 40 bp, Artificial Sequence
  Description of Artificial Sequence: Synthetic primer
taggataatagtctgtatttcagttttcaatttaactgtg

SEQ ID NO: 4492 - DNA, 40 bp, Artificial Sequence
  Description of Artificial Sequence: Synthetic primer
tgggcccggggtggcaggcacgaggacctgtgggactctg

SEQ ID NO: 4493 - DNA, 40 bp, Artificial Sequence
  Description of Artificial Sequence: Synthetic primer
tgggcagtgccttgccctttttgtggggtaggacagtgac

SEQ ID NO: 4494 - DNA, 40 bp, Artificial Sequence
  Description of Artificial Sequence: Synthetic primer
ccggccggggctagggccggatggagccgcgggacggtag

SEQ ID NO: 4495 - DNA, 40 bp, Artificial Sequence
  Description of Artificial Sequence: Synthetic primer
gccggtgcctcggtgcctgccccgccgccgccccgctcac

SEQ ID NO: 4496 - DNA, 40 bp, Artificial Sequence
  Description of Artificial Sequence: Synthetic primer
cttaagtttcaaagaaacagtaaaaggggaagggatgatg

SEQ ID NO: 4497 - DNA, 40 bp, Artificial Sequence
  Description of Artificial Sequence: Synthetic primer
ttgtctgaatttaccacctttgtcagaagtcaactcaaag

SEQ ID NO: 4498 - DNA, 40 bp, Artificial Sequence
  Description of Artificial Sequence: Synthetic primer
tccggtgggcgtggcggccgccctgggagtccccctcacc

SEQ ID NO: 4499 - DNA, 40 bp, Artificial Sequence
  Description of Artificial Sequence: Synthetic primer
ggccacaggccggtccctcctgatcccatccctcctttcc

SEQ ID NO: 4500 - DNA, 40 bp, Artificial Sequence
  Description of Artificial Sequence: Synthetic primer
gtggctgccactctcacacggccacctgccttctctcctg

SEQ ID NO: 4501 - DNA, 40 bp, Artificial Sequence
  Description of Artificial Sequence: Synthetic primer
tatcctcaatttgctgcgagcctgacctccaccaagaagg

SEQ ID NO: 4502 - DNA, 40 bp, Artificial Sequence
  Description of Artificial Sequence: Synthetic primer
tgcgagctaacagtggtggggcctcatgctgcttgtctac

SEQ ID NO: 4503 - DNA, 40 bp, Artificial Sequence
  Description of Artificial Sequence: Synthetic primer
tgattaatcttcaaccacaacttagtatcaaaggaacaag

SEQ ID NO: 4504 - DNA, 40 bp, Artificial Sequence
  Description of Artificial Sequence: Synthetic primer
ccccattctgctcagctccccatccgcgggcttctctgtc

SEQ ID NO: 4505 - DNA, 40 bp, Artificial Sequence
  Description of Artificial Sequence: Synthetic primer
ggtcccggccagccacgcccacaccgatcgcactccatcc

SEQ ID NO: 4506 - DNA, 40 bp, Artificial Sequence
  Description of Artificial Sequence: Synthetic primer
ggtaaggccggccgcgccatggtggacccggtgggcttcg

SEQ ID NO: 4507 - DNA, 40 bp, Artificial Sequence
  Description of Artificial Sequence: Synthetic primer
cccgtgcaggtgtgcccacgcacgtggcgtgaggaactca

SEQ ID NO: 4508 - DNA, 40 bp, Artificial Sequence
  Description of Artificial Sequence: Synthetic primer
aaggccaggcccgggaccgcccgcaggcccggggcagccg

SEQ ID NO: 4509 - DNA, 40 bp, Artificial Sequence
  Description of Artificial Sequence: Synthetic primer
cccttggccgcccctggagtaccagccctaccagagcatc

SEQ ID NO: 4510 - DNA, 40 bp, Artificial Sequence
  Description of Artificial Sequence: Synthetic primer
ccgctcgaagttggacctgagcgccgccacgctggcgggg

SEQ ID NO: 4511 - DNA, 40 bp, Artificial Sequence
  Description of Artificial Sequence: Synthetic primer
tgcgcaggagcgggcccttgccctccccttccatcatgcc

SEQ ID NO: 4512 - DNA, 40 bp, Artificial Sequence
  Description of Artificial Sequence: Synthetic primer
ccgccggcggctgcaggttcggcgaccggagtgccagaag

SEQ ID NO: 4513 - DNA, 40 bp, Artificial Sequence
  Description of Artificial Sequence: Synthetic primer
gatatgccatttggacatgtaattgtcagcacgggatctg

SEQ ID NO: 4514 - DNA, 40 bp, Artificial Sequence
  Description of Artificial Sequence: Synthetic primer
ggagagcactctctggtgagaaatcaatgtaaacaccatc

SEQ ID NO: 4515 - DNA, 40 bp, Artificial Sequence
  Description of Artificial Sequence: Synthetic primer
ctcttcatgcagttggacccaacgcttcatgctccactac

SEQ ID NO: 4516 - DNA, 40 bp, Artificial Sequence
  Description of Artificial Sequence: Synthetic primer
gctgccttgcttcccacccatgcgagccgttgcttctgag

SEQ ID NO: 4517 - DNA, 40 bp, Artificial Sequence
  Description of Artificial Sequence: Synthetic primer
cccgccctgcccgtgggcccgcactgcccaagggactcac

SEQ ID NO: 4518 - DNA, 40 bp, Artificial Sequence
  Description of Artificial Sequence: Synthetic primer
aaagcctcagaaaaaacgtgatgggcacatctgggcctcc

SEQ ID NO: 4519 - DNA, 40 bp, Artificial Sequence
  Description of Artificial Sequence: Synthetic primer
tcaaattattaaaatattccttttctttctgccttcttag

SEQ ID NO: 4520 - DNA, 40 bp, Artificial Sequence
  Description of Artificial Sequence: Synthetic primer
tgctgagaactgccctgctgaccctctccccagtcagctt

SEQ ID NO: 4521 - DNA, 40 bp, Artificial Sequence
  Description of Artificial Sequence: Synthetic primer
ttttttcctctgccaaggtagcatctctaccccaaaactg

SEQ ID NO: 4522 - DNA, 40 bp, Artificial Sequence
  Description of Artificial Sequence: Synthetic primer
ttggagaaagtaagtttcacatgttcaaaaaccaagtaag

SEQ ID NO: 4523 - DNA, 40 bp, Artificial Sequence
  Description of Artificial Sequence: Synthetic primer
ttgacatttaatcaatatgtgaaagtgtgttactgtctac

SEQ ID NO: 4524 - DNA, 40 bp, Artificial Sequence
  Description of Artificial Sequence: Synthetic primer
gttttctaaaatattctctgtaatttattttgaaatggag

SEQ ID NO: 4525 - DNA, 40 bp, Artificial Sequence
  Description of Artificial Sequence: Synthetic primer
tactaggatatgcaaattgaacaaactgacactttatgaa

SEQ ID NO: 4526 - DNA, 40 bp, Artificial Sequence
  Description of Artificial Sequence: Synthetic primer
tcccgggctaggggtggcctggcctcaggcagggcggtgc

SEQ ID NO: 4527 - DNA, 40 bp, Artificial Sequence
  Description of Artificial Sequence: Synthetic primer
gccttccctctgccccagaccaccgggcccctgcactcac

SEQ ID NO: 4528 - DNA, 40 bp, Artificial Sequence
  Description of Artificial Sequence: Synthetic primer
cactctggtcagcctgatggagcaaagcaacattgtggac

SEQ ID NO: 4529 - DNA, 40 bp, Artificial Sequence
  Description of Artificial Sequence: Synthetic primer
tcgcggtgctgtccccaacttgccttcagagcattccttc

SEQ ID NO: 4530 - DNA, 40 bp, Artificial Sequence
  Description of Artificial Sequence: Synthetic primer
aaggctacagagcataggttcctctaaaatattcttcttc

SEQ ID NO: 4531 - DNA, 40 bp, Artificial Sequence
  Description of Artificial Sequence: Synthetic primer
gatgtttgtttctctctttcagttacttgggtgagttggc

SEQ ID NO: 4532 - DNA, 40 bp, Artificial Sequence
  Description of Artificial Sequence: Synthetic primer
tccctccaaaagaccaaagcccaaggaggcatatgaagac

SEQ ID NO: 4533 - DNA, 40 bp, Artificial Sequence
  Description of Artificial Sequence: Synthetic primer
tacatccacatgctttcctacagagggatcaccatgaccc

SEQ ID NO: 4534 - DNA, 40 bp, Artificial Sequence
  Description of Artificial Sequence: Synthetic primer
ggccatgggtggtgctggccgggcctgactctgcctgttc

SEQ ID NO: 4535 - DNA, 40 bp, Artificial Sequence
  Description of Artificial Sequence: Synthetic primer
cagggcagctcagacccaagcaaggccccacaacccagtg

SEQ ID NO: 4536 - DNA, 40 bp, Artificial Sequence
  Description of Artificial Sequence: Synthetic primer
aagtttgattagttataaagtatgtttctctttcattaac

SEQ ID NO: 4537 - DNA, 40 bp, Artificial Sequence
  Description of Artificial Sequence: Synthetic primer
tgtggtgttttgtttgttaactctgttttctttgttttag

SEQ ID NO: 4538 - DNA, 40 bp, Artificial Sequence
  Description of Artificial Sequence: Synthetic primer
ttatttcattaataaaaattctaacatgggcattataaac

SEQ ID NO: 4539 - DNA, 40 bp, Artificial Sequence
  Description of Artificial Sequence: Synthetic primer
tatacatatattaactcaattttgtaattatcttatgaag

SEQ ID NO: 4540 - DNA, 40 bp, Artificial Sequence
  Description of Artificial Sequence: Synthetic primer
attttattgtccttgacactgacagccaggtatgtttttg

SEQ ID NO: 4541 - DNA, 40 bp, Artificial Sequence
  Description of Artificial Sequence: Synthetic primer
tcagaggctaaggcgcacttttggttggaggctcacttac

SEQ ID NO: 4542 - DNA, 40 bp, Artificial Sequence
  Description of Artificial Sequence: Synthetic primer
gatcagcagccctgagccccaaaccaagagccaccctctc

SEQ ID NO: 4543 - DNA, 40 bp, Artificial Sequence
  Description of Artificial Sequence: Synthetic primer
tccctccccaagcccatgcaagaggcaggggtgggacacg

SEQ ID NO: 4544 - DNA, 40 bp, Artificial Sequence
  Description of Artificial Sequence: Synthetic primer
tttgctaaatccaacccattttctgatttctttttcttgc

SEQ ID NO: 4545 - DNA, 40 bp, Artificial Sequence
  Description of Artificial Sequence: Synthetic primer
gctaatgtttcaaatagcagagagggaaacaagtaaaaag

SEQ ID NO: 4546 - DNA, 40 bp, Artificial Sequence
  Description of Artificial Sequence: Synthetic primer
cctgtgacatcctctgcaaccaccacctcagtagcaccac

SEQ ID NO: 4547 - DNA, 40 bp, Artificial Sequence
  Description of Artificial Sequence: Synthetic primer
cagcccagcttccccaggctcctccgcaaacttctgactc

SEQ ID NO: 4548 - DNA, 40 bp, Artificial Sequence
  Description of Artificial Sequence: Synthetic primer
cgcccgtgtttgggcaagtggcagccagcaccgcaccaag

SEQ ID NO: 4549 - DNA, 40 bp, Artificial Sequence
  Description of Artificial Sequence: Synthetic primer
ccaaaaacggcagttgaggaagtgctggtggctgctggtg

SEQ ID NO: 4550 - DNA, 40 bp, Artificial Sequence
  Description of Artificial Sequence: Synthetic primer
gactagtactagatgctgcagtgccagagttgctgactgc

SEQ ID NO: 4551 - DNA, 40 bp, Artificial Sequence
  Description of Artificial Sequence: Synthetic primer
agctgggctgctaaaccctgagctgctgacctgtggtgtg

SEQ ID NO: 4552 - DNA, 40 bp, Artificial Sequence
  Description of Artificial Sequence: Synthetic primer
cagctgggtgtcactaactcctttcctctcccttattttc

SEQ ID NO: 4553 - DNA, 40 bp, Artificial Sequence
  Description of Artificial Sequence: Synthetic primer
agtttcagctacgatgctagagttggttcccaataaatgc

SEQ ID NO: 4554 - DNA, 40 bp, Artificial Sequence
  Description of Artificial Sequence: Synthetic primer
agtgatgcctaatattcagtatcaagtaatcccacagttc

SEQ ID NO: 4555 - DNA, 40 bp, Artificial Sequence
  Description of Artificial Sequence: Synthetic primer
cccaggagagtggctcacagcctgtcacctcagggactac

SEQ ID NO: 4556 - DNA, 40 bp, Artificial Sequence
  Description of Artificial Sequence: Synthetic primer
aggccctccaagcagcaccattgtcagggcagacctttac

SEQ ID NO: 4557 - DNA, 40 bp, Artificial Sequence
  Description of Artificial Sequence: Synthetic primer
catcctgctgcacttgggccccagtggcagcaaactgcag

SEQ ID NO: 4558 - DNA, 40 bp, Artificial Sequence
  Description of Artificial Sequence: Synthetic primer
agtagctattggcattggtgaaaaaggagctggaactggc

SEQ ID NO: 4559 - DNA, 40 bp, Artificial Sequence
  Description of Artificial Sequence: Synthetic primer
tccggatgatgatgggaccagagtttggaacagcctgaag

SEQ ID NO: 4560 - DNA, 40 bp, Artificial Sequence
  Description of Artificial Sequence: Synthetic primer
gggtctggggcccaggtatctggctatcccctagccttcc

SEQ ID NO: 4561 - DNA, 40 bp, Artificial Sequence
  Description of Artificial Sequence: Synthetic primer
gggctgagacgcagtagcggccctgcacttctggaggatg

SEQ ID NO: 4562 - DNA, 40 bp, Artificial Sequence
  Description of Artificial Sequence: Synthetic primer
cgtgcactgagaaagccagcagaaggcactatcttaagtg

SEQ ID NO: 4563 - DNA, 40 bp, Artificial Sequence
  Description of Artificial Sequence: Synthetic primer
tggtgactactctcgtaatgttggtgcttataatgttctc

SEQ ID NO: 4564 - DNA, 40 bp, Artificial Sequence
  Description of Artificial Sequence: Synthetic primer
aatttctaactctactgcagaaccctcctgtggctgattc

SEQ ID NO: 4565 - DNA, 40 bp, Artificial Sequence
  Description of Artificial Sequence: Synthetic primer
ctcagtgctttctgtgggttcatttctgtcttctctcctg

SEQ ID NO: 4566 - DNA, 40 bp, Artificial Sequence
  Description of Artificial Sequence: Synthetic primer
caacgacgacaaagaaggactatccaatgagtctcaaaag

SEQ ID NO: 4567 - DNA, 40 bp, Artificial Sequence
  Description of Artificial Sequence: Synthetic primer
tttgctttcatgaatgccagaaagtttattttctcttcca

SEQ ID NO: 4568 - DNA, 40 bp, Artificial Sequence
  Description of Artificial Sequence: Synthetic primer
tttgattcaaatatgccccacggtaacagatgcccatgtc

SEQ ID NO: 4569 - DNA, 40 bp, Artificial Sequence
  Description of Artificial Sequence: Synthetic primer
aggctgccctggcgaagtcccctgaggctgaggattctgg

SEQ ID NO: 4570 - DNA, 40 bp, Artificial Sequence
  Description of Artificial Sequence: Synthetic primer
gcctgcaagccagatatccacccgttcctggcccctcctc

SEQ ID NO: 4571 - DNA, 40 bp, Artificial Sequence
  Description of Artificial Sequence: Synthetic primer
ggctggtggtgacttccccagacctaagccaatctctctc

SEQ ID NO: 4572 - DNA, 40 bp, Artificial Sequence
  Description of Artificial Sequence: Synthetic primer
ttgtttaaacaattggaacttacttagctactgcttgttg

SEQ ID NO: 4573 - DNA, 40 bp, Artificial Sequence
  Description of Artificial Sequence: Synthetic primer
aagacactcatctacagagctagcattatctttatactcc

SEQ ID NO: 4574 - DNA, 40 bp, Artificial Sequence
  Description of Artificial Sequence: Synthetic primer
gttttagtcctaaaatcttaattttccttgcttttctttc

SEQ ID NO: 4575 - DNA, 40 bp, Artificial Sequence
  Description of Artificial Sequence: Synthetic primer
tctttacatcaaatgaaaagtggcataataggaaaagttt

SEQ ID NO: 4576 - DNA, 40 bp, Artificial Sequence
  Description of Artificial Sequence: Synthetic primer
taggagagaagaaataaaataaatatatactaaagtaacc

SEQ ID NO: 4577 - DNA, 40 bp, Artificial Sequence
  Description of Artificial Sequence: Synthetic primer
caactggataactacttgaacttatattcttttgtttttc

SEQ ID NO: 4578 - DNA, 40 bp, Artificial Sequence
  Description of Artificial Sequence: Synthetic primer
atcttggtgggagaagaagataaaaactaacatctttctg

SEQ ID NO: 4579 - DNA, 40 bp, Artificial Sequence
  Description of Artificial Sequence: Synthetic primer
ggcaaaggatgctgtcctggcgtctggaggagggacttac

SEQ ID NO: 4580 - DNA, 40 bp, Artificial Sequence
  Description of Artificial Sequence: Synthetic primer
taaaatggatccatctaatctagtttttccattatttttc

SEQ ID NO: 4581 - DNA, 40 bp, Artificial Sequence
  Description of Artificial Sequence: Synthetic primer
taaaaaagtacaatgaacatactaaaatgaagataaaata

SEQ ID NO: 4582 - DNA, 40 bp, Artificial Sequence
  Description of Artificial Sequence: Synthetic primer
caagaaattagaatttagttcttcaccagattctttaagt

SEQ ID NO: 4583 - DNA, 40 bp, Artificial Sequence
  Description of Artificial Sequence: Synthetic primer
attttgaagtctcagaagtatcaaagtcatccatatcatc

SEQ ID NO: 4584 - DNA, 40 bp, Artificial Sequence
  Description of Artificial Sequence: Synthetic primer
cacagacggctgccccgcctgagcgaggcgggcgccgccg

SEQ ID NO: 4585 - DNA, 40 bp, Artificial Sequence
  Description of Artificial Sequence: Synthetic primer
ggcactgcaatgcctgcctgtccccgcgcccccccaccgc

SEQ ID NO: 4586 - DNA, 40 bp, Artificial Sequence
  Description of Artificial Sequence: Synthetic primer
cagaggtgctgcccttggccatccctgtactcttgtgttc

SEQ ID NO: 4587 - DNA, 40 bp, Artificial Sequence
  Description of Artificial Sequence: Synthetic primer
aaaggggctggtgctccaatgccagggagatggccacagg

SEQ ID NO: 4588 - DNA, 40 bp, Artificial Sequence
  Description of Artificial Sequence: Synthetic primer
acacttctgacacacagagagagactcagaatatacttta

SEQ ID NO: 4589 - DNA, 40 bp, Artificial Sequence
  Description of Artificial Sequence: Synthetic primer
atatatgaattgtgtatttatctatacatttatttttaca

SEQ ID NO: 4590 - DNA, 40 bp, Artificial Sequence
  Description of Artificial Sequence: Synthetic primer
ctacacgtattcgggtgtgtactcattctttgctaatttc

SEQ ID NO: 4591 - DNA, 40 bp, Artificial Sequence
  Description of Artificial Sequence: Synthetic primer
aggagttgaaataacaagatatcatccccagatccactcc

SEQ ID NO: 4592 - DNA, 40 bp, Artificial Sequence
  Description of Artificial Sequence: Synthetic primer
ctaaccttgggaatggttaatttcctgaaatactgtttgc

SEQ ID NO: 4593 - DNA, 40 bp, Artificial Sequence
  Description of Artificial Sequence: Synthetic primer
ggttgtctagccttggctcactaacccgcagttgagcatc

SEQ ID NO: 4594 - DNA, 40 bp, Artificial Sequence
  Description of Artificial Sequence: Synthetic primer
acagagaaatgatttgctgtttcttgttgttcttgttgta

SEQ ID NO: 4595 - DNA, 40 bp, Artificial Sequence
  Description of Artificial Sequence: Synthetic primer
tggcttcactcgtagggtatcaatttgccaagacaagtac

SEQ ID NO: 4596 - DNA, 40 bp, Artificial Sequence
  Description of Artificial Sequence: Synthetic primer
ggcagtcaggccccagaggaagcctggcccaccccaccat

SEQ ID NO: 4597 - DNA, 40 bp, Artificial Sequence
  Description of Artificial Sequence: Synthetic primer
gccttgggcctgggtgtccacatcaggcattgcccttctc

SEQ ID NO: 4598 - DNA, 40 bp, Artificial Sequence
  Description of Artificial Sequence: Synthetic primer
tgccagcagtatgttttccttgaaaataatttaacagctt

SEQ ID NO: 4599 - DNA, 40 bp, Artificial Sequence
  Description of Artificial Sequence: Synthetic primer
tatgtgaatacatgtagctgcacagaaaaggaataaacac

SEQ ID NO: 4600 - DNA, 40 bp, Artificial Sequence
  Description of Artificial Sequence: Synthetic primer
catatattttaaaaagccaggtatacttccacatacaaag

SEQ ID NO: 4601 - DNA, 40 bp, Artificial Sequence
  Description of Artificial Sequence: Synthetic primer
tttctttgcaaagtcagatcctttatttgcttcctttttt

SEQ ID NO: 4602 - DNA, 40 bp, Artificial Sequence
  Description of Artificial Sequence: Synthetic primer
agtcactgattctgaagatcaagcatgtcccccgtcattc

SEQ ID NO: 4603 - DNA, 40 bp, Artificial Sequence
  Description of Artificial Sequence: Synthetic primer
gtgcactccgtgaaggcaaagagaacacgctgcaaaaggc

SEQ ID NO: 4604 - DNA, 40 bp, Artificial Sequence
  Description of Artificial Sequence: Synthetic primer
aacagaaattagtgcaatttaagtttccatagaaaataag

SEQ ID NO: 4605 - DNA, 40 bp, Artificial Sequence
  Description of Artificial Sequence: Synthetic primer
tacttcaactccttgttacttgtgaatatcatgccaacgg

SEQ ID NO: 4606 - DNA, 40 bp, Artificial Sequence
  Description of Artificial Sequence: Synthetic primer
gtgcactgggactttggtaattcaccagttacctgtcctg

SEQ ID NO: 4607 - DNA, 40 bp, Artificial Sequence
  Description of Artificial Sequence: Synthetic primer
aaagttgtgtgcaagggaaaagggagtcttgggaggttac

SEQ ID NO: 4608 - DNA, 40 bp, Artificial Sequence
  Description of Artificial Sequence: Synthetic primer
gtttgtccttgtagttaatgcaattgaagttgaattaatc

SEQ ID NO: 4609 - DNA, 40 bp, Artificial Sequence
  Description of Artificial Sequence: Synthetic primer
aataaagtctgccagaacctactaataactaaaaatgtgc

SEQ ID NO: 4610 - DNA, 40 bp, Artificial Sequence
  Description of Artificial Sequence: Synthetic primer
ctgccatggtagaggcagagaattattttagctgatggtg

SEQ ID NO: 4611 - DNA, 40 bp, Artificial Sequence
  Description of Artificial Sequence: Synthetic primer
attgggacaggcagagaccctgacattcatcaatacttac

SEQ ID NO: 4612 - DNA, 40 bp, Artificial Sequence
  Description of Artificial Sequence: Synthetic primer
ggtctggggcacgtgggcagagatctgctcctctgtgctc

SEQ ID NO: 4613 - DNA, 40 bp, Artificial Sequence
  Description of Artificial Sequence: Synthetic primer
ggggttaagccatgtcctccttccccacactgatggtggg

SEQ ID NO: 4614 - DNA, 40 bp, Artificial Sequence
  Description of Artificial Sequence: Synthetic primer
cgaccttccccagcctctcctccccaggcgtcgcctcctc

SEQ ID NO: 4615 - DNA, 40 bp, Artificial Sequence
  Description of Artificial Sequence: Synthetic primer
tggaggacccggaggagaggcagccccacagaccctaatg

SEQ ID NO: 4616 - DNA, 40 bp, Artificial Sequence
  Description of Artificial Sequence: Synthetic primer
ctaatttacatttatcaaagcaaaactactttttacttag

SEQ ID NO: 4617 - DNA, 40 bp, Artificial Sequence
  Description of Artificial Sequence: Synthetic primer
cggttgtaattccacagttctgacatttatttctcttcac

SEQ ID NO: 4618 - DNA, 40 bp, Artificial Sequence
  Description of Artificial Sequence: Synthetic primer
tggtccccaaaggtaccagggctgagatgaagccatggag

SEQ ID NO: 4619 - DNA, 40 bp, Artificial Sequence
  Description of Artificial Sequence: Synthetic primer
gcaggctgggtctctttctaaagcatctgttttctctccc

SEQ ID NO: 4620 - DNA, 40 bp, Artificial Sequence
  Description of Artificial Sequence: Synthetic primer
aactctaataataggctcctaacagtaaccttctttctcc

SEQ ID NO: 4621 - DNA, 40 bp, Artificial Sequence
  Description of Artificial Sequence: Synthetic primer
tcacatatttaacttggctgttacctgacccactaagagc

SEQ ID NO: 4622 - DNA, 40 bp, Artificial Sequence
  Description of Artificial Sequence: Synthetic primer
ttggttctatcaagttccatgttactgtattgacttttac

SEQ ID NO: 4623 - DNA, 40 bp, Artificial Sequence
  Description of Artificial Sequence: Synthetic primer
gtccagcaggcagctcagcacgagggccaggtgaaagcac

SEQ ID NO: 4624 - DNA, 40 bp, Artificial Sequence
  Description of Artificial Sequence: Synthetic primer
gccgcccctcagctgcccggcccggagcccgagacgcgcg

SEQ ID NO: 4625 - DNA, 40 bp, Artificial Sequence
  Description of Artificial Sequence: Synthetic primer
acgccgaggcccgcggagtggtgcccgcagctctacttac

SEQ ID NO: 4626 - DNA, 40 bp, Artificial Sequence
  Description of Artificial Sequence: Synthetic primer
tgtcctcttggacttctggatgcttgagtttcaatttctc

SEQ ID NO: 4627 - DNA, 40 bp, Artificial Sequence
  Description of Artificial Sequence: Synthetic primer
tcccgtcacaagctcctgcctctcttttctccccatacag

SEQ ID NO: 4628 - DNA, 40 bp, Artificial Sequence
  Description of Artificial Sequence: Synthetic primer
ggttctcctggtagtgtatgcctaactgtgttagtgaagc

SEQ ID NO: 4629 - DNA, 40 bp, Artificial Sequence
  Description of Artificial Sequence: Synthetic primer
atatggggaaccagagcagatgaggttagggagcggtagc

SEQ ID NO: 4630 - DNA, 40 bp, Artificial Sequence
  Description of Artificial Sequence: Synthetic primer
cgggcggtggagcctcagggtgcagggagggacggctgag

SEQ ID NO: 4631 - DNA, 40 bp, Artificial Sequence
  Description of Artificial Sequence: Synthetic primer
gaggcagctgggcctcaaggagctggggtgggcacaaggc

SEQ ID NO: 4632 - DNA, 40 bp, Artificial Sequence
  Description of Artificial Sequence: Synthetic primer
tcgataaccaaacatagcttatgaaataagtttagcagag

SEQ ID NO: 4633 - DNA, 40 bp, Artificial Sequence
  Description of Artificial Sequence: Synthetic primer
gatatagtgatttgttagcaattacaccctttggtttttg

SEQ ID NO: 4634 - DNA, 40 bp, Artificial Sequence
  Description of Artificial Sequence: Synthetic primer
ggatgacagtccccagttattttgggccccgactcttcac

SEQ ID NO: 4635 - DNA, 40 bp, Artificial Sequence
  Description of Artificial Sequence: Synthetic primer
ggtaggagaaggcccaagactaaccctgcagtgctttccc

SEQ ID NO: 4636 - DNA, 40 bp, Artificial Sequence
  Description of Artificial Sequence: Synthetic primer
gcatatatgaatgtcaagtctttggaatccacttggtaac

SEQ ID NO: 4637 - DNA, 40 bp, Artificial Sequence
  Description of Artificial Sequence: Synthetic primer
aacaaaaacataggaagagttttaaggaaaacccacattc

SEQ ID NO: 4638 - DNA, 40 bp, Artificial Sequence
  Description of Artificial Sequence: Synthetic primer
cttggcagccgtgtgggcgacgctggcaggctctgctgat

SEQ ID NO: 4639 - DNA, 40 bp, Artificial Sequence
  Description of Artificial Sequence: Synthetic primer
acttgatcgtcaaggccagagaaacctccaacccaaggtg

SEQ ID NO: 4640 - DNA, 40 bp, Artificial Sequence
  Description of Artificial Sequence: Synthetic primer
ctccagccttacccttgtgctgggagtcatggagccgttg

SEQ ID NO: 4641 - DNA, 40 bp, Artificial Sequence
  Description of Artificial Sequence: Synthetic primer
gtgcgtgggcctggggtgtctgaggactggccccctcttc

SEQ ID NO: 4642 - DNA, 40 bp, Artificial Sequence
  Description of Artificial Sequence: Synthetic primer
caaatcacctggtataaaatcaattttggacatggagaag

SEQ ID NO: 4643 - DNA, 40 bp, Artificial Sequence
  Description of Artificial Sequence: Synthetic primer
tcttacctgaacacatctgcagattcgttttccctgtctc

SEQ ID NO: 4644 - DNA, 40 bp, Artificial Sequence
  Description of Artificial Sequence: Synthetic primer
aaatataactcttaaaatattttgttatttatttcttatc

SEQ ID NO: 4645 - DNA, 40 bp, Artificial Sequence
  Description of Artificial Sequence: Synthetic primer
aaaaaatagcaatgaaaattgagtactatacctgaagacc

SEQ ID NO: 4646 - DNA, 40 bp, Artificial Sequence
  Description of Artificial Sequence: Synthetic primer
gaccacagaatcatgaggtgatgtgtttcagtgtttttac

SEQ ID NO: 4647 - DNA, 40 bp, Artificial Sequence
  Description of Artificial Sequence: Synthetic primer
aatacatatattgttggtagtatgtatttatcggtatttc

SEQ ID NO: 4648 - DNA, 40 bp, Artificial Sequence
  Description of Artificial Sequence: Synthetic primer
atttagaaaaacaaattttcagactattttctatttttca

SEQ ID NO: 4649 - DNA, 40 bp, Artificial Sequence
  Description of Artificial Sequence: Synthetic primer
cactaattgcatatactcagaactgaatttgttgtttttc

SEQ ID NO: 4650 - DNA, 40 bp, Artificial Sequence
  Description of Artificial Sequence: Synthetic primer
cgattccatttctcagagagcctggcaccttggttggttg

SEQ ID NO: 4651 - DNA, 40 bp, Artificial Sequence
  Description of Artificial Sequence: Synthetic primer
gagccctgctgttggtcacagctccagtgtctgtccttgc

SEQ ID NO: 4652 - DNA, 40 bp, Artificial Sequence
  Description of Artificial Sequence: Synthetic primer
ttggttgtcagtgcttcagtaaagcttatttatttatttt

SEQ ID NO: 4653 - DNA, 40 bp, Artificial Sequence
  Description of Artificial Sequence: Synthetic primer
aaacaaacagagcacataaaatgatacagaaaaagtacag

SEQ ID NO: 4654 - DNA, 40 bp, Artificial Sequence
  Description of Artificial Sequence: Synthetic primer
ggctcttttctgggtttcccattcccaccactctgtcctc

SEQ ID NO: 4655 - DNA, 40 bp, Artificial Sequence
  Description of Artificial Sequence: Synthetic primer
ctctgacccagcacaaatgatccaaccatccccccgactc

SEQ ID NO: 4656 - DNA, 40 bp, Artificial Sequence
  Description of Artificial Sequence: Synthetic primer
ggctgagcccttacctccccacctgacgagcattttaccc

SEQ ID NO: 4657 - DNA, 40 bp, Artificial Sequence
  Description of Artificial Sequence: Synthetic primer
agttctatgcatttgcaggggcacgtgccccaccctggcc

SEQ ID NO: 4658 - DNA, 40 bp, Artificial Sequence
  Description of Artificial Sequence: Synthetic primer
aggtggataccattgcagccgacgagagcttctcccaggt

SEQ ID NO: 4659 - DNA, 40 bp, Artificial Sequence
  Description of Artificial Sequence: Synthetic primer
gccaggtagaagccgctgcgggacacaggtccgaagctcc

SEQ ID NO: 4660 - DNA, 40 bp, Artificial Sequence
  Description of Artificial Sequence: Synthetic primer
ctcaaaaccacaaagaaaaaatgagagaaccccccgctgc

SEQ ID NO: 4661 - DNA, 40 bp, Artificial Sequence
  Description of Artificial Sequence: Synthetic primer
gagctctggccgctgccttccagggctcccgagccacacg

SEQ ID NO: 4662 - DNA, 40 bp, Artificial Sequence
  Description of Artificial Sequence: Synthetic primer
ggtcataagatacatgatctataaaatcttaacaataagc

SEQ ID NO: 4663 - DNA, 40 bp, Artificial Sequence
  Description of Artificial Sequence: Synthetic primer
tgctactcacataaaatccctggaacaaaagaacatctac

SEQ ID NO: 4664 - DNA, 40 bp, Artificial Sequence
  Description of Artificial Sequence: Synthetic primer
agatttgtatacatttgctgaagaaaaagaatttaacaac

SEQ ID NO: 4665 - DNA, 40 bp, Artificial Sequence
  Description of Artificial Sequence: Synthetic primer
aattttacaaattatactagatgtgtatttgttggcacag

SEQ ID NO: 4666 - DNA, 40 bp, Artificial Sequence
  Description of Artificial Sequence: Synthetic primer
ataaaaatacagagcacttcggcttatgttcatgcctttg

SEQ ID NO: 4667 - DNA, 40 bp, Artificial Sequence
  Description of Artificial Sequence: Synthetic primer
gctaataggaccttgttaatgcatgcctcttccttttcag

SEQ ID NO: 4668 - DNA, 40 bp, Artificial Sequence
  Description of Artificial Sequence: Synthetic primer
cttggagagcacatcctcaccgctgtcccctctgctggtg

SEQ ID NO: 4669 - DNA, 40 bp, Artificial Sequence
  Description of Artificial Sequence: Synthetic primer
agcctgacgtcacccatcccagcgtcgccctgggccttac

SEQ ID NO: 4670 - DNA, 40 bp, Artificial Sequence
  Description of Artificial Sequence: Synthetic primer
agagctcttctatatgtttttatgattttatgatctagcc

SEQ ID NO: 4671 - DNA, 40 bp, Artificial Sequence
  Description of Artificial Sequence: Synthetic primer
tatcttattatgtaaaaccacctgtcacattaaatcaaac

SEQ ID NO: 4672 - DNA, 40 bp, Artificial Sequence
  Description of Artificial Sequence: Synthetic primer
ctaactatgaaacactggcatttaatgatttaaagtaaag

SEQ ID NO: 4673 - DNA, 40 bp, Artificial Sequence
  Description of Artificial Sequence: Synthetic primer
ccatctcggctactggaaaacattcaaaactggttcctac

SEQ ID NO: 4674 - DNA, 40 bp, Artificial Sequence
  Description of Artificial Sequence: Synthetic primer
gaacagatgtccaataatgggcggagcggggctgttccag

SEQ ID NO: 4675 - DNA, 40 bp, Artificial Sequence
  Description of Artificial Sequence: Synthetic primer
gtcttttccccaaagcgggacaggcgccctgagtcactga

SEQ ID NO: 4676 - DNA, 40 bp, Artificial Sequence
  Description of Artificial Sequence: Synthetic primer
ggcttgtttctgtacctgctttaattacggtttcttctcc

SEQ ID NO: 4677 - DNA, 40 bp, Artificial Sequence
  Description of Artificial Sequence: Synthetic primer
tgtgataccctctccctgtgctgcattttggcttttcagg

SEQ ID NO: 4678 - DNA, 40 bp, Artificial Sequence
  Description of Artificial Sequence: Synthetic primer
ggtttaatcgagacacggttccctaattatctcttctttg

SEQ ID NO: 4679 - DNA, 40 bp, Artificial Sequence
  Description of Artificial Sequence: Synthetic primer
ctggctgagcttttgggacagagccagtcccgcggggcag

SEQ ID NO: 4680 - DNA, 40 bp, Artificial Sequence
  Description of Artificial Sequence: Synthetic primer
agaaagtgaaactaacttttatgttctgaatatcttttct

SEQ ID NO: 4681 - DNA, 40 bp, Artificial Sequence
  Description of Artificial Sequence: Synthetic primer
taagatcattctcaagatcaaattcacaaagcctgcctac

SEQ ID NO: 4682 - DNA, 40 bp, Artificial Sequence
  Description of Artificial Sequence: Synthetic primer
gagctgagcctagctccctcttctcctctccaccccacca

SEQ ID NO: 4683 - DNA, 40 bp, Artificial Sequence
  Description of Artificial Sequence: Synthetic primer
ggacaggggttcctgtgtataaggtgaagcaggtctgtgg

SEQ ID NO: 4684 - DNA, 40 bp, Artificial Sequence
  Description of Artificial Sequence: Synthetic primer
aaaattatcctacatgtacacttaaaataacaaaaacaac

SEQ ID NO: 4685 - DNA, 40 bp, Artificial Sequence
  Description of Artificial Sequence: Synthetic primer
caacatttttgagataattcagtcatttttatggtcactg

SEQ ID NO: 4686 - DNA, 40 bp, Artificial Sequence
  Description of Artificial Sequence: Synthetic primer
tctcaatcaaaccaactcagtttttttcatgttttccatc

SEQ ID NO: 4687 - DNA, 40 bp, Artificial Sequence
  Description of Artificial Sequence: Synthetic primer
ccacccgttaactcatgggtatgctgtgattcaggcaagc

SEQ ID NO: 4688 - DNA, 40 bp, Artificial Sequence
  Description of Artificial Sequence: Synthetic primer
cctgggcaggccccatagggcacagctgccacccctggac

SEQ ID NO: 4689 - DNA, 40 bp, Artificial Sequence
  Description of Artificial Sequence: Synthetic primer
acgtgtccgcctgggtccagcacagcactgactcctcctg

SEQ ID NO: 4690 - DNA, 40 bp, Artificial Sequence
  Description of Artificial Sequence: Synthetic primer
agtcctgtgtgtcacaaggatcccgcccagcccagccttg

SEQ ID NO: 4691 - DNA, 40 bp, Artificial Sequence
  Description of Artificial Sequence: Synthetic primer
ctaaaaactgtgcagttagacaagggtctctctctgatgg

SEQ ID NO: 4692 - DNA, 40 bp, Artificial Sequence
  Description of Artificial Sequence: Synthetic primer
gggacgtccatccctgtctgctcacacctttcttctctcc

SEQ ID NO: 4693 - DNA, 40 bp, Artificial Sequence
  Description of Artificial Sequence: Synthetic primer
ccactccgcccctgccccttcttactgtagatggtcactg

SEQ ID NO: 4694 - DNA, 40 bp, Artificial Sequence
  Description of Artificial Sequence: Synthetic primer
ctgggcagcccagcatgccagctgcccctgtggggactca

SEQ ID NO: 4695 - DNA, 40 bp, Artificial Sequence
  Description of Artificial Sequence: Synthetic primer
aagaatgatttctaacaatttcccattttttcccccttcc

SEQ ID NO: 4696 - DNA, 40 bp, Artificial Sequence
  Description of Artificial Sequence: Synthetic primer
agtttgaaaataagaatatggtttttatgacacagagttg

SEQ ID NO: 4697 - DNA, 40 bp, Artificial Sequence
  Description of Artificial Sequence: Synthetic primer
gcaatcatttactttttaaagttaagtttaaaatcatatg

SEQ ID NO: 4698 - DNA, 40 bp, Artificial Sequence
  Description of Artificial Sequence: Synthetic primer
tctcatggcccactgctgatggtgaaatctgttttatttc

SEQ ID NO: 4699 - DNA, 40 bp, Artificial Sequence
  Description of Artificial Sequence: Synthetic primer
tctcctacatgcaaacacacatgcgcacacacacaatacc

SEQ ID NO: 4700 - DNA, 40 bp, Artificial Sequence
  Description of Artificial Sequence: Synthetic primer
agaaacactgagtcctagagaagtcacagacatcagaaag

SEQ ID NO: 4701 - DNA, 40 bp, Artificial Sequence
  Description of Artificial Sequence: Synthetic primer
cttaacctaacgcatggcctcttctttttaactttgacag

SEQ ID NO: 4702 - DNA, 40 bp, Artificial Sequence
  Description of Artificial Sequence: Synthetic primer
tggcaggggatgagagctgcgcaaggtcttcccatcttgg

SEQ ID NO: 4703 - DNA, 40 bp, Artificial Sequence
  Description of Artificial Sequence: Synthetic primer
ctctgtccctttgcttctctccactgactttgcccttttg

SEQ ID NO: 4704 - DNA, 40 bp, Artificial Sequence
  Description of Artificial Sequence: Synthetic primer
tcctataagaacatttttttacctcataaaaataactagc

SEQ ID NO: 4705 - DNA, 40 bp, Artificial Sequence
  Description of Artificial Sequence: Synthetic primer
aattggcaaattgttgtttcctagcgttcatagattattc

SEQ ID NO: 4706 - DNA, 40 bp, Artificial Sequence
  Description of Artificial Sequence: Synthetic primer
tatattaattcaaaccttatactcaattctcaactccttg

SEQ ID NO: 4707 - DNA, 40 bp, Artificial Sequence
  Description of Artificial Sequence: Synthetic primer
aaaagctgaaaatttagttggaaggggaatttaagatagc

SEQ ID NO: 4708 - DNA, 40 bp, Artificial Sequence
  Description of Artificial Sequence: Synthetic primer
tatctagtaaaaaatacagttgtactatatacatcaaacc

SEQ ID NO: 4709 - DNA, 40 bp, Artificial Sequence
  Description of Artificial Sequence: Synthetic primer
tttatctaacaatgactcaaatcttgattgttttaatttc

SEQ ID NO: 4710 - DNA, 40 bp, Artificial Sequence
  Description of Artificial Sequence: Synthetic primer
tccttttttcctcatctcccttattttacttcaacaattc

SEQ ID NO: 4711 - DNA, 40 bp, Artificial Sequence
  Description of Artificial Sequence: Synthetic primer
ttagatagaaactattttattatcaatttctctcaaacag

SEQ ID NO: 4712 - DNA, 40 bp, Artificial Sequence
  Description of Artificial Sequence: Synthetic primer
ccagccagccctcgcctcctcagcgtctctctaactcttc

SEQ ID NO: 4713 - DNA, 40 bp, Artificial Sequence
  Description of Artificial Sequence: Synthetic primer
cactgaaatagctcatttttgccttttgttttaacttttc

SEQ ID NO: 4714 - DNA, 40 bp, Artificial Sequence
  Description of Artificial Sequence: Synthetic primer
ataaactaagtactgcaagtagtttgcaattgtgattttt

SEQ ID NO: 4715 - DNA, 40 bp, Artificial Sequence
  Description of Artificial Sequence: Synthetic primer
cccgcagccactgcagcccagctacccaaccactagcacc

SEQ ID NO: 4716 - DNA, 40 bp, Artificial Sequence
  Description of Artificial Sequence: Synthetic primer
cctggactcagacctctcccatcttctgccctgcttcctg

SEQ ID NO: 4717 - DNA, 40 bp, Artificial Sequence
  Description of Artificial Sequence: Synthetic primer
cctccctcagccaagcctgggttctgcacagggaggtgtc

SEQ ID NO: 4718 - DNA, 40 bp, Artificial Sequence
  Description of Artificial Sequence: Synthetic primer
gctaaaccctgaccctctgcggggctgcctgccgggcttc

SEQ ID NO: 4719 - DNA, 40 bp, Artificial Sequence
  Description of Artificial Sequence: Synthetic primer
gatctggggtaagcgaaggggctgggtgttggggcaaggg

SEQ ID NO: 4720 - DNA, 40 bp, Artificial Sequence
  Description of Artificial Sequence: Synthetic primer
cccctaggcctgtgaggctgccacaccctgtgcccccgtg

SEQ ID NO: 4721 - DNA, 40 bp, Artificial Sequence
  Description of Artificial Sequence: Synthetic primer
gtagagagaagaaatgaaggaaggggaggaggaggaggac

SEQ ID NO: 4722 - DNA, 40 bp, Artificial Sequence
  Description of Artificial Sequence: Synthetic primer
tttcagtgtctgtgaccagccattccaactactgattttg

SEQ ID NO: 4723 - DNA, 40 bp, Artificial Sequence
  Description of Artificial Sequence: Synthetic primer
ctttagataagtgagttctcaactcccagaggcagataag

SEQ ID NO: 4724 - DNA, 40 bp, Artificial Sequence
  Description of Artificial Sequence: Synthetic primer
gtacatgttcaatttaaaatgtgttcttatctttttcctc

SEQ ID NO: 4725 - DNA, 40 bp, Artificial Sequence
  Description of Artificial Sequence: Synthetic primer
ttaatatttaaaactcagatggcacttgagaaagacttac

SEQ ID NO: 4726 - DNA, 40 bp, Artificial Sequence
  Description of Artificial Sequence: Synthetic primer
tgaggttctgtattggaaagtgcatggagcccatggagac

SEQ ID NO: 4727 - DNA, 40 bp, Artificial Sequence
  Description of Artificial Sequence: Synthetic primer
gggccgggcaggggtgttggctgcaaggttacaagagaag

SEQ ID NO: 4728 - DNA, 40 bp, Artificial Sequence
  Description of Artificial Sequence: Synthetic primer
attcggacttggtctccccatgtggtccaagccagcactc

SEQ ID NO: 4729 - DNA, 40 bp, Artificial Sequence
  Description of Artificial Sequence: Synthetic primer
ctgggcaggatgttcctgggcattggcaggatggttgagg

SEQ ID NO: 4730 - DNA, 40 bp, Artificial Sequence
  Description of Artificial Sequence: Synthetic primer
ccgggtccagccggagccatggggccggagccgcagtgag

SEQ ID NO: 4731 - DNA, 40 bp, Artificial Sequence
  Description of Artificial Sequence: Synthetic primer
cagggtcccgccgctgctccgtcccctccccacaccagac

SEQ ID NO: 4732 - DNA, 40 bp, Artificial Sequence
  Description of Artificial Sequence: Synthetic primer
aggatactttggatatgtttcacgtagtacacattgcttc

SEQ ID NO: 4733 - DNA, 40 bp, Artificial Sequence
  Description of Artificial Sequence: Synthetic primer
tctgttaccaaaagccaggtgacattcagaacattattag

SEQ ID NO: 4734 - DNA, 40 bp, Artificial Sequence
  Description of Artificial Sequence: Synthetic primer
ggggagacagacctgcccctcttggaccttagatgcttcc

SEQ ID NO: 4735 - DNA, 40 bp, Artificial Sequence
  Description of Artificial Sequence: Synthetic primer
agatgagcagcagcggggacacaagtccttggagacctac

SEQ ID NO: 4736 - DNA, 40 bp, Artificial Sequence
  Description of Artificial Sequence: Synthetic primer
caaagagatttggaaaaatgagtaacatgattatttactc

SEQ ID NO: 4737 - DNA, 40 bp, Artificial Sequence
  Description of Artificial Sequence: Synthetic primer
gacagacaatgtcatcacaggaggatattttacacatttc

SEQ ID NO: 4738 - DNA, 40 bp, Artificial Sequence
  Description of Artificial Sequence: Synthetic primer
gcaacatagggactctgagggaaaatttttaaaaggaaag

SEQ ID NO: 4739 - DNA, 40 bp, Artificial Sequence
  Description of Artificial Sequence: Synthetic primer
ggctgtttcctcttgtgatgtgctcacctggttgaataac

SEQ ID NO: 4740 - DNA, 40 bp, Artificial Sequence
  Description of Artificial Sequence: Synthetic primer
ctgtgtgctgagagatgtaatgacatgtaaaggataattg

SEQ ID NO: 4741 - DNA, 40 bp, Artificial Sequence
  Description of Artificial Sequence: Synthetic primer
atcaacctatatctaaagcaaatcaatcaaatataccatg

SEQ ID NO: 4742 - DNA, 40 bp, Artificial Sequence
  Description of Artificial Sequence: Synthetic primer
agaaatggtagagcctccattgctccagaagcacgtgggc

SEQ ID NO: 4743 - DNA, 40 bp, Artificial Sequence
  Description of Artificial Sequence: Synthetic primer
agcgcagccaggtctgctgctgaaaggaaatcctgttccc

SEQ ID NO: 4744 - DNA, 40 bp, Artificial Sequence
  Description of Artificial Sequence: Synthetic primer
taagcaaagaccgaaaatcctaaaagatgaaggttgattg

SEQ ID NO: 4745 - DNA, 40 bp, Artificial Sequence
  Description of Artificial Sequence: Synthetic primer
attttttcattcatattgcctcttattatatccatcattc

SEQ ID NO: 4746 - DNA, 40 bp, Artificial Sequence
  Description of Artificial Sequence: Synthetic primer
aatctaccaactgggtaggaaagtcttctgagtttctttg

SEQ ID NO: 4747 - DNA, 40 bp, Artificial Sequence
  Description of Artificial Sequence: Synthetic primer
ctaaactggtggtgtcttttcttttttttttctcttcctc

SEQ ID NO: 4748 - DNA, 40 bp, Artificial Sequence
  Description of Artificial Sequence: Synthetic primer
aggccgttgtctccctgtgcctgtctgaccccatttttcc

SEQ ID NO: 4749 - DNA, 40 bp, Artificial Sequence
  Description of Artificial Sequence: Synthetic primer
ctctcttcgggcctcagatctcaccttagcccccttagcc

SEQ ID NO: 4750 - DNA, 40 bp, Artificial Sequence
  Description of Artificial Sequence: Synthetic primer
atttcttaatagttaaaaagtgctaaatactacttgaaat

SEQ ID NO: 4751 - DNA, 40 bp, Artificial Sequence
  Description of Artificial Sequence: Synthetic primer
agaaaaaaggaatacaacttagtttaagcactcattttta

SEQ ID NO: 4752 - DNA, 40 bp, Artificial Sequence
  Description of Artificial Sequence: Synthetic primer
gggccgcccgccgtgaagacatcgcggggaccgattcacc

SEQ ID NO: 4753 - DNA, 40 bp, Artificial Sequence
  Description of Artificial Sequence: Synthetic primer
cggcgggccgagggaatgggcttactttttcttgtcgttc

SEQ ID NO: 4754 - DNA, 40 bp, Artificial Sequence
  Description of Artificial Sequence: Synthetic primer
ccaggcgttttccgagatgaagcctcaaagaccccctttc

SEQ ID NO: 4755 - DNA, 40 bp, Artificial Sequence
  Description of Artificial Sequence: Synthetic primer
ggggtccctagagccttttccgttgatccctggtcttgca

SEQ ID NO: 4756 - DNA, 40 bp, Artificial Sequence
  Description of Artificial Sequence: Synthetic primer
gcagagcaagcccatgtgaactagcgtccttgtgtttgtg

SEQ ID NO: 4757 - DNA, 40 bp, Artificial Sequence
  Description of Artificial Sequence: Synthetic primer
cctcatactcctctcccggggaagccaacgaggcacttac

SEQ ID NO: 4758 - DNA, 40 bp, Artificial Sequence
  Description of Artificial Sequence: Synthetic primer
aacccagactttgggtccacagggcagggctaggagtagg

SEQ ID NO: 4759 - DNA, 40 bp, Artificial Sequence
  Description of Artificial Sequence: Synthetic primer
agtgtttttattcatcctggcttgagaactctgtcattcc

SEQ ID NO: 4760 - DNA, 40 bp, Artificial Sequence
  Description of Artificial Sequence: Synthetic primer
tgttgcttccatttcactttcagctttgatgaccatgacc

SEQ ID NO: 4761 - DNA, 40 bp, Artificial Sequence
  Description of Artificial Sequence: Synthetic primer
acgtaacacacaggggttggggccaggcccagccaagccc

SEQ ID NO: 4762 - DNA, 40 bp, Artificial Sequence
  Description of Artificial Sequence: Synthetic primer
agcttctaacagcagctcagtgaaggaaccaggaggaagg

SEQ ID NO: 4763 - DNA, 40 bp, Artificial Sequence
  Description of Artificial Sequence: Synthetic primer
ttgcttgataacagcagaattaaatgttgtgtgcacgttc

SEQ ID NO: 4764 - DNA, 40 bp, Artificial Sequence
  Description of Artificial Sequence: Synthetic primer
gagttgttacattaagtcttttcatgggacttgattggtg

SEQ ID NO: 4765 - DNA, 40 bp, Artificial Sequence
  Description of Artificial Sequence: Synthetic primer
ttccctgcctgtggacttgaatttcataatcattttcctg

SEQ ID NO: 4766 - DNA, 40 bp, Artificial Sequence
  Description of Artificial Sequence: Synthetic primer
agagatgctcatcccagcaggagtgttctctctgcatgac

SEQ ID NO: 4767 - DNA, 40 bp, Artificial Sequence
  Description of Artificial Sequence: Synthetic primer
gaaggagggcagggactctcagtagacacttatctttttg

SEQ ID NO: 4768 - DNA, 40 bp, Artificial Sequence
  Description of Artificial Sequence: Synthetic primer
gcaatatcccagtagcctccttagggcctcccttgaaagc

SEQ ID NO: 4769 - DNA, 40 bp, Artificial Sequence
  Description of Artificial Sequence: Synthetic primer
aggagtagacctgtctgactttccatttgctccctcactc

SEQ ID NO: 4770 - DNA, 40 bp, Artificial Sequence
  Description of Artificial Sequence: Synthetic primer
gctattattttctaaacatctaaaacaaaacttaactaac

SEQ ID NO: 4771 - DNA, 40 bp, Artificial Sequence
  Description of Artificial Sequence: Synthetic primer
agagaggactgactatcggactgaaagtataaccttcttc

SEQ ID NO: 4772 - DNA, 40 bp, Artificial Sequence
  Description of Artificial Sequence: Synthetic primer
ttttaagcaccagttgaaaaaaaaattatgagattttttt

SEQ ID NO: 4773 - DNA, 40 bp, Artificial Sequence
  Description of Artificial Sequence: Synthetic primer
tcaagtagagaatatgatgcaaacaaaataacaaatactg

SEQ ID NO: 4774 - DNA, 40 bp, Artificial Sequence
  Description of Artificial Sequence: Synthetic primer
gaggaaagatctctgtcagcagatggtgacgccctctgtc

SEQ ID NO: 4775 - DNA, 40 bp, Artificial Sequence
  Description of Artificial Sequence: Synthetic primer
cttccggcccacccacccacggcagcctggccccgctcac

SEQ ID NO: 4776 - DNA, 40 bp, Artificial Sequence
  Description of Artificial Sequence: Synthetic primer
agttttaaataaagcacagtagtaattgcaggcccatgac

SEQ ID NO: 4777 - DNA, 40 bp, Artificial Sequence
  Description of Artificial Sequence: Synthetic primer
ttgttttatcttgttttattgaaaaatgtagaaagcacag

SEQ ID NO: 4778 - DNA, 40 bp, Artificial Sequence
  Description of Artificial Sequence: Synthetic primer
ttatttcatttattcattcattcatttattttgtcttgta

SEQ ID NO: 4779 - DNA, 40 bp, Artificial Sequence
  Description of Artificial Sequence: Synthetic primer
cataagcatacctcttcttggctaccttaagtactttttt

SEQ ID NO: 4780 - DNA, 40 bp, Artificial Sequence
  Description of Artificial Sequence: Synthetic primer
gttctatgatgtgtaattacgaaaccctgacccagcctct

SEQ ID NO: 4781 - DNA, 40 bp, Artificial Sequence
  Description of Artificial Sequence: Synthetic primer
tgaaataacagtttgctttgtgtatgcctataattgaaac

SEQ ID NO: 4782 - DNA, 40 bp, Artificial Sequence
  Description of Artificial Sequence: Synthetic primer
cactgagcctagctgaggttttcataaatgtttgctcaac

SEQ ID NO: 4783 - DNA, 40 bp, Artificial Sequence
  Description of Artificial Sequence: Synthetic primer
ccagaattgtaactaatactattttataacatattaaaac

SEQ ID NO: 4784 - DNA, 40 bp, Artificial Sequence
  Description of Artificial Sequence: Synthetic primer
gcaccccagctctgcttgaattttaaattacattaatatg

SEQ ID NO: 4785 - DNA, 40 bp, Artificial Sequence
  Description of Artificial Sequence: Synthetic primer
catgagaaaaagaggaggaacaagagaggaaactaaagac

SEQ ID NO: 4786 - DNA, 40 bp, Artificial Sequence
  Description of Artificial Sequence: Synthetic primer
actcggatgcagtgaaatgccggctgtaactcggatgaat

SEQ ID NO: 4787 - DNA, 40 bp, Artificial Sequence
  Description of Artificial Sequence: Synthetic primer
gctagtggcctcggtggcgctgccctggcccttcagacac

SEQ ID NO: 4788 - DNA, 40 bp, Artificial Sequence
  Description of Artificial Sequence: Synthetic primer
aaggctgagttctcaagaataacacaggagatttaagcac

SEQ ID NO: 4789 - DNA, 40 bp, Artificial Sequence
  Description of Artificial Sequence: Synthetic primer
gtgaatttgtttggagaattatctcttggtttgacacttg

SEQ ID NO: 4790 - DNA, 40 bp, Artificial Sequence
  Description of Artificial Sequence: Synthetic primer
acagttgacattttcaagagtggcacactcagttttaagg

SEQ ID NO: 4791 - DNA, 40 bp, Artificial Sequence
  Description of Artificial Sequence: Synthetic primer
agatggaaactaacattaccttctttgttccttttatctg

SEQ ID NO: 4792 - DNA, 40 bp, Artificial Sequence
  Description of Artificial Sequence: Synthetic primer
cagcaccccagtgtttggccattttactcttctaaaatac

SEQ ID NO: 4793 - DNA, 40 bp, Artificial Sequence
  Description of Artificial Sequence: Synthetic primer
aatacatgctctgaattgattattattggcacatttacat

SEQ ID NO: 4794 - DNA, 40 bp, Artificial Sequence
  Description of Artificial Sequence: Synthetic primer
ttctgatttttccaatttggcaaaaatgtgcatagggctc

SEQ ID NO: 4795 - DNA, 40 bp, Artificial Sequence
  Description of Artificial Sequence: Synthetic primer
tctgctttgctccctcctcttcacttctccagccactgac

SEQ ID NO: 4796 - DNA, 40 bp, Artificial Sequence
  Description of Artificial Sequence: Synthetic primer
attttctctttctctctttcttttgtctcatatttctttc

SEQ ID NO: 4797 - DNA, 40 bp, Artificial Sequence
  Description of Artificial Sequence: Synthetic primer
aggtttaaagatagaatgaggatcgaaatccaaagtgatc

SEQ ID NO: 4798 - DNA, 40 bp, Artificial Sequence
  Description of Artificial Sequence: Synthetic primer
gccctccgcggccgcagctccccggcggaggcaagaggtg

SEQ ID NO: 4799 - DNA, 40 bp, Artificial Sequence
  Description of Artificial Sequence: Synthetic primer
gccgggacccggaggcggggaggagcggggcaggagtgcc

SEQ ID NO: 4800 - DNA, 40 bp, Artificial Sequence
  Description of Artificial Sequence: Synthetic primer
ggtaaaatttattctaaaggccttaatctggtcattattc

SEQ ID NO: 4801 - DNA, 40 bp, Artificial Sequence
  Description of Artificial Sequence: Synthetic primer
actatcagttttactatagcttgtcaatttttatgcagtc

SEQ ID NO: 4802 - DNA, 40 bp, Artificial Sequence
  Description of Artificial Sequence: Synthetic primer
aaaatcaatgctatcatataagtgacatcttgttatattt

SEQ ID NO: 4803 - DNA, 40 bp, Artificial Sequence
  Description of Artificial Sequence: Synthetic primer
ctagcatgtgaatatatatattcacatgttttcttcattg

SEQ ID NO: 4804 - DNA, 40 bp, Artificial Sequence
  Description of Artificial Sequence: Synthetic primer
tgtcttaaattttattgcttattttgttttcttttgtttc

SEQ ID NO: 4805 - DNA, 40 bp, Artificial Sequence
  Description of Artificial Sequence: Synthetic primer
aaaatgccagtttgaaaacaagtctgtaatggattagtac

SEQ ID NO: 4806 - DNA, 40 bp, Artificial Sequence
  Description of Artificial Sequence: Synthetic primer
ttttttctgcagctgctatccacatcagacagcccaggag

SEQ ID NO: 4807 - DNA, 40 bp, Artificial Sequence
  Description of Artificial Sequence: Synthetic primer
ccaaatgactctatttaaatgcattcattattatccattg

SEQ ID NO: 4808 - DNA, 40 bp, Artificial Sequence
  Description of Artificial Sequence: Synthetic primer
aaaaatgcatataaattcttacccatgatagcattatttc

SEQ ID NO: 4809 - DNA, 40 bp, Artificial Sequence
  Description of Artificial Sequence: Synthetic primer
tgtttgttgccatatttgaagttgtaggggaatatttttt

SEQ ID NO: 4810 - DNA, 40 bp, Artificial Sequence
  Description of Artificial Sequence: Synthetic primer
ggaatgccacagtgaggaatgcccatttattttttctgcc

SEQ ID NO: 4811 - DNA, 40 bp, Artificial Sequence
  Description of Artificial Sequence: Synthetic primer
ggaccctttctggtgtgggatgcctgagccacggagctgc

SEQ ID NO: 4812 - DNA, 40 bp, Artificial Sequence
  Description of Artificial Sequence: Synthetic primer
tccaggaatgcctgctgtgaaaatttaaaaaagaaattgc

SEQ ID NO: 4813 - DNA, 40 bp, Artificial Sequence
  Description of Artificial Sequence: Synthetic primer
aaacgcactctctctctctctctctcactccaatgaatga

SEQ ID NO: 4814 - DNA, 40 bp, Artificial Sequence
  Description of Artificial Sequence: Synthetic primer
ttttcatcacgtggaatacattgactttttctcatctctg

SEQ ID NO: 4815 - DNA, 40 bp, Artificial Sequence
  Description of Artificial Sequence: Synthetic primer
aacattcattctcttgggttcaacacctgtgaaaagatat

SEQ ID NO: 4816 - DNA, 40 bp, Artificial Sequence
  Description of Artificial Sequence: Synthetic primer
taggtgtaaaaatgcaattctgaggtgttaaagggaggag

SEQ ID NO: 4817 - DNA, 40 bp, Artificial Sequence
  Description of Artificial Sequence: Synthetic primer
ttgttttcaacttctaatcctttgagtgtttttcattctg

SEQ ID NO: 4818 - DNA, 40 bp, Artificial Sequence
  Description of Artificial Sequence: Synthetic primer
ctggccggctggctgcccctcaccatcgtctccctccatc

SEQ ID NO: 4819 - DNA, 40 bp, Artificial Sequence
  Description of Artificial Sequence: Synthetic primer
taaacttacagacccaacctctgcccctgccccctttccc

SEQ ID NO: 4820 - DNA, 40 bp, Artificial Sequence
  Description of Artificial Sequence: Synthetic primer
agtagtaaaagtatttattcccatatgtcattttcatttc

SEQ ID NO: 4821 - DNA, 40 bp, Artificial Sequence
  Description of Artificial Sequence: Synthetic primer
gtttttttaaataacagtaaaacactaatccagccaataa

SEQ ID NO: 4822 - DNA, 40 bp, Artificial Sequence
  Description of Artificial Sequence: Synthetic primer
aggggacctcctcaggtaccctcacattctccttccatcc

SEQ ID NO: 4823 - DNA, 40 bp, Artificial Sequence
  Description of Artificial Sequence: Synthetic primer
tactcagccattctttagaaaaggataatggagcagcagc

SEQ ID NO: 4824 - DNA, 40 bp, Artificial Sequence
  Description of Artificial Sequence: Synthetic primer
tccacatggtttttccctgccctcacctactccccctccc

SEQ ID NO: 4825 - DNA, 40 bp, Artificial Sequence
  Description of Artificial Sequence: Synthetic primer
tagatccaggccagggcagtggggcatagggttcacttac

SEQ ID NO: 4826 - DNA, 40 bp, Artificial Sequence
  Description of Artificial Sequence: Synthetic primer
gcaggaaaggcaaaggggacctgatggagtgtctctcctg

SEQ ID NO: 4827 - DNA, 40 bp, Artificial Sequence
  Description of Artificial Sequence: Synthetic primer
tgtgactcccttcaggcagtcctttagtccccagcctcac

SEQ ID NO: 4828 - DNA, 40 bp, Artificial Sequence
  Description of Artificial Sequence: Synthetic primer
atattcatgtttgctttacttccatattcatatatttcac

SEQ ID NO: 4829 - DNA, 40 bp, Artificial Sequence
  Description of Artificial Sequence: Synthetic primer
tcttggacattctgctctgcgtagccactgtcctgtcttc

SEQ ID NO: 4830 - DNA, 40 bp, Artificial Sequence
  Description of Artificial Sequence: Synthetic primer
acggcctcccgggtggcatctgagcgctgtgtggtatctg

SEQ ID NO: 4831 - DNA, 40 bp, Artificial Sequence
  Description of Artificial Sequence: Synthetic primer
ctctgatggtcccctgcctccaacacaccctggccctcag

SEQ ID NO: 4832 - DNA, 40 bp, Artificial Sequence
  Description of Artificial Sequence: Synthetic primer
aatccactgccatggctcagtctgcttctcttccttctcc

SEQ ID NO: 4833 - DNA, 40 bp, Artificial Sequence
  Description of Artificial Sequence: Synthetic primer
caggcagggttggtggtgggcacaggggagggaagcacac

SEQ ID NO: 4834 - DNA, 40 bp, Artificial Sequence
  Description of Artificial Sequence: Synthetic primer
tccaggtccccagccctccaggtccccagcccaacccttg

SEQ ID NO: 4835 - DNA, 40 bp, Artificial Sequence
  Description of Artificial Sequence: Synthetic primer
ggaagcgaaaattccatgggactgactttctgctcttgtc

SEQ ID NO: 4836 - DNA, 40 bp, Artificial Sequence
  Description of Artificial Sequence: Synthetic primer
ggaattatctctgttatttcactttatgcctcctctccac

SEQ ID NO: 4837 - DNA, 40 bp, Artificial Sequence
  Description of Artificial Sequence: Synthetic primer
ctttctcttcaccgaagtagcagtaaccagtttagtcaac

SEQ ID NO: 4838 - DNA, 40 bp, Artificial Sequence
  Description of Artificial Sequence: Synthetic primer
ggggaaaagtgatcacccgggaagatgaggttggggttct

SEQ ID NO: 4839 - DNA, 40 bp, Artificial Sequence
  Description of Artificial Sequence: Synthetic primer
atccgttatctctgttgatccctccctgatctgtcttctg

SEQ ID NO: 4840 - DNA, 40 bp, Artificial Sequence
  Description of Artificial Sequence: Synthetic primer
gggtgggtctagggaggggcaagggcagggcttggctacc

SEQ ID NO: 4841 - DNA, 40 bp, Artificial Sequence
  Description of Artificial Sequence: Synthetic primer
tctccctgtcttcctctctcgccccttggcttcccttccc

SEQ ID NO: 4842 - DNA, 40 bp, Artificial Sequence
  Description of Artificial Sequence: Synthetic primer
ctgttcatttctgtgggttttttcacattattttatttac

SEQ ID NO: 4843 - DNA, 40 bp, Artificial Sequence
  Description of Artificial Sequence: Synthetic primer
ttcttaatgttcaaatgtttgatatttaataatttagtca

SEQ ID NO: 4844 - DNA, 40 bp, Artificial Sequence
  Description of Artificial Sequence: Synthetic primer
ggggcacgaccagcggggagcgagtctgcattattctgag

SEQ ID NO: 4845 - DNA, 40 bp, Artificial Sequence
  Description of Artificial Sequence: Synthetic primer
tgccttccctcacggccgttctctcccacaggggactcgc

SEQ ID NO: 4846 - DNA, 40 bp, Artificial Sequence
  Description of Artificial Sequence: Synthetic primer
gagtgagccaccgcacctggccgagatgcagatgattctt

SEQ ID NO: 4847 - DNA, 40 bp, Artificial Sequence
  Description of Artificial Sequence: Synthetic primer
caatcttgtctccaaggactggggcttcactggtttctcc

SEQ ID NO: 4848 - DNA, 40 bp, Artificial Sequence
  Description of Artificial Sequence: Synthetic primer
aaggcagtgactttctgcttgctattcataggagattcac

SEQ ID NO: 4849 - DNA, 40 bp, Artificial Sequence
  Description of Artificial Sequence: Synthetic primer
tgatattatattacttttagtcaaatgaatttttggtgtg

SEQ ID NO: 4850 - DNA, 40 bp, Artificial Sequence
  Description of Artificial Sequence: Synthetic primer
ccgatttttttcaagtttttaagactctattttaaattac

SEQ ID NO: 4851 - DNA, 40 bp, Artificial Sequence
  Description of Artificial Sequence: Synthetic primer
gcaatctcctctctcttttatcacacaacaatatgatttc

SEQ ID NO: 4852 - DNA, 40 bp, Artificial Sequence
  Description of Artificial Sequence: Synthetic primer
acctagttaccaaaagacaattatccttcttagctcaggt

SEQ ID NO: 4853 - DNA, 40 bp, Artificial Sequence
  Description of Artificial Sequence: Synthetic primer
tttaccactacctgctaccatatcagagaccaactaaatt

SEQ ID NO: 4854 - DNA, 40 bp, Artificial Sequence
  Description of Artificial Sequence: Synthetic primer
cacattttcttcaaaaacagagtatatccattaaacattc

SEQ ID NO: 4855 - DNA, 40 bp, Artificial Sequence
  Description of Artificial Sequence: Synthetic primer
aaaaaaactcattctgagctaaagaattaataattttttg

SEQ ID NO: 4856 - DNA, 40 bp, Artificial Sequence
  Description of Artificial Sequence: Synthetic primer
ggaccttgccttatatccagttctgacctaccattgtacc

SEQ ID NO: 4857 - DNA, 40 bp, Artificial Sequence
  Description of Artificial Sequence: Synthetic primer
aggagactccggtccaccctacccgaatacccctcactcc

SEQ ID NO: 4858 - DNA, 40 bp, Artificial Sequence
  Description of Artificial Sequence: Synthetic primer
cagtccttcaaagctcatgaggtgaaggcaaccctagaag

SEQ ID NO: 4859 - DNA, 40 bp, Artificial Sequence
  Description of Artificial Sequence: Synthetic primer
ttttgacacaatcctctgttttatttccccttgattttgg

SEQ ID NO: 4860 - DNA, 40 bp, Artificial Sequence
  Description of Artificial Sequence: Synthetic primer
tttcctttctgactggttttcttaaacactcttctcttcc

SEQ ID NO: 4861 - DNA, 40 bp, Artificial Sequence
  Description of Artificial Sequence: Synthetic primer
catcagcccagctcccctcccgctcccctgcaggccattc

SEQ ID NO: 4862 - DNA, 40 bp, Artificial Sequence
  Description of Artificial Sequence: Synthetic primer
gcctggtgtgtggcaacactcgtgccggccacaaccctta

SEQ ID NO: 4863 - DNA, 40 bp, Artificial Sequence
  Description of Artificial Sequence: Synthetic primer
cctctgtgggcctgggcctcacctgtctaccaccccatcc

SEQ ID NO: 4864 - DNA, 40 bp, Artificial Sequence
  Description of Artificial Sequence: Synthetic primer
gccctcctgggcctggcagcccgtctgaggagcccgtgtc

SEQ ID NO: 4865 - DNA, 40 bp, Artificial Sequence
  Description of Artificial Sequence: Synthetic primer
cagcatctcagggcagggcccagcctactccacccacacc

SEQ ID NO: 4866 - DNA, 40 bp, Artificial Sequence
  Description of Artificial Sequence: Synthetic primer
aaacctgattgttgggctgaccacggtttctccttctttc

SEQ ID NO: 4867 - DNA, 40 bp, Artificial Sequence
  Description of Artificial Sequence: Synthetic primer
gaggaattggtatgctactgcctttgggatcccttcaatg

SEQ ID NO: 4868 - DNA, 40 bp, Artificial Sequence
  Description of Artificial Sequence: Synthetic primer
cagccactgaccttctgacgtccccacccaccccgtcctc

SEQ ID NO: 4869 - DNA, 40 bp, Artificial Sequence
  Description of Artificial Sequence: Synthetic primer
ccttcccttccaggggcgtgatttcctccacggaaattcc

SEQ ID NO: 4870 - DNA, 40 bp, Artificial Sequence
  Description of Artificial Sequence: Synthetic primer
gaaaaatgaaagagagatggtgattgcatctaatgttttc

SEQ ID NO: 4871 - DNA, 40 bp, Artificial Sequence
  Description of Artificial Sequence: Synthetic primer
tgttactcaccttatactgactcagaggatatttttctag

SEQ ID NO: 4872 - DNA, 40 bp, Artificial Sequence
  Description of Artificial Sequence: Synthetic primer
aggagagcacaacccattgcccacccaccccagggctggg

SEQ ID NO: 4873 - DNA, 40 bp, Artificial Sequence
  Description of Artificial Sequence: Synthetic primer
gctaccatgcacaagggttccctgtgtctctgcctctcac

SEQ ID NO: 4874 - DNA, 40 bp, Artificial Sequence
  Description of Artificial Sequence: Synthetic primer
cccgcattgtcatgttgactgacctttccttctttttgtc

SEQ ID NO: 4875 - DNA, 40 bp, Artificial Sequence
  Description of Artificial Sequence: Synthetic primer
ttctcgctggtgagtttcatactgcactctgtaagatggg

SEQ ID NO: 4876 - DNA, 40 bp, Artificial Sequence
  Description of Artificial Sequence: Synthetic primer
tctggccaactttgaccccgaagccttccctctagcaagc

SEQ ID NO: 4877 - DNA, 40 bp, Artificial Sequence
  Description of Artificial Sequence: Synthetic primer
attcagcataagctcaccacaaaggagagctcctaacgag

SEQ ID NO: 4878 - DNA, 40 bp, Artificial Sequence
  Description of Artificial Sequence: Synthetic primer
gtagtacagtcaccccaatcacctacagacagaaattcac

SEQ ID NO: 4879 - DNA, 40 bp, Artificial Sequence
  Description of Artificial Sequence: Synthetic primer
aaattgaatgtattaagtcaatttttctttcttctcttgc

SEQ ID NO: 4880 - DNA, 40 bp, Artificial Sequence
  Description of Artificial Sequence: Synthetic primer
acaataattattaaaaggtgatctatttttccctttctcc

SEQ ID NO: 4881 - DNA, 40 bp, Artificial Sequence
  Description of Artificial Sequence: Synthetic primer
tgtacccaaaaaggtgacatggaaagcccctgtttcatac

SEQ ID NO: 4882 - DNA, 40 bp, Artificial Sequence
  Description of Artificial Sequence: Synthetic primer
atactcccaaacccgagtcaaggccagtatggctcacacc

SEQ ID NO: 4883 - DNA, 40 bp, Artificial Sequence
  Description of Artificial Sequence: Synthetic primer
tgttctgactatttatgtaagagtaaaaggaggctgattc

SEQ ID NO: 4884 - DNA, 40 bp, Artificial Sequence
  Description of Artificial Sequence: Synthetic primer
tctataaaataaatgtctgaaatatttcttaaattgtttc

SEQ ID NO: 4885 - DNA, 40 bp, Artificial Sequence
  Description of Artificial Sequence: Synthetic primer
caagcacctctacatctccatgtatgttcaatgaggttcc

SEQ ID NO: 4886 - DNA, 40 bp, Artificial Sequence
  Description of Artificial Sequence: Synthetic primer
taccttcatataaaagagagtgaaacaaaataaagtcagg

SEQ ID NO: 4887 - DNA, 40 bp, Artificial Sequence
  Description of Artificial Sequence: Synthetic primer
tcctcatttggctctttgtaaatggccctgtgaaagcatt

SEQ ID NO: 4888 - DNA, 40 bp, Artificial Sequence
  Description of Artificial Sequence: Synthetic primer
agggtgcggtggccaggtctcttgacggtcttctctcctg

SEQ ID NO: 4889 - DNA, 40 bp, Artificial Sequence
  Description of Artificial Sequence: Synthetic primer
aaaccaaagtcaggaatgttcaaccaaggggtggctggag

SEQ ID NO: 4890 - DNA, 40 bp, Artificial Sequence
  Description of Artificial Sequence: Synthetic primer
caggtatgcttttcaatttataaccaaaaaacagcaaagc

SEQ ID NO: 4891 - DNA, 40 bp, Artificial Sequence
  Description of Artificial Sequence: Synthetic primer
ttatttccttttttaaaatacatttttaacattttttctg

SEQ ID NO: 4892 - DNA, 40 bp, Artificial Sequence
  Description of Artificial Sequence: Synthetic primer
ttctctcctgtctgacaccttctcaatcctccccctcctc

SEQ ID NO: 4893 - DNA, 40 bp, Artificial Sequence
  Description of Artificial Sequence: Synthetic primer
ccacaccgaggggcatctggtggggctcaggcactctcac

SEQ ID NO: 4894 - DNA, 40 bp, Artificial Sequence
  Description of Artificial Sequence: Synthetic primer
tgctttttaaaaattatcttcacgtgttataaaacttgtc

SEQ ID NO: 4895 - DNA, 40 bp, Artificial Sequence
  Description of Artificial Sequence: Synthetic primer
ttactgcataaagtatataataaaagaaggtatataccag

SEQ ID NO: 4896 - DNA, 40 bp, Artificial Sequence
  Description of Artificial Sequence: Synthetic primer
ctgtaacacgcgtccacgctcccgccccaccgggctgctc

SEQ ID NO: 4897 - DNA, 40 bp, Artificial Sequence
  Description of Artificial Sequence: Synthetic primer
ttcatcctatgtccactgccctcgccccacctgctcttgg

SEQ ID NO: 4898 - DNA, 40 bp, Artificial Sequence
  Description of Artificial Sequence: Synthetic primer
ccttatgttgtattcgttattatcattaattctgcctcac

SEQ ID NO: 4899 - DNA, 40 bp, Artificial Sequence
  Description of Artificial Sequence: Synthetic primer
tgagaaatattgctcaaagaaaaatagagaaggctcttac

SEQ ID NO: 4900 - DNA, 40 bp, Artificial Sequence
  Description of Artificial Sequence: Synthetic primer
ctgatgaaagtttcactcaaatggatcttggggaccgtat

SEQ ID NO: 4901 - DNA, 40 bp, Artificial Sequence
  Description of Artificial Sequence: Synthetic primer
cttcttgttgacaggacctacttctctaatctcagtgttg

SEQ ID NO: 4902 - DNA, 40 bp, Artificial Sequence
  Description of Artificial Sequence: Synthetic primer
tataaaaacccttctgcaattcaaaatagagaaaatgaag

SEQ ID NO: 4903 - DNA, 40 bp, Artificial Sequence
  Description of Artificial Sequence: Synthetic primer
gcttgaattttttaaatggagtttgttgtgttttggattc

SEQ ID NO: 4904 - DNA, 40 bp, Artificial Sequence
  Description of Artificial Sequence: Synthetic primer
ttaaaataccaaaccatttctaattttatcattactcttc

SEQ ID NO: 4905 - DNA, 40 bp, Artificial Sequence
  Description of Artificial Sequence: Synthetic primer
aagatatttgagaagcatgctccgacttttctcggctaac

SEQ ID NO: 4906 - DNA, 40 bp, Artificial Sequence
  Description of Artificial Sequence: Synthetic primer
gccacatagggtagaacattttgagaaattaaaaagaata

SEQ ID NO: 4907 - DNA, 40 bp, Artificial Sequence
  Description of Artificial Sequence: Synthetic primer
tttcatcaacaagcagtttgacaaaaaatttgtttatttg

SEQ ID NO: 4908 - DNA, 40 bp, Artificial Sequence
  Description of Artificial Sequence: Synthetic primer
gaatgtataacctggtttgcatttgttttcacatattttt

SEQ ID NO: 4909 - DNA, 40 bp, Artificial Sequence
  Description of Artificial Sequence: Synthetic primer
ggggtaaaaaccatgggcatatacaatgtatgtctactgg

SEQ ID NO: 4910 - DNA, 40 bp, Artificial Sequence
  Description of Artificial Sequence: Synthetic primer
tggttggtccactgctggctgatctatgtccctgaagcag

SEQ ID NO: 4911 - DNA, 40 bp, Artificial Sequence
  Description of Artificial Sequence: Synthetic primer
gaaattgaagtatttctgtgactacttctgctctcactac

SEQ ID NO: 4912 - DNA, 40 bp, Artificial Sequence
  Description of Artificial Sequence: Synthetic primer
tacacgtcttcagtgtgggtgaatgctgggatttgttttc

SEQ ID NO: 4913 - DNA, 40 bp, Artificial Sequence
  Description of Artificial Sequence: Synthetic primer
gctttctgaaggtggccattatgtagtgtgtcctcttatc

SEQ ID NO: 4914 - DNA, 40 bp, Artificial Sequence
  Description of Artificial Sequence: Synthetic primer
ggctcaagaaataacatttttctaattgcttcaatcatcg

SEQ ID NO: 4915 - DNA, 40 bp, Artificial Sequence
  Description of Artificial Sequence: Synthetic primer
gctttgaggggaaaaaaatctttcattaaatatgcagaac

SEQ ID NO: 4916 - DNA, 40 bp, Artificial Sequence
  Description of Artificial Sequence: Synthetic primer
tagccaataacatcattgcaagcaatccataaagttcagg

SEQ ID NO: 4917 - DNA, 40 bp, Artificial Sequence
  Description of Artificial Sequence: Synthetic primer
ggctgttgagatgagcattgctgtctgtttgattctccag

SEQ ID NO: 4918 - DNA, 40 bp, Artificial Sequence
  Description of Artificial Sequence: Synthetic primer
tcagatgttaacagaataacatactatgtgctaaaccgtg

SEQ ID NO: 4919 - DNA, 40 bp, Artificial Sequence
  Description of Artificial Sequence: Synthetic primer
ggtcagcttatatattggttatgtttgtttgcttgtttgc

SEQ ID NO: 4920 - DNA, 40 bp, Artificial Sequence
  Description of Artificial Sequence: Synthetic primer
gttctctgaaagaactctggctctttggttcttttcaagc

SEQ ID NO: 4921 - DNA, 40 bp, Artificial Sequence
  Description of Artificial Sequence: Synthetic primer
aaaaggaaggaggaaggctggtggaatgctgagtgatggc

SEQ ID NO: 4922 - DNA, 40 bp, Artificial Sequence
  Description of Artificial Sequence: Synthetic primer
aaatggtgctaatctcacattcatgtttttgttcattttg

SEQ ID NO: 4923 - DNA, 40 bp, Artificial Sequence
  Description of Artificial Sequence: Synthetic primer
ctttgggtaataacttctgattcattaattaaacagcatt

SEQ ID NO: 4924 - DNA, 40 bp, Artificial Sequence
  Description of Artificial Sequence: Synthetic primer
atttttttttcagagacatgagagaagttatcaaaaacag

SEQ ID NO: 4925 - DNA, 40 bp, Artificial Sequence
  Description of Artificial Sequence: Synthetic primer
ctgtaaacttgattatttaccttgcattcttttctttttc

SEQ ID NO: 4926 - DNA, 40 bp, Artificial Sequence
  Description of Artificial Sequence: Synthetic primer
aacttctgtttcccgattttgctctaggaagtaatttaag

SEQ ID NO: 4927 - DNA, 40 bp, Artificial Sequence
  Description of Artificial Sequence: Synthetic primer
cacattgctacaggaaataaagcaacaaatgactagatac

SEQ ID NO: 4928 - DNA, 40 bp, Artificial Sequence
  Description of Artificial Sequence: Synthetic primer
agcgcctgcgatctcgcccagcgggaggatgtttgcactc

SEQ ID NO: 4929 - DNA, 40 bp, Artificial Sequence
  Description of Artificial Sequence: Synthetic primer
cctccaacccctttatgggtggtttcccatttcatctttg

SEQ ID NO: 4930 - DNA, 40 bp, Artificial Sequence
  Description of Artificial Sequence: Synthetic primer
ccacaagccccgcctcctgattcttgtcggactgtcattg

SEQ ID NO: 4931 - DNA, 40 bp, Artificial Sequence
  Description of Artificial Sequence: Synthetic primer
ggtgtactgctctcaccctttctgggcctctgctcatccc

SEQ ID NO: 4932 - DNA, 40 bp, Artificial Sequence
  Description of Artificial Sequence: Synthetic primer
cttgtgtcttcgtaagacagaactgtcaggctttttggtc

SEQ ID NO: 4933 - DNA, 40 bp, Artificial Sequence
  Description of Artificial Sequence: Synthetic primer
tttctcatgggatgtgtttcttctcttgatctcttttctc

SEQ ID NO: 4934 - DNA, 40 bp, Artificial Sequence
  Description of Artificial Sequence: Synthetic primer
atcctcagtatcagaactgacaggtttggggtggcaggac

SEQ ID NO: 4935 - DNA, 40 bp, Artificial Sequence
  Description of Artificial Sequence: Synthetic primer
ggaaaaggaagatgaggaggatgaagagattgtgagtccc

SEQ ID NO: 4936 - DNA, 40 bp, Artificial Sequence
  Description of Artificial Sequence: Synthetic primer
cccttcctccctctttctttcataaaacctctctttcttc

SEQ ID NO: 4937 - DNA, 40 bp, Artificial Sequence
  Description of Artificial Sequence: Synthetic primer
gattaggccagagccacccaactcttaaggccattgctcc

SEQ ID NO: 4938 - DNA, 40 bp, Artificial Sequence
  Description of Artificial Sequence: Synthetic primer
gaaagaattttgctacaaattaaatgtacaaaaaatattg

SEQ ID NO: 4939 - DNA, 40 bp, Artificial Sequence
  Description of Artificial Sequence: Synthetic primer
gaagtccttgagtaaaaagtaaaagaaaatgcatgactac

SEQ ID NO: 4940 - DNA, 40 bp, Artificial Sequence
  Description of Artificial Sequence: Synthetic primer
gatgtactttatacttttgtaatactcttttctcaatgtg

SEQ ID NO: 4941 - DNA, 40 bp, Artificial Sequence
  Description of Artificial Sequence: Synthetic primer
ggctactgtgcgccacattagtgatcaggagacgagtcac

SEQ ID NO: 4942 - DNA, 40 bp, Artificial Sequence
  Description of Artificial Sequence: Synthetic primer
gctgcaagcagggaatggaattcaccccaccagccctatg

SEQ ID NO: 4943 - DNA, 40 bp, Artificial Sequence
  Description of Artificial Sequence: Synthetic primer
gggcggacgcaggtagggtgtttgagagggcttctctttg

SEQ ID NO: 4944 - DNA, 40 bp, Artificial Sequence
  Description of Artificial Sequence: Synthetic primer
atactgtctgggtctgaaacgctttccccactaaggtctg

SEQ ID NO: 4945 - DNA, 40 bp, Artificial Sequence
  Description of Artificial Sequence: Synthetic primer
aatgacgtctatgtgctagttttatgtcgtcggatttttc

SEQ ID NO: 4946 - DNA, 40 bp, Artificial Sequence
  Description of Artificial Sequence: Synthetic primer
atcccagcagctacatgcccatttttctgatacatcttac

SEQ ID NO: 4947 - DNA, 40 bp, Artificial Sequence
  Description of Artificial Sequence: Synthetic primer
accccactgtctgggttttaatgtcaggctgttcttttag

SEQ ID NO: 4948 - DNA, 40 bp, Artificial Sequence
  Description of Artificial Sequence: Synthetic primer
tcccggctggtgatcacgcggggcccctgtctgcttggtg

SEQ ID NO: 4949 - DNA, 40 bp, Artificial Sequence
  Description of Artificial Sequence: Synthetic primer
gaactgtggccggagacagacactgggtagaccacagcac

SEQ ID NO: 4950 - DNA, 40 bp, Artificial Sequence
  Description of Artificial Sequence: Synthetic primer
ctgaagataggctgatcgcatgaaatcaatgaggcacttc

SEQ ID NO: 4951 - DNA, 40 bp, Artificial Sequence
  Description of Artificial Sequence: Synthetic primer
gtgcatggctaccaattccgctctctcatttgtatctgac

SEQ ID NO: 4952 - DNA, 40 bp, Artificial Sequence
  Description of Artificial Sequence: Synthetic primer
catgaacaagcacctgtgagagacctggcccacctgtgac

SEQ ID NO: 4953 - DNA, 40 bp, Artificial Sequence
  Description of Artificial Sequence: Synthetic primer
tgaggtttggctgtggagttaatggtgctgggcagagttg

SEQ ID NO: 4954 - DNA, 40 bp, Artificial Sequence
  Description of Artificial Sequence: Synthetic primer
tcccctctactaacaaaacttcccatcatcatagtcttcc

SEQ ID NO: 4955 - DNA, 40 bp, Artificial Sequence
  Description of Artificial Sequence: Synthetic primer
taggtttgcatctaccctccctggctttcccaggctctag

SEQ ID NO: 4956 - DNA, 40 bp, Artificial Sequence
  Description of Artificial Sequence: Synthetic primer
cttgccccaaggcctggctcagggcctccgacatctcctc

SEQ ID NO: 4957 - DNA, 40 bp, Artificial Sequence
  Description of Artificial Sequence: Synthetic primer
cggagaagctctaacaccctgtggctctccgcccatttgc

SEQ ID NO: 4958 - DNA, 40 bp, Artificial Sequence
  Description of Artificial Sequence: Synthetic primer
ggggtgggaggctgtcagtggggaacaagaagtggagaat

SEQ ID NO: 4959 - DNA, 40 bp, Artificial Sequence
  Description of Artificial Sequence: Synthetic primer
tcatgtgatgtcatctctcctccctgcttctgtctcctac

SEQ ID NO: 4960 - DNA, 40 bp, Artificial Sequence
  Description of Artificial Sequence: Synthetic primer
ttcaggtagcacctgcccggtctgggctcaccaggtattc

SEQ ID NO: 4961 - DNA, 40 bp, Artificial Sequence
  Description of Artificial Sequence: Synthetic primer
aaggtggacttggactctgaggatcgggtttagcctctgg

SEQ ID NO: 4962 - DNA, 40 bp, Artificial Sequence
  Description of Artificial Sequence: Synthetic primer
cacaccctcccactgccaaatgtttggagctccgtggttc

SEQ ID NO: 4963 - DNA, 40 bp, Artificial Sequence
  Description of Artificial Sequence: Synthetic primer
gacagcttcccatctcctgattcctcatgatgtggctgag

SEQ ID NO: 4964 - DNA, 40 bp, Artificial Sequence
  Description of Artificial Sequence: Synthetic primer
gtagcagagatgcagggcatgtcctcatggcttctcgctc

SEQ ID NO: 4965 - DNA, 40 bp, Artificial Sequence
  Description of Artificial Sequence: Synthetic primer
tgtggctctcatccccacctgtgaagctgcctgtgtaccc

SEQ ID NO: 4966 - DNA, 40 bp, Artificial Sequence
  Description of Artificial Sequence: Synthetic primer
aagagacatcaataatacagatgtgggacattattttttc

SEQ ID NO: 4967 - DNA, 40 bp, Artificial Sequence
  Description of Artificial Sequence: Synthetic primer
atgaacatgcaatgaaaacacaagtgggcaaacatttctc

SEQ ID NO: 4968 - DNA, 40 bp, Artificial Sequence
  Description of Artificial Sequence: Synthetic primer
taggtgggccctgcgctggcggtgctgatggtctctgtcc

SEQ ID NO: 4969 - DNA, 40 bp, Artificial Sequence
  Description of Artificial Sequence: Synthetic primer
aggggccgactcaccaatttgatagccacgtattcatttg

SEQ ID NO: 4970 - DNA, 40 bp, Artificial Sequence
  Description of Artificial Sequence: Synthetic primer
tggatgtcaccctaaggccagcctcacaggccaggagaag

SEQ ID NO: 4971 - DNA, 40 bp, Artificial Sequence
  Description of Artificial Sequence: Synthetic primer
caagaatacttgttttgttattcttcatgcaacagacttc

SEQ ID NO: 4972 - DNA, 40 bp, Artificial Sequence
  Description of Artificial Sequence: Synthetic primer
agtgaacttctgattaaagtgaatgttataaaactatgat

SEQ ID NO: 4973 - DNA, 40 bp, Artificial Sequence
  Description of Artificial Sequence: Synthetic primer
atgtttgctcatttgctccttttcatttttcccattttag

SEQ ID NO: 4974 - DNA, 40 bp, Artificial Sequence
  Description of Artificial Sequence: Synthetic primer
taaatttttttttctatttagttttaccaacagactgcag

SEQ ID NO: 4975 - DNA, 40 bp, Artificial Sequence
  Description of Artificial Sequence: Synthetic primer
tagaaataccgaaaatgatttacctgattgatttgtccag

SEQ ID NO: 4976 - DNA, 40 bp, Artificial Sequence
  Description of Artificial Sequence: Synthetic primer
atatccccatttatagctgagtctccatcctgggacatgg

SEQ ID NO: 4977 - DNA, 40 bp, Artificial Sequence
  Description of Artificial Sequence: Synthetic primer
gctgacttccagccttctcagatggagccaggattacatc

SEQ ID NO: 4978 - DNA, 40 bp, Artificial Sequence
  Description of Artificial Sequence: Synthetic primer
agaattcaaatccttacaagttaaaaaaaaaattaatacg

SEQ ID NO: 4979 - DNA, 40 bp, Artificial Sequence
  Description of Artificial Sequence: Synthetic primer
gtatgactttaaatgtgtgtaatttttatatcctactgtt

SEQ ID NO: 4980 - DNA, 40 bp, Artificial Sequence
  Description of Artificial Sequence: Synthetic primer
ctccctgcagcacccctccctgcccgtctcctcgcctctc

SEQ ID NO: 4981 - DNA, 40 bp, Artificial Sequence
  Description of Artificial Sequence: Synthetic primer
ggggcagccctggggtctccagcttagttgctacatcccg

SEQ ID NO: 4982 - DNA, 40 bp, Artificial Sequence
  Description of Artificial Sequence: Synthetic primer
cccactgcacaacctcaaagcccggtgaggctggctaggg

SEQ ID NO: 4983 - DNA, 40 bp, Artificial Sequence
  Description of Artificial Sequence: Synthetic primer
agactgagacctctcaactcccgctccctgcccccaccag

SEQ ID NO: 4984 - DNA, 40 bp, Artificial Sequence
  Description of Artificial Sequence: Synthetic primer
ttttaagtcacacttgtgatttgttaaattttttaacctg

SEQ ID NO: 4985 - DNA, 40 bp, Artificial Sequence
  Description of Artificial Sequence: Synthetic primer
ggaaaattgaaacttgattatgattatgtaattataggag

SEQ ID NO: 4986 - DNA, 40 bp, Artificial Sequence
  Description of Artificial Sequence: Synthetic primer
atctgggaggcgagcagctctgcagttaatgcacgtattt

SEQ ID NO: 4987 - DNA, 40 bp, Artificial Sequence
  Description of Artificial Sequence: Synthetic primer
attattaagagggtccatttcatgctcttcccctttttgc

SEQ ID NO: 4988 - DNA, 40 bp, Artificial Sequence
  Description of Artificial Sequence: Synthetic primer
ctatccctatgccatggggtttttaagacccgtgctcttc

SEQ ID NO: 4989 - DNA, 40 bp, Artificial Sequence
  Description of Artificial Sequence: Synthetic primer
cacctggtacacctgcaccagcaacgcccagggtgaacgc

SEQ ID NO: 4990 - DNA, 40 bp, Artificial Sequence
  Description of Artificial Sequence: Synthetic primer
gcttataaaatattaatgtgcttctgttttatactttaac

SEQ ID NO: 4991 - DNA, 40 bp, Artificial Sequence
  Description of Artificial Sequence: Synthetic primer
aaaactatatgtactatttacaaaaaaaaaaagacagagg

SEQ ID NO: 4992 - DNA, 40 bp, Artificial Sequence
  Description of Artificial Sequence: Synthetic primer
caaatcagaagccctttgagagtggaagtgacaaaatctc

SEQ ID NO: 4993 - DNA, 40 bp, Artificial Sequence
  Description of Artificial Sequence: Synthetic primer
tggcttcttcatttcagggtatcaaaaagtctatattcag

SEQ ID NO: 4994 - DNA, 40 bp, Artificial Sequence
  Description of Artificial Sequence: Synthetic primer
atctgggctccatttagacctgaaagggttagttgagacc

SEQ ID NO: 4995 - DNA, 40 bp, Artificial Sequence
  Description of Artificial Sequence: Synthetic primer
tcttttttaaagtttggatcagtcatatgacctgaaaaac

SEQ ID NO: 4996 - DNA, 40 bp, Artificial Sequence
  Description of Artificial Sequence: Synthetic primer
tccacaggcagataaatagctaaatttcctaagtagaatg

SEQ ID NO: 4997 - DNA, 40 bp, Artificial Sequence
  Description of Artificial Sequence: Synthetic primer
ttttgttctagagttacaattatttgtgtttcttaccagg

SEQ ID NO: 4998 - DNA, 40 bp, Artificial Sequence
  Description of Artificial Sequence: Synthetic primer
agagaggctgtgtgcattagctacaaatagtaacattttc

SEQ ID NO: 4999 - DNA, 40 bp, Artificial Sequence
  Description of Artificial Sequence: Synthetic primer
ctgctttcctttaaacaagtgagttagaagctatacaaag

SEQ ID NO: 5000 - DNA, 40 bp, Artificial Sequence
  Description of Artificial Sequence: Synthetic primer
gagcaagcccaatgccgggatatgaaagggaagaaaaatc

SEQ ID NO: 5001 - DNA, 40 bp, Artificial Sequence
  Description of Artificial Sequence: Synthetic primer
gaactgcttggtaagaacactacccaaagccagcagcatg

SEQ ID NO: 5002 - DNA, 40 bp, Artificial Sequence
  Description of Artificial Sequence: Synthetic primer
agtgctgacagtgtcttgtttttttattacttactttgtc

SEQ ID NO: 5003 - DNA, 40 bp, Artificial Sequence
  Description of Artificial Sequence: Synthetic primer
tggttttaccacttcctacctagaaaacactctcaggatc

SEQ ID NO: 5004 - DNA, 40 bp, Artificial Sequence
  Description of Artificial Sequence: Synthetic primer
accttatggctgcagggatacctggaggatgatggctgac

SEQ ID NO: 5005 - DNA, 40 bp, Artificial Sequence
  Description of Artificial Sequence: Synthetic primer
agatgcttaatgccatctccagatcctagtttggttttcc

SEQ ID NO: 5006 - DNA, 40 bp, Artificial Sequence
  Description of Artificial Sequence: Synthetic primer
tccacccagcccctccccgagcctcccgcctccccgctca

SEQ ID NO: 5007 - DNA, 40 bp, Artificial Sequence
  Description of Artificial Sequence: Synthetic primer
caccagatgctatgtgctaatcccctatttacacatttag

SEQ ID NO: 5008 - DNA, 40 bp, Artificial Sequence
  Description of Artificial Sequence: Synthetic primer
tgcatgttggggattcctggtgccagaaacaggggtgacg

SEQ ID NO: 5009 - DNA, 40 bp, Artificial Sequence
  Description of Artificial Sequence: Synthetic primer
caccgggcgtgttccccagagtgacttttccttttatttc

SEQ ID NO: 5010 - DNA, 40 bp, Artificial Sequence
  Description of Artificial Sequence: Synthetic primer
gggagtgggttgtgtggagcgctggaatgggaaggtgagg

SEQ ID NO: 5011 - DNA, 40 bp, Artificial Sequence
  Description of Artificial Sequence: Synthetic primer
ccatcccaggccaggagagcaggaggggccggaacagcag

SEQ ID NO: 5012 - DNA, 40 bp, Artificial Sequence
  Description of Artificial Sequence: Synthetic primer
atttgataatcttattcacagttgttattgtttacagacc

SEQ ID NO: 5013 - DNA, 40 bp, Artificial Sequence
  Description of Artificial Sequence: Synthetic primer
actagttttgaattcttaaaagatatattcaatttgattc

SEQ ID NO: 5014 - DNA, 40 bp, Artificial Sequence
  Description of Artificial Sequence: Synthetic primer
tgaccaccaccccaggcccagcctgtcccactcttacctg

SEQ ID NO: 5015 - DNA, 40 bp, Artificial Sequence
  Description of Artificial Sequence: Synthetic primer
agggcccaatctctccctccaggcacccctgagtcacctg

SEQ ID NO: 5016 - DNA, 40 bp, Artificial Sequence
  Description of Artificial Sequence: Synthetic primer
caggaaaggcttgttaaacttgcggtggtaactcttcttc

SEQ ID NO: 5017 - DNA, 40 bp, Artificial Sequence
  Description of Artificial Sequence: Synthetic primer
tttctaaaggaaaggtgtttccgggcattttgttatcctc

SEQ ID NO: 5018 - DNA, 40 bp, Artificial Sequence
  Description of Artificial Sequence: Synthetic primer
tgtggtgctgcgacccttataatgagccttcttgctttac

SEQ ID NO: 5019 - DNA, 40 bp, Artificial Sequence
  Description of Artificial Sequence: Synthetic primer
gttttatcttcatgacataagcgagtggttttgaaacagg

SEQ ID NO: 5020 - DNA, 40 bp, Artificial Sequence
  Description of Artificial Sequence: Synthetic primer
cttctgggcccagagatgctaagtctctgccctgctctgc

SEQ ID NO: 5021 - DNA, 40 bp, Artificial Sequence
  Description of Artificial Sequence: Synthetic primer
atttcaaggcacagacctgtcatccactctctacctcttc

SEQ ID NO: 5022 - DNA, 40 bp, Artificial Sequence
  Description of Artificial Sequence: Synthetic primer
gcctggtgtacattttgtccacaaagccagtgccccactc

SEQ ID NO: 5023 - DNA, 40 bp, Artificial Sequence
  Description of Artificial Sequence: Synthetic primer
cacggtagcaggagtgtctctctttatctctttttcacag

SEQ ID NO: 5024 - DNA, 40 bp, Artificial Sequence
  Description of Artificial Sequence: Synthetic primer
ttgggtctgagctgccctgaccctgtgtgactgttttgtc

SEQ ID NO: 5025 - DNA, 40 bp, Artificial Sequence
  Description of Artificial Sequence: Synthetic primer
tctctcctgcctcccctgccatgccccgtctaccacagcc

SEQ ID NO: 5026 - DNA, 40 bp, Artificial Sequence
  Description of Artificial Sequence: Synthetic primer
ataacacccctctggctggattaaccaggaaaattcactt

SEQ ID NO: 5027 - DNA, 40 bp, Artificial Sequence
  Description of Artificial Sequence: Synthetic primer
tattattttaaaacaaagctgccagatgagactggcattt

SEQ ID NO: 5028 - DNA, 40 bp, Artificial Sequence
  Description of Artificial Sequence: Synthetic primer
aggtgtgtactttatttaaaaatataacttggaatttaac

SEQ ID NO: 5029 - DNA, 40 bp, Artificial Sequence
  Description of Artificial Sequence: Synthetic primer
aaacttgcattacttttattttcctactttctgttatttc

SEQ ID NO: 5030 - DNA, 40 bp, Artificial Sequence
  Description of Artificial Sequence: Synthetic primer
ctgcccaggtggtgctgccctgcccaggtggtagtaggtg

SEQ ID NO: 5031 - DNA, 40 bp, Artificial Sequence
  Description of Artificial Sequence: Synthetic primer
cccgactggctgggcagtgagccccgaggccttcctgtgc

SEQ ID NO: 5032 - DNA, 40 bp, Artificial Sequence
  Description of Artificial Sequence: Synthetic primer
ggtacccctttctgcactgacctaggatccctgactcttc

SEQ ID NO: 5033 - DNA, 40 bp, Artificial Sequence
  Description of Artificial Sequence: Synthetic primer
cctcctgagggtcccaggagccccggtccccagctcttac

SEQ ID NO: 5034 - DNA, 40 bp, Artificial Sequence
  Description of Artificial Sequence: Synthetic primer
gattacacaactcgtagaacaaaaagaaaggtatagtaac

SEQ ID NO: 5035 - DNA, 40 bp, Artificial Sequence
  Description of Artificial Sequence: Synthetic primer
tggtgttgaccttcccttgaaaccagtattctaatctttt

SEQ ID NO: 5036 - DNA, 40 bp, Artificial Sequence
  Description of Artificial Sequence: Synthetic primer
gccccgtggctgtagaactccagtgttgtctcttgtcctg

SEQ ID NO: 5037 - DNA, 40 bp, Artificial Sequence
  Description of Artificial Sequence: Synthetic primer
ggcatacgcatgtttaattaattaactgaaatggcagaac

SEQ ID NO: 5038 - DNA, 40 bp, Artificial Sequence
  Description of Artificial Sequence: Synthetic primer
atttcataacattcatcctagtttttttttgtaagataag

SEQ ID NO: 5039 - DNA, 40 bp, Artificial Sequence
  Description of Artificial Sequence: Synthetic primer
tgaaaaatgtctcatatatttaatctttcttctttcctcc

SEQ ID NO: 5040 - DNA, 40 bp, Artificial Sequence
  Description of Artificial Sequence: Synthetic primer
cacgtgaaacccaagccggaatcagcggaggaggatgcag

SEQ ID NO: 5041 - DNA, 40 bp, Artificial Sequence
  Description of Artificial Sequence: Synthetic primer
cccgcgttggcgtggttgactagtgcctcgcagcctcagc

SEQ ID NO: 5042 - DNA, 40 bp, Artificial Sequence
  Description of Artificial Sequence: Synthetic primer
ggaagctcaggcaccacctgaataagaaaccccagagtcc

SEQ ID NO: 5043 - DNA, 40 bp, Artificial Sequence
  Description of Artificial Sequence: Synthetic primer
gtggctctgccttgctccgtccctgacccgttctcacctc

SEQ ID NO: 5044 - DNA, 40 bp, Artificial Sequence
  Description of Artificial Sequence: Synthetic primer
aatatttcttgacctgcttccccatttcccgcccctgctc

SEQ ID NO: 5045 - DNA, 40 bp, Artificial Sequence
  Description of Artificial Sequence: Synthetic primer
tgaattgaccacttgcgactctcgacctgatgtatgtatg

SEQ ID NO: 5046 - DNA, 40 bp, Artificial Sequence
  Description of Artificial Sequence: Synthetic primer
actcattatgtgacctgactttttttttcctcttcatttc

SEQ ID NO: 5047 - DNA, 40 bp, Artificial Sequence
  Description of Artificial Sequence: Synthetic primer
gccatgctagttaaagaaaaaaagccattatcaaaatatg

SEQ ID NO: 5048 - DNA, 40 bp, Artificial Sequence
  Description of Artificial Sequence: Synthetic primer
ctactctccactaggagtcggcttccttcggctgcgttcg

SEQ ID NO: 5049 - DNA, 40 bp, Artificial Sequence
  Description of Artificial Sequence: Synthetic primer
tccgctcaggaggccctcaacactctcggagtcccctcac

SEQ ID NO: 5050 - DNA, 40 bp, Artificial Sequence
  Description of Artificial Sequence: Synthetic primer
tgttctactctaatgtgttgtcccttttattcttaccaac

SEQ ID NO: 5051 - DNA, 40 bp, Artificial Sequence
  Description of Artificial Sequence: Synthetic primer
tggagcaggcgcgcaactgtctttggtggagaaggatggg

SEQ ID NO: 5052 - DNA, 40 bp, Artificial Sequence
  Description of Artificial Sequence: Synthetic primer
tacccctccatcaactgatcacagaaaagatacccaattc

SEQ ID NO: 5053 - DNA, 40 bp, Artificial Sequence
  Description of Artificial Sequence: Synthetic primer
ccccgctgggccaggcaagagtataacctttctccttctc

SEQ ID NO: 5054 - DNA, 40 bp, Artificial Sequence
  Description of Artificial Sequence: Synthetic primer
tgcccggccagcagctccccagcctgcagagtccggccgg

SEQ ID NO: 5055 - DNA, 40 bp, Artificial Sequence
  Description of Artificial Sequence: Synthetic primer
ggttttggacaccaccctcctaagcacccgcacccctctc

SEQ ID NO: 5056 - DNA, 40 bp, Artificial Sequence
  Description of Artificial Sequence: Synthetic primer
ttgtgtccagccctcagccactcttccctctgctttgaac

SEQ ID NO: 5057 - DNA, 40 bp, Artificial Sequence
  Description of Artificial Sequence: Synthetic primer
aaggagggttctaggggagaataaagaggagcaggttgag

SEQ ID NO: 5058 - DNA, 40 bp, Artificial Sequence
  Description of Artificial Sequence: Synthetic primer
ccctccggatccaggactcttatcccaacgaaccacaagg

SEQ ID NO: 5059 - DNA, 40 bp, Artificial Sequence
  Description of Artificial Sequence: Synthetic primer
ccccatgtcaggggcacctctgatctcttgctatcctttc

SEQ ID NO: 5060 - DNA, 40 bp, Artificial Sequence
  Description of Artificial Sequence: Synthetic primer
ctacttgtgttctaactgtgttctctttcttcccccttcc

SEQ ID NO: 5061 - DNA, 40 bp, Artificial Sequence
  Description of Artificial Sequence: Synthetic primer
tcaaaaaaggcaatcattgtaggaaataggacaacaatag

SEQ ID NO: 5062 - DNA, 40 bp, Artificial Sequence
  Description of Artificial Sequence: Synthetic primer
gaaagaaaatcagtttgaagcaggaaaacaaaagtgacag

SEQ ID NO: 5063 - DNA, 40 bp, Artificial Sequence
  Description of Artificial Sequence: Synthetic primer
ctaggttttctgtcatctatgtactaataatgtctttttc

SEQ ID NO: 5064 - DNA, 40 bp, Artificial Sequence
  Description of Artificial Sequence: Synthetic primer
aacactattttcatcttttaaaattatttcaaaagcatgc

SEQ ID NO: 5065 - DNA, 40 bp, Artificial Sequence
  Description of Artificial Sequence: Synthetic primer
tttttatgcgaaaggtacaaattaatgataaagatgacac

SEQ ID NO: 5066 - DNA, 40 bp, Artificial Sequence
  Description of Artificial Sequence: Synthetic primer
cttcataaacattgtttttctgaaaaatattttccctttc

SEQ ID NO: 5067 - DNA, 40 bp, Artificial Sequence
  Description of Artificial Sequence: Synthetic primer
tagtagaacactaaagtatatgtcagagatttaaatgaat

SEQ ID NO: 5068 - DNA, 40 bp, Artificial Sequence
  Description of Artificial Sequence: Synthetic primer
gagggcaccggggcagctgtgtgtgtccagagtggtgctg

SEQ ID NO: 5069 - DNA, 40 bp, Artificial Sequence
  Description of Artificial Sequence: Synthetic primer
gcaagcctctggctttggtaagggctaccgtggggagcag

SEQ ID NO: 5070 - DNA, 40 bp, Artificial Sequence
  Description of Artificial Sequence: Synthetic primer
ttttgataaatcagtgacattgacaagttgtttttcttcc

SEQ ID NO: 5071 - DNA, 40 bp, Artificial Sequence
  Description of Artificial Sequence: Synthetic primer
ttgcaaaattggggaatcatattgccaatccagtaatttc

SEQ ID NO: 5072 - DNA, 40 bp, Artificial Sequence
  Description of Artificial Sequence: Synthetic primer
gcaacatgctcagcagcctgttcccctctcactctcttgc

SEQ ID NO: 5073 - DNA, 40 bp, Artificial Sequence
  Description of Artificial Sequence: Synthetic primer
ctagtcactgaagaatagctatgccatttgagaaacttac

SEQ ID NO: 5074 - DNA, 40 bp, Artificial Sequence
  Description of Artificial Sequence: Synthetic primer
cttagcctctgagagactaaccaactctccatgttttctc

SEQ ID NO: 5075 - DNA, 40 bp, Artificial Sequence
  Description of Artificial Sequence: Synthetic primer
gtttggcaggttaacagaggtctggcaaatgggcggaatg

SEQ ID NO: 5076 - DNA, 40 bp, Artificial Sequence
  Description of Artificial Sequence: Synthetic primer
aaaatagaggcctaaacttcccttcttttctccctgcttc

SEQ ID NO: 5077 - DNA, 40 bp, Artificial Sequence
  Description of Artificial Sequence: Synthetic primer
acactgcacgtctatgtgaaaccataggggctgggagatg

SEQ ID NO: 5078 - DNA, 40 bp, Artificial Sequence
  Description of Artificial Sequence: Synthetic primer
agagcaaagaggagacatgtatcaacgtatgcagggtgga

SEQ ID NO: 5079 - DNA, 40 bp, Artificial Sequence
  Description of Artificial Sequence: Synthetic primer
tgaaatctctggcagcattgctcacaccacagaagtattc

SEQ ID NO: 5080 - DNA, 40 bp, Artificial Sequence
  Description of Artificial Sequence: Synthetic primer
caataagtaatatgtagtaattatgaaataaaatgtatac

SEQ ID NO: 5081 - DNA, 40 bp, Artificial Sequence
  Description of Artificial Sequence: Synthetic primer
taagtcgctacctttagtgaggtctccataacaaaactac

SEQ ID NO: 5082 - DNA, 40 bp, Artificial Sequence
  Description of Artificial Sequence: Synthetic primer
gggtccagcctcccgaaccctctggccacttaccaagagc

SEQ ID NO: 5083 - DNA, 40 bp, Artificial Sequence
  Description of Artificial Sequence: Synthetic primer
agccccacccatcactcactgggcgttcatgcgtagcacc

SEQ ID NO: 5084 - DNA, 40 bp, Artificial Sequence
  Description of Artificial Sequence: Synthetic primer
ctcgggctccctgggctgtgcagacccctcagagacagac

SEQ ID NO: 5085 - DNA, 40 bp, Artificial Sequence
  Description of Artificial Sequence: Synthetic primer
agcccgagatcctgagatttaaggcttcactgggtctttc

SEQ ID NO: 5086 - DNA, 40 bp, Artificial Sequence
  Description of Artificial Sequence: Synthetic primer
gtgccagcactgtcttaactcttgcctcctccccgctctg

SEQ ID NO: 5087 - DNA, 40 bp, Artificial Sequence
  Description of Artificial Sequence: Synthetic primer
ccccaaagcccaacagcacccactactgacccacacaggc

SEQ ID NO: 5088 - DNA, 40 bp, Artificial Sequence
  Description of Artificial Sequence: Synthetic primer
ggcgctcctccacagctcgctggctcccgccgcggaaagg

SEQ ID NO: 5089 - DNA, 40 bp, Artificial Sequence
  Description of Artificial Sequence: Synthetic primer
ggggcgcccttcccgcgtgaggcgacggcggctctgctcg

SEQ ID NO: 5090 - DNA, 40 bp, Artificial Sequence
  Description of Artificial Sequence: Synthetic primer
ccttgtcctgcagagactgtgttttgaggcccatgtcatc

SEQ ID NO: 5091 - DNA, 40 bp, Artificial Sequence
  Description of Artificial Sequence: Synthetic primer
tgaccccttccacctttgggctgtgctcccaggcaccatg

SEQ ID NO: 5092 - DNA, 40 bp, Artificial Sequence
  Description of Artificial Sequence: Synthetic primer
catcttttctttaagcctccaatctttctttgttatacat

SEQ ID NO: 5093 - DNA, 40 bp, Artificial Sequence
  Description of Artificial Sequence: Synthetic primer
gaaatggttgttaaaatagttgattaataagttctgtctc

SEQ ID NO: 5094 - DNA, 40 bp, Artificial Sequence
  Description of Artificial Sequence: Synthetic primer
taagctttctagaacaaggcacgagacactgcttagaacc

SEQ ID NO: 5095 - DNA, 40 bp, Artificial Sequence
  Description of Artificial Sequence: Synthetic primer
ccgtgcgtctgctcacctgtcttgctttctgttcattttc

SEQ ID NO: 5096 - DNA, 40 bp, Artificial Sequence
  Description of Artificial Sequence: Synthetic primer
ccgggtgatgttcatcaggttgtagaggccgagttccttg

SEQ ID NO: 5097 - DNA, 40 bp, Artificial Sequence
  Description of Artificial Sequence: Synthetic primer
ggatcacgactgttctttaactacgcgctggtcatcttcg

SEQ ID NO: 5098 - DNA, 40 bp, Artificial Sequence
  Description of Artificial Sequence: Synthetic primer
tacttttgagaattttcattttgctttctattcttccttg

SEQ ID NO: 5099 - DNA, 40 bp, Artificial Sequence
  Description of Artificial Sequence: Synthetic primer
ctttagcttgatctggagttaatcgagaaatatgagacac

SEQ ID NO: 5100 - DNA, 40 bp, Artificial Sequence
  Description of Artificial Sequence: Synthetic primer
atctgggaaggctgaaaggaaacaaacccttcctgatgac

SEQ ID NO: 5101 - DNA, 40 bp, Artificial Sequence
  Description of Artificial Sequence: Synthetic primer
tttccctggagacgatggggacagggcatgccggccttac

SEQ ID NO: 5102 - DNA, 40 bp, Artificial Sequence
  Description of Artificial Sequence: Synthetic primer
cctctctggctactccagtcccaagctgcagaatccatcc

SEQ ID NO: 5103 - DNA, 40 bp, Artificial Sequence
  Description of Artificial Sequence: Synthetic primer
gccttgtggtctcagccaccttgatcttactccgatgttc

SEQ ID NO: 5104 - DNA, 40 bp, Artificial Sequence
  Description of Artificial Sequence: Synthetic primer
gatgcctgtgaggagcattcgggagcctcattaccactcc

SEQ ID NO: 5105 - DNA, 40 bp, Artificial Sequence
  Description of Artificial Sequence: Synthetic primer
atctgaaatctgcagaatatcagaaatacccttctttttc

SEQ ID NO: 5106 - DNA, 40 bp, Artificial Sequence
  Description of Artificial Sequence: Synthetic primer
ttaaaaatattaacaagtaactcataattaatttttttac

SEQ ID NO: 5107 - DNA, 40 bp, Artificial Sequence
  Description of Artificial Sequence: Synthetic primer
cacaaccacactaaggggaagataagaattaagcaacttg

SEQ ID NO: 5108 - DNA, 40 bp, Artificial Sequence
  Description of Artificial Sequence: Synthetic primer
gacagtttggatttcacagatagaaagtcaaatggagttc

SEQ ID NO: 5109 - DNA, 40 bp, Artificial Sequence
  Description of Artificial Sequence: Synthetic primer
caattaatatagcaaacctttttgcatgtgtgtgtgattc

SEQ ID NO: 5110 - DNA, 40 bp, Artificial Sequence
  Description of Artificial Sequence: Synthetic primer
atccagtctgtgagaggaaaaggaagcaataaatttgacc

SEQ ID NO: 5111 - DNA, 40 bp, Artificial Sequence
  Description of Artificial Sequence: Synthetic primer
gtgtttccaggcagatttacgtgacacttttcttggtgtg

SEQ ID NO: 5112 - DNA, 40 bp, Artificial Sequence
  Description of Artificial Sequence: Synthetic primer
caaccgtacatggatctactctagcttagtttctaaagtc

SEQ ID NO: 5113 - DNA, 40 bp, Artificial Sequence
  Description of Artificial Sequence: Synthetic primer
tttaaaaatgaaaccaacaattggactttttttttaatgc

SEQ ID NO: 5114 - DNA, 40 bp, Artificial Sequence
  Description of Artificial Sequence: Synthetic primer
acattgtgaccttaattttgtgatctcttgattttatttc

SEQ ID NO: 5115 - DNA, 40 bp, Artificial Sequence
  Description of Artificial Sequence: Synthetic primer
ttgtaattaacatagaattttcttagtttcattcttcctc

SEQ ID NO: 5116 - DNA, 40 bp, Artificial Sequence
  Description of Artificial Sequence: Synthetic primer
gagacacaagcaaagtctctatggtgattatgtttttgac

SEQ ID NO: 5117 - DNA, 40 bp, Artificial Sequence
  Description of Artificial Sequence: Synthetic primer
ggacatgttctatgccttatgccaaattagaatacaagag

SEQ ID NO: 5118 - DNA, 40 bp, Artificial Sequence
  Description of Artificial Sequence: Synthetic primer
catacaggtcacggggagccaatggttcagaaacaaatcg

SEQ ID NO: 5119 - DNA, 40 bp, Artificial Sequence
  Description of Artificial Sequence: Synthetic primer
cttattgtgtagaagatactccaatatgtttttcaagatg

SEQ ID NO: 5120 - DNA, 40 bp, Artificial Sequence
  Description of Artificial Sequence: Synthetic primer
agccccagtgatcttccagatagccctggacaaaccatgc

SEQ ID NO: 5121 - DNA, 40 bp, Artificial Sequence
  Description of Artificial Sequence: Synthetic primer
ttgaaatactagaagaatgtattatttctgccatgccaac

SEQ ID NO: 5122 - DNA, 40 bp, Artificial Sequence
  Description of Artificial Sequence: Synthetic primer
agggaaaagtcacaagcctttccgtgtgaaaaagataatg

SEQ ID NO: 5123 - DNA, 40 bp, Artificial Sequence
  Description of Artificial Sequence: Synthetic primer
aggcaaaagaaaataaggaatcagaggctaaagttaccag

SEQ ID NO: 5124 - DNA, 40 bp, Artificial Sequence
  Description of Artificial Sequence: Synthetic primer
tgccaaaaaagaaaaagccttcaagactcaagggtgataa

SEQ ID NO: 5125 - DNA, 40 bp, Artificial Sequence
  Description of Artificial Sequence: Synthetic primer
agttcgatctaattcagaaatttcaggccaaatgaaacag

SEQ ID NO: 5126 - DNA, 40 bp, Artificial Sequence
  Description of Artificial Sequence: Synthetic primer
aggttctggaaaaatgtcatatacatctccaggtagacag

SEQ ID NO: 5127 - DNA, 40 bp, Artificial Sequence
  Description of Artificial Sequence: Synthetic primer
aatctcagtcccactatagagtataatgatggaagaccag

SEQ ID NO: 5128 - DNA, 40 bp, Artificial Sequence
  Description of Artificial Sequence: Synthetic primer
gatctggaagatctcccacaggtaatactcccccggtgat

SEQ ID NO: 5129 - DNA, 40 bp, Artificial Sequence
  Description of Artificial Sequence: Synthetic primer
tgaaaggacagtcatgttgccagtattaaaattgtctgac

SEQ ID NO: 5130 - DNA, 40 bp, Artificial Sequence
  Description of Artificial Sequence: Synthetic primer
atttgacctcttttaccataaccatcactactactgacac

SEQ ID NO: 5131 - DNA, 40 bp, Artificial Sequence
  Description of Artificial Sequence: Synthetic primer
attggtaggcttatcatcttcatagtcatcttcttgacac

SEQ ID NO: 5132 - DNA, 40 bp, Artificial Sequence
  Description of Artificial Sequence: Synthetic primer
cttcctgtgtcgtctgattacatcctatttcatcttcagc

SEQ ID NO: 5133 - DNA, 40 bp, Artificial Sequence
  Description of Artificial Sequence: Synthetic primer
tatttttaggtacttctcgcttggtttgagctgtttgagg

SEQ ID NO: 5134 - DNA, 40 bp, Artificial Sequence
  Description of Artificial Sequence: Synthetic primer
cttggtttccttgccacaggtggaggtaattttgaagcag

SEQ ID NO: 5135 - DNA, 40 bp, Artificial Sequence
  Description of Artificial Sequence: Synthetic primer
ctgatttttgttgggtgcagaagaagacgcagatgcttgc

SEQ ID NO: 5136 - DNA, 40 bp, Artificial Sequence
  Description of Artificial Sequence: Synthetic primer
gctgctttgcaatagcttgtgtcttattagctgattgttg

SEQ ID NO: 5137 - DNA, 40 bp, Artificial Sequence
  Description of Artificial Sequence: Synthetic primer
agtgtcagatcttcacctaatatgccacccatatttctgg

SEQ ID NO: 5138 - DNA, 40 bp, Artificial Sequence
  Description of Artificial Sequence: Synthetic primer
tcattgtcctgcctcgagagattgaaggcatgtttgcttg

SEQ ID NO: 5139 - DNA, 40 bp, Artificial Sequence
  Description of Artificial Sequence: Synthetic primer
tggcattcttggataaacctgtttgtttggtaaggttctg

SEQ ID NO: 5140 - DNA, 40 bp, Artificial Sequence
  Description of Artificial Sequence: Synthetic primer
aggttcctgacctattgattggaagtctagaaggactttc

SEQ ID NO: 5141 - DNA, 40 bp, Artificial Sequence
  Description of Artificial Sequence: Synthetic primer
gattatcttttgaatctttaatgtttggatttgccttttc

SEQ ID NO: 5142 - DNA, 40 bp, Artificial Sequence
  Description of Artificial Sequence: Synthetic primer
atcctattatgacttgtcacaatgtcaccacattacatac

SEQ ID NO: 5143 - DNA, 40 bp, Artificial Sequence
  Description of Artificial Sequence: Synthetic primer
gtgaaacataaggttttctttttctgtttggcttgacttg

SEQ ID NO: 5144 - DNA, 40 bp, Artificial Sequence
  Description of Artificial Sequence: Synthetic primer
atttgaaatgaaaatacatacacataactgaatggggtct

SEQ ID NO: 5145 - DNA, 40 bp, Artificial Sequence
  Description of Artificial Sequence: Synthetic primer
ttcgtaactggtcacaatcccacagcacccttgtcttctc

SEQ ID NO: 5146 - DNA, 40 bp, Artificial Sequence
  Description of Artificial Sequence: Synthetic primer
gatattaaaacatatttccttattccaaaatgttaatacc

SEQ ID NO: 5147 - DNA, 40 bp, Artificial Sequence
  Description of Artificial Sequence: Synthetic primer
tctaagtattaaaaggatcttgtctaaacatcgtaactgg

SEQ ID NO: 5148 - DNA, 40 bp, Artificial Sequence
  Description of Artificial Sequence: Synthetic primer
gaggccaaggggatacttacgcgccacagagaagttgttg

SEQ ID NO: 5149 - DNA, 40 bp, Artificial Sequence
  Description of Artificial Sequence: Synthetic primer
gcgagggtctgacgggtagagtgtgcgtggctctcaccac

SEQ ID NO: 5150 - DNA, 40 bp, Artificial Sequence
  Description of Artificial Sequence: Synthetic primer
ctgtctgtttttcaggtcttctttgtgatccgcctcattg

SEQ ID NO: 5151 - DNA, 40 bp, Artificial Sequence
  Description of Artificial Sequence: Synthetic primer
cagaacaaccctgcggagctcacctcctccttcccacaac

SEQ ID NO: 5152 - DNA, 40 bp, Artificial Sequence
  Description of Artificial Sequence: Synthetic primer
caggagcggatgtttctctggctatggaagaggggaactg

SEQ ID NO: 5153 - DNA, 40 bp, Artificial Sequence
  Description of Artificial Sequence: Synthetic primer
aaaaaggattgatcctcagtgacaacccctccctcatgtg

SEQ ID NO: 5154 - DNA, 40 bp, Artificial Sequence
  Description of Artificial Sequence: Synthetic primer
ctggccattcctatagtgactgtgctgtggtgacttggtg

SEQ ID NO: 5155 - DNA, 40 bp, Artificial Sequence
  Description of Artificial Sequence: Synthetic primer
tgggcagaccctgagccctgccgaccccttcccaccacag

SEQ ID NO: 5156 - DNA, 40 bp, Artificial Sequence
  Description of Artificial Sequence: Synthetic primer
tcagctggtgctgttccctgtccttgggcactagctggac

SEQ ID NO: 5157 - DNA, 40 bp, Artificial Sequence
  Description of Artificial Sequence: Synthetic primer
gtgccatcgcccctgcaggcctcccttgggcgtttccagg

SEQ ID NO: 5158 - DNA, 40 bp, Artificial Sequence
  Description of Artificial Sequence: Synthetic primer
caagttatttgacaatcgttctctgaatgtattatttttc

SEQ ID NO: 5159 - DNA, 40 bp, Artificial Sequence
  Description of Artificial Sequence: Synthetic primer
aatttaaaatcaactcttaccaggatcttttcttatgtag

SEQ ID NO: 5160 - DNA, 40 bp, Artificial Sequence
  Description of Artificial Sequence: Synthetic primer
ccccgtcaggaagtgccgaaagaggaagagagtcgccggg

SEQ ID NO: 5161 - DNA, 40 bp, Artificial Sequence
  Description of Artificial Sequence: Synthetic primer
gaggtcccatgcccactcccaggccaccccttgtacctac

SEQ ID NO: 5162 - DNA, 40 bp, Artificial Sequence
  Description of Artificial Sequence: Synthetic primer
tcctggtggaggtgactgatgccctgaccctgttcctttc

SEQ ID NO: 5163 - DNA, 40 bp, Artificial Sequence
  Description of Artificial Sequence: Synthetic primer
gatggtcaggccatgccctcccatggttccccactcttgg

SEQ ID NO: 5164 - DNA, 40 bp, Artificial Sequence
  Description of Artificial Sequence: Synthetic primer
tgttctctaggacttaacttcacagctagtctatttttcc

SEQ ID NO: 5165 - DNA, 40 bp, Artificial Sequence
  Description of Artificial Sequence: Synthetic primer
agagatgagtccaattctagtcctagtagtctgaaaagtg

SEQ ID NO: 5166 - DNA, 40 bp, Artificial Sequence
  Description of Artificial Sequence: Synthetic primer
tgttactaccagtcataaaagaccttttcctccctcattc

SEQ ID NO: 5167 - DNA, 40 bp, Artificial Sequence
  Description of Artificial Sequence: Synthetic primer
atcacatctaaatgactgaatgagaacttaagtgggaaac

SEQ ID NO: 5168 - DNA, 40 bp, Artificial Sequence
  Description of Artificial Sequence: Synthetic primer
ctggcctgttttccccagcctccctcactctgtgtcttcc

SEQ ID NO: 5169 - DNA, 40 bp, Artificial Sequence
  Description of Artificial Sequence: Synthetic primer
gcccggccagcaccacccatggccctgccctgccttgtcc

SEQ ID NO: 5170 - DNA, 40 bp, Artificial Sequence
  Description of Artificial Sequence: Synthetic primer
cagggagcactgcattctcctgggtagtctctttttcaga

SEQ ID NO: 5171 - DNA, 40 bp, Artificial Sequence
  Description of Artificial Sequence: Synthetic primer
tcagaccaggtgctttaagctgaagtttcagtagttcatg

SEQ ID NO: 5172 - DNA, 40 bp, Artificial Sequence
  Description of Artificial Sequence: Synthetic primer
tctaaatttaatttgtttcatggtttattcgttgttttcc

SEQ ID NO: 5173 - DNA, 40 bp, Artificial Sequence
  Description of Artificial Sequence: Synthetic primer
tgtatacaactatacaccatttaagcaaggagcatttggg

SEQ ID NO: 5174 - DNA, 40 bp, Artificial Sequence
  Description of Artificial Sequence: Synthetic primer
ctggtgaaagacgccggattgacagccctggagactgaag

SEQ ID NO: 5175 - DNA, 40 bp, Artificial Sequence
  Description of Artificial Sequence: Synthetic primer
agccgagaagccgaggattgaatgggcatggagactgaac

SEQ ID NO: 5176 - DNA, 40 bp, Artificial Sequence
  Description of Artificial Sequence: Synthetic primer
ggcagcccggcagcaggtgcccgggagcccaggagcccgg

SEQ ID NO: 5177 - DNA, 40 bp, Artificial Sequence
  Description of Artificial Sequence: Synthetic primer
ggggcttcctagggagctcgctcagcctcacttctcgacc

SEQ ID NO: 5178 - DNA, 40 bp, Artificial Sequence
  Description of Artificial Sequence: Synthetic primer
gcacagcaggccagtgtgcagggtggcaagtggctcctga

SEQ ID NO: 5179 - DNA, 40 bp, Artificial Sequence
  Description of Artificial Sequence: Synthetic primer
ctgcttgccacaggtctccccaaggcgcactggcctcatc

SEQ ID NO: 5180 - DNA, 40 bp, Artificial Sequence
  Description of Artificial Sequence: Synthetic primer
gaaagcgcgcttctcccaagcattcacacggcctcccttc

SEQ ID NO: 5181 - DNA, 40 bp, Artificial Sequence
  Description of Artificial Sequence: Synthetic primer
ttgaaaaagaaccaccgcaatgaacagccagcaagagtgg

SEQ ID NO: 5182 - DNA, 40 bp, Artificial Sequence
  Description of Artificial Sequence: Synthetic primer
aatgcctctgcctaatggaaaatggtgaagaccccctgct

SEQ ID NO: 5183 - DNA, 40 bp, Artificial Sequence
  Description of Artificial Sequence: Synthetic primer
ctttcggggttcttgtcatccctaactagtttcttccttc

SEQ ID NO: 5184 - DNA, 40 bp, Artificial Sequence
  Description of Artificial Sequence: Synthetic primer
cctaaaccaaaatcaaataaaatcaaattactatcaaagg

SEQ ID NO: 5185 - DNA, 40 bp, Artificial Sequence
  Description of Artificial Sequence: Synthetic primer
aataatggtatggaagtttctgttgtcttgtaataaaggc

SEQ ID NO: 5186 - DNA, 40 bp, Artificial Sequence
  Description of Artificial Sequence: Synthetic primer
cctagctcacactggacaacaggggaggaaatcaggagag

SEQ ID NO: 5187 - DNA, 40 bp, Artificial Sequence
  Description of Artificial Sequence: Synthetic primer
aaaggtatttaccttgtcttttgataacctcctccacatc

SEQ ID NO: 5188 - DNA, 40 bp, Artificial Sequence
  Description of Artificial Sequence: Synthetic primer
acttcttatgaaagatttgaccagatctttatattaaagg

SEQ ID NO: 5189 - DNA, 40 bp, Artificial Sequence
  Description of Artificial Sequence: Synthetic primer
aatcatgataacagaacaatgaatatagaataaaaataac

SEQ ID NO: 5190 - DNA, 40 bp, Artificial Sequence
  Description of Artificial Sequence: Synthetic primer
ggagcactttaaatattaaaatgccaaaagtattatcatc

SEQ ID NO: 5191 - DNA, 40 bp, Artificial Sequence
  Description of Artificial Sequence: Synthetic primer
tggcgattgctaaaaggtaaatttaataaaaaggtgcttc

SEQ ID NO: 5192 - DNA, 40 bp, Artificial Sequence
  Description of Artificial Sequence: Synthetic primer
aaacaagcagacaccatcctgcccgtcaacgtgatgattc

SEQ ID NO: 5193 - DNA, 40 bp, Artificial Sequence
  Description of Artificial Sequence: Synthetic primer
acccctgcctcaaccctcacgtgctctgtgctgcccaacc

SEQ ID NO: 5194 - DNA, 40 bp, Artificial Sequence
  Description of Artificial Sequence: Synthetic primer
catgatgatctgtccctcacagcagggtcttctctgtttc

SEQ ID NO: 5195 - DNA, 40 bp, Artificial Sequence
  Description of Artificial Sequence: Synthetic primer
tggtccctggtgtcaggaaaatgctggctgacctaaagcc

SEQ ID NO: 5196 - DNA, 40 bp, Artificial Sequence
  Description of Artificial Sequence: Synthetic primer
gttcatttttctctgcactggcccagcagcaccagagtcc

SEQ ID NO: 5197 - DNA, 40 bp, Artificial Sequence
  Description of Artificial Sequence: Synthetic primer
cattactctttgaccagaattgtttactggcttatttttc

SEQ ID NO: 5198 - DNA, 40 bp, Artificial Sequence
  Description of Artificial Sequence: Synthetic primer
ccagatggccacatgctgggttgctgaccgccccccggtg

SEQ ID NO: 5199 - DNA, 40 bp, Artificial Sequence
  Description of Artificial Sequence: Synthetic primer
gggccttccctgtgctgtgtggcctcctgcgggtgagtgg

SEQ ID NO: 5200 - DNA, 40 bp, Artificial Sequence
  Description of Artificial Sequence: Synthetic primer
aggggaaaaagaaaaacgactaattcatcttttcctgatc

SEQ ID NO: 5201 - DNA, 40 bp, Artificial Sequence
  Description of Artificial Sequence: Synthetic primer
tcacgtaggcaacattattgacttgttttccccacctctc

SEQ ID NO: 5202 - DNA, 40 bp, Artificial Sequence
  Description of Artificial Sequence: Synthetic primer
tttgttttgttgtgagattgtctcaaattttggctttatc

SEQ ID NO: 5203 - DNA, 40 bp, Artificial Sequence
  Description of Artificial Sequence: Synthetic primer
ggggttaatatcaagccaattccttgcttcatctgctttg

SEQ ID NO: 5204 - DNA, 40 bp, Artificial Sequence
  Description of Artificial Sequence: Synthetic primer
tggaggagttgaagtttgtgggaggggagagtggtactcc

SEQ ID NO: 5205 - DNA, 40 bp, Artificial Sequence
  Description of Artificial Sequence: Synthetic primer
gtaaagcacgttgggctgggcctgatggatctggactgac

SEQ ID NO: 5206 - DNA, 40 bp, Artificial Sequence
  Description of Artificial Sequence: Synthetic primer
gtctgtttctctatgtaaactaaactacctgcttcacctc

SEQ ID NO: 5207 - DNA, 40 bp, Artificial Sequence
  Description of Artificial Sequence: Synthetic primer
ggacttgcccttattagctagtaggaagatgagacactac

SEQ ID NO: 5208 - DNA, 40 bp, Artificial Sequence
  Description of Artificial Sequence: Synthetic primer
aacgaattaattagcttttattcttctattcattttcttg

SEQ ID NO: 5209 - DNA, 40 bp, Artificial Sequence
  Description of Artificial Sequence: Synthetic primer
tcaccaggcacatggggatggtgtggctgcctgactgagg

SEQ ID NO: 5210 - DNA, 40 bp, Artificial Sequence
  Description of Artificial Sequence: Synthetic primer
agatcttaatacaaggatatgttattaatgatatggaaag

SEQ ID NO: 5211 - DNA, 40 bp, Artificial Sequence
  Description of Artificial Sequence: Synthetic primer
cattgtacatggctctcatttttggtactggattaaatat

SEQ ID NO: 5212 - DNA, 40 bp, Artificial Sequence
  Description of Artificial Sequence: Synthetic primer
gtacttctatgaatttacaagaaaaatcaatcttctgttc

SEQ ID NO: 5213 - DNA, 40 bp, Artificial Sequence
  Description of Artificial Sequence: Synthetic primer
aacacattactttgatgacaaatctcagagacccactccc

SEQ ID NO: 5214 - DNA, 40 bp, Artificial Sequence
  Description of Artificial Sequence: Synthetic primer
catacaatctattcaactgaaacccaaggaaaagttaagg

SEQ ID NO: 5215 - DNA, 40 bp, Artificial Sequence
  Description of Artificial Sequence: Synthetic primer
gtatttttgtaaaataacattctttgtttcttttctttag

SEQ ID NO: 5216 - DNA, 40 bp, Artificial Sequence
  Description of Artificial Sequence: Synthetic primer
ctcccggccagaggcacggctgcagcaccgcagcccacgc

SEQ ID NO: 5217 - DNA, 40 bp, Artificial Sequence
  Description of Artificial Sequence: Synthetic primer
ccaagtgtggaggggcacttgcctggtctcacagccttgc

SEQ ID NO: 5218 - DNA, 40 bp, Artificial Sequence
  Description of Artificial Sequence: Synthetic primer
ttaattctgtcttaagtttatgataattatttctattgtc

SEQ ID NO: 5219 - DNA, 40 bp, Artificial Sequence
  Description of Artificial Sequence: Synthetic primer
actagataataattagaagaattctcacctttgacatctc

SEQ ID NO: 5220 - DNA, 40 bp, Artificial Sequence
  Description of Artificial Sequence: Synthetic primer
gagaaaggactggtgaaaggtggtggggatctaagtccag

SEQ ID NO: 5221 - DNA, 40 bp, Artificial Sequence
  Description of Artificial Sequence: Synthetic primer
aatctatgtctgtccccgacattttcctccatgtgttgcc

SEQ ID NO: 5222 - DNA, 40 bp, Artificial Sequence
  Description of Artificial Sequence: Synthetic primer
tccccagaaaaatgacccacgtgtttcccatttgtgcttg

SEQ ID NO: 5223 - DNA, 40 bp, Artificial Sequence
  Description of Artificial Sequence: Synthetic primer
aaactgattcgacattctctgcagaagcccctgcaatttg

SEQ ID NO: 5224 - DNA, 40 bp, Artificial Sequence
  Description of Artificial Sequence: Synthetic primer
gcccaggtgacaccaacccagcttagacttgattcctctg

SEQ ID NO: 5225 - DNA, 40 bp, Artificial Sequence
  Description of Artificial Sequence: Synthetic primer
tcctctgttcctgccatgacccctcctgctgcatccactc

SEQ ID NO: 5226 - DNA, 40 bp, Artificial Sequence
  Description of Artificial Sequence: Synthetic primer
aaggcaggggagtagggccaggaaggggctgaggtcactc

SEQ ID NO: 5227 - DNA, 40 bp, Artificial Sequence
  Description of Artificial Sequence: Synthetic primer
ctcaggtactgtgtatatacttacttctccccctcctctg

SEQ ID NO: 5228 - DNA, 40 bp, Artificial Sequence
  Description of Artificial Sequence: Synthetic primer
ttctgagtccctgctcaatctcccacccctcattttgctg

SEQ ID NO: 5229 - DNA, 40 bp, Artificial Sequence
  Description of Artificial Sequence: Synthetic primer
agtggcagtgcttagcttggatcctgagagggagtaccag

SEQ ID NO: 5230 - DNA, 40 bp, Artificial Sequence
  Description of Artificial Sequence: Synthetic primer
ttttttccataatttcagggacagccaagatagaaacagc

SEQ ID NO: 5231 - DNA, 40 bp, Artificial Sequence
  Description of Artificial Sequence: Synthetic primer
agatttggggaagctaattgctagtaatttgccataaaac

SEQ ID NO: 5232 - DNA, 40 bp, Artificial Sequence
  Description of Artificial Sequence: Synthetic primer
ttcaccaatccaaatgtttggggttaaatagcttatcttt

SEQ ID NO: 5233 - DNA, 40 bp, Artificial Sequence
  Description of Artificial Sequence: Synthetic primer
aaaagatcttatggtcattatttctttgttgtttttatcc

SEQ ID NO: 5234 - DNA, 40 bp, Artificial Sequence
  Description of Artificial Sequence: Synthetic primer
ttcctgaacttctggaaacttcttcaggtttagactcagg

SEQ ID NO: 5235 - DNA, 40 bp, Artificial Sequence
  Description of Artificial Sequence: Synthetic primer
tcttccttctccatttcatctacacgtacattacaaatac

SEQ ID NO: 5236 - DNA, 40 bp, Artificial Sequence
  Description of Artificial Sequence: Synthetic primer
tccaactttgtttatgctgtgggctattatcctgatcttc

SEQ ID NO: 5237 - DNA, 40 bp, Artificial Sequence
  Description of Artificial Sequence: Synthetic primer
ttgattctttgagacatgccgacgtatctgaatggaaatc

SEQ ID NO: 5238 - DNA, 40 bp, Artificial Sequence
  Description of Artificial Sequence: Synthetic primer
atttctacgaaatcagaaaatatttgtaattcaacaagag

SEQ ID NO: 5239 - DNA, 40 bp, Artificial Sequence
  Description of Artificial Sequence: Synthetic primer
ctttgtcaacgagatacagtaggtgtaatctatgacaatg

SEQ ID NO: 5240 - DNA, 40 bp, Artificial Sequence
  Description of Artificial Sequence: Synthetic primer
attatcttttccaagttgaagaaaaatcaggtgggattaa

SEQ ID NO: 5241 - DNA, 40 bp, Artificial Sequence
  Description of Artificial Sequence: Synthetic primer
atgaaggaggagctaaaaatattgaagtaaaagatttggg

SEQ ID NO: 5242 - DNA, 40 bp, Artificial Sequence
  Description of Artificial Sequence: Synthetic primer
ggtggcaccaaggcagggcccttgctgagcccccgcttgc

SEQ ID NO: 5243 - DNA, 40 bp, Artificial Sequence
  Description of Artificial Sequence: Synthetic primer
ccctcctggccaccctgccaggccgccccaccgcactcac

SEQ ID NO: 5244 - DNA, 40 bp, Artificial Sequence
  Description of Artificial Sequence: Synthetic primer
cacaggaagagtgggctaaatgaaattgttttatcttttg

SEQ ID NO: 5245 - DNA, 40 bp, Artificial Sequence
  Description of Artificial Sequence: Synthetic primer
gtggtcagtctcctttcacttttataccccgtagattttc

SEQ ID NO: 5246 - DNA, 40 bp, Artificial Sequence
  Description of Artificial Sequence: Synthetic primer
ggagtgatgtccaccctgttcctggccctgctgactcctc

SEQ ID NO: 5247 - DNA, 40 bp, Artificial Sequence
  Description of Artificial Sequence: Synthetic primer
aggactcccagcccctgcagaacaggatgcagagacagag

SEQ ID NO: 5248 - DNA, 40 bp, Artificial Sequence
  Description of Artificial Sequence: Synthetic primer
ggctgctgactcagaaccatgagcctgtgtgtaagtcctg

SEQ ID NO: 5249 - DNA, 40 bp, Artificial Sequence
  Description of Artificial Sequence: Synthetic primer
agctggtggacgctagccatgcgcgccccgggagcagagg

SEQ ID NO: 5250 - DNA, 40 bp, Artificial Sequence
  Description of Artificial Sequence: Synthetic primer
ttgagggacaagactgttctcacgtgccttcccatctctc

SEQ ID NO: 5251 - DNA, 40 bp, Artificial Sequence
  Description of Artificial Sequence: Synthetic primer
accactctcaggtacagacaccctccaaatcagaagacac

SEQ ID NO: 5252 - DNA, 40 bp, Artificial Sequence
  Description of Artificial Sequence: Synthetic primer
acatcttgtcatctcaaggaggggataaagggagctaaag

SEQ ID NO: 5253 - DNA, 40 bp, Artificial Sequence
  Description of Artificial Sequence: Synthetic primer
gtggcagttgcaaatgccctttttgcttttctcctctggc

SEQ ID NO: 5254 - DNA, 40 bp, Artificial Sequence
  Description of Artificial Sequence: Synthetic primer
ggcagatgtgtatatatgtatatttataatttttcatttc

SEQ ID NO: 5255 - DNA, 40 bp, Artificial Sequence
  Description of Artificial Sequence: Synthetic primer
caaagtttcaataacattaaaatttgcactctgtactaac

SEQ ID NO: 5256 - DNA, 40 bp, Artificial Sequence
  Description of Artificial Sequence: Synthetic primer
tttgttaatgtgatggaatagttttcaaattatccttttt

SEQ ID NO: 5257 - DNA, 40 bp, Artificial Sequence
  Description of Artificial Sequence: Synthetic primer
tgagtgtgtgtgtgtctgtgtgtgtttatctgtaagtcag

SEQ ID NO: 5258 - DNA, 40 bp, Artificial Sequence
  Description of Artificial Sequence: Synthetic primer
aggtgggtcgggcaggaggtgtgggttgggcaggctggtg

SEQ ID NO: 5259 - DNA, 40 bp, Artificial Sequence
  Description of Artificial Sequence: Synthetic primer
acagtggtatggccaaatcagtgagctgccccactcctcc

SEQ ID NO: 5260 - DNA, 40 bp, Artificial Sequence
  Description of Artificial Sequence: Synthetic primer
cagaataaagtcctttctttctcatcgtttaacaaaatac

SEQ ID NO: 5261 - DNA, 40 bp, Artificial Sequence
  Description of Artificial Sequence: Synthetic primer
acagattcagtaaaggcacacctggctgggatgaatgtac

SEQ ID NO: 5262 - DNA, 40 bp, Artificial Sequence
  Description of Artificial Sequence: Synthetic primer
cgcggaccgagctgggagaggggttccggcccccgacgtg

SEQ ID NO: 5263 - DNA, 40 bp, Artificial Sequence
  Description of Artificial Sequence: Synthetic primer
ccagcagcagcgggagggcgcgcggctactcagcccaacc

SEQ ID NO: 5264 - DNA, 40 bp, Artificial Sequence
  Description of Artificial Sequence: Synthetic primer
ttgttcctagcttgggaatgcagtcacagtgacagacaag

SEQ ID NO: 5265 - DNA, 40 bp, Artificial Sequence
  Description of Artificial Sequence: Synthetic primer
aattactcaagcaggcctgacttttagtatttgctttttg

SEQ ID NO: 5266 - DNA, 40 bp, Artificial Sequence
  Description of Artificial Sequence: Synthetic primer
atggtgcagtatttttatgttaaataatgttgtctgtttc

SEQ ID NO: 5267 - DNA, 40 bp, Artificial Sequence
  Description of Artificial Sequence: Synthetic primer
gggctctaccaaaaacattttgaaaaagaaaatgaaggtc

SEQ ID NO: 5268 - DNA, 40 bp, Artificial Sequence
  Description of Artificial Sequence: Synthetic primer
caagttagtttacaagctggaaatctcaaatccaaaatac

SEQ ID NO: 5269 - DNA, 40 bp, Artificial Sequence
  Description of Artificial Sequence: Synthetic primer
atatgtgagactgcttcatctccaaaatctaattttaacc

SEQ ID NO: 5270 - DNA, 40 bp, Artificial Sequence
  Description of Artificial Sequence: Synthetic primer
gcaggtgctctgggctcacggcttctgcctttcctctttg

SEQ ID NO: 5271 - DNA, 40 bp, Artificial Sequence
  Description of Artificial Sequence: Synthetic primer
gggcggacggacggccgccctgcctacctccaactgtgcc

SEQ ID NO: 5272 - DNA, 40 bp, Artificial Sequence
  Description of Artificial Sequence: Synthetic primer
cggcaaggagggctcggacgccaaccctttcctgagcaag

SEQ ID NO: 5273 - DNA, 40 bp, Artificial Sequence
  Description of Artificial Sequence: Synthetic primer
cctcccctgcctccttgccgcggctgccctcgcccttcag

SEQ ID NO: 5274 - DNA, 40 bp, Artificial Sequence
  Description of Artificial Sequence: Synthetic primer
tgctctccttcaggattctattaatgaagcattttacagc

SEQ ID NO: 5275 - DNA, 40 bp, Artificial Sequence
  Description of Artificial Sequence: Synthetic primer
atacaagtttcagatatttaatgacttagtattgtctcac

SEQ ID NO: 5276 - DNA, 40 bp, Artificial Sequence
  Description of Artificial Sequence: Synthetic primer
agcaatacatctgatgaaatattaattgagctccacagac

SEQ ID NO: 5277 - DNA, 40 bp, Artificial Sequence
  Description of Artificial Sequence: Synthetic primer
ttgccattttctcttttcttgttggtgtttgttgtcatag

SEQ ID NO: 5278 - DNA, 40 bp, Artificial Sequence
  Description of Artificial Sequence: Synthetic primer
gtaaatgcagttgaaggggctgctcttattaacaaatatc

SEQ ID NO: 5279 - DNA, 40 bp, Artificial Sequence
  Description of Artificial Sequence: Synthetic primer
tttttttcctctatagtcgcttgtattggacagaagtttc

SEQ ID NO: 5280 - DNA, 40 bp, Artificial Sequence
  Description of Artificial Sequence: Synthetic primer
aagaaatactgcatgggtatttaaaggcttttgttttctg

SEQ ID NO: 5281 - DNA, 40 bp, Artificial Sequence
  Description of Artificial Sequence: Synthetic primer
aacagcatcagtaaatatagttagataaaaaccaatgctc

SEQ ID NO: 5282 - DNA, 40 bp, Artificial Sequence
  Description of Artificial Sequence: Synthetic primer
tttaacctaaataaacattaaagatgtctcatggaaaaac

SEQ ID NO: 5283 - DNA, 40 bp, Artificial Sequence
  Description of Artificial Sequence: Synthetic primer
atatcacattgtaattggtagatttcaagtattatacaca

SEQ ID NO: 5284 - DNA, 40 bp, Artificial Sequence
  Description of Artificial Sequence: Synthetic primer
actctagaataggcgtgtggtggcatccatctcagcgttc

SEQ ID NO: 5285 - DNA, 40 bp, Artificial Sequence
  Description of Artificial Sequence: Synthetic primer
gacaactggatgtaagcttagtacaccttgtttgtgcatg

SEQ ID NO: 5286 - DNA, 40 bp, Artificial Sequence
  Description of Artificial Sequence: Synthetic primer
catagagtgaataatagtttgtaaaagaatcactgaaagc

SEQ ID NO: 5287 - DNA, 40 bp, Artificial Sequence
  Description of Artificial Sequence: Synthetic primer
ttgattttgctgtcagaaacaattaacatgccatacttta

SEQ ID NO: 5288 - DNA, 40 bp, Artificial Sequence
  Description of Artificial Sequence: Synthetic primer
cccgccctcttcccggcccagggcgccggcccacccttcc

SEQ ID NO: 5289 - DNA, 40 bp, Artificial Sequence
  Description of Artificial Sequence: Synthetic primer
cccactccgctcccacctcccgcccgccacgggccggtta

SEQ ID NO: 5290 - DNA, 40 bp, Artificial Sequence
  Description of Artificial Sequence: Synthetic primer
tttcactgccccaagagtacctgccatgtgcccccaatcc

SEQ ID NO: 5291 - DNA, 40 bp, Artificial Sequence
  Description of Artificial Sequence: Synthetic primer
ctctgccacttgagctctgctgatcctctttttctctctg

SEQ ID NO: 5292 - DNA, 40 bp, Artificial Sequence
  Description of Artificial Sequence: Synthetic primer
ctattactatgattattactatttgcttttgactttaccc

SEQ ID NO: 5293 - DNA, 40 bp, Artificial Sequence
  Description of Artificial Sequence: Synthetic primer
gaatgttccaacctgggagggatcggggtgggaaatcagc

SEQ ID NO: 5294 - DNA, 40 bp, Artificial Sequence
  Description of Artificial Sequence: Synthetic primer
cagaggtcatgagaagctggatgagaccactggggatgtc

SEQ ID NO: 5295 - DNA, 40 bp, Artificial Sequence
  Description of Artificial Sequence: Synthetic primer
cccagctgaagggctcttggcttcccctgcccccatctac

SEQ ID NO: 5296 - DNA, 40 bp, Artificial Sequence
  Description of Artificial Sequence: Synthetic primer
tatactatattttcaagcaagattgctctcaaaaagatac

SEQ ID NO: 5297 - DNA, 40 bp, Artificial Sequence
  Description of Artificial Sequence: Synthetic primer
aacctgggcattaactgaatatcattaaggaacttgatat

SEQ ID NO: 5298 - DNA, 40 bp, Artificial Sequence
  Description of Artificial Sequence: Synthetic primer
ccttcccctcactgtatcaagtgctcatttgtgaattacc

SEQ ID NO: 5299 - DNA, 40 bp, Artificial Sequence
  Description of Artificial Sequence: Synthetic primer
agcaacagacacaatttaggggattaacaaaaataactac

SEQ ID NO: 5300 - DNA, 40 bp, Artificial Sequence
  Description of Artificial Sequence: Synthetic primer
tgttctccccttcccgggagctgggctctctggggcgttg

SEQ ID NO: 5301 - DNA, 40 bp, Artificial Sequence
  Description of Artificial Sequence: Synthetic primer
gtgctcacggggccaagctccagggtccgtgccccccacc

SEQ ID NO: 5302 - DNA, 40 bp, Artificial Sequence
  Description of Artificial Sequence: Synthetic primer
cccggagaagaggaaggagctccaccccagccccgcgaag

SEQ ID NO: 5303 - DNA, 40 bp, Artificial Sequence
  Description of Artificial Sequence: Synthetic primer
ggcatccgcgcagggcgggccctcaaatgacctcaccttc

SEQ ID NO: 5304 - DNA, 40 bp, Artificial Sequence
  Description of Artificial Sequence: Synthetic primer
accccatgggtgggaggctctgtgcccatccctgttcttc

SEQ ID NO: 5305 - DNA, 40 bp, Artificial Sequence
  Description of Artificial Sequence: Synthetic primer
cccagcagaggggaccccaggcatccgcactcggggagag

SEQ ID NO: 5306 - DNA, 40 bp, Artificial Sequence
  Description of Artificial Sequence: Synthetic primer
ccaactagctacacaggcagtgacaaatatcagggtgcag

SEQ ID NO: 5307 - DNA, 40 bp, Artificial Sequence
  Description of Artificial Sequence: Synthetic primer
gggattaaccttgcactcttgtggttgtttttcccattac

SEQ ID NO: 5308 - DNA, 40 bp, Artificial Sequence
  Description of Artificial Sequence: Synthetic primer
cagcctctgtcactcaccagaagaagttcaccatcagttg

SEQ ID NO: 5309 - DNA, 40 bp, Artificial Sequence
  Description of Artificial Sequence: Synthetic primer
ccttagttccttaccttccaatcctgtatcctttacctac

SEQ ID NO: 5310 - DNA, 40 bp, Artificial Sequence
  Description of Artificial Sequence: Synthetic primer
agtgggcagggaagagctggcaggacacagaaggaagtgg

SEQ ID NO: 5311 - DNA, 40 bp, Artificial Sequence
  Description of Artificial Sequence: Synthetic primer
cctcctctgtagctctcctgggtctcttttgtgctaatcc

SEQ ID NO: 5312 - DNA, 40 bp, Artificial Sequence
  Description of Artificial Sequence: Synthetic primer
tggaggtttttgcacacgtgagggaaaggaggtagcaaac

SEQ ID NO: 5313 - DNA, 40 bp, Artificial Sequence
  Description of Artificial Sequence: Synthetic primer
atgaaatattttctttaaacaatattccctctattattcc

SEQ ID NO: 5314 - DNA, 40 bp, Artificial Sequence
  Description of Artificial Sequence: Synthetic primer
actcccacttgaggtcactgtattcacttggtttgctcag

SEQ ID NO: 5315 - DNA, 40 bp, Artificial Sequence
  Description of Artificial Sequence: Synthetic primer
ctactattctgaggtgaagcctttgaaatccgattttgcc

SEQ ID NO: 5316 - DNA, 40 bp, Artificial Sequence
  Description of Artificial Sequence: Synthetic primer
gtgcatcttgagtcagtccatatgacagagcctggtcttg

SEQ ID NO: 5317 - DNA, 40 bp, Artificial Sequence
  Description of Artificial Sequence: Synthetic primer
ggctaaggtcatagtacatgtgagagtaccagccacctac

SEQ ID NO: 5318 - DNA, 40 bp, Artificial Sequence
  Description of Artificial Sequence: Synthetic primer
ctccaagtcctgtgatggtttttctcagggccccccaagg

SEQ ID NO: 5319 - DNA, 40 bp, Artificial Sequence
  Description of Artificial Sequence: Synthetic primer
tgctgctctctggcacctcacccctgtttgcctcccaaag

SEQ ID NO: 5320 - DNA, 40 bp, Artificial Sequence
  Description of Artificial Sequence: Synthetic primer
ggggagaggaggatagcacggaagaaggggagaaggactc

SEQ ID NO: 5321 - DNA, 40 bp, Artificial Sequence
  Description of Artificial Sequence: Synthetic primer
gacccactgccccgtcttgcgagagcaccgctgacactgt

SEQ ID NO: 5322 - DNA, 40 bp, Artificial Sequence
  Description of Artificial Sequence: Synthetic primer
ttttctttagatcggccatgcagaaactgaccctgatttg

SEQ ID NO: 5323 - DNA, 40 bp, Artificial Sequence
  Description of Artificial Sequence: Synthetic primer
taatatgtaccttaagaatttaatgggaaaataattagac

SEQ ID NO: 5324 - DNA, 40 bp, Artificial Sequence
  Description of Artificial Sequence: Synthetic primer
tagtgtagagcttactcctttctttttgagcagtacacag

SEQ ID NO: 5325 - DNA, 40 bp, Artificial Sequence
  Description of Artificial Sequence: Synthetic primer
ggtcaaagattggtcatttttctactgatgcctgtttttc

SEQ ID NO: 5326 - DNA, 40 bp, Artificial Sequence
  Description of Artificial Sequence: Synthetic primer
aaccagcttgctagctcctgcttctctctaaagaattcac

SEQ ID NO: 5327 - DNA, 40 bp, Artificial Sequence
  Description of Artificial Sequence: Synthetic primer
aaaacaaattctgtcatgtaatctctatcttgggtcgtgg

SEQ ID NO: 5328 - DNA, 40 bp, Artificial Sequence
  Description of Artificial Sequence: Synthetic primer
tttaaagttcttaaagcatcgccaaagatttggtaggaag

SEQ ID NO: 5329 - DNA, 40 bp, Artificial Sequence
  Description of Artificial Sequence: Synthetic primer
aatattttaataagagggtcttctactaatgggacatctc

SEQ ID NO: 5330 - DNA, 40 bp, Artificial Sequence
  Description of Artificial Sequence: Synthetic primer
ataactattctgactcatatttcaaaggcagataatatag

SEQ ID NO: 5331 - DNA, 40 bp, Artificial Sequence
  Description of Artificial Sequence: Synthetic primer
tttgctaacaaagtcttcctcttttggcttctcttcacag

SEQ ID NO: 5332 - DNA, 40 bp, Artificial Sequence
  Description of Artificial Sequence: Synthetic primer
tcaatggacacttatggaaactcatttgaacattaataac

SEQ ID NO: 5333 - DNA, 40 bp, Artificial Sequence
  Description of Artificial Sequence: Synthetic primer
aacccaaattttgtgattgttctcatgcccttccctacag

SEQ ID NO: 5334 - DNA, 40 bp, Artificial Sequence
  Description of Artificial Sequence: Synthetic primer
gggcctctgaagaccaaatacttgcaatgtaacaaaactg

SEQ ID NO: 5335 - DNA, 40 bp, Artificial Sequence
  Description of Artificial Sequence: Synthetic primer
actgttaacatttcttttttgtcttttgaattgaatattg

SEQ ID NO: 5336 - DNA, 40 bp, Artificial Sequence
  Description of Artificial Sequence: Synthetic primer
gcctgccatttcacgatgacctctcatcctatcttgcttc

SEQ ID NO: 5337 - DNA, 40 bp, Artificial Sequence
  Description of Artificial Sequence: Synthetic primer
atgacaatggcattaggggaccaagggactgggaaaagtc

SEQ ID NO: 5338 - DNA, 40 bp, Artificial Sequence
  Description of Artificial Sequence: Synthetic primer
cgggacagctgattctgaaaaggtgtaacaaagaagaatc

SEQ ID NO: 5339 - DNA, 40 bp, Artificial Sequence
  Description of Artificial Sequence: Synthetic primer
tttataaaaactctggcaggaaagacaggaaaagagcatc

SEQ ID NO: 5340 - DNA, 40 bp, Artificial Sequence
  Description of Artificial Sequence: Synthetic primer
acatctttttctaggtatcttgacactcatgttctttttc

SEQ ID NO: 5341 - DNA, 40 bp, Artificial Sequence
  Description of Artificial Sequence: Synthetic primer
tttcttggcaagatgaacaggtttgcacatttatctgtct

SEQ ID NO: 5342 - DNA, 40 bp, Artificial Sequence
  Description of Artificial Sequence: Synthetic primer
tccacttcaggcccaaaccctgcccagcccctggacactc

SEQ ID NO: 5343 - DNA, 40 bp, Artificial Sequence
  Description of Artificial Sequence: Synthetic primer
cggaagttcagtgacccagggcagggtgtgtgctctctcg

SEQ ID NO: 5344 - DNA, 40 bp, Artificial Sequence
  Description of Artificial Sequence: Synthetic primer
gctctatttctttccccagtctctatttctttccctgtgc

SEQ ID NO: 5345 - DNA, 40 bp, Artificial Sequence
  Description of Artificial Sequence: Synthetic primer
catggggatgggaactggaggaccctcctgaccagagttc

SEQ ID NO: 5346 - DNA, 40 bp, Artificial Sequence
  Description of Artificial Sequence: Synthetic primer
aggttggatagctattatcctgagtcttatgtctgatacc

SEQ ID NO: 5347 - DNA, 40 bp, Artificial Sequence
  Description of Artificial Sequence: Synthetic primer
ttcagctaaacccaattaacttagtgtgataattttgaga

SEQ ID NO: 5348 - DNA, 40 bp, Artificial Sequence
  Description of Artificial Sequence: Synthetic primer
gaaggtatggtgtatacttgccctctgatccatcccaaac

SEQ ID NO: 5349 - DNA, 40 bp, Artificial Sequence
  Description of Artificial Sequence: Synthetic primer
gagctttgtgtcagctttgacttttaaaatgttctttctg

SEQ ID NO: 5350 - DNA, 40 bp, Artificial Sequence
  Description of Artificial Sequence: Synthetic primer
gctgccgctccgcacactcctgggccctgcccaagctaag

SEQ ID NO: 5351 - DNA, 40 bp, Artificial Sequence
  Description of Artificial Sequence: Synthetic primer
gggaaccctgaaggctcctgctgggcttacttctgtgttg

SEQ ID NO: 5352 - DNA, 40 bp, Artificial Sequence
  Description of Artificial Sequence: Synthetic primer
ttagttgttctgttttgtttggtaatgtgtttatattttc

SEQ ID NO: 5353 - DNA, 40 bp, Artificial Sequence
  Description of Artificial Sequence: Synthetic primer
gaactttcaatcataacatctaaaaggcaatcaacagtgg

SEQ ID NO: 5354 - DNA, 40 bp, Artificial Sequence
  Description of Artificial Sequence: Synthetic primer
tagtaacttggttatttttgttaactaatttaatgtttac

SEQ ID NO: 5355 - DNA, 40 bp, Artificial Sequence
  Description of Artificial Sequence: Synthetic primer
ttcacattccagtaataaagacgtttatttaaactgaaga

SEQ ID NO: 5356 - DNA, 40 bp, Artificial Sequence
  Description of Artificial Sequence: Synthetic primer
gtttggcgtaactagagttttagtaagcagttattattcc

SEQ ID NO: 5357 - DNA, 40 bp, Artificial Sequence
  Description of Artificial Sequence: Synthetic primer
aatttgtctattcttggctctaatcttgttttcctttttc

SEQ ID NO: 5358 - DNA, 40 bp, Artificial Sequence
  Description of Artificial Sequence: Synthetic primer
gacaaactaaactgatcatttccaaaattccaacaaactc

SEQ ID NO: 5359 - DNA, 40 bp, Artificial Sequence
  Description of Artificial Sequence: Synthetic primer
ggaaaacagcttttgtcccgtatggaaattttaagtaact

SEQ ID NO: 5360 - DNA, 40 bp, Artificial Sequence
  Description of Artificial Sequence: Synthetic primer
agggaccgcgaggggctgcgagcgagcgagcggggcctta

SEQ ID NO: 5361 - DNA, 40 bp, Artificial Sequence
  Description of Artificial Sequence: Synthetic primer
cagggctgggccggcgcggcctggggaccccgggctccgg

SEQ ID NO: 5362 - DNA, 40 bp, Artificial Sequence
  Description of Artificial Sequence: Synthetic primer
cagttttgtcagctggtgtttaaagggagtcaaagattgc

SEQ ID NO: 5363 - DNA, 40 bp, Artificial Sequence
  Description of Artificial Sequence: Synthetic primer
ctaaaccaccttgctttaggcacactgcttggtgagtttc

SEQ ID NO: 5364 - DNA, 40 bp, Artificial Sequence
  Description of Artificial Sequence: Synthetic primer
ccctgcctatcacccttttcccttaacttaaacttctctc

SEQ ID NO: 5365 - DNA, 40 bp, Artificial Sequence
  Description of Artificial Sequence: Synthetic primer
cttgagctcggtctgcctcctagaatggataatggacacc

SEQ ID NO: 5366 - DNA, 40 bp, Artificial Sequence
  Description of Artificial Sequence: Synthetic primer
tatcttgatggaagtgaacttcgaatggcgatcgtttctg

SEQ ID NO: 5367 - DNA, 40 bp, Artificial Sequence
  Description of Artificial Sequence: Synthetic primer
acattcatttttaaactatttctaacaacgccttctctcc

SEQ ID NO: 5368 - DNA, 40 bp, Artificial Sequence
  Description of Artificial Sequence: Synthetic primer
ggagcggagccacgtgttgaagtcctcgttgtcttgttgg

SEQ ID NO: 5369 - DNA, 40 bp, Artificial Sequence
  Description of Artificial Sequence: Synthetic primer
gccctgtgactccatggcgcaggctgcctggccaggcccc

SEQ ID NO: 5370 - DNA, 40 bp, Artificial Sequence
  Description of Artificial Sequence: Synthetic primer
gaaaagagtaacaagaacaagattttgtcaaattaaaagg

SEQ ID NO: 5371 - DNA, 40 bp, Artificial Sequence
  Description of Artificial Sequence: Synthetic primer
agcaataattattattaacatttattaacgatcaataaac

SEQ ID NO: 5372 - DNA, 40 bp, Artificial Sequence
  Description of Artificial Sequence: Synthetic primer
aaagcataatgatctaggccatggtagtatatcttaagtg

SEQ ID NO: 5373 - DNA, 40 bp, Artificial Sequence
  Description of Artificial Sequence: Synthetic primer
tagggctgcacggtaatcctatgtaaatacttgtccattc

SEQ ID NO: 5374 - DNA, 40 bp, Artificial Sequence
  Description of Artificial Sequence: Synthetic primer
acctgttctccaacaccgatgccgacgaaggcagccactc

SEQ ID NO: 5375 - DNA, 40 bp, Artificial Sequence
  Description of Artificial Sequence: Synthetic primer
tccatgcaggcattcatggccgggctctgttctctctggc

SEQ ID NO: 5376 - DNA, 40 bp, Artificial Sequence
  Description of Artificial Sequence: Synthetic primer
ctatgggtgataatttaaattcctaattttatgcctttgc

SEQ ID NO: 5377 - DNA, 40 bp, Artificial Sequence
  Description of Artificial Sequence: Synthetic primer
agacgcgtcgcttcacattaaacaggcttttagagaacac

SEQ ID NO: 5378 - DNA, 40 bp, Artificial Sequence
  Description of Artificial Sequence: Synthetic primer
tcatatatgagtctcgtcttttattttatctttcctttgc

SEQ ID NO: 5379 - DNA, 40 bp, Artificial Sequence
  Description of Artificial Sequence: Synthetic primer
gaaaatgaataaaatttaaaacctggatgctaacaaatac

SEQ ID NO: 5380 - DNA, 40 bp, Artificial Sequence
  Description of Artificial Sequence: Synthetic primer
aattatcttaaatagttttcacactttcccagtttgtgag

SEQ ID NO: 5381 - DNA, 40 bp, Artificial Sequence
  Description of Artificial Sequence: Synthetic primer
tgagggacacgtggggtttacacgtggccgcttgtctctg

SEQ ID NO: 5382 - DNA, 40 bp, Artificial Sequence
  Description of Artificial Sequence: Synthetic primer
gaatcctttgaatagttaatgttcccttagtagtctctcc

SEQ ID NO: 5383 - DNA, 40 bp, Artificial Sequence
  Description of Artificial Sequence: Synthetic primer
tccctgactccctattctcaccacctagcagaccctttcc

SEQ ID NO: 5384 - DNA, 40 bp, Artificial Sequence
  Description of Artificial Sequence: Synthetic primer
ccctcccacaagatctctaagattcgacagagggcagaat

SEQ ID NO: 5385 - DNA, 40 bp, Artificial Sequence
  Description of Artificial Sequence: Synthetic primer
gtattttgaataaccatgcttccatgttcacatcaatttt

SEQ ID NO: 5386 - DNA, 40 bp, Artificial Sequence
  Description of Artificial Sequence: Synthetic primer
gagggtggagaatttggaggggagatagagataggagaag

SEQ ID NO: 5387 - DNA, 40 bp, Artificial Sequence
  Description of Artificial Sequence: Synthetic primer
ttaaaagtaatcttcagcagagaatgtgaatgaccagttg

SEQ ID NO: 5388 - DNA, 40 bp, Artificial Sequence
  Description of Artificial Sequence: Synthetic primer
cagacaaggggctgcccatccagagaggcagggacagcag

SEQ ID NO: 5389 - DNA, 40 bp, Artificial Sequence
  Description of Artificial Sequence: Synthetic primer
tcgaggcaatgggtaaaatgaccaggcttctctttccttc

SEQ ID NO: 5390 - DNA, 40 bp, Artificial Sequence
  Description of Artificial Sequence: Synthetic primer
gggagagcctttctgctctgactggtgcttctcacctctg

SEQ ID NO: 5391 - DNA, 40 bp, Artificial Sequence
  Description of Artificial Sequence: Synthetic primer
ggggcccttggactctgggcctaccacaccactggcttac

SEQ ID NO: 5392 - DNA, 40 bp, Artificial Sequence
  Description of Artificial Sequence: Synthetic primer
gctctgttcccaccctggcattacccaggggagccttcag

SEQ ID NO: 5393 - DNA, 40 bp, Artificial Sequence
  Description of Artificial Sequence: Synthetic primer
acctgctcacctgctgctggccccatggcctcttctcctg

SEQ ID NO: 5394 - DNA, 40 bp, Artificial Sequence
  Description of Artificial Sequence: Synthetic primer
atgtggggagcatgcgtgcgcgtgaatatgcggggagcag

SEQ ID NO: 5395 - DNA, 40 bp, Artificial Sequence
  Description of Artificial Sequence: Synthetic primer
cctgggcaggtggcggtaccgacactgtggccttgtttcc

SEQ ID NO: 5396 - DNA, 40 bp, Artificial Sequence
  Description of Artificial Sequence: Synthetic primer
agagacccttgtctaactgcacagtttttagccccacagc

SEQ ID NO: 5397 - DNA, 40 bp, Artificial Sequence
  Description of Artificial Sequence: Synthetic primer
tggctgctgccacctgctgttctctgtgcccgtttcctgc

SEQ ID NO: 5398 - DNA, 40 bp, Artificial Sequence
  Description of Artificial Sequence: Synthetic primer
ctggctgccctccccatcccgagggacttggtcccagggc

SEQ ID NO: 5399 - DNA, 40 bp, Artificial Sequence
  Description of Artificial Sequence: Synthetic primer
ctccttggaggtgaaactctccttatactgatgttgctgg

SEQ ID NO: 5400 - DNA, 40 bp, Artificial Sequence
  Description of Artificial Sequence: Synthetic primer
ccacacggccacagctgaggggccctgaccactatttctc

SEQ ID NO: 5401 - DNA, 40 bp, Artificial Sequence
  Description of Artificial Sequence: Synthetic primer
tatcatgaccttgtcctgtcctcccctgggtcccgagggg

SEQ ID NO: 5402 - DNA, 40 bp, Artificial Sequence
  Description of Artificial Sequence: Synthetic primer
ggtgctgccactctgctgacggccacgcatggtttttgtc

SEQ ID NO: 5403 - DNA, 40 bp, Artificial Sequence
  Description of Artificial Sequence: Synthetic primer
tctaatttctagtttactatgagcttgaagtttatttacc

SEQ ID NO: 5404 - DNA, 40 bp, Artificial Sequence
  Description of Artificial Sequence: Synthetic primer
tgagagcttcctggaggaggccagagccgcggggctactc

SEQ ID NO: 5405 - DNA, 40 bp, Artificial Sequence
  Description of Artificial Sequence: Synthetic primer
ggaagggcctggagggccaggggccgctggtgaccaaccg

SEQ ID NO: 5406 - DNA, 40 bp, Artificial Sequence
  Description of Artificial Sequence: Synthetic primer
ctatgtggtttttatgataatattctacttttatttgttc

SEQ ID NO: 5407 - DNA, 40 bp, Artificial Sequence
  Description of Artificial Sequence: Synthetic primer
cagaaaccttaaccatactgccgtatatgattacgtaatg

SEQ ID NO: 5408 - DNA, 40 bp, Artificial Sequence
  Description of Artificial Sequence: Synthetic primer
acctatggactcaggcctggggagacacggttgggagagg

SEQ ID NO: 5409 - DNA, 40 bp, Artificial Sequence
  Description of Artificial Sequence: Synthetic primer
ttttgcaaaaagtgccagccctcacctccctgtcttcttg

SEQ ID NO: 5410 - DNA, 40 bp, Artificial Sequence
  Description of Artificial Sequence: Synthetic primer
aaaaacgttgaaaagaagcagggccgccctgggcgccaac

SEQ ID NO: 5411 - DNA, 40 bp, Artificial Sequence
  Description of Artificial Sequence: Synthetic primer
ggacatggttctgccattttccctggcatcgttcgcttcc

SEQ ID NO: 5412 - DNA, 40 bp, Artificial Sequence
  Description of Artificial Sequence: Synthetic primer
acctacaataaaaacttttgaagtatgtgaaactgaaatc

SEQ ID NO: 5413 - DNA, 40 bp, Artificial Sequence
  Description of Artificial Sequence: Synthetic primer
tagacaatgataaaataagcaaacaaaattattcatccac

SEQ ID NO: 5414 - DNA, 40 bp, Artificial Sequence
  Description of Artificial Sequence: Synthetic primer
agaaaaatacttaggcaaatgaatctacattttaataatg

SEQ ID NO: 5415 - DNA, 40 bp, Artificial Sequence
  Description of Artificial Sequence: Synthetic primer
ccggggttaggatgtacctacaatccccacagtcccacac

SEQ ID NO: 5416 - DNA, 40 bp, Artificial Sequence
  Description of Artificial Sequence: Synthetic primer
ttttaatgaattaatcacttttacctccagtaaattaaaa

SEQ ID NO: 5417 - DNA, 40 bp, Artificial Sequence
  Description of Artificial Sequence: Synthetic primer
aacaaaaaaacaaaacaaaaaaaccttcaacttaacttta

SEQ ID NO: 5418 - DNA, 40 bp, Artificial Sequence
  Description of Artificial Sequence: Synthetic primer
gattgcaataaatttttgcaaacccgatttaacactaatc

SEQ ID NO: 5419 - DNA, 40 bp, Artificial Sequence
  Description of Artificial Sequence: Synthetic primer
atgttttcaaacaaacaaaaggtaaataaagcaaataaac

SEQ ID NO: 5420 - DNA, 40 bp, Artificial Sequence
  Description of Artificial Sequence: Synthetic primer
ccagaatctgacacaggctagaaataggcttcagagaatc

SEQ ID NO: 5421 - DNA, 40 bp, Artificial Sequence
  Description of Artificial Sequence: Synthetic primer
ctggaattcacagccactgaaagtaggcattctctgtccc

SEQ ID NO: 5422 - DNA, 40 bp, Artificial Sequence
  Description of Artificial Sequence: Synthetic primer
agtcttagtttcctctcttcccctggattaatactggttt

SEQ ID NO: 5423 - DNA, 40 bp, Artificial Sequence
  Description of Artificial Sequence: Synthetic primer
tgctgaacatggccctgactacagtgttaccttgctttac

SEQ ID NO: 5424 - DNA, 40 bp, Artificial Sequence
  Description of Artificial Sequence: Synthetic primer
agtttaaataactagccatgttttacatttgagttcacag

SEQ ID NO: 5425 - DNA, 40 bp, Artificial Sequence
  Description of Artificial Sequence: Synthetic primer
agttaaagataagaatatctatggtaaaagatctcaggtc

SEQ ID NO: 5426 - DNA, 40 bp, Artificial Sequence
  Description of Artificial Sequence: Synthetic primer
gtttctgcatttactatttgttaacttatttcacttttgc

SEQ ID NO: 5427 - DNA, 40 bp, Artificial Sequence
  Description of Artificial Sequence: Synthetic primer
taagtagatgaccatgattgtatgctacagtgtgaaagcc

SEQ ID NO: 5428 - DNA, 40 bp, Artificial Sequence
  Description of Artificial Sequence: Synthetic primer
cctgccccagccgggcacaggctccacttccggccaggtg

SEQ ID NO: 5429 - DNA, 40 bp, Artificial Sequence
  Description of Artificial Sequence: Synthetic primer
ggtgacggccccgcatcctggggctgacattgcccctctg

SEQ ID NO: 5430 - DNA, 40 bp, Artificial Sequence
  Description of Artificial Sequence: Synthetic primer
gacacataggatactattgcatttgtttgtttttcttgtc

SEQ ID NO: 5431 - DNA, 40 bp, Artificial Sequence
  Description of Artificial Sequence: Synthetic primer
tcctgggaagcccaaagtttgtaagtgtgagatattagtc

SEQ ID NO: 5432 - DNA, 40 bp, Artificial Sequence
  Description of Artificial Sequence: Synthetic primer
tgaaatcatgatagacatggagtttttgcgtgatcccttc

SEQ ID NO: 5433 - DNA, 40 bp, Artificial Sequence
  Description of Artificial Sequence: Synthetic primer
gtctctcacctgcgctggggttaacgactggcaccacctc

SEQ ID NO: 5434 - DNA, 40 bp, Artificial Sequence
  Description of Artificial Sequence: Synthetic primer
atataaatatgcattaaaatactgtcttctctttttactc

SEQ ID NO: 5435 - DNA, 40 bp, Artificial Sequence
  Description of Artificial Sequence: Synthetic primer
acaaagacctaaaattgtttacatagtaaaagcaacatac

SEQ ID NO: 5436 - DNA, 40 bp, Artificial Sequence
  Description of Artificial Sequence: Synthetic primer
aatgcactagaaataatgtcagttcaatcatttgtgtgtt

SEQ ID NO: 5437 - DNA, 40 bp, Artificial Sequence
  Description of Artificial Sequence: Synthetic primer
tatgctcactgcacagtcccgctctgagcccccagtctcc

SEQ ID NO: 5438 - DNA, 40 bp, Artificial Sequence
  Description of Artificial Sequence: Synthetic primer
aaatttgtctgtcactggttaaaactaaggtgggattttt

SEQ ID NO: 5439 - DNA, 40 bp, Artificial Sequence
  Description of Artificial Sequence: Synthetic primer
taacacaggtttgcctaaattcctagtttgtagttctccc

SEQ ID NO: 5440 - DNA, 40 bp, Artificial Sequence
  Description of Artificial Sequence: Synthetic primer
attattactgtttcggttggctttggtgagatccattgac

SEQ ID NO: 5441 - DNA, 40 bp, Artificial Sequence
  Description of Artificial Sequence: Synthetic primer
agaaaccatgatctctgttatataaaaaggtaacagttgg

SEQ ID NO: 5442 - DNA, 40 bp, Artificial Sequence
  Description of Artificial Sequence: Synthetic primer
ggggccccagtacacatgagttggacgtgtgcccccctgc

SEQ ID NO: 5443 - DNA, 40 bp, Artificial Sequence
  Description of Artificial Sequence: Synthetic primer
ccaggcctgggccctcccacccgctacagccccctccttc

SEQ ID NO: 5444 - DNA, 40 bp, Artificial Sequence
  Description of Artificial Sequence: Synthetic primer
tatataatataaacatttctgtgtttcgatgcccagattc

SEQ ID NO: 5445 - DNA, 40 bp, Artificial Sequence
  Description of Artificial Sequence: Synthetic primer
aggaattataatcttttcaaacgagctgagaggtctattc

SEQ ID NO: 5446 - DNA, 40 bp, Artificial Sequence
  Description of Artificial Sequence: Synthetic primer
taactgctgatggttatgagaaacccagacctgaatctcc

SEQ ID NO: 5447 - DNA, 40 bp, Artificial Sequence
  Description of Artificial Sequence: Synthetic primer
gggagcagaggctccagccctaccgtgccgtccccctctc

SEQ ID NO: 5448 - DNA, 40 bp, Artificial Sequence
  Description of Artificial Sequence: Synthetic primer
ttaccatttgtcaattctggatgaattggtataatgatgt

SEQ ID NO: 5449 - DNA, 40 bp, Artificial Sequence
  Description of Artificial Sequence: Synthetic primer
aatgttcacacatgttttgcaaaggagagagcgtgatgag

SEQ ID NO: 5450 - DNA, 40 bp, Artificial Sequence
  Description of Artificial Sequence: Synthetic primer
actgttttccttcatattagtgtgttgactatgtagaatc

SEQ ID NO: 5451 - DNA, 40 bp, Artificial Sequence
  Description of Artificial Sequence: Synthetic primer
gttttaaggctactaaaatttctttgacgtttattcattg

SEQ ID NO: 5452 - DNA, 40 bp, Artificial Sequence
  Description of Artificial Sequence: Synthetic primer
aagttattcagataaatggtaatgaagattctgatgtttg

SEQ ID NO: 5453 - DNA, 40 bp, Artificial Sequence
  Description of Artificial Sequence: Synthetic primer
cgtgggaccaaaaactgattgcatcttcactagccctttc

SEQ ID NO: 5454 - DNA, 40 bp, Artificial Sequence
  Description of Artificial Sequence: Synthetic primer
tctactgcagaattaatagaaagttttagaagtaggaaaa

SEQ ID NO: 5455 - DNA, 40 bp, Artificial Sequence
  Description of Artificial Sequence: Synthetic primer
cagacggtgctttcaatctgtgctgactgtaacttttatc

SEQ ID NO: 5456 - DNA, 40 bp, Artificial Sequence
  Description of Artificial Sequence: Synthetic primer
gcagtcttcccttatgtctggctggggaagtgactgtagc

SEQ ID NO: 5457 - DNA, 40 bp, Artificial Sequence
  Description of Artificial Sequence: Synthetic primer
ggtttaattttgaacacatttcacagctcagaaggaaaac

SEQ ID NO: 5458 - DNA, 40 bp, Artificial Sequence
  Description of Artificial Sequence: Synthetic primer
atattaaccttatttgtcatagtaatgctttttctttttc

SEQ ID NO: 5459 - DNA, 40 bp, Artificial Sequence
  Description of Artificial Sequence: Synthetic primer
gaaaataaagacaatgttctctattgatttaaaatattag

SEQ ID NO: 5460 - DNA, 40 bp, Artificial Sequence
  Description of Artificial Sequence: Synthetic primer
gcggagcttgcggcccgaatgcgtccctcgcaagtcaggg

SEQ ID NO: 5461 - DNA, 40 bp, Artificial Sequence
  Description of Artificial Sequence: Synthetic primer
ggcagcctcacccctgctaatgtctgaggtcccccttctg

SEQ ID NO: 5462 - DNA, 40 bp, Artificial Sequence
  Description of Artificial Sequence: Synthetic primer
caggagggtgcagtgttgggctggccaggacctcagaccg

SEQ ID NO: 5463 - DNA, 40 bp, Artificial Sequence
  Description of Artificial Sequence: Synthetic primer
aggaggggtgagacctggtccctgggccacttgccagagc

SEQ ID NO: 5464 - DNA, 40 bp, Artificial Sequence
  Description of Artificial Sequence: Synthetic primer
ggtgcgtcgtacttggccctatctccagagcagccttcac

SEQ ID NO: 5465 - DNA, 40 bp, Artificial Sequence
  Description of Artificial Sequence: Synthetic primer
ggaaactaatagttgtctcactgcctcatctctcaccatc

SEQ ID NO: 5466 - DNA, 40 bp, Artificial Sequence
  Description of Artificial Sequence: Synthetic primer
agcttggcctcagtacaaactcattagcatcaggattatg

SEQ ID NO: 5467 - DNA, 40 bp, Artificial Sequence
  Description of Artificial Sequence: Synthetic primer
agctttccttgtaaacttttaagagtagagaacgcaactg

SEQ ID NO: 5468 - DNA, 40 bp, Artificial Sequence
  Description of Artificial Sequence: Synthetic primer
attttcactgttactgagctgtgtgcctgtcttccttacc

SEQ ID NO: 5469 - DNA, 40 bp, Artificial Sequence
  Description of Artificial Sequence: Synthetic primer
aaggctgggatgaggaggccaggtgcagggaacccacaac

SEQ ID NO: 5470 - DNA, 40 bp, Artificial Sequence
  Description of Artificial Sequence: Synthetic primer
ggactacccagctcctgcacctgccacttgacctttcttg

SEQ ID NO: 5471 - DNA, 40 bp, Artificial Sequence
  Description of Artificial Sequence: Synthetic primer
caaagccaccattcggcctgtgtttgacccgagcaaggtg

SEQ ID NO: 5472 - DNA, 40 bp, Artificial Sequence
  Description of Artificial Sequence: Synthetic primer
tgagcagtccacagtgaaggtggctgcctcaccgaccttg

SEQ ID NO: 5473 - DNA, 40 bp, Artificial Sequence
  Description of Artificial Sequence: Synthetic primer
ccccttcacctgttccgccccacgttccctctcctcaatg

SEQ ID NO: 5474 - DNA, 40 bp, Artificial Sequence
  Description of Artificial Sequence: Synthetic primer
gggtattaccccaggggcctgcactgacagcccccctgcc

SEQ ID NO: 5475 - DNA, 40 bp, Artificial Sequence
  Description of Artificial Sequence: Synthetic primer
cttttaaaagcccattatttaattccttctctttattttg

SEQ ID NO: 5476 - DNA, 40 bp, Artificial Sequence
  Description of Artificial Sequence: Synthetic primer
ccaatctctgataccataacttgggaaaatggttgataag

SEQ ID NO: 5477 - DNA, 40 bp, Artificial Sequence
  Description of Artificial Sequence: Synthetic primer
agcctggacctcaggttctcaccagcctcccttctgtctc

SEQ ID NO: 5478 - DNA, 40 bp, Artificial Sequence
  Description of Artificial Sequence: Synthetic primer
ggccataggagtgccctacctggggtctggtagttgagcc

SEQ ID NO: 5479 - DNA, 40 bp, Artificial Sequence
  Description of Artificial Sequence: Synthetic primer
aaaggtatctgctgaaggtaggaaaccactggctttggtc

SEQ ID NO: 5480 - DNA, 40 bp, Artificial Sequence
  Description of Artificial Sequence: Synthetic primer
tacaagaagtcaggtgttttcatggactcttctcttttcc

SEQ ID NO: 5481 - DNA, 40 bp, Artificial Sequence
  Description of Artificial Sequence: Synthetic primer
caccaacccaagcccaggcctccgactgcagagtaacagg

SEQ ID NO: 5482 - DNA, 40 bp, Artificial Sequence
  Description of Artificial Sequence: Synthetic primer
ggaaggaactggagcctggagctagtaccttacagaagtc

SEQ ID NO: 5483 - DNA, 40 bp, Artificial Sequence
  Description of Artificial Sequence: Synthetic primer
tgaatttatccatcagaaagcaagcaacaggaaaattagc

SEQ ID NO: 5484 - DNA, 40 bp, Artificial Sequence
  Description of Artificial Sequence: Synthetic primer
gaaatatatttttaaggcaatttatgggctaattgtaaac

SEQ ID NO: 5485 - DNA, 40 bp, Artificial Sequence
  Description of Artificial Sequence: Synthetic primer
aggagaggggccccggcatggtgctgggctgcagccaggg

SEQ ID NO: 5486 - DNA, 40 bp, Artificial Sequence
  Description of Artificial Sequence: Synthetic primer
cagagctgggacccgtggctgaagtgcccatttccctgtg

SEQ ID NO: 5487 - DNA, 40 bp, Artificial Sequence
  Description of Artificial Sequence: Synthetic primer
gaaaaaaacaattccttatcagagcaaacacagttcagac

SEQ ID NO: 5488 - DNA, 40 bp, Artificial Sequence
  Description of Artificial Sequence: Synthetic primer
gtgacctaggcagttgggttaactacttcttctctttctg

SEQ ID NO: 5489 - DNA, 40 bp, Artificial Sequence
  Description of Artificial Sequence: Synthetic primer
tgctgcctgctgaccagggtatctactgtgcctctttctc

SEQ ID NO: 5490 - DNA, 40 bp, Artificial Sequence
  Description of Artificial Sequence: Synthetic primer
ctcaagtttagcaaatgataagaaagaagctgttaagacg

SEQ ID NO: 5491 - DNA, 40 bp, Artificial Sequence
  Description of Artificial Sequence: Synthetic primer
ggctcaaaagaaggcagctgacagggctgcaccgctcacg

SEQ ID NO: 5492 - DNA, 40 bp, Artificial Sequence
  Description of Artificial Sequence: Synthetic primer
ccagggctctgggcgctttgggctggtgtcaccggaatgg

SEQ ID NO: 5493 - DNA, 40 bp, Artificial Sequence
  Description of Artificial Sequence: Synthetic primer
gttgagggtgggcagggttgagctcacaattctggctgtg

SEQ ID NO: 5494 - DNA, 40 bp, Artificial Sequence
  Description of Artificial Sequence: Synthetic primer
ccaatgtgtccccttctcctcccacacgcgtccagttccc

SEQ ID NO: 5495 - DNA, 40 bp, Artificial Sequence
  Description of Artificial Sequence: Synthetic primer
aagagactccatggatattgaagggcctgtagtaaaaatc

SEQ ID NO: 5496 - DNA, 40 bp, Artificial Sequence
  Description of Artificial Sequence: Synthetic primer
ttctattaaaatatgctcatggtcccttcttttgcttctc

SEQ ID NO: 5497 - DNA, 40 bp, Artificial Sequence
  Description of Artificial Sequence: Synthetic primer
ccccagctctgcacacctccggagctgcagagatctgagc

SEQ ID NO: 5498 - DNA, 40 bp, Artificial Sequence
  Description of Artificial Sequence: Synthetic primer
tgccagaaggatggtggggctgactgaggacccaatgatg

SEQ ID NO: 5499 - DNA, 40 bp, Artificial Sequence
  Description of Artificial Sequence: Synthetic primer
cagggactcctatccccataataattttccttttgcactc

SEQ ID NO: 5500 - DNA, 40 bp, Artificial Sequence
  Description of Artificial Sequence: Synthetic primer
atgagctcctaccagccctactgcggaacccccactcctc

SEQ ID NO: 5501 - DNA, 40 bp, Artificial Sequence
  Description of Artificial Sequence: Synthetic primer
tagccagatctcatggatgatctgacttgggtttcatctg

SEQ ID NO: 5502 - DNA, 40 bp, Artificial Sequence
  Description of Artificial Sequence: Synthetic primer
caggctgcagtcccacatggctgccctttcaccccactgc

SEQ ID NO: 5503 - DNA, 40 bp, Artificial Sequence
  Description of Artificial Sequence: Synthetic primer
ctgtcagtggttttgcttttaagatttcttttaaactttc

SEQ ID NO: 5504 - DNA, 40 bp, Artificial Sequence
  Description of Artificial Sequence: Synthetic primer
agtggtaggtatcacaggtgagtcatttcaaacatacttc

SEQ ID NO: 5505 - DNA, 40 bp, Artificial Sequence
  Description of Artificial Sequence: Synthetic primer
tgacctcgcctcctctccccaccggcaccccatcctgcac

SEQ ID NO: 5506 - DNA, 40 bp, Artificial Sequence
  Description of Artificial Sequence: Synthetic primer
gacacgcttccctccgtctccccatccaccacgggacaag

SEQ ID NO: 5507 - DNA, 40 bp, Artificial Sequence
  Description of Artificial Sequence: Synthetic primer
ggggcggcacagcccactttgctggcagtcctgtttgctt

SEQ ID NO: 5508 - DNA, 40 bp, Artificial Sequence
  Description of Artificial Sequence: Synthetic primer
tagttacatttaacttcatgtttacatttttctgttctcc

SEQ ID NO: 5509 - DNA, 40 bp, Artificial Sequence
  Description of Artificial Sequence: Synthetic primer
attgcttggctgtcccgtcctcacacccttgcctctcctc

SEQ ID NO: 5510 - DNA, 40 bp, Artificial Sequence
  Description of Artificial Sequence: Synthetic primer
ggcactgatataagcaaggtccggtggggcagtggtgacg

SEQ ID NO: 5511 - DNA, 40 bp, Artificial Sequence
  Description of Artificial Sequence: Synthetic primer
ccagctcctttcgcccgcgccctccgttcgctccggacac

SEQ ID NO: 5512 - DNA, 40 bp, Artificial Sequence
  Description of Artificial Sequence: Synthetic primer
ccccgcacccatcttgctgcccaggctgcggcgggcactc

SEQ ID NO: 5513 - DNA, 40 bp, Artificial Sequence
  Description of Artificial Sequence: Synthetic primer
cccctacccttggcctcacacgttcctacccccaccaacc

SEQ ID NO: 5514 - DNA, 40 bp, Artificial Sequence
  Description of Artificial Sequence: Synthetic primer
aagccttgggagcatgcacctgagatccgttgacttttcc

SEQ ID NO: 5515 - DNA, 40 bp, Artificial Sequence
  Description of Artificial Sequence: Synthetic primer
ccggcgcgccccaggtcgctgagggaccccggccaggcgc

SEQ ID NO: 5516 - DNA, 40 bp, Artificial Sequence
  Description of Artificial Sequence: Synthetic primer
aaacagggacccgggcgggcgggagcgcccagcccgcgag

SEQ ID NO: 5517 - DNA, 40 bp, Artificial Sequence
  Description of Artificial Sequence: Synthetic primer
cccactctacccctgaggtcaccccgctgaccctgttctc

SEQ ID NO: 5518 - DNA, 40 bp, Artificial Sequence
  Description of Artificial Sequence: Synthetic primer
ccccttccttctcctcgacctggggcccggcccgctttta

SEQ ID NO: 5519 - DNA, 40 bp, Artificial Sequence
  Description of Artificial Sequence: Synthetic primer
aaatcagtttgactaaggttctttatccaagctttttttc

SEQ ID NO: 5520 - DNA, 40 bp, Artificial Sequence
  Description of Artificial Sequence: Synthetic primer
gaaatacataaaactagcattatcttccccacaaaacacc

SEQ ID NO: 5521 - DNA, 40 bp, Artificial Sequence
  Description of Artificial Sequence: Synthetic primer
aatgagagtgtttatctcaactctctatttcccaaacaac

SEQ ID NO: 5522 - DNA, 40 bp, Artificial Sequence
  Description of Artificial Sequence: Synthetic primer
tattattacaaataaataattaaatacatgctagaataac

SEQ ID NO: 5523 - DNA, 40 bp, Artificial Sequence
  Description of Artificial Sequence: Synthetic primer
gtaatattttctgtctttacttgttcctttattctcttac

SEQ ID NO: 5524 - DNA, 40 bp, Artificial Sequence
  Description of Artificial Sequence: Synthetic primer
aaaagattttaacttagtttcttatcattttggcttctat

SEQ ID NO: 5525 - DNA, 40 bp, Artificial Sequence
  Description of Artificial Sequence: Synthetic primer
tatagacttcatacaataaataatctgattatttataacc

SEQ ID NO: 5526 - DNA, 40 bp, Artificial Sequence
  Description of Artificial Sequence: Synthetic primer
gattcaaacagagcaactgagtaagtggcaagaaaattac

SEQ ID NO: 5527 - DNA, 40 bp, Artificial Sequence
  Description of Artificial Sequence: Synthetic primer
atagcccattccacctgtccccatgaaatgccatcagtcc

SEQ ID NO: 5528 - DNA, 40 bp, Artificial Sequence
  Description of Artificial Sequence: Synthetic primer
cagctgctcctaatttcccatcagaagattctcagctctc

SEQ ID NO: 5529 - DNA, 40 bp, Artificial Sequence
  Description of Artificial Sequence: Synthetic primer
aaccacattgttcccatttgagtatttcaaaagaatctgc

SEQ ID NO: 5530 - DNA, 40 bp, Artificial Sequence
  Description of Artificial Sequence: Synthetic primer
atttgttgttatcttgtttgtgtttcctttttatccactg

SEQ ID NO: 5531 - DNA, 40 bp, Artificial Sequence
  Description of Artificial Sequence: Synthetic primer
agagaaaaataagtgaatcttctaatttaatgttttccac

SEQ ID NO: 5532 - DNA, 40 bp, Artificial Sequence
  Description of Artificial Sequence: Synthetic primer
gaactgatctgaggaagctgagatgctattaacactgata

SEQ ID NO: 5533 - DNA, 40 bp, Artificial Sequence
  Description of Artificial Sequence: Synthetic primer
tgttttccatgtcatcttggttactagtttatattggttg

SEQ ID NO: 5534 - DNA, 40 bp, Artificial Sequence
  Description of Artificial Sequence: Synthetic primer
ttcaacatgaaggtctaaagatgaatcaaacaaaattcag

SEQ ID NO: 5535 - DNA, 40 bp, Artificial Sequence
  Description of Artificial Sequence: Synthetic primer
gcctgtacccagtggtgccgagcctctggcggtgccaagc

SEQ ID NO: 5536 - DNA, 40 bp, Artificial Sequence
  Description of Artificial Sequence: Synthetic primer
cctccctggaaggcagctggggagggcaggggatcttccc

SEQ ID NO: 5537 - DNA, 40 bp, Artificial Sequence
  Description of Artificial Sequence: Synthetic primer
aaacaaagaggaaaggtctgtgtcgttgcttaacgatttc

SEQ ID NO: 5538 - DNA, 40 bp, Artificial Sequence
  Description of Artificial Sequence: Synthetic primer
atattgtgacacagccaaacaatcaaggcagcatctggtg

SEQ ID NO: 5539 - DNA, 40 bp, Artificial Sequence
  Description of Artificial Sequence: Synthetic primer
ttcaaaaggtcttttgatattggggtgaacttacctgctc

SEQ ID NO: 5540 - DNA, 40 bp, Artificial Sequence
  Description of Artificial Sequence: Synthetic primer
agagaagtattgtacttctaataagatgttttgccttaca

SEQ ID NO: 5541 - DNA, 40 bp, Artificial Sequence
  Description of Artificial Sequence: Synthetic primer
tgggtatgggagctgggattcatcattttgttatgagatg

SEQ ID NO: 5542 - DNA, 40 bp, Artificial Sequence
  Description of Artificial Sequence: Synthetic primer
gttgagattatccaaaagattttccatgttttcgggattg

SEQ ID NO: 5543 - DNA, 40 bp, Artificial Sequence
  Description of Artificial Sequence: Synthetic primer
ccagaacgtcatgatgggccctaattcggtcatgtcaacc

SEQ ID NO: 5544 - DNA, 40 bp, Artificial Sequence
  Description of Artificial Sequence: Synthetic primer
ggagaaggggatgtgcattctatggtgtacccgccatctg

SEQ ID NO: 5545 - DNA, 40 bp, Artificial Sequence
  Description of Artificial Sequence: Synthetic primer
ccttctcctgggcagggctgtagcctggggctacagggcc

SEQ ID NO: 5546 - DNA, 40 bp, Artificial Sequence
  Description of Artificial Sequence: Synthetic primer
tctttttgcacccaccaggccctccaggcacatgcacacc

SEQ ID NO: 5547 - DNA, 40 bp, Artificial Sequence
  Description of Artificial Sequence: Synthetic primer
cagcgcctgtctggcttccccagcagccactgccctttgc

SEQ ID NO: 5548 - DNA, 40 bp, Artificial Sequence
  Description of Artificial Sequence: Synthetic primer
cagctgcaggaagccctgggagtggggaggaggcagcatg

SEQ ID NO: 5549 - DNA, 40 bp, Artificial Sequence
  Description of Artificial Sequence: Synthetic primer
gacccgggccgggctcacctctctgccggcactgcgcggc

SEQ ID NO: 5550 - DNA, 40 bp, Artificial Sequence
  Description of Artificial Sequence: Synthetic primer
gtggagcgttccaggcgggcgcgcggctttctccccagac

SEQ ID NO: 5551 - DNA, 40 bp, Artificial Sequence
  Description of Artificial Sequence: Synthetic primer
cctgctgcggggacttggcctcagctgcttctcttgcttc

SEQ ID NO: 5552 - DNA, 40 bp, Artificial Sequence
  Description of Artificial Sequence: Synthetic primer
ggcccaacgtgggacggatggtccctgcccggccccactc

SEQ ID NO: 5553 - DNA, 40 bp, Artificial Sequence
  Description of Artificial Sequence: Synthetic primer
attatctcacttgtcaaggcacagaataatttccaagacc

SEQ ID NO: 5554 - DNA, 40 bp, Artificial Sequence
  Description of Artificial Sequence: Synthetic primer
tactagaagttattgggtaatgttatatgctgtgctttgg

SEQ ID NO: 5555 - DNA, 40 bp, Artificial Sequence
  Description of Artificial Sequence: Synthetic primer
gagctaaacgtgccagaaagacagcaacttacctaaactc

SEQ ID NO: 5556 - DNA, 40 bp, Artificial Sequence
  Description of Artificial Sequence: Synthetic primer
ttgcatcattaggaataggctcagtgctttctttgaactg

SEQ ID NO: 5557 - DNA, 40 bp, Artificial Sequence
  Description of Artificial Sequence: Synthetic primer
aaacaaagtctttgcagcaaaatacaagccacttcttttc

SEQ ID NO: 5558 - DNA, 40 bp, Artificial Sequence
  Description of Artificial Sequence: Synthetic primer
ttttagagtttgcttatacaacttaatctttccttttcag

SEQ ID NO: 5559 - DNA, 40 bp, Artificial Sequence
  Description of Artificial Sequence: Synthetic primer
taacaagctgaatgctacatgttctagttcctgcaaagac

SEQ ID NO: 5560 - DNA, 40 bp, Artificial Sequence
  Description of Artificial Sequence: Synthetic primer
atggagaaaattagaccggccatctaaaaatctgccattg

SEQ ID NO: 5561 - DNA, 40 bp, Artificial Sequence
  Description of Artificial Sequence: Synthetic primer
atttgcaaagcaaaagcaaacagaatgtagaaaatggaag

SEQ ID NO: 5562 - DNA, 40 bp, Artificial Sequence
  Description of Artificial Sequence: Synthetic primer
gcccagccataaatatgttttgttttcttatctgtgattg

SEQ ID NO: 5563 - DNA, 40 bp, Artificial Sequence
  Description of Artificial Sequence: Synthetic primer
tttgaatcaggaatggatttggggttaacaaaaagctcac

SEQ ID NO: 5564 - DNA, 40 bp, Artificial Sequence
  Description of Artificial Sequence: Synthetic primer
ggttcactgttgccttctgggtgaataatacagcatttgc

SEQ ID NO: 5565 - DNA, 40 bp, Artificial Sequence
  Description of Artificial Sequence: Synthetic primer
ggtgtacagcagaggggagcctgtgtctaaatagtacgtg

SEQ ID NO: 5566 - DNA, 40 bp, Artificial Sequence
  Description of Artificial Sequence: Synthetic primer
tgtcattcctcactataatgctttctctctgctttggatg

SEQ ID NO: 5567 - DNA, 40 bp, Artificial Sequence
  Description of Artificial Sequence: Synthetic primer
ataattttagatatttttgtcaaggcttatgtttgtgatg

SEQ ID NO: 5568 - DNA, 40 bp, Artificial Sequence
  Description of Artificial Sequence: Synthetic primer
agcttgaatgactgaaaagggctgctcagaaagggaaaag

SEQ ID NO: 5569 - DNA, 40 bp, Artificial Sequence
  Description of Artificial Sequence: Synthetic primer
aaccctagcccaagggaacacagctgccagcaatgagaag

SEQ ID NO: 5570 - DNA, 40 bp, Artificial Sequence
  Description of Artificial Sequence: Synthetic primer
ggttgcctttaatgagatccccttttccagtatcattttc

SEQ ID NO: 5571 - DNA, 40 bp, Artificial Sequence
  Description of Artificial Sequence: Synthetic primer
aaacatacttgcatagaagacttgaaagcatttgtatttg

SEQ ID NO: 5572 - DNA, 40 bp, Artificial Sequence
  Description of Artificial Sequence: Synthetic primer
tattattcttcatggggaatactacaatcaaaaactactc

SEQ ID NO: 5573 - DNA, 40 bp, Artificial Sequence
  Description of Artificial Sequence: Synthetic primer
gcacgagcttggctctggctttcaccatcctcttcctgac

SEQ ID NO: 5574 - DNA, 40 bp, Artificial Sequence
  Description of Artificial Sequence: Synthetic primer
cgccctgagcctcatgggccgtgggcgaggtcccgcgtac

SEQ ID NO: 5575 - DNA, 40 bp, Artificial Sequence
  Description of Artificial Sequence: Synthetic primer
cccgagggtgccggtcccgccctcggggtaaggctgaagg

SEQ ID NO: 5576 - DNA, 40 bp, Artificial Sequence
  Description of Artificial Sequence: Synthetic primer
gggcgtggtttggcggggtccagctgggcccccacttcgg

SEQ ID NO: 5577 - DNA, 40 bp, Artificial Sequence
  Description of Artificial Sequence: Synthetic primer
gggttgcagcaccccacccttccaccgctcacttaaccag

SEQ ID NO: 5578 - DNA, 40 bp, Artificial Sequence
  Description of Artificial Sequence: Synthetic primer
ttttttgttaacaggcattggacaaaatccggtatgaaag

SEQ ID NO: 5579 - DNA, 40 bp, Artificial Sequence
  Description of Artificial Sequence: Synthetic primer
gatttgctcagagccccttgtgaccatcatgcatctcctc

SEQ ID NO: 5580 - DNA, 40 bp, Artificial Sequence
  Description of Artificial Sequence: Synthetic primer
gctccccagaactgagatagtgccagggaaagctttggac

SEQ ID NO: 5581 - DNA, 40 bp, Artificial Sequence
  Description of Artificial Sequence: Synthetic primer
ccctccctcgcaggggccgagcgaatgtagcccgcgagag

SEQ ID NO: 5582 - DNA, 40 bp, Artificial Sequence
  Description of Artificial Sequence: Synthetic primer
ctctccaagtccccgccgcgaccccggccgtgctgctcac

SEQ ID NO: 5583 - DNA, 40 bp, Artificial Sequence
  Description of Artificial Sequence: Synthetic primer
ctgcacacatgagacacagcatgagctcccatccatcctc

SEQ ID NO: 5584 - DNA, 40 bp, Artificial Sequence
  Description of Artificial Sequence: Synthetic primer
gtcctgttgagtgtctttccatctggtttcttccttcttc

SEQ ID NO: 5585 - DNA, 40 bp, Artificial Sequence
  Description of Artificial Sequence: Synthetic primer
aaaaactataattactccttaatgtcagcttattatattc

SEQ ID NO: 5586 - DNA, 40 bp, Artificial Sequence
  Description of Artificial Sequence: Synthetic primer
cttttttgaagtaaaaggtgcactgtaataatccagactg

SEQ ID NO: 5587 - DNA, 40 bp, Artificial Sequence
  Description of Artificial Sequence: Synthetic primer
ttttgatgtcagagccccgaactttctctgaacttaattg

SEQ ID NO: 5588 - DNA, 40 bp, Artificial Sequence
  Description of Artificial Sequence: Synthetic primer
caagcaaggccagtgagcttgcgaagaagtgtggatgctg

SEQ ID NO: 5589 - DNA, 40 bp, Artificial Sequence
  Description of Artificial Sequence: Synthetic primer
caagaaatgtatatctaataactgaggaattttcaaagac

SEQ ID NO: 5590 - DNA, 40 bp, Artificial Sequence
  Description of Artificial Sequence: Synthetic primer
gaaaaggtagtgagattatgttgcagctgtgcttgatttg

SEQ ID NO: 5591 - DNA, 40 bp, Artificial Sequence
  Description of Artificial Sequence: Synthetic primer
gcctgggctgggaggaaggaggctgggcacgcacaaagtg

SEQ ID NO: 5592 - DNA, 40 bp, Artificial Sequence
  Description of Artificial Sequence: Synthetic primer
gaacccaggagtcttgggtgtcttataatcttgagtcttg

SEQ ID NO: 5593 - DNA, 40 bp, Artificial Sequence
  Description of Artificial Sequence: Synthetic primer
tgtggcctcacccatgtcccttctctgtcctccattgtcc

SEQ ID NO: 5594 - DNA, 40 bp, Artificial Sequence
  Description of Artificial Sequence: Synthetic primer
atggacggctggtcttcccaaccacccctccccttaatag

SEQ ID NO: 5595 - DNA, 40 bp, Artificial Sequence
  Description of Artificial Sequence: Synthetic primer
ttaattaaaatttaacaatattacttatttacctcacttg

SEQ ID NO: 5596 - DNA, 40 bp, Artificial Sequence
  Description of Artificial Sequence: Synthetic primer
ttcagcagacagaacactttaaaatgtaaaatttataaag

SEQ ID NO: 5597 - DNA, 40 bp, Artificial Sequence
  Description of Artificial Sequence: Synthetic primer
tgcctcagtccatcaatgacccatctccattgctttttcc

SEQ ID NO: 5598 - DNA, 40 bp, Artificial Sequence
  Description of Artificial Sequence: Synthetic primer
acagaaaccaattcaactcttcaaaatactaattcagtcc

SEQ ID NO: 5599 - DNA, 40 bp, Artificial Sequence
  Description of Artificial Sequence: Synthetic primer
catttttttcacaatagctctttttcaaatacatcataaa

SEQ ID NO: 5600 - DNA, 40 bp, Artificial Sequence
  Description of Artificial Sequence: Synthetic primer
ctgccacgctgtttctttacacctttctcatatcctttcc

SEQ ID NO: 5601 - DNA, 40 bp, Artificial Sequence
  Description of Artificial Sequence: Synthetic primer
tttgcttttaaaagtaacaaaaggccccttgagggactag

SEQ ID NO: 5602 - DNA, 40 bp, Artificial Sequence
  Description of Artificial Sequence: Synthetic primer
acagctgcgccctcgcctgacccaccgcgcccccaaggtc

SEQ ID NO: 5603 - DNA, 40 bp, Artificial Sequence
  Description of Artificial Sequence: Synthetic primer
gcaggcagcccgcctccgggccctggaagtccccgcacag

SEQ ID NO: 5604 - DNA, 40 bp, Artificial Sequence
  Description of Artificial Sequence: Synthetic primer
acaagcacctcaggaatcctccaccccacatcttcacctg

SEQ ID NO: 5605 - DNA, 40 bp, Artificial Sequence
  Description of Artificial Sequence: Synthetic primer
tgtaagggtagctgaggcccgtgtcctcctatccctttag

SEQ ID NO: 5606 - DNA, 40 bp, Artificial Sequence
  Description of Artificial Sequence: Synthetic primer
aaggtgttataacaaactcccttattttgcacatatttta

SEQ ID NO: 5607 - DNA, 40 bp, Artificial Sequence
  Description of Artificial Sequence: Synthetic primer
catgacctctgcagagcagtgccttatttttacaaatacc

SEQ ID NO: 5608 - DNA, 40 bp, Artificial Sequence
  Description of Artificial Sequence: Synthetic primer
caggtagagggagtacagagtgaccgcctcaagtgacacc

SEQ ID NO: 5609 - DNA, 40 bp, Artificial Sequence
  Description of Artificial Sequence: Synthetic primer
ctccctcaaactcaccccatccaggtctcccgttcctacc

SEQ ID NO: 5610 - DNA, 40 bp, Artificial Sequence
  Description of Artificial Sequence: Synthetic primer
cagtatgcatagtggttatagctaaatatgaatgcgtgac

SEQ ID NO: 5611 - DNA, 40 bp, Artificial Sequence
  Description of Artificial Sequence: Synthetic primer
ctctttgatgatttgttaaattataaacatgatttatctc

SEQ ID NO: 5612 - DNA, 40 bp, Artificial Sequence
  Description of Artificial Sequence: Synthetic primer
aaccaacttgattctcagtacttatgtcccatatatcctc

SEQ ID NO: 5613 - DNA, 40 bp, Artificial Sequence
  Description of Artificial Sequence: Synthetic primer
taaagactgactataaatagccaatggatccctctgaaag

SEQ ID NO: 5614 - DNA, 40 bp, Artificial Sequence
  Description of Artificial Sequence: Synthetic primer
cgtggagcacataatcccatcccaagcccaagcagagcag

SEQ ID NO: 5615 - DNA, 40 bp, Artificial Sequence
  Description of Artificial Sequence: Synthetic primer
tgctcagagcaatgacttctggcttttattctttgtccag

SEQ ID NO: 5616 - DNA, 40 bp, Artificial Sequence
  Description of Artificial Sequence: Synthetic primer
ggaggaaccaatgcaaagctctaaccaacatggctttttc

SEQ ID NO: 5617 - DNA, 40 bp, Artificial Sequence
  Description of Artificial Sequence: Synthetic primer
aagaagactatttctgcactaactaccaggctacacttac

SEQ ID NO: 5618 - DNA, 40 bp, Artificial Sequence
  Description of Artificial Sequence: Synthetic primer
ggggcacttcctggcatggacaccagctccctctctgccc

SEQ ID NO: 5619 - DNA, 40 bp, Artificial Sequence
  Description of Artificial Sequence: Synthetic primer
gcgctccccagcatgcgcactgcacccattacccacagtg

SEQ ID NO: 5620 - DNA, 40 bp, Artificial Sequence
  Description of Artificial Sequence: Synthetic primer
agctggatccaaggcttcatccatgacctgttcctcatac

SEQ ID NO: 5621 - DNA, 40 bp, Artificial Sequence
  Description of Artificial Sequence: Synthetic primer
tccagcctctccatcccaggccacacagcctccccatgtg

SEQ ID NO: 5622 - DNA, 40 bp, Artificial Sequence
  Description of Artificial Sequence: Synthetic primer
ctgcatctcttgggaccctgactctctctttcttttctcc

SEQ ID NO: 5623 - DNA, 40 bp, Artificial Sequence
  Description of Artificial Sequence: Synthetic primer
aagaaatcagagaagtaggcaaaaactgcctccattcaac

SEQ ID NO: 5624 - DNA, 40 bp, Artificial Sequence
  Description of Artificial Sequence: Synthetic primer
ggctatcaccacgaccacctcatccccagccacgcgcagg

SEQ ID NO: 5625 - DNA, 40 bp, Artificial Sequence
  Description of Artificial Sequence: Synthetic primer
tgcgggacggccttggagagtactcgggttcgtgaacttc

SEQ ID NO: 5626 - DNA, 40 bp, Artificial Sequence
  Description of Artificial Sequence: Synthetic primer
catcactggtatctctaaaaacatttcaaacactgacctc

SEQ ID NO: 5627 - DNA, 40 bp, Artificial Sequence
  Description of Artificial Sequence: Synthetic primer
acttttctttgttatttcttctctttcttacctatccatc

SEQ ID NO: 5628 - DNA, 40 bp, Artificial Sequence
  Description of Artificial Sequence: Synthetic primer
cgccatccagacccgccggccctagccgcagtccctccag

SEQ ID NO: 5629 - DNA, 40 bp, Artificial Sequence
  Description of Artificial Sequence: Synthetic primer
tgctcggcgccaacttcgccctggcccctgcgggagccgg

SEQ ID NO: 5630 - DNA, 40 bp, Artificial Sequence
  Description of Artificial Sequence: Synthetic primer
ttttttgtggcagtcatatcatattcaaattaaataaatc

SEQ ID NO: 5631 - DNA, 40 bp, Artificial Sequence
  Description of Artificial Sequence: Synthetic primer
ccatgtaattacgaatttcttcttctttatttccctgtgg

SEQ ID NO: 5632 - DNA, 40 bp, Artificial Sequence
  Description of Artificial Sequence: Synthetic primer
gtattgcacatgtgaaaatgttggtaaaacagaaataata

SEQ ID NO: 5633 - DNA, 40 bp, Artificial Sequence
  Description of Artificial Sequence: Synthetic primer
gttattttatgttcataaagtaaagatatttattttttcc

SEQ ID NO: 5634 - DNA, 40 bp, Artificial Sequence
  Description of Artificial Sequence: Synthetic primer
aatgttttttctgttttgttttgttttcccctcaaaagtg

SEQ ID NO: 5635 - DNA, 40 bp, Artificial Sequence
  Description of Artificial Sequence: Synthetic primer
atagaaaacagggcacagtcaaaagacaggaaggaaatac

SEQ ID NO: 5636 - DNA, 40 bp, Artificial Sequence
  Description of Artificial Sequence: Synthetic primer
agcatttgtgtcattcttagtatgcagctgggtttcaagc

SEQ ID NO: 5637 - DNA, 40 bp, Artificial Sequence
  Description of Artificial Sequence: Synthetic primer
ccacggccacacggacaggcctggccacgccgcaaaacac

SEQ ID NO: 5638 - DNA, 40 bp, Artificial Sequence
  Description of Artificial Sequence: Synthetic primer
ttctggccttctttatctttggctctcaacacttgctctg

SEQ ID NO: 5639 - DNA, 40 bp, Artificial Sequence
  Description of Artificial Sequence: Synthetic primer
gcttcttccgaataaagagatcaccactgagctaccaagg

SEQ ID NO: 5640 - DNA, 40 bp, Artificial Sequence
  Description of Artificial Sequence: Synthetic primer
cggcctcgccggcctccgcctgtcctcccaccaccctctc

SEQ ID NO: 5641 - DNA, 40 bp, Artificial Sequence
  Description of Artificial Sequence: Synthetic primer
taggagctgtttgcagggtcctaactcaatcggcttgttg

SEQ ID NO: 5642 - DNA, 40 bp, Artificial Sequence
  Description of Artificial Sequence: Synthetic primer
ttttttcttggttctcccaaacacatttgtctgtgtattc

SEQ ID NO: 5643 - DNA, 40 bp, Artificial Sequence
  Description of Artificial Sequence: Synthetic primer
gaatgcaaagaggaggggctgaactccagcgcacacttac

SEQ ID NO: 5644 - DNA, 40 bp, Artificial Sequence
  Description of Artificial Sequence: Synthetic primer
tgttctggtttcctttagaatttccattcagttaacaaac

SEQ ID NO: 5645 - DNA, 40 bp, Artificial Sequence
  Description of Artificial Sequence: Synthetic primer
ttctaaacaggtggatttatctttttaataaacaaatttt

SEQ ID NO: 5646 - DNA, 40 bp, Artificial Sequence
  Description of Artificial Sequence: Synthetic primer
ataatcttctttttctcattgagttctattttttgagcgc

SEQ ID NO: 5647 - DNA, 40 bp, Artificial Sequence
  Description of Artificial Sequence: Synthetic primer
aagtttcaaaaagagcttctaaaacgtagattatcattcc

SEQ ID NO: 5648 - DNA, 40 bp, Artificial Sequence
  Description of Artificial Sequence: Synthetic primer
ctgtgggccagggccagagccttcagggacccttgactcc

SEQ ID NO: 5649 - DNA, 40 bp, Artificial Sequence
  Description of Artificial Sequence: Synthetic primer
tccaaaatcaggctcgcaaatgagattctccaaaagaaag

SEQ ID NO: 5650 - DNA, 40 bp, Artificial Sequence
  Description of Artificial Sequence: Synthetic primer
cctccggcccctcgggtccctgctctgtcactgactgctg

SEQ ID NO: 5651 - DNA, 40 bp, Artificial Sequence
  Description of Artificial Sequence: Synthetic primer
ttatttttgatcaacgcaaggggattaaagaaataacctc

SEQ ID NO: 5652 - DNA, 40 bp, Artificial Sequence
  Description of Artificial Sequence: Synthetic primer
ggcagttggataatcatttaatatatctttctctctcctc

SEQ ID NO: 5653 - DNA, 40 bp, Artificial Sequence
  Description of Artificial Sequence: Synthetic primer
aaaaaggggaaaagaaagaataacttcttaaaaggcttgc

SEQ ID NO: 5654 - DNA, 40 bp, Artificial Sequence
  Description of Artificial Sequence: Synthetic primer
gcccagtctgccttgtgctcccttcagccaaacacttaac

SEQ ID NO: 5655 - DNA, 40 bp, Artificial Sequence
  Description of Artificial Sequence: Synthetic primer
catggataaagccaccactgctgaaagatcactctaaacc

SEQ ID NO: 5656 - DNA, 40 bp, Artificial Sequence
  Description of Artificial Sequence: Synthetic primer
cccaggctccagaccctgaagaagaggagaacagggactc

SEQ ID NO: 5657 - DNA, 40 bp, Artificial Sequence
  Description of Artificial Sequence: Synthetic primer
gtttcccaggctgctgggagtccctgttctcctcttcttc

SEQ ID NO: 5658 - DNA, 40 bp, Artificial Sequence
  Description of Artificial Sequence: Synthetic primer
attagtatagtcaaaggatttgctctcacacgaaatgatg

SEQ ID NO: 5659 - DNA, 40 bp, Artificial Sequence
  Description of Artificial Sequence: Synthetic primer
taaatcaaatgaccatttacagtaagttgacctttttttt

SEQ ID NO: 5660 - DNA, 40 bp, Artificial Sequence
  Description of Artificial Sequence: Synthetic primer
ggcagccacttgccaacttacccagtaccatcaatgctgt

SEQ ID NO: 5661 - DNA, 40 bp, Artificial Sequence
  Description of Artificial Sequence: Synthetic primer
gacaatgaatccagaggtgtacacagtgtccaccaaggtc

SEQ ID NO: 5662 - DNA, 40 bp, Artificial Sequence
  Description of Artificial Sequence: Synthetic primer
ttaatgaataaaataacaactataagacttaaaagtttgg

SEQ ID NO: 5663 - DNA, 40 bp, Artificial Sequence
  Description of Artificial Sequence: Synthetic primer
ctagatttctgatagatcccttcttccctaatatgatccc

SEQ ID NO: 5664 - DNA, 40 bp, Artificial Sequence
  Description of Artificial Sequence: Synthetic primer
ctgaatacatcatgggaaaattatatcattccttagtgtg

SEQ ID NO: 5665 - DNA, 40 bp, Artificial Sequence
  Description of Artificial Sequence: Synthetic primer
aatgaaaattatttatgatatcttagtgtttgttttgttg

SEQ ID NO: 5666 - DNA, 40 bp, Artificial Sequence
  Description of Artificial Sequence: Synthetic primer
gttttcacagaaatattcaatgaaaatctatgacagtatc

SEQ ID NO: 5667 - DNA, 40 bp, Artificial Sequence
  Description of Artificial Sequence: Synthetic primer
cctcctaaattttgcctttaatcaatttatatttttgtcc

SEQ ID NO: 5668 - DNA, 40 bp, Artificial Sequence
  Description of Artificial Sequence: Synthetic primer
ttggaataaggacggctccttccgctaaactcttcacttg

SEQ ID NO: 5669 - DNA, 40 bp, Artificial Sequence
  Description of Artificial Sequence: Synthetic primer
gcttggagaccatgatgtccataaataactttggttttat

SEQ ID NO: 5670 - DNA, 40 bp, Artificial Sequence
  Description of Artificial Sequence: Synthetic primer
gaccctgtacccaggcctccccgccctggtctggtcactc

SEQ ID NO: 5671 - DNA, 40 bp, Artificial Sequence
  Description of Artificial Sequence: Synthetic primer
ggcccaggttgggagaacttgggcaggaaatggatccttg

SEQ ID NO: 5672 - DNA, 40 bp, Artificial Sequence
  Description of Artificial Sequence: Synthetic primer
ctggagaccgctcacctggtcgttttccctggccctgtgc

SEQ ID NO: 5673 - DNA, 40 bp, Artificial Sequence
  Description of Artificial Sequence: Synthetic primer
tccgcatctgtccttgccaagcccctctgtagagcatgtg

SEQ ID NO: 5674 - DNA, 40 bp, Artificial Sequence
  Description of Artificial Sequence: Synthetic primer
ttttcagccttattttttctctaacacaaaataactttac

SEQ ID NO: 5675 - DNA, 40 bp, Artificial Sequence
  Description of Artificial Sequence: Synthetic primer
ggtagtttagatattagttatcgtttctttcctttcttac

SEQ ID NO: 5676 - DNA, 40 bp, Artificial Sequence
  Description of Artificial Sequence: Synthetic primer
gttcatgtatgaagttcttgcattcgtttttttttggagc

SEQ ID NO: 5677 - DNA, 40 bp, Artificial Sequence
  Description of Artificial Sequence: Synthetic primer
ttagccaatgccctagccagaacgacccaaaaatctctcc

SEQ ID NO: 5678 - DNA, 40 bp, Artificial Sequence
  Description of Artificial Sequence: Synthetic primer
aagcgtcagttgtggctgcagcgccgagccctgccccagc

SEQ ID NO: 5679 - DNA, 40 bp, Artificial Sequence
  Description of Artificial Sequence: Synthetic primer
tggagttgaaaaagcttgactggcgtcattcaggagctgg

SEQ ID NO: 5680 - DNA, 40 bp, Artificial Sequence
  Description of Artificial Sequence: Synthetic primer
cttttgttgctatgttcgttgtagggactgctgtattgac

SEQ ID NO: 5681 - DNA, 40 bp, Artificial Sequence
  Description of Artificial Sequence: Synthetic primer
aaccatcatggaagccaaaagaagagatcattcctggagg

SEQ ID NO: 5682 - DNA, 40 bp, Artificial Sequence
  Description of Artificial Sequence: Synthetic primer
gagggctgtgtttgtcagttgtctctggctcttttctacc

SEQ ID NO: 5683 - DNA, 40 bp, Artificial Sequence
  Description of Artificial Sequence: Synthetic primer
ccggaggaaatcagcgtgcacaattctccctatggaaggg

SEQ ID NO: 5684 - DNA, 40 bp, Artificial Sequence
  Description of Artificial Sequence: Synthetic primer
ggaatgtgtgcacagaggaaaagctgctacttcaggtgtc

SEQ ID NO: 5685 - DNA, 40 bp, Artificial Sequence
  Description of Artificial Sequence: Synthetic primer
aggtcccgctcggggtccatgacgtgtgtttctctccttc

SEQ ID NO: 5686 - DNA, 40 bp, Artificial Sequence
  Description of Artificial Sequence: Synthetic primer
cgccgccgccgccatgggctgcctcgggaacagtaagacc

SEQ ID NO: 5687 - DNA, 40 bp, Artificial Sequence
  Description of Artificial Sequence: Synthetic primer
gaaaatctgagcagcacctctcatgtgatgtccaggagtt

SEQ ID NO: 5688 - DNA, 40 bp, Artificial Sequence
  Description of Artificial Sequence: Synthetic primer
gggtaaaaagcaaaagaattgtcttctctctgccaactcc

SEQ ID NO: 5689 - DNA, 40 bp, Artificial Sequence
  Description of Artificial Sequence: Synthetic primer
ccgctctgcccgccgctgggtccgaccgcgctcgccttcc

SEQ ID NO: 5690 - DNA, 40 bp, Artificial Sequence
  Description of Artificial Sequence: Synthetic primer
cgcagtgaccccggagccccgcgccttacccagaacttgg

SEQ ID NO: 5691 - DNA, 40 bp, Artificial Sequence
  Description of Artificial Sequence: Synthetic primer
gactaagcttgaaagcaccttagaagtatcaatgatcagg

SEQ ID NO: 5692 - DNA, 40 bp, Artificial Sequence
  Description of Artificial Sequence: Synthetic primer
gctagatgaaaccattcttaactgttaaaaggtctaaaag

SEQ ID NO: 5693 - DNA, 40 bp, Artificial Sequence
  Description of Artificial Sequence: Synthetic primer
tctcgccttacacatgtacgttagtgtcctctcctcacac

SEQ ID NO: 5694 - DNA, 40 bp, Artificial Sequence
  Description of Artificial Sequence: Synthetic primer
ccccagtgccagacaggtcccagacccctccctcagcatc

SEQ ID NO: 5695 - DNA, 40 bp, Artificial Sequence
  Description of Artificial Sequence: Synthetic primer
atagctggaaaagtcattcctctcactgcctcccctcctc

SEQ ID NO: 5696 - DNA, 40 bp, Artificial Sequence
  Description of Artificial Sequence: Synthetic primer
ctgcctggaaagccaggtgcctgtgggcagagcccaggac

SEQ ID NO: 5697 - DNA, 40 bp, Artificial Sequence
  Description of Artificial Sequence: Synthetic primer
tattttagactgcttaaagcaattgttgtataaaaacttg

SEQ ID NO: 5698 - DNA, 40 bp, Artificial Sequence
  Description of Artificial Sequence: Synthetic primer
gagtacacaaggcaatgtttactatatgaagaaaagttac

SEQ ID NO: 5699 - DNA, 40 bp, Artificial Sequence
  Description of Artificial Sequence: Synthetic primer
aaaaccatacacgttttggttttctgtctcctcacaggtc

SEQ ID NO: 5700 - DNA, 40 bp, Artificial Sequence
  Description of Artificial Sequence: Synthetic primer
gaaggtgacagatggcctctggtcaaagctcgttttttcg

SEQ ID NO: 5701 - DNA, 40 bp, Artificial Sequence
  Description of Artificial Sequence: Synthetic primer
ctagaggggactgtggccaagggcaggtgcgctaacatcg

SEQ ID NO: 5702 - DNA, 40 bp, Artificial Sequence
  Description of Artificial Sequence: Synthetic primer
gtctgctgttatcatgatggttgggcccacggtgttttgg

SEQ ID NO: 5703 - DNA, 40 bp, Artificial Sequence
  Description of Artificial Sequence: Synthetic primer
aggcaagaaaagaataaaaagaaatgtggaaaatgaaagg

SEQ ID NO: 5704 - DNA, 40 bp, Artificial Sequence
  Description of Artificial Sequence: Synthetic primer
tggaggatcttgctcatgttgtccagctctttccagatgg

SEQ ID NO: 5705 - DNA, 40 bp, Artificial Sequence
  Description of Artificial Sequence: Synthetic primer
taaagaaactttgatcttatatatcaattcttattctttt

SEQ ID NO: 5706 - DNA, 40 bp, Artificial Sequence
  Description of Artificial Sequence: Synthetic primer
actgttacgatcttttgaaagaaaacaaaaagcaaagttc

SEQ ID NO: 5707 - DNA, 40 bp, Artificial Sequence
  Description of Artificial Sequence: Synthetic primer
gcagtagtaatccaatgattcatcctgtcattcctcttcc

SEQ ID NO: 5708 - DNA, 40 bp, Artificial Sequence
  Description of Artificial Sequence: Synthetic primer
agaaacaaaaacccaaaacaacttcccgcctcccccaatg

SEQ ID NO: 5709 - DNA, 40 bp, Artificial Sequence
  Description of Artificial Sequence: Synthetic primer
tcctggatgaggcatgcagtagaacaaggcagtagatgtc

SEQ ID NO: 5710 - DNA, 40 bp, Artificial Sequence
  Description of Artificial Sequence: Synthetic primer
cagctgggcctttcctacgtggctattcacaagcacctgc

SEQ ID NO: 5711 - DNA, 40 bp, Artificial Sequence
  Description of Artificial Sequence: Synthetic primer
ctgaggttcattctgaaatgcttatctgaagggtccacct

SEQ ID NO: 5712 - DNA, 40 bp, Artificial Sequence
  Description of Artificial Sequence: Synthetic primer
gtcctggtctcgggtactcactcctttctctgccctgtag

SEQ ID NO: 5713 - DNA, 40 bp, Artificial Sequence
  Description of Artificial Sequence: Synthetic primer
cccaccatcatcctaaacacctaccctaggatggccactg

SEQ ID NO: 5714 - DNA, 40 bp, Artificial Sequence
  Description of Artificial Sequence: Synthetic primer
tgaggggtgggcaggaaggactgtgacttaggtgtttgtc

SEQ ID NO: 5715 - DNA, 40 bp, Artificial Sequence
  Description of Artificial Sequence: Synthetic primer
agcccaccagcctcgtgggcacagagggccaagccactca

SEQ ID NO: 5716 - DNA, 40 bp, Artificial Sequence
  Description of Artificial Sequence: Synthetic primer
cccaggtagtggaaactcctgcctccttccctccattcac

SEQ ID NO: 5717 - DNA, 40 bp, Artificial Sequence
  Description of Artificial Sequence: Synthetic primer
tattttcttgtaggccttgagagtaatggctaaaattatg

SEQ ID NO: 5718 - DNA, 40 bp, Artificial Sequence
  Description of Artificial Sequence: Synthetic primer
cctcccaaattaaaacccaggagcagatctgaagaaaaaa

SEQ ID NO: 5719 - DNA, 40 bp, Artificial Sequence
  Description of Artificial Sequence: Synthetic primer
cagcctacacacctcacttccactcacagagtatcatgtc

SEQ ID NO: 5720 - DNA, 40 bp, Artificial Sequence
  Description of Artificial Sequence: Synthetic primer
gagtgatcccatgacccaaattaacgcccaggaaaaatac

SEQ ID NO: 5721 - DNA, 40 bp, Artificial Sequence
  Description of Artificial Sequence: Synthetic primer
aacttgcttctgagccttccttgacccaaacatggaagag

SEQ ID NO: 5722 - DNA, 40 bp, Artificial Sequence
  Description of Artificial Sequence: Synthetic primer
tcaatgtccttcatgataccagctggttgacctcttgtcc

SEQ ID NO: 5723 - DNA, 40 bp, Artificial Sequence
  Description of Artificial Sequence: Synthetic primer
catccttcatccctcagagcaggtgagggtggagggtagg

SEQ ID NO: 5724 - DNA, 40 bp, Artificial Sequence
  Description of Artificial Sequence: Synthetic primer
gctggtggctccccagcgctccttgccactgctgtgcttg

SEQ ID NO: 5725 - DNA, 40 bp, Artificial Sequence
  Description of Artificial Sequence: Synthetic primer
ggggaccgggccagagctcacaccaacaactgcccacctc

SEQ ID NO: 5726 - DNA, 40 bp, Artificial Sequence
  Description of Artificial Sequence: Synthetic primer
ggaagctgctcctccagtgaggagcaggcggcacgcatgg

SEQ ID NO: 5727 - DNA, 40 bp, Artificial Sequence
  Description of Artificial Sequence: Synthetic primer
aggtgcaggcgggccggggccggcttcccggggccgcgag

SEQ ID NO: 5728 - DNA, 40 bp, Artificial Sequence
  Description of Artificial Sequence: Synthetic primer
cctccttcccgcctgcctgtagcggcgttgttgccactcc

SEQ ID NO: 5729 - DNA, 40 bp, Artificial Sequence
  Description of Artificial Sequence: Synthetic primer
gggcagtaaaacaacccagactttccttcaaaactcaaac

SEQ ID NO: 5730 - DNA, 40 bp, Artificial Sequence
  Description of Artificial Sequence: Synthetic primer
atgaaaacttaaatgatgaaaagagaatagcttctcaaag

SEQ ID NO: 5731 - DNA, 40 bp, Artificial Sequence
  Description of Artificial Sequence: Synthetic primer
aagcaaatatttaagaaataaataatcataggaaccattg

SEQ ID NO: 5732 - DNA, 40 bp, Artificial Sequence
  Description of Artificial Sequence: Synthetic primer
cttgttgcttatatgaaacctcccctcttttgtttaatag

SEQ ID NO: 5733 - DNA, 40 bp, Artificial Sequence
  Description of Artificial Sequence: Synthetic primer
atatttctttaggtgtataacaggaaagaattaggaacag

SEQ ID NO: 5734 - DNA, 40 bp, Artificial Sequence
  Description of Artificial Sequence: Synthetic primer
attactgaatataaatatgtgagtgtattattactgtttg

SEQ ID NO: 5735 - DNA, 40 bp, Artificial Sequence
  Description of Artificial Sequence: Synthetic primer
cctttaaactgttcacctcactgaaacctttgtgtttttg

SEQ ID NO: 5736 - DNA, 40 bp, Artificial Sequence
  Description of Artificial Sequence: Synthetic primer
taatttctaaaggctgaatgaaagggtaattcatatactg

SEQ ID NO: 5737 - DNA, 40 bp, Artificial Sequence
  Description of Artificial Sequence: Synthetic primer
taaaatgttaatttgtacataatggcttgatagcaaatag

SEQ ID NO: 5738 - DNA, 40 bp, Artificial Sequence
  Description of Artificial Sequence: Synthetic primer
ctttttaaatctgtcttgtgatcaaaataatggaaatgtg

SEQ ID NO: 5739 - DNA, 40 bp, Artificial Sequence
  Description of Artificial Sequence: Synthetic primer
tcattcaaaataggaaaaataagtttaataaaaggacagc

SEQ ID NO: 5740 - DNA, 40 bp, Artificial Sequence
  Description of Artificial Sequence: Synthetic primer
gcaaatgctcaacttccgttttgagtgtttactgattttc

SEQ ID NO: 5741 - DNA, 40 bp, Artificial Sequence
  Description of Artificial Sequence: Synthetic primer
aagaatatgaattgagaaggaaagcattgcctcaggagag

SEQ ID NO: 5742 - DNA, 40 bp, Artificial Sequence
  Description of Artificial Sequence: Synthetic primer
tcttcaaatgttcatccttgtaaacacgtgtgtgtgtgtg

SEQ ID NO: 5743 - DNA, 40 bp, Artificial Sequence
  Description of Artificial Sequence: Synthetic primer
gttctctattgcagcttctgaaccagagactgatgttgac

SEQ ID NO: 5744 - DNA, 40 bp, Artificial Sequence
  Description of Artificial Sequence: Synthetic primer
tttcttgcttgaagatcagatctctggtttatttaatatc

SEQ ID NO: 5745 - DNA, 40 bp, Artificial Sequence
  Description of Artificial Sequence: Synthetic primer
aataggtattccagcctggccctgacccacccaggacatc

SEQ ID NO: 5746 - DNA, 40 bp, Artificial Sequence
  Description of Artificial Sequence: Synthetic primer
aaagtcacgtttgggaaatggttttttccattgacccttg

SEQ ID NO: 5747 - DNA, 40 bp, Artificial Sequence
  Description of Artificial Sequence: Synthetic primer
ggcgttctgagaaggccacgagaggggctgagggagcatc

SEQ ID NO: 5748 - DNA, 40 bp, Artificial Sequence
  Description of Artificial Sequence: Synthetic primer
tcttcctgtgggcttttcttacctgccttgaactcttttg

SEQ ID NO: 5749 - DNA, 40 bp, Artificial Sequence
  Description of Artificial Sequence: Synthetic primer
aacagcacttcaaaattaaccgcataagggctgtgcttgc

SEQ ID NO: 5750 - DNA, 40 bp, Artificial Sequence
  Description of Artificial Sequence: Synthetic primer
gccacactattagctaaaaggactatttttttttctttgc

SEQ ID NO: 5751 - DNA, 40 bp, Artificial Sequence
  Description of Artificial Sequence: Synthetic primer
ccatattaatgccttatatacctctaaatgttttgggttc

SEQ ID NO: 5752 - DNA, 40 bp, Artificial Sequence
  Description of Artificial Sequence: Synthetic primer
gcctgtgtgactaatttctactctgaaatttttaatctac

SEQ ID NO: 5753 - DNA, 40 bp, Artificial Sequence
  Description of Artificial Sequence: Synthetic primer
tctttgctactggttttcccatctggaatataagttctgg

SEQ ID NO: 5754 - DNA, 40 bp, Artificial Sequence
  Description of Artificial Sequence: Synthetic primer
tcactgtgtgaaaccgaatatgtaaattcattcattcatt

SEQ ID NO: 5755 - DNA, 40 bp, Artificial Sequence
  Description of Artificial Sequence: Synthetic primer
ttcattttataacatggccagagcaggattaggagatgac

SEQ ID NO: 5756 - DNA, 40 bp, Artificial Sequence
  Description of Artificial Sequence: Synthetic primer
aatatgagtgaaaacccattttccttcctggacatgctgc

SEQ ID NO: 5757 - DNA, 40 bp, Artificial Sequence
  Description of Artificial Sequence: Synthetic primer
ctctgaccctgaacctctctgtctctcctcttgccctgtc

SEQ ID NO: 5758 - DNA, 40 bp, Artificial Sequence
  Description of Artificial Sequence: Synthetic primer
gagcgccacatgtcctctgacccctcaggacccctgaccc

SEQ ID NO: 5759 - DNA, 40 bp, Artificial Sequence
  Description of Artificial Sequence: Synthetic primer
ctgctgctccacgcctgccctggttcccatccatcctgtc

SEQ ID NO: 5760 - DNA, 40 bp, Artificial Sequence
  Description of Artificial Sequence: Synthetic primer
cggggacccaaacccagcagtgcagggcctggccctgggg

SEQ ID NO: 5761 - DNA, 40 bp, Artificial Sequence
  Description of Artificial Sequence: Synthetic primer
atgaaccccttggcccatgagggtcatgcttagaggagag

SEQ ID NO: 5762 - DNA, 40 bp, Artificial Sequence
  Description of Artificial Sequence: Synthetic primer
gcagctgccatctcttccttctcgctgacatctccatttc

SEQ ID NO: 5763 - DNA, 40 bp, Artificial Sequence
  Description of Artificial Sequence: Synthetic primer
ctgtgccaggggtgtgctggagggtggtaggggtgagagc

SEQ ID NO: 5764 - DNA, 40 bp, Artificial Sequence
  Description of Artificial Sequence: Synthetic primer
gggaaggcatgggaatcagagggcccaggatggcagatac

SEQ ID NO: 5765 - DNA, 40 bp, Artificial Sequence
  Description of Artificial Sequence: Synthetic primer
aaaaaaagtcactttttaattttatttattatttctcctc

SEQ ID NO: 5766 - DNA, 40 bp, Artificial Sequence
  Description of Artificial Sequence: Synthetic primer
acaacctgaaaaaaactgttttgtcactgtttttgttttg

SEQ ID NO: 5767 - DNA, 40 bp, Artificial Sequence
  Description of Artificial Sequence: Synthetic primer
gcgcaggacttcccagctcggacctcttgccttcgagggg

SEQ ID NO: 5768 - DNA, 40 bp, Artificial Sequence
  Description of Artificial Sequence: Synthetic primer
agaggccggtacgtacagtggtttgagccattccaaagcg

SEQ ID NO: 5769 - DNA, 40 bp, Artificial Sequence
  Description of Artificial Sequence: Synthetic primer
actgagagcccagttacgaaagccacggggccccaaactc

SEQ ID NO: 5770 - DNA, 40 bp, Artificial Sequence
  Description of Artificial Sequence: Synthetic primer
ttccctctccccaactttcttgccaccccttgccttcttg

SEQ ID NO: 5771 - DNA, 40 bp, Artificial Sequence
  Description of Artificial Sequence: Synthetic primer
ccatgactctgaaaaagagtaaacagtgaagtttaatatc

SEQ ID NO: 5772 - DNA, 40 bp, Artificial Sequence
  Description of Artificial Sequence: Synthetic primer
aagtaattatgaacatcttcacatacttctctggggaacc

SEQ ID NO: 5773 - DNA, 40 bp, Artificial Sequence
  Description of Artificial Sequence: Synthetic primer
ccagagtcacccatcatccaagtgccctcttacccccaac

SEQ ID NO: 5774 - DNA, 40 bp, Artificial Sequence
  Description of Artificial Sequence: Synthetic primer
cacccagctttcgtggcatctgaactctgcccctgtcacc

SEQ ID NO: 5775 - DNA, 40 bp, Artificial Sequence
  Description of Artificial Sequence: Synthetic primer
gggaggcttttgtgctcaactgccctgacccctcgctttc

SEQ ID NO: 5776 - DNA, 40 bp, Artificial Sequence
  Description of Artificial Sequence: Synthetic primer
atagttcacacatcactactagccactgccactgccactc

SEQ ID NO: 5777 - DNA, 40 bp, Artificial Sequence
  Description of Artificial Sequence: Synthetic primer
agccaagccaggaccccgccctgccctcacatctcctttc

SEQ ID NO: 5778 - DNA, 40 bp, Artificial Sequence
  Description of Artificial Sequence: Synthetic primer
accagaaagcagaggagagagcaggcacactagttgacac

SEQ ID NO: 5779 - DNA, 40 bp, Artificial Sequence
  Description of Artificial Sequence: Synthetic primer
accagaataacctaaaaccacacactaaccccctgtgttc

SEQ ID NO: 5780 - DNA, 40 bp, Artificial Sequence
  Description of Artificial Sequence: Synthetic primer
agaccaattattaaaggtgacagtacacaggaaacattac

SEQ ID NO: 5781 - DNA, 40 bp, Artificial Sequence
  Description of Artificial Sequence: Synthetic primer
tatatacacacatacattactaaaatgaacactgatttac

SEQ ID NO: 5782 - DNA, 40 bp, Artificial Sequence
  Description of Artificial Sequence: Synthetic primer
gagaatagcctttgctgaccgggaaggggtccgtggtaag

SEQ ID NO: 5783 - DNA, 40 bp, Artificial Sequence
  Description of Artificial Sequence: Synthetic primer
tggcagatggggagtgcgcacactgggctccctgtcttac

SEQ ID NO: 5784 - DNA, 40 bp, Artificial Sequence
  Description of Artificial Sequence: Synthetic primer
aagctaataaagttggaaatcagcgacatgaaaattctgc

SEQ ID NO: 5785 - DNA, 40 bp, Artificial Sequence
  Description of Artificial Sequence: Synthetic primer
tggaaagggattttccttttcttatctcttgcctgtgctc

SEQ ID NO: 5786 - DNA, 40 bp, Artificial Sequence
  Description of Artificial Sequence: Synthetic primer
ggggagagggcatggcggtcacggctcccctcggtgcccc

SEQ ID NO: 5787 - DNA, 40 bp, Artificial Sequence
  Description of Artificial Sequence: Synthetic primer
gctttgcccgcccgccctccgccctccgaggctggctcac

SEQ ID NO: 5788 - DNA, 40 bp, Artificial Sequence
  Description of Artificial Sequence: Synthetic primer
tctctacctctgggctaagggcaaggagaaggaacaggtg

SEQ ID NO: 5789 - DNA, 40 bp, Artificial Sequence
  Description of Artificial Sequence: Synthetic primer
ggcaggggtttgtgcctccaatgagcacaagctccccctg

SEQ ID NO: 5790 - DNA, 40 bp, Artificial Sequence
  Description of Artificial Sequence: Synthetic primer
catcccacccctgcaccctggcctgtcctgacctttgcac

SEQ ID NO: 5791 - DNA, 40 bp, Artificial Sequence
  Description of Artificial Sequence: Synthetic primer
acggggtttctggggcctcagtgggacaagggaggctgtg

SEQ ID NO: 5792 - DNA, 40 bp, Artificial Sequence
  Description of Artificial Sequence: Synthetic primer
aatacttttggggtgctaattaacatgatgtgtttttctc

SEQ ID NO: 5793 - DNA, 40 bp, Artificial Sequence
  Description of Artificial Sequence: Synthetic primer
aaatatttgtctaatgaattttttgaggttacagagagag

SEQ ID NO: 5794 - DNA, 40 bp, Artificial Sequence
  Description of Artificial Sequence: Synthetic primer
tcatctctgaaaagattaactacacacatacaatgaaaag

SEQ ID NO: 5795 - DNA, 40 bp, Artificial Sequence
  Description of Artificial Sequence: Synthetic primer
ttttaatcctttgcattagaattaactccctctcttggac

SEQ ID NO: 5796 - DNA, 40 bp, Artificial Sequence
  Description of Artificial Sequence: Synthetic primer
actcagaagtcacaccagcaaagttataatctatttttat

SEQ ID NO: 5797 - DNA, 40 bp, Artificial Sequence
  Description of Artificial Sequence: Synthetic primer
tctgagcaccttttacaaagtgtcttttcttgatgttttc

SEQ ID NO: 5798 - DNA, 40 bp, Artificial Sequence
  Description of Artificial Sequence: Synthetic primer
aaccctctcccttgccccactccatctatacagacacagc

SEQ ID NO: 5799 - DNA, 40 bp, Artificial Sequence
  Description of Artificial Sequence: Synthetic primer
tacctggtatgttttctttcaggtgtggttcaataacaag

SEQ ID NO: 5800 - DNA, 40 bp, Artificial Sequence
  Description of Artificial Sequence: Synthetic primer
tggctgtgcgtgccagccttctggtgccctccccgcctgc

SEQ ID NO: 5801 - DNA, 40 bp, Artificial Sequence
  Description of Artificial Sequence: Synthetic primer
gctcagaggacccagctctctgtgcttcatgtgttacctc

SEQ ID NO: 5802 - DNA, 40 bp, Artificial Sequence
  Description of Artificial Sequence: Synthetic primer
ctgcttgtcgacctgggtgctggctgtcctattttactac

SEQ ID NO: 5803 - DNA, 40 bp, Artificial Sequence
  Description of Artificial Sequence: Synthetic primer
caggcctgctcccacggggacccctacagcccccgccctc

SEQ ID NO: 5804 - DNA, 40 bp, Artificial Sequence
  Description of Artificial Sequence: Synthetic primer
cttttttttccagcatgacatagagtacaacatacaattc

SEQ ID NO: 5805 - DNA, 40 bp, Artificial Sequence
  Description of Artificial Sequence: Synthetic primer
ccagctccgacagactgattcttacgaccccatgacaacg

SEQ ID NO: 5806 - DNA, 40 bp, Artificial Sequence
  Description of Artificial Sequence: Synthetic primer
cagaagaaacctggaagtagtcatccccttctaaccgttg

SEQ ID NO: 5807 - DNA, 40 bp, Artificial Sequence
  Description of Artificial Sequence: Synthetic primer
aggactttccttgtcagtctctcacaggtctcttctcttc

SEQ ID NO: 5808 - DNA, 40 bp, Artificial Sequence
  Description of Artificial Sequence: Synthetic primer
aagtatatctatttgcaaaacatttttattcagtgtcatc

SEQ ID NO: 5809 - DNA, 40 bp, Artificial Sequence
  Description of Artificial Sequence: Synthetic primer
cagtataactaatctgactttttataggagttttaccatg

SEQ ID NO: 5810 - DNA, 40 bp, Artificial Sequence
  Description of Artificial Sequence: Synthetic primer
cgagccagtctggggaccggggaggcggggagagggaagg

SEQ ID NO: 5811 - DNA, 40 bp, Artificial Sequence
  Description of Artificial Sequence: Synthetic primer
tgcgtggagctgggagctaggtcctcggagtgggccagag

SEQ ID NO: 5812 - DNA, 40 bp, Artificial Sequence
  Description of Artificial Sequence: Synthetic primer
gactccttcaagtctcaggtgtgtttgtccctggctcttc

SEQ ID NO: 5813 - DNA, 40 bp, Artificial Sequence
  Description of Artificial Sequence: Synthetic primer
cctgccattgtcctgtctgcctccctgctgtcctcactgc

SEQ ID NO: 5814 - DNA, 40 bp, Artificial Sequence
  Description of Artificial Sequence: Synthetic primer
aaaacacaaaggtttatatagttgctcttttatgttttgc

SEQ ID NO: 5815 - DNA, 40 bp, Artificial Sequence
  Description of Artificial Sequence: Synthetic primer
agcgcagaccttcccattacagttcatttctatgtatttg

SEQ ID NO: 5816 - DNA, 40 bp, Artificial Sequence
  Description of Artificial Sequence: Synthetic primer
cccgccacgagctcagaagcaggtataataccacatccac

SEQ ID NO: 5817 - DNA, 40 bp, Artificial Sequence
  Description of Artificial Sequence: Synthetic primer
actttttgatctctgacttgaagtttttgtctgtttctcc

SEQ ID NO: 5818 - DNA, 40 bp, Artificial Sequence
  Description of Artificial Sequence: Synthetic primer
atcagggccagggactgcactcaccaaggcaatgagatag

SEQ ID NO: 5819 - DNA, 40 bp, Artificial Sequence
  Description of Artificial Sequence: Synthetic primer
gggcgcctcctctgggagactgccctgaccactgcttttc

SEQ ID NO: 5820 - DNA, 40 bp, Artificial Sequence
  Description of Artificial Sequence: Synthetic primer
gagtgctggggtcagagtgaactcactggtgaggtagcag

SEQ ID NO: 5821 - DNA, 40 bp, Artificial Sequence
  Description of Artificial Sequence: Synthetic primer
ccccagtttgctcctcacacacattcctcttgatgtgtac

SEQ ID NO: 5822 - DNA, 40 bp, Artificial Sequence
  Description of Artificial Sequence: Synthetic primer
gattgaaggaaatagggcgatgaattgatgctaatgaatg

SEQ ID NO: 5823 - DNA, 40 bp, Artificial Sequence
  Description of Artificial Sequence: Synthetic primer
ctaatcttgaccttaatgaaatttttatttcttaaaaaag

SEQ ID NO: 5824 - DNA, 40 bp, Artificial Sequence
  Description of Artificial Sequence: Synthetic primer
cgtaacaactttttgtaccaacacattattgtactttttc

SEQ ID NO: 5825 - DNA, 40 bp, Artificial Sequence
  Description of Artificial Sequence: Synthetic primer
aggtagcaattgttacatgagcttgtttttaaatctttta

SEQ ID NO: 5826 - DNA, 40 bp, Artificial Sequence
  Description of Artificial Sequence: Synthetic primer
gcccaggagtcatgatgaggagccagagacaggatgaaag

SEQ ID NO: 5827 - DNA, 40 bp, Artificial Sequence
  Description of Artificial Sequence: Synthetic primer
ggaagcatcaaatctgcctttttaattgagttggttttcc

SEQ ID NO: 5828 - DNA, 40 bp, Artificial Sequence
  Description of Artificial Sequence: Synthetic primer
gcagagctggctccatccttaagttctgtgccggcagctt

SEQ ID NO: 5829 - DNA, 40 bp, Artificial Sequence
  Description of Artificial Sequence: Synthetic primer
atcccagcctggacttgacacgttgctctctgtttttacc

SEQ ID NO: 5830 - DNA, 40 bp, Artificial Sequence
  Description of Artificial Sequence: Synthetic primer
gtttctatttgctaatgctgtttctgttgacttttgactt

SEQ ID NO: 5831 - DNA, 40 bp, Artificial Sequence
  Description of Artificial Sequence: Synthetic primer
taaaaaaacaagacacccaaacaaggaactcagagaggac

SEQ ID NO: 5832 - DNA, 40 bp, Artificial Sequence
  Description of Artificial Sequence: Synthetic primer
tacaggtttagaagaatttgggaggggaatgtgggaggag

SEQ ID NO: 5833 - DNA, 40 bp, Artificial Sequence
  Description of Artificial Sequence: Synthetic primer
ttctgccttgtcccctctctttccttgtctaccttatttc

SEQ ID NO: 5834 - DNA, 40 bp, Artificial Sequence
  Description of Artificial Sequence: Synthetic primer
aggtgacatggcagttggtagaacatgatgtaaaggttag

SEQ ID NO: 5835 - DNA, 40 bp, Artificial Sequence
  Description of Artificial Sequence: Synthetic primer
gtgttcaacaactaatttatatttaaataaatcggttttc

SEQ ID NO: 5836 - DNA, 40 bp, Artificial Sequence
  Description of Artificial Sequence: Synthetic primer
tatcttgaatctaaaatgaaatcaggacatttcatagagc

SEQ ID NO: 5837 - DNA, 40 bp, Artificial Sequence
  Description of Artificial Sequence: Synthetic primer
aactgcagattaagccaacaggcaggctgctgatagaacc

SEQ ID NO: 5838 - DNA, 40 bp, Artificial Sequence
  Description of Artificial Sequence: Synthetic primer
tgtgtgttagtagccagcagttaacacctattttcctgtc

SEQ ID NO: 5839 - DNA, 40 bp, Artificial Sequence
  Description of Artificial Sequence: Synthetic primer
gaaaagtagcttctctttagaaggtgaaaagatcaggaac

SEQ ID NO: 5840 - DNA, 40 bp, Artificial Sequence
  Description of Artificial Sequence: Synthetic primer
ccatacatctaattccttaaagtagttttatatgtaaaac

SEQ ID NO: 5841 - DNA, 40 bp, Artificial Sequence
  Description of Artificial Sequence: Synthetic primer
aagggacaacagttaagctttatggttatttgcattttag

SEQ ID NO: 5842 - DNA, 40 bp, Artificial Sequence
  Description of Artificial Sequence: Synthetic primer
tttaatttattaaaaaccaatttgtttcttttttgttttg

SEQ ID NO: 5843 - DNA, 40 bp, Artificial Sequence
  Description of Artificial Sequence: Synthetic primer
ccttgatttaactatgaacaactaagcattgcatttcagg

SEQ ID NO: 5844 - DNA, 40 bp, Artificial Sequence
  Description of Artificial Sequence: Synthetic primer
aaaaaattctctaggagttagtagaaacagtaacaagacc

SEQ ID NO: 5845 - DNA, 40 bp, Artificial Sequence
  Description of Artificial Sequence: Synthetic primer
ctgacttattaactgaatgtttctatcaccttttgtcttg

SEQ ID NO: 5846 - DNA, 40 bp, Artificial Sequence
  Description of Artificial Sequence: Synthetic primer
ccacccagcacccctgacttcccaggtgccatcgaagaac

SEQ ID NO: 5847 - DNA, 40 bp, Artificial Sequence
  Description of Artificial Sequence: Synthetic primer
tatggtttaattatttgtttgttatttgggactttctctc

SEQ ID NO: 5848 - DNA, 40 bp, Artificial Sequence
  Description of Artificial Sequence: Synthetic primer
gagagtttttatactagtgattttaaactataatttttgc

SEQ ID NO: 5849 - DNA, 40 bp, Artificial Sequence
  Description of Artificial Sequence: Synthetic primer
caaaacaacaacaacaaaaaaacctgtagttcaactaaac

SEQ ID NO: 5850 - DNA, 40 bp, Artificial Sequence
  Description of Artificial Sequence: Synthetic primer
tctgactggctaagtttcctgaaataatattaattctgtc

SEQ ID NO: 5851 - DNA, 40 bp, Artificial Sequence
  Description of Artificial Sequence: Synthetic primer
gcactgggcggtggccagggccatccccaagggcccctgg

SEQ ID NO: 5852 - DNA, 40 bp, Artificial Sequence
  Description of Artificial Sequence: Synthetic primer
tgatttttcagcaacctccaagaaagcacaatgcaagaag

SEQ ID NO: 5853 - DNA, 40 bp, Artificial Sequence
  Description of Artificial Sequence: Synthetic primer
ttataagagctgcatgaaaatgttgatgtgtcttgcatag

SEQ ID NO: 5854 - DNA, 40 bp, Artificial Sequence
  Description of Artificial Sequence: Synthetic primer
aaggtctccgagtcgggttctgatccactgtgctcttttc

SEQ ID NO: 5855 - DNA, 40 bp, Artificial Sequence
  Description of Artificial Sequence: Synthetic primer
ggacctgagtcgggcagccgctctcccggaactggaaggg

SEQ ID NO: 5856 - DNA, 40 bp, Artificial Sequence
  Description of Artificial Sequence: Synthetic primer
tatccacaacagaatctgatttaatcagagtgtaaaatag

SEQ ID NO: 5857 - DNA, 40 bp, Artificial Sequence
  Description of Artificial Sequence: Synthetic primer
gtaaatctgaatattgtttgaaaattacggatgtgaaaag

SEQ ID NO: 5858 - DNA, 40 bp, Artificial Sequence
  Description of Artificial Sequence: Synthetic primer
aggacttaaggaagtcactgtaagatgctattctgtttcc

SEQ ID NO: 5859 - DNA, 40 bp, Artificial Sequence
  Description of Artificial Sequence: Synthetic primer
gtggcacaggctgataatgatctgaggatgactgcttatc

SEQ ID NO: 5860 - DNA, 40 bp, Artificial Sequence
  Description of Artificial Sequence: Synthetic primer
aaagtaaaatgataaatttttataagctacagagacaaac

SEQ ID NO: 5861 - DNA, 40 bp, Artificial Sequence
  Description of Artificial Sequence: Synthetic primer
gaagacctgtgaaactttaatagtgccttttattccatat

SEQ ID NO: 5862 - DNA, 40 bp, Artificial Sequence
  Description of Artificial Sequence: Synthetic primer
attaatttttaaaataaacaggaaacaaatcaggctgctg

SEQ ID NO: 5863 - DNA, 40 bp, Artificial Sequence
  Description of Artificial Sequence: Synthetic primer
agaacgtctgctactctatacatttaaaatgacttgtagg

SEQ ID NO: 5864 - DNA, 40 bp, Artificial Sequence
  Description of Artificial Sequence: Synthetic primer
gaagaccacctaagcagggcagcccactccccacctcgtg

SEQ ID NO: 5865 - DNA, 40 bp, Artificial Sequence
  Description of Artificial Sequence: Synthetic primer
aagcagccagcgcctgcctgaatctgttctgccccctccc

SEQ ID NO: 5866 - DNA, 40 bp, Artificial Sequence
  Description of Artificial Sequence: Synthetic primer
cggccgcgggtgctcacccggcccggtgccacccgggtcc

SEQ ID NO: 5867 - DNA, 40 bp, Artificial Sequence
  Description of Artificial Sequence: Synthetic primer
cctgtctcttttgtactcacaacggtcacgtttgccttcc

SEQ ID NO: 5868 - DNA, 40 bp, Artificial Sequence
  Description of Artificial Sequence: Synthetic primer
agaaacacaaatcctacactccccagctctgcaggacaag

SEQ ID NO: 5869 - DNA, 40 bp, Artificial Sequence
  Description of Artificial Sequence: Synthetic primer
gccttccttccatgctgccccttcctcctttcctcttcac

SEQ ID NO: 5870 - DNA, 40 bp, Artificial Sequence
  Description of Artificial Sequence: Synthetic primer
gtgtgcttctccatgtgcaacctctctcacctcccctctc

SEQ ID NO: 5871 - DNA, 40 bp, Artificial Sequence
  Description of Artificial Sequence: Synthetic primer
ggcagttttggtcccggtccagaggggcgctgtgacttac

SEQ ID NO: 5872 - DNA, 40 bp, Artificial Sequence
  Description of Artificial Sequence: Synthetic primer
caccccgttctgattctgcaccctcactccatccccactc

SEQ ID NO: 5873 - DNA, 40 bp, Artificial Sequence
  Description of Artificial Sequence: Synthetic primer
gctgagagtcctgtgtcctgaaggagcccagtggctggac

SEQ ID NO: 5874 - DNA, 40 bp, Artificial Sequence
  Description of Artificial Sequence: Synthetic primer
ggcgccaaacacagactggctcttcctgcctccctgatgg

SEQ ID NO: 5875 - DNA, 40 bp, Artificial Sequence
  Description of Artificial Sequence: Synthetic primer
acctgaggcaggctagtgtgggtgtgtttcccctctgacc

SEQ ID NO: 5876 - DNA, 40 bp, Artificial Sequence
  Description of Artificial Sequence: Synthetic primer
tgtataatacttgaactgtactgattattatttattattt

SEQ ID NO: 5877 - DNA, 40 bp, Artificial Sequence
  Description of Artificial Sequence: Synthetic primer
caatttattcatatatatgtatgtgtgtgcatcttactta

SEQ ID NO: 5878 - DNA, 40 bp, Artificial Sequence
  Description of Artificial Sequence: Synthetic primer
ttggtgaaatctggtagagtccctgaagtcagaaaataat

SEQ ID NO: 5879 - DNA, 40 bp, Artificial Sequence
  Description of Artificial Sequence: Synthetic primer
atttccttcagtgctggacaggctgctgtgaagggacatc

SEQ ID NO: 5880 - DNA, 40 bp, Artificial Sequence
  Description of Artificial Sequence: Synthetic primer
agataaaacagaaagatagatcaccacataattttgcttt

SEQ ID NO: 5881 - DNA, 40 bp, Artificial Sequence
  Description of Artificial Sequence: Synthetic primer
cactttggttgtatagtaatccaagtctgttttcttgttg

SEQ ID NO: 5882 - DNA, 40 bp, Artificial Sequence
  Description of Artificial Sequence: Synthetic primer
tagagaaggggaggggccctgagtggccacagaggccggg

SEQ ID NO: 5883 - DNA, 40 bp, Artificial Sequence
  Description of Artificial Sequence: Synthetic primer
cgagggcgggaccggcaccctcgggtttcactgggctctg

SEQ ID NO: 5884 - DNA, 40 bp, Artificial Sequence
  Description of Artificial Sequence: Synthetic primer
attgtttagtaaattattaatgctcattctttacatatgc

SEQ ID NO: 5885 - DNA, 40 bp, Artificial Sequence
  Description of Artificial Sequence: Synthetic primer
agtattatatcttaaaattattagattattcaaacaatat

SEQ ID NO: 5886 - DNA, 40 bp, Artificial Sequence
  Description of Artificial Sequence: Synthetic primer
acttctagttcttgtaacttctctcctttacccccattag

SEQ ID NO: 5887 - DNA, 40 bp, Artificial Sequence
  Description of Artificial Sequence: Synthetic primer
ggggagcctcctgcgaggccatgaggtggctgggctctta

SEQ ID NO: 5888 - DNA, 40 bp, Artificial Sequence
  Description of Artificial Sequence: Synthetic primer
ttaattttgttttcccacagaattttgtacgtcatcactg

SEQ ID NO: 5889 - DNA, 40 bp, Artificial Sequence
  Description of Artificial Sequence: Synthetic primer
ggggtggggcaagctggttctcctcccctccccaactcag

SEQ ID NO: 5890 - DNA, 40 bp, Artificial Sequence
  Description of Artificial Sequence: Synthetic primer
cagggtccctgccatgggtagtaagggcagcagagactgg

SEQ ID NO: 5891 - DNA, 40 bp, Artificial Sequence
  Description of Artificial Sequence: Synthetic primer
ccaagcagccacctaaccatccagaccccaccccactcac

SEQ ID NO: 5892 - DNA, 40 bp, Artificial Sequence
  Description of Artificial Sequence: Synthetic primer
ggagatcccattgcctcactggacagaagaggagaccaag

SEQ ID NO: 5893 - DNA, 40 bp, Artificial Sequence
  Description of Artificial Sequence: Synthetic primer
ggacccaggcgcgcccaccgatgaccccatcttcaagacc

SEQ ID NO: 5894 - DNA, 40 bp, Artificial Sequence
  Description of Artificial Sequence: Synthetic primer
catgagggaggcgggtcgaccccgctgcacagtccggccg

SEQ ID NO: 5895 - DNA, 40 bp, Artificial Sequence
  Description of Artificial Sequence: Synthetic primer
tcttctctaaggtctagaaataactgcacgggattcttgc

SEQ ID NO: 5896 - DNA, 40 bp, Artificial Sequence
  Description of Artificial Sequence: Synthetic primer
cagtattgtccaaatatgtgaatttgcccttttctcttac

SEQ ID NO: 5897 - DNA, 40 bp, Artificial Sequence
  Description of Artificial Sequence: Synthetic primer
ggtgacagaaggggaaagggtcctctgatcattgctcacc

SEQ ID NO: 5898 - DNA, 40 bp, Artificial Sequence
  Description of Artificial Sequence: Synthetic primer
ctgtctgagagaagaggcagcagggaggggcatggcttac

SEQ ID NO: 5899 - DNA, 40 bp, Artificial Sequence
  Description of Artificial Sequence: Synthetic primer
ctcttccaagcatatatacgaaactgatataaagaaaaag

SEQ ID NO: 5900 - DNA, 40 bp, Artificial Sequence
  Description of Artificial Sequence: Synthetic primer
acagtatgtgcatataaacaatttttgtgttttctgtttt

SEQ ID NO: 5901 - DNA, 40 bp, Artificial Sequence
  Description of Artificial Sequence: Synthetic primer
attcatgaattagatacttgcatcttaacatttgaaataa

SEQ ID NO: 5902 - DNA, 40 bp, Artificial Sequence
  Description of Artificial Sequence: Synthetic primer
aacagaatttgaatcaataaagaatgaaataaatcagaac

SEQ ID NO: 5903 - DNA, 40 bp, Artificial Sequence
  Description of Artificial Sequence: Synthetic primer
caaaaacaaaacaggggagagtggacacacaaggcctctc

SEQ ID NO: 5904 - DNA, 40 bp, Artificial Sequence
  Description of Artificial Sequence: Synthetic primer
ggctctcggccccacgctcaccccggccccgccctctccc

SEQ ID NO: 5905 - DNA, 40 bp, Artificial Sequence
  Description of Artificial Sequence: Synthetic primer
tcctggctgcccagacccaacaccagcccagcaccaagac

SEQ ID NO: 5906 - DNA, 40 bp, Artificial Sequence
  Description of Artificial Sequence: Synthetic primer
caaatcagaactgagaggcctcacctgtcccacatccttg

SEQ ID NO: 5907 - DNA, 40 bp, Artificial Sequence
  Description of Artificial Sequence: Synthetic primer
tgtctgctcttctgtttcctctctcctgtgtggcagtaag

SEQ ID NO: 5908 - DNA, 40 bp, Artificial Sequence
  Description of Artificial Sequence: Synthetic primer
aatactgcgtgtcagatggttaaaattacccgtgttcatc

SEQ ID NO: 5909 - DNA, 40 bp, Artificial Sequence
  Description of Artificial Sequence: Synthetic primer
ggcaggtggagctacctccttctctgtgccgagcctcttg

SEQ ID NO: 5910 - DNA, 40 bp, Artificial Sequence
  Description of Artificial Sequence: Synthetic primer
aaacccacctggtaaggtggctgagcgccctctgtctttc

SEQ ID NO: 5911 - DNA, 40 bp, Artificial Sequence
  Description of Artificial Sequence: Synthetic primer
gatttctccagccaagaagaaatcccgtcccagggctgtc

SEQ ID NO: 5912 - DNA, 40 bp, Artificial Sequence
  Description of Artificial Sequence: Synthetic primer
acttcagcctagtgaacaaaactccatcactgccctttag

SEQ ID NO: 5913 - DNA, 40 bp, Artificial Sequence
  Description of Artificial Sequence: Synthetic primer
cctctcatgtccctgcttccctttcaccccacccattctg

SEQ ID NO: 5914 - DNA, 40 bp, Artificial Sequence
  Description of Artificial Sequence: Synthetic primer
ctcactatgtcagcgcctgacaccaccccagtccccactg

SEQ ID NO: 5915 - DNA, 40 bp, Artificial Sequence
  Description of Artificial Sequence: Synthetic primer
ggagtctcccactcatccccaaaacaaaacaccaaacaag

SEQ ID NO: 5916 - DNA, 40 bp, Artificial Sequence
  Description of Artificial Sequence: Synthetic primer
tgggtcctcacaaaccgctgacctcctgctgcgttctctc

SEQ ID NO: 5917 - DNA, 40 bp, Artificial Sequence
  Description of Artificial Sequence: Synthetic primer
ttgtggttacaagcacagaattcatggtttcctatttttc

SEQ ID NO: 5918 - DNA, 40 bp, Artificial Sequence
  Description of Artificial Sequence: Synthetic primer
catgttcagatccaactttcacgagaagattaagaaaatc

SEQ ID NO: 5919 - DNA, 40 bp, Artificial Sequence
  Description of Artificial Sequence: Synthetic primer
gtgtccgccccaccagagcaccccgtgtctgctccctccc

SEQ ID NO: 5920 - DNA, 40 bp, Artificial Sequence
  Description of Artificial Sequence: Synthetic primer
ggagtgtctggtgcgtcccggtccctctgaggtgctgaag

SEQ ID NO: 5921 - DNA, 40 bp, Artificial Sequence
  Description of Artificial Sequence: Synthetic primer
ttggggagggcgaccagctggcctgtgccgtagccggtca

SEQ ID NO: 5922 - DNA, 40 bp, Artificial Sequence
  Description of Artificial Sequence: Synthetic primer
ccccaaccaggcagaaaggaggggccccagagggagaggc

SEQ ID NO: 5923 - DNA, 40 bp, Artificial Sequence
  Description of Artificial Sequence: Synthetic primer
gttctcccctaccctgcttatttgtttgtttaaaacttcc

SEQ ID NO: 5924 - DNA, 40 bp, Artificial Sequence
  Description of Artificial Sequence: Synthetic primer
agagaagccagttgatgctcatttctgatcaaactcctgc

SEQ ID NO: 5925 - DNA, 40 bp, Artificial Sequence
  Description of Artificial Sequence: Synthetic primer
agggcctggcggtgcccttccctgggcgtcactgtgtacc

SEQ ID NO: 5926 - DNA, 40 bp, Artificial Sequence
  Description of Artificial Sequence: Synthetic primer
gacaaactctgaaggtaaatgtcagaaagtaatcaaaaag

SEQ ID NO: 5927 - DNA, 40 bp, Artificial Sequence
  Description of Artificial Sequence: Synthetic primer
ttgtggtcatgggccaaatctcaggctatgggcccctctg

SEQ ID NO: 5928 - DNA, 40 bp, Artificial Sequence
  Description of Artificial Sequence: Synthetic primer
tactgaggctgggagtggggaggcaggctcggcccaagac

SEQ ID NO: 5929 - DNA, 40 bp, Artificial Sequence
  Description of Artificial Sequence: Synthetic primer
ggaaaatgaggacaattactgaagcaactgtcctaaaatc

SEQ ID NO: 5930 - DNA, 40 bp, Artificial Sequence
  Description of Artificial Sequence: Synthetic primer
agtatatactcagttctctccacacttcccacatacttac

SEQ ID NO: 5931 - DNA, 40 bp, Artificial Sequence
  Description of Artificial Sequence: Synthetic primer
attgttaatgatatgaatattgaaatttcttttgtctttc

SEQ ID NO: 5932 - DNA, 40 bp, Artificial Sequence
  Description of Artificial Sequence: Synthetic primer
atcgacatagttcattcttcttgactttccttttaattcc

SEQ ID NO: 5933 - DNA, 40 bp, Artificial Sequence
  Description of Artificial Sequence: Synthetic primer
ggcagagccagccctaatacacacattgctgtttgtctgc

SEQ ID NO: 5934 - DNA, 40 bp, Artificial Sequence
  Description of Artificial Sequence: Synthetic primer
gacaagacgcttgttctgaggtctgcatggccccttgacc

SEQ ID NO: 5935 - DNA, 40 bp, Artificial Sequence
  Description of Artificial Sequence: Synthetic primer
gtacaattttatgcattaattcatggccaaatttgaaatc

SEQ ID NO: 5936 - DNA, 40 bp, Artificial Sequence
  Description of Artificial Sequence: Synthetic primer
taagccacagtattccaaaacgaaaaaaatgttccccacc

SEQ ID NO: 5937 - DNA, 40 bp, Artificial Sequence
  Description of Artificial Sequence: Synthetic primer
ttagctgaataaattcatcaaaatttaattttttttaaac

SEQ ID NO: 5938 - DNA, 40 bp, Artificial Sequence
  Description of Artificial Sequence: Synthetic primer
cagtttagaaaattgcctaatatcaaaaagaaatactcac

SEQ ID NO: 5939 - DNA, 40 bp, Artificial Sequence
  Description of Artificial Sequence: Synthetic primer
tgtatccctgaccaagcgtccattaacactttgacaattg

SEQ ID NO: 5940 - DNA, 40 bp, Artificial Sequence
  Description of Artificial Sequence: Synthetic primer
agtggatttcaaaaaacataatatataaaaatctcagagg

SEQ ID NO: 5941 - DNA, 40 bp, Artificial Sequence
  Description of Artificial Sequence: Synthetic primer
tctcccagagagtgcatgttttgcttttctaatgttaatg

SEQ ID NO: 5942 - DNA, 40 bp, Artificial Sequence
  Description of Artificial Sequence: Synthetic primer
tttggctcttaggatctgctcataggatcaaaaatagaag

SEQ ID NO: 5943 - DNA, 40 bp, Artificial Sequence
  Description of Artificial Sequence: Synthetic primer
cacagactgagaaggaagaggatattaatggcatttttgc

SEQ ID NO: 5944 - DNA, 40 bp, Artificial Sequence
  Description of Artificial Sequence: Synthetic primer
cacctgcatccaagtgcatcatcaaacccctgagttgctc

SEQ ID NO: 5945 - DNA, 40 bp, Artificial Sequence
  Description of Artificial Sequence: Synthetic primer
agggaaagtgaattctgctggctctgagcagatttgtatg

SEQ ID NO: 5946 - DNA, 40 bp, Artificial Sequence
  Description of Artificial Sequence: Synthetic primer
ctgccagtgggcactgagagccttgaaagccaggaaatgc

SEQ ID NO: 5947 - DNA, 40 bp, Artificial Sequence
  Description of Artificial Sequence: Synthetic primer
caaaagacacaagatgcctgactgtccacatgtctctctc

SEQ ID NO: 5948 - DNA, 40 bp, Artificial Sequence
  Description of Artificial Sequence: Synthetic primer
gttttggcctgagttttcctcccaccccagttcagcaaag

SEQ ID NO: 5949 - DNA, 40 bp, Artificial Sequence
  Description of Artificial Sequence: Synthetic primer
ttacataagtacaagtcactagagtggtgcagcctatttt

SEQ ID NO: 5950 - DNA, 40 bp, Artificial Sequence
  Description of Artificial Sequence: Synthetic primer
tcaaggctgccctgactgtcatgctccctgtcttccacag

SEQ ID NO: 5951 - DNA, 40 bp, Artificial Sequence
  Description of Artificial Sequence: Synthetic primer
ccgctttaatcccttcagctgcctttccgctgttgttttg

SEQ ID NO: 5952 - DNA, 40 bp, Artificial Sequence
  Description of Artificial Sequence: Synthetic primer
tgctaaagacattgaacagggtttgagcagttcttattcc

SEQ ID NO: 5953 - DNA, 40 bp, Artificial Sequence
  Description of Artificial Sequence: Synthetic primer
tgctaaatatgtttgtcaaactgtgttgtgatttgttctc

SEQ ID NO: 5954 - DNA, 40 bp, Artificial Sequence
  Description of Artificial Sequence: Synthetic primer
aaagaaagaaagaaatctgcaagagtaaaaacaataaatt

SEQ ID NO: 5955 - DNA, 40 bp, Artificial Sequence
  Description of Artificial Sequence: Synthetic primer
atactgagttgtatctagttgtggcacatggcttggagtg

SEQ ID NO: 5956 - DNA, 40 bp, Artificial Sequence
  Description of Artificial Sequence: Synthetic primer
atttttaaaaagcatcacagagaggaaggatagtgcaaag

SEQ ID NO: 5957 - DNA, 40 bp, Artificial Sequence
  Description of Artificial Sequence: Synthetic primer
tattcacaattctctgatgagaaaaatcaagacccgagac

SEQ ID NO: 5958 - DNA, 40 bp, Artificial Sequence
  Description of Artificial Sequence: Synthetic primer
tccacctttccttccacccctcaccttatgttctgtgttg

SEQ ID NO: 5959 - DNA, 40 bp, Artificial Sequence
  Description of Artificial Sequence: Synthetic primer
accccagcctccatggccaagtaccgggtcccctgtgaag

SEQ ID NO: 5960 - DNA, 40 bp, Artificial Sequence
  Description of Artificial Sequence: Synthetic primer
ggggactctagctggtttttaatcccctggtgtttggtag

SEQ ID NO: 5961 - DNA, 40 bp, Artificial Sequence
  Description of Artificial Sequence: Synthetic primer
agaagagggagctaacggctcagagctggagacccagtcc

SEQ ID NO: 5962 - DNA, 40 bp, Artificial Sequence
  Description of Artificial Sequence: Synthetic primer
tggccgcccatggcctcccagtcattctgctccactcctg

SEQ ID NO: 5963 - DNA, 40 bp, Artificial Sequence
  Description of Artificial Sequence: Synthetic primer
tgaggtgctacccgcagctttcccctccaggctgcgagat

SEQ ID NO: 5964 - DNA, 40 bp, Artificial Sequence
  Description of Artificial Sequence: Synthetic primer
gggcggggcctcaccagttacgtggatctcatctgctgtg

SEQ ID NO: 5965 - DNA, 40 bp, Artificial Sequence
  Description of Artificial Sequence: Synthetic primer
ctataatagtcgactgcctgataagacatgaagatgattc

SEQ ID NO: 5966 - DNA, 40 bp, Artificial Sequence
  Description of Artificial Sequence: Synthetic primer
catacaggttacttctttgcttattgccacctacttaacc

SEQ ID NO: 5967 - DNA, 40 bp, Artificial Sequence
  Description of Artificial Sequence: Synthetic primer
cttcaaagggtctcttacagcatgtctttctttttggaac

SEQ ID NO: 5968 - DNA, 40 bp, Artificial Sequence
  Description of Artificial Sequence: Synthetic primer
tgaaaaaaccattggacaaagtgtggactgttgctttgac

SEQ ID NO: 5969 - DNA, 40 bp, Artificial Sequence
  Description of Artificial Sequence: Synthetic primer
ggataaagacattatcttgtaactcaatcaaattagacaa

SEQ ID NO: 5970 - DNA, 40 bp, Artificial Sequence
  Description of Artificial Sequence: Synthetic primer
gaaattttgactccttagagattttataaatgtgttactc

SEQ ID NO: 5971 - DNA, 40 bp, Artificial Sequence
  Description of Artificial Sequence: Synthetic primer
tttgaaatttgtactatataaatgtttaaagtaagtaaac

SEQ ID NO: 5972 - DNA, 40 bp, Artificial Sequence
  Description of Artificial Sequence: Synthetic primer
gaattttaacatttggttggatcttaaaatacatgtttac

SEQ ID NO: 5973 - DNA, 40 bp, Artificial Sequence
  Description of Artificial Sequence: Synthetic primer
aacctcaccccattaattgactgacattaccacccccaag

SEQ ID NO: 5974 - DNA, 40 bp, Artificial Sequence
  Description of Artificial Sequence: Synthetic primer
cagtatgaaagcctaagtgccaatcatggaattttctttc

SEQ ID NO: 5975 - DNA, 40 bp, Artificial Sequence
  Description of Artificial Sequence: Synthetic primer
ggggccagtaacccaccttctgtcccaccccttcctgctg

SEQ ID NO: 5976 - DNA, 40 bp, Artificial Sequence
  Description of Artificial Sequence: Synthetic primer
gtatattttgttgcccaactggtcctggcctggtcttcac

SEQ ID NO: 5977 - DNA, 40 bp, Artificial Sequence
  Description of Artificial Sequence: Synthetic primer
ctgatgagtagggttctggccacccacagggaagggatgg

SEQ ID NO: 5978 - DNA, 40 bp, Artificial Sequence
  Description of Artificial Sequence: Synthetic primer
ccatgagaatctcaagctaacgtgcctcgttttcctcctc

SEQ ID NO: 5979 - DNA, 40 bp, Artificial Sequence
  Description of Artificial Sequence: Synthetic primer
gagctccacgggcaagctgggtttcacgctccctgtcttc

SEQ ID NO: 5980 - DNA, 40 bp, Artificial Sequence
  Description of Artificial Sequence: Synthetic primer
cagccggtgtcgaggctggcaggcgcggaggaaaggaagg

SEQ ID NO: 5981 - DNA, 40 bp, Artificial Sequence
  Description of Artificial Sequence: Synthetic primer
aaaattatacatttattgagtctagcctatagtatgattg

SEQ ID NO: 5982 - DNA, 40 bp, Artificial Sequence
  Description of Artificial Sequence: Synthetic primer
taagtagttgaaatacatggtatgtctaaaatattgcttg

SEQ ID NO: 5983 - DNA, 40 bp, Artificial Sequence
  Description of Artificial Sequence: Synthetic primer
gcttggcggggaggccagccttccgactccccctctcgtc

SEQ ID NO: 5984 - DNA, 40 bp, Artificial Sequence
  Description of Artificial Sequence: Synthetic primer
cagacgggcccaggggcggctctgcttggggcgggtcctc

SEQ ID NO: 5985 - DNA, 40 bp, Artificial Sequence
  Description of Artificial Sequence: Synthetic primer
accaattaggcaggattaaggtagggattgggatcgtcag

SEQ ID NO: 5986 - DNA, 40 bp, Artificial Sequence
  Description of Artificial Sequence: Synthetic primer
tccctgtctgcaaggggaaggggctggcagccaaccctac

SEQ ID NO: 5987 - DNA, 40 bp, Artificial Sequence
  Description of Artificial Sequence: Synthetic primer
aaatagtttcttctaaaaatatacttgtatcattaatatg

SEQ ID NO: 5988 - DNA, 40 bp, Artificial Sequence
  Description of Artificial Sequence: Synthetic primer
tatacatggccctttcttatgtaataaaacaactaaaatg

SEQ ID NO: 5989 - DNA, 40 bp, Artificial Sequence
  Description of Artificial Sequence: Synthetic primer
tctcttcttgtgaggagtctggctagtttctgctttagcc

SEQ ID NO: 5990 - DNA, 40 bp, Artificial Sequence
  Description of Artificial Sequence: Synthetic primer
acattgttgtgggacatgatggcgcctgagtttgtcctgg

SEQ ID NO: 5991 - DNA, 40 bp, Artificial Sequence
  Description of Artificial Sequence: Synthetic primer
tatacccatattatataacttagtacccacactgtatatg

SEQ ID NO: 5992 - DNA, 40 bp, Artificial Sequence
  Description of Artificial Sequence: Synthetic primer
ttagaaattttgagttctatcttgtttttaaatttatgtg

SEQ ID NO: 5993 - DNA, 40 bp, Artificial Sequence
  Description of Artificial Sequence: Synthetic primer
cctggggcgggcgggttgcgggaccttcgggagtcacctg

SEQ ID NO: 5994 - DNA, 40 bp, Artificial Sequence
  Description of Artificial Sequence: Synthetic primer
ggggctggaggatggcttcccagaggacctgggacactca

SEQ ID NO: 5995 - DNA, 40 bp, Artificial Sequence
  Description of Artificial Sequence: Synthetic primer
cctcctcctgctgacgtggccgcacacggccttcccttgc

SEQ ID NO: 5996 - DNA, 40 bp, Artificial Sequence
  Description of Artificial Sequence: Synthetic primer
cacctatgaggcagagtggcgctctgcagccaaccgcttc

SEQ ID NO: 5997 - DNA, 40 bp, Artificial Sequence
  Description of Artificial Sequence: Synthetic primer
atcttctttacagacctacattcagaatttttgggttttg

SEQ ID NO: 5998 - DNA, 40 bp, Artificial Sequence
  Description of Artificial Sequence: Synthetic primer
gatagtaaaatgaacaactttaatatatccccaaatcatg

SEQ ID NO: 5999 - DNA, 40 bp, Artificial Sequence
  Description of Artificial Sequence: Synthetic primer
ggaaaaaccatcttccactacaccggtccctcatgccaaa

SEQ ID NO: 6000 - DNA, 40 bp, Artificial Sequence
  Description of Artificial Sequence: Synthetic primer
ccatcttggagttgtagaagaccagccgttgaatgactag

SEQ ID NO: 6001 - DNA, 40 bp, Artificial Sequence
  Description of Artificial Sequence: Synthetic primer
gggtctgggaaggggaggctgtggtgtctgtctgtccatc

SEQ ID NO: 6002 - DNA, 40 bp, Artificial Sequence
  Description of Artificial Sequence: Synthetic primer
gcctggccgggcccgctgaccctctgcttctacctctgcc

SEQ ID NO: 6003 - DNA, 40 bp, Artificial Sequence
  Description of Artificial Sequence: Synthetic primer
cagctctggggcctgggccctcgacggccaccacctcctc

SEQ ID NO: 6004 - DNA, 40 bp, Artificial Sequence
  Description of Artificial Sequence: Synthetic primer
ggaaccagcgacatgcggagagcagcgcaggcgactcagg

SEQ ID NO: 6005 - DNA, 40 bp, Artificial Sequence
  Description of Artificial Sequence: Synthetic primer
gggccgcatttgccagtagcgctggggcaggcggggcaac

SEQ ID NO: 6006 - DNA, 40 bp, Artificial Sequence
  Description of Artificial Sequence: Synthetic primer
ggggcagcgccacgcctgggcctcttgggcaacggcagac

SEQ ID NO: 6007 - DNA, 40 bp, Artificial Sequence
  Description of Artificial Sequence: Synthetic primer
ctgactggcgctcggaggctcgtggagaccatctttctgg

SEQ ID NO: 6008 - DNA, 40 bp, Artificial Sequence
  Description of Artificial Sequence: Synthetic primer
cccgaaggcgtctgggatgcgaacgggcctggaaccatag

SEQ ID NO: 6009 - DNA, 40 bp, Artificial Sequence
  Description of Artificial Sequence: Synthetic primer
tgcaggagaagggtgcgctagcaggagttagctggaggac

SEQ ID NO: 6010 - DNA, 40 bp, Artificial Sequence
  Description of Artificial Sequence: Synthetic primer
gcatttgtgaaattatctgcatcattccatctatattttc

SEQ ID NO: 6011 - DNA, 40 bp, Artificial Sequence
  Description of Artificial Sequence: Synthetic primer
taaatatctgctcaagaaatgaattacttttacataatgg

SEQ ID NO: 6012 - DNA, 40 bp, Artificial Sequence
  Description of Artificial Sequence: Synthetic primer
tcattgcctcatttcttaaagcaaatgtaattcctttatc

SEQ ID NO: 6013 - DNA, 40 bp, Artificial Sequence
  Description of Artificial Sequence: Synthetic primer
aaactcccttccatttcacagtcttgttcactagcagatg

SEQ ID NO: 6014 - DNA, 40 bp, Artificial Sequence
  Description of Artificial Sequence: Synthetic primer
ctccagttctccagtgttcacaggtgagcctaccaacagc

SEQ ID NO: 6015 - DNA, 40 bp, Artificial Sequence
  Description of Artificial Sequence: Synthetic primer
ttttctaataaagattgtgtgttctttttaaaaatttccc

SEQ ID NO: 6016 - DNA, 40 bp, Artificial Sequence
  Description of Artificial Sequence: Synthetic primer
ctgaaggccccgggttccagtgcgtgctcctttagtgatc

SEQ ID NO: 6017 - DNA, 40 bp, Artificial Sequence
  Description of Artificial Sequence: Synthetic primer
cgctagctctgtggctgagtcctgcagctgggaaagtcac

SEQ ID NO: 6018 - DNA, 40 bp, Artificial Sequence
  Description of Artificial Sequence: Synthetic primer
ttctccttgatctcctgatttctctctgccccctctcttc

SEQ ID NO: 6019 - DNA, 40 bp, Artificial Sequence
  Description of Artificial Sequence: Synthetic primer
gagcagaaacggtgataattatctgtatgaaaaagtaagg

SEQ ID NO: 6020 - DNA, 40 bp, Artificial Sequence
  Description of Artificial Sequence: Synthetic primer
ctatctagattgatgctagtccttctcacctagagtatcc

SEQ ID NO: 6021 - DNA, 40 bp, Artificial Sequence
  Description of Artificial Sequence: Synthetic primer
ggttcaagagtctgcagaaggaaaattgaggtcatcatgg

SEQ ID NO: 6022 - DNA, 40 bp, Artificial Sequence
  Description of Artificial Sequence: Synthetic primer
tttcagtggctttctgcaacagcgcccctgaccttcgtgc

SEQ ID NO: 6023 - DNA, 40 bp, Artificial Sequence
  Description of Artificial Sequence: Synthetic primer
attatggcacaaatatcattgttactgtctttttccaatg

SEQ ID NO: 6024 - DNA, 40 bp, Artificial Sequence
  Description of Artificial Sequence: Synthetic primer
cctaaaattaaaagtaacactggattaatgtttgaaatcc

SEQ ID NO: 6025 - DNA, 40 bp, Artificial Sequence
  Description of Artificial Sequence: Synthetic primer
ttggttgataacaagtcacagtgtatttaaccatcatcac

SEQ ID NO: 6026 - DNA, 40 bp, Artificial Sequence
  Description of Artificial Sequence: Synthetic primer
actaattcatctaacccagaactgccgaccgccatcttgc

SEQ ID NO: 6027 - DNA, 40 bp, Artificial Sequence
  Description of Artificial Sequence: Synthetic primer
agtaataataatagcactttagaattttgctgaactcttg

SEQ ID NO: 6028 - DNA, 40 bp, Artificial Sequence
  Description of Artificial Sequence: Synthetic primer
tatttgtttttccccatgtatgcatcagtctcttaggatc

SEQ ID NO: 6029 - DNA, 40 bp, Artificial Sequence
  Description of Artificial Sequence: Synthetic primer
gaaacttgacttcacaccaaagccctgcagttagtaaagg

SEQ ID NO: 6030 - DNA, 40 bp, Artificial Sequence
  Description of Artificial Sequence: Synthetic primer
taccattgcatggagtataataatgatctctacttgtttc

SEQ ID NO: 6031 - DNA, 40 bp, Artificial Sequence
  Description of Artificial Sequence: Synthetic primer
gctggctgggtgacccacctccccacagcccccactctgc

SEQ ID NO: 6032 - DNA, 40 bp, Artificial Sequence
  Description of Artificial Sequence: Synthetic primer
gcaggggtcctgtgggccagaaggagatataagatagcag

SEQ ID NO: 6033 - DNA, 40 bp, Artificial Sequence
  Description of Artificial Sequence: Synthetic primer
tttaacaatttaacaaactatatcaagaggcctaagattg

SEQ ID NO: 6034 - DNA, 40 bp, Artificial Sequence
  Description of Artificial Sequence: Synthetic primer
gtttgtaataagtataattaaagcaaaccctctactattc

SEQ ID NO: 6035 - DNA, 40 bp, Artificial Sequence
  Description of Artificial Sequence: Synthetic primer
aatttattctatatcataaaataaagacttgcattaaaag

SEQ ID NO: 6036 - DNA, 40 bp, Artificial Sequence
  Description of Artificial Sequence: Synthetic primer
tattgtcattctcaagtgcaaggctctcaaaaggttaagc

SEQ ID NO: 6037 - DNA, 40 bp, Artificial Sequence
  Description of Artificial Sequence: Synthetic primer
tagaagaaatttaaagtttccttttgtttgtctttttttc

SEQ ID NO: 6038 - DNA, 40 bp, Artificial Sequence
  Description of Artificial Sequence: Synthetic primer
aaaatctatagtaagattatacctttacattacctacata

SEQ ID NO: 6039 - DNA, 40 bp, Artificial Sequence
  Description of Artificial Sequence: Synthetic primer
acaaaagcatcatggagcctgtgccccagaacccagttcc

SEQ ID NO: 6040 - DNA, 40 bp, Artificial Sequence
  Description of Artificial Sequence: Synthetic primer
tgtgaaacgtgcaggttccaagggtctctgttgtcttcac

SEQ ID NO: 6041 - DNA, 40 bp, Artificial Sequence
  Description of Artificial Sequence: Synthetic primer
gtttaattataataaattggtgctttggtctgtgtctttg

SEQ ID NO: 6042 - DNA, 40 bp, Artificial Sequence
  Description of Artificial Sequence: Synthetic primer
actctcattaggctgcagcacttaaggtttttaacagagg

SEQ ID NO: 6043 - DNA, 40 bp, Artificial Sequence
  Description of Artificial Sequence: Synthetic primer
ctcaccacggggctccccgccccaatggccggtggctgag

SEQ ID NO: 6044 - DNA, 40 bp, Artificial Sequence
  Description of Artificial Sequence: Synthetic primer
ccccaccagggctaggtggtaaacagtactgttcctgtcc

SEQ ID NO: 6045 - DNA, 40 bp, Artificial Sequence
  Description of Artificial Sequence: Synthetic primer
ttggctttttatagaaggaagctccaagtagtctgaaaag

SEQ ID NO: 6046 - DNA, 40 bp, Artificial Sequence
  Description of Artificial Sequence: Synthetic primer
cagtcactgccccagggttctcaaatacgtgacgtgcaac

SEQ ID NO: 6047 - DNA, 40 bp, Artificial Sequence
  Description of Artificial Sequence: Synthetic primer
acaaaaaaacaaacagaaccaaacagttctgaaaacaaag

SEQ ID NO: 6048 - DNA, 40 bp, Artificial Sequence
  Description of Artificial Sequence: Synthetic primer
gtctgagtcttcttcatcttccttcctgtggtctttacac

SEQ ID NO: 6049 - DNA, 40 bp, Artificial Sequence
  Description of Artificial Sequence: Synthetic primer
gcctcaagccaccttgggccctcgtgagcattatgtgtcc

SEQ ID NO: 6050 - DNA, 40 bp, Artificial Sequence
  Description of Artificial Sequence: Synthetic primer
cgctgccggccttggacacccagtggggaatgcagttggg

SEQ ID NO: 6051 - DNA, 40 bp, Artificial Sequence
  Description of Artificial Sequence: Synthetic primer
gacatagtattgccaattttaactggatctcaaggtattg

SEQ ID NO: 6052 - DNA, 40 bp, Artificial Sequence
  Description of Artificial Sequence: Synthetic primer
caaggacaaacagttcttttggagtatgtattaactaggg

SEQ ID NO: 6053 - DNA, 40 bp, Artificial Sequence
  Description of Artificial Sequence: Synthetic primer
agtggcaggtgccagtgctcctctgtgtctaactcaagtc

SEQ ID NO: 6054 - DNA, 40 bp, Artificial Sequence
  Description of Artificial Sequence: Synthetic primer
gcaggatgggtggacccaagccatcccctgccacactcac

SEQ ID NO: 6055 - DNA, 40 bp, Artificial Sequence
  Description of Artificial Sequence: Synthetic primer
ccgggtccccacctggatagaaccctgcggcctcccatgc

SEQ ID NO: 6056 - DNA, 40 bp, Artificial Sequence
  Description of Artificial Sequence: Synthetic primer
cttggagtggaggacctgcctaagccacctctatgtcctc

SEQ ID NO: 6057 - DNA, 40 bp, Artificial Sequence
  Description of Artificial Sequence: Synthetic primer
tttcacaaaggcattcagatctaacattttgctcatattc

SEQ ID NO: 6058 - DNA, 40 bp, Artificial Sequence
  Description of Artificial Sequence: Synthetic primer
ttttcaaaataccaggtaaaggccaaagagattaccaaag

SEQ ID NO: 6059 - DNA, 40 bp, Artificial Sequence
  Description of Artificial Sequence: Synthetic primer
cccgggccgcgcggaggctccaccgccagtcccccccgcg

SEQ ID NO: 6060 - DNA, 40 bp, Artificial Sequence
  Description of Artificial Sequence: Synthetic primer
gcctgtttagtcgctttcagggttcttgagccccttcacg

SEQ ID NO: 6061 - DNA, 40 bp, Artificial Sequence
  Description of Artificial Sequence: Synthetic primer
gggagatgtgaggcagggagagaggaggcaacagagtatg

SEQ ID NO: 6062 - DNA, 40 bp, Artificial Sequence
  Description of Artificial Sequence: Synthetic primer
aggctgagctttgggtgtaacttccttgttcttctcactc

SEQ ID NO: 6063 - DNA, 40 bp, Artificial Sequence
  Description of Artificial Sequence: Synthetic primer
aaaatgttcagtttgggctgtcatacaaacttttgacttt

SEQ ID NO: 6064 - DNA, 40 bp, Artificial Sequence
  Description of Artificial Sequence: Synthetic primer
tgaaaattctttacgtcttgcttcctctcagccctttttt

SEQ ID NO: 6065 - DNA, 40 bp, Artificial Sequence
  Description of Artificial Sequence: Synthetic primer
agcagctgttgcctactgcatgtgacaggagcctagaagc

SEQ ID NO: 6066 - DNA, 40 bp, Artificial Sequence
  Description of Artificial Sequence: Synthetic primer
cagtagctattattattgttattactattactgattttta

SEQ ID NO: 6067 - DNA, 40 bp, Artificial Sequence
  Description of Artificial Sequence: Synthetic primer
agctccagcgggacacgtgggcaatggagctcagagaagg

SEQ ID NO: 6068 - DNA, 40 bp, Artificial Sequence
  Description of Artificial Sequence: Synthetic primer
cgtgcatggccctcatctcactgttgtgctttgcccactc

SEQ ID NO: 6069 - DNA, 40 bp, Artificial Sequence
  Description of Artificial Sequence: Synthetic primer
tcatcacaatcataagatacagaagcattgtccctgttgc

SEQ ID NO: 6070 - DNA, 40 bp, Artificial Sequence
  Description of Artificial Sequence: Synthetic primer
ggagcagcaccagagctggccttgctgaatgattctctcc

SEQ ID NO: 6071 - DNA, 40 bp, Artificial Sequence
  Description of Artificial Sequence: Synthetic primer
ctaattatttcttggaattgttcattcttataaccaggtg

SEQ ID NO: 6072 - DNA, 40 bp, Artificial Sequence
  Description of Artificial Sequence: Synthetic primer
tctttgcaactttgataaaaggtttctcagcacactaccc

SEQ ID NO: 6073 - DNA, 40 bp, Artificial Sequence
  Description of Artificial Sequence: Synthetic primer
ttacaaccaacacacaaattagatataaagtaaatacaag

SEQ ID NO: 6074 - DNA, 40 bp, Artificial Sequence
  Description of Artificial Sequence: Synthetic primer
atttgtttaatgatatggaacccacattttaattactttg

SEQ ID NO: 6075 - DNA, 40 bp, Artificial Sequence
  Description of Artificial Sequence: Synthetic primer
ttttagtgttagataaaagcaacatatctttcctggcaat

SEQ ID NO: 6076 - DNA, 40 bp, Artificial Sequence
  Description of Artificial Sequence: Synthetic primer
tttattggcactagaaattctgatggctcactgtagaaac

SEQ ID NO: 6077 - DNA, 40 bp, Artificial Sequence
  Description of Artificial Sequence: Synthetic primer
tcctcacccctcgcttccctccctcaccctggctcccttg

SEQ ID NO: 6078 - DNA, 40 bp, Artificial Sequence
  Description of Artificial Sequence: Synthetic primer
tcccgccgtgaggacccggccggcccagtgtgcggtgctc

SEQ ID NO: 6079 - DNA, 40 bp, Artificial Sequence
  Description of Artificial Sequence: Synthetic primer
ttaccataacaacagtaacagcattttcttcttctttatc

SEQ ID NO: 6080 - DNA, 40 bp, Artificial Sequence
  Description of Artificial Sequence: Synthetic primer
gctatgctaatttaaaccatagaacactaacttgtttttg

SEQ ID NO: 6081 - DNA, 40 bp, Artificial Sequence
  Description of Artificial Sequence: Synthetic primer
agggaccaatcccaggtggagcctgaatgaggcagggaag

SEQ ID NO: 6082 - DNA, 40 bp, Artificial Sequence
  Description of Artificial Sequence: Synthetic primer
tttgtaattcctggcttctaggtttctaattctgattttc

SEQ ID NO: 6083 - DNA, 40 bp, Artificial Sequence
  Description of Artificial Sequence: Synthetic primer
agaaaagtgagacctttaccttttcatcctcgtctttttc

SEQ ID NO: 6084 - DNA, 40 bp, Artificial Sequence
  Description of Artificial Sequence: Synthetic primer
tgtggttagtgtttctaagctgctacttgctgtgtatctg

SEQ ID NO: 6085 - DNA, 40 bp, Artificial Sequence
  Description of Artificial Sequence: Synthetic primer
tcacgaaaatgtctgaaggcagtcattcttctggatattg

SEQ ID NO: 6086 - DNA, 40 bp, Artificial Sequence
  Description of Artificial Sequence: Synthetic primer
aatattaagattttaattaatcatatgccaaattttctta

SEQ ID NO: 6087 - DNA, 40 bp, Artificial Sequence
  Description of Artificial Sequence: Synthetic primer
ccctgtggactccagggcacacgggcaggcggcatgcacg

SEQ ID NO: 6088 - DNA, 40 bp, Artificial Sequence
  Description of Artificial Sequence: Synthetic primer
ccatggcactgtggtctggaggctgggctggtgacctctc

SEQ ID NO: 6089 - DNA, 40 bp, Artificial Sequence
  Description of Artificial Sequence: Synthetic primer
tgagtttagttcttattcacaggaatatataaagtcataa

SEQ ID NO: 6090 - DNA, 40 bp, Artificial Sequence
  Description of Artificial Sequence: Synthetic primer
aatgaaaatgtaacatactatcacataactacacttaaat

SEQ ID NO: 6091 - DNA, 40 bp, Artificial Sequence
  Description of Artificial Sequence: Synthetic primer
aactgtgcgacccgtgccctcgcagccacccccaagaagc

SEQ ID NO: 6092 - DNA, 40 bp, Artificial Sequence
  Description of Artificial Sequence: Synthetic primer
aggcttccttgcttcccgctctgcgaggagcctttcatcc

SEQ ID NO: 6093 - DNA, 40 bp, Artificial Sequence
  Description of Artificial Sequence: Synthetic primer
gcaggaatccacaccctgagaagtaaatctgttttgacac

SEQ ID NO: 6094 - DNA, 40 bp, Artificial Sequence
  Description of Artificial Sequence: Synthetic primer
agtattcttttaaatagttttctggagatcctccatttgg

SEQ ID NO: 6095 - DNA, 40 bp, Artificial Sequence
  Description of Artificial Sequence: Synthetic primer
ccatgaaaggtcagaaagtgcaagaacatgcagagagcag

SEQ ID NO: 6096 - DNA, 40 bp, Artificial Sequence
  Description of Artificial Sequence: Synthetic primer
tattatttcattatgtttaaagcttttcatttattttctc

SEQ ID NO: 6097 - DNA, 40 bp, Artificial Sequence
  Description of Artificial Sequence: Synthetic primer
aaatttattttaaggctacattaataaatattgaaagctc

SEQ ID NO: 6098 - DNA, 40 bp, Artificial Sequence
  Description of Artificial Sequence: Synthetic primer
ttcctctactctggtttactttggatttctgttattttgc

SEQ ID NO: 6099 - DNA, 40 bp, Artificial Sequence
  Description of Artificial Sequence: Synthetic primer
gctgggaggtatggaattgaccttgggatctgattcttcc

SEQ ID NO: 6100 - DNA, 40 bp, Artificial Sequence
  Description of Artificial Sequence: Synthetic primer
ctagttctgtgctcctacccttccacctgaccccctctcc

SEQ ID NO: 6101 - DNA, 40 bp, Artificial Sequence
  Description of Artificial Sequence: Synthetic primer
gtaagcttaaattcaaataacttatttttaacataagaac

SEQ ID NO: 6102 - DNA, 40 bp, Artificial Sequence
  Description of Artificial Sequence: Synthetic primer
tctctgcaactctgatactatgactttatttaacttattc

SEQ ID NO: 6103 - DNA, 40 bp, Artificial Sequence
  Description of Artificial Sequence: Synthetic primer
gccctctggggcagtggctggagatctggcaggccaatgc

SEQ ID NO: 6104 - DNA, 40 bp, Artificial Sequence
  Description of Artificial Sequence: Synthetic primer
acaaccccttcgaggctcaaaatttagacagaaatgaccg

SEQ ID NO: 6105 - DNA, 40 bp, Artificial Sequence
  Description of Artificial Sequence: Synthetic primer
agcagtccaggacttatgtgaccgtggtctctttttcttc

SEQ ID NO: 6106 - DNA, 40 bp, Artificial Sequence
  Description of Artificial Sequence: Synthetic primer
taaaatacaaaaataggctagaaatgtatggtcagaaaac

SEQ ID NO: 6107 - DNA, 40 bp, Artificial Sequence
  Description of Artificial Sequence: Synthetic primer
cgtcctctcgctgttagacatctctctcactgcctgtctc

SEQ ID NO: 6108 - DNA, 40 bp, Artificial Sequence
  Description of Artificial Sequence: Synthetic primer
tgcattccacccggccccagccctccccttccctgactcc

SEQ ID NO: 6109 - DNA, 40 bp, Artificial Sequence
  Description of Artificial Sequence: Synthetic primer
actcaaatttatagaaatatattatatgggaaaaaaacag

SEQ ID NO: 6110 - DNA, 40 bp, Artificial Sequence
  Description of Artificial Sequence: Synthetic primer
tattatttttgaatatttattgtatttcataatcttcctg

SEQ ID NO: 6111 - DNA, 40 bp, Artificial Sequence
  Description of Artificial Sequence: Synthetic primer
atttgagttttccatttataaatacacatgaaatgttttg

SEQ ID NO: 6112 - DNA, 40 bp, Artificial Sequence
  Description of Artificial Sequence: Synthetic primer
ttcttgcagtgtaaacaattgtttatttcatttacacaag

SEQ ID NO: 6113 - DNA, 40 bp, Artificial Sequence
  Description of Artificial Sequence: Synthetic primer
aattttgagtctggtaaaatagtggtcacctcactaaaag

SEQ ID NO: 6114 - DNA, 40 bp, Artificial Sequence
  Description of Artificial Sequence: Synthetic primer
ttcttacatgattttaccactagaaactaacagttttccg

SEQ ID NO: 6115 - DNA, 40 bp, Artificial Sequence
  Description of Artificial Sequence: Synthetic primer
tttattaagttgtgtatcattgttattcatttcatatctc

SEQ ID NO: 6116 - DNA, 40 bp, Artificial Sequence
  Description of Artificial Sequence: Synthetic primer
aaaaagaaacaatgtctgtttaagactgggaacaatttaa

SEQ ID NO: 6117 - DNA, 40 bp, Artificial Sequence
  Description of Artificial Sequence: Synthetic primer
tgacctcctgggctcctttgggactgactggcacctcttc

SEQ ID NO: 6118 - DNA, 40 bp, Artificial Sequence
  Description of Artificial Sequence: Synthetic primer
gtccaccattcacgctggggaggggtcggggccggtgctg

SEQ ID NO: 6119 - DNA, 40 bp, Artificial Sequence
  Description of Artificial Sequence: Synthetic primer
agttaatgttttatttcaatgaaagtaaaataaaaaattc

SEQ ID NO: 6120 - DNA, 40 bp, Artificial Sequence
  Description of Artificial Sequence: Synthetic primer
gaaagaaagtaacattcaacactgatacccaaaatgaatg

SEQ ID NO: 6121 - DNA, 40 bp, Artificial Sequence
  Description of Artificial Sequence: Synthetic primer
tttccaatagagtgatatattcaaattaaaatcttagtac

SEQ ID NO: 6122 - DNA, 40 bp, Artificial Sequence
  Description of Artificial Sequence: Synthetic primer
tacataaaattaacattagtagaaatcttgtttaatagac

SEQ ID NO: 6123 - DNA, 40 bp, Artificial Sequence
  Description of Artificial Sequence: Synthetic primer
gatcagattgctagtgaaaatatgcaaaactttgtgaacg

SEQ ID NO: 6124 - DNA, 40 bp, Artificial Sequence
  Description of Artificial Sequence: Synthetic primer
cctaaattgcagaaagttaaatccacgtactactattttg

SEQ ID NO: 6125 - DNA, 40 bp, Artificial Sequence
  Description of Artificial Sequence: Synthetic primer
accagggtcagttcctgcggccagtcctccactccacctc

SEQ ID NO: 6126 - DNA, 40 bp, Artificial Sequence
  Description of Artificial Sequence: Synthetic primer
cagcccctgcttgaactctgtcccttaatgaccccatccc

SEQ ID NO: 6127 - DNA, 40 bp, Artificial Sequence
  Description of Artificial Sequence: Synthetic primer
tgctgtcttttctagatgttcattctttgatgtacagtgc

SEQ ID NO: 6128 - DNA, 40 bp, Artificial Sequence
  Description of Artificial Sequence: Synthetic primer
aaacttaatttttgtaatcaagtaatctgacatattgaag

SEQ ID NO: 6129 - DNA, 40 bp, Artificial Sequence
  Description of Artificial Sequence: Synthetic primer
taagaaatagcattactaaggcccttggcagatcctgagg

SEQ ID NO: 6130 - DNA, 40 bp, Artificial Sequence
  Description of Artificial Sequence: Synthetic primer
ggaggctgaaaaccttttttgcttctgttcttttctcttg

SEQ ID NO: 6131 - DNA, 40 bp, Artificial Sequence
  Description of Artificial Sequence: Synthetic primer
gttttatagtttttcatttttaatgtagattgttttctgc

SEQ ID NO: 6132 - DNA, 40 bp, Artificial Sequence
  Description of Artificial Sequence: Synthetic primer
ccatcatgaggacacattctaaatcaacacaccattcatg

SEQ ID NO: 6133 - DNA, 40 bp, Artificial Sequence
  Description of Artificial Sequence: Synthetic primer
aataccctttaaagtatgtatactcctcatccctatcttc

SEQ ID NO: 6134 - DNA, 40 bp, Artificial Sequence
  Description of Artificial Sequence: Synthetic primer
atcttttatttattcagcataatttacacctgtgttcttg

SEQ ID NO: 6135 - DNA, 40 bp, Artificial Sequence
  Description of Artificial Sequence: Synthetic primer
aagaggctcgtccctgagctgccttgacaccgtcttttcc

SEQ ID NO: 6136 - DNA, 40 bp, Artificial Sequence
  Description of Artificial Sequence: Synthetic primer
tggctctcttcccacgttccaggctgagggccccccgggc

SEQ ID NO: 6137 - DNA, 40 bp, Artificial Sequence
  Description of Artificial Sequence: Synthetic primer
gatggcggcagcggctgtggtggctgcggcgggtccgggc

SEQ ID NO: 6138 - DNA, 40 bp, Artificial Sequence
  Description of Artificial Sequence: Synthetic primer
cttcctgagcccgcgccgccgccccggccctgtcacctcg

SEQ ID NO: 6139 - DNA, 40 bp, Artificial Sequence
  Description of Artificial Sequence: Synthetic primer
gacttttagaaaagatattttaattactaatgggacattc

SEQ ID NO: 6140 - DNA, 40 bp, Artificial Sequence
  Description of Artificial Sequence: Synthetic primer
cagacaatagcttatcaatattaccttcattccattactg

SEQ ID NO: 6141 - DNA, 40 bp, Artificial Sequence
  Description of Artificial Sequence: Synthetic primer
cttggcttccccttctgcccagcaggagtgacagggctac

SEQ ID NO: 6142 - DNA, 40 bp, Artificial Sequence
  Description of Artificial Sequence: Synthetic primer
cagttaatatttgtagactgaatgattaaacgccccttac

SEQ ID NO: 6143 - DNA, 40 bp, Artificial Sequence
  Description of Artificial Sequence: Synthetic primer
tattattacttatattttaatgcagatattctggttcagg

SEQ ID NO: 6144 - DNA, 40 bp, Artificial Sequence
  Description of Artificial Sequence: Synthetic primer
ttataaaataaaatagtatcttttgataaaaaggttgtac

SEQ ID NO: 6145 - DNA, 40 bp, Artificial Sequence
  Description of Artificial Sequence: Synthetic primer
ccctgcctccctcctctggaacccttctcctacccttcac

SEQ ID NO: 6146 - DNA, 40 bp, Artificial Sequence
  Description of Artificial Sequence: Synthetic primer
gacaggctctggccttgctctgtcccctccacccccacag

SEQ ID NO: 6147 - DNA, 40 bp, Artificial Sequence
  Description of Artificial Sequence: Synthetic primer
accactggggaaaaggtcttggcataattttgttatttta

SEQ ID NO: 6148 - DNA, 40 bp, Artificial Sequence
  Description of Artificial Sequence: Synthetic primer
ttggtggtgttatttgttaatacgcttctttttatatttc

SEQ ID NO: 6149 - DNA, 40 bp, Artificial Sequence
  Description of Artificial Sequence: Synthetic primer
taaagttattttaagatatttgtgcatggtgatggtagtg

SEQ ID NO: 6150 - DNA, 40 bp, Artificial Sequence
  Description of Artificial Sequence: Synthetic primer
atatttttaagtagtaaaattttattttgtattaattttg

SEQ ID NO: 6151 - DNA, 40 bp, Artificial Sequence
  Description of Artificial Sequence: Synthetic primer
ccagaagacttctcaaattgttgccatttcagggtttctg

SEQ ID NO: 6152 - DNA, 40 bp, Artificial Sequence
  Description of Artificial Sequence: Synthetic primer
ggacctctgatgtacactcaccgctcccactgttccttac

SEQ ID NO: 6153 - DNA, 40 bp, Artificial Sequence
  Description of Artificial Sequence: Synthetic primer
cagcgcagggccggccggacagggcaggggtgggcggact

SEQ ID NO: 6154 - DNA, 40 bp, Artificial Sequence
  Description of Artificial Sequence: Synthetic primer
tatgttggctgaaatgcgcgcagtttctgaagccagtgcc

SEQ ID NO: 6155 - DNA, 40 bp, Artificial Sequence
  Description of Artificial Sequence: Synthetic primer
tctggcacagtataaactggttaaaaacagtggcttgcag

SEQ ID NO: 6156 - DNA, 40 bp, Artificial Sequence
  Description of Artificial Sequence: Synthetic primer
ttttttattgtatggttctaaaggaatggttgattacctg

SEQ ID NO: 6157 - DNA, 40 bp, Artificial Sequence
  Description of Artificial Sequence: Synthetic primer
cagaggctgggccaccttaggggagcgggagcacccacag

SEQ ID NO: 6158 - DNA, 40 bp, Artificial Sequence
  Description of Artificial Sequence: Synthetic primer
ggagggtagagcatggcccacatcctctgtcccagtcctc

SEQ ID NO: 6159 - DNA, 40 bp, Artificial Sequence
  Description of Artificial Sequence: Synthetic primer
aaatgctttgtggactgctgaggacggtgcaagggtgagg

SEQ ID NO: 6160 - DNA, 40 bp, Artificial Sequence
  Description of Artificial Sequence: Synthetic primer
tgccctcacaaccatccatccccagtctgtacccttttcc

SEQ ID NO: 6161 - DNA, 40 bp, Artificial Sequence
  Description of Artificial Sequence: Synthetic primer
cacctccaggctgtaaactttggaaaggagggctgggaac

SEQ ID NO: 6162 - DNA, 40 bp, Artificial Sequence
  Description of Artificial Sequence: Synthetic primer
caaaagacacaaaccccacacctcctattttcgtgttccc

SEQ ID NO: 6163 - DNA, 40 bp, Artificial Sequence
  Description of Artificial Sequence: Synthetic primer
ggggaagatgatgaagatcagcaatggcaaagaaatactc

SEQ ID NO: 6164 - DNA, 40 bp, Artificial Sequence
  Description of Artificial Sequence: Synthetic primer
gctatgtaaattaattgagatgttaaaaatattctcctag

SEQ ID NO: 6165 - DNA, 40 bp, Artificial Sequence
  Description of Artificial Sequence: Synthetic primer
cccagacgcacccaagcatgcccacctcctcttccctctc

SEQ ID NO: 6166 - DNA, 40 bp, Artificial Sequence
  Description of Artificial Sequence: Synthetic primer
tatggggttacctctgttcctgtgccactctcctctttgc

SEQ ID NO: 6167 - DNA, 40 bp, Artificial Sequence
  Description of Artificial Sequence: Synthetic primer
ggccaagtacgacgcaccttgacggatgcagcgagagagg

SEQ ID NO: 6168 - DNA, 40 bp, Artificial Sequence
  Description of Artificial Sequence: Synthetic primer
agcagagtggccccaggtgggttttgctcactgtctgttc

SEQ ID NO: 6169 - DNA, 40 bp, Artificial Sequence
  Description of Artificial Sequence: Synthetic primer
cagagtgctaggggcctcacctccaccccatatgccacac

SEQ ID NO: 6170 - DNA, 40 bp, Artificial Sequence
  Description of Artificial Sequence: Synthetic primer
tgatgtgttttcaagataactgaggcattattctgtggtc

SEQ ID NO: 6171 - DNA, 40 bp, Artificial Sequence
  Description of Artificial Sequence: Synthetic primer
gaccagaaactcacctctccagtatcaagcaggcacatgg

SEQ ID NO: 6172 - DNA, 40 bp, Artificial Sequence
  Description of Artificial Sequence: Synthetic primer
ttctcctcctttttctgcggtccctggctccccacctgac

SEQ ID NO: 6173 - DNA, 40 bp, Artificial Sequence
  Description of Artificial Sequence: Synthetic primer
ttcctctaattagtaataatacggcaggggccaagtttag

SEQ ID NO: 6174 - DNA, 40 bp, Artificial Sequence
  Description of Artificial Sequence: Synthetic primer
tttctgtttcaattcttgtctataaagacccgtatgcttg

SEQ ID NO: 6175 - DNA, 40 bp, Artificial Sequence
  Description of Artificial Sequence: Synthetic primer
tctttcaaaacataaaaatctgcgataaaaccaattattc

SEQ ID NO: 6176 - DNA, 40 bp, Artificial Sequence
  Description of Artificial Sequence: Synthetic primer
gtcaaaaaactactaaaacgttgaaccattgtgtctcaca

SEQ ID NO: 6177 - DNA, 40 bp, Artificial Sequence
  Description of Artificial Sequence: Synthetic primer
tgactttgatgtaagctgtacaaacttgagtaaatctagc

SEQ ID NO: 6178 - DNA, 40 bp, Artificial Sequence
  Description of Artificial Sequence: Synthetic primer
gtaacaccagataccattttcagtcttttctctctttctc

SEQ ID NO: 6179 - DNA, 40 bp, Artificial Sequence
  Description of Artificial Sequence: Synthetic primer
ccatctccccatatgagctgatgacaacgcacagagaaag

SEQ ID NO: 6180 - DNA, 40 bp, Artificial Sequence
  Description of Artificial Sequence: Synthetic primer
aatgtcttctgccatagagaacatatgagcctttcttccc

SEQ ID NO: 6181 - DNA, 40 bp, Artificial Sequence
  Description of Artificial Sequence: Synthetic primer
tcctgggtgggcgggctctgtaagtgttttccctgtttgg

SEQ ID NO: 6182 - DNA, 40 bp, Artificial Sequence
  Description of Artificial Sequence: Synthetic primer
gtgtattccagtccagctgccccacagtgcccctcctcac

SEQ ID NO: 6183 - DNA, 40 bp, Artificial Sequence
  Description of Artificial Sequence: Synthetic primer
taatgatttcatgaatgtctagatgcccagtagaaacaag

SEQ ID NO: 6184 - DNA, 40 bp, Artificial Sequence
  Description of Artificial Sequence: Synthetic primer
aactaattactatgaaataagtaactttatatttcttttc

SEQ ID NO: 6185 - DNA, 40 bp, Artificial Sequence
  Description of Artificial Sequence: Synthetic primer
aaggcaggccaaaaccaactaatcaaatccaacctaagac

SEQ ID NO: 6186 - DNA, 40 bp, Artificial Sequence
  Description of Artificial Sequence: Synthetic primer
tagcattcctttgccactgctgatgtactttattaacttc

SEQ ID NO: 6187 - DNA, 40 bp, Artificial Sequence
  Description of Artificial Sequence: Synthetic primer
tcagccaaagcacttacccatatagaaacagaggaaacag

SEQ ID NO: 6188 - DNA, 40 bp, Artificial Sequence
  Description of Artificial Sequence: Synthetic primer
atattctcttataggttattagacccacaacatatatgtc

SEQ ID NO: 6189 - DNA, 40 bp, Artificial Sequence
  Description of Artificial Sequence: Synthetic primer
ccacttccacatccccagggcactgatctcacatcctgtc

SEQ ID NO: 6190 - DNA, 40 bp, Artificial Sequence
  Description of Artificial Sequence: Synthetic primer
tgtggcatgaagacagggaaagcagaggggtggctccaag

SEQ ID NO: 6191 - DNA, 40 bp, Artificial Sequence
  Description of Artificial Sequence: Synthetic primer
caagttaaggcaaactaacttgtatacactttccatctcg

SEQ ID NO: 6192 - DNA, 40 bp, Artificial Sequence
  Description of Artificial Sequence: Synthetic primer
atttacttctaacttctaattttcaggcctatttataccc

SEQ ID NO: 6193 - DNA, 40 bp, Artificial Sequence
  Description of Artificial Sequence: Synthetic primer
tgcctcttcatgcagcaagactttttttctttttctctct

SEQ ID NO: 6194 - DNA, 40 bp, Artificial Sequence
  Description of Artificial Sequence: Synthetic primer
ggggccctgggagccaaccctccccgctgcctctgggtcg

SEQ ID NO: 6195 - DNA, 40 bp, Artificial Sequence
  Description of Artificial Sequence: Synthetic primer
ggggctagtggtccaaggcccctcagcacccccaacctcc

SEQ ID NO: 6196 - DNA, 40 bp, Artificial Sequence
  Description of Artificial Sequence: Synthetic primer
ccccagccccaccctcacgaccctgggctctggcactcac

SEQ ID NO: 6197 - DNA, 40 bp, Artificial Sequence
  Description of Artificial Sequence: Synthetic primer
catgtcgttctttttttctctcttttattttatctcttgg

SEQ ID NO: 6198 - DNA, 40 bp, Artificial Sequence
  Description of Artificial Sequence: Synthetic primer
gcaattaattctggaagtgaagatcagcattatatattga

SEQ ID NO: 6199 - DNA, 40 bp, Artificial Sequence
  Description of Artificial Sequence: Synthetic primer
taaattgtgtttttgtttatgttaaaaattcttgtttctc

SEQ ID NO: 6200 - DNA, 40 bp, Artificial Sequence
  Description of Artificial Sequence: Synthetic primer
atatgctataaaagattatttctattatttgtttatcttt

SEQ ID NO: 6201 - DNA, 40 bp, Artificial Sequence
  Description of Artificial Sequence: Synthetic primer
atgccaggccgcccacccgtgcgctctcccgtccctgacc

SEQ ID NO: 6202 - DNA, 40 bp, Artificial Sequence
  Description of Artificial Sequence: Synthetic primer
gtgccagcatgaggttggggctgtggtgggatctgtatgg

SEQ ID NO: 6203 - DNA, 40 bp, Artificial Sequence
  Description of Artificial Sequence: Synthetic primer
tccctcccagcccatcctgttcccaaggcccaggagtcca

SEQ ID NO: 6204 - DNA, 40 bp, Artificial Sequence
  Description of Artificial Sequence: Synthetic primer
atgtggagccttgtcaccaacctctaactgcagaactggg

SEQ ID NO: 6205 - DNA, 40 bp, Artificial Sequence
  Description of Artificial Sequence: Synthetic primer
ctgacaggcagacctagattgtgaagctgggattttcctc

SEQ ID NO: 6206 - DNA, 40 bp, Artificial Sequence
  Description of Artificial Sequence: Synthetic primer
cctagagatattcttttatctcctccccatctccctattc

SEQ ID NO: 6207 - DNA, 40 bp, Artificial Sequence
  Description of Artificial Sequence: Synthetic primer
ttcgtgttgtcctgggagctcgcccttttcggctggagtc

SEQ ID NO: 6208 - DNA, 40 bp, Artificial Sequence
  Description of Artificial Sequence: Synthetic primer
cggcgcggggctgtccgcttggggccctccccgtccttcc

SEQ ID NO: 6209 - DNA, 40 bp, Artificial Sequence
  Description of Artificial Sequence: Synthetic primer
ctacctccctttgcaggctccctcccagaagcccccgatg

SEQ ID NO: 6210 - DNA, 40 bp, Artificial Sequence
  Description of Artificial Sequence: Synthetic primer
atgccagctgggcgctttctgaccatccgctccccaccag

SEQ ID NO: 6211 - DNA, 40 bp, Artificial Sequence
  Description of Artificial Sequence: Synthetic primer
gagaatcattattaaatcagggaatcttgttatatttttg

SEQ ID NO: 6212 - DNA, 40 bp, Artificial Sequence
  Description of Artificial Sequence: Synthetic primer
aatttccagaagtttagtagtaactcaaaatgtacttcac

SEQ ID NO: 6213 - DNA, 40 bp, Artificial Sequence
  Description of Artificial Sequence: Synthetic primer
actaacaaataccttaatgcacttagaatttttgcaccta

SEQ ID NO: 6214 - DNA, 40 bp, Artificial Sequence
  Description of Artificial Sequence: Synthetic primer
tactacagtgtttaaagtattgtgtttcttttgatatgtc

SEQ ID NO: 6215 - DNA, 40 bp, Artificial Sequence
  Description of Artificial Sequence: Synthetic primer
aacctggtgtgctgggaggatggccagacttcaccttgtg

SEQ ID NO: 6216 - DNA, 40 bp, Artificial Sequence
  Description of Artificial Sequence: Synthetic primer
agcaatatctctatcatgttcagggagcctgggtgttcag

SEQ ID NO: 6217 - DNA, 40 bp, Artificial Sequence
  Description of Artificial Sequence: Synthetic primer
tggcggcgcgaccccgtcccgggcgcggcccccagcagtc

SEQ ID NO: 6218 - DNA, 40 bp, Artificial Sequence
  Description of Artificial Sequence: Synthetic primer
acgccggccgctcaccccgggcaccgcgagcggagcctgc

SEQ ID NO: 6219 - DNA, 40 bp, Artificial Sequence
  Description of Artificial Sequence: Synthetic primer
tgctgtaacaagcacatttcaactcaaacccaggaaatag

SEQ ID NO: 6220 - DNA, 40 bp, Artificial Sequence
  Description of Artificial Sequence: Synthetic primer
aaatgttagcgtttcctctcttaacatgatggctgcacag

SEQ ID NO: 6221 - DNA, 40 bp, Artificial Sequence
  Description of Artificial Sequence: Synthetic primer
atttgtaaccatattcccatctctgctttcccaacctctc

SEQ ID NO: 6222 - DNA, 40 bp, Artificial Sequence
  Description of Artificial Sequence: Synthetic primer
ctgtacagacagaacttatcctcctttccagctggatcac

SEQ ID NO: 6223 - DNA, 40 bp, Artificial Sequence
  Description of Artificial Sequence: Synthetic primer
agtgtgattagtaacccattattatttcctttttattttc

SEQ ID NO: 6224 - DNA, 40 bp, Artificial Sequence
  Description of Artificial Sequence: Synthetic primer
cacaacagaaataaatatgaaagagaaaaataaagacagt

SEQ ID NO: 6225 - DNA, 40 bp, Artificial Sequence
  Description of Artificial Sequence: Synthetic primer
gcttgctccctctcaagggcagccacacagaggcccagac

SEQ ID NO: 6226 - DNA, 40 bp, Artificial Sequence
  Description of Artificial Sequence: Synthetic primer
ctgcaggctagcagggctatcccctcagccccctgctgtc

SEQ ID NO: 6227 - DNA, 40 bp, Artificial Sequence
  Description of Artificial Sequence: Synthetic primer
aaataataataaagcaaaggtacctagtaaagtttttaac

SEQ ID NO: 6228 - DNA, 40 bp, Artificial Sequence
  Description of Artificial Sequence: Synthetic primer
cctgtgtataaaaagatagctaaattcatgcatcataagc

SEQ ID NO: 6229 - DNA, 40 bp, Artificial Sequence
  Description of Artificial Sequence: Synthetic primer
agtcctcaggactgtgcccctgcccacccctcacccagtg

SEQ ID NO: 6230 - DNA, 40 bp, Artificial Sequence
  Description of Artificial Sequence: Synthetic primer
gcctgggctcaggaccgcaggtgcaggtggcgatgtcctc

SEQ ID NO: 6231 - DNA, 40 bp, Artificial Sequence
  Description of Artificial Sequence: Synthetic primer
agtgccactcactgacgacagacacaagagggtatgacag

SEQ ID NO: 6232 - DNA, 40 bp, Artificial Sequence
  Description of Artificial Sequence: Synthetic primer
ccccatctctcctcctccgcttctcccttggcatcccaca

SEQ ID NO: 6233 - DNA, 40 bp, Artificial Sequence
  Description of Artificial Sequence: Synthetic primer
actggtgtggcaagtccactggggcaccggcaggaaagac

SEQ ID NO: 6234 - DNA, 40 bp, Artificial Sequence
  Description of Artificial Sequence: Synthetic primer
cgtggatgggttagtaatgccgtgctttctccttttgttg

SEQ ID NO: 6235 - DNA, 40 bp, Artificial Sequence
  Description of Artificial Sequence: Synthetic primer
tccgatttgtctggtctccatataaaacatagagaggatt

SEQ ID NO: 6236 - DNA, 40 bp, Artificial Sequence
  Description of Artificial Sequence: Synthetic primer
tacttatgttacaaaacataagtttaaagataaggcatca

SEQ ID NO: 6237 - DNA, 40 bp, Artificial Sequence
  Description of Artificial Sequence: Synthetic primer
gtaaataacgtgtcattcagccaagaggcaaaaataaacc

SEQ ID NO: 6238 - DNA, 40 bp, Artificial Sequence
  Description of Artificial Sequence: Synthetic primer
atgacagacttgttttaagaatagcatatgtcttaaaata

SEQ ID NO: 6239 - DNA, 40 bp, Artificial Sequence
  Description of Artificial Sequence: Synthetic primer
gtgtccgacccggccttcagtcctggcgtggccgcatctg

SEQ ID NO: 6240 - DNA, 40 bp, Artificial Sequence
  Description of Artificial Sequence: Synthetic primer
aacaaacacaggagcgtgtgagcggcgtgtgggatgttgc

SEQ ID NO: 6241 - DNA, 40 bp, Artificial Sequence
  Description of Artificial Sequence: Synthetic primer
gcattatgctttgtaaaaggccgatacgagagggactaac

SEQ ID NO: 6242 - DNA, 40 bp, Artificial Sequence
  Description of Artificial Sequence: Synthetic primer
cactcctcagggtgtcagtattgcttttgtcctatttctg

SEQ ID NO: 6243 - DNA, 40 bp, Artificial Sequence
  Description of Artificial Sequence: Synthetic primer
cacgctgagctcacagcctgctgttctccaccgggccaca

SEQ ID NO: 6244 - DNA, 40 bp, Artificial Sequence
  Description of Artificial Sequence: Synthetic primer
cgaggggcaggtggccgttcccggagctctgagggcagtg

SEQ ID NO: 6245 - DNA, 40 bp, Artificial Sequence
  Description of Artificial Sequence: Synthetic primer
ccataaacttgggacgtattaagaggaaaactgtactgac

SEQ ID NO: 6246 - DNA, 40 bp, Artificial Sequence
  Description of Artificial Sequence: Synthetic primer
aacataagcagatacattttctaattcagttttggcttcc

SEQ ID NO: 6247 - DNA, 40 bp, Artificial Sequence
  Description of Artificial Sequence: Synthetic primer
atgccatatcaaacgcctttgtcagttacagaaagggaac

SEQ ID NO: 6248 - DNA, 40 bp, Artificial Sequence
  Description of Artificial Sequence: Synthetic primer
catatgtatacacattgcaacttaaaaggcatctactttc

SEQ ID NO: 6249 - DNA, 40 bp, Artificial Sequence
  Description of Artificial Sequence: Synthetic primer
tgtataaaatatctataatttaaatcatgatactaacatg

SEQ ID NO: 6250 - DNA, 40 bp, Artificial Sequence
  Description of Artificial Sequence: Synthetic primer
taataataattatcctacttctctttctttcttttgttct

SEQ ID NO: 6251 - DNA, 40 bp, Artificial Sequence
  Description of Artificial Sequence: Synthetic primer
ggtgaatgtctgaccgttgattttgttgtctaatactttc

SEQ ID NO: 6252 - DNA, 40 bp, Artificial Sequence
  Description of Artificial Sequence: Synthetic primer
caggtttgaagtgtgaactaactgtatacaaagaagagac

SEQ ID NO: 6253 - DNA, 40 bp, Artificial Sequence
  Description of Artificial Sequence: Synthetic primer
cagaggagtcattgaccctcttgtgcacctggcttcgttg

SEQ ID NO: 6254 - DNA, 40 bp, Artificial Sequence
  Description of Artificial Sequence: Synthetic primer
cactgccttcctggctctagcacccctccatcttcctcac

SEQ ID NO: 6255 - DNA, 40 bp, Artificial Sequence
  Description of Artificial Sequence: Synthetic primer
atggaccaaaatcccaagtaaataatctccttagatacag

SEQ ID NO: 6256 - DNA, 40 bp, Artificial Sequence
  Description of Artificial Sequence: Synthetic primer
tttttctgtccctttgatttccacaggactctaaattgcc

SEQ ID NO: 6257 - DNA, 40 bp, Artificial Sequence
  Description of Artificial Sequence: Synthetic primer
gcttaaaaaattcatgtctgaaacattgttggtcttgtgc

SEQ ID NO: 6258 - DNA, 40 bp, Artificial Sequence
  Description of Artificial Sequence: Synthetic primer
aggtaagaacagtctgtaacataccatatgccacaaaaaa

SEQ ID NO: 6259 - DNA, 40 bp, Artificial Sequence
  Description of Artificial Sequence: Synthetic primer
gctcgctgcacttgggcgagagctggaacgtggaccagag

SEQ ID NO: 6260 - DNA, 40 bp, Artificial Sequence
  Description of Artificial Sequence: Synthetic primer
ggcttcgccgagtagtcgcacggtcggggtgccagccgcg

SEQ ID NO: 6261 - DNA, 40 bp, Artificial Sequence
  Description of Artificial Sequence: Synthetic primer
agtcacctgccctggcccttagtcacctgccctgtttgtc

SEQ ID NO: 6262 - DNA, 40 bp, Artificial Sequence
  Description of Artificial Sequence: Synthetic primer
ccagcctgcgccccagctgccacctgccacctgccctctg

SEQ ID NO: 6263 - DNA, 40 bp, Artificial Sequence
  Description of Artificial Sequence: Synthetic primer
ttcaattcaacagaacattctattcagatttacaataata

SEQ ID NO: 6264 - DNA, 40 bp, Artificial Sequence
  Description of Artificial Sequence: Synthetic primer
aagtgctaactagttttatggatttttaatctttggtatc

SEQ ID NO: 6265 - DNA, 40 bp, Artificial Sequence
  Description of Artificial Sequence: Synthetic primer
atttgaattaaacaatttaaagccagtaatgactatatcc

SEQ ID NO: 6266 - DNA, 40 bp, Artificial Sequence
  Description of Artificial Sequence: Synthetic primer
gcagtacacctaagaaaatttatagcagttatcctggaat

SEQ ID NO: 6267 - DNA, 40 bp, Artificial Sequence
  Description of Artificial Sequence: Synthetic primer
gtataatttaaaacaaaagaaaaaagttgtcgtttttatg

SEQ ID NO: 6268 - DNA, 40 bp, Artificial Sequence
  Description of Artificial Sequence: Synthetic primer
gctgtatagaaatgagtaatgatgcattttgttattccag

SEQ ID NO: 6269 - DNA, 40 bp, Artificial Sequence
  Description of Artificial Sequence: Synthetic primer
gtctgttgatttggagttgcttgtgagaaatcactattgg

SEQ ID NO: 6270 - DNA, 40 bp, Artificial Sequence
  Description of Artificial Sequence: Synthetic primer
cactggggactgctggaagctggtcccagaaagatttcca

SEQ ID NO: 6271 - DNA, 40 bp, Artificial Sequence
  Description of Artificial Sequence: Synthetic primer
gttgtctctcttgctgttctcgtaaacgttccttacgttc

SEQ ID NO: 6272 - DNA, 40 bp, Artificial Sequence
  Description of Artificial Sequence: Synthetic primer
gcccatccactcccaatatggcagcaggccagctatgtac

SEQ ID NO: 6273 - DNA, 40 bp, Artificial Sequence
  Description of Artificial Sequence: Synthetic primer
atcaatccctgttggaagcccaaatttttcttctgtgaag

SEQ ID NO: 6274 - DNA, 40 bp, Artificial Sequence
  Description of Artificial Sequence: Synthetic primer
aatccacagagtggaccaccacctcgggtagaatttgatg

SEQ ID NO: 6275 - DNA, 40 bp, Artificial Sequence
  Description of Artificial Sequence: Synthetic primer
tttccatgatatctgaggattctcaaaagctctgtgtaac

SEQ ID NO: 6276 - DNA, 40 bp, Artificial Sequence
  Description of Artificial Sequence: Synthetic primer
gcctgtgttttgataaggtgatgggccctctttctggagg

SEQ ID NO: 6277 - DNA, 40 bp, Artificial Sequence
  Description of Artificial Sequence: Synthetic primer
gcaattaataattatgagcattatattcagatttgtactt

SEQ ID NO: 6278 - DNA, 40 bp, Artificial Sequence
  Description of Artificial Sequence: Synthetic primer
gttctttaaggtttagatttaaagaatttctgctttttat

SEQ ID NO: 6279 - DNA, 40 bp, Artificial Sequence
  Description of Artificial Sequence: Synthetic primer
tggttttccaaattttgatttgtttttaaatactctttcc

SEQ ID NO: 6280 - DNA, 40 bp, Artificial Sequence
  Description of Artificial Sequence: Synthetic primer
agctggcaaacagcactacttatcaaagcctgagaacaag

SEQ ID NO: 6281 - DNA, 40 bp, Artificial Sequence
  Description of Artificial Sequence: Synthetic primer
ccaagaatactttgagagctttctctgcccctcaaaattc

SEQ ID NO: 6282 - DNA, 40 bp, Artificial Sequence
  Description of Artificial Sequence: Synthetic primer
gcagaagggctataaagtagcacgagtggaacagactgag

SEQ ID NO: 6283 - DNA, 40 bp, Artificial Sequence
  Description of Artificial Sequence: Synthetic primer
ttctcttcaggaaggtctgatacccggctcccagttttgg

SEQ ID NO: 6284 - DNA, 40 bp, Artificial Sequence
  Description of Artificial Sequence: Synthetic primer
ccctactagagagggttgatacttgccatactccttttgg

SEQ ID NO: 6285 - DNA, 40 bp, Artificial Sequence
  Description of Artificial Sequence: Synthetic primer
tttcctgatttgactgtagaattgaaccgatgggatacag

SEQ ID NO: 6286 - DNA, 40 bp, Artificial Sequence
  Description of Artificial Sequence: Synthetic primer
cattctaaagtttcatgataccaaacagtagggcgactac

SEQ ID NO: 6287 - DNA, 40 bp, Artificial Sequence
  Description of Artificial Sequence: Synthetic primer
ctctatcatacttggatatatgtgccatctttctacatcg

SEQ ID NO: 6288 - DNA, 40 bp, Artificial Sequence
  Description of Artificial Sequence: Synthetic primer
tgccatcacttagcttttccctaaaatattcttcctcaag

SEQ ID NO: 6289 - DNA, 40 bp, Artificial Sequence
  Description of Artificial Sequence: Synthetic primer
gatcattaatagcataatggttacagagtggggcacaaag

SEQ ID NO: 6290 - DNA, 40 bp, Artificial Sequence
  Description of Artificial Sequence: Synthetic primer
tgggagtaataagtccagtctttcgagccttttcatggtc

SEQ ID NO: 6291 - DNA, 40 bp, Artificial Sequence
  Description of Artificial Sequence: Synthetic primer
cccaggatctgaacaacatggcagatgcaatctctcacac

SEQ ID NO: 6292 - DNA, 40 bp, Artificial Sequence
  Description of Artificial Sequence: Synthetic primer
tagctgttttacaatacagttttctgacatggtggcttgc

SEQ ID NO: 6293 - DNA, 40 bp, Artificial Sequence
  Description of Artificial Sequence: Synthetic primer
aagggcgggagtcgagcccaaaaccaaggacggaaagagc

SEQ ID NO: 6294 - DNA, 40 bp, Artificial Sequence
  Description of Artificial Sequence: Synthetic primer
tccgcttctaccccgtcggccgctgccactggggtccctg

SEQ ID NO: 6295 - DNA, 40 bp, Artificial Sequence
  Description of Artificial Sequence: Synthetic primer
tggctcttaccccaccccacccgctttctccattctctgc

SEQ ID NO: 6296 - DNA, 40 bp, Artificial Sequence
  Description of Artificial Sequence: Synthetic primer
cctgagactcgtggacatcctctgtagaatgacatgttgc

SEQ ID NO: 6297 - DNA, 40 bp, Artificial Sequence
  Description of Artificial Sequence: Synthetic primer
gcagccggcctggccccacctgtgcggcgtgggctcccgg

SEQ ID NO: 6298 - DNA, 40 bp, Artificial Sequence
  Description of Artificial Sequence: Synthetic primer
catgaggggcatgagaggtaccagggagaggctggctgtg

SEQ ID NO: 6299 - DNA, 40 bp, Artificial Sequence
  Description of Artificial Sequence: Synthetic primer
acacagtctgttggtatcactacattctatatattgaaag

SEQ ID NO: 6300 - DNA, 40 bp, Artificial Sequence
  Description of Artificial Sequence: Synthetic primer
tttgttttatctgccttgatattcattggacttatttctg

SEQ ID NO: 6301 - DNA, 40 bp, Artificial Sequence
  Description of Artificial Sequence: Synthetic primer
ccttcaatgctgttcctcagtttgtcactaaaatctcttc

SEQ ID NO: 6302 - DNA, 40 bp, Artificial Sequence
  Description of Artificial Sequence: Synthetic primer
taaaaaaaatttagtttaaaaaaaatcaagagttaattgc

SEQ ID NO: 6303 - DNA, 40 bp, Artificial Sequence
  Description of Artificial Sequence: Synthetic primer
acataaaactatggtaattttagttttcttcttcatctcc

SEQ ID NO: 6304 - DNA, 40 bp, Artificial Sequence
  Description of Artificial Sequence: Synthetic primer
cccacccttaataattcccacttcaaaatatccaaaaacc

SEQ ID NO: 6305 - DNA, 40 bp, Artificial Sequence
  Description of Artificial Sequence: Synthetic primer
aagcagtattataattctcttcaaactattttctttttac

SEQ ID NO: 6306 - DNA, 40 bp, Artificial Sequence
  Description of Artificial Sequence: Synthetic primer
attaaatttctaacaattaacttttggaaaatttttgttc

SEQ ID NO: 6307 - DNA, 40 bp, Artificial Sequence
  Description of Artificial Sequence: Synthetic primer
gctaagcacagccccagtcagctgaggctgccatggagac

SEQ ID NO: 6308 - DNA, 40 bp, Artificial Sequence
  Description of Artificial Sequence: Synthetic primer
ctcccagatgtgcaaagctcagccaccctccttctcctcc

SEQ ID NO: 6309 - DNA, 40 bp, Artificial Sequence
  Description of Artificial Sequence: Synthetic primer
gggtgagatgtctattcccagctgttatctgctctcgccc

SEQ ID NO: 6310 - DNA, 40 bp, Artificial Sequence
  Description of Artificial Sequence: Synthetic primer
ctcagctgcctgacgggcccacacactgccccccagaagg

SEQ ID NO: 6311 - DNA, 40 bp, Artificial Sequence
  Description of Artificial Sequence: Synthetic primer
caagaatcttccacaactggggacctgctgccccacactg

SEQ ID NO: 6312 - DNA, 40 bp, Artificial Sequence
  Description of Artificial Sequence: Synthetic primer
caggtcagcactggcttcggattccctccctgccagcaag

SEQ ID NO: 6313 - DNA, 40 bp, Artificial Sequence
  Description of Artificial Sequence: Synthetic primer
tgcgtagccagggcggagataactgggtgtgttcttcttg

SEQ ID NO: 6314 - DNA, 40 bp, Artificial Sequence
  Description of Artificial Sequence: Synthetic primer
ggccctaatggtttgaagcccagcccctctcaggacagag

SEQ ID NO: 6315 - DNA, 40 bp, Artificial Sequence
  Description of Artificial Sequence: Synthetic primer
ctcccgccctgccaacctccatcccggaacctgtgctgac

SEQ ID NO: 6316 - DNA, 40 bp, Artificial Sequence
  Description of Artificial Sequence: Synthetic primer
tgtcctcaactcctgcccatctctcagatagcagaaaccc

SEQ ID NO: 6317 - DNA, 40 bp, Artificial Sequence
  Description of Artificial Sequence: Synthetic primer
tgggctgcaaaagctctaacttgtgtcctttggttgttgc

SEQ ID NO: 6318 - DNA, 40 bp, Artificial Sequence
  Description of Artificial Sequence: Synthetic primer
aaacagttttgcagggagatgagggagggagagactcatg

SEQ ID NO: 6319 - DNA, 40 bp, Artificial Sequence
  Description of Artificial Sequence: Synthetic primer
tttttatcagaaataaatctattgccatgcaaaaggcaga

SEQ ID NO: 6320 - DNA, 40 bp, Artificial Sequence
  Description of Artificial Sequence: Synthetic primer
acacaggttatgctgatcaaattgtgtgtttctactttag

SEQ ID NO: 6321 - DNA, 40 bp, Artificial Sequence
  Description of Artificial Sequence: Synthetic primer
acagagtccttattatgagatagtgacagtgtatctcaag

SEQ ID NO: 6322 - DNA, 40 bp, Artificial Sequence
  Description of Artificial Sequence: Synthetic primer
caagcacatggatcagtgttttctttatttttatgtccag

SEQ ID NO: 6323 - DNA, 40 bp, Artificial Sequence
  Description of Artificial Sequence: Synthetic primer
tcctggctctgcagtttctctttattcttcatgatgtttc

SEQ ID NO: 6324 - DNA, 40 bp, Artificial Sequence
  Description of Artificial Sequence: Synthetic primer
gcctagcaagagaatgagaatccgcatgccagccctcagg

SEQ ID NO: 6325 - DNA, 40 bp, Artificial Sequence
  Description of Artificial Sequence: Synthetic primer
aaagttttcagccctggggctttcattaggctgaaaatac

SEQ ID NO: 6326 - DNA, 40 bp, Artificial Sequence
  Description of Artificial Sequence: Synthetic primer
ggagtacctcggaaaggatgcgatcagtgtctgtgtctgg

SEQ ID NO: 6327 - DNA, 40 bp, Artificial Sequence
  Description of Artificial Sequence: Synthetic primer
actccagcactccagagggactggaccgccagctttctac

SEQ ID NO: 6328 - DNA, 40 bp, Artificial Sequence
  Description of Artificial Sequence: Synthetic primer
agatcattcaactgattgcactgactgccaactaattttg

SEQ ID NO: 6329 - DNA, 40 bp, Artificial Sequence
  Description of Artificial Sequence: Synthetic primer
aagcccctcgggccgcccaggcgccggacccccgtccccg

SEQ ID NO: 6330 - DNA, 40 bp, Artificial Sequence
  Description of Artificial Sequence: Synthetic primer
ccgagcggcggcggagggagcagcgccggggcgcacgagg

SEQ ID NO: 6331 - DNA, 40 bp, Artificial Sequence
  Description of Artificial Sequence: Synthetic primer
agcctacaccatttttgcatgtactgatgttaactccatc

SEQ ID NO: 6332 - DNA, 40 bp, Artificial Sequence
  Description of Artificial Sequence: Synthetic primer
atagatcattcttagaaccatcttgcttcatacttttctg

SEQ ID NO: 6333 - DNA, 40 bp, Artificial Sequence
  Description of Artificial Sequence: Synthetic primer
ataataaaagagtgaataccttatttcttaaaactgaaaa

SEQ ID NO: 6334 - DNA, 40 bp, Artificial Sequence
  Description of Artificial Sequence: Synthetic primer
ctggtgaatgaattcacacaactcacctgcacacctacag

SEQ ID NO: 6335 - DNA, 40 bp, Artificial Sequence
  Description of Artificial Sequence: Synthetic primer
ctgtccctccagagaaccctaatacagtgtgtgctgctaa

SEQ ID NO: 6336 - DNA, 40 bp, Artificial Sequence
  Description of Artificial Sequence: Synthetic primer
aagcatttctcagaattgatagcagtgtttgctgttctag

SEQ ID NO: 6337 - DNA, 40 bp, Artificial Sequence
  Description of Artificial Sequence: Synthetic primer
cctactctgctttgagagggtggtgggcactcctgattcc

SEQ ID NO: 6338 - DNA, 40 bp, Artificial Sequence
  Description of Artificial Sequence: Synthetic primer
tcaccttccatccctcccctccctctggcctggctggtgg

SEQ ID NO: 6339 - DNA, 40 bp, Artificial Sequence
  Description of Artificial Sequence: Synthetic primer
gccatactgcctgctgcctcaggatccccgtccccgactc

SEQ ID NO: 6340 - DNA, 40 bp, Artificial Sequence
  Description of Artificial Sequence: Synthetic primer
tttcatgggcaggaaccaccagaaggacgggagagcagag

SEQ ID NO: 6341 - DNA, 40 bp, Artificial Sequence
  Description of Artificial Sequence: Synthetic primer
aaaaataaacatgaaacactaagctatgaatcacatactc

SEQ ID NO: 6342 - DNA, 40 bp, Artificial Sequence
  Description of Artificial Sequence: Synthetic primer
catttgtctttgtttcttacttttctcaccttattgtatg

SEQ ID NO: 6343 - DNA, 40 bp, Artificial Sequence
  Description of Artificial Sequence: Synthetic primer
ggaccttcggtgactgatgatctaagtttcccgaggtttc

SEQ ID NO: 6344 - DNA, 40 bp, Artificial Sequence
  Description of Artificial Sequence: Synthetic primer
gccacacatctttgacctcaggtttctaacgcctgttttc

SEQ ID NO: 6345 - DNA, 40 bp, Artificial Sequence
  Description of Artificial Sequence: Synthetic primer
acaagcgatttggggaattcaaggtagtccagggtatgtg

SEQ ID NO: 6346 - DNA, 40 bp, Artificial Sequence
  Description of Artificial Sequence: Synthetic primer
tgtgtttcatggtaacccatggggtccccatccattcttc

SEQ ID NO: 6347 - DNA, 40 bp, Artificial Sequence
  Description of Artificial Sequence: Synthetic primer
ggtccctccctagcctggcagaaaagaaagaccctcatcc

SEQ ID NO: 6348 - DNA, 40 bp, Artificial Sequence
  Description of Artificial Sequence: Synthetic primer
tttttgggagaaagtagaatataaatctaaacaaagtaac

SEQ ID NO: 6349 - DNA, 40 bp, Artificial Sequence
  Description of Artificial Sequence: Synthetic primer
ttgactaccatgttcagctgtaactaactgggttatttac

SEQ ID NO: 6350 - DNA, 40 bp, Artificial Sequence
  Description of Artificial Sequence: Synthetic primer
tctagaaaaattgcctacctgtaagttatttatgctgttt

SEQ ID NO: 6351 - DNA, 40 bp, Artificial Sequence
  Description of Artificial Sequence: Synthetic primer
cctcaatctttttatatatgtactcaagatatatgcattc

SEQ ID NO: 6352 - DNA, 40 bp, Artificial Sequence
  Description of Artificial Sequence: Synthetic primer
acttaatgtgctttgaaaatttagcccaaagtaatgtagg

SEQ ID NO: 6353 - DNA, 40 bp, Artificial Sequence
  Description of Artificial Sequence: Synthetic primer
ttaaatactatccaagtagttttccagaaactaagctaac

SEQ ID NO: 6354 - DNA, 40 bp, Artificial Sequence
  Description of Artificial Sequence: Synthetic primer
aatcctgttcctaggagtttcttgggacaacaatcttggc

SEQ ID NO: 6355 - DNA, 40 bp, Artificial Sequence
  Description of Artificial Sequence: Synthetic primer
ggtttgaaattggatgtacccgtgagagccacctatggag

SEQ ID NO: 6356 - DNA, 40 bp, Artificial Sequence
  Description of Artificial Sequence: Synthetic primer
taaaatcaactgcctttgtgacactctgcctgccactcac

SEQ ID NO: 6357 - DNA, 40 bp, Artificial Sequence
  Description of Artificial Sequence: Synthetic primer
ctctgaagatttcgatactccgagaatacttacaaagatg

SEQ ID NO: 6358 - DNA, 40 bp, Artificial Sequence
  Description of Artificial Sequence: Synthetic primer
atgtgtttgattttgttttttgttttttgcttgtctgctg

SEQ ID NO: 6359 - DNA, 40 bp, Artificial Sequence
  Description of Artificial Sequence: Synthetic primer
ttctccatctttactcattcttttcttttacctttttctc

SEQ ID NO: 6360 - DNA, 40 bp, Artificial Sequence
  Description of Artificial Sequence: Synthetic primer
cacatctttaaacagcataaactacatgaacaatataaag

SEQ ID NO: 6361 - DNA, 40 bp, Artificial Sequence
  Description of Artificial Sequence: Synthetic primer
atttatgcaaaagaatctaacatttctatttcttcccata

SEQ ID NO: 6362 - DNA, 40 bp, Artificial Sequence
  Description of Artificial Sequence: Synthetic primer
ccaggccgccagctttccccagtggtcgggtgctggtctc

SEQ ID NO: 6363 - DNA, 40 bp, Artificial Sequence
  Description of Artificial Sequence: Synthetic primer
cacagtggggctgggtgagcctgcaggcgggcggcagggc

SEQ ID NO: 6364 - DNA, 40 bp, Artificial Sequence
  Description of Artificial Sequence: Synthetic primer
cagtgcatcctgctaagttgtagtcactgagcgactttcc

SEQ ID NO: 6365 - DNA, 40 bp, Artificial Sequence
  Description of Artificial Sequence: Synthetic primer
atcagtgagtgagatgggagtgtcacggagcgctgtgttt

SEQ ID NO: 6366 - DNA, 40 bp, Artificial Sequence
  Description of Artificial Sequence: Synthetic primer
atgtcacgaggagaggatctggctgttcaaagcaggttac

SEQ ID NO: 6367 - DNA, 40 bp, Artificial Sequence
  Description of Artificial Sequence: Synthetic primer
cttttttatgcttatggcctatctgtgcagaacaacagag

SEQ ID NO: 6368 - DNA, 40 bp, Artificial Sequence
  Description of Artificial Sequence: Synthetic primer
cactgagaacattactgtatccctttcccctgtgctcctc

SEQ ID NO: 6369 - DNA, 40 bp, Artificial Sequence
  Description of Artificial Sequence: Synthetic primer
gggtgcagcattggtgaacattcttttgaacatgaacctg

SEQ ID NO: 6370 - DNA, 40 bp, Artificial Sequence
  Description of Artificial Sequence: Synthetic primer
aaatttgttagaaaagctttgttttcttcacattctaaag

SEQ ID NO: 6371 - DNA, 40 bp, Artificial Sequence
  Description of Artificial Sequence: Synthetic primer
ccttcctagagagttagagtaacttcaatgtctttattcc

SEQ ID NO: 6372 - DNA, 40 bp, Artificial Sequence
  Description of Artificial Sequence: Synthetic primer
gccccactacatgtataagggtgtttctgtaacctccacc

SEQ ID NO: 6373 - DNA, 40 bp, Artificial Sequence
  Description of Artificial Sequence: Synthetic primer
gtcttaccttgactaacataccagctgcaattttccaatc

SEQ ID NO: 6374 - DNA, 40 bp, Artificial Sequence
  Description of Artificial Sequence: Synthetic primer
agcaaactctcctgagcctttgcgagaggtaatgaatgac

SEQ ID NO: 6375 - DNA, 40 bp, Artificial Sequence
  Description of Artificial Sequence: Synthetic primer
gagtaaactacttatatttaatacgttgttctcttttctc

SEQ ID NO: 6376 - DNA, 40 bp, Artificial Sequence
  Description of Artificial Sequence: Synthetic primer
attcctattttgggacagttttgttttcatataagcattc

SEQ ID NO: 6377 - DNA, 40 bp, Artificial Sequence
  Description of Artificial Sequence: Synthetic primer
aagtcctttgtaagtagcaactgggctgaaacaccaagac

SEQ ID NO: 6378 - DNA, 40 bp, Artificial Sequence
  Description of Artificial Sequence: Synthetic primer
tattctgatctttcacagcagtgcttgtgagaacatttcc

SEQ ID NO: 6379 - DNA, 40 bp, Artificial Sequence
  Description of Artificial Sequence: Synthetic primer
gctgagggctgagcctggaaaggtggttacctcgctgctc

SEQ ID NO: 6380 - DNA, 40 bp, Artificial Sequence
  Description of Artificial Sequence: Synthetic primer
ggctcctggctgtgtggtctctacagaggcattttgtggc

SEQ ID NO: 6381 - DNA, 40 bp, Artificial Sequence
  Description of Artificial Sequence: Synthetic primer
tggcagccggggaggggctcgtgcaccccggccagcgggc

SEQ ID NO: 6382 - DNA, 40 bp, Artificial Sequence
  Description of Artificial Sequence: Synthetic primer
gagcagtgaggccagcacgaccctcttgtccccttgtctc

SEQ ID NO: 6383 - DNA, 40 bp, Artificial Sequence
  Description of Artificial Sequence: Synthetic primer
acctcagaggtctgtgacccctccccagtgaactgcacct

SEQ ID NO: 6384 - DNA, 40 bp, Artificial Sequence
  Description of Artificial Sequence: Synthetic primer
cgtgcagatggatgtttttgtgcatgcttttgatgaatgc

SEQ ID NO: 6385 - DNA, 40 bp, Artificial Sequence
  Description of Artificial Sequence: Synthetic primer
tggcctccctccctgggaacccaaatccaactttgtcacc

SEQ ID NO: 6386 - DNA, 40 bp, Artificial Sequence
  Description of Artificial Sequence: Synthetic primer
gctgtcaatggatggaagtacatgcaggcacgggccactg

SEQ ID NO: 6387 - DNA, 40 bp, Artificial Sequence
  Description of Artificial Sequence: Synthetic primer
gcggagcccaccaactcatggtgccctttggatctctttc

SEQ ID NO: 6388 - DNA, 40 bp, Artificial Sequence
  Description of Artificial Sequence: Synthetic primer
ggggcagcctctttggacatggcccagcctgccccagaag

SEQ ID NO: 6389 - DNA, 40 bp, Artificial Sequence
  Description of Artificial Sequence: Synthetic primer
agtacaataacaaaaataatgttcccataactgaaaacac

SEQ ID NO: 6390 - DNA, 40 bp, Artificial Sequence
  Description of Artificial Sequence: Synthetic primer
cacatgttagtatctaaatgttgcattgttgactgttagg

SEQ ID NO: 6391 - DNA, 40 bp, Artificial Sequence
  Description of Artificial Sequence: Synthetic primer
ggttttcactaatgagcttgccattctttctattttattt

SEQ ID NO: 6392 - DNA, 40 bp, Artificial Sequence
  Description of Artificial Sequence: Synthetic primer
ggttacataaaactaacgaaagtataaactaataacatac

SEQ ID NO: 6393 - DNA, 40 bp, Artificial Sequence
  Description of Artificial Sequence: Synthetic primer
cccagaaagctttcctgtgaaaatatgctactaaccattg

SEQ ID NO: 6394 - DNA, 40 bp, Artificial Sequence
  Description of Artificial Sequence: Synthetic primer
tcccaggacactggatcctcggggcagcattaacacttac

SEQ ID NO: 6395 - DNA, 40 bp, Artificial Sequence
  Description of Artificial Sequence: Synthetic primer
gccaccaaatatattctctgctcactgaacatctctttac

SEQ ID NO: 6396 - DNA, 40 bp, Artificial Sequence
  Description of Artificial Sequence: Synthetic primer
taaaaacagttcttgcagtctagagtttctcctccgatgg

SEQ ID NO: 6397 - DNA, 40 bp, Artificial Sequence
  Description of Artificial Sequence: Synthetic primer
catatgtagttggctcagtcgggtgccgcccaccctcacc

SEQ ID NO: 6398 - DNA, 40 bp, Artificial Sequence
  Description of Artificial Sequence: Synthetic primer
ccagtgggtccagcttcccaagttgttgatgttccttccc

SEQ ID NO: 6399 - DNA, 40 bp, Artificial Sequence
  Description of Artificial Sequence: Synthetic primer
cctgcctctggcccctgctgatcgcagctccgccctcctc

SEQ ID NO: 6400 - DNA, 40 bp, Artificial Sequence
  Description of Artificial Sequence: Synthetic primer
caaggaaggcgctcgtcccctggccgcattgtccctcctg

SEQ ID NO: 6401 - DNA, 40 bp, Artificial Sequence
  Description of Artificial Sequence: Synthetic primer
ccctcggatgttctgctccacagtgaagggcccgctggag

SEQ ID NO: 6402 - DNA, 40 bp, Artificial Sequence
  Description of Artificial Sequence: Synthetic primer
cagggaggccccgggagctccttcccgatgtgggctgtgg

SEQ ID NO: 6403 - DNA, 40 bp, Artificial Sequence
  Description of Artificial Sequence: Synthetic primer
ttttcctttcgagctttatcttttcctttatgtgtttttc

SEQ ID NO: 6404 - DNA, 40 bp, Artificial Sequence
  Description of Artificial Sequence: Synthetic primer
ccaatcctgaatgctctccttattaagaatgtaatttcgg

SEQ ID NO: 6405 - DNA, 40 bp, Artificial Sequence
  Description of Artificial Sequence: Synthetic primer
attcctctgtggagggttatacttgcctctgctgagcatc

SEQ ID NO: 6406 - DNA, 40 bp, Artificial Sequence
  Description of Artificial Sequence: Synthetic primer
ttcaggggatggccagaaacccagttcccctgatttattc

SEQ ID NO: 6407 - DNA, 40 bp, Artificial Sequence
  Description of Artificial Sequence: Synthetic primer
gggcggccagcgtgtgctgagcaagcccatcccgtggcta

SEQ ID NO: 6408 - DNA, 40 bp, Artificial Sequence
  Description of Artificial Sequence: Synthetic primer
cccacgttcccggaagggctgcggctactggctccaccag

SEQ ID NO: 6409 - DNA, 40 bp, Artificial Sequence
  Description of Artificial Sequence: Synthetic primer
caactgatctgtctgaaaaatacaaagaaacagcaaaatg

SEQ ID NO: 6410 - DNA, 40 bp, Artificial Sequence
  Description of Artificial Sequence: Synthetic primer
tttgttaatgtcaggacaaagtccggattgaatataagtc

SEQ ID NO: 6411 - DNA, 40 bp, Artificial Sequence
  Description of Artificial Sequence: Synthetic primer
atgggatgctggaagtcagtgccccgttcaggatcaccac

SEQ ID NO: 6412 - DNA, 40 bp, Artificial Sequence
  Description of Artificial Sequence: Synthetic primer
gtctgtgctccaaggggaccatgtccagtgcagctctcag

SEQ ID NO: 6413 - DNA, 40 bp, Artificial Sequence
  Description of Artificial Sequence: Synthetic primer
gcgcatgtccacccgaggcctgcctccccgctccctctgg

SEQ ID NO: 6414 - DNA, 40 bp, Artificial Sequence
  Description of Artificial Sequence: Synthetic primer
aggggtgggcgtggggacagcaggccagcccggcggtgac

SEQ ID NO: 6415 - DNA, 40 bp, Artificial Sequence
  Description of Artificial Sequence: Synthetic primer
ccttttccagagaagctcaaaggaagctcaggggtgtctc

SEQ ID NO: 6416 - DNA, 40 bp, Artificial Sequence
  Description of Artificial Sequence: Synthetic primer
tttaaacctcttttgccttcatgttgggtcattgccattg

SEQ ID NO: 6417 - DNA, 40 bp, Artificial Sequence
  Description of Artificial Sequence: Synthetic primer
tgcaatcatttgaaatagcaaactgacattttctttttcc

SEQ ID NO: 6418 - DNA, 40 bp, Artificial Sequence
  Description of Artificial Sequence: Synthetic primer
gtgttgaataaattcagatgcacatgtcaattgtaatggg

SEQ ID NO: 6419 - DNA, 40 bp, Artificial Sequence
  Description of Artificial Sequence: Synthetic primer
ccgcccaccccggcccctcctcagcggcactgacagtttg

SEQ ID NO: 6420 - DNA, 40 bp, Artificial Sequence
  Description of Artificial Sequence: Synthetic primer
tttgctcctggtggcagcagagtgggatgcctgaactgcc

SEQ ID NO: 6421 - DNA, 40 bp, Artificial Sequence
  Description of Artificial Sequence: Synthetic primer
tttgtatttacccatgaagacattgttttttggactctgc

SEQ ID NO: 6422 - DNA, 40 bp, Artificial Sequence
  Description of Artificial Sequence: Synthetic primer
aaattaaatttctcacccaaaagaatagtcaatgaacaac

SEQ ID NO: 6423 - DNA, 40 bp, Artificial Sequence
  Description of Artificial Sequence: Synthetic primer
ttgaaatgtaattgctgtattatttttacctctttgtttc

SEQ ID NO: 6424 - DNA, 40 bp, Artificial Sequence
  Description of Artificial Sequence: Synthetic primer
caaaaactagtttcagagggtagtaatcaaaaacatgagc

SEQ ID NO: 6425 - DNA, 40 bp, Artificial Sequence
  Description of Artificial Sequence: Synthetic primer
cctggggtgtgatgtatagctacgtaatgttactttcttg

SEQ ID NO: 6426 - DNA, 40 bp, Artificial Sequence
  Description of Artificial Sequence: Synthetic primer
ataccattccaaccatcactgttctctatcacaagaatgc

SEQ ID NO: 6427 - DNA, 40 bp, Artificial Sequence
  Description of Artificial Sequence: Synthetic primer
tttcagaacatctacagcaaaaggactgactaggatcaac

SEQ ID NO: 6428 - DNA, 40 bp, Artificial Sequence
  Description of Artificial Sequence: Synthetic primer
aaaaaaagagcagctgtgacaaatgcctgtattgaattgc

SEQ ID NO: 6429 - DNA, 40 bp, Artificial Sequence
  Description of Artificial Sequence: Synthetic primer
gaggaaaacacaggatgagaagatccaccaccacatctcc

SEQ ID NO: 6430 - DNA, 40 bp, Artificial Sequence
  Description of Artificial Sequence: Synthetic primer
tgactagttaaaacacttgtgttcattttgattctgtttc

SEQ ID NO: 6431 - DNA, 40 bp, Artificial Sequence
  Description of Artificial Sequence: Synthetic primer
cttgtagagtctacatcagcctttttgtcttatttttcac

SEQ ID NO: 6432 - DNA, 40 bp, Artificial Sequence
  Description of Artificial Sequence: Synthetic primer
ctacagctgtactttcgggcaaggagtgtctttccaaacg

SEQ ID NO: 6433 - DNA, 40 bp, Artificial Sequence
  Description of Artificial Sequence: Synthetic primer
agaggacacactacataatggccaccttcagaaagcaagc

SEQ ID NO: 6434 - DNA, 40 bp, Artificial Sequence
  Description of Artificial Sequence: Synthetic primer
ccaggaccaggattagctctgaatttgtgtacctgtttcc

SEQ ID NO: 6435 - DNA, 40 bp, Artificial Sequence
  Description of Artificial Sequence: Synthetic primer
atggaatttccatattagataccttacttttttctttacc

SEQ ID NO: 6436 - DNA, 40 bp, Artificial Sequence
  Description of Artificial Sequence: Synthetic primer
ccatccagagttttaaatctatacttagaaaatgttaatg

SEQ ID NO: 6437 - DNA, 40 bp, Artificial Sequence
  Description of Artificial Sequence: Synthetic primer
aaccggcgctgcagcccatcctgacccctgctccctcacc

SEQ ID NO: 6438 - DNA, 40 bp, Artificial Sequence
  Description of Artificial Sequence: Synthetic primer
cgcccatgcccctccctggggcggtcggtcccgcccgggc

SEQ ID NO: 6439 - DNA, 40 bp, Artificial Sequence
  Description of Artificial Sequence: Synthetic primer
taaccaagggaatatggtagatagtgcacaaatacaaacc

SEQ ID NO: 6440 - DNA, 40 bp, Artificial Sequence
  Description of Artificial Sequence: Synthetic primer
ctttaatgaattattaatatattgaaatgtttcttctttc

SEQ ID NO: 6441 - DNA, 40 bp, Artificial Sequence
  Description of Artificial Sequence: Synthetic primer
agaaatgtttaggatagtaattttaaaccttagtccactt

SEQ ID NO: 6442 - DNA, 40 bp, Artificial Sequence
  Description of Artificial Sequence: Synthetic primer
atgtttggtttggaagtccagaagattgtgtttatgttcc

SEQ ID NO: 6443 - DNA, 40 bp, Artificial Sequence
  Description of Artificial Sequence: Synthetic primer
cagattgtatggaagagacaatgccccttcttagatgagc

SEQ ID NO: 6444 - DNA, 40 bp, Artificial Sequence
  Description of Artificial Sequence: Synthetic primer
gagtaacttgcagtgactacttctgccttttaaaaccttt

SEQ ID NO: 6445 - DNA, 40 bp, Artificial Sequence
  Description of Artificial Sequence: Synthetic primer
tctatattagcaagcactggcaaattggcttaaataaaac

SEQ ID NO: 6446 - DNA, 40 bp, Artificial Sequence
  Description of Artificial Sequence: Synthetic primer
tctataaagaatatactaaagcttgtgtccagtgatatgg

SEQ ID NO: 6447 - DNA, 40 bp, Artificial Sequence
  Description of Artificial Sequence: Synthetic primer
ttgaaaaattgcagaaaataatgacccacaaaattttacc

SEQ ID NO: 6448 - DNA, 40 bp, Artificial Sequence
  Description of Artificial Sequence: Synthetic primer
aaataatacttacctttgcatcatctatgtcaaaaacatc

SEQ ID NO: 6449 - DNA, 40 bp, Artificial Sequence
  Description of Artificial Sequence: Synthetic primer
atgatctccatctttattccaatgaacaacggtcatgtct

SEQ ID NO: 6450 - DNA, 40 bp, Artificial Sequence
  Description of Artificial Sequence: Synthetic primer
ccatttcctataagataacctctaaccaatgacaatctcg

SEQ ID NO: 6451 - DNA, 40 bp, Artificial Sequence
  Description of Artificial Sequence: Synthetic primer
aactatgttattctcttgaccaaaagcacttctcattcag

SEQ ID NO: 6452 - DNA, 40 bp, Artificial Sequence
  Description of Artificial Sequence: Synthetic primer
aaaaaaatcacttccattaacatcctcttgcccgtcatac

SEQ ID NO: 6453 - DNA, 40 bp, Artificial Sequence
  Description of Artificial Sequence: Synthetic primer
ttgtccagtgttctatcgcaaaaagaaaatatatgaagag

SEQ ID NO: 6454 - DNA, 40 bp, Artificial Sequence
  Description of Artificial Sequence: Synthetic primer
gattagtgacttacttctaatgtgcatttgtttttatttt

SEQ ID NO: 6455 - DNA, 40 bp, Artificial Sequence
  Description of Artificial Sequence: Synthetic primer
tttacctataattctttccttcagccctaagccttcaatc

SEQ ID NO: 6456 - DNA, 40 bp, Artificial Sequence
  Description of Artificial Sequence: Synthetic primer
gcctctctgataaccagattttttttttattggttttatc

SEQ ID NO: 6457 - DNA, 40 bp, Artificial Sequence
  Description of Artificial Sequence: Synthetic primer
ttgtgttaacttattctagagttaatttttaaaaattgtg

SEQ ID NO: 6458 - DNA, 40 bp, Artificial Sequence
  Description of Artificial Sequence: Synthetic primer
caaattttacatcaaaaacaaaattttaataccagagagg

SEQ ID NO: 6459 - DNA, 40 bp, Artificial Sequence
  Description of Artificial Sequence: Synthetic primer
cttcccaaggccccacacgcccgcccacatgctcccactc

SEQ ID NO: 6460 - DNA, 40 bp, Artificial Sequence
  Description of Artificial Sequence: Synthetic primer
ccccaccccacagtactgactctgagtgcttcccctccag

SEQ ID NO: 6461 - DNA, 40 bp, Artificial Sequence
  Description of Artificial Sequence: Synthetic primer
tgccagtcttaatgggtttctttcatcaagagctcaaacc

SEQ ID NO: 6462 - DNA, 40 bp, Artificial Sequence
  Description of Artificial Sequence: Synthetic primer
acctgtacctcactagccttgtcaaaaatgaaattgactg

SEQ ID NO: 6463 - DNA, 40 bp, Artificial Sequence
  Description of Artificial Sequence: Synthetic primer
aaacactttatcactgaaaagagtatcaatataaattaac

SEQ ID NO: 6464 - DNA, 40 bp, Artificial Sequence
  Description of Artificial Sequence: Synthetic primer
gataaatgtttaaaaggtctatcttgtttctacttcttag

SEQ ID NO: 6465 - DNA, 40 bp, Artificial Sequence
  Description of Artificial Sequence: Synthetic primer
agcccaacgtgctttaccggccacccaccccaagcctcac

SEQ ID NO: 6466 - DNA, 40 bp, Artificial Sequence
  Description of Artificial Sequence: Synthetic primer
taatggcccctggaccctagggagctgcccatgggcatcc

SEQ ID NO: 6467 - DNA, 40 bp, Artificial Sequence
  Description of Artificial Sequence: Synthetic primer
ggcggcggcgcctgacactcggcgcctcctgccgtgctcc

SEQ ID NO: 6468 - DNA, 40 bp, Artificial Sequence
  Description of Artificial Sequence: Synthetic primer
gcgggctgggcccctagcacccatccgcggtccgagagcg

SEQ ID NO: 6469 - DNA, 40 bp, Artificial Sequence
  Description of Artificial Sequence: Synthetic primer
agactcttcatgagccgatgtgatactctccctctattgc

SEQ ID NO: 6470 - DNA, 40 bp, Artificial Sequence
  Description of Artificial Sequence: Synthetic primer
cattaataagcttctgaattagatgaaggatggtaactta

SEQ ID NO: 6471 - DNA, 40 bp, Artificial Sequence
  Description of Artificial Sequence: Synthetic primer
tttctttttcattttagctgatagaggagaagggtattgg

SEQ ID NO: 6472 - DNA, 40 bp, Artificial Sequence
  Description of Artificial Sequence: Synthetic primer
ccagaaaggggacctttcagcaatcataccttgtcctctg

SEQ ID NO: 6473 - DNA, 40 bp, Artificial Sequence
  Description of Artificial Sequence: Synthetic primer
cattataacaattttttgcagttctgggttttattttttc

SEQ ID NO: 6474 - DNA, 40 bp, Artificial Sequence
  Description of Artificial Sequence: Synthetic primer
ttagatgagccaaggagataagggagagtgctttattatc

SEQ ID NO: 6475 - DNA, 40 bp, Artificial Sequence
  Description of Artificial Sequence: Synthetic primer
ggcgctgagtgtacttacctcacttgcccagcgtgtcctc

SEQ ID NO: 6476 - DNA, 40 bp, Artificial Sequence
  Description of Artificial Sequence: Synthetic primer
aggatgcctgaccagttagagggcccacagaggaggactc

SEQ ID NO: 6477 - DNA, 40 bp, Artificial Sequence
  Description of Artificial Sequence: Synthetic primer
ttttttttcctttagcaaacttctgaatgacaacattttt

SEQ ID NO: 6478 - DNA, 40 bp, Artificial Sequence
  Description of Artificial Sequence: Synthetic primer
caccacattttaactttaaattgaacaaaagtgtttattt

SEQ ID NO: 6479 - DNA, 40 bp, Artificial Sequence
  Description of Artificial Sequence: Synthetic primer
cagaattcagacgttattaatgtttgttctgcatttttgc

SEQ ID NO: 6480 - DNA, 40 bp, Artificial Sequence
  Description of Artificial Sequence: Synthetic primer
aaaagagtcgtacggtgattttgggaacatgaagctgttc

SEQ ID NO: 6481 - DNA, 40 bp, Artificial Sequence
  Description of Artificial Sequence: Synthetic primer
accgttttctgtaatattttctttattttacatcaactgc

SEQ ID NO: 6482 - DNA, 40 bp, Artificial Sequence
  Description of Artificial Sequence: Synthetic primer
tcctccactaaaaataggatataacaactcacgtaaaaac

SEQ ID NO: 6483 - DNA, 40 bp, Artificial Sequence
  Description of Artificial Sequence: Synthetic primer
cgcgtccgggcggtacctccagcatccagtaagccagcat

SEQ ID NO: 6484 - DNA, 40 bp, Artificial Sequence
  Description of Artificial Sequence: Synthetic primer
ttgggactcgcgagcccgcactcccgccctgcctgttcgc

SEQ ID NO: 6485 - DNA, 40 bp, Artificial Sequence
  Description of Artificial Sequence: Synthetic primer
ttagccaggagctttgcatactcacccctgccactcactg

SEQ ID NO: 6486 - DNA, 40 bp, Artificial Sequence
  Description of Artificial Sequence: Synthetic primer
aaagattaaggtgcccacaagaagcccctgccagtgtgtg

SEQ ID NO: 6487 - DNA, 40 bp, Artificial Sequence
  Description of Artificial Sequence: Synthetic primer
agaaatctgtctatgaatgttagtctgttcttttggatag

SEQ ID NO: 6488 - DNA, 40 bp, Artificial Sequence
  Description of Artificial Sequence: Synthetic primer
aacttatctacaaggttgaattatttcccttttttttctc

SEQ ID NO: 6489 - DNA, 40 bp, Artificial Sequence
  Description of Artificial Sequence: Synthetic primer
gcagggagattttatttttctttcgggtactaaagcttcc

SEQ ID NO: 6490 - DNA, 40 bp, Artificial Sequence
  Description of Artificial Sequence: Synthetic primer
aaaatagatgtctattatattgggtggaaatgaaatgatt

SEQ ID NO: 6491 - DNA, 40 bp, Artificial Sequence
  Description of Artificial Sequence: Synthetic primer
tgtccctggactgagtttcctgggcaatgtgtgttttctg

SEQ ID NO: 6492 - DNA, 40 bp, Artificial Sequence
  Description of Artificial Sequence: Synthetic primer
aagcgttttctgtgaggaaggtagttttgctttagatgag

SEQ ID NO: 6493 - DNA, 40 bp, Artificial Sequence
  Description of Artificial Sequence: Synthetic primer
ctccccaaggcagggccgcaccccgcacgtcccgcagtgg

SEQ ID NO: 6494 - DNA, 40 bp, Artificial Sequence
  Description of Artificial Sequence: Synthetic primer
gcatcgggcaatttttgagccctctggtccctccctgctg

SEQ ID NO: 6495 - DNA, 40 bp, Artificial Sequence
  Description of Artificial Sequence: Synthetic primer
aaaattgcttcagaaattggagacatatttgatttaaaag

SEQ ID NO: 6496 - DNA, 40 bp, Artificial Sequence
  Description of Artificial Sequence: Synthetic primer
agtttttaaatctgccaccatagagggtatagaaaaactc

SEQ ID NO: 6497 - DNA, 40 bp, Artificial Sequence
  Description of Artificial Sequence: Synthetic primer
tttagttttttatgttactacataattatgataggctacg

SEQ ID NO: 6498 - DNA, 40 bp, Artificial Sequence
  Description of Artificial Sequence: Synthetic primer
ccagtcttataaactggaaaggttaagcgtcaataattta

SEQ ID NO: 6499 - DNA, 40 bp, Artificial Sequence
  Description of Artificial Sequence: Synthetic primer
ttcagccaccaaggagttgtggcaccaaatacgaaacacc

SEQ ID NO: 6500 - DNA, 40 bp, Artificial Sequence
  Description of Artificial Sequence: Synthetic primer
caaaagagaaatttcattgaattttttaaatggagtcatc

SEQ ID NO: 6501 - DNA, 40 bp, Artificial Sequence
  Description of Artificial Sequence: Synthetic primer
aaactgaaacacagagttttctgagtattgagtatgttag

SEQ ID NO: 6502 - DNA, 40 bp, Artificial Sequence
  Description of Artificial Sequence: Synthetic primer
attttcttagagaaacaaaaatattaatcgagacttcttt

SEQ ID NO: 6503 - DNA, 40 bp, Artificial Sequence
  Description of Artificial Sequence: Synthetic primer
taatataaattgaaacgtgtacatctcacaaaacaaatac

SEQ ID NO: 6504 - DNA, 40 bp, Artificial Sequence
  Description of Artificial Sequence: Synthetic primer
ttgctgttgactattcagaagcctatattttagaaacttc

SEQ ID NO: 6505 - DNA, 40 bp, Artificial Sequence
  Description of Artificial Sequence: Synthetic primer
gcccagcggagcctgagcaaggagcgggtccgtcgcggag

SEQ ID NO: 6506 - DNA, 40 bp, Artificial Sequence
  Description of Artificial Sequence: Synthetic primer
gggcccctcggggctcctcacctccgcgatgtcatgttcc

SEQ ID NO: 6507 - DNA, 40 bp, Artificial Sequence
  Description of Artificial Sequence: Synthetic primer
tttggagcaattcatactttcagtgtattttgaagtgata

SEQ ID NO: 6508 - DNA, 40 bp, Artificial Sequence
  Description of Artificial Sequence: Synthetic primer
acagatgttgttttaaaaggacaaaaaagacagtaatgag

SEQ ID NO: 6509 - DNA, 40 bp, Artificial Sequence
  Description of Artificial Sequence: Synthetic primer
taaattcgtacctattttgaggtattgaatttctttggac

SEQ ID NO: 6510 - DNA, 40 bp, Artificial Sequence
  Description of Artificial Sequence: Synthetic primer
attgtatgaggtcctgtcctagtcctggggtgccagtgtg

SEQ ID NO: 6511 - DNA, 40 bp, Artificial Sequence
  Description of Artificial Sequence: Synthetic primer
gagccaccctgcctggctgtttttaaagtgtgccccaaac

SEQ ID NO: 6512 - DNA, 40 bp, Artificial Sequence
  Description of Artificial Sequence: Synthetic primer
gaagtctgcacgaagacccgccttcacggcttagctggta

SEQ ID NO: 6513 - DNA, 40 bp, Artificial Sequence
  Description of Artificial Sequence: Synthetic primer
gatttttttcaagttcatttttcataatgaccagtacttt

SEQ ID NO: 6514 - DNA, 40 bp, Artificial Sequence
  Description of Artificial Sequence: Synthetic primer
gtggtaaatttagcagttcaaaagtaaatttctcttttcc

SEQ ID NO: 6515 - DNA, 40 bp, Artificial Sequence
  Description of Artificial Sequence: Synthetic primer
taaatgaggttttactgttgttctttaataattttccttc

SEQ ID NO: 6516 - DNA, 40 bp, Artificial Sequence
  Description of Artificial Sequence: Synthetic primer
aatgcttactggaaaatcgtatttaacaaaaagctgagtg

SEQ ID NO: 6517 - DNA, 40 bp, Artificial Sequence
  Description of Artificial Sequence: Synthetic primer
ccttgcctcgctcacagaatggtacacggggagcctggac

SEQ ID NO: 6518 - DNA, 40 bp, Artificial Sequence
  Description of Artificial Sequence: Synthetic primer
ctgtattctttctgggtttgtactctgtctctaatgaagg

SEQ ID NO: 6519 - DNA, 40 bp, Artificial Sequence
  Description of Artificial Sequence: Synthetic primer
aatcagcacccgcctgccctctcacccatgcttcccactc

SEQ ID NO: 6520 - DNA, 40 bp, Artificial Sequence
  Description of Artificial Sequence: Synthetic primer
cctctcaggctcgagacccaagtcccagctgaacccaaac

SEQ ID NO: 6521 - DNA, 40 bp, Artificial Sequence
  Description of Artificial Sequence: Synthetic primer
aataaaactgatattatttgccttaaaaacatatatgaaa

SEQ ID NO: 6522 - DNA, 40 bp, Artificial Sequence
  Description of Artificial Sequence: Synthetic primer
ataccatacctatagagggagaacagatataaataaaaag

SEQ ID NO: 6523 - DNA, 40 bp, Artificial Sequence
  Description of Artificial Sequence: Synthetic primer
gctggggaggagccctgctcatgtgttgaaccttggtctg

SEQ ID NO: 6524 - DNA, 40 bp, Artificial Sequence
  Description of Artificial Sequence: Synthetic primer
aagtttccagttggtaggacttggttgttcaaattaaagg

SEQ ID NO: 6525 - DNA, 40 bp, Artificial Sequence
  Description of Artificial Sequence: Synthetic primer
tccatttcaattatcattttgacaaattggaaaaataaag

SEQ ID NO: 6526 - DNA, 40 bp, Artificial Sequence
  Description of Artificial Sequence: Synthetic primer
agaactgcaaagaaatttaattttgtctaataaactttgc

SEQ ID NO: 6527 - DNA, 40 bp, Artificial Sequence
  Description of Artificial Sequence: Synthetic primer
aggtaaaagtacttaaaagccacatttctctcctccttgc

SEQ ID NO: 6528 - DNA, 40 bp, Artificial Sequence
  Description of Artificial Sequence: Synthetic primer
cacatcttctccactaggttgtgaggaaggtggcaatggg

SEQ ID NO: 6529 - DNA, 40 bp, Artificial Sequence
  Description of Artificial Sequence: Synthetic primer
gtcattcctttccaacacagcaacaaattctgggaaagac

SEQ ID NO: 6530 - DNA, 40 bp, Artificial Sequence
  Description of Artificial Sequence: Synthetic primer
agtatatcttttcatatgtttattgaccctttctttctac

SEQ ID NO: 6531 - DNA, 40 bp, Artificial Sequence
  Description of Artificial Sequence: Synthetic primer
ccctcccgggcactccctgagggctgcacggcaccgccac

SEQ ID NO: 6532 - DNA, 40 bp, Artificial Sequence
  Description of Artificial Sequence: Synthetic primer
aagacgcagaggcccctcggagtgtgcgtgtggtgagtgc

SEQ ID NO: 6533 - DNA, 40 bp, Artificial Sequence
  Description of Artificial Sequence: Synthetic primer
gctttttagaatatatgtaaaaaggagcatagaacatcac

SEQ ID NO: 6534 - DNA, 40 bp, Artificial Sequence
  Description of Artificial Sequence: Synthetic primer
agattctgagtttgggaatttctttgttgcaccactattg

SEQ ID NO: 6535 - DNA, 40 bp, Artificial Sequence
  Description of Artificial Sequence: Synthetic primer
cactatctccaggcagtggggacaaggttcagtccctaac

SEQ ID NO: 6536 - DNA, 40 bp, Artificial Sequence
  Description of Artificial Sequence: Synthetic primer
aggtcaggggtcactgggaggtcagcagggtagatgaatc

SEQ ID NO: 6537 - DNA, 40 bp, Artificial Sequence
  Description of Artificial Sequence: Synthetic primer
ttgtcttaggtagttctgatgtgtcctattgtcactctac

SEQ ID NO: 6538 - DNA, 40 bp, Artificial Sequence
  Description of Artificial Sequence: Synthetic primer
accatgtgaccaaacacaagtgtgactctaccactaagcg

SEQ ID NO: 6539 - DNA, 40 bp, Artificial Sequence
  Description of Artificial Sequence: Synthetic primer
agataaactgtcccctctacttttatctgtgatttcttac

SEQ ID NO: 6540 - DNA, 40 bp, Artificial Sequence
  Description of Artificial Sequence: Synthetic primer
aaaggacaggtcatctgttttaagaatagtttaaatacac

SEQ ID NO: 6541 - DNA, 40 bp, Artificial Sequence
  Description of Artificial Sequence: Synthetic primer
caagcagctctgaccctgtgtgctggccgggctcgtgttc

SEQ ID NO: 6542 - DNA, 40 bp, Artificial Sequence
  Description of Artificial Sequence: Synthetic primer
ctgagtgggccgagcctgcctgtctgggttcccggtgctc

SEQ ID NO: 6543 - DNA, 40 bp, Artificial Sequence
  Description of Artificial Sequence: Synthetic primer
tctactccctaaattgttgtcaaacaagacaacccacaag

SEQ ID NO: 6544 - DNA, 40 bp, Artificial Sequence
  Description of Artificial Sequence: Synthetic primer
cagcggtaatcttttccttctttgttgtgtattgttcctg

SEQ ID NO: 6545 - DNA, 40 bp, Artificial Sequence
  Description of Artificial Sequence: Synthetic primer
gtgcaatacgacctgctcattaaatcccgccgcgcagatg

SEQ ID NO: 6546 - DNA, 40 bp, Artificial Sequence
  Description of Artificial Sequence: Synthetic primer
cattttattctctctggacagacacattggtttcaaaagc

SEQ ID NO: 6547 - DNA, 40 bp, Artificial Sequence
  Description of Artificial Sequence: Synthetic primer
gtgtggggtcgcgcattttcttcaaccaggaggtgaggag

SEQ ID NO: 6548 - DNA, 40 bp, Artificial Sequence
  Description of Artificial Sequence: Synthetic primer
ccccgggtccctccccagcacgcgccgtcccggccctcac

SEQ ID NO: 6549 - DNA, 40 bp, Artificial Sequence
  Description of Artificial Sequence: Synthetic primer
tttgccccttcccagacatgtcttttcgggctccctctcc

SEQ ID NO: 6550 - DNA, 40 bp, Artificial Sequence
  Description of Artificial Sequence: Synthetic primer
cttgcaccccgttcacaccatagggtagcccccgctttcc

SEQ ID NO: 6551 - DNA, 40 bp, Artificial Sequence
  Description of Artificial Sequence: Synthetic primer
aaagaatttttggccttttacagttggtttcagtctcaat

SEQ ID NO: 6552 - DNA, 40 bp, Artificial Sequence
  Description of Artificial Sequence: Synthetic primer
atgtaataaaatacatttttagtacagtttagaagttcac

SEQ ID NO: 6553 - DNA, 40 bp, Artificial Sequence
  Description of Artificial Sequence: Synthetic primer
ggttgaatttagaccttgagtaatgtctttacaatttttc

SEQ ID NO: 6554 - DNA, 40 bp, Artificial Sequence
  Description of Artificial Sequence: Synthetic primer
atacatatgagatgttccatatgactataactatttgtga

SEQ ID NO: 6555 - DNA, 40 bp, Artificial Sequence
  Description of Artificial Sequence: Synthetic primer
agatgggaggcctgcccgcttgaccatggtgatgttgctc

SEQ ID NO: 6556 - DNA, 40 bp, Artificial Sequence
  Description of Artificial Sequence: Synthetic primer
gagccaagttaacccctgggtcatccagcctccgactcac

SEQ ID NO: 6557 - DNA, 40 bp, Artificial Sequence
  Description of Artificial Sequence: Synthetic primer
ttgggaccactggtctcacccgctccctctcccccactcc

SEQ ID NO: 6558 - DNA, 40 bp, Artificial Sequence
  Description of Artificial Sequence: Synthetic primer
gggatgctgggcaaagtgccaccgtgggcagaggagctgg

SEQ ID NO: 6559 - DNA, 40 bp, Artificial Sequence
  Description of Artificial Sequence: Synthetic primer
atggccttgtcagtgcttgattacatactctgtctccttc

SEQ ID NO: 6560 - DNA, 40 bp, Artificial Sequence
  Description of Artificial Sequence: Synthetic primer
tgtgaaaaataactttataaggccagaagaccgcaatgtg

SEQ ID NO: 6561 - DNA, 40 bp, Artificial Sequence
  Description of Artificial Sequence: Synthetic primer
gaatgtgaactttgttaaatgtgaacaacttttttttttc

SEQ ID NO: 6562 - DNA, 40 bp, Artificial Sequence
  Description of Artificial Sequence: Synthetic primer
tccattatttgcctttttggctatttccctcagtagtaaa

SEQ ID NO: 6563 - DNA, 40 bp, Artificial Sequence
  Description of Artificial Sequence: Synthetic primer
tcagtacccagactgaccactgcctctgcctcttcttctc

SEQ ID NO: 6564 - DNA, 40 bp, Artificial Sequence
  Description of Artificial Sequence: Synthetic primer
caccaccaaccaggtctggccaagctgctgtattttagtg

SEQ ID NO: 6565 - DNA, 40 bp, Artificial Sequence
  Description of Artificial Sequence: Synthetic primer
tactagatgtatattaaaattttcgtcattgtatttattc

SEQ ID NO: 6566 - DNA, 40 bp, Artificial Sequence
  Description of Artificial Sequence: Synthetic primer
aaaataaaagagtgatataacccacctcatttatcatttc

SEQ ID NO: 6567 - DNA, 40 bp, Artificial Sequence
  Description of Artificial Sequence: Synthetic primer
gacgcctgggtagcccctcagcttgaacaccccagctctc

SEQ ID NO: 6568 - DNA, 40 bp, Artificial Sequence
  Description of Artificial Sequence: Synthetic primer
gaaggcgggaagtgaagggctgggcgctctgtttgtcgtc

SEQ ID NO: 6569 - DNA, 40 bp, Artificial Sequence
  Description of Artificial Sequence: Synthetic primer
cccttgcccgccagcccctgcccatcacctcctgctcgtc

SEQ ID NO: 6570 - DNA, 40 bp, Artificial Sequence
  Description of Artificial Sequence: Synthetic primer
tgttctgtgctcaaccaacactaaatgccagcctactccc

SEQ ID NO: 6571 - DNA, 40 bp, Artificial Sequence
  Description of Artificial Sequence: Synthetic primer
gcaccactgcatctattcaggttcaagaacagtatttcac

SEQ ID NO: 6572 - DNA, 40 bp, Artificial Sequence
  Description of Artificial Sequence: Synthetic primer
aggtaaactctgatcagttcctttcctgaaatgtcttctc

SEQ ID NO: 6573 - DNA, 40 bp, Artificial Sequence
  Description of Artificial Sequence: Synthetic primer
gaccagatagttttgtgggcagtttttgcattattttagc

SEQ ID NO: 6574 - DNA, 40 bp, Artificial Sequence
  Description of Artificial Sequence: Synthetic primer
tcccagcctttccccttgggtggctaccgctcagatgctg

SEQ ID NO: 6575 - DNA, 40 bp, Artificial Sequence
  Description of Artificial Sequence: Synthetic primer
ctataaccagatgaacgtgccttgccctaagacataatgc

SEQ ID NO: 6576 - DNA, 40 bp, Artificial Sequence
  Description of Artificial Sequence: Synthetic primer
gaatgtatttttatataaaagtatttctcctttatttttg

SEQ ID NO: 6577 - DNA, 40 bp, Artificial Sequence
  Description of Artificial Sequence: Synthetic primer
caggcacctctggggatgtgcctccttccacgaagcaaac

SEQ ID NO: 6578 - DNA, 40 bp, Artificial Sequence
  Description of Artificial Sequence: Synthetic primer
cccagccttcctctgcctgtcccttgtcccactgctcacc

SEQ ID NO: 6579 - DNA, 40 bp, Artificial Sequence
  Description of Artificial Sequence: Synthetic primer
caccttcccctcgagcctcttacctgggccgcccttcctg

SEQ ID NO: 6580 - DNA, 40 bp, Artificial Sequence
  Description of Artificial Sequence: Synthetic primer
gcagtcctggtagaggcctgtcctgggctccaggttggcc

SEQ ID NO: 6581 - DNA, 40 bp, Artificial Sequence
  Description of Artificial Sequence: Synthetic primer
aaatgaacacattgcagctacattttattctttaaattgc

SEQ ID NO: 6582 - DNA, 40 bp, Artificial Sequence
  Description of Artificial Sequence: Synthetic primer
acaatggattaatgtcatgacaacttcattttcataactc

SEQ ID NO: 6583 - DNA, 40 bp, Artificial Sequence
  Description of Artificial Sequence: Synthetic primer
ccctcccagcatgcatcctaggcagttcataatgcatctc

SEQ ID NO: 6584 - DNA, 40 bp, Artificial Sequence
  Description of Artificial Sequence: Synthetic primer
gggctggggtggtccaggcatgcagctgtcatttggagac

SEQ ID NO: 6585 - DNA, 40 bp, Artificial Sequence
  Description of Artificial Sequence: Synthetic primer
tttctggaggagaagctcagcctgggagggtgccgggagg

SEQ ID NO: 6586 - DNA, 40 bp, Artificial Sequence
  Description of Artificial Sequence: Synthetic primer
ctccccgaatgaccttctgtccctggcctgcgcttctgcc

SEQ ID NO: 6587 - DNA, 40 bp, Artificial Sequence
  Description of Artificial Sequence: Synthetic primer
gcatctacgttaaatgtcatgagtaaaggcaagacaactc

SEQ ID NO: 6588 - DNA, 40 bp, Artificial Sequence
  Description of Artificial Sequence: Synthetic primer
gccacactacaactatctgaccaacacgtttctgtttctc

SEQ ID NO: 6589 - DNA, 40 bp, Artificial Sequence
  Description of Artificial Sequence: Synthetic primer
ttacacatttcaaactttggttgagagatgttgtttttcc

SEQ ID NO: 6590 - DNA, 40 bp, Artificial Sequence
  Description of Artificial Sequence: Synthetic primer
gagaaagctgctttcagtgtgtttttctgcctcaaagttt

SEQ ID NO: 6591 - DNA, 40 bp, Artificial Sequence
  Description of Artificial Sequence: Synthetic primer
ctcacggacagcagtgaggagccatgctgctctgtggccc

SEQ ID NO: 6592 - DNA, 40 bp, Artificial Sequence
  Description of Artificial Sequence: Synthetic primer
aggggcattagagcctgacctgcccacttgcttgtctgtc

SEQ ID NO: 6593 - DNA, 40 bp, Artificial Sequence
  Description of Artificial Sequence: Synthetic primer
atcccacttgcgcccaccagctaagggaccagggtctatg

SEQ ID NO: 6594 - DNA, 40 bp, Artificial Sequence
  Description of Artificial Sequence: Synthetic primer
tcttccccaacccacatttcctttatagatgtttcttctg

SEQ ID NO: 6595 - DNA, 40 bp, Artificial Sequence
  Description of Artificial Sequence: Synthetic primer
tcctgctggtgcgcagaaagtgacagtgccttgggacagg

SEQ ID NO: 6596 - DNA, 40 bp, Artificial Sequence
  Description of Artificial Sequence: Synthetic primer
ttagctgcacatttacctgttggatgttatctgtatttgc

SEQ ID NO: 6597 - DNA, 40 bp, Artificial Sequence
  Description of Artificial Sequence: Synthetic primer
gctgcttcaggggagcatggggaaggaaaggccgatactc

SEQ ID NO: 6598 - DNA, 40 bp, Artificial Sequence
  Description of Artificial Sequence: Synthetic primer
actcaccatagcacggtacctcctctcacctcctccaatc

SEQ ID NO: 6599 - DNA, 40 bp, Artificial Sequence
  Description of Artificial Sequence: Synthetic primer
aatgccttgcagccttctagaggttttccttctccttttc

SEQ ID NO: 6600 - DNA, 40 bp, Artificial Sequence
  Description of Artificial Sequence: Synthetic primer
acagaggtctgtgtttgcctgagaaacaaaaaggataaag

SEQ ID NO: 6601 - DNA, 40 bp, Artificial Sequence
  Description of Artificial Sequence: Synthetic primer
aaagagggcttcacattaaaatggtgtgctcatcccttcc

SEQ ID NO: 6602 - DNA, 40 bp, Artificial Sequence
  Description of Artificial Sequence: Synthetic primer
ggcatgatgcttgcccttttcattgtgctacttcttatcc

SEQ ID NO: 6603 - DNA, 40 bp, Artificial Sequence
  Description of Artificial Sequence: Synthetic primer
gggccctgacagctggacccatgcagcatccctcttcgtg

SEQ ID NO: 6604 - DNA, 40 bp, Artificial Sequence
  Description of Artificial Sequence: Synthetic primer
cacccaacctgcccgcaggggctggacagatccccacctc

SEQ ID NO: 6605 - DNA, 40 bp, Artificial Sequence
  Description of Artificial Sequence: Synthetic primer
ccagccacccgcagggcaatggcacctggccacctgactc

SEQ ID NO: 6606 - DNA, 40 bp, Artificial Sequence
  Description of Artificial Sequence: Synthetic primer
cctgcctgtctcagcacccaccggctcactcccatgtgtc

SEQ ID NO: 6607 - DNA, 40 bp, Artificial Sequence
  Description of Artificial Sequence: Synthetic primer
caagcccttacctattcctttgtattaccactctaaccac

SEQ ID NO: 6608 - DNA, 40 bp, Artificial Sequence
  Description of Artificial Sequence: Synthetic primer
attttcgttttagtcttgcctgaaaatattctttttctcc

SEQ ID NO: 6609 - DNA, 40 bp, Artificial Sequence
  Description of Artificial Sequence: Synthetic primer
gggcctctccagccacagagggctcagtccctgcctgctc

SEQ ID NO: 6610 - DNA, 40 bp, Artificial Sequence
  Description of Artificial Sequence: Synthetic primer
agacacgcccgaggtcccagaaccagcaagtggaaaagtg

SEQ ID NO: 6611 - DNA, 40 bp, Artificial Sequence
  Description of Artificial Sequence: Synthetic primer
ccaaggatttgagcactttcatccaatagtttaaaaacac

SEQ ID NO: 6612 - DNA, 40 bp, Artificial Sequence
  Description of Artificial Sequence: Synthetic primer
tatagttttaggtatgtttatagggctcttaattcttttt

SEQ ID NO: 6613 - DNA, 40 bp, Artificial Sequence
  Description of Artificial Sequence: Synthetic primer
tgctagagggtttgcagttctaacattagtccttttctcc

SEQ ID NO: 6614 - DNA, 40 bp, Artificial Sequence
  Description of Artificial Sequence: Synthetic primer
ttcgaagcctttgtgtctatgaagtccacatcaatgcagc

SEQ ID NO: 6615 - DNA, 40 bp, Artificial Sequence
  Description of Artificial Sequence: Synthetic primer
tatctttgattacttaacttaaaaacaaaataactcctgt

SEQ ID NO: 6616 - DNA, 40 bp, Artificial Sequence
  Description of Artificial Sequence: Synthetic primer
aaaaacagttgttgtttagaatgaggagagaggcaaaaaa

SEQ ID NO: 6617 - DNA, 40 bp, Artificial Sequence
  Description of Artificial Sequence: Synthetic primer
taaacaaaagtgttgtcttcatgctagtttaaactaattt

SEQ ID NO: 6618 - DNA, 40 bp, Artificial Sequence
  Description of Artificial Sequence: Synthetic primer
agttgactgaaatgtcacgcagcgcatgactgtagtttac

SEQ ID NO: 6619 - DNA, 40 bp, Artificial Sequence
  Description of Artificial Sequence: Synthetic primer
tgagagcatgagagagaatttcacattcaaacagtaggac

SEQ ID NO: 6620 - DNA, 40 bp, Artificial Sequence
  Description of Artificial Sequence: Synthetic primer
tgttgtaaataaaataaagtatgggattctttccttgtgc

SEQ ID NO: 6621 - DNA, 40 bp, Artificial Sequence
  Description of Artificial Sequence: Synthetic primer
gagagcaggggtgtgttcccctcgagagccctgactgagc

SEQ ID NO: 6622 - DNA, 40 bp, Artificial Sequence
  Description of Artificial Sequence: Synthetic primer
ctaaccccaacctcgagccagtcccagcccctgcccagac

SEQ ID NO: 6623 - DNA, 40 bp, Artificial Sequence
  Description of Artificial Sequence: Synthetic primer
gggagaccccagcttgatcttggcctctttgctaccttcc

SEQ ID NO: 6624 - DNA, 40 bp, Artificial Sequence
  Description of Artificial Sequence: Synthetic primer
ccagcaggcattcccctaactatcctctacctcctctacc

SEQ ID NO: 6625 - DNA, 40 bp, Artificial Sequence
  Description of Artificial Sequence: Synthetic primer
ccaggcacaggaccccttcacccgcatatttccctaacac

SEQ ID NO: 6626 - DNA, 40 bp, Artificial Sequence
  Description of Artificial Sequence: Synthetic primer
gcggggcttggaggaagaggtgagccgaggcaggtgaatg

SEQ ID NO: 6627 - DNA, 40 bp, Artificial Sequence
  Description of Artificial Sequence: Synthetic primer
cccgggcgcccctcaccgtggcccgcccgcctgcctttgc

SEQ ID NO: 6628 - DNA, 40 bp, Artificial Sequence
  Description of Artificial Sequence: Synthetic primer
tttgcccactggcgcagggccccgcctaccgccgcgccac

SEQ ID NO: 6629 - DNA, 40 bp, Artificial Sequence
  Description of Artificial Sequence: Synthetic primer
agcaaagtccctggactcatggggtctgtcttgctcaatc

SEQ ID NO: 6630 - DNA, 40 bp, Artificial Sequence
  Description of Artificial Sequence: Synthetic primer
agaatttctaaccctttctgccaccctctttttcattttg

SEQ ID NO: 6631 - DNA, 40 bp, Artificial Sequence
  Description of Artificial Sequence: Synthetic primer
ctgaactgtcattgcgctttgactgtgtgacattctgttc

SEQ ID NO: 6632 - DNA, 40 bp, Artificial Sequence
  Description of Artificial Sequence: Synthetic primer
gtggatgtcagggaggatgcgcctgtcggtggcatttggg

SEQ ID NO: 6633 - DNA, 40 bp, Artificial Sequence
  Description of Artificial Sequence: Synthetic primer
atctgtctctaaggggtcaggtgggagaagccaccgatag

SEQ ID NO: 6634 - DNA, 40 bp, Artificial Sequence
  Description of Artificial Sequence: Synthetic primer
tggcaatgtctgtgcatcctcagtgccctgtcttgctttc

SEQ ID NO: 6635 - DNA, 40 bp, Artificial Sequence
  Description of Artificial Sequence: Synthetic primer
tgccacggaaggggcactagctctcgtggccgcatcacat

SEQ ID NO: 6636 - DNA, 40 bp, Artificial Sequence
  Description of Artificial Sequence: Synthetic primer
agctgctcaagggtatactctctttacggtacactaaccc

SEQ ID NO: 6637 - DNA, 40 bp, Artificial Sequence
  Description of Artificial Sequence: Synthetic primer
ctgaagaaggggtctatcggggtgcactaggtaccttaac

SEQ ID NO: 6638 - DNA, 40 bp, Artificial Sequence
  Description of Artificial Sequence: Synthetic primer
gctggatgccttttcctgtcttgataattctttctgtttc

SEQ ID NO: 6639 - DNA, 40 bp, Artificial Sequence
  Description of Artificial Sequence: Synthetic primer
tagctttttaattttgcattcaaaatgatattattattcc

SEQ ID NO: 6640 - DNA, 40 bp, Artificial Sequence
  Description of Artificial Sequence: Synthetic primer
aaggaaagtccttgctttctacacaactggtcacaaactc

SEQ ID NO: 6641 - DNA, 40 bp, Artificial Sequence
  Description of Artificial Sequence: Synthetic primer
tgccttctcgctgctctgactgatgcactgtctgcttctc

SEQ ID NO: 6642 - DNA, 40 bp, Artificial Sequence
  Description of Artificial Sequence: Synthetic primer
ttaataacataataacattcttctacttctttttaaccac

SEQ ID NO: 6643 - DNA, 40 bp, Artificial Sequence
  Description of Artificial Sequence: Synthetic primer
tatttttatctattgccatgttaagaaagagtaacttatc

SEQ ID NO: 6644 - DNA, 40 bp, Artificial Sequence
  Description of Artificial Sequence: Synthetic primer
tgggcagcgctggggcttcctgtggctcaacctgctctcc

SEQ ID NO: 6645 - DNA, 40 bp, Artificial Sequence
  Description of Artificial Sequence: Synthetic primer
gggcgggtgccctccagcagcaggagccaggctggggcct

SEQ ID NO: 6646 - DNA, 40 bp, Artificial Sequence
  Description of Artificial Sequence: Synthetic primer
gtgagcctgggcttggggctcaggaagaggagagagaagg

SEQ ID NO: 6647 - DNA, 40 bp, Artificial Sequence
  Description of Artificial Sequence: Synthetic primer
ttgacgctcactgggcctgaactgccttttttatctgtcc

SEQ ID NO: 6648 - DNA, 40 bp, Artificial Sequence
  Description of Artificial Sequence: Synthetic primer
ttagaggcttgttgattaacaaaggtgtattttaaaatac

SEQ ID NO: 6649 - DNA, 40 bp, Artificial Sequence
  Description of Artificial Sequence: Synthetic primer
ctcgaccataaatacacatggggtttcatgccattcttac

SEQ ID NO: 6650 - DNA, 40 bp, Artificial Sequence
  Description of Artificial Sequence: Synthetic primer
gggaaatggcagcttttcttccttccatggcagccactcc

SEQ ID NO: 6651 - DNA, 40 bp, Artificial Sequence
  Description of Artificial Sequence: Synthetic primer
gggcagaagtctgttttcttcatggttttctgacctttgc

SEQ ID NO: 6652 - DNA, 40 bp, Artificial Sequence
  Description of Artificial Sequence: Synthetic primer
caggtaactttaaaaccagtcttgggcttggtaagataat

SEQ ID NO: 6653 - DNA, 40 bp, Artificial Sequence
  Description of Artificial Sequence: Synthetic primer
ttgtcagatttacaatgtgcaagttacctgggcttttctc

SEQ ID NO: 6654 - DNA, 40 bp, Artificial Sequence
  Description of Artificial Sequence: Synthetic primer
aattgataggcaaaagctactggatagtcatactgccaac

SEQ ID NO: 6655 - DNA, 40 bp, Artificial Sequence
  Description of Artificial Sequence: Synthetic primer
tcatgcttttgagcagagttttaaaataagccccatttgc

SEQ ID NO: 6656 - DNA, 40 bp, Artificial Sequence
  Description of Artificial Sequence: Synthetic primer
ttgaattctgggttttaagtaaaaatctacttgcctattc

SEQ ID NO: 6657 - DNA, 40 bp, Artificial Sequence
  Description of Artificial Sequence: Synthetic primer
tttcctctataaaaatttgttgtaatatattttaaaaatg

SEQ ID NO: 6658 - DNA, 40 bp, Artificial Sequence
  Description of Artificial Sequence: Synthetic primer
tgagtcactgtgcctgggcagagggatagcagacgagctg

SEQ ID NO: 6659 - DNA, 40 bp, Artificial Sequence
  Description of Artificial Sequence: Synthetic primer
ttttctaatagttgggctcagtgttcatatatgttctgcc

SEQ ID NO: 6660 - DNA, 40 bp, Artificial Sequence
  Description of Artificial Sequence: Synthetic primer
ctgttaaatattagatttcacagtgctgttttcttccttc

SEQ ID NO: 6661 - DNA, 40 bp, Artificial Sequence
  Description of Artificial Sequence: Synthetic primer
gaagcatctcatgctttaagaagggcaaattaagaatggc

SEQ ID NO: 6662 - DNA, 40 bp, Artificial Sequence
  Description of Artificial Sequence: Synthetic primer
tcatgtgtcctaggtagtaagaaggaaaatgacagcatgg

SEQ ID NO: 6663 - DNA, 40 bp, Artificial Sequence
  Description of Artificial Sequence: Synthetic primer
ggttatttgccttcttagagacttaattttgttttctttc

SEQ ID NO: 6664 - DNA, 40 bp, Artificial Sequence
  Description of Artificial Sequence: Synthetic primer
cccatccctccaggcagtcccagggcctccgccccaggtg

SEQ ID NO: 6665 - DNA, 40 bp, Artificial Sequence
  Description of Artificial Sequence: Synthetic primer
actaggctggggctcaccaacaccacctgattctctcctg

SEQ ID NO: 6666 - DNA, 40 bp, Artificial Sequence
  Description of Artificial Sequence: Synthetic primer
ctctaatgtttgatgattctgtcagcattactctgtgtcc

SEQ ID NO: 6667 - DNA, 40 bp, Artificial Sequence
  Description of Artificial Sequence: Synthetic primer
ttctttgatttctggaactttattgttgttattattatta

SEQ ID NO: 6668 - DNA, 40 bp, Artificial Sequence
  Description of Artificial Sequence: Synthetic primer
ttattctcactatagacagatgatgttgttgtgtttttcc

SEQ ID NO: 6669 - DNA, 40 bp, Artificial Sequence
  Description of Artificial Sequence: Synthetic primer
ttttttgttagtacttgtggttcagcaattccttcttgcc

SEQ ID NO: 6670 - DNA, 40 bp, Artificial Sequence
  Description of Artificial Sequence: Synthetic primer
ccatatacagtacctgattcctgctgtgttgtcataatgg

SEQ ID NO: 6671 - DNA, 40 bp, Artificial Sequence
  Description of Artificial Sequence: Synthetic primer
ctgaagccataacaacagtcttctgtgtttattgtttcag

SEQ ID NO: 6672 - DNA, 40 bp, Artificial Sequence
  Description of Artificial Sequence: Synthetic primer
acctctatgggtaacttttgtgttgaagaagtcatttgtc

SEQ ID NO: 6673 - DNA, 40 bp, Artificial Sequence
  Description of Artificial Sequence: Synthetic primer
agtgaaaccgtaaaagacaaaaggacagtagtgagaatgc

SEQ ID NO: 6674 - DNA, 40 bp, Artificial Sequence
  Description of Artificial Sequence: Synthetic primer
aaccaggcacttttcctaagtcagccaaggggtctagagg

SEQ ID NO: 6675 - DNA, 40 bp, Artificial Sequence
  Description of Artificial Sequence: Synthetic primer
gtccttcaattgctctccttaaaagtttattccaatccac

SEQ ID NO: 6676 - DNA, 40 bp, Artificial Sequence
  Description of Artificial Sequence: Synthetic primer
ggggctggagggccatgagcagaggggatgaggggctaca

SEQ ID NO: 6677 - DNA, 40 bp, Artificial Sequence
  Description of Artificial Sequence: Synthetic primer
gcttctggcagcctttctcaaaccatttcccccactccag

SEQ ID NO: 6678 - DNA, 40 bp, Artificial Sequence
  Description of Artificial Sequence: Synthetic primer
atccatggccaagcacctgccccattatttccagcgagag

SEQ ID NO: 6679 - DNA, 40 bp, Artificial Sequence
  Description of Artificial Sequence: Synthetic primer
caccatgacccatgtctgcttctgagctgcctctgattgc

SEQ ID NO: 6680 - DNA, 40 bp, Artificial Sequence
  Description of Artificial Sequence: Synthetic primer
ggacacctctgcgcccatgagagcgcttggcccccacctg

SEQ ID NO: 6681 - DNA, 40 bp, Artificial Sequence
  Description of Artificial Sequence: Synthetic primer
tagcttttccattggcccaaggtgacatttctgtctttac

SEQ ID NO: 6682 - DNA, 40 bp, Artificial Sequence
  Description of Artificial Sequence: Synthetic primer
ctctctgtccttgcacatctatgcatagccgacgtcatgc

SEQ ID NO: 6683 - DNA, 40 bp, Artificial Sequence
  Description of Artificial Sequence: Synthetic primer
gactgtgaggctgggaagacacttcttgactttgggagtg

SEQ ID NO: 6684 - DNA, 40 bp, Artificial Sequence
  Description of Artificial Sequence: Synthetic primer
gggcttcatgacttctgttgtctgttcccggcttcttacc

SEQ ID NO: 6685 - DNA, 40 bp, Artificial Sequence
  Description of Artificial Sequence: Synthetic primer
gtgttacacatatgaccgtgactttgttacaccactacag

SEQ ID NO: 6686 - DNA, 40 bp, Artificial Sequence
  Description of Artificial Sequence: Synthetic primer
ttggtttggaaggtgtagtcaccacatggttgttctctcc

SEQ ID NO: 6687 - DNA, 40 bp, Artificial Sequence
  Description of Artificial Sequence: Synthetic primer
aggtggaggggctgacctacctcttgttgcatttctcctg

SEQ ID NO: 6688 - DNA, 40 bp, Artificial Sequence
  Description of Artificial Sequence: Synthetic primer
gtcacatctctcacctcatctgtcctgtttcttgttttac

SEQ ID NO: 6689 - DNA, 40 bp, Artificial Sequence
  Description of Artificial Sequence: Synthetic primer
gcaggcatttctgtaaaagtaaagaacgtaagaggtacag

SEQ ID NO: 6690 - DNA, 40 bp, Artificial Sequence
  Description of Artificial Sequence: Synthetic primer
atgctgcctaattcagatgcactctcgtcaatttcattgc

SEQ ID NO: 6691 - DNA, 40 bp, Artificial Sequence
  Description of Artificial Sequence: Synthetic primer
cgcaatctactcagtcataatgaacataaaatgagcactc

SEQ ID NO: 6692 - DNA, 40 bp, Artificial Sequence
  Description of Artificial Sequence: Synthetic primer
taaaaaagatcagtgctgaatatgtattaaaaggaatact

SEQ ID NO: 6693 - DNA, 40 bp, Artificial Sequence
  Description of Artificial Sequence: Synthetic primer
ggagggtctcttgtctgtattgtttagtttgtgtcttttc

SEQ ID NO: 6694 - DNA, 40 bp, Artificial Sequence
  Description of Artificial Sequence: Synthetic primer
ggccacttaaaaaccttggggagaagaaggagagcaagtc

SEQ ID NO: 6695 - DNA, 40 bp, Artificial Sequence
  Description of Artificial Sequence: Synthetic primer
tctgatcagttctgatcactgcactttcctggggttttgc

SEQ ID NO: 6696 - DNA, 40 bp, Artificial Sequence
  Description of Artificial Sequence: Synthetic primer
gtgtaaggcaattaataacttacacttgtctttatgttcc

SEQ ID NO: 6697 - DNA, 40 bp, Artificial Sequence
  Description of Artificial Sequence: Synthetic primer
tctttcacttctaaatttcttattgttacgctactgtggc

SEQ ID NO: 6698 - DNA, 40 bp, Artificial Sequence
  Description of Artificial Sequence: Synthetic primer
ttgagcacaaatatgtgctataaaaacagagatcggctta

SEQ ID NO: 6699 - DNA, 40 bp, Artificial Sequence
  Description of Artificial Sequence: Synthetic primer
tgtggtggtggatcttctcatcctgtgttttcctctttac

SEQ ID NO: 6700 - DNA, 40 bp, Artificial Sequence
  Description of Artificial Sequence: Synthetic primer
ggtggtggaggggctgggccgtgaggtttatgtgacatgg

SEQ ID NO: 6701 - DNA, 40 bp, Artificial Sequence
  Description of Artificial Sequence: Synthetic primer
agagcgtgtggcctggaagtgcacaggagccgggcatggc

SEQ ID NO: 6702 - DNA, 40 bp, Artificial Sequence
  Description of Artificial Sequence: Synthetic primer
acatcctttgctctggcccaaactatgtgtccttctgtcc

SEQ ID NO: 6703 - DNA, 40 bp, Artificial Sequence
  Description of Artificial Sequence: Synthetic primer
gtcctcagtcaccctgggcaggagcccctctcggccatac

SEQ ID NO: 6704 - DNA, 40 bp, Artificial Sequence
  Description of Artificial Sequence: Synthetic primer
cagctaaatatatgctcttcattgtttaatttctatacac

SEQ ID NO: 6705 - DNA, 40 bp, Artificial Sequence
  Description of Artificial Sequence: Synthetic primer
tagaaagggctcaataaactgttagttttaataggcaagg

SEQ ID NO: 6706 - DNA, 40 bp, Artificial Sequence
  Description of Artificial Sequence: Synthetic primer
aaattgtacgacggagaggaaggcctccatcaacagaaag

SEQ ID NO: 6707 - DNA, 40 bp, Artificial Sequence
  Description of Artificial Sequence: Synthetic primer
tagagtctacaccgaatagtagattcagtgccccgtcctg

SEQ ID NO: 6708 - DNA, 40 bp, Artificial Sequence
  Description of Artificial Sequence: Synthetic primer
acaatccccttagcatcaccatttttgcctgcttccactg

SEQ ID NO: 6709 - DNA, 40 bp, Artificial Sequence
  Description of Artificial Sequence: Synthetic primer
gtgtttagtcctattcgatctgaaccaagatctccttctc

SEQ ID NO: 6710 - DNA, 40 bp, Artificial Sequence
  Description of Artificial Sequence: Synthetic primer
aagagaaaaggaaaaagggatcagaaattcagagtagttc

SEQ ID NO: 6711 - DNA, 40 bp, Artificial Sequence
  Description of Artificial Sequence: Synthetic primer
ccggactttctggggcttttccagttcagaattaatgagg

SEQ ID NO: 6712 - DNA, 40 bp, Artificial Sequence
  Description of Artificial Sequence: Synthetic primer
cactggggctactagatcgagaggagtctgaagacatttg

SEQ ID NO: 6713 - DNA, 40 bp, Artificial Sequence
  Description of Artificial Sequence: Synthetic primer
agaatgctttaaagaagtccacctaaatgtcggttctcgc

SEQ ID NO: 6714 - DNA, 40 bp, Artificial Sequence
  Description of Artificial Sequence: Synthetic primer
agaggtgagagctcagaactactaagccttccacttcttg

SEQ ID NO: 6715 - DNA, 40 bp, Artificial Sequence
  Description of Artificial Sequence: Synthetic primer
aacatcttcaccaacaaccttctctttggaaaccctaccc

SEQ ID NO: 6716 - DNA, 40 bp, Artificial Sequence
  Description of Artificial Sequence: Synthetic primer
ccactgactcaccaccaggccaccctcctctgtggaaatg

SEQ ID NO: 6717 - DNA, 40 bp, Artificial Sequence
  Description of Artificial Sequence: Synthetic primer
tattggttgaccaccaattttcccttatctcctctactcc

SEQ ID NO: 6718 - DNA, 40 bp, Artificial Sequence
  Description of Artificial Sequence: Synthetic primer
tgtattcatgtactgatttttcttaacgttgattattttc

SEQ ID NO: 6719 - DNA, 40 bp, Artificial Sequence
  Description of Artificial Sequence: Synthetic primer
gccaatggattcctgccaattcacttctaaaaatacatac

SEQ ID NO: 6720 - DNA, 40 bp, Artificial Sequence
  Description of Artificial Sequence: Synthetic primer
ggagtcctcagactcctctcctaacccaccccttcctttc

SEQ ID NO: 6721 - DNA, 40 bp, Artificial Sequence
  Description of Artificial Sequence: Synthetic primer
tggctccccttactgtacccattcagaaagttgcagtggg

SEQ ID NO: 6722 - DNA, 40 bp, Artificial Sequence
  Description of Artificial Sequence: Synthetic primer
tagttaagtaaagatattaaaaacaagaaattcctattga

SEQ ID NO: 6723 - DNA, 40 bp, Artificial Sequence
  Description of Artificial Sequence: Synthetic primer
cagaacaccaagtacaacctccgaaagctggcaaaactgg

SEQ ID NO: 6724 - DNA, 40 bp, Artificial Sequence
  Description of Artificial Sequence: Synthetic primer
gctaatgcactctgagaacttcatattctttttatgtaag

SEQ ID NO: 6725 - DNA, 40 bp, Artificial Sequence
  Description of Artificial Sequence: Synthetic primer
agtagcccctgtgcagcctggtggggccggggtgctgctc

SEQ ID NO: 6726 - DNA, 40 bp, Artificial Sequence
  Description of Artificial Sequence: Synthetic primer
ccaactgtcgggaggtccccatgacttctcccctgggctc

SEQ ID NO: 6727 - DNA, 40 bp, Artificial Sequence
  Description of Artificial Sequence: Synthetic primer
tgggccaggctctcaccttcccctccgtggcatgtttcag

SEQ ID NO: 6728 - DNA, 40 bp, Artificial Sequence
  Description of Artificial Sequence: Synthetic primer
ctgtttttgattcccataaagtagtacctatctgtctttc

SEQ ID NO: 6729 - DNA, 40 bp, Artificial Sequence
  Description of Artificial Sequence: Synthetic primer
agatatccatggactgaagatcggttccagagtctcttac

SEQ ID NO: 6730 - DNA, 40 bp, Artificial Sequence
  Description of Artificial Sequence: Synthetic primer
ttctgaattaacattattgactctgttgtgcttctattac

SEQ ID NO: 6731 - DNA, 40 bp, Artificial Sequence
  Description of Artificial Sequence: Synthetic primer
cttcaagaagatgctctgagtctaatgaagttgtctttgg

SEQ ID NO: 6732 - DNA, 40 bp, Artificial Sequence
  Description of Artificial Sequence: Synthetic primer
gccctgagagtttgtaacgggcgtttggtttctttccttc

SEQ ID NO: 6733 - DNA, 40 bp, Artificial Sequence
  Description of Artificial Sequence: Synthetic primer
tggggccggcgatgggagccggggcggagcgatggcactc

SEQ ID NO: 6734 - DNA, 40 bp, Artificial Sequence
  Description of Artificial Sequence: Synthetic primer
aattgaaagatggacttcatttggccagaaggtaagaaac

SEQ ID NO: 6735 - DNA, 40 bp, Artificial Sequence
  Description of Artificial Sequence: Synthetic primer
agttgtggggcagcttgttcaaactaattttaaggtatgg

SEQ ID NO: 6736 - DNA, 40 bp, Artificial Sequence
  Description of Artificial Sequence: Synthetic primer
ttgcttattttcatataaaatgtccaatgttccaacctac

SEQ ID NO: 6737 - DNA, 40 bp, Artificial Sequence
  Description of Artificial Sequence: Synthetic primer
actacttcccaagttatttcaatctgcagtttgaacaaag

SEQ ID NO: 6738 - DNA, 40 bp, Artificial Sequence
  Description of Artificial Sequence: Synthetic primer
gcccaggcgtggcagccccaccggtcgagtgggcgggtcg

SEQ ID NO: 6739 - DNA, 40 bp, Artificial Sequence
  Description of Artificial Sequence: Synthetic primer
ctgtggaggcgggagaggggctgaggggacgggaactgac

SEQ ID NO: 6740 - DNA, 40 bp, Artificial Sequence
  Description of Artificial Sequence: Synthetic primer
cagggataaagatacatgtggataacacataccaggtgag

SEQ ID NO: 6741 - DNA, 40 bp, Artificial Sequence
  Description of Artificial Sequence: Synthetic primer
ccacttttcttttttctttttttttcgttttcacatttca

SEQ ID NO: 6742 - DNA, 40 bp, Artificial Sequence
  Description of Artificial Sequence: Synthetic primer
atatactaacaacaaagctcaagccatttcatcatattac

SEQ ID NO: 6743 - DNA, 40 bp, Artificial Sequence
  Description of Artificial Sequence: Synthetic primer
tattgataattgcctaaggtgcttcttccttttctttttc

SEQ ID NO: 6744 - DNA, 40 bp, Artificial Sequence
  Description of Artificial Sequence: Synthetic primer
acacccactacctcctgtgctaggggtttgtcccctaatc

SEQ ID NO: 6745 - DNA, 40 bp, Artificial Sequence
  Description of Artificial Sequence: Synthetic primer
tttctgtggccagtactgagttttgttatccttcctttag

SEQ ID NO: 6746 - DNA, 40 bp, Artificial Sequence
  Description of Artificial Sequence: Synthetic primer
ccccagctcagctgcaaagaatgtgttttcaagtggctta

SEQ ID NO: 6747 - DNA, 40 bp, Artificial Sequence
  Description of Artificial Sequence: Synthetic primer
tcccaccccactttacatataattgacctttctgattctc

SEQ ID NO: 6748 - DNA, 40 bp, Artificial Sequence
  Description of Artificial Sequence: Synthetic primer
aagaagcctttgaaaacaggttaacaagcaatttaacaac

SEQ ID NO: 6749 - DNA, 40 bp, Artificial Sequence
  Description of Artificial Sequence: Synthetic primer
aaagataaaatattccgtttctgtttctttctttttaccg

SEQ ID NO: 6750 - DNA, 40 bp, Artificial Sequence
  Description of Artificial Sequence: Synthetic primer
caaattacgttctctagagaaaaacagctaaaggtataat

SEQ ID NO: 6751 - DNA, 40 bp, Artificial Sequence
  Description of Artificial Sequence: Synthetic primer
gttttctttttaaggtgtgcatgtatcaacattatcattt

SEQ ID NO: 6752 - DNA, 40 bp, Artificial Sequence
  Description of Artificial Sequence: Synthetic primer
ggccgggcgtggccggtcgcggacactcaccacaccatgc

SEQ ID NO: 6753 - DNA, 40 bp, Artificial Sequence
  Description of Artificial Sequence: Synthetic primer
gcgggaggggcgacaagagctgagcggcggccgccgagcg

SEQ ID NO: 6754 - DNA, 40 bp, Artificial Sequence
  Description of Artificial Sequence: Synthetic primer
cttgattttaattttaatttttaggagaacgacacattgg

SEQ ID NO: 6755 - DNA, 40 bp, Artificial Sequence
  Description of Artificial Sequence: Synthetic primer
tgatcatctagaagatttgtactaaacaaattaactcctg

SEQ ID NO: 6756 - DNA, 40 bp, Artificial Sequence
  Description of Artificial Sequence: Synthetic primer
cccagcaggtccagacccagagtcccacgcagcccagtcc

SEQ ID NO: 6757 - DNA, 40 bp, Artificial Sequence
  Description of Artificial Sequence: Synthetic primer
aggggccgccgctgccccggcccctgggcttcgagaggac

SEQ ID NO: 6758 - DNA, 40 bp, Artificial Sequence
  Description of Artificial Sequence: Synthetic primer
cagaggcccagcccagggccaggggcacctgcacgcacat

SEQ ID NO: 6759 - DNA, 40 bp, Artificial Sequence
  Description of Artificial Sequence: Synthetic primer
tggggacgtcatcccaaaccccgctgcgcccccagccccg

SEQ ID NO: 6760 - DNA, 40 bp, Artificial Sequence
  Description of Artificial Sequence: Synthetic primer
ttgccttctgggctcaggcccttaaattcacttggttttt

SEQ ID NO: 6761 - DNA, 40 bp, Artificial Sequence
  Description of Artificial Sequence: Synthetic primer
tcttgtgcaagcccatggtattcccttactgataaagcag

SEQ ID NO: 6762 - DNA, 40 bp, Artificial Sequence
  Description of Artificial Sequence: Synthetic primer
ggaaagtcactgtaaatgttttaatgctatggacactggt

SEQ ID NO: 6763 - DNA, 40 bp, Artificial Sequence
  Description of Artificial Sequence: Synthetic primer
tgattgaaatgtaatctgagaacatttcttatttaaaatg

SEQ ID NO: 6764 - DNA, 40 bp, Artificial Sequence
  Description of Artificial Sequence: Synthetic primer
ggggtctgacccatgacccttcccttcctcccctggagtc

SEQ ID NO: 6765 - DNA, 40 bp, Artificial Sequence
  Description of Artificial Sequence: Synthetic primer
gtaggggcaggtcagcagtgtcctcatgccaacccctttc

SEQ ID NO: 6766 - DNA, 40 bp, Artificial Sequence
  Description of Artificial Sequence: Synthetic primer
ggcactgtggggcagctggactggaatacaccataatctg

SEQ ID NO: 6767 - DNA, 40 bp, Artificial Sequence
  Description of Artificial Sequence: Synthetic primer
caacggcaagcagcccctttcctaccctgaagcccagatg

SEQ ID NO: 6768 - DNA, 40 bp, Artificial Sequence
  Description of Artificial Sequence: Synthetic primer
tcttgaaatctgtgagccctgcagctttaaacatatccac

SEQ ID NO: 6769 - DNA, 40 bp, Artificial Sequence
  Description of Artificial Sequence: Synthetic primer
gaaaaatcagcactaatactaagacaatgatattctgatt

SEQ ID NO: 6770 - DNA, 40 bp, Artificial Sequence
  Description of Artificial Sequence: Synthetic primer
tgtcttatacagcaaataccatacacaagtaatcactcac

SEQ ID NO: 6771 - DNA, 40 bp, Artificial Sequence
  Description of Artificial Sequence: Synthetic primer
ctgtaaaacatactaattttaacacctttttctgttgatc

SEQ ID NO: 6772 - DNA, 40 bp, Artificial Sequence
  Description of Artificial Sequence: Synthetic primer
caattgttaattgtattgtggaataaagaaaaaagaaacc

SEQ ID NO: 6773 - DNA, 40 bp, Artificial Sequence
  Description of Artificial Sequence: Synthetic primer
atcatatctgcacaagtatcatataattatattgcatttc

SEQ ID NO: 6774 - DNA, 40 bp, Artificial Sequence
  Description of Artificial Sequence: Synthetic primer
gctgataccctggggtcttcatcatgttcatcatgtttcc

SEQ ID NO: 6775 - DNA, 40 bp, Artificial Sequence
  Description of Artificial Sequence: Synthetic primer
atgtagagtgttggccacaagtgctttggctcgaggtgtg

SEQ ID NO: 6776 - DNA, 40 bp, Artificial Sequence
  Description of Artificial Sequence: Synthetic primer
taattttactcatttttactcaaactattgggtggatttg

SEQ ID NO: 6777 - DNA, 40 bp, Artificial Sequence
  Description of Artificial Sequence: Synthetic primer
tagaactgagtttacagtattaatgttaaaaatttaatag

SEQ ID NO: 6778 - DNA, 40 bp, Artificial Sequence
  Description of Artificial Sequence: Synthetic primer
gaactggaatggggcttctgactgggccaggaagggttgg

SEQ ID NO: 6779 - DNA, 40 bp, Artificial Sequence
  Description of Artificial Sequence: Synthetic primer
ctaaggagtgactctgccctatgacactcaaccctgtgcc

SEQ ID NO: 6780 - DNA, 40 bp, Artificial Sequence
  Description of Artificial Sequence: Synthetic primer
gccggttctgccttgcagcagcagtggacgtcagctcagc

SEQ ID NO: 6781 - DNA, 40 bp, Artificial Sequence
  Description of Artificial Sequence: Synthetic primer
cccctccgggcacatgcggggcgcaggtacaacgtcaggg

SEQ ID NO: 6782 - DNA, 40 bp, Artificial Sequence
  Description of Artificial Sequence: Synthetic primer
ctttgtccctcccaccccaaactagccctcaatccctgac

SEQ ID NO: 6783 - DNA, 40 bp, Artificial Sequence
  Description of Artificial Sequence: Synthetic primer
gccggtgcagaccccacgcgggctgggaggacttcacccc

SEQ ID NO: 6784 - DNA, 40 bp, Artificial Sequence
  Description of Artificial Sequence: Synthetic primer
taatgttaaacatttacatttttgtaagattttgtttctg

SEQ ID NO: 6785 - DNA, 40 bp, Artificial Sequence
  Description of Artificial Sequence: Synthetic primer
ctgagaaatttttaaaaattaaacatatccgtatcatttc

SEQ ID NO: 6786 - DNA, 40 bp, Artificial Sequence
  Description of Artificial Sequence: Synthetic primer
tccatttcaactactaggttaactgcctttgatgagcttg

SEQ ID NO: 6787 - DNA, 40 bp, Artificial Sequence
  Description of Artificial Sequence: Synthetic primer
ttagggtaaacttatgattaaaaattcccttctttctctc

SEQ ID NO: 6788 - DNA, 40 bp, Artificial Sequence
  Description of Artificial Sequence: Synthetic primer
attcttctttgtgtaacgccaagttcccgaaaggtcagag

SEQ ID NO: 6789 - DNA, 40 bp, Artificial Sequence
  Description of Artificial Sequence: Synthetic primer
cttttttccttctgccacctctgttctcacttgtttcacc

SEQ ID NO: 6790 - DNA, 40 bp, Artificial Sequence
  Description of Artificial Sequence: Synthetic primer
ggcgctcttaccttccacccacagctcctccacgttggtc

SEQ ID NO: 6791 - DNA, 40 bp, Artificial Sequence
  Description of Artificial Sequence: Synthetic primer
cgcgactccccggcgctcactcctcccttctgcttcgtcc

SEQ ID NO: 6792 - DNA, 40 bp, Artificial Sequence
  Description of Artificial Sequence: Synthetic primer
cctcctggactcaccctgacccggccctgccctgcccatc

SEQ ID NO: 6793 - DNA, 40 bp, Artificial Sequence
  Description of Artificial Sequence: Synthetic primer
ccagggcacagcgcacgggcctggggcattcacggtgttc

SEQ ID NO: 6794 - DNA, 40 bp, Artificial Sequence
  Description of Artificial Sequence: Synthetic primer
atcactagagcaataagaggcgttgaagtaaccggccatc

SEQ ID NO: 6795 - DNA, 40 bp, Artificial Sequence
  Description of Artificial Sequence: Synthetic primer
ttcctataatattaaagtaatgtagaatattgtgtttgtg

SEQ ID NO: 6796 - DNA, 40 bp, Artificial Sequence
  Description of Artificial Sequence: Synthetic primer
ctgtattaatttacttctaccctgaacattctctttttcc

SEQ ID NO: 6797 - DNA, 40 bp, Artificial Sequence
  Description of Artificial Sequence: Synthetic primer
aatagacatcagtcagagctttgcacctgttccaaatgac

SEQ ID NO: 6798 - DNA, 40 bp, Artificial Sequence
  Description of Artificial Sequence: Synthetic primer
gcatctgtatatttattttaaacactgctaataatctttg

SEQ ID NO: 6799 - DNA, 40 bp, Artificial Sequence
  Description of Artificial Sequence: Synthetic primer
gtctagttagtcaagaaaagcaatgaatcgtttacaaaac

SEQ ID NO: 6800 - DNA, 40 bp, Artificial Sequence
  Description of Artificial Sequence: Synthetic primer
tgttagccacccaacaaacttctccataataaacataaag

SEQ ID NO: 6801 - DNA, 40 bp, Artificial Sequence
  Description of Artificial Sequence: Synthetic primer
aaaatataagaagcacctgcctccttttcttaattttcat

SEQ ID NO: 6802 - DNA, 40 bp, Artificial Sequence
  Description of Artificial Sequence: Synthetic primer
cctagagcggagagtccctggcgccactgccccgcgcgta

SEQ ID NO: 6803 - DNA, 40 bp, Artificial Sequence
  Description of Artificial Sequence: Synthetic primer
ccaggcgcccgggccccgccgtctcctcgccgcgatcctg

SEQ ID NO: 6804 - DNA, 40 bp, Artificial Sequence
  Description of Artificial Sequence: Synthetic primer
ggtggcggcgcggggccgcccaacgacccgtaagccgaag

SEQ ID NO: 6805 - DNA, 40 bp, Artificial Sequence
  Description of Artificial Sequence: Synthetic primer
gcctgtgagcggcgcggcgcagtgggcgccggtgctggac

SEQ ID NO: 6806 - DNA, 40 bp, Artificial Sequence
  Description of Artificial Sequence: Synthetic primer
ggggttgcgcccctcagctcaggccacacttgccgtctcc

SEQ ID NO: 6807 - DNA, 40 bp, Artificial Sequence
  Description of Artificial Sequence: Synthetic primer
tccccacatgccccacccgggccccgccgcgccccacctg

SEQ ID NO: 6808 - DNA, 40 bp, Artificial Sequence
  Description of Artificial Sequence: Synthetic primer
tgttataacccaattggcagttctcaacttgcagtaatag

SEQ ID NO: 6809 - DNA, 40 bp, Artificial Sequence
  Description of Artificial Sequence: Synthetic primer
gtcttcaaggctgtttatcttttccttccatgtattttag

SEQ ID NO: 6810 - DNA, 40 bp, Artificial Sequence
  Description of Artificial Sequence: Synthetic primer
gctgctattttcttaatgagctagtcactggtgcggttcc

SEQ ID NO: 6811 - DNA, 40 bp, Artificial Sequence
  Description of Artificial Sequence: Synthetic primer
agtggctttttggtgtttgaattttctgttaattgatttc

SEQ ID NO: 6812 - DNA, 40 bp, Artificial Sequence
  Description of Artificial Sequence: Synthetic primer
gaccgttcctgatgtacccagataataacaaatacgtttc

SEQ ID NO: 6813 - DNA, 40 bp, Artificial Sequence
  Description of Artificial Sequence: Synthetic primer
tgtagcaatcaccaattattcatgtataggattccatttc

SEQ ID NO: 6814 - DNA, 40 bp, Artificial Sequence
  Description of Artificial Sequence: Synthetic primer
aatgtgaaccatgctctgcttcacctcaccacaaactttc

SEQ ID NO: 6815 - DNA, 40 bp, Artificial Sequence
  Description of Artificial Sequence: Synthetic primer
gctgtgctgtattatgaagactcccagcgtcagctccacc

SEQ ID NO: 6816 - DNA, 40 bp, Artificial Sequence
  Description of Artificial Sequence: Synthetic primer
ttttttcttactgaacattaaaggggtttgttctctattc

SEQ ID NO: 6817 - DNA, 40 bp, Artificial Sequence
  Description of Artificial Sequence: Synthetic primer
ttgttaccattggccaactaacatttagcctttctttttc

SEQ ID NO: 6818 - DNA, 40 bp, Artificial Sequence
  Description of Artificial Sequence: Synthetic primer
accctcttctgcctgcagcttcccagtgatcctgtccatc

SEQ ID NO: 6819 - DNA, 40 bp, Artificial Sequence
  Description of Artificial Sequence: Synthetic primer
gggaaccgagccactgggctccctggacagccaacagcag

SEQ ID NO: 6820 - DNA, 40 bp, Artificial Sequence
  Description of Artificial Sequence: Synthetic primer
atatcgcatgccactctaatacccatagtaatatacgttg

SEQ ID NO: 6821 - DNA, 40 bp, Artificial Sequence
  Description of Artificial Sequence: Synthetic primer
tttttttttaaaagatttggatttccaggaggtagtcatg

SEQ ID NO: 6822 - DNA, 40 bp, Artificial Sequence
  Description of Artificial Sequence: Synthetic primer
gacacatgattggatggggaggccggcagagttggtggtg

SEQ ID NO: 6823 - DNA, 40 bp, Artificial Sequence
  Description of Artificial Sequence: Synthetic primer
tgttcctttttttttggttcaacagatacacactgattat

SEQ ID NO: 6824 - DNA, 40 bp, Artificial Sequence
  Description of Artificial Sequence: Synthetic primer
gagtcctcatgaccatagaagatgaatggacagaatgacc

SEQ ID NO: 6825 - DNA, 40 bp, Artificial Sequence
  Description of Artificial Sequence: Synthetic primer
gctaatgagaaatctgataattcagacattaggccatcgg

SEQ ID NO: 6826 - DNA, 40 bp, Artificial Sequence
  Description of Artificial Sequence: Synthetic primer
catgggagataagaaaagcatgtttaatgaggaactagac

SEQ ID NO: 6827 - DNA, 40 bp, Artificial Sequence
  Description of Artificial Sequence: Synthetic primer
cctaatcagctacctgtgcacccagatttggaacaagtgc

SEQ ID NO: 6828 - DNA, 40 bp, Artificial Sequence
  Description of Artificial Sequence: Synthetic primer
tgctaaatgtgaactgctaattttttttctaagtagtttg

SEQ ID NO: 6829 - DNA, 40 bp, Artificial Sequence
  Description of Artificial Sequence: Synthetic primer
tccttctcaaccaaaaagaaagcaatcaactatttcaagg

SEQ ID NO: 6830 - DNA, 40 bp, Artificial Sequence
  Description of Artificial Sequence: Synthetic primer
acaaaacattaaagcttaaagattgctagtcccaaagagg

SEQ ID NO: 6831 - DNA, 40 bp, Artificial Sequence
  Description of Artificial Sequence: Synthetic primer
ggacctgactattcatcaccatgcttttgctcccttttgc

SEQ ID NO: 6832 - DNA, 40 bp, Artificial Sequence
  Description of Artificial Sequence: Synthetic primer
taagggagtatgcctgacatagtttgcctttgaataacac

SEQ ID NO: 6833 - DNA, 40 bp, Artificial Sequence
  Description of Artificial Sequence: Synthetic primer
tttggctgagatcaagtgtaaaaatatggtgtgtgaggac

SEQ ID NO: 6834 - DNA, 40 bp, Artificial Sequence
  Description of Artificial Sequence: Synthetic primer
acaatcagcatatcttactttataggaaacctaatagacc

SEQ ID NO: 6835 - DNA, 40 bp, Artificial Sequence
  Description of Artificial Sequence: Synthetic primer
tgcccatctgaagcagaacagttatacatctcggctgaac

SEQ ID NO: 6836 - DNA, 40 bp, Artificial Sequence
  Description of Artificial Sequence: Synthetic primer
acggaaagggtcaggggcaagacaagccaggccaacatcc

SEQ ID NO: 6837 - DNA, 40 bp, Artificial Sequence
  Description of Artificial Sequence: Synthetic primer
tgaaggtgagcccaggtcactcgggcaggcccctgttgtc

SEQ ID NO: 6838 - DNA, 40 bp, Artificial Sequence
  Description of Artificial Sequence: Synthetic primer
caggaaggtgattaccaagaggacgttgtcaggttatttg

SEQ ID NO: 6839 - DNA, 40 bp, Artificial Sequence
  Description of Artificial Sequence: Synthetic primer
aacagtgctgtgaatccagatatttacttttatttctttc

SEQ ID NO: 6840 - DNA, 40 bp, Artificial Sequence
  Description of Artificial Sequence: Synthetic primer
gatttgcctcttttttctcttttacttccattgtgacttc

SEQ ID NO: 6841 - DNA, 40 bp, Artificial Sequence
  Description of Artificial Sequence: Synthetic primer
taaaataattcccagatgaactgtttgggagaggggacac

SEQ ID NO: 6842 - DNA, 40 bp, Artificial Sequence
  Description of Artificial Sequence: Synthetic primer
aggcattaccttaagaggaccttaatgaaagcacgctgat

SEQ ID NO: 6843 - DNA, 40 bp, Artificial Sequence
  Description of Artificial Sequence: Synthetic primer
aacatagtatcttcacaaggcttaaaacgaaacgacattg

SEQ ID NO: 6844 - DNA, 40 bp, Artificial Sequence
  Description of Artificial Sequence: Synthetic primer
tttattaagtagtttagaaacttaatcagaagtatgaatc

SEQ ID NO: 6845 - DNA, 40 bp, Artificial Sequence
  Description of Artificial Sequence: Synthetic primer
aaaaacttgcattttccttctttatccttgaaatcattcc

SEQ ID NO: 6846 - DNA, 40 bp, Artificial Sequence
  Description of Artificial Sequence: Synthetic primer
aatggagaatggccaaaataaataaggaagaacacaaatg

SEQ ID NO: 6847 - DNA, 40 bp, Artificial Sequence
  Description of Artificial Sequence: Synthetic primer
gtcaacctagctctaaaaatttctttaaccagttaatttt

SEQ ID NO: 6848 - DNA, 40 bp, Artificial Sequence
  Description of Artificial Sequence: Synthetic primer
gcttttagcaaggcccatattcaataagaagggaagcaag

SEQ ID NO: 6849 - DNA, 40 bp, Artificial Sequence
  Description of Artificial Sequence: Synthetic primer
gagatttaactaagagatcatagcaataatctttttttcc

SEQ ID NO: 6850 - DNA, 40 bp, Artificial Sequence
  Description of Artificial Sequence: Synthetic primer
agagtgtttttcctaaggtaattgagcttaaaacacttgc

SEQ ID NO: 6851 - DNA, 40 bp, Artificial Sequence
  Description of Artificial Sequence: Synthetic primer
agtactcaaagtcaaccaggctcatggcaaaaggaccagc

SEQ ID NO: 6852 - DNA, 40 bp, Artificial Sequence
  Description of Artificial Sequence: Synthetic primer
aaaggtatttcttttgatcacaaacctaaaaaagaaatcc

SEQ ID NO: 6853 - DNA, 40 bp, Artificial Sequence
  Description of Artificial Sequence: Synthetic primer
tgttgtgatttccgtctagtatcacatttagaaaacatac

SEQ ID NO: 6854 - DNA, 40 bp, Artificial Sequence
  Description of Artificial Sequence: Synthetic primer
tggctggaggcttggccactgtgtgcccctcttatttctg

SEQ ID NO: 6855 - DNA, 40 bp, Artificial Sequence
  Description of Artificial Sequence: Synthetic primer
ggggcagggccaagggattcaggttcagaattagagtggc

SEQ ID NO: 6856 - DNA, 40 bp, Artificial Sequence
  Description of Artificial Sequence: Synthetic primer
tttgaattgaagaactagctgatattatatcttacatttg

SEQ ID NO: 6857 - DNA, 40 bp, Artificial Sequence
  Description of Artificial Sequence: Synthetic primer
tccttttagcattgatattctctgattctaaccttttacc

SEQ ID NO: 6858 - DNA, 40 bp, Artificial Sequence
  Description of Artificial Sequence: Synthetic primer
gcagggaagcagcagacaaggctgtggtcatggagtgttg

SEQ ID NO: 6859 - DNA, 40 bp, Artificial Sequence
  Description of Artificial Sequence: Synthetic primer
gccctcttccccggctgactctcacttctctctctctctc

SEQ ID NO: 6860 - DNA, 40 bp, Artificial Sequence
  Description of Artificial Sequence: Synthetic primer
tccttttttgttttaattcctttgagttacttccttatgc

SEQ ID NO: 6861 - DNA, 40 bp, Artificial Sequence
  Description of Artificial Sequence: Synthetic primer
agaagtgccctctcaaaaaaccgaatttgtggaaaaaaac

SEQ ID NO: 6862 - DNA, 40 bp, Artificial Sequence
  Description of Artificial Sequence: Synthetic primer
tatatgccattgtatgtatagattttttattccttctaac

SEQ ID NO: 6863 - DNA, 40 bp, Artificial Sequence
  Description of Artificial Sequence: Synthetic primer
agatacttgcaatttttttttatttcagaaagattttggg

SEQ ID NO: 6864 - DNA, 40 bp, Artificial Sequence
  Description of Artificial Sequence: Synthetic primer
gcggccccgcagccctggaagcgccctcagtgcccagcag

SEQ ID NO: 6865 - DNA, 40 bp, Artificial Sequence
  Description of Artificial Sequence: Synthetic primer
ctgcgagttataatgtgttacaatcatttgccatttctag

SEQ ID NO: 6866 - DNA, 40 bp, Artificial Sequence
  Description of Artificial Sequence: Synthetic primer
gattttctctcatacaaagatctgaatctctaactttctt

SEQ ID NO: 6867 - DNA, 40 bp, Artificial Sequence
  Description of Artificial Sequence: Synthetic primer
actgctgaatgagaaagtaaaaggggcataaattaaatac

SEQ ID NO: 6868 - DNA, 40 bp, Artificial Sequence
  Description of Artificial Sequence: Synthetic primer
ctccaggccaggtgtcctgaggcacccaagcccccgctcc

SEQ ID NO: 6869 - DNA, 40 bp, Artificial Sequence
  Description of Artificial Sequence: Synthetic primer
ctgccaccccgggcccagtgcccctccacccccatccagt

SEQ ID NO: 6870 - DNA, 40 bp, Artificial Sequence
  Description of Artificial Sequence: Synthetic primer
tgtctcattactggagtctgaagagcatccttttggtgtc

SEQ ID NO: 6871 - DNA, 40 bp, Artificial Sequence
  Description of Artificial Sequence: Synthetic primer
aatatatatatatttcaaaaggtttgactaacaaagaggc

SEQ ID NO: 6872 - DNA, 40 bp, Artificial Sequence
  Description of Artificial Sequence: Synthetic primer
agacacatgaatctctgtcactcacggatgtactctttgc

SEQ ID NO: 6873 - DNA, 40 bp, Artificial Sequence
  Description of Artificial Sequence: Synthetic primer
ccctgtcaacagaatggcatcacccaaagcagaaactcac

SEQ ID NO: 6874 - DNA, 40 bp, Artificial Sequence
  Description of Artificial Sequence: Synthetic primer
tctttggataagcctccctactttccttcttctgttcttg

SEQ ID NO: 6875 - DNA, 40 bp, Artificial Sequence
  Description of Artificial Sequence: Synthetic primer
ctcattcatcaataatgcatacattccttcaaggacaaac

SEQ ID NO: 6876 - DNA, 40 bp, Artificial Sequence
  Description of Artificial Sequence: Synthetic primer
tactagtagatgataatatataatacatttcttttaattc

SEQ ID NO: 6877 - DNA, 40 bp, Artificial Sequence
  Description of Artificial Sequence: Synthetic primer
gagaaaaaataattcttaagggtaataagaaaataaacag

SEQ ID NO: 6878 - DNA, 40 bp, Artificial Sequence
  Description of Artificial Sequence: Synthetic primer
tcttttttttgttggaaaattctgtgatataaagtttgag

SEQ ID NO: 6879 - DNA, 40 bp, Artificial Sequence
  Description of Artificial Sequence: Synthetic primer
tcatagaaattgttgaagtcagaattggtgcaacgagagc

SEQ ID NO: 6880 - DNA, 40 bp, Artificial Sequence
  Description of Artificial Sequence: Synthetic primer
cccactatctaaggtaattgttctctcttattttcctgac

SEQ ID NO: 6881 - DNA, 40 bp, Artificial Sequence
  Description of Artificial Sequence: Synthetic primer
cacatttcaaaggccccagagaagtagctggatgagaagc

SEQ ID NO: 6882 - DNA, 40 bp, Artificial Sequence
  Description of Artificial Sequence: Synthetic primer
gtgagattctgcttttttaagaaaaaagacagattttaac

SEQ ID NO: 6883 - DNA, 40 bp, Artificial Sequence
  Description of Artificial Sequence: Synthetic primer
gaatgaaagattttataattctctccctgagaaaataatg

SEQ ID NO: 6884 - DNA, 40 bp, Artificial Sequence
  Description of Artificial Sequence: Synthetic primer
cccaggccccaggccccaggccccgagcgcagccgcacct

SEQ ID NO: 6885 - DNA, 40 bp, Artificial Sequence
  Description of Artificial Sequence: Synthetic primer
ttgcagtcactactgacaacgcccctcttccgcctgtccc

SEQ ID NO: 6886 - DNA, 40 bp, Artificial Sequence
  Description of Artificial Sequence: Synthetic primer
tcctgctgcctgccagcaccaatacatttaatttcttttc

SEQ ID NO: 6887 - DNA, 40 bp, Artificial Sequence
  Description of Artificial Sequence: Synthetic primer
ccacactccactcactgaaatctgggtctaaaaaggtctg

SEQ ID NO: 6888 - DNA, 40 bp, Artificial Sequence
  Description of Artificial Sequence: Synthetic primer
tatgttctaccccgaagtgatttgagcgacttatattgat

SEQ ID NO: 6889 - DNA, 40 bp, Artificial Sequence
  Description of Artificial Sequence: Synthetic primer
aactgctgttactttacagatatgtaaacatttaaatatc

SEQ ID NO: 6890 - DNA, 40 bp, Artificial Sequence
  Description of Artificial Sequence: Synthetic primer
cccttcacttcatgcccatgtctactattttgccagtgac

SEQ ID NO: 6891 - DNA, 40 bp, Artificial Sequence
  Description of Artificial Sequence: Synthetic primer
gaaaaaaagagaaaatggttgggctcagcaggtaactcac

SEQ ID NO: 6892 - DNA, 40 bp, Artificial Sequence
  Description of Artificial Sequence: Synthetic primer
tcactgagttaacccaggtgtgtggctacttttgggtttt

SEQ ID NO: 6893 - DNA, 40 bp, Artificial Sequence
  Description of Artificial Sequence: Synthetic primer
gaccaaaaacaaacaaactctaagctatcagataaaactg

SEQ ID NO: 6894 - DNA, 40 bp, Artificial Sequence
  Description of Artificial Sequence: Synthetic primer
ccagggacagtgccccttttgagtggaagagcaggtaccc

SEQ ID NO: 6895 - DNA, 40 bp, Artificial Sequence
  Description of Artificial Sequence: Synthetic primer
tacaaatggactgtgttccttaaatacacaaaaactcacc

SEQ ID NO: 6896 - DNA, 40 bp, Artificial Sequence
  Description of Artificial Sequence: Synthetic primer
tgcatcatgacgccactgtccattcacaaagaagagaaag

SEQ ID NO: 6897 - DNA, 40 bp, Artificial Sequence
  Description of Artificial Sequence: Synthetic primer
ataaaggttatgtaatttcacgtgtatcttcttgtctttg

SEQ ID NO: 6898 - DNA, 40 bp, Artificial Sequence
  Description of Artificial Sequence: Synthetic primer
tgtgctcggaagctaatgctgcttcctttctcaaattctc

SEQ ID NO: 6899 - DNA, 40 bp, Artificial Sequence
  Description of Artificial Sequence: Synthetic primer
cctccagctactgcctctgcagagcggggtccacccgggc

SEQ ID NO: 6900 - DNA, 40 bp, Artificial Sequence
  Description of Artificial Sequence: Synthetic primer
tcaggcactgacaaagcaaggtcaagtatcccctctggtc

SEQ ID NO: 6901 - DNA, 40 bp, Artificial Sequence
  Description of Artificial Sequence: Synthetic primer
agaaattgatgaggctgtcagaaagttttactgtttttgg

SEQ ID NO: 6902 - DNA, 40 bp, Artificial Sequence
  Description of Artificial Sequence: Synthetic primer
gcatttgaatggaaacagaaatttttaaaaagtttactac

SEQ ID NO: 6903 - DNA, 40 bp, Artificial Sequence
  Description of Artificial Sequence: Synthetic primer
tcttgtggttttcctcttgggagtttctcactactttccc

SEQ ID NO: 6904 - DNA, 40 bp, Artificial Sequence
  Description of Artificial Sequence: Synthetic primer
gcccctccttctggccaccatgcgaagccacactgacgtg

SEQ ID NO: 6905 - DNA, 40 bp, Artificial Sequence
  Description of Artificial Sequence: Synthetic primer
atcctggctccttatctcccctccccgtatctcccttccc

SEQ ID NO: 6906 - DNA, 40 bp, Artificial Sequence
  Description of Artificial Sequence: Synthetic primer
tgaaaaaaactgaagatgagctattgtaacctgtactctc

SEQ ID NO: 6907 - DNA, 40 bp, Artificial Sequence
  Description of Artificial Sequence: Synthetic primer
ctttgtcctgaaaaatagtttgaaaggttcatttttcttg

SEQ ID NO: 6908 - DNA, 40 bp, Artificial Sequence
  Description of Artificial Sequence: Synthetic primer
atagataaagtctttgcccctccaatagcttgcttttcac

SEQ ID NO: 6909 - DNA, 40 bp, Artificial Sequence
  Description of Artificial Sequence: Synthetic primer
agagagcctgataaaacaaacaaaaaaaacagcagcatgc

SEQ ID NO: 6910 - DNA, 40 bp, Artificial Sequence
  Description of Artificial Sequence: Synthetic primer
aatttcacataataccatctttcaacaaattatacgaagg

SEQ ID NO: 6911 - DNA, 40 bp, Artificial Sequence
  Description of Artificial Sequence: Synthetic primer
aaaaatttgttcaagccaagtatcataatcagaataaaag

SEQ ID NO: 6912 - DNA, 40 bp, Artificial Sequence
  Description of Artificial Sequence: Synthetic primer
gatctcattcatctccccaagctcggttgttaagtcaagc

SEQ ID NO: 6913 - DNA, 40 bp, Artificial Sequence
  Description of Artificial Sequence: Synthetic primer
aaccccaggttcaccaaggagtcacttttccggactcatg

SEQ ID NO: 6914 - DNA, 40 bp, Artificial Sequence
  Description of Artificial Sequence: Synthetic primer
gaaccccagccctgccctaccgtccctggcgagcccccgc

SEQ ID NO: 6915 - DNA, 40 bp, Artificial Sequence
  Description of Artificial Sequence: Synthetic primer
gtgcatgggctgatcgtggtccctccgtcctgactgcacc

SEQ ID NO: 6916 - DNA, 40 bp, Artificial Sequence
  Description of Artificial Sequence: Synthetic primer
tctatcctaacacggctcactgaatgacacgccctggaag

SEQ ID NO: 6917 - DNA, 40 bp, Artificial Sequence
  Description of Artificial Sequence: Synthetic primer
gcaacagcctttgtaaatgtccggctctggcttttgtttc

SEQ ID NO: 6918 - DNA, 40 bp, Artificial Sequence
  Description of Artificial Sequence: Synthetic primer
ttcccatctcccctccaggcacgcaggctgaagaaagtcc

SEQ ID NO: 6919 - DNA, 40 bp, Artificial Sequence
  Description of Artificial Sequence: Synthetic primer
tctgtgtgacggaggtgggagtgggattcggggatgtggc

SEQ ID NO: 6920 - DNA, 40 bp, Artificial Sequence
  Description of Artificial Sequence: Synthetic primer
atccaatccaaattgaatttttgttttctttgtattttac

SEQ ID NO: 6921 - DNA, 40 bp, Artificial Sequence
  Description of Artificial Sequence: Synthetic primer
tacagtgaagaaaactgaatgggtttgatacatgttgacg

SEQ ID NO: 6922 - DNA, 40 bp, Artificial Sequence
  Description of Artificial Sequence: Synthetic primer
tagaggttgtggctttatgcttagaacataccgttttctg

SEQ ID NO: 6923 - DNA, 40 bp, Artificial Sequence
  Description of Artificial Sequence: Synthetic primer
taattcaatacaaggaaatctgcttagggttctcatgttg

SEQ ID NO: 6924 - DNA, 40 bp, Artificial Sequence
  Description of Artificial Sequence: Synthetic primer
aaaagttatcaattaaaagtcaaaggcataaagaacaaac

SEQ ID NO: 6925 - DNA, 40 bp, Artificial Sequence
  Description of Artificial Sequence: Synthetic primer
atgtgatcgtatttctaatccctttcactctggaatcctg

SEQ ID NO: 6926 - DNA, 40 bp, Artificial Sequence
  Description of Artificial Sequence: Synthetic primer
aacatttatttccctgaaaacctcttctttattttcagag

SEQ ID NO: 6927 - DNA, 40 bp, Artificial Sequence
  Description of Artificial Sequence: Synthetic primer
agtcactattggtaacagaaaagctgcactttaggataac

SEQ ID NO: 6928 - DNA, 40 bp, Artificial Sequence
  Description of Artificial Sequence: Synthetic primer
taatttaaactttaaaactgaaactcaaaagcctgaaatg

SEQ ID NO: 6929 - DNA, 40 bp, Artificial Sequence
  Description of Artificial Sequence: Synthetic primer
aaccccacttgaaaaactgaggtgcttaaggagtaaaata

SEQ ID NO: 6930 - DNA, 40 bp, Artificial Sequence
  Description of Artificial Sequence: Synthetic primer
ttgcaagggaaaggggtgttgtgtactgtttctgcttttg

SEQ ID NO: 6931 - DNA, 40 bp, Artificial Sequence
  Description of Artificial Sequence: Synthetic primer
tccgtcgttttatctgaacttaaaattttctttatttgta

SEQ ID NO: 6932 - DNA, 40 bp, Artificial Sequence
  Description of Artificial Sequence: Synthetic primer
caagaaaggcaggatcctggtccctgctacgtttctgggg

SEQ ID NO: 6933 - DNA, 40 bp, Artificial Sequence
  Description of Artificial Sequence: Synthetic primer
gataggagtctgcacccctagtcccctcgtcccccagtcc

SEQ ID NO: 6934 - DNA, 40 bp, Artificial Sequence
  Description of Artificial Sequence: Synthetic primer
tcctggggagccccttccagagctcagggatcccccaagg

SEQ ID NO: 6935 - DNA, 40 bp, Artificial Sequence
  Description of Artificial Sequence: Synthetic primer
ggggaacaaggctgtctcccatctcatctgacttctcttg

SEQ ID NO: 6936 - DNA, 40 bp, Artificial Sequence
  Description of Artificial Sequence: Synthetic primer
aagtgcagtgaagcccaggttcagccacagccccctgctc

SEQ ID NO: 6937 - DNA, 40 bp, Artificial Sequence
  Description of Artificial Sequence: Synthetic primer
ctaggcggtggtggggaggcagaggcatgatggtcttttc

SEQ ID NO: 6938 - DNA, 40 bp, Artificial Sequence
  Description of Artificial Sequence: Synthetic primer
taaaacatccctatttaaccattttcccttaatgatgaac

SEQ ID NO: 6939 - DNA, 40 bp, Artificial Sequence
  Description of Artificial Sequence: Synthetic primer
gttttttatccgtagtctaaagattttacctttccttttt

SEQ ID NO: 6940 - DNA, 40 bp, Artificial Sequence
  Description of Artificial Sequence: Synthetic primer
agaggcctgggcagggcagaggcgggacaactggaaacac

SEQ ID NO: 6941 - DNA, 40 bp, Artificial Sequence
  Description of Artificial Sequence: Synthetic primer
aatggttgttatttcttttgaaatctttctcctctctttg

SEQ ID NO: 6942 - DNA, 40 bp, Artificial Sequence
  Description of Artificial Sequence: Synthetic primer
aaacatgcattcatggaagatgttgaatcttttttttttt

SEQ ID NO: 6943 - DNA, 40 bp, Artificial Sequence
  Description of Artificial Sequence: Synthetic primer
tgtacacaatgtgctgaaaatttgtttccacttgattctg

SEQ ID NO: 6944 - DNA, 40 bp, Artificial Sequence
  Description of Artificial Sequence: Synthetic primer
caagcaagaatgggctggtatgcagccgccacacgaggag

SEQ ID NO: 6945 - DNA, 40 bp, Artificial Sequence
  Description of Artificial Sequence: Synthetic primer
cttggtattctgtgctaggattgttaaataaccgcctttg

SEQ ID NO: 6946 - DNA, 40 bp, Artificial Sequence
  Description of Artificial Sequence: Synthetic primer
gaggagattggagtgttctaaatgctaacagtttgtcctg

SEQ ID NO: 6947 - DNA, 40 bp, Artificial Sequence
  Description of Artificial Sequence: Synthetic primer
ggtaaagacgatgtttcagtacgaaaataggtgactacag

SEQ ID NO: 6948 - DNA, 40 bp, Artificial Sequence
  Description of Artificial Sequence: Synthetic primer
gccttgatgtcccacccatgacactcggaccccggagcag

SEQ ID NO: 6949 - DNA, 40 bp, Artificial Sequence
  Description of Artificial Sequence: Synthetic primer
tgatggtgatggtgtcatcatacatgtcctactgtcgttc

SEQ ID NO: 6950 - DNA, 40 bp, Artificial Sequence
  Description of Artificial Sequence: Synthetic primer
ataaaaaatataaaatccaattttctcaatgacctgtttg

SEQ ID NO: 6951 - DNA, 40 bp, Artificial Sequence
  Description of Artificial Sequence: Synthetic primer
tctttaacatttgatgtaaaatttaatatgcacctaacac

SEQ ID NO: 6952 - DNA, 40 bp, Artificial Sequence
  Description of Artificial Sequence: Synthetic primer
ttctggtcagagtgaggtcgggtcactcaaggggtctgtc

SEQ ID NO: 6953 - DNA, 40 bp, Artificial Sequence
  Description of Artificial Sequence: Synthetic primer
cccaagtgcacacaggcacacacacacttggtgctcttgc

SEQ ID NO: 6954 - DNA, 40 bp, Artificial Sequence
  Description of Artificial Sequence: Synthetic primer
tcacttaaataaacattcatatttttcaaatgtgtgagac

SEQ ID NO: 6955 - DNA, 40 bp, Artificial Sequence
  Description of Artificial Sequence: Synthetic primer
cctgtattacatgtagagagtattcgtcaaccaagaggag

SEQ ID NO: 6956 - DNA, 40 bp, Artificial Sequence
  Description of Artificial Sequence: Synthetic primer
ctcttataacttcacaactgactcaatccagagacaagac

SEQ ID NO: 6957 - DNA, 40 bp, Artificial Sequence
  Description of Artificial Sequence: Synthetic primer
tgaagcagtcttctcatccgtgtgtttcccctttcctgac

SEQ ID NO: 6958 - DNA, 40 bp, Artificial Sequence
  Description of Artificial Sequence: Synthetic primer
gtgacccaattattttataataggattagaaaaagtcaac

SEQ ID NO: 6959 - DNA, 40 bp, Artificial Sequence
  Description of Artificial Sequence: Synthetic primer
atgttataaataatgtcaatataaaaactgatagcatggg

SEQ ID NO: 6960 - DNA, 40 bp, Artificial Sequence
  Description of Artificial Sequence: Synthetic primer
tgaaggctgagacggccccttccccacccacccccacctc

SEQ ID NO: 6961 - DNA, 40 bp, Artificial Sequence
  Description of Artificial Sequence: Synthetic primer
gatcctcaggactctgtctgccctgacactgtctcaggtc

SEQ ID NO: 6962 - DNA, 40 bp, Artificial Sequence
  Description of Artificial Sequence: Synthetic primer
aagattgcacaatgtgacatccctctgaaggcatcagatc

SEQ ID NO: 6963 - DNA, 40 bp, Artificial Sequence
  Description of Artificial Sequence: Synthetic primer
tgatttcagccgttcgtaacagagccacggcattgctgag

SEQ ID NO: 6964 - DNA, 40 bp, Artificial Sequence
  Description of Artificial Sequence: Synthetic primer
aaattgtaaattttcagtatgtgaatgacttcacttattg

SEQ ID NO: 6965 - DNA, 40 bp, Artificial Sequence
  Description of Artificial Sequence: Synthetic primer
atacataaagaaacgtgaacaaatctgaaacactataaag

SEQ ID NO: 6966 - DNA, 40 bp, Artificial Sequence
  Description of Artificial Sequence: Synthetic primer
aattggtttttggcttttggatattaaagtcgtaattttg

SEQ ID NO: 6967 - DNA, 40 bp, Artificial Sequence
  Description of Artificial Sequence: Synthetic primer
ctgtttaaaaatttcacatttgctttgaaacatgcactac

SEQ ID NO: 6968 - DNA, 40 bp, Artificial Sequence
  Description of Artificial Sequence: Synthetic primer
agcagaggtctcaggaagtctgatgtgtagcttcttttgg

SEQ ID NO: 6969 - DNA, 40 bp, Artificial Sequence
  Description of Artificial Sequence: Synthetic primer
acaaaagccctgaaattcagatgtcagctgcagaatcctg

SEQ ID NO: 6970 - DNA, 40 bp, Artificial Sequence
  Description of Artificial Sequence: Synthetic primer
tgaatattattatcatgccaccaaatgggaatatacttag

SEQ ID NO: 6971 - DNA, 40 bp, Artificial Sequence
  Description of Artificial Sequence: Synthetic primer
ttttttttctgtgtttccttccctgtcctcctgccacatc

SEQ ID NO: 6972 - DNA, 40 bp, Artificial Sequence
  Description of Artificial Sequence: Synthetic primer
gggcctgcccttctctggtctccgatttcactggtgtttc

SEQ ID NO: 6973 - DNA, 40 bp, Artificial Sequence
  Description of Artificial Sequence: Synthetic primer
ccccacagggcccagtgctcaccggcagcagctcgtgttg

SEQ ID NO: 6974 - DNA, 40 bp, Artificial Sequence
  Description of Artificial Sequence: Synthetic primer
ggagttggggaagctctttcacttcggaggattgctcaac

SEQ ID NO: 6975 - DNA, 40 bp, Artificial Sequence
  Description of Artificial Sequence: Synthetic primer
tttgcctatccccgggactaagacggggtaagcctccacc

SEQ ID NO: 6976 - DNA, 40 bp, Artificial Sequence
  Description of Artificial Sequence: Synthetic primer
cttggtctttctaatgttggaatttataaataatcacttg

SEQ ID NO: 6977 - DNA, 40 bp, Artificial Sequence
  Description of Artificial Sequence: Synthetic primer
ctgctgataggcttgtacattgactgttcatttttctaac

SEQ ID NO: 6978 - DNA, 40 bp, Artificial Sequence
  Description of Artificial Sequence: Synthetic primer
ggacaccacacacacgcatgtgcacacacacacacgcttt

SEQ ID NO: 6979 - DNA, 40 bp, Artificial Sequence
  Description of Artificial Sequence: Synthetic primer
gcgtttatagtctgcttttacatctgaacctctgtttttg

SEQ ID NO: 6980 - DNA, 40 bp, Artificial Sequence
  Description of Artificial Sequence: Synthetic primer
aatttcctgagcttggggctcaggagcactggccctactc

SEQ ID NO: 6981 - DNA, 40 bp, Artificial Sequence
  Description of Artificial Sequence: Synthetic primer
cagctaggaactcaccatgctgttccatctcctctgtgtc

SEQ ID NO: 6982 - DNA, 40 bp, Artificial Sequence
  Description of Artificial Sequence: Synthetic primer
gccaggtccctgagggtcctgctggggcaagcagtggggc

SEQ ID NO: 6983 - DNA, 40 bp, Artificial Sequence
  Description of Artificial Sequence: Synthetic primer
cccagctgctccgggaggcaggtgctgacggccgtctctg

SEQ ID NO: 6984 - DNA, 40 bp, Artificial Sequence
  Description of Artificial Sequence: Synthetic primer
tccaggcccactaccacggtgggaagacccctccccctgg

SEQ ID NO: 6985 - DNA, 40 bp, Artificial Sequence
  Description of Artificial Sequence: Synthetic primer
ccagcaggtaaatggacaagaacacttttaacatggaatc

SEQ ID NO: 6986 - DNA, 40 bp, Artificial Sequence
  Description of Artificial Sequence: Synthetic primer
ctattcagctacagatggcttgatcctgagtcatttcttc

SEQ ID NO: 6987 - DNA, 40 bp, Artificial Sequence
  Description of Artificial Sequence: Synthetic primer
ttaaagtgaaggaggatgagcctgaccagtgagggaagtg

SEQ ID NO: 6988 - DNA, 40 bp, Artificial Sequence
  Description of Artificial Sequence: Synthetic primer
caggaggacacgagccagccagggtgctgggtctcacagg

SEQ ID NO: 6989 - DNA, 40 bp, Artificial Sequence
  Description of Artificial Sequence: Synthetic primer
tcctcttaggagggctgttttgaggagggaatgtcatggg

SEQ ID NO: 6990 - DNA, 40 bp, Artificial Sequence
  Description of Artificial Sequence: Synthetic primer
taatttgttaattagatggctgaaaggaaaattgttagtg

SEQ ID NO: 6991 - DNA, 40 bp, Artificial Sequence
  Description of Artificial Sequence: Synthetic primer
atggcaacttaaatccaagatacaacattcagaatttcct

SEQ ID NO: 6992 - DNA, 40 bp, Artificial Sequence
  Description of Artificial Sequence: Synthetic primer
gcacacaacacaggcaagtcctcaccaggctccgcccttg

SEQ ID NO: 6993 - DNA, 40 bp, Artificial Sequence
  Description of Artificial Sequence: Synthetic primer
accaacaccgaggccacaaacgagattttgtcagcatggc

SEQ ID NO: 6994 - DNA, 40 bp, Artificial Sequence
  Description of Artificial Sequence: Synthetic primer
atcatcccaccaaggccaagcaggcggccacagggacaag

SEQ ID NO: 6995 - DNA, 40 bp, Artificial Sequence
  Description of Artificial Sequence: Synthetic primer
gccatgcctaagcccgggacttccttgcctctcttggtag

SEQ ID NO: 6996 - DNA, 40 bp, Artificial Sequence
  Description of Artificial Sequence: Synthetic primer
tctccctctatgtggtgtttttctacttgaacataaatgc

SEQ ID NO: 6997 - DNA, 40 bp, Artificial Sequence
  Description of Artificial Sequence: Synthetic primer
tttcccttgttttaaagagaatactaaatatgtgatttga

SEQ ID NO: 6998 - DNA, 40 bp, Artificial Sequence
  Description of Artificial Sequence: Synthetic primer
ttcttcttttataggattgaatctttggaagaagaaatta

SEQ ID NO: 6999 - DNA, 40 bp, Artificial Sequence
  Description of Artificial Sequence: Synthetic primer
actgaaggttattttacatatattcttgattttcattttc

SEQ ID NO: 7000 - DNA, 40 bp, Artificial Sequence
  Description of Artificial Sequence: Synthetic primer
taacttaatggactacaaagtctatttaagggttacaaac

SEQ ID NO: 7001 - DNA, 40 bp, Artificial Sequence
  Description of Artificial Sequence: Synthetic primer
aacaaaactcatttggattattaatataaatctataaatg

SEQ ID NO: 7002 - DNA, 40 bp, Artificial Sequence
  Description of Artificial Sequence: Synthetic primer
tctgaagaaggtggtaaaggaaacccaagctgcctgcacc

SEQ ID NO: 7003 - DNA, 40 bp, Artificial Sequence
  Description of Artificial Sequence: Synthetic primer
tcatttcatagttgttataccacagaaatgaagcagtaag

SEQ ID NO: 7004 - DNA, 40 bp, Artificial Sequence
  Description of Artificial Sequence: Synthetic primer
tttttttaaatatgcattggaaaatctgttattctgatag

SEQ ID NO: 7005 - DNA, 40 bp, Artificial Sequence
  Description of Artificial Sequence: Synthetic primer
cctgaataattaatttactgagtcttttcttccatgattc

SEQ ID NO: 7006 - DNA, 40 bp, Artificial Sequence
  Description of Artificial Sequence: Synthetic primer
aggatgaaagaacaaggcggccaaggccaggagtctgagc

SEQ ID NO: 7007 - DNA, 40 bp, Artificial Sequence
  Description of Artificial Sequence: Synthetic primer
aggggcctaccctggggacacacctggtcccccccaactc

SEQ ID NO: 7008 - DNA, 40 bp, Artificial Sequence
  Description of Artificial Sequence: Synthetic primer
tggggctgtggctgcctttaggtcacactctgggtctttg

SEQ ID NO: 7009 - DNA, 40 bp, Artificial Sequence
  Description of Artificial Sequence: Synthetic primer
agaaatctccaagtcatccacgttttccctgttttatttg

SEQ ID NO: 7010 - DNA, 40 bp, Artificial Sequence
  Description of Artificial Sequence: Synthetic primer
atcatcccaccctctttcatagaagatcaaaagacaaatc

SEQ ID NO: 7011 - DNA, 40 bp, Artificial Sequence
  Description of Artificial Sequence: Synthetic primer
aggcttttttctttttctgtgactctttgacacgtaataa

SEQ ID NO: 7012 - DNA, 40 bp, Artificial Sequence
  Description of Artificial Sequence: Synthetic primer
tccaagagtgactattactgagcggaatattgatacttac

SEQ ID NO: 7013 - DNA, 40 bp, Artificial Sequence
  Description of Artificial Sequence: Synthetic primer
cagcacacgctgtgtgcggggatgaccctttctcttgtcc

SEQ ID NO: 7014 - DNA, 40 bp, Artificial Sequence
  Description of Artificial Sequence: Synthetic primer
acactgcagggccccacccggccctacctttcctgcactg

SEQ ID NO: 7015 - DNA, 40 bp, Artificial Sequence
  Description of Artificial Sequence: Synthetic primer
cacgtcggtgggtcaggggcggtcgtcagagcgggcatcc

SEQ ID NO: 7016 - DNA, 40 bp, Artificial Sequence
  Description of Artificial Sequence: Synthetic primer
gagaggatgatggtgctgtgtatacaatctcggggaccag

SEQ ID NO: 7017 - DNA, 40 bp, Artificial Sequence
  Description of Artificial Sequence: Synthetic primer
aacagaaaaaagacttgttgtcacataaattggaagtatg

SEQ ID NO: 7018 - DNA, 40 bp, Artificial Sequence
  Description of Artificial Sequence: Synthetic primer
aaagtagtgtcatatgcaaatacttcacttcctttatttc

SEQ ID NO: 7019 - DNA, 40 bp, Artificial Sequence
  Description of Artificial Sequence: Synthetic primer
ttgctaagctaaagtcagttttctcatgcatattatctac

SEQ ID NO: 7020 - DNA, 40 bp, Artificial Sequence
  Description of Artificial Sequence: Synthetic primer
ataagtataatgtgcaaagggacagcctattaacagctac

SEQ ID NO: 7021 - DNA, 40 bp, Artificial Sequence
  Description of Artificial Sequence: Synthetic primer
gaggaccagaaatttccccaatgatatatacagccttccc

SEQ ID NO: 7022 - DNA, 40 bp, Artificial Sequence
  Description of Artificial Sequence: Synthetic primer
ccccacccatttctttgataagtgataattctttttctcc

SEQ ID NO: 7023 - DNA, 40 bp, Artificial Sequence
  Description of Artificial Sequence: Synthetic primer
ttatcagcactttctccaatttttttttttttatcacatt

SEQ ID NO: 7024 - DNA, 40 bp, Artificial Sequence
  Description of Artificial Sequence: Synthetic primer
tggggatatatctgatacgcaggcctctaatgaactttcc

SEQ ID NO: 7025 - DNA, 40 bp, Artificial Sequence
  Description of Artificial Sequence: Synthetic primer
atgcagaaaaatgaaaagataaagtattctaggtttgctg

SEQ ID NO: 7026 - DNA, 40 bp, Artificial Sequence
  Description of Artificial Sequence: Synthetic primer
tctcctttggccagcatttctaaaagtgggaaagtggatg

SEQ ID NO: 7027 - DNA, 40 bp, Artificial Sequence
  Description of Artificial Sequence: Synthetic primer
ctccacacacaattcagagaaaaagggagatggcactcag

SEQ ID NO: 7028 - DNA, 40 bp, Artificial Sequence
  Description of Artificial Sequence: Synthetic primer
tgaccatttttctgatgtgcatttcgatagcaaggttaag

SEQ ID NO: 7029 - DNA, 40 bp, Artificial Sequence
  Description of Artificial Sequence: Synthetic primer
aaacagaaaacttcctggggcagtgttggaccctgtgagg

SEQ ID NO: 7030 - DNA, 40 bp, Artificial Sequence
  Description of Artificial Sequence: Synthetic primer
caacccattaagtggtctgtatgtgagttactaatgagag

SEQ ID NO: 7031 - DNA, 40 bp, Artificial Sequence
  Description of Artificial Sequence: Synthetic primer
caccactgctgtttctatgtcacttgaatccctggttttc

SEQ ID NO: 7032 - DNA, 40 bp, Artificial Sequence
  Description of Artificial Sequence: Synthetic primer
agtaagccaggtagggaagcagacaactcgccagataatg

SEQ ID NO: 7033 - DNA, 40 bp, Artificial Sequence
  Description of Artificial Sequence: Synthetic primer
tacagagtccagctctgggccttttccgttttcaaaagag

SEQ ID NO: 7034 - DNA, 40 bp, Artificial Sequence
  Description of Artificial Sequence: Synthetic primer
ttaaaagcagttttgtcttctgactttgtcaccatgaaac

SEQ ID NO: 7035 - DNA, 40 bp, Artificial Sequence
  Description of Artificial Sequence: Synthetic primer
gttgtttttcggagcctccctctgctcagcgttggtggtg

SEQ ID NO: 7036 - DNA, 40 bp, Artificial Sequence
  Description of Artificial Sequence: Synthetic primer
tctcggagctatgcctccgccggcacccttgtgggtctgc

SEQ ID NO: 7037 - DNA, 40 bp, Artificial Sequence
  Description of Artificial Sequence: Synthetic primer
ccggcccggccccaggtccatcttcatgtactcctcagtg

SEQ ID NO: 7038 - DNA, 40 bp, Artificial Sequence
  Description of Artificial Sequence: Synthetic primer
aaggcgaccagagctagtggaaaggcggaggtgctgatgc

SEQ ID NO: 7039 - DNA, 40 bp, Artificial Sequence
  Description of Artificial Sequence: Synthetic primer
gcagatacgctcttggggctcatgggcatatagtctccac

SEQ ID NO: 7040 - DNA, 40 bp, Artificial Sequence
  Description of Artificial Sequence: Synthetic primer
ttgccacccatgcagatatagttgcttagctcctcctcac

SEQ ID NO: 7041 - DNA, 40 bp, Artificial Sequence
  Description of Artificial Sequence: Synthetic primer
gcgcggacacggaaggagcctggcttcccgcccaccatgc

SEQ ID NO: 7042 - DNA, 40 bp, Artificial Sequence
  Description of Artificial Sequence: Synthetic primer
tctttgtctgacccaggcccttgggcttcaggatcacttg

SEQ ID NO: 7043 - DNA, 40 bp, Artificial Sequence
  Description of Artificial Sequence: Synthetic primer
ggtgaacctcagtcctaaccgcaaccagagtgccaaagtg

SEQ ID NO: 7044 - DNA, 40 bp, Artificial Sequence
  Description of Artificial Sequence: Synthetic primer
ttccacagctcaccttctgtcaggtgtccatcccagctcc

SEQ ID NO: 7045 - DNA, 40 bp, Artificial Sequence
  Description of Artificial Sequence: Synthetic primer
agcacaagccagtcctctcctactactcattgccaagatc

SEQ ID NO: 7046 - DNA, 40 bp, Artificial Sequence
  Description of Artificial Sequence: Synthetic primer
tgatggctacatgcccatgtccccaggggtggccccagtg

SEQ ID NO: 7047 - DNA, 40 bp, Artificial Sequence
  Description of Artificial Sequence: Synthetic primer
gggccacaccccaccagcccgcggtgaggaggagctaagc

SEQ ID NO: 7048 - DNA, 40 bp, Artificial Sequence
  Description of Artificial Sequence: Synthetic primer
ccagccaggtggggctgacccgccgatcacgcactgagag

SEQ ID NO: 7049 - DNA, 40 bp, Artificial Sequence
  Description of Artificial Sequence: Synthetic primer
gcggcagctccggccttggtgaggctggggaggacttgag

SEQ ID NO: 7050 - DNA, 40 bp, Artificial Sequence
  Description of Artificial Sequence: Synthetic primer
taaattttatgtttattagattatttctgaaacttttaac

SEQ ID NO: 7051 - DNA, 40 bp, Artificial Sequence
  Description of Artificial Sequence: Synthetic primer
gataaaacctacttgtaagaaagacaacacaatgaaaatc

SEQ ID NO: 7052 - DNA, 40 bp, Artificial Sequence
  Description of Artificial Sequence: Synthetic primer
tttatgtgtaaaggtgaaattaatgtctaatagagtcttc

SEQ ID NO: 7053 - DNA, 40 bp, Artificial Sequence
  Description of Artificial Sequence: Synthetic primer
ctacacgcaccttatgattttgcctgttactcttatttaa

SEQ ID NO: 7054 - DNA, 40 bp, Artificial Sequence
  Description of Artificial Sequence: Synthetic primer
catagtagacctttatttgtaaagttttcttacaccttgg

SEQ ID NO: 7055 - DNA, 40 bp, Artificial Sequence
  Description of Artificial Sequence: Synthetic primer
aaaaaagaagatgtgtttctttcgaaaagtatagtgagag

SEQ ID NO: 7056 - DNA, 40 bp, Artificial Sequence
  Description of Artificial Sequence: Synthetic primer
attttttatatatatgaagtaccaatgacttccttttcca

SEQ ID NO: 7057 - DNA, 40 bp, Artificial Sequence
  Description of Artificial Sequence: Synthetic primer
gggaagagctgcggagagggctttggaaagagcatttgtg

SEQ ID NO: 7058 - DNA, 40 bp, Artificial Sequence
  Description of Artificial Sequence: Synthetic primer
gactgccaaataatctctttaatactctgatctttttctc

SEQ ID NO: 7059 - DNA, 40 bp, Artificial Sequence
  Description of Artificial Sequence: Synthetic primer
gaccaaagaagctttgagaagactacttgcagagaattac

SEQ ID NO: 7060 - DNA, 40 bp, Artificial Sequence
  Description of Artificial Sequence: Synthetic primer
ggggaaaagtgaggtgtggagcttaggaaaagagggaaag

SEQ ID NO: 7061 - DNA, 40 bp, Artificial Sequence
  Description of Artificial Sequence: Synthetic primer
ccacagtgcccagtttgaatgccagtcataagtaaagatg

SEQ ID NO: 7062 - DNA, 40 bp, Artificial Sequence
  Description of Artificial Sequence: Synthetic primer
accgtctcaggttcgcacaccctcagcaaccctccccccg

SEQ ID NO: 7063 - DNA, 40 bp, Artificial Sequence
  Description of Artificial Sequence: Synthetic primer
ggggtgcctgtgctgcccggctgggagccgacctctacgc

SEQ ID NO: 7064 - DNA, 40 bp, Artificial Sequence
  Description of Artificial Sequence: Synthetic primer
agtgcgctggtttctcagtggcccaggtctttaaatccac

SEQ ID NO: 7065 - DNA, 40 bp, Artificial Sequence
  Description of Artificial Sequence: Synthetic primer
aggaacgaactgggaaaatgtgcagggccaccttacctac

SEQ ID NO: 7066 - DNA, 40 bp, Artificial Sequence
  Description of Artificial Sequence: Synthetic primer
taacttggctctccaggccaagaatcttttgtgaagtctc

SEQ ID NO: 7067 - DNA, 40 bp, Artificial Sequence
  Description of Artificial Sequence: Synthetic primer
ggagatactcacccaagttattatgtgctggggacatcgg

SEQ ID NO: 7068 - DNA, 40 bp, Artificial Sequence
  Description of Artificial Sequence: Synthetic primer
tactccctcatcctcactcactggtcttatgaagctgatg

SEQ ID NO: 7069 - DNA, 40 bp, Artificial Sequence
  Description of Artificial Sequence: Synthetic primer
tgcaccctcccttgtcttccctgagaccccgaccactctc

SEQ ID NO: 7070 - DNA, 40 bp, Artificial Sequence
  Description of Artificial Sequence: Synthetic primer
tttacataaattgctgtctcttctcatgctgtcccctcac

SEQ ID NO: 7071 - DNA, 40 bp, Artificial Sequence
  Description of Artificial Sequence: Synthetic primer
agtgtcctgtttatgtaataatagagaagctaagttaaac

SEQ ID NO: 7072 - DNA, 40 bp, Artificial Sequence
  Description of Artificial Sequence: Synthetic primer
accaaagacgcattctgacctagtatgatgctaaatggac

SEQ ID NO: 7073 - DNA, 40 bp, Artificial Sequence
  Description of Artificial Sequence: Synthetic primer
tctgtgagagaactatatctattgtaaattttaaaggact

SEQ ID NO: 7074 - DNA, 40 bp, Artificial Sequence
  Description of Artificial Sequence: Synthetic primer
acagactacatcatcataaatgagaatgatcgttttcttc

SEQ ID NO: 7075 - DNA, 40 bp, Artificial Sequence
  Description of Artificial Sequence: Synthetic primer
tctgggataattttggaagtataatagcagttcttttctc

SEQ ID NO: 7076 - DNA, 40 bp, Artificial Sequence
  Description of Artificial Sequence: Synthetic primer
acatgtaactagtgagatactacttatctcttgattcagc

SEQ ID NO: 7077 - DNA, 40 bp, Artificial Sequence
  Description of Artificial Sequence: Synthetic primer
tgattgcatagctgcatgaagaaattgccttccctctttt

SEQ ID NO: 7078 - DNA, 40 bp, Artificial Sequence
  Description of Artificial Sequence: Synthetic primer
taggtctgtaacaggctttatggggccaaaggaaaagaac

SEQ ID NO: 7079 - DNA, 40 bp, Artificial Sequence
  Description of Artificial Sequence: Synthetic primer
gcagccagagcagcttggtggtcattgttgtgcccctacc

SEQ ID NO: 7080 - DNA, 40 bp, Artificial Sequence
  Description of Artificial Sequence: Synthetic primer
cttggcctttcaatcttccccagacaggcaataggtatgg

SEQ ID NO: 7081 - DNA, 40 bp, Artificial Sequence
  Description of Artificial Sequence: Synthetic primer
aagtggaagacatacacattttaaaggctcaaaataatac

SEQ ID NO: 7082 - DNA, 40 bp, Artificial Sequence
  Description of Artificial Sequence: Synthetic primer
tctgcacagatgttacttgtttctctttcctctttttcac

SEQ ID NO: 7083 - DNA, 40 bp, Artificial Sequence
  Description of Artificial Sequence: Synthetic primer
agacggtaaacgtcttaaaacatatgaaagtctgaatagg

SEQ ID NO: 7084 - DNA, 40 bp, Artificial Sequence
  Description of Artificial Sequence: Synthetic primer
tttttaaagcaactaaagctctctcacttcgcctttgatc

SEQ ID NO: 7085 - DNA, 40 bp, Artificial Sequence
  Description of Artificial Sequence: Synthetic primer
ctcgtgcagttggagggcagcctcttcaccccgtctgctg

SEQ ID NO: 7086 - DNA, 40 bp, Artificial Sequence
  Description of Artificial Sequence: Synthetic primer
gctctgcaccctaacggcccgtgcagccagccccgcctcg

SEQ ID NO: 7087 - DNA, 40 bp, Artificial Sequence
  Description of Artificial Sequence: Synthetic primer
ttttttatgtgaggataaatcatactgaattaaggggaaa

SEQ ID NO: 7088 - DNA, 40 bp, Artificial Sequence
  Description of Artificial Sequence: Synthetic primer
acatttgacggatgctaggaatgaagttatattctttttc

SEQ ID NO: 7089 - DNA, 40 bp, Artificial Sequence
  Description of Artificial Sequence: Synthetic primer
cggcccagccgcccaggctctgtaccttccaggagaggag

SEQ ID NO: 7090 - DNA, 40 bp, Artificial Sequence
  Description of Artificial Sequence: Synthetic primer
tctccctcctttgtcctctgtcctgctccgtctctctccc

SEQ ID NO: 7091 - DNA, 40 bp, Artificial Sequence
  Description of Artificial Sequence: Synthetic primer
ggcagtgacttctaaacatgatgcacgctcttatttcctc

SEQ ID NO: 7092 - DNA, 40 bp, Artificial Sequence
  Description of Artificial Sequence: Synthetic primer
aaggacagctctcctgtcctctggtttactcgtctagttg

SEQ ID NO: 7093 - DNA, 40 bp, Artificial Sequence
  Description of Artificial Sequence: Synthetic primer
cccaccgtcaggtgccctgacctcccgccctgacctcccc

SEQ ID NO: 7094 - DNA, 40 bp, Artificial Sequence
  Description of Artificial Sequence: Synthetic primer
aggtggggctgaaagccaggggctggagggacgggacacc

SEQ ID NO: 7095 - DNA, 40 bp, Artificial Sequence
  Description of Artificial Sequence: Synthetic primer
ggccaggggcccagagtagctgagacctggggactgatcc

SEQ ID NO: 7096 - DNA, 40 bp, Artificial Sequence
  Description of Artificial Sequence: Synthetic primer
cccattagcagcccaagtctgggtgtcctccccaactccc

SEQ ID NO: 7097 - DNA, 40 bp, Artificial Sequence
  Description of Artificial Sequence: Synthetic primer
acagagcgcacacagacgcccgaaggcttgggaaaggaag

SEQ ID NO: 7098 - DNA, 40 bp, Artificial Sequence
  Description of Artificial Sequence: Synthetic primer
tgcttcctctggtgatggaaccttggggagggtccccacg

SEQ ID NO: 7099 - DNA, 40 bp, Artificial Sequence
  Description of Artificial Sequence: Synthetic primer
caggctttgctgctgctggatgtttgctggctgcaggttc

SEQ ID NO: 7100 - DNA, 40 bp, Artificial Sequence
  Description of Artificial Sequence: Synthetic primer
gatgcccaggtgggtgtcgggcatcccaggcaggtggttg

SEQ ID NO: 7101 - DNA, 40 bp, Artificial Sequence
  Description of Artificial Sequence: Synthetic primer
cggctggccacccagcctcacctggtgcagacccagcagg

SEQ ID NO: 7102 - DNA, 40 bp, Artificial Sequence
  Description of Artificial Sequence: Synthetic primer
tggcctcgccgccactgctgccctccccgttccagcagtc

SEQ ID NO: 7103 - DNA, 40 bp, Artificial Sequence
  Description of Artificial Sequence: Synthetic primer
cccatacatctagcaatgagacgccgcataaggatgttag

SEQ ID NO: 7104 - DNA, 40 bp, Artificial Sequence
  Description of Artificial Sequence: Synthetic primer
ggctgcgggtggcggctgagtgtccctgtgtgtctcttac

SEQ ID NO: 7105 - DNA, 40 bp, Artificial Sequence
  Description of Artificial Sequence: Synthetic primer
ggcctgctgtttgcttggaatgggacaagattttctttgc

SEQ ID NO: 7106 - DNA, 40 bp, Artificial Sequence
  Description of Artificial Sequence: Synthetic primer
aggtttgaacttcaccagccccaacttatgccactctctg

SEQ ID NO: 7107 - DNA, 40 bp, Artificial Sequence
  Description of Artificial Sequence: Synthetic primer
tagcttgacattgtctgatttccaggcttacactaacacc

SEQ ID NO: 7108 - DNA, 40 bp, Artificial Sequence
  Description of Artificial Sequence: Synthetic primer
ggaagacctcaggaataaggctctggataaagaacaggtg

SEQ ID NO: 7109 - DNA, 40 bp, Artificial Sequence
  Description of Artificial Sequence: Synthetic primer
tcatggacagcacttgagtgtcattcttgggatattcaac

SEQ ID NO: 7110 - DNA, 40 bp, Artificial Sequence
  Description of Artificial Sequence: Synthetic primer
ttttagtgtccttaaaaggttgataatcacttgctgagtg

SEQ ID NO: 7111 - DNA, 40 bp, Artificial Sequence
  Description of Artificial Sequence: Synthetic primer
gaggggctgtgggcaggcgcaggccccggcctcacctgtg

SEQ ID NO: 7112 - DNA, 40 bp, Artificial Sequence
  Description of Artificial Sequence: Synthetic primer
cgtgggcggggtggaagaccaggacggccctgcggctgag

SEQ ID NO: 7113 - DNA, 40 bp, Artificial Sequence
  Description of Artificial Sequence: Synthetic primer
gcagtaggaatttatacttttcagcactcatttctccttt

SEQ ID NO: 7114 - DNA, 40 bp, Artificial Sequence
  Description of Artificial Sequence: Synthetic primer
aggtaattccataagcaagtcagtgcccagtggatggtac

SEQ ID NO: 7115 - DNA, 40 bp, Artificial Sequence
  Description of Artificial Sequence: Synthetic primer
attaggcgagcattctggagaaggtggtctgttctggatg

SEQ ID NO: 7116 - DNA, 40 bp, Artificial Sequence
  Description of Artificial Sequence: Synthetic primer
gtccctgggctgtccagttctgtctataacccagtttctc

SEQ ID NO: 7117 - DNA, 40 bp, Artificial Sequence
  Description of Artificial Sequence: Synthetic primer
ccacagcagggttgggaccggcccctctctggcccctcac

SEQ ID NO: 7118 - DNA, 40 bp, Artificial Sequence
  Description of Artificial Sequence: Synthetic primer
ccaaagctgccaccctgaccctgggcagctccccaccaag

SEQ ID NO: 7119 - DNA, 40 bp, Artificial Sequence
  Description of Artificial Sequence: Synthetic primer
agaagggcaccctgggtaagatttctctttctgtttttac

SEQ ID NO: 7120 - DNA, 40 bp, Artificial Sequence
  Description of Artificial Sequence: Synthetic primer
tcatattaaaccactggaaagtcccaacacccagagtgag

SEQ ID NO: 7121 - DNA, 40 bp, Artificial Sequence
  Description of Artificial Sequence: Synthetic primer
ttagcattcctgcagaactgtgaagtgttaacaacctttt

SEQ ID NO: 7122 - DNA, 40 bp, Artificial Sequence
  Description of Artificial Sequence: Synthetic primer
agaataacataattacactggcttccttatttacatcatg

SEQ ID NO: 7123 - DNA, 40 bp, Artificial Sequence
  Description of Artificial Sequence: Synthetic primer
ccctctattcattcagatccacaggccttcccccagcaag

SEQ ID NO: 7124 - DNA, 40 bp, Artificial Sequence
  Description of Artificial Sequence: Synthetic primer
atagttttccttatccctggaaaaaaaaaattgatgtcag

SEQ ID NO: 7125 - DNA, 40 bp, Artificial Sequence
  Description of Artificial Sequence: Synthetic primer
tttaaagtgagtcttcagaagtataactttcattaaatgc

SEQ ID NO: 7126 - DNA, 40 bp, Artificial Sequence
  Description of Artificial Sequence: Synthetic primer
catgttgacacactttataaatgctataaggattttaaac

SEQ ID NO: 7127 - DNA, 40 bp, Artificial Sequence
  Description of Artificial Sequence: Synthetic primer
atattttaaattctagcttatgtagaacaataaatcatgc

SEQ ID NO: 7128 - DNA, 40 bp, Artificial Sequence
  Description of Artificial Sequence: Synthetic primer
gcttaaaacacttatggataaattgtagctgttctcttag

SEQ ID NO: 7129 - DNA, 40 bp, Artificial Sequence
  Description of Artificial Sequence: Synthetic primer
cagacagagcccctgctaagtggcccctctccacccagtg

SEQ ID NO: 7130 - DNA, 40 bp, Artificial Sequence
  Description of Artificial Sequence: Synthetic primer
agtgtgggagccctcatgccggggctgaccagggcactcc

SEQ ID NO: 7131 - DNA, 40 bp, Artificial Sequence
  Description of Artificial Sequence: Synthetic primer
gggcagcaatgggaaggaggtagggatggaaaggagatac

SEQ ID NO: 7132 - DNA, 40 bp, Artificial Sequence
  Description of Artificial Sequence: Synthetic primer
cccaggaggccctggcttctcacttcagccccctcaaccc

SEQ ID NO: 7133 - DNA, 40 bp, Artificial Sequence
  Description of Artificial Sequence: Synthetic primer
tattatctaagtatttggaggtctggctttgaatcattag

SEQ ID NO: 7134 - DNA, 40 bp, Artificial Sequence
  Description of Artificial Sequence: Synthetic primer
ctgtgcaaagttataggcttatttgctctctcatgttctg

SEQ ID NO: 7135 - DNA, 40 bp, Artificial Sequence
  Description of Artificial Sequence: Synthetic primer
agtgaccctccacgataaggcaggggctcacgagggacac

SEQ ID NO: 7136 - DNA, 40 bp, Artificial Sequence
  Description of Artificial Sequence: Synthetic primer
aagtcagaactttctccccatgcccgtcttctgattccag

SEQ ID NO: 7137 - DNA, 40 bp, Artificial Sequence
  Description of Artificial Sequence: Synthetic primer
catctctgtaaacaggaacacctgttcccagggtaccacc

SEQ ID NO: 7138 - DNA, 40 bp, Artificial Sequence
  Description of Artificial Sequence: Synthetic primer
caaacattctacagtcccatggcatatggttctctgttcc

SEQ ID NO: 7139 - DNA, 40 bp, Artificial Sequence
  Description of Artificial Sequence: Synthetic primer
atggctggagcaaggagccaggcatttttcttatctcaac

SEQ ID NO: 7140 - DNA, 40 bp, Artificial Sequence
  Description of Artificial Sequence: Synthetic primer
ctgacaaatccagagtatacgcttccagagaacaaggagc

SEQ ID NO: 7141 - DNA, 40 bp, Artificial Sequence
  Description of Artificial Sequence: Synthetic primer
aaggcggccgacactcacccacccgtttcccaccgagtgc

SEQ ID NO: 7142 - DNA, 40 bp, Artificial Sequence
  Description of Artificial Sequence: Synthetic primer
cgtgtcagagtcggagctctctctgcccagccctaagtgc

SEQ ID NO: 7143 - DNA, 40 bp, Artificial Sequence
  Description of Artificial Sequence: Synthetic primer
agagtccacatatcaagtaactgtcttttaaatgttattc

SEQ ID NO: 7144 - DNA, 40 bp, Artificial Sequence
  Description of Artificial Sequence: Synthetic primer
gaacaaacaaaaaactgaaagtaaataaaaagcacactga

SEQ ID NO: 7145 - DNA, 40 bp, Artificial Sequence
  Description of Artificial Sequence: Synthetic primer
tagggatgatgcccgcgcggagctgacccttctcctattg

SEQ ID NO: 7146 - DNA, 40 bp, Artificial Sequence
  Description of Artificial Sequence: Synthetic primer
gggctgcccgaggggtgctccagggacccgcacccagtgg

SEQ ID NO: 7147 - DNA, 40 bp, Artificial Sequence
  Description of Artificial Sequence: Synthetic primer
taattttttacatacgtcagcttctaaacaagaaataatc

SEQ ID NO: 7148 - DNA, 40 bp, Artificial Sequence
  Description of Artificial Sequence: Synthetic primer
ggctagcttttttcccactccagaactctctccttccttc

SEQ ID NO: 7149 - DNA, 40 bp, Artificial Sequence
  Description of Artificial Sequence: Synthetic primer
aatcttatactctgcacagcagcccagcagggatgtcctc

SEQ ID NO: 7150 - DNA, 40 bp, Artificial Sequence
  Description of Artificial Sequence: Synthetic primer
tttgaaaactatacgtgaagggttgagttaaatgtgtgtg

SEQ ID NO: 7151 - DNA, 40 bp, Artificial Sequence
  Description of Artificial Sequence: Synthetic primer
gctacacagaactaatatttttatatgtatttttgttaac

SEQ ID NO: 7152 - DNA, 40 bp, Artificial Sequence
  Description of Artificial Sequence: Synthetic primer
agatctaagaatttgtaagcaggaagaatgctgccattac

SEQ ID NO: 7153 - DNA, 40 bp, Artificial Sequence
  Description of Artificial Sequence: Synthetic primer
agaaattcagagaataatcattgatattctggaatcaacc

SEQ ID NO: 7154 - DNA, 40 bp, Artificial Sequence
  Description of Artificial Sequence: Synthetic primer
gtcatctttttatacacaactgccacttttaattgtcttc

SEQ ID NO: 7155 - DNA, 40 bp, Artificial Sequence
  Description of Artificial Sequence: Synthetic primer
gtaagctcattcttggggtcctgtggctctgtacctgtgg

SEQ ID NO: 7156 - DNA, 40 bp, Artificial Sequence
  Description of Artificial Sequence: Synthetic primer
gagaatgaattgacactaatctctgcttgtgttctctgtc

SEQ ID NO: 7157 - DNA, 40 bp, Artificial Sequence
  Description of Artificial Sequence: Synthetic primer
atgagtctggaggaccacttaaaggtagaagagatgagtc

SEQ ID NO: 7158 - DNA, 40 bp, Artificial Sequence
  Description of Artificial Sequence: Synthetic primer
ataggagaagacgaggaggttgtaggcttggagcttctgg

SEQ ID NO: 7159 - DNA, 40 bp, Artificial Sequence
  Description of Artificial Sequence: Synthetic primer
atttccctcctgccccatgtaattcatttcctctcccttc

SEQ ID NO: 7160 - DNA, 40 bp, Artificial Sequence
  Description of Artificial Sequence: Synthetic primer
ggctttcttttctgagccatgggcattctgtctcttgctc

SEQ ID NO: 7161 - DNA, 40 bp, Artificial Sequence
  Description of Artificial Sequence: Synthetic primer
caaactatcagaaaaacaagttatttgccttttaattttt

SEQ ID NO: 7162 - DNA, 40 bp, Artificial Sequence
  Description of Artificial Sequence: Synthetic primer
gcaatagcaatatctattccaacacattgcagatgagaga

SEQ ID NO: 7163 - DNA, 40 bp, Artificial Sequence
  Description of Artificial Sequence: Synthetic primer
gtggctggaggggtgcatggggctcctctcagaccccctc

SEQ ID NO: 7164 - DNA, 40 bp, Artificial Sequence
  Description of Artificial Sequence: Synthetic primer
ccagctctgagcccgccagcagctcaccggtccaaaacag

SEQ ID NO: 7165 - DNA, 40 bp, Artificial Sequence
  Description of Artificial Sequence: Synthetic primer
agaggccttcccggggcctgacagagtgcagacgagaaac

SEQ ID NO: 7166 - DNA, 40 bp, Artificial Sequence
  Description of Artificial Sequence: Synthetic primer
cttcataccacagcgggagccaacgttctttgtcccattg

SEQ ID NO: 7167 - DNA, 40 bp, Artificial Sequence
  Description of Artificial Sequence: Synthetic primer
tgttaaagttcatggcttttgtgttttaccttaattattc

SEQ ID NO: 7168 - DNA, 40 bp, Artificial Sequence
  Description of Artificial Sequence: Synthetic primer
ttcaagcacagggtagaatattgggctgagtaacacttgc

SEQ ID NO: 7169 - DNA, 40 bp, Artificial Sequence
  Description of Artificial Sequence: Synthetic primer
taaggtcacacagccagtcaacagagacctaatccagagg

SEQ ID NO: 7170 - DNA, 40 bp, Artificial Sequence
  Description of Artificial Sequence: Synthetic primer
gtgtcctttggactgctcaggcacgaccccattatctgtc

SEQ ID NO: 7171 - DNA, 40 bp, Artificial Sequence
  Description of Artificial Sequence: Synthetic primer
tataattctaaaatatgtgtatctctaatagctaaaattc

SEQ ID NO: 7172 - DNA, 40 bp, Artificial Sequence
  Description of Artificial Sequence: Synthetic primer
acagcaaaatcatccttgtattcattgttttcttataccc

SEQ ID NO: 7173 - DNA, 40 bp, Artificial Sequence
  Description of Artificial Sequence: Synthetic primer
aaattaagggcaaaggataagacccttctattagtaacac

SEQ ID NO: 7174 - DNA, 40 bp, Artificial Sequence
  Description of Artificial Sequence: Synthetic primer
tggtggtgctggagctggcaggatgctggctgagcatggc

SEQ ID NO: 7175 - DNA, 40 bp, Artificial Sequence
  Description of Artificial Sequence: Synthetic primer
ccaaatgcattacttttagattattaacatattcttttac

SEQ ID NO: 7176 - DNA, 40 bp, Artificial Sequence
  Description of Artificial Sequence: Synthetic primer
tagtaattccaaattattaacatctgtttttggttttatg

SEQ ID NO: 7177 - DNA, 40 bp, Artificial Sequence
  Description of Artificial Sequence: Synthetic primer
tggaatcaaagcagcctatgtctctgaaccattttcattc

SEQ ID NO: 7178 - DNA, 40 bp, Artificial Sequence
  Description of Artificial Sequence: Synthetic primer
atgccagtgaaagggaaacagagggtatacagatgttctg

SEQ ID NO: 7179 - DNA, 40 bp, Artificial Sequence
  Description of Artificial Sequence: Synthetic primer
aggatttccccagatttgcaaatattttctttcctatttc

SEQ ID NO: 7180 - DNA, 40 bp, Artificial Sequence
  Description of Artificial Sequence: Synthetic primer
ttgagtaataactcccaactcactggtcctctaaacctgc

SEQ ID NO: 7181 - DNA, 40 bp, Artificial Sequence
  Description of Artificial Sequence: Synthetic primer
ctgactcttaagttcatttcattttctagaatgttctttg

SEQ ID NO: 7182 - DNA, 40 bp, Artificial Sequence
  Description of Artificial Sequence: Synthetic primer
caggaatgaacggtcacaccctccgtccaggccgctgctg

SEQ ID NO: 7183 - DNA, 40 bp, Artificial Sequence
  Description of Artificial Sequence: Synthetic primer
ttcccaaggccccacgctccttgcccagcattgtcctcag

SEQ ID NO: 7184 - DNA, 40 bp, Artificial Sequence
  Description of Artificial Sequence: Synthetic primer
gtcagtgaagtcatgggctgcttgtcctgtgctctctccc

SEQ ID NO: 7185 - DNA, 40 bp, Artificial Sequence
  Description of Artificial Sequence: Synthetic primer
ggggcttacttcaccttggaggccaccagcatgacctctc

SEQ ID NO: 7186 - DNA, 40 bp, Artificial Sequence
  Description of Artificial Sequence: Synthetic primer
cccaggcagggcccctctggttccacgtccctgtccttgc

SEQ ID NO: 7187 - DNA, 40 bp, Artificial Sequence
  Description of Artificial Sequence: Synthetic primer
caacaaatgtgaacggaatacacgtctctcttatctctgc

SEQ ID NO: 7188 - DNA, 40 bp, Artificial Sequence
  Description of Artificial Sequence: Synthetic primer
agattttgtttttctttatacaagcaactgaacctgtgac

SEQ ID NO: 7189 - DNA, 40 bp, Artificial Sequence
  Description of Artificial Sequence: Synthetic primer
cctccctgggcacccctgacctcacgcagatgaggctgac

SEQ ID NO: 7190 - DNA, 40 bp, Artificial Sequence
  Description of Artificial Sequence: Synthetic primer
agcccatcacagaccctcagggaccaggagaccccctcag

SEQ ID NO: 7191 - DNA, 40 bp, Artificial Sequence
  Description of Artificial Sequence: Synthetic primer
agaatttgttgtcattgagtgtttgtttcctctgtgagtg

SEQ ID NO: 7192 - DNA, 40 bp, Artificial Sequence
  Description of Artificial Sequence: Synthetic primer
caccgtccactttgaaagaaaagcaccggtgggaaaggtc

SEQ ID NO: 7193 - DNA, 40 bp, Artificial Sequence
  Description of Artificial Sequence: Synthetic primer
cttgcttaaaatactgtcctgcagaagaaatagaaaaatg

SEQ ID NO: 7194 - DNA, 40 bp, Artificial Sequence
  Description of Artificial Sequence: Synthetic primer
aatgaaatcttaattttaaaaaatttctctcttatgcttg

SEQ ID NO: 7195 - DNA, 40 bp, Artificial Sequence
  Description of Artificial Sequence: Synthetic primer
atagtttttatagttaaagtctttctttttattgttttac

SEQ ID NO: 7196 - DNA, 40 bp, Artificial Sequence
  Description of Artificial Sequence: Synthetic primer
atttcatcatgaatgcaaactaaaatagaaaatattaaaa

SEQ ID NO: 7197 - DNA, 40 bp, Artificial Sequence
  Description of Artificial Sequence: Synthetic primer
agaatgtctacccaataccagtacttgaaaactaacgatg

SEQ ID NO: 7198 - DNA, 40 bp, Artificial Sequence
  Description of Artificial Sequence: Synthetic primer
gtatactcttctactttttagcttcaagcattctgacatg

SEQ ID NO: 7199 - DNA, 40 bp, Artificial Sequence
  Description of Artificial Sequence: Synthetic primer
tcatgtattaaaagatactaactatggggcttgttgtcac

SEQ ID NO: 7200 - DNA, 40 bp, Artificial Sequence
  Description of Artificial Sequence: Synthetic primer
aattccataattttgggaaaaggagaaatgcaaatgtaac

SEQ ID NO: 7201 - DNA, 40 bp, Artificial Sequence
  Description of Artificial Sequence: Synthetic primer
gattcctttacttgaaccattcatgtttaattcttttctc

SEQ ID NO: 7202 - DNA, 40 bp, Artificial Sequence
  Description of Artificial Sequence: Synthetic primer
catgcattcattcacccatatttattgagtgcaagtcctc

SEQ ID NO: 7203 - DNA, 40 bp, Artificial Sequence
  Description of Artificial Sequence: Synthetic primer
ctcactggcacagtgcagacgagcttgacatcagaaaaac

SEQ ID NO: 7204 - DNA, 40 bp, Artificial Sequence
  Description of Artificial Sequence: Synthetic primer
tgatgagaaaacagcttctgcatagtagctaatgcttatg

SEQ ID NO: 7205 - DNA, 40 bp, Artificial Sequence
  Description of Artificial Sequence: Synthetic primer
atagtaatatcaatataaagttagattttttttttttccc

SEQ ID NO: 7206 - DNA, 40 bp, Artificial Sequence
  Description of Artificial Sequence: Synthetic primer
tcgaactgaagaataatgagtctttaaaaggccggcagac

SEQ ID NO: 7207 - DNA, 40 bp, Artificial Sequence
  Description of Artificial Sequence: Synthetic primer
ccaaagtggtatgagaaagctctgaacttgaaagactaac

SEQ ID NO: 7208 - DNA, 40 bp, Artificial Sequence
  Description of Artificial Sequence: Synthetic primer
ttaatgcataaatcacatggattggttgtttcttttacag

SEQ ID NO: 7209 - DNA, 40 bp, Artificial Sequence
  Description of Artificial Sequence: Synthetic primer
tcagtacaaagttgaggtagtgacatgaaaacctattaag

SEQ ID NO: 7210 - DNA, 40 bp, Artificial Sequence
  Description of Artificial Sequence: Synthetic primer
agagcaattggcacttaagttgctttatctaggtgtgatg

SEQ ID NO: 7211 - DNA, 40 bp, Artificial Sequence
  Description of Artificial Sequence: Synthetic primer
gggctgaaagtgcctgctgaccccgagtccagccccagtg

SEQ ID NO: 7212 - DNA, 40 bp, Artificial Sequence
  Description of Artificial Sequence: Synthetic primer
ggcatgagccactgcgcctggcctgacacgcattcttatc

SEQ ID NO: 7213 - DNA, 40 bp, Artificial Sequence
  Description of Artificial Sequence: Synthetic primer
tgaggctctgggctgggtcatctcatgccagtctctgctc

SEQ ID NO: 7214 - DNA, 40 bp, Artificial Sequence
  Description of Artificial Sequence: Synthetic primer
aggggttggggaagaaacgtgagggactcagcaggaagcc

SEQ ID NO: 7215 - DNA, 40 bp, Artificial Sequence
  Description of Artificial Sequence: Synthetic primer
gccctcagacccagcctgcggggtgccacggcagccactt

SEQ ID NO: 7216 - DNA, 40 bp, Artificial Sequence
  Description of Artificial Sequence: Synthetic primer
gttgtccttctcctccccgcttaggtcctggctataagtc

SEQ ID NO: 7217 - DNA, 40 bp, Artificial Sequence
  Description of Artificial Sequence: Synthetic primer
taagaaatgtgaaggcatgatgataaactcacaaaagatg

SEQ ID NO: 7218 - DNA, 40 bp, Artificial Sequence
  Description of Artificial Sequence: Synthetic primer
catctgatgctgtcacaaagaataagagtaggggattatc

SEQ ID NO: 7219 - DNA, 40 bp, Artificial Sequence
  Description of Artificial Sequence: Synthetic primer
aatacaaattatttgaggggccacatttcttttcattcta

SEQ ID NO: 7220 - DNA, 40 bp, Artificial Sequence
  Description of Artificial Sequence: Synthetic primer
agaaaacttatcatctcccacagagacagaacatgagaag

SEQ ID NO: 7221 - DNA, 40 bp, Artificial Sequence
  Description of Artificial Sequence: Synthetic primer
gttaaacaaacagggaaatagatgtctgaccaatttcttg

SEQ ID NO: 7222 - DNA, 40 bp, Artificial Sequence
  Description of Artificial Sequence: Synthetic primer
tgttttttgtttgtcatccaggcccactaatctaaacatc

SEQ ID NO: 7223 - DNA, 40 bp, Artificial Sequence
  Description of Artificial Sequence: Synthetic primer
aggttgctgcttccatgtgtcataaagacttaaaatttgc

SEQ ID NO: 7224 - DNA, 40 bp, Artificial Sequence
  Description of Artificial Sequence: Synthetic primer
tctggcagctataatgagaataataaagtatatggtgatg

SEQ ID NO: 7225 - DNA, 40 bp, Artificial Sequence
  Description of Artificial Sequence: Synthetic primer
tggagtgtctatggccacaaaattgacatttatcctttcc

SEQ ID NO: 7226 - DNA, 40 bp, Artificial Sequence
  Description of Artificial Sequence: Synthetic primer
tcacagttaatatgacattccgaaaagaagaactgatccc

SEQ ID NO: 7227 - DNA, 40 bp, Artificial Sequence
  Description of Artificial Sequence: Synthetic primer
ttgcaatgttctcctgcccaaggcttcttctactggtcac

SEQ ID NO: 7228 - DNA, 40 bp, Artificial Sequence
  Description of Artificial Sequence: Synthetic primer
ctgcggaaccatcctcagctacattgtgcaggacctgatg

SEQ ID NO: 7229 - DNA, 40 bp, Artificial Sequence
  Description of Artificial Sequence: Synthetic primer
tcacgcacgttatcgtaactggcagaggaagtgtgctcag

SEQ ID NO: 7230 - DNA, 40 bp, Artificial Sequence
  Description of Artificial Sequence: Synthetic primer
ctgagtgtgcagcagggaggtgtctgccaaattaaagagc

SEQ ID NO: 7231 - DNA, 40 bp, Artificial Sequence
  Description of Artificial Sequence: Synthetic primer
aacaatatgtattccaaaaagttacttcctgatttctttg

SEQ ID NO: 7232 - DNA, 40 bp, Artificial Sequence
  Description of Artificial Sequence: Synthetic primer
taaacctccatatacatcaaacataaagttaaacaaaaac

SEQ ID NO: 7233 - DNA, 40 bp, Artificial Sequence
  Description of Artificial Sequence: Synthetic primer
cctgtagaaagagactgtctagtatgagggaacacacttg

SEQ ID NO: 7234 - DNA, 40 bp, Artificial Sequence
  Description of Artificial Sequence: Synthetic primer
ggttatcataaaccccatttgacttcatgcctctactctc

SEQ ID NO: 7235 - DNA, 40 bp, Artificial Sequence
  Description of Artificial Sequence: Synthetic primer
taaaccatggagggttttgaagaagtgggtcatggataag

SEQ ID NO: 7236 - DNA, 40 bp, Artificial Sequence
  Description of Artificial Sequence: Synthetic primer
ccccggcttgccttgcaggccgccgcccaccgcccgccgc

SEQ ID NO: 7237 - DNA, 40 bp, Artificial Sequence
  Description of Artificial Sequence: Synthetic primer
tcttctacaaaataaacacgaacacaacgaaggtaaaatg

SEQ ID NO: 7238 - DNA, 40 bp, Artificial Sequence
  Description of Artificial Sequence: Synthetic primer
ttttcagattcctcaaaaattatgcatgttttcactttgc

SEQ ID NO: 7239 - DNA, 40 bp, Artificial Sequence
  Description of Artificial Sequence: Synthetic primer
tttacttcttaggaacaccttttgtgttattagggttttg

SEQ ID NO: 7240 - DNA, 40 bp, Artificial Sequence
  Description of Artificial Sequence: Synthetic primer
tcggctcggatttcctggtcttggagctgttttcttgtgc

SEQ ID NO: 7241 - DNA, 40 bp, Artificial Sequence
  Description of Artificial Sequence: Synthetic primer
cacagattcagaccagtgctacctgagagagactttggag

SEQ ID NO: 7242 - DNA, 40 bp, Artificial Sequence
  Description of Artificial Sequence: Synthetic primer
accaagtttacttttagttattttcaaacggtctggtttt

SEQ ID NO: 7243 - DNA, 40 bp, Artificial Sequence
  Description of Artificial Sequence: Synthetic primer
cactacctctagattctctggctccagaatccttccttac

SEQ ID NO: 7244 - DNA, 40 bp, Artificial Sequence
  Description of Artificial Sequence: Synthetic primer
gggagtgggtatagaaacataaacaacttcaagtcatctc

SEQ ID NO: 7245 - DNA, 40 bp, Artificial Sequence
  Description of Artificial Sequence: Synthetic primer
gagtccgatgacgctggagtggccatgcaatttctgaagg

SEQ ID NO: 7246 - DNA, 40 bp, Artificial Sequence
  Description of Artificial Sequence: Synthetic primer
tgtgtacatcatatactgcttcctattgtattaaatttct

SEQ ID NO: 7247 - DNA, 40 bp, Artificial Sequence
  Description of Artificial Sequence: Synthetic primer
cacaattactctgaagaaaagtactttcataaaaaaattg

SEQ ID NO: 7248 - DNA, 40 bp, Artificial Sequence
  Description of Artificial Sequence: Synthetic primer
acaggcccaggtgccacctgatagtgagctcaccccctgc

SEQ ID NO: 7249 - DNA, 40 bp, Artificial Sequence
  Description of Artificial Sequence: Synthetic primer
acccgccccacagcttgggcagccagcacaccccgctgag

SEQ ID NO: 7250 - DNA, 40 bp, Artificial Sequence
  Description of Artificial Sequence: Synthetic primer
ggtatacaattattttgaggatactaaatgtcatgaatag

SEQ ID NO: 7251 - DNA, 40 bp, Artificial Sequence
  Description of Artificial Sequence: Synthetic primer
tttttctttattggctcaaatatatgcaaaattgaaaaaa

SEQ ID NO: 7252 - DNA, 40 bp, Artificial Sequence
  Description of Artificial Sequence: Synthetic primer
aagtgtacattcccatgggaatttcagaaataaaggcgcg

SEQ ID NO: 7253 - DNA, 40 bp, Artificial Sequence
  Description of Artificial Sequence: Synthetic primer
taagctcattctttggatttcaagtggctcagctgatttg

SEQ ID NO: 7254 - DNA, 40 bp, Artificial Sequence
  Description of Artificial Sequence: Synthetic primer
ttgtcatcaagctacagtctttttgatgaggtgattttcg

SEQ ID NO: 7255 - DNA, 40 bp, Artificial Sequence
  Description of Artificial Sequence: Synthetic primer
attttacttgagttttacatttttaatgctcctttctttg

SEQ ID NO: 7256 - DNA, 40 bp, Artificial Sequence
  Description of Artificial Sequence: Synthetic primer
catggagccattcttacggtggacatcaaaaatcatgtgg

SEQ ID NO: 7257 - DNA, 40 bp, Artificial Sequence
  Description of Artificial Sequence: Synthetic primer
gccagacttggaaatacatggaaaacagaaacatcacttg

SEQ ID NO: 7258 - DNA, 40 bp, Artificial Sequence
  Description of Artificial Sequence: Synthetic primer
ataatgaaacattttacatgaggttttaatatttttgctc

SEQ ID NO: 7259 - DNA, 40 bp, Artificial Sequence
  Description of Artificial Sequence: Synthetic primer
cttctctaccctaaatgtgaagtctttgttgtgtcagcaa

SEQ ID NO: 7260 - DNA, 40 bp, Artificial Sequence
  Description of Artificial Sequence: Synthetic primer
gagctgttttcaaggacaacattgttaagtgctccatttc

SEQ ID NO: 7261 - DNA, 40 bp, Artificial Sequence
  Description of Artificial Sequence: Synthetic primer
aaagctgtgcatgtccctgtctcccgcgggccctctgatc

SEQ ID NO: 7262 - DNA, 40 bp, Artificial Sequence
  Description of Artificial Sequence: Synthetic primer
gaacaataaaggcaaattcttcctgacctctaccactagg

SEQ ID NO: 7263 - DNA, 40 bp, Artificial Sequence
  Description of Artificial Sequence: Synthetic primer
cttggaactctgagaggttaaagtatttttattattttgc

SEQ ID NO: 7264 - DNA, 40 bp, Artificial Sequence
  Description of Artificial Sequence: Synthetic primer
gctccaccccaagccacttctcacatcaccccttcttccc

SEQ ID NO: 7265 - DNA, 40 bp, Artificial Sequence
  Description of Artificial Sequence: Synthetic primer
aaacttcttttatattatatatgatttaaggcttctttcc

SEQ ID NO: 7266 - DNA, 40 bp, Artificial Sequence
  Description of Artificial Sequence: Synthetic primer
tagcacatttgtttcataaaacctaaaaaaatcaagtatg

SEQ ID NO: 7267 - DNA, 40 bp, Artificial Sequence
  Description of Artificial Sequence: Synthetic primer
aaatatacaaccagttgataagactgtactgcagatgctc

SEQ ID NO: 7268 - DNA, 40 bp, Artificial Sequence
  Description of Artificial Sequence: Synthetic primer
tgaccatttggagaaactcctctggaaaattctgattctg

SEQ ID NO: 7269 - DNA, 40 bp, Artificial Sequence
  Description of Artificial Sequence: Synthetic primer
acgaagctggctcgagggcgcccagtcgtccgccgcagag

SEQ ID NO: 7270 - DNA, 40 bp, Artificial Sequence
  Description of Artificial Sequence: Synthetic primer
ccgcagcgcgccccgggttccgaacgcacggccgccgccc

SEQ ID NO: 7271 - DNA, 40 bp, Artificial Sequence
  Description of Artificial Sequence: Synthetic primer
gggccggacgccgcccactcccgcggcctgccgcgcccac

SEQ ID NO: 7272 - DNA, 40 bp, Artificial Sequence
  Description of Artificial Sequence: Synthetic primer
ggaaggcagcgcgggctcgggcgcagggagccgccgccgg

SEQ ID NO: 7273 - DNA, 40 bp, Artificial Sequence
  Description of Artificial Sequence: Synthetic primer
cattgtttttataatttttcaccacatgatttttcttctc

SEQ ID NO: 7274 - DNA, 40 bp, Artificial Sequence
  Description of Artificial Sequence: Synthetic primer
ggacccattagaaccaactccataaactaaacagaaagcg

SEQ ID NO: 7275 - DNA, 40 bp, Artificial Sequence
  Description of Artificial Sequence: Synthetic primer
ccccagccctggcccctcttctgctcctatgtcataaacc

SEQ ID NO: 7276 - DNA, 40 bp, Artificial Sequence
  Description of Artificial Sequence: Synthetic primer
gcttcccagcataccaaggaccccaaccttccctacactc

SEQ ID NO: 7277 - DNA, 40 bp, Artificial Sequence
  Description of Artificial Sequence: Synthetic primer
ggcattgatggcaaatcattaatgtatttgttctttcttt

SEQ ID NO: 7278 - DNA, 40 bp, Artificial Sequence
  Description of Artificial Sequence: Synthetic primer
tgtaagaggtttttcttatctcttaaaatgtttctgctac

SEQ ID NO: 7279 - DNA, 40 bp, Artificial Sequence
  Description of Artificial Sequence: Synthetic primer
aggcctctcacatattgaaatgtacttgtccatctttctc

SEQ ID NO: 7280 - DNA, 40 bp, Artificial Sequence
  Description of Artificial Sequence: Synthetic primer
acagacacgtgaaggcatgaggctcagtggcaggaggagg

SEQ ID NO: 7281 - DNA, 40 bp, Artificial Sequence
  Description of Artificial Sequence: Synthetic primer
tagtccactatcacatcattgaagtcaacatgcatctctc

SEQ ID NO: 7282 - DNA, 40 bp, Artificial Sequence
  Description of Artificial Sequence: Synthetic primer
agcctggtcaagcccacactggaggagagggtgagattag

SEQ ID NO: 7283 - DNA, 40 bp, Artificial Sequence
  Description of Artificial Sequence: Synthetic primer
gggaaaaaaagaaaccatcagaattgataagattaggaga

SEQ ID NO: 7284 - DNA, 40 bp, Artificial Sequence
  Description of Artificial Sequence: Synthetic primer
tttaagttgaagtgagtgaatattcaagataattaaatgc

SEQ ID NO: 7285 - DNA, 40 bp, Artificial Sequence
  Description of Artificial Sequence: Synthetic primer
gatctggaatccggtttgttgtttgatgatatgggcagtc

SEQ ID NO: 7286 - DNA, 40 bp, Artificial Sequence
  Description of Artificial Sequence: Synthetic primer
ttatttatctttcttatatctcttctggcccccgatacgc

SEQ ID NO: 7287 - DNA, 40 bp, Artificial Sequence
  Description of Artificial Sequence: Synthetic primer
gactagagagcagggctggacacaggtccctcacagtcac

SEQ ID NO: 7288 - DNA, 40 bp, Artificial Sequence
  Description of Artificial Sequence: Synthetic primer
ccgctggacagcccagcggtgccccgcggtaaatgcttac

SEQ ID NO: 7289 - DNA, 40 bp, Artificial Sequence
  Description of Artificial Sequence: Synthetic primer
gggtcccgggtctgtggtatgtgcatccattgtgtctgtc

SEQ ID NO: 7290 - DNA, 40 bp, Artificial Sequence
  Description of Artificial Sequence: Synthetic primer
ggcacctcctgcccctgctgccaggccccgcccccctccg

SEQ ID NO: 7291 - DNA, 40 bp, Artificial Sequence
  Description of Artificial Sequence: Synthetic primer
caaaccagaggaaagcgaaaatgggaacccctgcccgccc

SEQ ID NO: 7292 - DNA, 40 bp, Artificial Sequence
  Description of Artificial Sequence: Synthetic primer
cccaggacgtgtccttctgccccgcagcactgacctcatg

SEQ ID NO: 7293 - DNA, 40 bp, Artificial Sequence
  Description of Artificial Sequence: Synthetic primer
ggcatgtttcaggaaattcagagtattgctccccacacag

SEQ ID NO: 7294 - DNA, 40 bp, Artificial Sequence
  Description of Artificial Sequence: Synthetic primer
cctgcatgtgaccttttaattatatcctataaatcattca

SEQ ID NO: 7295 - DNA, 40 bp, Artificial Sequence
  Description of Artificial Sequence: Synthetic primer
tgtattctcttttatgtctctacctcctacatcttatctc

SEQ ID NO: 7296 - DNA, 40 bp, Artificial Sequence
  Description of Artificial Sequence: Synthetic primer
cagccaactcctcctttttctaaatttccttagcacctcc

SEQ ID NO: 7297 - DNA, 40 bp, Artificial Sequence
  Description of Artificial Sequence: Synthetic primer
aggctttagcagctggtgtcagggcctcaactgccaaaag

SEQ ID NO: 7298 - DNA, 40 bp, Artificial Sequence
  Description of Artificial Sequence: Synthetic primer
caaggggaggaaggtccagggcagtagtaggaggacttac

SEQ ID NO: 7299 - DNA, 40 bp, Artificial Sequence
  Description of Artificial Sequence: Synthetic primer
gaagtagcacaggaataaatacacagacacacagaacacc

SEQ ID NO: 7300 - DNA, 40 bp, Artificial Sequence
  Description of Artificial Sequence: Synthetic primer
caatgaatctgatgtttgtttctttgtaaaactggattac

SEQ ID NO: 7301 - DNA, 40 bp, Artificial Sequence
  Description of Artificial Sequence: Synthetic primer
gatgtgtcacctgacgccagcacccctccctgccccactc

SEQ ID NO: 7302 - DNA, 40 bp, Artificial Sequence
  Description of Artificial Sequence: Synthetic primer
gtccctgagaaggcaggctgtggggcccaggcgggacacc

SEQ ID NO: 7303 - DNA, 40 bp, Artificial Sequence
  Description of Artificial Sequence: Synthetic primer
caaagatttcttaaaaattggctcaaaatatataacactc

SEQ ID NO: 7304 - DNA, 40 bp, Artificial Sequence
  Description of Artificial Sequence: Synthetic primer
ataatatgaaatttttctaatcaccgaatttatatttttc

SEQ ID NO: 7305 - DNA, 40 bp, Artificial Sequence
  Description of Artificial Sequence: Synthetic primer
gggcaaaacaaatcagacagaaatgatatatgaatgtaaa

SEQ ID NO: 7306 - DNA, 40 bp, Artificial Sequence
  Description of Artificial Sequence: Synthetic primer
tttgaccttttatgttgctgagttttacacatctattttc

SEQ ID NO: 7307 - DNA, 40 bp, Artificial Sequence
  Description of Artificial Sequence: Synthetic primer
aattgattgttaaacatttacattttacattacatttttt

SEQ ID NO: 7308 - DNA, 40 bp, Artificial Sequence
  Description of Artificial Sequence: Synthetic primer
ttcacagtgacctaaggaagcttctaataaaatactcatc

SEQ ID NO: 7309 - DNA, 40 bp, Artificial Sequence
  Description of Artificial Sequence: Synthetic primer
cttgggccaggccaggatacttggtgttaagcctgctctc

SEQ ID NO: 7310 - DNA, 40 bp, Artificial Sequence
  Description of Artificial Sequence: Synthetic primer
tctgacaagggtcagcacgttcccactggccctctttttg

SEQ ID NO: 7311 - DNA, 40 bp, Artificial Sequence
  Description of Artificial Sequence: Synthetic primer
taccctgaccacctccaccctgaccccggccgcccccaag

SEQ ID NO: 7312 - DNA, 40 bp, Artificial Sequence
  Description of Artificial Sequence: Synthetic primer
gtcctggcagccaggacacagctgccctctggagaagtgg

SEQ ID NO: 7313 - DNA, 40 bp, Artificial Sequence
  Description of Artificial Sequence: Synthetic primer
ccacaaaactgtcttttaacagtctttacatttggttaat

SEQ ID NO: 7314 - DNA, 40 bp, Artificial Sequence
  Description of Artificial Sequence: Synthetic primer
acacaatgtacactaaagtaaataataatgatgtaaaata

SEQ ID NO: 7315 - DNA, 40 bp, Artificial Sequence
  Description of Artificial Sequence: Synthetic primer
gtaggggcacacgggccctgatgggacttacttctttgac

SEQ ID NO: 7316 - DNA, 40 bp, Artificial Sequence
  Description of Artificial Sequence: Synthetic primer
caagattgtggctcactcccatgacaccaacctcaatcag

SEQ ID NO: 7317 - DNA, 40 bp, Artificial Sequence
  Description of Artificial Sequence: Synthetic primer
tgaggctctgccgaggggactggctgtgaaggatgagttc

SEQ ID NO: 7318 - DNA, 40 bp, Artificial Sequence
  Description of Artificial Sequence: Synthetic primer
tgtgtatttatctctctcagtctctcatacaagcatacac

SEQ ID NO: 7319 - DNA, 40 bp, Artificial Sequence
  Description of Artificial Sequence: Synthetic primer
tatttcctgaaaaaaattcgttaatagtatgtcttatctc

SEQ ID NO: 7320 - DNA, 40 bp, Artificial Sequence
  Description of Artificial Sequence: Synthetic primer
ttgattttgaaaaactgcattcgttttctgtaattctttc

SEQ ID NO: 7321 - DNA, 40 bp, Artificial Sequence
  Description of Artificial Sequence: Synthetic primer
gcaaacagggtgcttctatgggtgccggtggtcagggttg

SEQ ID NO: 7322 - DNA, 40 bp, Artificial Sequence
  Description of Artificial Sequence: Synthetic primer
cccaacccaaggtgggagaagaatggggcccaggctgcag

SEQ ID NO: 7323 - DNA, 40 bp, Artificial Sequence
  Description of Artificial Sequence: Synthetic primer
ggggcctcctttaagggtcttgccttcttcctcccctgtc

SEQ ID NO: 7324 - DNA, 40 bp, Artificial Sequence
  Description of Artificial Sequence: Synthetic primer
tcccatgctgggcaggaggggcctcacccgccccccgccc

SEQ ID NO: 7325 - DNA, 40 bp, Artificial Sequence
  Description of Artificial Sequence: Synthetic primer
ctgttttgcagacttatttaccaagcattggaggaatatc

SEQ ID NO: 7326 - DNA, 40 bp, Artificial Sequence
  Description of Artificial Sequence: Synthetic primer
actttctcggtgtaatttataaagttatataaaatttgtc

SEQ ID NO: 7327 - DNA, 40 bp, Artificial Sequence
  Description of Artificial Sequence: Synthetic primer
gctttaatgattaagcttagcaataacagttatgttatac

SEQ ID NO: 7328 - DNA, 40 bp, Artificial Sequence
  Description of Artificial Sequence: Synthetic primer
cttaaaaaacaataagcgatatgagaacatgtttttgacc

SEQ ID NO: 7329 - DNA, 40 bp, Artificial Sequence
  Description of Artificial Sequence: Synthetic primer
cagctgctaggaggcccagcagggacagaaaaaggtgagc

SEQ ID NO: 7330 - DNA, 40 bp, Artificial Sequence
  Description of Artificial Sequence: Synthetic primer
gctgctggtcctgctcatgcttccgtctgccccccgaccc

SEQ ID NO: 7331 - DNA, 40 bp, Artificial Sequence
  Description of Artificial Sequence: Synthetic primer
ggctggggcctggagctgggtgtgcaggtcattctctctc

SEQ ID NO: 7332 - DNA, 40 bp, Artificial Sequence
  Description of Artificial Sequence: Synthetic primer
gaggagcgctcttcaggtcatccacgctggcctgtagccc

SEQ ID NO: 7333 - DNA, 40 bp, Artificial Sequence
  Description of Artificial Sequence: Synthetic primer
tgtttaggcttttatttcagagttcacagaattaactttc

SEQ ID NO: 7334 - DNA, 40 bp, Artificial Sequence
  Description of Artificial Sequence: Synthetic primer
tcctacacaccatcaacagttcccaaagtctctagaatac

SEQ ID NO: 7335 - DNA, 40 bp, Artificial Sequence
  Description of Artificial Sequence: Synthetic primer
tgcctgccccaggctacctgtcctgcctccctccctcagc

SEQ ID NO: 7336 - DNA, 40 bp, Artificial Sequence
  Description of Artificial Sequence: Synthetic primer
ccagggtttgaagagtggttgggtttccaccctgtctggg

SEQ ID NO: 7337 - DNA, 40 bp, Artificial Sequence
  Description of Artificial Sequence: Synthetic primer
atttactcaggtcttttagaaagcctagatgtagggcaaa

SEQ ID NO: 7338 - DNA, 40 bp, Artificial Sequence
  Description of Artificial Sequence: Synthetic primer
tctgaatgtacctttaaatttattttccttactcttgtag

SEQ ID NO: 7339 - DNA, 40 bp, Artificial Sequence
  Description of Artificial Sequence: Synthetic primer
aacaaaccttcctgttaacaaatgaaacatgacatagacg

SEQ ID NO: 7340 - DNA, 40 bp, Artificial Sequence
  Description of Artificial Sequence: Synthetic primer
actggagactcaactcatgtgaatgatacacatgcacttc

SEQ ID NO: 7341 - DNA, 40 bp, Artificial Sequence
  Description of Artificial Sequence: Synthetic primer
tgtctctgaagctcacgcatgtcatttaatttactcatac

SEQ ID NO: 7342 - DNA, 40 bp, Artificial Sequence
  Description of Artificial Sequence: Synthetic primer
gatataaagcccaggtttaaatgatgccctttccaagttg

SEQ ID NO: 7343 - DNA, 40 bp, Artificial Sequence
  Description of Artificial Sequence: Synthetic primer
taaacttcagccaattcaattaggcaaaaatctgggactg

SEQ ID NO: 7344 - DNA, 40 bp, Artificial Sequence
  Description of Artificial Sequence: Synthetic primer
ccaagaccatcaagtttgtgtttttgagctgccttctttc

SEQ ID NO: 7345 - DNA, 40 bp, Artificial Sequence
  Description of Artificial Sequence: Synthetic primer
aaaaaaaaattgggaaggggtctgggttgaggtacaaagg

SEQ ID NO: 7346 - DNA, 40 bp, Artificial Sequence
  Description of Artificial Sequence: Synthetic primer
gcacacactctcttgcgctgatggacaggagtgcgtggtg

SEQ ID NO: 7347 - DNA, 40 bp, Artificial Sequence
  Description of Artificial Sequence: Synthetic primer
ctaacctttccttttctttacctcccctcccaaccccatc

SEQ ID NO: 7348 - DNA, 40 bp, Artificial Sequence
  Description of Artificial Sequence: Synthetic primer
ccccagggtgtgtgtgggagagcggggctcccaggggacc

SEQ ID NO: 7349 - DNA, 40 bp, Artificial Sequence
  Description of Artificial Sequence: Synthetic primer
caggtttaacatcctgcgccttctctcctgcctcctccac

SEQ ID NO: 7350 - DNA, 40 bp, Artificial Sequence
  Description of Artificial Sequence: Synthetic primer
aacaacaaaaccctgtaagaaacgcctcactggctcatac

SEQ ID NO: 7351 - DNA, 40 bp, Artificial Sequence
  Description of Artificial Sequence: Synthetic primer
ttatattcttttatgcttaatactttttcttccccttttc

SEQ ID NO: 7352 - DNA, 40 bp, Artificial Sequence
  Description of Artificial Sequence: Synthetic primer
agagcaactgtgttgagtaagcatagggagaaaaagagcc

SEQ ID NO: 7353 - DNA, 40 bp, Artificial Sequence
  Description of Artificial Sequence: Synthetic primer
aaatctcttggttaataaacattaaagaagctgtagtgac

SEQ ID NO: 7354 - DNA, 40 bp, Artificial Sequence
  Description of Artificial Sequence: Synthetic primer
gtcaaggtatgggcttccagtgtggtagactctcacttac

SEQ ID NO: 7355 - DNA, 40 bp, Artificial Sequence
  Description of Artificial Sequence: Synthetic primer
cggatactccagcgcctgcccctccctcatgagcctcacc

SEQ ID NO: 7356 - DNA, 40 bp, Artificial Sequence
  Description of Artificial Sequence: Synthetic primer
aacttgggaacaattctgtattaatgatctcctaaaccac

SEQ ID NO: 7357 - DNA, 40 bp, Artificial Sequence
  Description of Artificial Sequence: Synthetic primer
tttagtattcatattcttggcaaataattctttttattcc

SEQ ID NO: 7358 - DNA, 40 bp, Artificial Sequence
  Description of Artificial Sequence: Synthetic primer
gatccagcccacgctcttctcactcatatcctcctctttc

SEQ ID NO: 7359 - DNA, 40 bp, Artificial Sequence
  Description of Artificial Sequence: Synthetic primer
gcccagacctgcagccatggggtccttcctgtcctcctag

SEQ ID NO: 7360 - DNA, 40 bp, Artificial Sequence
  Description of Artificial Sequence: Synthetic primer
cagggtctgcataatctgtttaaagatttgtgtactttcc

SEQ ID NO: 7361 - DNA, 40 bp, Artificial Sequence
  Description of Artificial Sequence: Synthetic primer
ggtttaaatgtgtctgaatgtagcaatgactaaaataata

SEQ ID NO: 7362 - DNA, 40 bp, Artificial Sequence
  Description of Artificial Sequence: Synthetic primer
agcagagagcagcactgtttataacatcttgtctctgagc

SEQ ID NO: 7363 - DNA, 40 bp, Artificial Sequence
  Description of Artificial Sequence: Synthetic primer
gagcccttcccggcctggcctaccggccccacccgagacg

SEQ ID NO: 7364 - DNA, 40 bp, Artificial Sequence
  Description of Artificial Sequence: Synthetic primer
tgttacccaagatttttctttaggccaccgagttgattag

SEQ ID NO: 7365 - DNA, 40 bp, Artificial Sequence
  Description of Artificial Sequence: Synthetic primer
gcagaccacacttcctttcactgcaactttgacttgtccc

SEQ ID NO: 7366 - DNA, 40 bp, Artificial Sequence
  Description of Artificial Sequence: Synthetic primer
gttatttgctaatttaaggtgataatattctttatttctc

SEQ ID NO: 7367 - DNA, 40 bp, Artificial Sequence
  Description of Artificial Sequence: Synthetic primer
tcctaaatgaaatgattatactctatttgaaaaaattctg

SEQ ID NO: 7368 - DNA, 40 bp, Artificial Sequence
  Description of Artificial Sequence: Synthetic primer
ttcagcattaaacatttcaaaagtgataaattttaaatac

SEQ ID NO: 7369 - DNA, 40 bp, Artificial Sequence
  Description of Artificial Sequence: Synthetic primer
cttgcatttacttttaaagaagttaactttttctgtttat

SEQ ID NO: 7370 - DNA, 40 bp, Artificial Sequence
  Description of Artificial Sequence: Synthetic primer
cctgttcttcccctgacatcactgagtatccttgtctgtg

SEQ ID NO: 7371 - DNA, 40 bp, Artificial Sequence
  Description of Artificial Sequence: Synthetic primer
tccaggaaagtactatcattaatcagaaagttggatgagc

SEQ ID NO: 7372 - DNA, 40 bp, Artificial Sequence
  Description of Artificial Sequence: Synthetic primer
tgtggagggctctcggcggctcattgacgaacacacacag

SEQ ID NO: 7373 - DNA, 40 bp, Artificial Sequence
  Description of Artificial Sequence: Synthetic primer
cagcagccgctgcccctcccggtccagctcctccacaggg

SEQ ID NO: 7374 - DNA, 40 bp, Artificial Sequence
  Description of Artificial Sequence: Synthetic primer
gggaaacactgcccagccctgaccagccctgtgggtggag

SEQ ID NO: 7375 - DNA, 40 bp, Artificial Sequence
  Description of Artificial Sequence: Synthetic primer
cagagatgtccagagttgcctgagccacttcttggtgttg

SEQ ID NO: 7376 - DNA, 40 bp, Artificial Sequence
  Description of Artificial Sequence: Synthetic primer
ccccaaacgatgaagcctcacttttaccctctcttttaac

SEQ ID NO: 7377 - DNA, 40 bp, Artificial Sequence
  Description of Artificial Sequence: Synthetic primer
atgtcacaaatgactttctgataacaaaactttaagaatc

SEQ ID NO: 7378 - DNA, 40 bp, Artificial Sequence
  Description of Artificial Sequence: Synthetic primer
cccaggccctggaaggttcttctaaccaggcctctttctg

SEQ ID NO: 7379 - DNA, 40 bp, Artificial Sequence
  Description of Artificial Sequence: Synthetic primer
gctttgtgtctaagtaacagtcaaaaagtgaaggacttac

SEQ ID NO: 7380 - DNA, 40 bp, Artificial Sequence
  Description of Artificial Sequence: Synthetic primer
ttcactggtctatgaacaaaactttttaaaacgatgactg

SEQ ID NO: 7381 - DNA, 40 bp, Artificial Sequence
  Description of Artificial Sequence: Synthetic primer
gctaaaaaagaaggaatgttctattattaaactcatcatg

SEQ ID NO: 7382 - DNA, 40 bp, Artificial Sequence
  Description of Artificial Sequence: Synthetic primer
gcatgcaagaatgtttatgtttattttgtttctcccacac

SEQ ID NO: 7383 - DNA, 40 bp, Artificial Sequence
  Description of Artificial Sequence: Synthetic primer
cataccaatttgtacaacagttatctagtaatctcaaaca

SEQ ID NO: 7384 - DNA, 40 bp, Artificial Sequence
  Description of Artificial Sequence: Synthetic primer
gaaatgtgctgctgagcctgaatcttctcttatggttatc

SEQ ID NO: 7385 - DNA, 40 bp, Artificial Sequence
  Description of Artificial Sequence: Synthetic primer
aagactagtgaccaaatctgttatagctaattgccttttg

SEQ ID NO: 7386 - DNA, 40 bp, Artificial Sequence
  Description of Artificial Sequence: Synthetic primer
gccatgagctcggctctgcaccccatccaccccaccttcc

SEQ ID NO: 7387 - DNA, 40 bp, Artificial Sequence
  Description of Artificial Sequence: Synthetic primer
tggtaatattgcgctccatccccaggccccagccctgctc

SEQ ID NO: 7388 - DNA, 40 bp, Artificial Sequence
  Description of Artificial Sequence: Synthetic primer
ggttgctacctgattatatttagtcaataaacttactttc

SEQ ID NO: 7389 - DNA, 40 bp, Artificial Sequence
  Description of Artificial Sequence: Synthetic primer
tctaattttaagtaaaagggaaatagacaactatacctac

SEQ ID NO: 7390 - DNA, 40 bp, Artificial Sequence
  Description of Artificial Sequence: Synthetic primer
atagtagaataactataatgaagcagtttggtgatttgtg

SEQ ID NO: 7391 - DNA, 40 bp, Artificial Sequence
  Description of Artificial Sequence: Synthetic primer
tcaagagaagtttcaagaatcaaaaataagtgaaaaatcc

SEQ ID NO: 7392 - DNA, 40 bp, Artificial Sequence
  Description of Artificial Sequence: Synthetic primer
gtcttaaaattattccgttatataaaacaatcctcagaag

SEQ ID NO: 7393 - DNA, 40 bp, Artificial Sequence
  Description of Artificial Sequence: Synthetic primer
ttttcgtggtacagtattcatgactttgtttttgtttttg

SEQ ID NO: 7394 - DNA, 40 bp, Artificial Sequence
  Description of Artificial Sequence: Synthetic primer
ttgaaagaggatcggtgtgggctaatgattcctttctttg

SEQ ID NO: 7395 - DNA, 40 bp, Artificial Sequence
  Description of Artificial Sequence: Synthetic primer
cacctggcctcaatctccacctggcctcattcttcaagtg

SEQ ID NO: 7396 - DNA, 40 bp, Artificial Sequence
  Description of Artificial Sequence: Synthetic primer
ataacattgacccgtttgttcacactggacttcccttctc

SEQ ID NO: 7397 - DNA, 40 bp, Artificial Sequence
  Description of Artificial Sequence: Synthetic primer
aaaggacgccatgcatcgggcaggggagggtagggatggc

SEQ ID NO: 7398 - DNA, 40 bp, Artificial Sequence
  Description of Artificial Sequence: Synthetic primer
cgccaggccagccagagcttcaggaccagaggccccagac

SEQ ID NO: 7399 - DNA, 40 bp, Artificial Sequence
  Description of Artificial Sequence: Synthetic primer
ctgggtgaaaaggaaaggggaactcacgaccttgctcctc

SEQ ID NO: 7400 - DNA, 40 bp, Artificial Sequence
  Description of Artificial Sequence: Synthetic primer
gctccagcccaccagctccctgagcaggatctcccgcatg

SEQ ID NO: 7401 - DNA, 40 bp, Artificial Sequence
  Description of Artificial Sequence: Synthetic primer
cctccccagccatctagtcttgctgtggctacagaactta

SEQ ID NO: 7402 - DNA, 40 bp, Artificial Sequence
  Description of Artificial Sequence: Synthetic primer
caggcagggccgctgacctccgccctgtccccgcccatcc

SEQ ID NO: 7403 - DNA, 40 bp, Artificial Sequence
  Description of Artificial Sequence: Synthetic primer
catgctccagctgcccgaggctgggttcccacgcccactc

SEQ ID NO: 7404 - DNA, 40 bp, Artificial Sequence
  Description of Artificial Sequence: Synthetic primer
ttccaggacagctggggttgggcggggccaggggcacgta

SEQ ID NO: 7405 - DNA, 40 bp, Artificial Sequence
  Description of Artificial Sequence: Synthetic primer
agggccccagccctccccaaggtcactggcccttcttctg

SEQ ID NO: 7406 - DNA, 40 bp, Artificial Sequence
  Description of Artificial Sequence: Synthetic primer
gtaaggtgcaagtgagtggtacaagagtgcagactcacag

SEQ ID NO: 7407 - DNA, 40 bp, Artificial Sequence
  Description of Artificial Sequence: Synthetic primer
cagttctcagtatattccattttttaaaaaaaatgtacaa

SEQ ID NO: 7408 - DNA, 40 bp, Artificial Sequence
  Description of Artificial Sequence: Synthetic primer
tttgacttaattttgtttcccactccacattaaaagatcc

SEQ ID NO: 7409 - DNA, 40 bp, Artificial Sequence
  Description of Artificial Sequence: Synthetic primer
acaaaaaatgcagaagttacaagaaaaaaactgaaaaatg

SEQ ID NO: 7410 - DNA, 40 bp, Artificial Sequence
  Description of Artificial Sequence: Synthetic primer
taaacctgaaacgtatggcagaatggaaaaataggaaaag

SEQ ID NO: 7411 - DNA, 40 bp, Artificial Sequence
  Description of Artificial Sequence: Synthetic primer
aactttttccttcatcccttattttgtatggattacattt

SEQ ID NO: 7412 - DNA, 40 bp, Artificial Sequence
  Description of Artificial Sequence: Synthetic primer
aaaacatgcactgaagtgatgtttaaatgaaaaggccaac

SEQ ID NO: 7413 - DNA, 40 bp, Artificial Sequence
  Description of Artificial Sequence: Synthetic primer
ctctgtatgagattctgatgttggtttttctttgtttttg

SEQ ID NO: 7414 - DNA, 40 bp, Artificial Sequence
  Description of Artificial Sequence: Synthetic primer
gggtgtgtggtctcccataccctctcagcgtacccttgtc

SEQ ID NO: 7415 - DNA, 40 bp, Artificial Sequence
  Description of Artificial Sequence: Synthetic primer
aggggtttgctccggagagacctgcaaagagcccaggtgc

SEQ ID NO: 7416 - DNA, 40 bp, Artificial Sequence
  Description of Artificial Sequence: Synthetic primer
cccctcttaaacccaatgcccagacccaaagggcagtaag

SEQ ID NO: 7417 - DNA, 40 bp, Artificial Sequence
  Description of Artificial Sequence: Synthetic primer
aggggtccctaggaggaacctcagtgccccttcttcttcc

SEQ ID NO: 7418 - DNA, 40 bp, Artificial Sequence
  Description of Artificial Sequence: Synthetic primer
aggaagcattgcttttcatgccagagaggacttagagtgg

SEQ ID NO: 7419 - DNA, 40 bp, Artificial Sequence
  Description of Artificial Sequence: Synthetic primer
aaggtaagacaaaatagccccaggatgaggcctgacttac

SEQ ID NO: 7420 - DNA, 40 bp, Artificial Sequence
  Description of Artificial Sequence: Synthetic primer
aaagttgatcttaattgttgcctgtggttcatcttcttac

SEQ ID NO: 7421 - DNA, 40 bp, Artificial Sequence
  Description of Artificial Sequence: Synthetic primer
gcattcagtaaaagagcaaagctcctgggtcgtttcatcc

SEQ ID NO: 7422 - DNA, 40 bp, Artificial Sequence
  Description of Artificial Sequence: Synthetic primer
ggggttgggaaagtacagtctctagggctgactcacatcc

SEQ ID NO: 7423 - DNA, 40 bp, Artificial Sequence
  Description of Artificial Sequence: Synthetic primer
ggagcaaggactggggcaggcagcccaggtaggggctctc

SEQ ID NO: 7424 - DNA, 40 bp, Artificial Sequence
  Description of Artificial Sequence: Synthetic primer
atctagttaattaatgaatgttggcaaactctcccttttg

SEQ ID NO: 7425 - DNA, 40 bp, Artificial Sequence
  Description of Artificial Sequence: Synthetic primer
aagctaacctaaatggatgcaggcgactttagagagatgg

SEQ ID NO: 7426 - DNA, 40 bp, Artificial Sequence
  Description of Artificial Sequence: Synthetic primer
tctcctctctcttttgccttccttcttgcctattttgttg

SEQ ID NO: 7427 - DNA, 40 bp, Artificial Sequence
  Description of Artificial Sequence: Synthetic primer
gagtaaaagtattttacccaaactggctttttaaaacttc

SEQ ID NO: 7428 - DNA, 40 bp, Artificial Sequence
  Description of Artificial Sequence: Synthetic primer
tggagggaactccagcttctaattggctcatgttaatttc

SEQ ID NO: 7429 - DNA, 40 bp, Artificial Sequence
  Description of Artificial Sequence: Synthetic primer
cttcttcaggaagacactaaggcacagggaaggagaaagg

SEQ ID NO: 7430 - DNA, 40 bp, Artificial Sequence
  Description of Artificial Sequence: Synthetic primer
acatatgccaatctataaaacgttttctaataatccatac

SEQ ID NO: 7431 - DNA, 40 bp, Artificial Sequence
  Description of Artificial Sequence: Synthetic primer
ctgcacatttgcatttttacaaatatgcctgtttttttgc

SEQ ID NO: 7432 - DNA, 40 bp, Artificial Sequence
  Description of Artificial Sequence: Synthetic primer
acaccaagtgagcacacagtgacacaatcccctttcaatg

SEQ ID NO: 7433 - DNA, 40 bp, Artificial Sequence
  Description of Artificial Sequence: Synthetic primer
ttgtaatagaacgtcagctcatgaaatttggggcacttac

SEQ ID NO: 7434 - DNA, 40 bp, Artificial Sequence
  Description of Artificial Sequence: Synthetic primer
tgtcacgtgtctttctctttttgccatccctccgcgcatc

SEQ ID NO: 7435 - DNA, 40 bp, Artificial Sequence
  Description of Artificial Sequence: Synthetic primer
aacacttgcaacctcagcatctgtaccaggccaaaaacag

SEQ ID NO: 7436 - DNA, 40 bp, Artificial Sequence
  Description of Artificial Sequence: Synthetic primer
ggaaagcggcggcccgtcccagccccgcgctcccgcactc

SEQ ID NO: 7437 - DNA, 40 bp, Artificial Sequence
  Description of Artificial Sequence: Synthetic primer
cgggatcgggccgccatggacgacaaggcgttcaccaagg

SEQ ID NO: 7438 - DNA, 40 bp, Artificial Sequence
  Description of Artificial Sequence: Synthetic primer
gctgccccgacatcttttcttcaccttgctccacttgtgc

SEQ ID NO: 7439 - DNA, 40 bp, Artificial Sequence
  Description of Artificial Sequence: Synthetic primer
taaatgtgcttcaccaactggagtacattttacaactttc

SEQ ID NO: 7440 - DNA, 40 bp, Artificial Sequence
  Description of Artificial Sequence: Synthetic primer
ggccccaggaggtccagccctgccatgcctcctgccctca

SEQ ID NO: 7441 - DNA, 40 bp, Artificial Sequence
  Description of Artificial Sequence: Synthetic primer
tcctcctcccaccttggccccaggccctgggctccactgc

SEQ ID NO: 7442 - DNA, 40 bp, Artificial Sequence
  Description of Artificial Sequence: Synthetic primer
ttttcagagaggtttctctaaggggtcaagtgagtggata

SEQ ID NO: 7443 - DNA, 40 bp, Artificial Sequence
  Description of Artificial Sequence: Synthetic primer
atgtgaattggttcttacggagccctgaaccttcatacag

SEQ ID NO: 7444 - DNA, 40 bp, Artificial Sequence
  Description of Artificial Sequence: Synthetic primer
gacgactcaaacttttgactgtgtctttctttttgaatcc

SEQ ID NO: 7445 - DNA, 40 bp, Artificial Sequence
  Description of Artificial Sequence: Synthetic primer
tctccaaaatatatgccaaagaagtagaatgagaaaaatg

SEQ ID NO: 7446 - DNA, 40 bp, Artificial Sequence
  Description of Artificial Sequence: Synthetic primer
cacccacagcagtgtggtcattcttgacgaggtccatgtg

SEQ ID NO: 7447 - DNA, 40 bp, Artificial Sequence
  Description of Artificial Sequence: Synthetic primer
cagcctgtccagacagtggcgctccgtgtgtctgatgagg

SEQ ID NO: 7448 - DNA, 40 bp, Artificial Sequence
  Description of Artificial Sequence: Synthetic primer
gttagccagcctcactaagcctcctcatcttcatctttcc

SEQ ID NO: 7449 - DNA, 40 bp, Artificial Sequence
  Description of Artificial Sequence: Synthetic primer
atgacatcaactttcttcatgtaatttcccacttaattcc

SEQ ID NO: 7450 - DNA, 40 bp, Artificial Sequence
  Description of Artificial Sequence: Synthetic primer
cttctacaaaaatagaaataacagctaacaggaggtttgg

SEQ ID NO: 7451 - DNA, 40 bp, Artificial Sequence
  Description of Artificial Sequence: Synthetic primer
attttattaagaacctctaacagctttgcacaaacaaacc

SEQ ID NO: 7452 - DNA, 40 bp, Artificial Sequence
  Description of Artificial Sequence: Synthetic primer
tcttaacacaactcctctggggtagagagatggcagaaac

SEQ ID NO: 7453 - DNA, 40 bp, Artificial Sequence
  Description of Artificial Sequence: Synthetic primer
gcgcccttggcacgtcccatccccaaagagcccccagacc

SEQ ID NO: 7454 - DNA, 40 bp, Artificial Sequence
  Description of Artificial Sequence: Synthetic primer
gctgagggtaagccggttggctcctaaagggcgttctcac

SEQ ID NO: 7455 - DNA, 40 bp, Artificial Sequence
  Description of Artificial Sequence: Synthetic primer
tctgccgccctcgtcccatccgccaggtcccggcccctca

SEQ ID NO: 7456 - DNA, 40 bp, Artificial Sequence
  Description of Artificial Sequence: Synthetic primer
ggcccgggacgcgcccggagcccagggaaggagggaggag

SEQ ID NO: 7457 - DNA, 40 bp, Artificial Sequence
  Description of Artificial Sequence: Synthetic primer
ggattaagctcacactaatatcttgctgaatgtgggttac

SEQ ID NO: 7458 - DNA, 40 bp, Artificial Sequence
  Description of Artificial Sequence: Synthetic primer
taaactaatgtttaaatagcgtttctttaattcttcactc

SEQ ID NO: 7459 - DNA, 40 bp, Artificial Sequence
  Description of Artificial Sequence: Synthetic primer
tagtatccagtgtgtgaattatttaatgaaatatttgatc

SEQ ID NO: 7460 - DNA, 40 bp, Artificial Sequence
  Description of Artificial Sequence: Synthetic primer
gagaggaaaatccagaattcgtttccttttatggcagagg

SEQ ID NO: 7461 - DNA, 40 bp, Artificial Sequence
  Description of Artificial Sequence: Synthetic primer
cagataacaggtattagctcaaaataaacaaggaactaac

SEQ ID NO: 7462 - DNA, 40 bp, Artificial Sequence
  Description of Artificial Sequence: Synthetic primer
gaatacctctttacttgttttattctcattatttaccttc

SEQ ID NO: 7463 - DNA, 40 bp, Artificial Sequence
  Description of Artificial Sequence: Synthetic primer
tgtgaatgcgtgtgtggttgcagttgcccttcacttcttc

SEQ ID NO: 7464 - DNA, 40 bp, Artificial Sequence
  Description of Artificial Sequence: Synthetic primer
cattcctttgcaacaaaaggaaaacgacaaacaatggtac

SEQ ID NO: 7465 - DNA, 40 bp, Artificial Sequence
  Description of Artificial Sequence: Synthetic primer
ggaaaaaaataaactaatttttttttccacctgtgttttc

SEQ ID NO: 7466 - DNA, 40 bp, Artificial Sequence
  Description of Artificial Sequence: Synthetic primer
ttgaaaagctattgactcttaaaagctgcgcttcgcattc

SEQ ID NO: 7467 - DNA, 40 bp, Artificial Sequence
  Description of Artificial Sequence: Synthetic primer
ctgctctcactaatgttaaggagttgatttattggtggac

SEQ ID NO: 7468 - DNA, 40 bp, Artificial Sequence
  Description of Artificial Sequence: Synthetic primer
ctacgttgtctctgacaaatacacaagatggacttaaaat

SEQ ID NO: 7469 - DNA, 40 bp, Artificial Sequence
  Description of Artificial Sequence: Synthetic primer
atggccttttaaaattaaaaggtatttaatctgtaactcc

SEQ ID NO: 7470 - DNA, 40 bp, Artificial Sequence
  Description of Artificial Sequence: Synthetic primer
ccattaaataatcttacaataacctttaattttgggtgtc

SEQ ID NO: 7471 - DNA, 40 bp, Artificial Sequence
  Description of Artificial Sequence: Synthetic primer
aaggaacttgacttttattaacttgctattaaccctattc

SEQ ID NO: 7472 - DNA, 40 bp, Artificial Sequence
  Description of Artificial Sequence: Synthetic primer
aaacttaactctgaaaatattgcaaatttttttcactgac

SEQ ID NO: 7473 - DNA, 40 bp, Artificial Sequence
  Description of Artificial Sequence: Synthetic primer
actatactcataaaaccatttcattcaaatccttacaaac

SEQ ID NO: 7474 - DNA, 40 bp, Artificial Sequence
  Description of Artificial Sequence: Synthetic primer
acttcatacattcatgtgaggactgcccttgttcttttac

SEQ ID NO: 7475 - DNA, 40 bp, Artificial Sequence
  Description of Artificial Sequence: Synthetic primer
agtttattaccaaatacatacaaattcaggggatctaaag

SEQ ID NO: 7476 - DNA, 40 bp, Artificial Sequence
  Description of Artificial Sequence: Synthetic primer
taactttaaatttcatcttaaattagtttttgtccattta

SEQ ID NO: 7477 - DNA, 40 bp, Artificial Sequence
  Description of Artificial Sequence: Synthetic primer
ggagtgaggtaattttcagcatgaaatagtgtatcagtgg

SEQ ID NO: 7478 - DNA, 40 bp, Artificial Sequence
  Description of Artificial Sequence: Synthetic primer
tgccaacatatttccatatatttacacattgtttatgctg

SEQ ID NO: 7479 - DNA, 40 bp, Artificial Sequence
  Description of Artificial Sequence: Synthetic primer
tatccattggaaaagaattaagtggaaatgatggcaaatg

SEQ ID NO: 7480 - DNA, 40 bp, Artificial Sequence
  Description of Artificial Sequence: Synthetic primer
attgtctgttgactagtgattgtctattgtttttcacttg

SEQ ID NO: 7481 - DNA, 40 bp, Artificial Sequence
  Description of Artificial Sequence: Synthetic primer
tgtgagccttgatccccaccccaacctacacctattttcc

SEQ ID NO: 7482 - DNA, 40 bp, Artificial Sequence
  Description of Artificial Sequence: Synthetic primer
tggaagctttcctggacccaaggaccctcctccttcaccc

SEQ ID NO: 7483 - DNA, 40 bp, Artificial Sequence
  Description of Artificial Sequence: Synthetic primer
gtggccattaacacacaatgggctttctatcctgggcctc

SEQ ID NO: 7484 - DNA, 40 bp, Artificial Sequence
  Description of Artificial Sequence: Synthetic primer
ccaggcccagggagccgcgctcccaccttgcatgggtact

SEQ ID NO: 7485 - DNA, 40 bp, Artificial Sequence
  Description of Artificial Sequence: Synthetic primer
gcattctagtgataatatacaatacacataaatttttatc

SEQ ID NO: 7486 - DNA, 40 bp, Artificial Sequence
  Description of Artificial Sequence: Synthetic primer
aaaattgttagcaatttcaacagtctaatcaatgtcatat

SEQ ID NO: 7487 - DNA, 40 bp, Artificial Sequence
  Description of Artificial Sequence: Synthetic primer
tctaatgaattaagaaactagatatcttgcattaagttac

SEQ ID NO: 7488 - DNA, 40 bp, Artificial Sequence
  Description of Artificial Sequence: Synthetic primer
ttttcctgttgctttttcttttgtgtattgtgtgtgatgc

SEQ ID NO: 7489 - DNA, 40 bp, Artificial Sequence
  Description of Artificial Sequence: Synthetic primer
aacagtataatctatctgatagattctatgatttttaaac

SEQ ID NO: 7490 - DNA, 40 bp, Artificial Sequence
  Description of Artificial Sequence: Synthetic primer
tcaacaattaggagtactagatttcaaaaagctgaatttt

SEQ ID NO: 7491 - DNA, 40 bp, Artificial Sequence
  Description of Artificial Sequence: Synthetic primer
cctcgcctccctcactgccctgccgtcccgggagacttac

SEQ ID NO: 7492 - DNA, 40 bp, Artificial Sequence
  Description of Artificial Sequence: Synthetic primer
ccccgccccagccagggagcagcactcactgaccctctcc

SEQ ID NO: 7493 - DNA, 40 bp, Artificial Sequence
  Description of Artificial Sequence: Synthetic primer
ctggtgatgttcctccctcatctctaatggtgtcctcctc

SEQ ID NO: 7494 - DNA, 40 bp, Artificial Sequence
  Description of Artificial Sequence: Synthetic primer
tcagaggaaaggctgtctctttacaacttcttaccatctc

SEQ ID NO: 7495 - DNA, 40 bp, Artificial Sequence
  Description of Artificial Sequence: Synthetic primer
tgaaggaggagagacattatatctatatccaagtaaaagc

SEQ ID NO: 7496 - DNA, 40 bp, Artificial Sequence
  Description of Artificial Sequence: Synthetic primer
ttttccaatatagctgtgaacggattactggaagactcac

SEQ ID NO: 7497 - DNA, 40 bp, Artificial Sequence
  Description of Artificial Sequence: Synthetic primer
ctacttcccaccatcccttggccattggcacctgggcttc

SEQ ID NO: 7498 - DNA, 40 bp, Artificial Sequence
  Description of Artificial Sequence: Synthetic primer
tgggccaaaatgcctgtgtttctgttttgttctcagtaac

SEQ ID NO: 7499 - DNA, 40 bp, Artificial Sequence
  Description of Artificial Sequence: Synthetic primer
tacaactaacatttagttttctttaatgctcagaaatcat

SEQ ID NO: 7500 - DNA, 40 bp, Artificial Sequence
  Description of Artificial Sequence: Synthetic primer
cccagatggctttttacaatggactaaactgaagaattac

SEQ ID NO: 7501 - DNA, 40 bp, Artificial Sequence
  Description of Artificial Sequence: Synthetic primer
aaacttggggccctagttcaagaatactacaagacagtcc

SEQ ID NO: 7502 - DNA, 40 bp, Artificial Sequence
  Description of Artificial Sequence: Synthetic primer
agatagaattgtatgtatccccaaattctctacatttttc

SEQ ID NO: 7503 - DNA, 40 bp, Artificial Sequence
  Description of Artificial Sequence: Synthetic primer
agcctaggcgcgggttccccaccagaaaatggggctctgg

SEQ ID NO: 7504 - DNA, 40 bp, Artificial Sequence
  Description of Artificial Sequence: Synthetic primer
cgcttggggtacctgccggattatcctgggatcctctctg

SEQ ID NO: 7505 - DNA, 40 bp, Artificial Sequence
  Description of Artificial Sequence: Synthetic primer
gaggtgagagttccttcaatgctgacaggtttgctatttc

SEQ ID NO: 7506 - DNA, 40 bp, Artificial Sequence
  Description of Artificial Sequence: Synthetic primer
cagcaatgtcgtgcctcagattttattatatttggttttc

SEQ ID NO: 7507 - DNA, 40 bp, Artificial Sequence
  Description of Artificial Sequence: Synthetic primer
aaggaaaggagagcaggataataaaagagagaaatcacag

SEQ ID NO: 7508 - DNA, 40 bp, Artificial Sequence
  Description of Artificial Sequence: Synthetic primer
cctggtggcagactttgatcatggtcctatctctgtcttc

SEQ ID NO: 7509 - DNA, 40 bp, Artificial Sequence
  Description of Artificial Sequence: Synthetic primer
atagataggagccaccacacccggccccaagcccctattc

SEQ ID NO: 7510 - DNA, 40 bp, Artificial Sequence
  Description of Artificial Sequence: Synthetic primer
tcataaagatgtgtgactcagtttaccttttgttcctttc

SEQ ID NO: 7511 - DNA, 40 bp, Artificial Sequence
  Description of Artificial Sequence: Synthetic primer
gttggcagactctgcgtgtgtctcacctacttcccttttt

SEQ ID NO: 7512 - DNA, 40 bp, Artificial Sequence
  Description of Artificial Sequence: Synthetic primer
tgaggtcctaaccaaatcaaacagtaattgccctactctc

SEQ ID NO: 7513 - DNA, 40 bp, Artificial Sequence
  Description of Artificial Sequence: Synthetic primer
aggctccacagtggttccacatataggtccccttcgagtc

SEQ ID NO: 7514 - DNA, 40 bp, Artificial Sequence
  Description of Artificial Sequence: Synthetic primer
catcctaccccagccatctaatgagccccatccctttcag

SEQ ID NO: 7515 - DNA, 40 bp, Artificial Sequence
  Description of Artificial Sequence: Synthetic primer
aggggccatgagctcacttcctgtttgtttccctgtgagc

SEQ ID NO: 7516 - DNA, 40 bp, Artificial Sequence
  Description of Artificial Sequence: Synthetic primer
tacctacgtcttcctccctgtaggtggggcagttgctcac

SEQ ID NO: 7517 - DNA, 40 bp, Artificial Sequence
  Description of Artificial Sequence: Synthetic primer
cccgacccacagagcattcacaccctcaccgggcagggtc

SEQ ID NO: 7518 - DNA, 40 bp, Artificial Sequence
  Description of Artificial Sequence: Synthetic primer
ctgagtgggtgcagctgtggctgtagtggggtaatctcac

SEQ ID NO: 7519 - DNA, 40 bp, Artificial Sequence
  Description of Artificial Sequence: Synthetic primer
gtgtctgtgtcagcagaataaccctaacctcacagaatgg

SEQ ID NO: 7520 - DNA, 40 bp, Artificial Sequence
  Description of Artificial Sequence: Synthetic primer
tggggtaaacgcacacttcagccttcctccctgtaccttc

SEQ ID NO: 7521 - DNA, 40 bp, Artificial Sequence
  Description of Artificial Sequence: Synthetic primer
ggaccgctcacccgcggactcagggctggcggcgggactc

SEQ ID NO: 7522 - DNA, 40 bp, Artificial Sequence
  Description of Artificial Sequence: Synthetic primer
ctggcccggcccggccccgaccccagcaagccatacttac

SEQ ID NO: 7523 - DNA, 40 bp, Artificial Sequence
  Description of Artificial Sequence: Synthetic primer
agattcattattttactaaagtgttgattttctttctgta

SEQ ID NO: 7524 - DNA, 40 bp, Artificial Sequence
  Description of Artificial Sequence: Synthetic primer
gttatcttattttattgcttaagtttcaaggtttccttac

SEQ ID NO: 7525 - DNA, 40 bp, Artificial Sequence
  Description of Artificial Sequence: Synthetic primer
tttgggcttgctttgagttgtctaaattgtgttttgtttg

SEQ ID NO: 7526 - DNA, 40 bp, Artificial Sequence
  Description of Artificial Sequence: Synthetic primer
tcatagggaaaaacagtttcctttcccactgtttacttac

SEQ ID NO: 7527 - DNA, 40 bp, Artificial Sequence
  Description of Artificial Sequence: Synthetic primer
ttttgaaatttgtttcagaagtgttgacaatgttttctcc

SEQ ID NO: 7528 - DNA, 40 bp, Artificial Sequence
  Description of Artificial Sequence: Synthetic primer
ccctttgcaggcaatggaggtgcctgacaaagtgcaggac

SEQ ID NO: 7529 - DNA, 40 bp, Artificial Sequence
  Description of Artificial Sequence: Synthetic primer
agtgcttgaacatgtaatatctcaaatctgtaatgtactt

SEQ ID NO: 7530 - DNA, 40 bp, Artificial Sequence
  Description of Artificial Sequence: Synthetic primer
tcacatttttatttttctactcttaaaaaaataagtaaat

SEQ ID NO: 7531 - DNA, 40 bp, Artificial Sequence
  Description of Artificial Sequence: Synthetic primer
cgtggtcctttcatgactaaaatgagcattgtgcttcttc

SEQ ID NO: 7532 - DNA, 40 bp, Artificial Sequence
  Description of Artificial Sequence: Synthetic primer
agctacagagcctcgctatgaactggaaaagaaaacttac

SEQ ID NO: 7533 - DNA, 40 bp, Artificial Sequence
  Description of Artificial Sequence: Synthetic primer
tagttctgtatgacatcttcagggtaaacaagggcaactc

SEQ ID NO: 7534 - DNA, 40 bp, Artificial Sequence
  Description of Artificial Sequence: Synthetic primer
aggatctcatcctcactgtgtgctatgttttattttctag

SEQ ID NO: 7535 - DNA, 40 bp, Artificial Sequence
  Description of Artificial Sequence: Synthetic primer
caaagcatcattatacattcttataaattcttgagttctg

SEQ ID NO: 7536 - DNA, 40 bp, Artificial Sequence
  Description of Artificial Sequence: Synthetic primer
ttaaaatttaacatttaactctatgtacttattatttttt

SEQ ID NO: 7537 - DNA, 40 bp, Artificial Sequence
  Description of Artificial Sequence: Synthetic primer
gccttggccctctgaatccctgacgcttggtttttctgtg

SEQ ID NO: 7538 - DNA, 40 bp, Artificial Sequence
  Description of Artificial Sequence: Synthetic primer
ggcagatggctctgcctgcacttctttttgggactcagag

SEQ ID NO: 7539 - DNA, 40 bp, Artificial Sequence
  Description of Artificial Sequence: Synthetic primer
cctctgtcctaggccctcctttgctgactggacctgactg

SEQ ID NO: 7540 - DNA, 40 bp, Artificial Sequence
  Description of Artificial Sequence: Synthetic primer
ttgtgatatcctaattttgaaaacactctcttgtttctac

SEQ ID NO: 7541 - DNA, 40 bp, Artificial Sequence
  Description of Artificial Sequence: Synthetic primer
gaaggagcggtgctcctcaggtatcccaaagattcagtcc

SEQ ID NO: 7542 - DNA, 40 bp, Artificial Sequence
  Description of Artificial Sequence: Synthetic primer
aagggacgcctgaggcctccatagggactgtccctgagcc

SEQ ID NO: 7543 - DNA, 40 bp, Artificial Sequence
  Description of Artificial Sequence: Synthetic primer
tcagacatgtgatcaagattccttgactaacaagatatat

SEQ ID NO: 7544 - DNA, 40 bp, Artificial Sequence
  Description of Artificial Sequence: Synthetic primer
taatctaattagaactgcagatgctatacacaagactcag

SEQ ID NO: 7545 - DNA, 40 bp, Artificial Sequence
  Description of Artificial Sequence: Synthetic primer
tatgtgtaatgtgtacatggtgccagaatatttgtttttc

SEQ ID NO: 7546 - DNA, 40 bp, Artificial Sequence
  Description of Artificial Sequence: Synthetic primer
acttcctcagcaacatgtaattcacccacgtaacaaactt

SEQ ID NO: 7547 - DNA, 40 bp, Artificial Sequence
  Description of Artificial Sequence: Synthetic primer
aggcctgggccagggtcacagtatctttgctgttgccttc

SEQ ID NO: 7548 - DNA, 40 bp, Artificial Sequence
  Description of Artificial Sequence: Synthetic primer
ctgtgtacacacgctgactgaacatacgcatctgcatggg

SEQ ID NO: 7549 - DNA, 40 bp, Artificial Sequence
  Description of Artificial Sequence: Synthetic primer
attataactaacattggaaaggaaatatgtgctacacagc

SEQ ID NO: 7550 - DNA, 40 bp, Artificial Sequence
  Description of Artificial Sequence: Synthetic primer
atatggtgactcagacagaaatacccctttgagtaaagtg

SEQ ID NO: 7551 - DNA, 40 bp, Artificial Sequence
  Description of Artificial Sequence: Synthetic primer
caggaacacgagggagggtggcgctgcagggacgctggtg

SEQ ID NO: 7552 - DNA, 40 bp, Artificial Sequence
  Description of Artificial Sequence: Synthetic primer
ccggcgccctccccatagcccagacgaggacgaggacgac

SEQ ID NO: 7553 - DNA, 40 bp, Artificial Sequence
  Description of Artificial Sequence: Synthetic primer
ttttaaatgccacaatggtaacccgggtcctacccatttc

SEQ ID NO: 7554 - DNA, 40 bp, Artificial Sequence
  Description of Artificial Sequence: Synthetic primer
ataagaagcccaaaacccaagagactaatgagcaatacac

SEQ ID NO: 7555 - DNA, 40 bp, Artificial Sequence
  Description of Artificial Sequence: Synthetic primer
cagcccctgcccatgcccatgccttgctctctttctgtcc

SEQ ID NO: 7556 - DNA, 40 bp, Artificial Sequence
  Description of Artificial Sequence: Synthetic primer
attaggccatccacccatcccctgagaggacagggaaccc

SEQ ID NO: 7557 - DNA, 40 bp, Artificial Sequence
  Description of Artificial Sequence: Synthetic primer
tctccaaccaaatggagtggaaggtgaaatcataacagag

SEQ ID NO: 7558 - DNA, 40 bp, Artificial Sequence
  Description of Artificial Sequence: Synthetic primer
gaccctaaccctgacctggagctatctactttgtcttttc

SEQ ID NO: 7559 - DNA, 40 bp, Artificial Sequence
  Description of Artificial Sequence: Synthetic primer
cgagacagtggtctccttcccagtagactggcccacgaag

SEQ ID NO: 7560 - DNA, 40 bp, Artificial Sequence
  Description of Artificial Sequence: Synthetic primer
ggcaaggtccccatgacaagtgcctcctctcccatcttcc

SEQ ID NO: 7561 - DNA, 40 bp, Artificial Sequence
  Description of Artificial Sequence: Synthetic primer
ctcagagtgggttcgggttcagtccctgaacccaagcatc

SEQ ID NO: 7562 - DNA, 40 bp, Artificial Sequence
  Description of Artificial Sequence: Synthetic primer
acagaggtggcctgaaagagctccctggaagagactccag

SEQ ID NO: 7563 - DNA, 40 bp, Artificial Sequence
  Description of Artificial Sequence: Synthetic primer
ctggcctgctgtccccacgcccacccctctgactctcctg

SEQ ID NO: 7564 - DNA, 40 bp, Artificial Sequence
  Description of Artificial Sequence: Synthetic primer
tgtggtcagtcctaaactcaccctgtcctggtccctccag

SEQ ID NO: 7565 - DNA, 40 bp, Artificial Sequence
  Description of Artificial Sequence: Synthetic primer
gtgttttacttaacctatatgtttaaattagcatttttag

SEQ ID NO: 7566 - DNA, 40 bp, Artificial Sequence
  Description of Artificial Sequence: Synthetic primer
tcttttaatgtggagtgggaaacaaaattaagtcaaacag

SEQ ID NO: 7567 - DNA, 40 bp, Artificial Sequence
  Description of Artificial Sequence: Synthetic primer
aaacatgataatgaaacttacgatgagatatttccttcaa

SEQ ID NO: 7568 - DNA, 40 bp, Artificial Sequence
  Description of Artificial Sequence: Synthetic primer
tactcacacttatgtgtaaggatttgcaaaagaaaattac

SEQ ID NO: 7569 - DNA, 40 bp, Artificial Sequence
  Description of Artificial Sequence: Synthetic primer
tgacccatgagtgcccttctacatgtcccacttgattcag

SEQ ID NO: 7570 - DNA, 40 bp, Artificial Sequence
  Description of Artificial Sequence: Synthetic primer
tctctgtaaagttactcttggttgcttgataggtaggtac

SEQ ID NO: 7571 - DNA, 40 bp, Artificial Sequence
  Description of Artificial Sequence: Synthetic primer
ccagatccttctctaggaaaaagctgaagccccttgacag

SEQ ID NO: 7572 - DNA, 40 bp, Artificial Sequence
  Description of Artificial Sequence: Synthetic primer
aaagaggggttaatatttactaaacagaaaatgtccttgg

SEQ ID NO: 7573 - DNA, 40 bp, Artificial Sequence
  Description of Artificial Sequence: Synthetic primer
cccgctgagtgttgcttcccgcttctgctgtccctcagtc

SEQ ID NO: 7574 - DNA, 40 bp, Artificial Sequence
  Description of Artificial Sequence: Synthetic primer
ggagaggcagagcaggcagcaggttcgagggttgacatcg

SEQ ID NO: 7575 - DNA, 40 bp, Artificial Sequence
  Description of Artificial Sequence: Synthetic primer
gtgagcagagtttgaacatgtttatgcttgttttcttttt

SEQ ID NO: 7576 - DNA, 40 bp, Artificial Sequence
  Description of Artificial Sequence: Synthetic primer
tctatcactcaccaaataaatgctcatataacacagcttc

SEQ ID NO: 7577 - DNA, 40 bp, Artificial Sequence
  Description of Artificial Sequence: Synthetic primer
agggccaaggtgtgggcaaacccctccatgcggctgtgtc

SEQ ID NO: 7578 - DNA, 40 bp, Artificial Sequence
  Description of Artificial Sequence: Synthetic primer
acacactcgtccctgcccttgacccagcatagcccctcac

SEQ ID NO: 7579 - DNA, 40 bp, Artificial Sequence
  Description of Artificial Sequence: Synthetic primer
accattcaggaaaactacaatggagaaagaagactaaaaa

SEQ ID NO: 7580 - DNA, 40 bp, Artificial Sequence
  Description of Artificial Sequence: Synthetic primer
gagtataattatgttgaaattaaagtttccagaaccgtag

SEQ ID NO: 7581 - DNA, 40 bp, Artificial Sequence
  Description of Artificial Sequence: Synthetic primer
caccacaaacttcactcttgcactagagaaagtaacaaaa

SEQ ID NO: 7582 - DNA, 40 bp, Artificial Sequence
  Description of Artificial Sequence: Synthetic primer
ttaaaattgtatttcctgatacatgtttttgtttgttttc

SEQ ID NO: 7583 - DNA, 40 bp, Artificial Sequence
  Description of Artificial Sequence: Synthetic primer
aggattaagggagaattaacaaacttagaggtgatagagc

SEQ ID NO: 7584 - DNA, 40 bp, Artificial Sequence
  Description of Artificial Sequence: Synthetic primer
tggcactcacacttggggtctgtgttattttgcttgacag

SEQ ID NO: 7585 - DNA, 40 bp, Artificial Sequence
  Description of Artificial Sequence: Synthetic primer
gacccagcagtgagtttttctttcagtctattttcttttc

SEQ ID NO: 7586 - DNA, 40 bp, Artificial Sequence
  Description of Artificial Sequence: Synthetic primer
aaatacatttcagaatgaatatatatgagtaaaagaagtc

SEQ ID NO: 7587 - DNA, 40 bp, Artificial Sequence
  Description of Artificial Sequence: Synthetic primer
caggatttaaagctattgctctctccccagccatattaag

SEQ ID NO: 7588 - DNA, 40 bp, Artificial Sequence
  Description of Artificial Sequence: Synthetic primer
acatcttatttttaaactattaatcatgtgccataacatg

SEQ ID NO: 7589 - DNA, 40 bp, Artificial Sequence
  Description of Artificial Sequence: Synthetic primer
ggcctgactgcctgactggcactcctgctctataccatgc

SEQ ID NO: 7590 - DNA, 40 bp, Artificial Sequence
  Description of Artificial Sequence: Synthetic primer
ggtggaagagcaggggcaggggttgagggagggcaggtgg

SEQ ID NO: 7591 - DNA, 40 bp, Artificial Sequence
  Description of Artificial Sequence: Synthetic primer
ggcacaggcgccctctcctccctcagtttccctccagagc

SEQ ID NO: 7592 - DNA, 40 bp, Artificial Sequence
  Description of Artificial Sequence: Synthetic primer
cccaccccaggcactgactctgtctctctgtctgtctcag

SEQ ID NO: 7593 - DNA, 40 bp, Artificial Sequence
  Description of Artificial Sequence: Synthetic primer
tgtgttttcatgtgtgacaagagtttttgtttattaaaag

SEQ ID NO: 7594 - DNA, 40 bp, Artificial Sequence
  Description of Artificial Sequence: Synthetic primer
ggcactccccaagccttttactttgccatgctctccttac

SEQ ID NO: 7595 - DNA, 40 bp, Artificial Sequence
  Description of Artificial Sequence: Synthetic primer
gtgtggggcctgtagtggggcagcagcaactggtgggtgc

SEQ ID NO: 7596 - DNA, 40 bp, Artificial Sequence
  Description of Artificial Sequence: Synthetic primer
tatctgattactaaccctcgcctgtgtcctcccaccactg

SEQ ID NO: 7597 - DNA, 40 bp, Artificial Sequence
  Description of Artificial Sequence: Synthetic primer
agcatgcaacaccatctatgtctcaaacgcagaagttttc

SEQ ID NO: 7598 - DNA, 40 bp, Artificial Sequence
  Description of Artificial Sequence: Synthetic primer
tttttttccctctattttccttttgcctccccctcccttt

SEQ ID NO: 7599 - DNA, 40 bp, Artificial Sequence
  Description of Artificial Sequence: Synthetic primer
gggcacctgctgcccctgacacacagggttttctctctgc

SEQ ID NO: 7600 - DNA, 40 bp, Artificial Sequence
  Description of Artificial Sequence: Synthetic primer
gagcagcagcagcagcagagtcctgagggtagggcacagg

SEQ ID NO: 7601 - DNA, 40 bp, Artificial Sequence
  Description of Artificial Sequence: Synthetic primer
gtaaaaattaagcaaagtaaattaattaaatcaagtaaag

SEQ ID NO: 7602 - DNA, 40 bp, Artificial Sequence
  Description of Artificial Sequence: Synthetic primer
cttttctgaaaagaattacctggatttttttttttcgttt

SEQ ID NO: 7603 - DNA, 40 bp, Artificial Sequence
  Description of Artificial Sequence: Synthetic primer
cactgtcttcaacagacccttgatctcctcactccacgag

SEQ ID NO: 7604 - DNA, 40 bp, Artificial Sequence
  Description of Artificial Sequence: Synthetic primer
actgtagggtttggtttgccacccgccccgctcacgtctc

SEQ ID NO: 7605 - DNA, 40 bp, Artificial Sequence
  Description of Artificial Sequence: Synthetic primer
tctttctaatcctctaacctggctgctattctctctcctc

SEQ ID NO: 7606 - DNA, 40 bp, Artificial Sequence
  Description of Artificial Sequence: Synthetic primer
cgatctttctacagtagtgggacaggaagcagcagcaaag

SEQ ID NO: 7607 - DNA, 40 bp, Artificial Sequence
  Description of Artificial Sequence: Synthetic primer
aagcacccaatcccgtaagaagtgaacaggtccttcagtc

SEQ ID NO: 7608 - DNA, 40 bp, Artificial Sequence
  Description of Artificial Sequence: Synthetic primer
actgtgctggtttctgaatagatgatgaaacaaactcttg

SEQ ID NO: 7609 - DNA, 40 bp, Artificial Sequence
  Description of Artificial Sequence: Synthetic primer
tgaagacagacggtcccactttgctctctatcctgtctcc

SEQ ID NO: 7610 - DNA, 40 bp, Artificial Sequence
  Description of Artificial Sequence: Synthetic primer
ggttgtcctttgtttttactgcagagccctgggaagattc

SEQ ID NO: 7611 - DNA, 40 bp, Artificial Sequence
  Description of Artificial Sequence: Synthetic primer
cctttcttagccctgatggccccttgtgttgccttccttc

SEQ ID NO: 7612 - DNA, 40 bp, Artificial Sequence
  Description of Artificial Sequence: Synthetic primer
aaagcgtatgagtgaagtttttggagggaatttcaaaccc

SEQ ID NO: 7613 - DNA, 40 bp, Artificial Sequence
  Description of Artificial Sequence: Synthetic primer
tggggccttgaacaatgaggatccttgtatctctcccaca

SEQ ID NO: 7614 - DNA, 40 bp, Artificial Sequence
  Description of Artificial Sequence: Synthetic primer
aggacccttcccacaggaaggcttgagccagcgtccaacc

SEQ ID NO: 7615 - DNA, 40 bp, Artificial Sequence
  Description of Artificial Sequence: Synthetic primer
tctccctttctctcgtaagatgctgatgcccgagggactg

SEQ ID NO: 7616 - DNA, 40 bp, Artificial Sequence
  Description of Artificial Sequence: Synthetic primer
aactgatgctactcttcagaggtctaattcttttgtaatg

SEQ ID NO: 7617 - DNA, 40 bp, Artificial Sequence
  Description of Artificial Sequence: Synthetic primer
aaatatttctaatagctgatttggggttatataaattttc

SEQ ID NO: 7618 - DNA, 40 bp, Artificial Sequence
  Description of Artificial Sequence: Synthetic primer
aaagcaaataaagtagcattctgtttgttttcttcttcag

SEQ ID NO: 7619 - DNA, 40 bp, Artificial Sequence
  Description of Artificial Sequence: Synthetic primer
ctcctgcccatgccctctctacactggagtaattattgtc

SEQ ID NO: 7620 - DNA, 40 bp, Artificial Sequence
  Description of Artificial Sequence: Synthetic primer
ggggaggcaggccttcaagagactcgccacagaaaattac

SEQ ID NO: 7621 - DNA, 40 bp, Artificial Sequence
  Description of Artificial Sequence: Synthetic primer
gacacctcagggctcaaggggatggcgctggtggctggag

SEQ ID NO: 7622 - DNA, 40 bp, Artificial Sequence
  Description of Artificial Sequence: Synthetic primer
acgatgacgtttagagctgaatggtccctctcactgtttc

SEQ ID NO: 7623 - DNA, 40 bp, Artificial Sequence
  Description of Artificial Sequence: Synthetic primer
tcctgagtagccgatgagttagggacaccagggagcagag

SEQ ID NO: 7624 - DNA, 40 bp, Artificial Sequence
  Description of Artificial Sequence: Synthetic primer
ctccacacgcttcccctgctctcttgacccagctctctcc

SEQ ID NO: 7625 - DNA, 40 bp, Artificial Sequence
  Description of Artificial Sequence: Synthetic primer
gctcctgcccgcatgaccagggccttcccttgcctttttc

SEQ ID NO: 7626 - DNA, 40 bp, Artificial Sequence
  Description of Artificial Sequence: Synthetic primer
tggaggggtccgggagcctggcactactaaccccctctgg

SEQ ID NO: 7627 - DNA, 40 bp, Artificial Sequence
  Description of Artificial Sequence: Synthetic primer
cccaagtgacacagtatgctaaacacatagaaattatacc

SEQ ID NO: 7628 - DNA, 40 bp, Artificial Sequence
  Description of Artificial Sequence: Synthetic primer
aaatttggctgatggttgttttgctatgttttaattactg

SEQ ID NO: 7629 - DNA, 40 bp, Artificial Sequence
  Description of Artificial Sequence: Synthetic primer
attacaaacatacatttcattatactttatttcattatgc

SEQ ID NO: 7630 - DNA, 40 bp, Artificial Sequence
  Description of Artificial Sequence: Synthetic primer
ataaatagtagtatttcttcttttcattctgatatttttt

SEQ ID NO: 7631 - DNA, 40 bp, Artificial Sequence
  Description of Artificial Sequence: Synthetic primer
gcccagcctgaggctcccctgactggggatcccgtctcgg

SEQ ID NO: 7632 - DNA, 40 bp, Artificial Sequence
  Description of Artificial Sequence: Synthetic primer
tggacaggccagcagccctgggcccagcaggagcaaggac

SEQ ID NO: 7633 - DNA, 40 bp, Artificial Sequence
  Description of Artificial Sequence: Synthetic primer
agatagacttacctggtgcctcaggggccctctcttcctg

SEQ ID NO: 7634 - DNA, 40 bp, Artificial Sequence
  Description of Artificial Sequence: Synthetic primer
gggcctcagcacccaaagggcaggggcgggcaaagctgag

SEQ ID NO: 7635 - DNA, 40 bp, Artificial Sequence
  Description of Artificial Sequence: Synthetic primer
ctgcactctcaatggggaagagaaactggcctggaggaag

SEQ ID NO: 7636 - DNA, 40 bp, Artificial Sequence
  Description of Artificial Sequence: Synthetic primer
aaagttttaaattgtgtggtgtttaaacttgtaaaatgac

SEQ ID NO: 7637 - DNA, 40 bp, Artificial Sequence
  Description of Artificial Sequence: Synthetic primer
tcctctcccctctttcccagcccattcacagacgatggag

SEQ ID NO: 7638 - DNA, 40 bp, Artificial Sequence
  Description of Artificial Sequence: Synthetic primer
agcaggaagatctgcctatgacttctgcttaccacttccc

SEQ ID NO: 7639 - DNA, 40 bp, Artificial Sequence
  Description of Artificial Sequence: Synthetic primer
tgagtcagcctgcatccctcctcaacagggacctggaacg

SEQ ID NO: 7640 - DNA, 40 bp, Artificial Sequence
  Description of Artificial Sequence: Synthetic primer
tgctccctgccctgtccggagtgcccctgccccctgcccc

SEQ ID NO: 7641 - DNA, 40 bp, Artificial Sequence
  Description of Artificial Sequence: Synthetic primer
ctgtgattatacagtacaggtacaaaggtaaaatttagtg

SEQ ID NO: 7642 - DNA, 40 bp, Artificial Sequence
  Description of Artificial Sequence: Synthetic primer
ttttttatttggttagagttcttttctcaaggtatttttt

SEQ ID NO: 7643 - DNA, 40 bp, Artificial Sequence
  Description of Artificial Sequence: Synthetic primer
acctgatacttttctcttgagaagcaaaccagcccaaaag

SEQ ID NO: 7644 - DNA, 40 bp, Artificial Sequence
  Description of Artificial Sequence: Synthetic primer
ttatttatgcatttcttaatgataaaaaggatcaactcac

SEQ ID NO: 7645 - DNA, 40 bp, Artificial Sequence
  Description of Artificial Sequence: Synthetic primer
cacgtttcagcacagcgctggccgcagtctgacaggaaag

SEQ ID NO: 7646 - DNA, 40 bp, Artificial Sequence
  Description of Artificial Sequence: Synthetic primer
cccaggtacccctccgcgtcttccccaagtcccccgtagc

SEQ ID NO: 7647 - DNA, 40 bp, Artificial Sequence
  Description of Artificial Sequence: Synthetic primer
tgtgtgtgtggcggaggagggtcgcggtttgtctctcttg

SEQ ID NO: 7648 - DNA, 40 bp, Artificial Sequence
  Description of Artificial Sequence: Synthetic primer
cgcctcagggtgactcgcgggcattctccccgcttctcgc

SEQ ID NO: 7649 - DNA, 40 bp, Artificial Sequence
  Description of Artificial Sequence: Synthetic primer
cattccaagtgtcttatttttgttcaaatttatgtttttc

SEQ ID NO: 7650 - DNA, 40 bp, Artificial Sequence
  Description of Artificial Sequence: Synthetic primer
gaagtttcatttcatgaggaaaaattcacaaacaacaacc

SEQ ID NO: 7651 - DNA, 40 bp, Artificial Sequence
  Description of Artificial Sequence: Synthetic primer
tctgaaatcaaacctggcctgggtcgttatgttttcaaag

SEQ ID NO: 7652 - DNA, 40 bp, Artificial Sequence
  Description of Artificial Sequence: Synthetic primer
ccgctcctggcctcctcggatcccagtgctgctgaaacac

SEQ ID NO: 7653 - DNA, 40 bp, Artificial Sequence
  Description of Artificial Sequence: Synthetic primer
aattttctgaactatttatggacaacagtcaaacaacaat

SEQ ID NO: 7654 - DNA, 40 bp, Artificial Sequence
  Description of Artificial Sequence: Synthetic primer
tctatataaacaaaaacagatgctctgagaaaggcattag

SEQ ID NO: 7655 - DNA, 40 bp, Artificial Sequence
  Description of Artificial Sequence: Synthetic primer
gcagaaaaataaagatacatacttggtttttttttagttc

SEQ ID NO: 7656 - DNA, 40 bp, Artificial Sequence
  Description of Artificial Sequence: Synthetic primer
tacctttatatcgttactctgaatcttatcttccaatgac

SEQ ID NO: 7657 - DNA, 40 bp, Artificial Sequence
  Description of Artificial Sequence: Synthetic primer
aagagttctctcacagcaccattctgcacccaatcaaaag

SEQ ID NO: 7658 - DNA, 40 bp, Artificial Sequence
  Description of Artificial Sequence: Synthetic primer
gcagtcctctgattgggcggaggcatgttggtgacctctg

SEQ ID NO: 7659 - DNA, 40 bp, Artificial Sequence
  Description of Artificial Sequence: Synthetic primer
ggtgcctcccctgcccggtctcatctccgtctctcctctc

SEQ ID NO: 7660 - DNA, 40 bp, Artificial Sequence
  Description of Artificial Sequence: Synthetic primer
tttgtgtgctagggtggcgggtgaggtggggcgggtagtg

SEQ ID NO: 7661 - DNA, 40 bp, Artificial Sequence
  Description of Artificial Sequence: Synthetic primer
ctccaataacattctgaaattccattccaattgtgaaaac

SEQ ID NO: 7662 - DNA, 40 bp, Artificial Sequence
  Description of Artificial Sequence: Synthetic primer
tatagaatattctctaagatcagtttaattatgtatttta

SEQ ID NO: 7663 - DNA, 40 bp, Artificial Sequence
  Description of Artificial Sequence: Synthetic primer
acccttctctgaccccagctcgggcggccacctgtctttg

SEQ ID NO: 7664 - DNA, 40 bp, Artificial Sequence
  Description of Artificial Sequence: Synthetic primer
aggcgctccctcccgcacgcgtcgcggccgatcggctccc

SEQ ID NO: 7665 - DNA, 40 bp, Artificial Sequence
  Description of Artificial Sequence: Synthetic primer
ctgttccgccagggccacactgggtgggtggcagcgcagc

SEQ ID NO: 7666 - DNA, 40 bp, Artificial Sequence
  Description of Artificial Sequence: Synthetic primer
accactcaccaaggatctgctttgtctctttcactttcag

SEQ ID NO: 7667 - DNA, 40 bp, Artificial Sequence
  Description of Artificial Sequence: Synthetic primer
cctagcattgtaaatattttttttaactgctttgttcttc

SEQ ID NO: 7668 - DNA, 40 bp, Artificial Sequence
  Description of Artificial Sequence: Synthetic primer
atgctgtagactaattaaaaatttcaaattcacattttag

SEQ ID NO: 7669 - DNA, 40 bp, Artificial Sequence
  Description of Artificial Sequence: Synthetic primer
gtaatcttctaatacctattcatataaaacaagcctcttc

SEQ ID NO: 7670 - DNA, 40 bp, Artificial Sequence
  Description of Artificial Sequence: Synthetic primer
caaccctatctcaagaaatacaaagaaaaaggaaaatcgc

SEQ ID NO: 7671 - DNA, 40 bp, Artificial Sequence
  Description of Artificial Sequence: Synthetic primer
gtactggttaccatttttaaatgttgaagaaatcattatc

SEQ ID NO: 7672 - DNA, 40 bp, Artificial Sequence
  Description of Artificial Sequence: Synthetic primer
acatgcctcattaaccatctgctcttctaatccaatactg

SEQ ID NO: 7673 - DNA, 40 bp, Artificial Sequence
  Description of Artificial Sequence: Synthetic primer
aattcaatcagtttaaatattgtatttccattttttttcc

SEQ ID NO: 7674 - DNA, 40 bp, Artificial Sequence
  Description of Artificial Sequence: Synthetic primer
acttaggaaaatcatgcacaatttgtcaagtctgaggaac

SEQ ID NO: 7675 - DNA, 40 bp, Artificial Sequence
  Description of Artificial Sequence: Synthetic primer
aactagcacatcaggtctcacttccctttgcctccctctc

SEQ ID NO: 7676 - DNA, 40 bp, Artificial Sequence
  Description of Artificial Sequence: Synthetic primer
ttggcaggctcggatccacttggttcctcccatcaaactc

SEQ ID NO: 7677 - DNA, 40 bp, Artificial Sequence
  Description of Artificial Sequence: Synthetic primer
agcagtgacattactgtttgtccttcagactgagtagttc

SEQ ID NO: 7678 - DNA, 40 bp, Artificial Sequence
  Description of Artificial Sequence: Synthetic primer
aatgcaattcaactcaggaaaagtatccataaacacaaac

SEQ ID NO: 7679 - DNA, 40 bp, Artificial Sequence
  Description of Artificial Sequence: Synthetic primer
tcaggggacttcaaacccaatatgggaggaaaggaaggtc

SEQ ID NO: 7680 - DNA, 40 bp, Artificial Sequence
  Description of Artificial Sequence: Synthetic primer
tctgcagaacgtgtgagtgtcctctcgcctgtccccacag

SEQ ID NO: 7681 - DNA, 40 bp, Artificial Sequence
  Description of Artificial Sequence: Synthetic primer
aaggcagtcggtgcatgtgaacgttcttctctccccatcc

SEQ ID NO: 7682 - DNA, 40 bp, Artificial Sequence
  Description of Artificial Sequence: Synthetic primer
tctgaccacaccaaacccggcccttgctcccctggtgtgc

SEQ ID NO: 7683 - DNA, 40 bp, Artificial Sequence
  Description of Artificial Sequence: Synthetic primer
ccctcactcttcagctcacagggaacctttgctctttttc

SEQ ID NO: 7684 - DNA, 40 bp, Artificial Sequence
  Description of Artificial Sequence: Synthetic primer
tgggtggggcgggtgcagccccagcctgctccagggaggc

SEQ ID NO: 7685 - DNA, 40 bp, Artificial Sequence
  Description of Artificial Sequence: Synthetic primer
ctatgactacagtttctacatgtttgtattatgctaagag

SEQ ID NO: 7686 - DNA, 40 bp, Artificial Sequence
  Description of Artificial Sequence: Synthetic primer
agtaatgcttgcttatttgattagctatagccccaacagc

SEQ ID NO: 7687 - DNA, 40 bp, Artificial Sequence
  Description of Artificial Sequence: Synthetic primer
gggaggccggtagaggagcccctgctgactgcccgctctc

SEQ ID NO: 7688 - DNA, 40 bp, Artificial Sequence
  Description of Artificial Sequence: Synthetic primer
cccagggcagtacaggcggggtgtggggaggccaggccct

SEQ ID NO: 7689 - DNA, 40 bp, Artificial Sequence
  Description of Artificial Sequence: Synthetic primer
ggctcagataatccctgatgctgacccagccccctttttc

SEQ ID NO: 7690 - DNA, 40 bp, Artificial Sequence
  Description of Artificial Sequence: Synthetic primer
cccctgcccctggtgagtctccaccccagcctgcgacctg

SEQ ID NO: 7691 - DNA, 40 bp, Artificial Sequence
  Description of Artificial Sequence: Synthetic primer
atcttccagtagttgtctcactttttattcctccattttc

SEQ ID NO: 7692 - DNA, 40 bp, Artificial Sequence
  Description of Artificial Sequence: Synthetic primer
ttctccctctccctcctggggcagggccgggagccgtcag

SEQ ID NO: 7693 - DNA, 40 bp, Artificial Sequence
  Description of Artificial Sequence: Synthetic primer
tgaggcatgggtggctctatggtcacgcccatcttcctac

SEQ ID NO: 7694 - DNA, 40 bp, Artificial Sequence
  Description of Artificial Sequence: Synthetic primer
tcctgggtctgagggaggaggcgccagggctggaggttgg

SEQ ID NO: 7695 - DNA, 40 bp, Artificial Sequence
  Description of Artificial Sequence: Synthetic primer
ctgggcccaggccccaaagcctgtcactttcacaaaccag

SEQ ID NO: 7696 - DNA, 40 bp, Artificial Sequence
  Description of Artificial Sequence: Synthetic primer
tttttttattctcttccttttcccttttcctctcctgtgg

SEQ ID NO: 7697 - DNA, 40 bp, Artificial Sequence
  Description of Artificial Sequence: Synthetic primer
tgtccttcagctgtcacagtggcggtatgaaaaggagaag

SEQ ID NO: 7698 - DNA, 40 bp, Artificial Sequence
  Description of Artificial Sequence: Synthetic primer
tacaatataactaacagtctcttttggatttctgtttctg

SEQ ID NO: 7699 - DNA, 40 bp, Artificial Sequence
  Description of Artificial Sequence: Synthetic primer
tcctgcccgctttgaccccgcgagtcaaaggccccgcgag

SEQ ID NO: 7700 - DNA, 40 bp, Artificial Sequence
  Description of Artificial Sequence: Synthetic primer
ctcctttgatccatccctcaatgccctggcctccccacag

SEQ ID NO: 7701 - DNA, 40 bp, Artificial Sequence
  Description of Artificial Sequence: Synthetic primer
ggagcgggcctggcccgggccgcggggagggcgcacggcc

SEQ ID NO: 7702 - DNA, 40 bp, Artificial Sequence
  Description of Artificial Sequence: Synthetic primer
agcctggaccgcgcgacctcgccccggccccgcgccttcg

SEQ ID NO: 7703 - DNA, 40 bp, Artificial Sequence
  Description of Artificial Sequence: Synthetic primer
catgcgccccgtcccatcccgggcgctgcagaggctgacc

SEQ ID NO: 7704 - DNA, 40 bp, Artificial Sequence
  Description of Artificial Sequence: Synthetic primer
tgtggctgagccccaaggcccaaggccaccagcctatgtg

SEQ ID NO: 7705 - DNA, 40 bp, Artificial Sequence
  Description of Artificial Sequence: Synthetic primer
agacgtcagagagcccaagagtgtctgaagaatcaaagtc

SEQ ID NO: 7706 - DNA, 40 bp, Artificial Sequence
  Description of Artificial Sequence: Synthetic primer
taaggaaataaaatgagagcacttttttttctgtttatcc

SEQ ID NO: 7707 - DNA, 40 bp, Artificial Sequence
  Description of Artificial Sequence: Synthetic primer
ttccaagcccagctcctcactgtctccatgttcccatctc

SEQ ID NO: 7708 - DNA, 40 bp, Artificial Sequence
  Description of Artificial Sequence: Synthetic primer
ggcaaggaagtctatgaaaggaaggagggagaagaaaaag

SEQ ID NO: 7709 - DNA, 40 bp, Artificial Sequence
  Description of Artificial Sequence: Synthetic primer
gaaaagaaagagacatgcatgaacatttttctccaccttg

SEQ ID NO: 7710 - DNA, 40 bp, Artificial Sequence
  Description of Artificial Sequence: Synthetic primer
gcaagagaggaaatgttctgttctccttcactttccactc

SEQ ID NO: 7711 - DNA, 40 bp, Artificial Sequence
  Description of Artificial Sequence: Synthetic primer
aagacccctttaactcaagactgcctcccgctttgtgtgc

SEQ ID NO: 7712 - DNA, 40 bp, Artificial Sequence
  Description of Artificial Sequence: Synthetic primer
caatgaaaatgggaaaggtatccagccgcccacttttgac

SEQ ID NO: 7713 - DNA, 40 bp, Artificial Sequence
  Description of Artificial Sequence: Synthetic primer
agacatggtgaaccagagtttcatctgcgacccggacgac

SEQ ID NO: 7714 - DNA, 40 bp, Artificial Sequence
  Description of Artificial Sequence: Synthetic primer
gaagccgctccacatacagtcctggatgatgatgtttttg

SEQ ID NO: 7715 - DNA, 40 bp, Artificial Sequence
  Description of Artificial Sequence: Synthetic primer
ttccaaataaggcagaagagcacctgtctgtccagactcc

SEQ ID NO: 7716 - DNA, 40 bp, Artificial Sequence
  Description of Artificial Sequence: Synthetic primer
ttgtatgttagcagttactgtatgttagtgattgttgtag

SEQ ID NO: 7717 - DNA, 40 bp, Artificial Sequence
  Description of Artificial Sequence: Synthetic primer
tttggctggttaggctcagaagacttttattttccctctc

SEQ ID NO: 7718 - DNA, 40 bp, Artificial Sequence
  Description of Artificial Sequence: Synthetic primer
taactatccattgtcttttcttttagacttcaactgtgag

SEQ ID NO: 7719 - DNA, 40 bp, Artificial Sequence
  Description of Artificial Sequence: Synthetic primer
cactaactaaaaattctccattcagatgcaataacaaaag

SEQ ID NO: 7720 - DNA, 40 bp, Artificial Sequence
  Description of Artificial Sequence: Synthetic primer
atcagttaaactgtttttggtccccaagctattattgaag

SEQ ID NO: 7721 - DNA, 40 bp, Artificial Sequence
  Description of Artificial Sequence: Synthetic primer
ctctaataggctgattgggacatttcttattctcttaccc

SEQ ID NO: 7722 - DNA, 40 bp, Artificial Sequence
  Description of Artificial Sequence: Synthetic primer
caactgagcaccaaagccctcagaatgccaggcccacctg

SEQ ID NO: 7723 - DNA, 40 bp, Artificial Sequence
  Description of Artificial Sequence: Synthetic primer
ctctacctcattttccccagggcctactgaaatgtataac

SEQ ID NO: 7724 - DNA, 40 bp, Artificial Sequence
  Description of Artificial Sequence: Synthetic primer
atgacatcttcaaagattttatataagtttttttttgttg

SEQ ID NO: 7725 - DNA, 40 bp, Artificial Sequence
  Description of Artificial Sequence: Synthetic primer
gaaaaagaagtcatctttgacttataacacaatttattac

SEQ ID NO: 7726 - DNA, 40 bp, Artificial Sequence
  Description of Artificial Sequence: Synthetic primer
cttgagaaataccttttaatgtgcttgctaatattttctc

SEQ ID NO: 7727 - DNA, 40 bp, Artificial Sequence
  Description of Artificial Sequence: Synthetic primer
gacacattcatatcccagagacacacatcctggacacgac

SEQ ID NO: 7728 - DNA, 40 bp, Artificial Sequence
  Description of Artificial Sequence: Synthetic primer
tgcgtggccactgtcagtctcctcgcctccactcacacag

SEQ ID NO: 7729 - DNA, 40 bp, Artificial Sequence
  Description of Artificial Sequence: Synthetic primer
ctgaccccaatggttagcttactatggctcttcagaactc

SEQ ID NO: 7730 - DNA, 40 bp, Artificial Sequence
  Description of Artificial Sequence: Synthetic primer
cctgccttctcttatatcccacaatttctgctccacaacc

SEQ ID NO: 7731 - DNA, 40 bp, Artificial Sequence
  Description of Artificial Sequence: Synthetic primer
taataaacctgtcacctaagataaagcaaacagtacaatg

SEQ ID NO: 7732 - DNA, 40 bp, Artificial Sequence
  Description of Artificial Sequence: Synthetic primer
gcatttcttttgtaccctcggaaagtttcatgctagtgcg

SEQ ID NO: 7733 - DNA, 40 bp, Artificial Sequence
  Description of Artificial Sequence: Synthetic primer
tctggcctcatgtctgactcccaaggtctccttgcctttg

SEQ ID NO: 7734 - DNA, 40 bp, Artificial Sequence
  Description of Artificial Sequence: Synthetic primer
tttgaaaaagcacatcaagaaactccagaagagggctttg

SEQ ID NO: 7735 - DNA, 40 bp, Artificial Sequence
  Description of Artificial Sequence: Synthetic primer
cctggagcccagtgtcccctcggagaggccgcatcccagg

SEQ ID NO: 7736 - DNA, 40 bp, Artificial Sequence
  Description of Artificial Sequence: Synthetic primer
cggagggtggcagtgcccatctaacccaccctcctcctgc

SEQ ID NO: 7737 - DNA, 40 bp, Artificial Sequence
  Description of Artificial Sequence: Synthetic primer
gagattattttgccctgttgtctctctcatttacataatc

SEQ ID NO: 7738 - DNA, 40 bp, Artificial Sequence
  Description of Artificial Sequence: Synthetic primer
gccccacaaggacacagggttcctttccctggagcagatg

SEQ ID NO: 7739 - DNA, 40 bp, Artificial Sequence
  Description of Artificial Sequence: Synthetic primer
gccgaggtaaagcagtgcacatacctttcaactggtcagc

SEQ ID NO: 7740 - DNA, 40 bp, Artificial Sequence
  Description of Artificial Sequence: Synthetic primer
gtactggtgaccccggccggggcaggccccgggactcgac

SEQ ID NO: 7741 - DNA, 40 bp, Artificial Sequence
  Description of Artificial Sequence: Synthetic primer
tcccagggtgctgattttctcacacttggtctcctcacac

SEQ ID NO: 7742 - DNA, 40 bp, Artificial Sequence
  Description of Artificial Sequence: Synthetic primer
tgggacatgacgaacaggtggaccccgatggcgtggatgc

SEQ ID NO: 7743 - DNA, 40 bp, Artificial Sequence
  Description of Artificial Sequence: Synthetic primer
aaacagaaagaagcccacacacaccaggaggaagcacagc

SEQ ID NO: 7744 - DNA, 40 bp, Artificial Sequence
  Description of Artificial Sequence: Synthetic primer
gccaacaagtctgcccacgccctggtgggtctcctgaacg

SEQ ID NO: 7745 - DNA, 40 bp, Artificial Sequence
  Description of Artificial Sequence: Synthetic primer
agcctgcttcccctcgcccggagccggggccctgcactgg

SEQ ID NO: 7746 - DNA, 40 bp, Artificial Sequence
  Description of Artificial Sequence: Synthetic primer
acatcggcttcgcctgccttctgtggagcatctattttgc

SEQ ID NO: 7747 - DNA, 40 bp, Artificial Sequence
  Description of Artificial Sequence: Synthetic primer
aacataaacataaaagactggccacattaattttcattat

SEQ ID NO: 7748 - DNA, 40 bp, Artificial Sequence
  Description of Artificial Sequence: Synthetic primer
tttaaattttatcttataagtctttaattactcaactttt

SEQ ID NO: 7749 - DNA, 40 bp, Artificial Sequence
  Description of Artificial Sequence: Synthetic primer
ctcccacattccctctgagctcaccacaccttcattacac

SEQ ID NO: 7750 - DNA, 40 bp, Artificial Sequence
  Description of Artificial Sequence: Synthetic primer
aatcatatagtaatgtgttttgtctgggaaattctctatg

SEQ ID NO: 7751 - DNA, 40 bp, Artificial Sequence
  Description of Artificial Sequence: Synthetic primer
cccaataccttataaaagaaacagagtgcccagggatttc

SEQ ID NO: 7752 - DNA, 40 bp, Artificial Sequence
  Description of Artificial Sequence: Synthetic primer
aagtaccttaaggaaagatggaaattgtatatctgaaaat

SEQ ID NO: 7753 - DNA, 40 bp, Artificial Sequence
  Description of Artificial Sequence: Synthetic primer
ctgcaggatccctaccgactgtccaccaccaccctgatgc

SEQ ID NO: 7754 - DNA, 40 bp, Artificial Sequence
  Description of Artificial Sequence: Synthetic primer
ttctaatccctaaactaccttggtataacatctccattcc

SEQ ID NO: 7755 - DNA, 40 bp, Artificial Sequence
  Description of Artificial Sequence: Synthetic primer
gcaagtcactgaagtggataagtatcattctagagcatcc

SEQ ID NO: 7756 - DNA, 40 bp, Artificial Sequence
  Description of Artificial Sequence: Synthetic primer
ttatgtttttgttggtatgtatgaaaaataactgctaatc

SEQ ID NO: 7757 - DNA, 40 bp, Artificial Sequence
  Description of Artificial Sequence: Synthetic primer
cactctgtctcgcttgctcacttaaaacagcattattttc

SEQ ID NO: 7758 - DNA, 40 bp, Artificial Sequence
  Description of Artificial Sequence: Synthetic primer
tggaccatgcctcatgtggctagcactggaattcacttac

SEQ ID NO: 7759 - DNA, 40 bp, Artificial Sequence
  Description of Artificial Sequence: Synthetic primer
gtgcccttctcttagtgttaatgagtgctttttattttta

SEQ ID NO: 7760 - DNA, 40 bp, Artificial Sequence
  Description of Artificial Sequence: Synthetic primer
cattacatttagtcagcaacatcagataaaatccaagagc

SEQ ID NO: 7761 - DNA, 40 bp, Artificial Sequence
  Description of Artificial Sequence: Synthetic primer
attattaaaaacaacatgcttccactcttgataactaagc

SEQ ID NO: 7762 - DNA, 40 bp, Artificial Sequence
  Description of Artificial Sequence: Synthetic primer
ggaacaggtagactttcaactattgttagatgttggtatg

SEQ ID NO: 7763 - DNA, 40 bp, Artificial Sequence
  Description of Artificial Sequence: Synthetic primer
ctgaaaacaggaactgattttactgtgttgctttttcatc

SEQ ID NO: 7764 - DNA, 40 bp, Artificial Sequence
  Description of Artificial Sequence: Synthetic primer
ttttaaaacacatcacaatttctaaagatctttaagcacg

SEQ ID NO: 7765 - DNA, 40 bp, Artificial Sequence
  Description of Artificial Sequence: Synthetic primer
atacactcaagatcttataaatgcataggtctactctgac

SEQ ID NO: 7766 - DNA, 40 bp, Artificial Sequence
  Description of Artificial Sequence: Synthetic primer
ataatttcagctttgataaaagtagaaggcttatattcag

SEQ ID NO: 7767 - DNA, 40 bp, Artificial Sequence
  Description of Artificial Sequence: Synthetic primer
aggaggctggggctctgaggttcctgacccaccctttgtc

SEQ ID NO: 7768 - DNA, 40 bp, Artificial Sequence
  Description of Artificial Sequence: Synthetic primer
agccctctcccaccacccgccccacccagggtcctccagg

SEQ ID NO: 7769 - DNA, 40 bp, Artificial Sequence
  Description of Artificial Sequence: Synthetic primer
acagcctcccattgccccaggagcccacccgcactccaac

SEQ ID NO: 7770 - DNA, 40 bp, Artificial Sequence
  Description of Artificial Sequence: Synthetic primer
gggtgggagctggggcgagaggtgccgttggcccccgttg

SEQ ID NO: 7771 - DNA, 40 bp, Artificial Sequence
  Description of Artificial Sequence: Synthetic primer
gaagggcgtcaggtgcagctggctggacatctcggcgaag

SEQ ID NO: 7772 - DNA, 40 bp, Artificial Sequence
  Description of Artificial Sequence: Synthetic primer
tgcgctcagcccggtgccacctgtggtccacctgaccctc

SEQ ID NO: 7773 - DNA, 40 bp, Artificial Sequence
  Description of Artificial Sequence: Synthetic primer
gctgcagaaagagctatgctgaaaggaatttgacttccac

SEQ ID NO: 7774 - DNA, 40 bp, Artificial Sequence
  Description of Artificial Sequence: Synthetic primer
aaactgtgatgctcttctaccctgggctgctcctaacctg

SEQ ID NO: 7775 - DNA, 40 bp, Artificial Sequence
  Description of Artificial Sequence: Synthetic primer
atccaatgagagtcaatttagctttctgtttcctgactgc

SEQ ID NO: 7776 - DNA, 40 bp, Artificial Sequence
  Description of Artificial Sequence: Synthetic primer
tattcatcattaccacctgaggcttggaaaacagaatttc

SEQ ID NO: 7777 - DNA, 40 bp, Artificial Sequence
  Description of Artificial Sequence: Synthetic primer
gggaagtggcagcttcttcacgctccttccctatcccttc

SEQ ID NO: 7778 - DNA, 40 bp, Artificial Sequence
  Description of Artificial Sequence: Synthetic primer
agcacatgggcagcgcggggccaggcggctccggtagagg

SEQ ID NO: 7779 - DNA, 40 bp, Artificial Sequence
  Description of Artificial Sequence: Synthetic primer
tggaggaagaatgggcgaggtctgtgggtctggtttgagc

SEQ ID NO: 7780 - DNA, 40 bp, Artificial Sequence
  Description of Artificial Sequence: Synthetic primer
ggggctgcttagaattagagctgggcccaggctggcagag

SEQ ID NO: 7781 - DNA, 40 bp, Artificial Sequence
  Description of Artificial Sequence: Synthetic primer
aaccactcccaccctagccccagcccgcctccatccaagc

SEQ ID NO: 7782 - DNA, 40 bp, Artificial Sequence
  Description of Artificial Sequence: Synthetic primer
ccaccacacatttacagccacagcttcactgtcctgtccc

SEQ ID NO: 7783 - DNA, 40 bp, Artificial Sequence
  Description of Artificial Sequence: Synthetic primer
ggctggagccaggctgagaaggggtgccatggagaagaag

SEQ ID NO: 7784 - DNA, 40 bp, Artificial Sequence
  Description of Artificial Sequence: Synthetic primer
cagacatttaggagggtggctgtctggctggaaggacatc

SEQ ID NO: 7785 - DNA, 40 bp, Artificial Sequence
  Description of Artificial Sequence: Synthetic primer
gctctcctggaacgcttaccttggaacccttggtttctcc

SEQ ID NO: 7786 - DNA, 40 bp, Artificial Sequence
  Description of Artificial Sequence: Synthetic primer
agctcccatctcctcttgctgctcctgtgaaggtactcac

SEQ ID NO: 7787 - DNA, 40 bp, Artificial Sequence
  Description of Artificial Sequence: Synthetic primer
gggaagtcactattccttctcctttccttccttccattcc

SEQ ID NO: 7788 - DNA, 40 bp, Artificial Sequence
  Description of Artificial Sequence: Synthetic primer
tccagaagcttgaactctcatacctggagttgccacaggg

SEQ ID NO: 7789 - DNA, 40 bp, Artificial Sequence
  Description of Artificial Sequence: Synthetic primer
gttgcaaccccgcctcaaaacctccgtgtcccaactcctc

SEQ ID NO: 7790 - DNA, 40 bp, Artificial Sequence
  Description of Artificial Sequence: Synthetic primer
tcccgccggcaccatggccaagaccgtggcctatttctac

SEQ ID NO: 7791 - DNA, 40 bp, Artificial Sequence
  Description of Artificial Sequence: Synthetic primer
aagggtttcacgagattccaacttgcttaagatactgagg

SEQ ID NO: 7792 - DNA, 40 bp, Artificial Sequence
  Description of Artificial Sequence: Synthetic primer
cgagcccggagtcgggagggcggcagggtggcgccagcac

SEQ ID NO: 7793 - DNA, 40 bp, Artificial Sequence
  Description of Artificial Sequence: Synthetic primer
gcccgacagcggccgctcgggccccggctctcggttataa

SEQ ID NO: 7794 - DNA, 40 bp, Artificial Sequence
  Description of Artificial Sequence: Synthetic primer
aggctgtggaggtccccacagacacacggcacgggcctca

SEQ ID NO: 7795 - DNA, 40 bp, Artificial Sequence
  Description of Artificial Sequence: Synthetic primer
tacgtaaaaagtgtaaagttaaccttgctgtgtattttcc

SEQ ID NO: 7796 - DNA, 40 bp, Artificial Sequence
  Description of Artificial Sequence: Synthetic primer
gcctggggaccctgggcaaccagccctgtcgtctctccag

SEQ ID NO: 7797 - DNA, 40 bp, Artificial Sequence
  Description of Artificial Sequence: Synthetic primer
ccagttgctttatctgttcacttgtgccctgactttcaac

SEQ ID NO: 7798 - DNA, 40 bp, Artificial Sequence
  Description of Artificial Sequence: Synthetic primer
aagatttttgctttatttagcatttttccccttatttgac

SEQ ID NO: 7799 - DNA, 40 bp, Artificial Sequence
  Description of Artificial Sequence: Synthetic primer
ttagttttcagaaatcaaccacaaaataaaatcttcaaag

SEQ ID NO: 7800 - DNA, 40 bp, Artificial Sequence
  Description of Artificial Sequence: Synthetic primer
gttaaaatctgaacatttggaagtatgagaatgtaatttg

SEQ ID NO: 7801 - DNA, 40 bp, Artificial Sequence
  Description of Artificial Sequence: Synthetic primer
ctactggcctagtagtactaccagtataggacacttctct

SEQ ID NO: 7802 - DNA, 40 bp, Artificial Sequence
  Description of Artificial Sequence: Synthetic primer
tgctacatttcaaagagaaaagctttaaaaagatgaaaaa

SEQ ID NO: 7803 - DNA, 40 bp, Artificial Sequence
  Description of Artificial Sequence: Synthetic primer
gtaactgagtaactaagaaaataaaattgagacttttcgg

SEQ ID NO: 7804 - DNA, 40 bp, Artificial Sequence
  Description of Artificial Sequence: Synthetic primer
ggagaataaatgtaatccagtaacttaaggccatcttttg

SEQ ID NO: 7805 - DNA, 40 bp, Artificial Sequence
  Description of Artificial Sequence: Synthetic primer
ggtgctcagggagatgagaagggaggatgtcccagaggac

SEQ ID NO: 7806 - DNA, 40 bp, Artificial Sequence
  Description of Artificial Sequence: Synthetic primer
cattcagaagaaattgtttttaagatgtattatttatttg

SEQ ID NO: 7807 - DNA, 40 bp, Artificial Sequence
  Description of Artificial Sequence: Synthetic primer
attcacttttccaaatttttcccatcttccaattgttcag

SEQ ID NO: 7808 - DNA, 40 bp, Artificial Sequence
  Description of Artificial Sequence: Synthetic primer
atgcaaggacagggtaacatatgctatctggaagcaaagc

SEQ ID NO: 7809 - DNA, 40 bp, Artificial Sequence
  Description of Artificial Sequence: Synthetic primer
cctgcaacccttggaaggtgacttttatcttctatttttc

SEQ ID NO: 7810 - DNA, 40 bp, Artificial Sequence
  Description of Artificial Sequence: Synthetic primer
gggagtacaggggagtaattgatgttctgttgtcttgttc

SEQ ID NO: 7811 - DNA, 40 bp, Artificial Sequence
  Description of Artificial Sequence: Synthetic primer
gggtatgaagtgtactgaaaaccttttaatgcaacatagg

SEQ ID NO: 7812 - DNA, 40 bp, Artificial Sequence
  Description of Artificial Sequence: Synthetic primer
tatactttgatgaagacttttcttgatgtattatttttgc

SEQ ID NO: 7813 - DNA, 40 bp, Artificial Sequence
  Description of Artificial Sequence: Synthetic primer
ggtataatcaggagtttttaaaggtaaacataattgttcc

SEQ ID NO: 7814 - DNA, 40 bp, Artificial Sequence
  Description of Artificial Sequence: Synthetic primer
cccctcctgtccctggcctgaccttttccttcttgttttc

SEQ ID NO: 7815 - DNA, 40 bp, Artificial Sequence
  Description of Artificial Sequence: Synthetic primer
aagtcaagcccacctgccgagcagcccagcctccactcag

SEQ ID NO: 7816 - DNA, 40 bp, Artificial Sequence
  Description of Artificial Sequence: Synthetic primer
ttaaacactactgacattcaagtccctttgtttaaaattg

SEQ ID NO: 7817 - DNA, 40 bp, Artificial Sequence
  Description of Artificial Sequence: Synthetic primer
ctgcatgctgttcttggatggggattatcactagggtttg

SEQ ID NO: 7818 - DNA, 40 bp, Artificial Sequence
  Description of Artificial Sequence: Synthetic primer
ctccttgttcagtaaaggacagatggtcaagatgtgagag

SEQ ID NO: 7819 - DNA, 40 bp, Artificial Sequence
  Description of Artificial Sequence: Synthetic primer
ctggagttcgtgatggctgattctctgatgtgtactctgc

SEQ ID NO: 7820 - DNA, 40 bp, Artificial Sequence
  Description of Artificial Sequence: Synthetic primer
cccacccaagcccatgtggagccagggtatgggctctgac

SEQ ID NO: 7821 - DNA, 40 bp, Artificial Sequence
  Description of Artificial Sequence: Synthetic primer
aggtgtcttgggtgcagcgcgggtgttgctgtaatttgtg

SEQ ID NO: 7822 - DNA, 40 bp, Artificial Sequence
  Description of Artificial Sequence: Synthetic primer
ttcaagtctaatggtggtgtgtaattggtacacattgagc

SEQ ID NO: 7823 - DNA, 40 bp, Artificial Sequence
  Description of Artificial Sequence: Synthetic primer
tttaggttaattcaatgaagcttatttagagacacaagac

SEQ ID NO: 7824 - DNA, 40 bp, Artificial Sequence
  Description of Artificial Sequence: Synthetic primer
acactacagcgactaaaaataggaataaagattgtgtgag

SEQ ID NO: 7825 - DNA, 40 bp, Artificial Sequence
  Description of Artificial Sequence: Synthetic primer
agtctggattgaaaacattaaatgcaaactctgttttatt

SEQ ID NO: 7826 - DNA, 40 bp, Artificial Sequence
  Description of Artificial Sequence: Synthetic primer
aatgcagcagattaaataacgaataaaagacatggccaac

SEQ ID NO: 7827 - DNA, 40 bp, Artificial Sequence
  Description of Artificial Sequence: Synthetic primer
acgttttcctcctttcaactaacctaacttttatctattc

SEQ ID NO: 7828 - DNA, 40 bp, Artificial Sequence
  Description of Artificial Sequence: Synthetic primer
ttgaatagtaattgtgaactttactaatagaaattttgcc

SEQ ID NO: 7829 - DNA, 40 bp, Artificial Sequence
  Description of Artificial Sequence: Synthetic primer
agtcagaagtctgaaccacataccaaaacctcccgcctac

SEQ ID NO: 7830 - DNA, 40 bp, Artificial Sequence
  Description of Artificial Sequence: Synthetic primer
gatgagtatgtgcttgtactgaccatctgtttttatctcc

SEQ ID NO: 7831 - DNA, 40 bp, Artificial Sequence
  Description of Artificial Sequence: Synthetic primer
caacagctagagatgcttcattttcaattctgcaacaaag

SEQ ID NO: 7832 - DNA, 40 bp, Artificial Sequence
  Description of Artificial Sequence: Synthetic primer
tggagccatctaattcttagtaggatatgggaattcaaag

SEQ ID NO: 7833 - DNA, 40 bp, Artificial Sequence
  Description of Artificial Sequence: Synthetic primer
tagtcttatctggccaaaaggagtcttctagtcctcctgg

SEQ ID NO: 7834 - DNA, 40 bp, Artificial Sequence
  Description of Artificial Sequence: Synthetic primer
gatgatcttcattcctgtccatattctgattctatttctg

SEQ ID NO: 7835 - DNA, 40 bp, Artificial Sequence
  Description of Artificial Sequence: Synthetic primer
gctcttcccaggaaatcattctgatgtgggcaaagtcaac

SEQ ID NO: 7836 - DNA, 40 bp, Artificial Sequence
  Description of Artificial Sequence: Synthetic primer
ccccgtttcaatcttaatgttcatgctctttggattttcc

SEQ ID NO: 7837 - DNA, 40 bp, Artificial Sequence
  Description of Artificial Sequence: Synthetic primer
cacatggcttttggggttactaaaggttcagaaataaaac

SEQ ID NO: 7838 - DNA, 40 bp, Artificial Sequence
  Description of Artificial Sequence: Synthetic primer
gatttaggtgttggcatgaaaatcaataccttcccctttc

SEQ ID NO: 7839 - DNA, 40 bp, Artificial Sequence
  Description of Artificial Sequence: Synthetic primer
agggagggaagggccaagtatggggtcttaacaggtcttc

SEQ ID NO: 7840 - DNA, 40 bp, Artificial Sequence
  Description of Artificial Sequence: Synthetic primer
aggggaggccctgaccctgagcctcttgtcccttgctctc

SEQ ID NO: 7841 - DNA, 40 bp, Artificial Sequence
  Description of Artificial Sequence: Synthetic primer
attactaaatgtaataattttagtaagaaaggaaatatac

SEQ ID NO: 7842 - DNA, 40 bp, Artificial Sequence
  Description of Artificial Sequence: Synthetic primer
ttgttcaagagttccctatcactctctttaatcactactc

SEQ ID NO: 7843 - DNA, 40 bp, Artificial Sequence
  Description of Artificial Sequence: Synthetic primer
atttgcttccttccaccttcccctcccatcctctctttac

SEQ ID NO: 7844 - DNA, 40 bp, Artificial Sequence
  Description of Artificial Sequence: Synthetic primer
aaacagcttcttgcctacacagcccaacccttaaacattg

SEQ ID NO: 7845 - DNA, 40 bp, Artificial Sequence
  Description of Artificial Sequence: Synthetic primer
tgtgccttggtttgttcctttttaatttctctttttccac

SEQ ID NO: 7846 - DNA, 40 bp, Artificial Sequence
  Description of Artificial Sequence: Synthetic primer
atttagagaaaacacatgagtaatgctactcaacacagag

SEQ ID NO: 7847 - DNA, 40 bp, Artificial Sequence
  Description of Artificial Sequence: Synthetic primer
gtggttctgcttcctcagaccgccaggacctggagcagcc

SEQ ID NO: 7848 - DNA, 40 bp, Artificial Sequence
  Description of Artificial Sequence: Synthetic primer
ttgtcctggcacaaagacatggggtgctggcttggatgtg

SEQ ID NO: 7849 - DNA, 40 bp, Artificial Sequence
  Description of Artificial Sequence: Synthetic primer
tctgggactcactgcacgcacagcagggcccaggagaagc

SEQ ID NO: 7850 - DNA, 40 bp, Artificial Sequence
  Description of Artificial Sequence: Synthetic primer
tgactattctccgactgttctaggcacggaagtgagaccg

SEQ ID NO: 7851 - DNA, 40 bp, Artificial Sequence
  Description of Artificial Sequence: Synthetic primer
cttttttattctttttctcttttgctgatgctatgctctc

SEQ ID NO: 7852 - DNA, 40 bp, Artificial Sequence
  Description of Artificial Sequence: Synthetic primer
attgttggccaggggaaagcgggaatcgcagaaaggaagg

SEQ ID NO: 7853 - DNA, 40 bp, Artificial Sequence
  Description of Artificial Sequence: Synthetic primer
ggctctggggcattaacatatcccattgtgtcctgtttcc

SEQ ID NO: 7854 - DNA, 40 bp, Artificial Sequence
  Description of Artificial Sequence: Synthetic primer
accctccccagcttcctatgcccagaggcctgagctgtac

SEQ ID NO: 7855 - DNA, 40 bp, Artificial Sequence
  Description of Artificial Sequence: Synthetic primer
tgagcagtaagctcagtttaatgggcatcattgagccctg

SEQ ID NO: 7856 - DNA, 40 bp, Artificial Sequence
  Description of Artificial Sequence: Synthetic primer
ctctttctcctcctctttttcctctccttctcttgtgttc

SEQ ID NO: 7857 - DNA, 40 bp, Artificial Sequence
  Description of Artificial Sequence: Synthetic primer
tatcaaaattccttatggattgattgatttattgattttc

SEQ ID NO: 7858 - DNA, 40 bp, Artificial Sequence
  Description of Artificial Sequence: Synthetic primer
tgaaaaatgcagttataactcatatcaagaacatgtgacc

SEQ ID NO: 7859 - DNA, 40 bp, Artificial Sequence
  Description of Artificial Sequence: Synthetic primer
aacaattcctaaggacgggaacgaagagaacagagaatgc

SEQ ID NO: 7860 - DNA, 40 bp, Artificial Sequence
  Description of Artificial Sequence: Synthetic primer
cagagggccgcacctgcaggagccctgaccggctgtgttc

SEQ ID NO: 7861 - DNA, 40 bp, Artificial Sequence
  Description of Artificial Sequence: Synthetic primer
aggggcagggaggccccagggcagaagacccgcctaactg

SEQ ID NO: 7862 - DNA, 40 bp, Artificial Sequence
  Description of Artificial Sequence: Synthetic primer
ggggtggatgcctctcccgagggcaggggccaggccttac

SEQ ID NO: 7863 - DNA, 40 bp, Artificial Sequence
  Description of Artificial Sequence: Synthetic primer
gggatgaaatgtctcaatacatgaacacacaaacacatag

SEQ ID NO: 7864 - DNA, 40 bp, Artificial Sequence
  Description of Artificial Sequence: Synthetic primer
ctagaactaatgtatgtggattattgtattgttattttaa

SEQ ID NO: 7865 - DNA, 40 bp, Artificial Sequence
  Description of Artificial Sequence: Synthetic primer
cttgaaattatttatgggtgtgttttcgaaaggaaccggg

SEQ ID NO: 7866 - DNA, 40 bp, Artificial Sequence
  Description of Artificial Sequence: Synthetic primer
acatagctaaatccaccctttgcataactgacatttttac

SEQ ID NO: 7867 - DNA, 40 bp, Artificial Sequence
  Description of Artificial Sequence: Synthetic primer
acacaaaattatgactttgtgaagtgtaggaagagtaaac

SEQ ID NO: 7868 - DNA, 40 bp, Artificial Sequence
  Description of Artificial Sequence: Synthetic primer
acataatttaattaacatatttctaatctgcacatctttc

SEQ ID NO: 7869 - DNA, 40 bp, Artificial Sequence
  Description of Artificial Sequence: Synthetic primer
actcctcccttgatcctaacactgtgggactccctgggag

SEQ ID NO: 7870 - DNA, 40 bp, Artificial Sequence
  Description of Artificial Sequence: Synthetic primer
gtccctgtcccaccagccacacttgtaacccccctcgccc

SEQ ID NO: 7871 - DNA, 40 bp, Artificial Sequence
  Description of Artificial Sequence: Synthetic primer
tgccagactgtctgcctcccttctgactgtggccgcttgg

SEQ ID NO: 7872 - DNA, 40 bp, Artificial Sequence
  Description of Artificial Sequence: Synthetic primer
gccaccctccacagtcccttcccaccccagcccccacacc

SEQ ID NO: 7873 - DNA, 40 bp, Artificial Sequence
  Description of Artificial Sequence: Synthetic primer
ggggcctcgagggcagaggactgacctccctcctccccac

SEQ ID NO: 7874 - DNA, 40 bp, Artificial Sequence
  Description of Artificial Sequence: Synthetic primer
aggccctatccagggcgttgggagcccagagtgcagaggg

SEQ ID NO: 7875 - DNA, 40 bp, Artificial Sequence
  Description of Artificial Sequence: Synthetic primer
agctggaagcagagaacctaccagaaactcacgcttctcc

SEQ ID NO: 7876 - DNA, 40 bp, Artificial Sequence
  Description of Artificial Sequence: Synthetic primer
actcccaggctgggcacagacaccaagggacgatgtgggg

SEQ ID NO: 7877 - DNA, 40 bp, Artificial Sequence
  Description of Artificial Sequence: Synthetic primer
gcaaatatcattgtcagacctgtaaggctgctctcctgtg

SEQ ID NO: 7878 - DNA, 40 bp, Artificial Sequence
  Description of Artificial Sequence: Synthetic primer
gaaatatagtcaactgtgctgactttctcttataaacatc

SEQ ID NO: 7879 - DNA, 40 bp, Artificial Sequence
  Description of Artificial Sequence: Synthetic primer
ttttttttaagtttacttttcagacattgtacatcttcat

SEQ ID NO: 7880 - DNA, 40 bp, Artificial Sequence
  Description of Artificial Sequence: Synthetic primer
ttctgtgtttgtaatggtaaattatttatgttttaccttc

SEQ ID NO: 7881 - DNA, 40 bp, Artificial Sequence
  Description of Artificial Sequence: Synthetic primer
cacactcatcacatgccgaccccaccatcccccatgtatc

SEQ ID NO: 7882 - DNA, 40 bp, Artificial Sequence
  Description of Artificial Sequence: Synthetic primer
caccaacgcacacagcacagcagctccacgcattccaacc

SEQ ID NO: 7883 - DNA, 40 bp, Artificial Sequence
  Description of Artificial Sequence: Synthetic primer
ccccagcccagcagacctgcagtcccttctgaacccttgc

SEQ ID NO: 7884 - DNA, 40 bp, Artificial Sequence
  Description of Artificial Sequence: Synthetic primer
agctgctccctcagtcttgcattccttctgtcccctcctc

SEQ ID NO: 7885 - DNA, 40 bp, Artificial Sequence
  Description of Artificial Sequence: Synthetic primer
ctgtgataacattcagcccctacactgcacccctctcctc

SEQ ID NO: 7886 - DNA, 40 bp, Artificial Sequence
  Description of Artificial Sequence: Synthetic primer
gccaggctgccaggccatgttgcagctgaccacccacctg

SEQ ID NO: 7887 - DNA, 40 bp, Artificial Sequence
  Description of Artificial Sequence: Synthetic primer
ttgaccagaaaggctcagttccctgttttctcttcctaac

SEQ ID NO: 7888 - DNA, 40 bp, Artificial Sequence
  Description of Artificial Sequence: Synthetic primer
ctccaaaagatatgagaaacatactctttaaattcaagag

SEQ ID NO: 7889 - DNA, 40 bp, Artificial Sequence
  Description of Artificial Sequence: Synthetic primer
tctagcaggctcttctgaggccttcaggctgccatttttc

SEQ ID NO: 7890 - DNA, 40 bp, Artificial Sequence
  Description of Artificial Sequence: Synthetic primer
gttaatctgagaaggcagggctgaggtctaaagttgtctg

SEQ ID NO: 7891 - DNA, 40 bp, Artificial Sequence
  Description of Artificial Sequence: Synthetic primer
tgcccttcctttcactaaaagatgcttttgtcccttcttc

SEQ ID NO: 7892 - DNA, 40 bp, Artificial Sequence
  Description of Artificial Sequence: Synthetic primer
ttcccagcacatgggtctggggcccgcctctctcgagtcc

SEQ ID NO: 7893 - DNA, 40 bp, Artificial Sequence
  Description of Artificial Sequence: Synthetic primer
cgggagggatcagttgctggagtcctgacatgatttttcc

SEQ ID NO: 7894 - DNA, 40 bp, Artificial Sequence
  Description of Artificial Sequence: Synthetic primer
aggaagctggtgatggagcaccaagagggtggtcccttgg

SEQ ID NO: 7895 - DNA, 40 bp, Artificial Sequence
  Description of Artificial Sequence: Synthetic primer
gggcgaaggccgcttctcccttgaggtccccttccccaac

SEQ ID NO: 7896 - DNA, 40 bp, Artificial Sequence
  Description of Artificial Sequence: Synthetic primer
ggggctggcctggcgggttcagggctggcctgcagctgag

SEQ ID NO: 7897 - DNA, 40 bp, Artificial Sequence
  Description of Artificial Sequence: Synthetic primer
ctaaagatatatttttatttgtctttctctgcttccattt

SEQ ID NO: 7898 - DNA, 40 bp, Artificial Sequence
  Description of Artificial Sequence: Synthetic primer
ctaaaggatgccatctctatgaaataaaatgataaaagcc

SEQ ID NO: 7899 - DNA, 40 bp, Artificial Sequence
  Description of Artificial Sequence: Synthetic primer
cactatatagttggttatatgaattcgttttcttcgttta

SEQ ID NO: 7900 - DNA, 40 bp, Artificial Sequence
  Description of Artificial Sequence: Synthetic primer
aaaatattttgttttatcaagtgaacactaactgatctag

SEQ ID NO: 7901 - DNA, 40 bp, Artificial Sequence
  Description of Artificial Sequence: Synthetic primer
aaccagaaaattccttggatttgtcatgtattaaactttg

SEQ ID NO: 7902 - DNA, 40 bp, Artificial Sequence
  Description of Artificial Sequence: Synthetic primer
atttaaatagattaagtaaaaatcaaacatgataggatag

SEQ ID NO: 7903 - DNA, 40 bp, Artificial Sequence
  Description of Artificial Sequence: Synthetic primer
tgcaataagccaatatttacattttaaaggagtttttctg

SEQ ID NO: 7904 - DNA, 40 bp, Artificial Sequence
  Description of Artificial Sequence: Synthetic primer
aaacaaatccaaaagagcttaactttatctgatacaaaaa

SEQ ID NO: 7905 - DNA, 40 bp, Artificial Sequence
  Description of Artificial Sequence: Synthetic primer
tttgtttttagaagtgaatcacctagtttgacccaagaga

SEQ ID NO: 7906 - DNA, 40 bp, Artificial Sequence
  Description of Artificial Sequence: Synthetic primer
gtgcagcctctctggcctgccagtgggagagggacccagt

SEQ ID NO: 7907 - DNA, 40 bp, Artificial Sequence
  Description of Artificial Sequence: Synthetic primer
tcaacgtcgtgccaagtcacagcccagcaccacgctgacc

SEQ ID NO: 7908 - DNA, 40 bp, Artificial Sequence
  Description of Artificial Sequence: Synthetic primer
ttgcagcaattaagtgaggcatttcaagtactatgtttag

SEQ ID NO: 7909 - DNA, 40 bp, Artificial Sequence
  Description of Artificial Sequence: Synthetic primer
tattaataagtatctatctttgctttcacttttgtttttt

SEQ ID NO: 7910 - DNA, 40 bp, Artificial Sequence
  Description of Artificial Sequence: Synthetic primer
cctgggcgtttcccttccatacagaaaggtgatctttgac

SEQ ID NO: 7911 - DNA, 40 bp, Artificial Sequence
  Description of Artificial Sequence: Synthetic primer
attagcaagaatacagcctttctgctgtggtggcaaatgc

SEQ ID NO: 7912 - DNA, 40 bp, Artificial Sequence
  Description of Artificial Sequence: Synthetic primer
tggaccacccagcctcccttccgagggcccagtggagtgc

SEQ ID NO: 7913 - DNA, 40 bp, Artificial Sequence
  Description of Artificial Sequence: Synthetic primer
tcactctggtgaggctgtccctgatgcttggccttctctc

SEQ ID NO: 7914 - DNA, 40 bp, Artificial Sequence
  Description of Artificial Sequence: Synthetic primer
gccctcctttcctaatcctaatccaagagctgctccacac

SEQ ID NO: 7915 - DNA, 40 bp, Artificial Sequence
  Description of Artificial Sequence: Synthetic primer
ctcccagtgggctcagctcactgacagcctctgctgtgcc

SEQ ID NO: 7916 - DNA, 40 bp, Artificial Sequence
  Description of Artificial Sequence: Synthetic primer
gttccttgtactgagaccctagtctgccactgaggatttg

SEQ ID NO: 7917 - DNA, 40 bp, Artificial Sequence
  Description of Artificial Sequence: Synthetic primer
ctcatcagtaccatcaaaagctgagatgaaacagtgtaag

SEQ ID NO: 7918 - DNA, 40 bp, Artificial Sequence
  Description of Artificial Sequence: Synthetic primer
ggtaagagtatctatttgaagttttcattttgtttcttgc

SEQ ID NO: 7919 - DNA, 40 bp, Artificial Sequence
  Description of Artificial Sequence: Synthetic primer
aaaccttccagggttcatgctaacgggctgggtgcagagg

SEQ ID NO: 7920 - DNA, 40 bp, Artificial Sequence
  Description of Artificial Sequence: Synthetic primer
aggcctgggcgtcacctgaacgcacgcgaatcgggtctgc

SEQ ID NO: 7921 - DNA, 40 bp, Artificial Sequence
  Description of Artificial Sequence: Synthetic primer
tccttccctcccgtccctggacagcacagggcgtagttac

SEQ ID NO: 7922 - DNA, 40 bp, Artificial Sequence
  Description of Artificial Sequence: Synthetic primer
agttatgcccatgacagacagagtgacaagaaaaactacg

SEQ ID NO: 7923 - DNA, 40 bp, Artificial Sequence
  Description of Artificial Sequence: Synthetic primer
gatgttcttaaacctgtcttgttccttaaatgttatttcc

SEQ ID NO: 7924 - DNA, 40 bp, Artificial Sequence
  Description of Artificial Sequence: Synthetic primer
actccatggacagtgactacacatacaagcaaatgaaagc

SEQ ID NO: 7925 - DNA, 40 bp, Artificial Sequence
  Description of Artificial Sequence: Synthetic primer
tctctctaatttacagaatataaccttgaaccttgtgaag

SEQ ID NO: 7926 - DNA, 40 bp, Artificial Sequence
  Description of Artificial Sequence: Synthetic primer
acggggtggaggatggctctgcgtctcaaacttctctctc

SEQ ID NO: 7927 - DNA, 40 bp, Artificial Sequence
  Description of Artificial Sequence: Synthetic primer
tccacggaagtggctcagggctgtgaagacaacacactgc

SEQ ID NO: 7928 - DNA, 40 bp, Artificial Sequence
  Description of Artificial Sequence: Synthetic primer
ccctggccattaccttggaccagagccactttgccctttc

SEQ ID NO: 7929 - DNA, 40 bp, Artificial Sequence
  Description of Artificial Sequence: Synthetic primer
taagttaagttgttgtgtacacttaccaatggtctctctc

SEQ ID NO: 7930 - DNA, 40 bp, Artificial Sequence
  Description of Artificial Sequence: Synthetic primer
aagcctccttcctgtccagacccagcgggcgccgccccac

SEQ ID NO: 7931 - DNA, 40 bp, Artificial Sequence
  Description of Artificial Sequence: Synthetic primer
cggcctgggtgctactgccctcgcccaccgcgcctctttc

SEQ ID NO: 7932 - DNA, 40 bp, Artificial Sequence
  Description of Artificial Sequence: Synthetic primer
ggttaaaactgttgagtacattttcctttgcttatactcc

SEQ ID NO: 7933 - DNA, 40 bp, Artificial Sequence
  Description of Artificial Sequence: Synthetic primer
aaaaactaatcaattctatctcactgtcacctttgttagc

SEQ ID NO: 7934 - DNA, 40 bp, Artificial Sequence
  Description of Artificial Sequence: Synthetic primer
tgctcttgaggagctggggagaagtcagaggggcctgatg

SEQ ID NO: 7935 - DNA, 40 bp, Artificial Sequence
  Description of Artificial Sequence: Synthetic primer
tcacagagggatgacgttgtccccagtgcccatcactcac

SEQ ID NO: 7936 - DNA, 40 bp, Artificial Sequence
  Description of Artificial Sequence: Synthetic primer
taccatgcactggccaagggcacagacagggcaaggtagc

SEQ ID NO: 7937 - DNA, 40 bp, Artificial Sequence
  Description of Artificial Sequence: Synthetic primer
tggcaggcatgcatctaggcctgtgtaattcctggctgac

SEQ ID NO: 7938 - DNA, 40 bp, Artificial Sequence
  Description of Artificial Sequence: Synthetic primer
ataatcactgtgatgtccattgtgactatccctccctttc

SEQ ID NO: 7939 - DNA, 40 bp, Artificial Sequence
  Description of Artificial Sequence: Synthetic primer
atacttcacgccacataaacaatccatgaccagtaattta

SEQ ID NO: 7940 - DNA, 40 bp, Artificial Sequence
  Description of Artificial Sequence: Synthetic primer
taattaatacagaaataatgtaattaaaaccatagatatt

SEQ ID NO: 7941 - DNA, 40 bp, Artificial Sequence
  Description of Artificial Sequence: Synthetic primer
gcaccactaatcccaaagcagaagtctagaagggtggtac

SEQ ID NO: 7942 - DNA, 40 bp, Artificial Sequence
  Description of Artificial Sequence: Synthetic primer
gtagggtttgaaattagaaaattatttcactttttgtttg

SEQ ID NO: 7943 - DNA, 40 bp, Artificial Sequence
  Description of Artificial Sequence: Synthetic primer
gggatattcatagcaagcatatgataacagcaaatacatg

SEQ ID NO: 7944 - DNA, 40 bp, Artificial Sequence
  Description of Artificial Sequence: Synthetic primer
gacaatgattacaaaatcccttattatccttaacatccag

SEQ ID NO: 7945 - DNA, 40 bp, Artificial Sequence
  Description of Artificial Sequence: Synthetic primer
agatgacttgaatttttcatgtttcctattctttacttcc

SEQ ID NO: 7946 - DNA, 40 bp, Artificial Sequence
  Description of Artificial Sequence: Synthetic primer
aatagttaccgatagtatcagaataaatcagtttcaaagc

SEQ ID NO: 7947 - DNA, 40 bp, Artificial Sequence
  Description of Artificial Sequence: Synthetic primer
gttctggtttttattaaatttgttaattatctctttgtcc

SEQ ID NO: 7948 - DNA, 40 bp, Artificial Sequence
  Description of Artificial Sequence: Synthetic primer
ttccttagcccagagtaaactgccagcccctctcactctc

SEQ ID NO: 7949 - DNA, 40 bp, Artificial Sequence
  Description of Artificial Sequence: Synthetic primer
ctccagccccttggatacccaccccacttgctgtgttccg

SEQ ID NO: 7950 - DNA, 40 bp, Artificial Sequence
  Description of Artificial Sequence: Synthetic primer
atatactttttaaagtaaatgatttgtggataaacctgat

SEQ ID NO: 7951 - DNA, 40 bp, Artificial Sequence
  Description of Artificial Sequence: Synthetic primer
ataactttaaagtgaacataacataaggttttaatttctt

SEQ ID NO: 7952 - DNA, 40 bp, Artificial Sequence
  Description of Artificial Sequence: Synthetic primer
aggctatcattaggtttctttgtaaatgaataaaatgctc

SEQ ID NO: 7953 - DNA, 40 bp, Artificial Sequence
  Description of Artificial Sequence: Synthetic primer
ttaatcaaaactacaaaattgagaacttagaaaaacaatc

SEQ ID NO: 7954 - DNA, 40 bp, Artificial Sequence
  Description of Artificial Sequence: Synthetic primer
aaatttagaggaaaggagcatatctgtgtcccttaaatac

SEQ ID NO: 7955 - DNA, 40 bp, Artificial Sequence
  Description of Artificial Sequence: Synthetic primer
gtgttatttgatgggaaataccttcattgttttatgttgc

SEQ ID NO: 7956 - DNA, 40 bp, Artificial Sequence
  Description of Artificial Sequence: Synthetic primer
tgggagttcggggtggttgctggaggtcagcaccctgtgg

SEQ ID NO: 7957 - DNA, 40 bp, Artificial Sequence
  Description of Artificial Sequence: Synthetic primer
ggaatagggaatgctgttactcaggtggttctggtcttac

SEQ ID NO: 7958 - DNA, 40 bp, Artificial Sequence
  Description of Artificial Sequence: Synthetic primer
tataagcggtaataactaagtcttaatagtcaaaggaagc

SEQ ID NO: 7959 - DNA, 40 bp, Artificial Sequence
  Description of Artificial Sequence: Synthetic primer
cactttatataagaaaaacttcaacagcaacaaattaaaa

SEQ ID NO: 7960 - DNA, 40 bp, Artificial Sequence
  Description of Artificial Sequence: Synthetic primer
catgtactcagatcttagttaagtcacagacacatatctc

SEQ ID NO: 7961 - DNA, 40 bp, Artificial Sequence
  Description of Artificial Sequence: Synthetic primer
tttcttacactttcttaaggtgactaagtgtcatttgttt

SEQ ID NO: 7962 - DNA, 40 bp, Artificial Sequence
  Description of Artificial Sequence: Synthetic primer
tgtgcaaaccccaccgatcctagcacagctgcctgcactc

SEQ ID NO: 7963 - DNA, 40 bp, Artificial Sequence
  Description of Artificial Sequence: Synthetic primer
cactgtttctcatgatggacccatttcctttctccctgac

SEQ ID NO: 7964 - DNA, 40 bp, Artificial Sequence
  Description of Artificial Sequence: Synthetic primer
gtaaaattttattagtacccgataggctaaggcaaaaatg

SEQ ID NO: 7965 - DNA, 40 bp, Artificial Sequence
  Description of Artificial Sequence: Synthetic primer
tgcacaacgcagtatatttaaggtgcatgtttctgtttac

SEQ ID NO: 7966 - DNA, 40 bp, Artificial Sequence
  Description of Artificial Sequence: Synthetic primer
tacccaagttgcaaatatatgtcttccacccttgactctc

SEQ ID NO: 7967 - DNA, 40 bp, Artificial Sequence
  Description of Artificial Sequence: Synthetic primer
caaaatcagatgccatgtgctttgaggcagactgagtaaa

SEQ ID NO: 7968 - DNA, 40 bp, Artificial Sequence
  Description of Artificial Sequence: Synthetic primer
ccttggccccaggccagggtggttacctggctaggctggg

SEQ ID NO: 7969 - DNA, 40 bp, Artificial Sequence
  Description of Artificial Sequence: Synthetic primer
gaaggcatttctggcctgaccatccctgtttctttggttc

SEQ ID NO: 7970 - DNA, 40 bp, Artificial Sequence
  Description of Artificial Sequence: Synthetic primer
ttaaaaacgctatattttcatttagaatttttttcttttc

SEQ ID NO: 7971 - DNA, 40 bp, Artificial Sequence
  Description of Artificial Sequence: Synthetic primer
cacgaaatagcacattagctagaaaagcaaaacctactac

SEQ ID NO: 7972 - DNA, 40 bp, Artificial Sequence
  Description of Artificial Sequence: Synthetic primer
cttccatccctttccagcgaaagcctggggtgtccttttc

SEQ ID NO: 7973 - DNA, 40 bp, Artificial Sequence
  Description of Artificial Sequence: Synthetic primer
gtgcgggaatggggagaagacaatgggcatggcctcttac

SEQ ID NO: 7974 - DNA, 40 bp, Artificial Sequence
  Description of Artificial Sequence: Synthetic primer
tgtggaaaagacctgtgaccttctccatgtccacttctcc

SEQ ID NO: 7975 - DNA, 40 bp, Artificial Sequence
  Description of Artificial Sequence: Synthetic primer
ccccacctggcaggctgggcccttgtggaatcagttcctc

SEQ ID NO: 7976 - DNA, 40 bp, Artificial Sequence
  Description of Artificial Sequence: Synthetic primer
ggtccgcccggtgtggtcgtgcccggcccgcgtggggatg

SEQ ID NO: 7977 - DNA, 40 bp, Artificial Sequence
  Description of Artificial Sequence: Synthetic primer
cctggggacgcgcggtcacgcggccgtttccgccctctag

SEQ ID NO: 7978 - DNA, 40 bp, Artificial Sequence
  Description of Artificial Sequence: Synthetic primer
aattattgtgtttttttgacatcttttgtcattcttttcc

SEQ ID NO: 7979 - DNA, 40 bp, Artificial Sequence
  Description of Artificial Sequence: Synthetic primer
ttcatttgtcccaattagatattcattagtcagctaaaac

SEQ ID NO: 7980 - DNA, 40 bp, Artificial Sequence
  Description of Artificial Sequence: Synthetic primer
gggccctggggaggcgggcctggccacgtagatcctgagc

SEQ ID NO: 7981 - DNA, 40 bp, Artificial Sequence
  Description of Artificial Sequence: Synthetic primer
taaggctgccacctgaccaggctgcgcgccctacctggag

SEQ ID NO: 7982 - DNA, 40 bp, Artificial Sequence
  Description of Artificial Sequence: Synthetic primer
cattttcttcaatgtcacgtgtgtttattttctttttaac

SEQ ID NO: 7983 - DNA, 40 bp, Artificial Sequence
  Description of Artificial Sequence: Synthetic primer
taatctttctaggttcctagtcatcactttttgattacag

SEQ ID NO: 7984 - DNA, 40 bp, Artificial Sequence
  Description of Artificial Sequence: Synthetic primer
ggccatgctggcaggaaccgctgatgaggtccgaggctta

SEQ ID NO: 7985 - DNA, 40 bp, Artificial Sequence
  Description of Artificial Sequence: Synthetic primer
aaatctgaaaatcctttaagacaacctgagctgattcttc

SEQ ID NO: 7986 - DNA, 40 bp, Artificial Sequence
  Description of Artificial Sequence: Synthetic primer
aaactgctagttactggacttcagctttggctacataaac

SEQ ID NO: 7987 - DNA, 40 bp, Artificial Sequence
  Description of Artificial Sequence: Synthetic primer
gcatcattcctcaggatcctcactgtatgtgtttcttttc

SEQ ID NO: 7988 - DNA, 40 bp, Artificial Sequence
  Description of Artificial Sequence: Synthetic primer
ttttttttaagaattgttctctgtgtacttcaggctctat

SEQ ID NO: 7989 - DNA, 40 bp, Artificial Sequence
  Description of Artificial Sequence: Synthetic primer
aagatcaaaagtatttcaatacaaaacaaaagaaaaagag

SEQ ID NO: 7990 - DNA, 40 bp, Artificial Sequence
  Description of Artificial Sequence: Synthetic primer
aaagttatatataacctgtattttaaatttttctattttt

SEQ ID NO: 7991 - DNA, 40 bp, Artificial Sequence
  Description of Artificial Sequence: Synthetic primer
cattcagggaatgaaaagtacataaaaattgaagccatac

SEQ ID NO: 7992 - DNA, 40 bp, Artificial Sequence
  Description of Artificial Sequence: Synthetic primer
cagccagctggctcctctcaccctgattccttctggtttg

SEQ ID NO: 7993 - DNA, 40 bp, Artificial Sequence
  Description of Artificial Sequence: Synthetic primer
tgcacacacacaacttctctaggtcctttacaaaagaaag

SEQ ID NO: 7994 - DNA, 40 bp, Artificial Sequence
  Description of Artificial Sequence: Synthetic primer
cctgtgggtttcacctctgcctcaggttagtacattgaag

SEQ ID NO: 7995 - DNA, 40 bp, Artificial Sequence
  Description of Artificial Sequence: Synthetic primer
ttttccactgaaattttatttgtgtgccttaattattttc

SEQ ID NO: 7996 - DNA, 40 bp, Artificial Sequence
  Description of Artificial Sequence: Synthetic primer
ggccttccccagtcactgactgttccctctcacctgctgc

SEQ ID NO: 7997 - DNA, 40 bp, Artificial Sequence
  Description of Artificial Sequence: Synthetic primer
gactgggcctggaagagggtttctcccctcagccctcatg

SEQ ID NO: 7998 - DNA, 40 bp, Artificial Sequence
  Description of Artificial Sequence: Synthetic primer
aaaaaaaaccaaacccttcctgatcgtttctgctgctgtg

SEQ ID NO: 7999 - DNA, 40 bp, Artificial Sequence
  Description of Artificial Sequence: Synthetic primer
ctgtcctcggagcggagcggctggacaggactctgcttac

SEQ ID NO: 8000 - DNA, 40 bp, Artificial Sequence
  Description of Artificial Sequence: Synthetic primer
gctagcagtcttggtactttgtaaatgacacatctctttg

SEQ ID NO: 8001 - DNA, 40 bp, Artificial Sequence
  Description of Artificial Sequence: Synthetic primer
ggacaagggtatgaacagctgtgaggatgccagtttctgc

SEQ ID NO: 8002 - DNA, 40 bp, Artificial Sequence
  Description of Artificial Sequence: Synthetic primer
ctctgcactctcctctccaaggtcttcatgttaagcaagg

SEQ ID NO: 8003 - DNA, 40 bp, Artificial Sequence
  Description of Artificial Sequence: Synthetic primer
gctttcttaaataataactaactccttgctcccctttgac

SEQ ID NO: 8004 - DNA, 40 bp, Artificial Sequence
  Description of Artificial Sequence: Synthetic primer
catttttcctcccaccgccgttgccgccctccccgtcctg

SEQ ID NO: 8005 - DNA, 40 bp, Artificial Sequence
  Description of Artificial Sequence: Synthetic primer
gagctgtcccagcccttccctgttggtcgccttggcttac

SEQ ID NO: 8006 - DNA, 40 bp, Artificial Sequence
  Description of Artificial Sequence: Synthetic primer
caaacaaaacaagtgccgaatgcgccccggacttttcgag

SEQ ID NO: 8007 - DNA, 40 bp, Artificial Sequence
  Description of Artificial Sequence: Synthetic primer
ctggtgccaaagggcggcgcagcggctgccgagctcggcc

SEQ ID NO: 8008 - DNA, 40 bp, Artificial Sequence
  Description of Artificial Sequence: Synthetic primer
ttttcctttaggatttggctgaaacaaagctgtccatttt

SEQ ID NO: 8009 - DNA, 40 bp, Artificial Sequence
  Description of Artificial Sequence: Synthetic primer
tttttctctgagaagtgaatgtactgagtggtaaaagact

SEQ ID NO: 8010 - DNA, 40 bp, Artificial Sequence
  Description of Artificial Sequence: Synthetic primer
gaggaggggaaaagggaaggggcagggagagggacagtag

SEQ ID NO: 8011 - DNA, 40 bp, Artificial Sequence
  Description of Artificial Sequence: Synthetic primer
ctgcttaaggattctgatttgtttagaataggaagtattt

SEQ ID NO: 8012 - DNA, 40 bp, Artificial Sequence
  Description of Artificial Sequence: Synthetic primer
ttgatcatgttctgtgtttaccctcatggccggcctctcc

SEQ ID NO: 8013 - DNA, 40 bp, Artificial Sequence
  Description of Artificial Sequence: Synthetic primer
taaggtaggttgaatccctgcttcctcccatcattatttg

SEQ ID NO: 8014 - DNA, 40 bp, Artificial Sequence
  Description of Artificial Sequence: Synthetic primer
ccaggctgtcggactgaaactgtgttctgcttcattcttc

SEQ ID NO: 8015 - DNA, 40 bp, Artificial Sequence
  Description of Artificial Sequence: Synthetic primer
ctcagaaaagctaccattatcagtaatgaaaaccaggatc

SEQ ID NO: 8016 - DNA, 40 bp, Artificial Sequence
  Description of Artificial Sequence: Synthetic primer
gagacgagtgacttcaccctcgatctaaggaccccctctc

SEQ ID NO: 8017 - DNA, 40 bp, Artificial Sequence
  Description of Artificial Sequence: Synthetic primer
atctagtggggcacagtggtggccactccatgccatgttc

SEQ ID NO: 8018 - DNA, 40 bp, Artificial Sequence
  Description of Artificial Sequence: Synthetic primer
agcctttctcaggtccatgagggatatttagagtgagaac

SEQ ID NO: 8019 - DNA, 40 bp, Artificial Sequence
  Description of Artificial Sequence: Synthetic primer
cgcttcttagaggacacctcaaggcttacctctgtgtttc

SEQ ID NO: 8020 - DNA, 40 bp, Artificial Sequence
  Description of Artificial Sequence: Synthetic primer
agaaggaggcactcatagtaaagagctgaagggtgcaaag

SEQ ID NO: 8021 - DNA, 40 bp, Artificial Sequence
  Description of Artificial Sequence: Synthetic primer
ttcacttctagctcagaccctggctttggcttccctctag

SEQ ID NO: 8022 - DNA, 40 bp, Artificial Sequence
  Description of Artificial Sequence: Synthetic primer
ctgtcaattgctcctcttctctggcagccctgcgcacctc

SEQ ID NO: 8023 - DNA, 40 bp, Artificial Sequence
  Description of Artificial Sequence: Synthetic primer
ctttaattactttcttaggataactatgttcttccttttc

SEQ ID NO: 8024 - DNA, 40 bp, Artificial Sequence
  Description of Artificial Sequence: Synthetic primer
gggcacaggcggcgctgtcggcgcggcgtccctggggtcc

SEQ ID NO: 8025 - DNA, 40 bp, Artificial Sequence
  Description of Artificial Sequence: Synthetic primer
tttctactacttctctggttttatttttacatcaaactgc

SEQ ID NO: 8026 - DNA, 40 bp, Artificial Sequence
  Description of Artificial Sequence: Synthetic primer
tgctcctgagcggggagctggctctgctgctgggccttac

SEQ ID NO: 8027 - DNA, 40 bp, Artificial Sequence
  Description of Artificial Sequence: Synthetic primer
aatttagttgaacaatctaaaaatttaataacaaatctga

SEQ ID NO: 8028 - DNA, 40 bp, Artificial Sequence
  Description of Artificial Sequence: Synthetic primer
ttaaatttctttgttcttttcaaatttataaacgatgctt

SEQ ID NO: 8029 - DNA, 40 bp, Artificial Sequence
  Description of Artificial Sequence: Synthetic primer
ccacagtctcttttcaaggaaagcagagtgaaacaaaatg

SEQ ID NO: 8030 - DNA, 40 bp, Artificial Sequence
  Description of Artificial Sequence: Synthetic primer
ttagtcaggagtctaagccaacagccaccttctcagtaac

SEQ ID NO: 8031 - DNA, 40 bp, Artificial Sequence
  Description of Artificial Sequence: Synthetic primer
caaacaagtttgatgtataaaaactgtattgcagtcaagg

SEQ ID NO: 8032 - DNA, 40 bp, Artificial Sequence
  Description of Artificial Sequence: Synthetic primer
actgtaggatcagttttgtattttctcatttttcttttcc

SEQ ID NO: 8033 - DNA, 40 bp, Artificial Sequence
  Description of Artificial Sequence: Synthetic primer
acacgggatggtcagggcctggccaagccaggctgaaagc

SEQ ID NO: 8034 - DNA, 40 bp, Artificial Sequence
  Description of Artificial Sequence: Synthetic primer
gagccacaaacttgagaccctaactgttcctgtgacttcc

SEQ ID NO: 8035 - DNA, 40 bp, Artificial Sequence
  Description of Artificial Sequence: Synthetic primer
gcatctctacgggccattctaatagcctcaaaatctctgc

SEQ ID NO: 8036 - DNA, 40 bp, Artificial Sequence
  Description of Artificial Sequence: Synthetic primer
atttgttcaaatgagtagacacagcttgagagagagagag

SEQ ID NO: 8037 - DNA, 40 bp, Artificial Sequence
  Description of Artificial Sequence: Synthetic primer
attattttacatatcaaaagaggcaaaggtattccataag

SEQ ID NO: 8038 - DNA, 40 bp, Artificial Sequence
  Description of Artificial Sequence: Synthetic primer
cgtttactgctgaaaagctttttaaatttttttgttgttg

SEQ ID NO: 8039 - DNA, 40 bp, Artificial Sequence
  Description of Artificial Sequence: Synthetic primer
ggagcatgaaggtcaggacttggaagtgacccccccctcc

SEQ ID NO: 8040 - DNA, 40 bp, Artificial Sequence
  Description of Artificial Sequence: Synthetic primer
gccccttctctgtctcccttggagatcctggtgctactag

SEQ ID NO: 8041 - DNA, 40 bp, Artificial Sequence
  Description of Artificial Sequence: Synthetic primer
cccacgaggatgctggcaggggacgctggggccagggtcc

SEQ ID NO: 8042 - DNA, 40 bp, Artificial Sequence
  Description of Artificial Sequence: Synthetic primer
agtgaggcgccgcggctctcacccttgtcttctgttttgc

SEQ ID NO: 8043 - DNA, 40 bp, Artificial Sequence
  Description of Artificial Sequence: Synthetic primer
acaaatgtgttgagattgaattctgaattcagaattatac

SEQ ID NO: 8044 - DNA, 40 bp, Artificial Sequence
  Description of Artificial Sequence: Synthetic primer
tcatctctaatactattgaaaatgttaattttaacagagc

SEQ ID NO: 8045 - DNA, 40 bp, Artificial Sequence
  Description of Artificial Sequence: Synthetic primer
tgcatgtctgccaggaaacttttcattgtgcctctctctc

SEQ ID NO: 8046 - DNA, 40 bp, Artificial Sequence
  Description of Artificial Sequence: Synthetic primer
aactaggttgctatgcttgttctcattggcttcaaagatc

SEQ ID NO: 8047 - DNA, 40 bp, Artificial Sequence
  Description of Artificial Sequence: Synthetic primer
taaactttactcttttaatgatttataattcttgattttg

SEQ ID NO: 8048 - DNA, 40 bp, Artificial Sequence
  Description of Artificial Sequence: Synthetic primer
actgcattctgggcacaaccgtgttctaaacctcttcttc

SEQ ID NO: 8049 - DNA, 40 bp, Artificial Sequence
  Description of Artificial Sequence: Synthetic primer
accttcctcgactgcaagcttgagcagctgagctgacagc

SEQ ID NO: 8050 - DNA, 40 bp, Artificial Sequence
  Description of Artificial Sequence: Synthetic primer
cgtgtttgtcaagtcatggatttttctcaaaattgtattc

SEQ ID NO: 8051 - DNA, 40 bp, Artificial Sequence
  Description of Artificial Sequence: Synthetic primer
gcgttttcacctcctgcgccgtggtgagctgcgtcctctc

SEQ ID NO: 8052 - DNA, 40 bp, Artificial Sequence
  Description of Artificial Sequence: Synthetic primer
ccgtctctgcagcttccaggaaccacacctgccgagacgg

SEQ ID NO: 8053 - DNA, 40 bp, Artificial Sequence
  Description of Artificial Sequence: Synthetic primer
aatcctaagaaaatttgtggaaataaacttgtgatacctc

SEQ ID NO: 8054 - DNA, 40 bp, Artificial Sequence
  Description of Artificial Sequence: Synthetic primer
aaatttgaaactggggccagtgatggtagagagggcatcc

SEQ ID NO: 8055 - DNA, 40 bp, Artificial Sequence
  Description of Artificial Sequence: Synthetic primer
cgttcttcccacaataccgggtagtttcccaagtgatacc

SEQ ID NO: 8056 - DNA, 40 bp, Artificial Sequence
  Description of Artificial Sequence: Synthetic primer
ttgcagcctctgacttgtgctgattgctaatgaacttggc

SEQ ID NO: 8057 - DNA, 40 bp, Artificial Sequence
  Description of Artificial Sequence: Synthetic primer
aggagtatgaggaagggaaagggaaggaaaacagcctttc

SEQ ID NO: 8058 - DNA, 40 bp, Artificial Sequence
  Description of Artificial Sequence: Synthetic primer
ggttttcgtccctgaccctcaccaactataggcttttccc

SEQ ID NO: 8059 - DNA, 40 bp, Artificial Sequence
  Description of Artificial Sequence: Synthetic primer
aactgcagagtatttgggcgaatgcagtttttcctcctac

SEQ ID NO: 8060 - DNA, 40 bp, Artificial Sequence
  Description of Artificial Sequence: Synthetic primer
gcccatgagttagaggaaatgaactgatttgtgaatatgc

SEQ ID NO: 8061 - DNA, 40 bp, Artificial Sequence
  Description of Artificial Sequence: Synthetic primer
acagtgacaataaatcaagatgatatgagacaactgttac

SEQ ID NO: 8062 - DNA, 40 bp, Artificial Sequence
  Description of Artificial Sequence: Synthetic primer
tgatttttctgtgaactgaagttctttattcttattttat

SEQ ID NO: 8063 - DNA, 40 bp, Artificial Sequence
  Description of Artificial Sequence: Synthetic primer
cccggccgcccgtgcccggggctgttttcgcgagcaggtg

SEQ ID NO: 8064 - DNA, 40 bp, Artificial Sequence
  Description of Artificial Sequence: Synthetic primer
atgggctggcttactcaatgcatcattgcctacatcgatg

SEQ ID NO: 8065 - DNA, 40 bp, Artificial Sequence
  Description of Artificial Sequence: Synthetic primer
catttttttaaaagcaaagtcttttcccttaacttttttc

SEQ ID NO: 8066 - DNA, 40 bp, Artificial Sequence
  Description of Artificial Sequence: Synthetic primer
gggtgaatggaggtgatggcagacacttttactgaatgtc

SEQ ID NO: 8067 - DNA, 40 bp, Artificial Sequence
  Description of Artificial Sequence: Synthetic primer
caatctccaactttccccttaagttttaaaaaggagcaac

SEQ ID NO: 8068 - DNA, 40 bp, Artificial Sequence
  Description of Artificial Sequence: Synthetic primer
cccctaatacttaatttgataagttaattttggtttttac

SEQ ID NO: 8069 - DNA, 40 bp, Artificial Sequence
  Description of Artificial Sequence: Synthetic primer
cccagtgatttttttcagatatattatacatttaaactta

SEQ ID NO: 8070 - DNA, 40 bp, Artificial Sequence
  Description of Artificial Sequence: Synthetic primer
aaagtacctgttagcattctaagcttctatgtactatacc

SEQ ID NO: 8071 - DNA, 40 bp, Artificial Sequence
  Description of Artificial Sequence: Synthetic primer
aatggttacttagctgtgttcattttcttgttttgttttc

SEQ ID NO: 8072 - DNA, 40 bp, Artificial Sequence
  Description of Artificial Sequence: Synthetic primer
gcaatccccaaaatgggtagcaactgagcagcctccacac

SEQ ID NO: 8073 - DNA, 40 bp, Artificial Sequence
  Description of Artificial Sequence: Synthetic primer
ggcaccctccctttcctgacccctctttctgctgcattgg

SEQ ID NO: 8074 - DNA, 40 bp, Artificial Sequence
  Description of Artificial Sequence: Synthetic primer
tgagcttccagagggcctaggagcagtaagggagtgagtg

SEQ ID NO: 8075 - DNA, 40 bp, Artificial Sequence
  Description of Artificial Sequence: Synthetic primer
ccaacgggctggggcacagagagagagaacgaaaatgagg

SEQ ID NO: 8076 - DNA, 40 bp, Artificial Sequence
  Description of Artificial Sequence: Synthetic primer
gctttattatgtttcttttgcaagttcttataatttatgt

SEQ ID NO: 8077 - DNA, 40 bp, Artificial Sequence
  Description of Artificial Sequence: Synthetic primer
tcaaatatttctaaattaaagcttgttctcatgatgcttc

SEQ ID NO: 8078 - DNA, 40 bp, Artificial Sequence
  Description of Artificial Sequence: Synthetic primer
tgccgaggaccctcaaactccctcctcatgcctggtgtgc

SEQ ID NO: 8079 - DNA, 40 bp, Artificial Sequence
  Description of Artificial Sequence: Synthetic primer
gccgctgaggagctgcacctaggcctgcagaggccaccag

SEQ ID NO: 8080 - DNA, 40 bp, Artificial Sequence
  Description of Artificial Sequence: Synthetic primer
cctgctattcctcccttgccatcagctagctgcaggcccc

SEQ ID NO: 8081 - DNA, 40 bp, Artificial Sequence
  Description of Artificial Sequence: Synthetic primer
cggtggccggagcagccggaagctagcatggcggccgccg

SEQ ID NO: 8082 - DNA, 40 bp, Artificial Sequence
  Description of Artificial Sequence: Synthetic primer
caatgataactgtatccagccccactcctaatgaggcaac

SEQ ID NO: 8083 - DNA, 40 bp, Artificial Sequence
  Description of Artificial Sequence: Synthetic primer
aagacactagagaatgatttatttgctgtcctttaattgc

SEQ ID NO: 8084 - DNA, 40 bp, Artificial Sequence
  Description of Artificial Sequence: Synthetic primer
gaccgtggcctgatccagctcctgatgctcccggtctctg

SEQ ID NO: 8085 - DNA, 40 bp, Artificial Sequence
  Description of Artificial Sequence: Synthetic primer
aggaggtcacaccactcgccctgctggccacagctatacc

SEQ ID NO: 8086 - DNA, 40 bp, Artificial Sequence
  Description of Artificial Sequence: Synthetic primer
tgcacccctgctgttgaccgggcttgtgggcatgaatgag

SEQ ID NO: 8087 - DNA, 40 bp, Artificial Sequence
  Description of Artificial Sequence: Synthetic primer
tggctggatggcgctcgatgcctcggctaccacatcctcc

SEQ ID NO: 8088 - DNA, 40 bp, Artificial Sequence
  Description of Artificial Sequence: Synthetic primer
ttctcaaagattatttattcccaatggaagagaattcatc

SEQ ID NO: 8089 - DNA, 40 bp, Artificial Sequence
  Description of Artificial Sequence: Synthetic primer
ctgaatttaatgctgtatagacagatgctaatcctaccgg

SEQ ID NO: 8090 - DNA, 40 bp, Artificial Sequence
  Description of Artificial Sequence: Synthetic primer
gagggtatagaccctcctcatttagatgccactaatctgc

SEQ ID NO: 8091 - DNA, 40 bp, Artificial Sequence
  Description of Artificial Sequence: Synthetic primer
acatgactacatgacacacaagactaaaaggcaaccaaag

SEQ ID NO: 8092 - DNA, 40 bp, Artificial Sequence
  Description of Artificial Sequence: Synthetic primer
ccatgccttccctggctgtggccccactgttctgacacac

SEQ ID NO: 8093 - DNA, 40 bp, Artificial Sequence
  Description of Artificial Sequence: Synthetic primer
ccgctttgaagtcccaccacccagccctgaggggcaatag

SEQ ID NO: 8094 - DNA, 40 bp, Artificial Sequence
  Description of Artificial Sequence: Synthetic primer
tggcctctctctcctcccttctccttctccctgggcactc

SEQ ID NO: 8095 - DNA, 40 bp, Artificial Sequence
  Description of Artificial Sequence: Synthetic primer
ccttcctgcctgtatccctgacctgcccttgcctcttctg

SEQ ID NO: 8096 - DNA, 40 bp, Artificial Sequence
  Description of Artificial Sequence: Synthetic primer
ttccaatttttgttttgttttgtttttctgtatgtgcttt

SEQ ID NO: 8097 - DNA, 40 bp, Artificial Sequence
  Description of Artificial Sequence: Synthetic primer
ttttatttccattgtacttaaaataacaaagaacaagaac

SEQ ID NO: 8098 - DNA, 40 bp, Artificial Sequence
  Description of Artificial Sequence: Synthetic primer
ccctctcgtgtaatctacatagaattaatgaagaatgtgg

SEQ ID NO: 8099 - DNA, 40 bp, Artificial Sequence
  Description of Artificial Sequence: Synthetic primer
ctgacgaattctttgacagaaggacgtggtgtttttacag

SEQ ID NO: 8100 - DNA, 40 bp, Artificial Sequence
  Description of Artificial Sequence: Synthetic primer
aaggccctctgtccccagagccggggcgccgccgcgctac

SEQ ID NO: 8101 - DNA, 40 bp, Artificial Sequence
  Description of Artificial Sequence: Synthetic primer
ggtcgctgcccggccttcactgcgtccctgggttccttgc

SEQ ID NO: 8102 - DNA, 40 bp, Artificial Sequence
  Description of Artificial Sequence: Synthetic primer
gtataacaaaatgggtatttttcttttgatttctattaac

SEQ ID NO: 8103 - DNA, 40 bp, Artificial Sequence
  Description of Artificial Sequence: Synthetic primer
aaattagttaattactattgttcttattcatctaaaaatg

SEQ ID NO: 8104 - DNA, 40 bp, Artificial Sequence
  Description of Artificial Sequence: Synthetic primer
cgctcgctgaccgttctggaagatcttgaaccctcttctg

SEQ ID NO: 8105 - DNA, 40 bp, Artificial Sequence
  Description of Artificial Sequence: Synthetic primer
atgcatgaggaaaaccatgagcagaaattttgaaaagcac

SEQ ID NO: 8106 - DNA, 40 bp, Artificial Sequence
  Description of Artificial Sequence: Synthetic primer
gtcaagcagtatgcaacaacaagaagacaaagagcagacg

SEQ ID NO: 8107 - DNA, 40 bp, Artificial Sequence
  Description of Artificial Sequence: Synthetic primer
acgtttatacctcctatagtaaaaagttttgtcttctttc

SEQ ID NO: 8108 - DNA, 40 bp, Artificial Sequence
  Description of Artificial Sequence: Synthetic primer
tgataatttcatgctaaaatgatactaattctttttgttc

SEQ ID NO: 8109 - DNA, 40 bp, Artificial Sequence
  Description of Artificial Sequence: Synthetic primer
caaactgtcagaacaaataactgcaacaacaatattaaag

SEQ ID NO: 8110 - DNA, 40 bp, Artificial Sequence
  Description of Artificial Sequence: Synthetic primer
tgggatttctaacattctcccctcctcttcttgttctctc

SEQ ID NO: 8111 - DNA, 40 bp, Artificial Sequence
  Description of Artificial Sequence: Synthetic primer
ttatatagtgaaaaccacctcccaagagtccccacatctg

SEQ ID NO: 8112 - DNA, 40 bp, Artificial Sequence
  Description of Artificial Sequence: Synthetic primer
tattaagactgtgaagtctgacccctaaagtaagataatg

SEQ ID NO: 8113 - DNA, 40 bp, Artificial Sequence
  Description of Artificial Sequence: Synthetic primer
taagtttaatacagatatttgataagtaaatatataaatg

SEQ ID NO: 8114 - DNA, 40 bp, Artificial Sequence
  Description of Artificial Sequence: Synthetic primer
gggctttggtaaaccaaacaacttccacctctaaagttac

SEQ ID NO: 8115 - DNA, 40 bp, Artificial Sequence
  Description of Artificial Sequence: Synthetic primer
ttgtgttatataaaatctaaaacataggctttcaatattg

SEQ ID NO: 8116 - DNA, 40 bp, Artificial Sequence
  Description of Artificial Sequence: Synthetic primer
tctggcaagcgggcgtggggactgctcgcagagcactgta

SEQ ID NO: 8117 - DNA, 40 bp, Artificial Sequence
  Description of Artificial Sequence: Synthetic primer
agcagtgctgttgaagccctctcacctgctccttctggac

SEQ ID NO: 8118 - DNA, 40 bp, Artificial Sequence
  Description of Artificial Sequence: Synthetic primer
ccccttcctccatgccctcctgttctactccctccaccac

SEQ ID NO: 8119 - DNA, 40 bp, Artificial Sequence
  Description of Artificial Sequence: Synthetic primer
atggcctccttggtctgtgcctcccacccgctctgttctc

SEQ ID NO: 8120 - DNA, 40 bp, Artificial Sequence
  Description of Artificial Sequence: Synthetic primer
tttgtttgcaaggaatctagaagaatttcaggactaacag

SEQ ID NO: 8121 - DNA, 40 bp, Artificial Sequence
  Description of Artificial Sequence: Synthetic primer
tttttctactaaaatgtatcacaccaccaaaatatgagtc

SEQ ID NO: 8122 - DNA, 40 bp, Artificial Sequence
  Description of Artificial Sequence: Synthetic primer
actcattttctaatcctagcatccctgtggcaaacgtatc

SEQ ID NO: 8123 - DNA, 40 bp, Artificial Sequence
  Description of Artificial Sequence: Synthetic primer
tgatacaatatagtattagtggtgtttttcctctttacag

SEQ ID NO: 8124 - DNA, 40 bp, Artificial Sequence
  Description of Artificial Sequence: Synthetic primer
ctcttttgtaagaaagacctaacttttcatcaatgctttc

SEQ ID NO: 8125 - DNA, 40 bp, Artificial Sequence
  Description of Artificial Sequence: Synthetic primer
atggggaatgttcaaattcttcaggaacaggcaaaacttc

SEQ ID NO: 8126 - DNA, 40 bp, Artificial Sequence
  Description of Artificial Sequence: Synthetic primer
ccagagacaaagttgcaaaacagataagtaccaaagacac

SEQ ID NO: 8127 - DNA, 40 bp, Artificial Sequence
  Description of Artificial Sequence: Synthetic primer
ctctgaagtatttaattcagttgattacagtttgcatttc

SEQ ID NO: 8128 - DNA, 40 bp, Artificial Sequence
  Description of Artificial Sequence: Synthetic primer
cattattgacaatatggaagcacacagacaaaatacatac

SEQ ID NO: 8129 - DNA, 40 bp, Artificial Sequence
  Description of Artificial Sequence: Synthetic primer
attttccaaaaccgttctaatggattgtgcattatatttc

SEQ ID NO: 8130 - DNA, 40 bp, Artificial Sequence
  Description of Artificial Sequence: Synthetic primer
acatacaaatgtaagttatactcaacatgaagaaaaacac

SEQ ID NO: 8131 - DNA, 40 bp, Artificial Sequence
  Description of Artificial Sequence: Synthetic primer
tatatcatctttaactgtacgtgttattttcttggatttc

SEQ ID NO: 8132 - DNA, 40 bp, Artificial Sequence
  Description of Artificial Sequence: Synthetic primer
ctccccaggtcccttcattctgtgctcactccatgatgtc

SEQ ID NO: 8133 - DNA, 40 bp, Artificial Sequence
  Description of Artificial Sequence: Synthetic primer
ccatttgtgttttgatctacacagtttccctctccaagtg

SEQ ID NO: 8134 - DNA, 40 bp, Artificial Sequence
  Description of Artificial Sequence: Synthetic primer
tgtctaatctccgccgtgaccagggccttccttgtatctc

SEQ ID NO: 8135 - DNA, 40 bp, Artificial Sequence
  Description of Artificial Sequence: Synthetic primer
tgagaatcctggtcccttacaaagtccttccgtgcacatg

SEQ ID NO: 8136 - DNA, 40 bp, Artificial Sequence
  Description of Artificial Sequence: Synthetic primer
gccagaggagggttccaggaggcccctggtagccctgtgc

SEQ ID NO: 8137 - DNA, 40 bp, Artificial Sequence
  Description of Artificial Sequence: Synthetic primer
tgcacagtgcccagctttcagagcgaaatcccctgtctcc

SEQ ID NO: 8138 - DNA, 40 bp, Artificial Sequence
  Description of Artificial Sequence: Synthetic primer
gaatctaagtttcatttcacatcacatgaatggctcaaac

SEQ ID NO: 8139 - DNA, 40 bp, Artificial Sequence
  Description of Artificial Sequence: Synthetic primer
atttggcccatgtgctgcagtttgccaaccctcacattta

SEQ ID NO: 8140 - DNA, 40 bp, Artificial Sequence
  Description of Artificial Sequence: Synthetic primer
ggatgctgagggcaggccccagtattccggctaaccactc

SEQ ID NO: 8141 - DNA, 40 bp, Artificial Sequence
  Description of Artificial Sequence: Synthetic primer
tggtgcccagggcgccactcagccctcatcctgccctttg

SEQ ID NO: 8142 - DNA, 40 bp, Artificial Sequence
  Description of Artificial Sequence: Synthetic primer
agcacattgggcacaaagcagaggcacataccaggcagtc

SEQ ID NO: 8143 - DNA, 40 bp, Artificial Sequence
  Description of Artificial Sequence: Synthetic primer
tattagttctcataatcgcctcttattaatttgtatgcac

SEQ ID NO: 8144 - DNA, 40 bp, Artificial Sequence
  Description of Artificial Sequence: Synthetic primer
taagcaggagataccatctatctattctcacctctgttgg

SEQ ID NO: 8145 - DNA, 40 bp, Artificial Sequence
  Description of Artificial Sequence: Synthetic primer
actgcggcagccccggactctgcctgctcctgccatggtg

SEQ ID NO: 8146 - DNA, 40 bp, Artificial Sequence
  Description of Artificial Sequence: Synthetic primer
cttcccaggcacctgctgcaagggacacagccaggtcagg

SEQ ID NO: 8147 - DNA, 40 bp, Artificial Sequence
  Description of Artificial Sequence: Synthetic primer
gcggggtcctgaggtaagacctgctcctcccgtccactgc

SEQ ID NO: 8148 - DNA, 40 bp, Artificial Sequence
  Description of Artificial Sequence: Synthetic primer
aaagcccagctgtgggagtggcccatccccaacccccagc

SEQ ID NO: 8149 - DNA, 40 bp, Artificial Sequence
  Description of Artificial Sequence: Synthetic primer
acccatgaaggagaccccagttgtgggtacctttagattc

SEQ ID NO: 8150 - DNA, 40 bp, Artificial Sequence
  Description of Artificial Sequence: Synthetic primer
gcttatttattggtctctcattctcccatccccactcctc

SEQ ID NO: 8151 - DNA, 40 bp, Artificial Sequence
  Description of Artificial Sequence: Synthetic primer
aaaacacaggggtttttaaaggcttaaaatggaaatgttc

SEQ ID NO: 8152 - DNA, 40 bp, Artificial Sequence
  Description of Artificial Sequence: Synthetic primer
tggcccagcttccattagctatttgccagtgtttcacatg

SEQ ID NO: 8153 - DNA, 40 bp, Artificial Sequence
  Description of Artificial Sequence: Synthetic primer
tcaaagctttggaataatgtcctttcataagaaatgtgtg

SEQ ID NO: 8154 - DNA, 40 bp, Artificial Sequence
  Description of Artificial Sequence: Synthetic primer
gtcccaatgtggggtgctgattctataatgctgatgattg

SEQ ID NO: 8155 - DNA, 40 bp, Artificial Sequence
  Description of Artificial Sequence: Synthetic primer
tgcctccctggagccagctgggccaggcggccactcactc

SEQ ID NO: 8156 - DNA, 40 bp, Artificial Sequence
  Description of Artificial Sequence: Synthetic primer
ctgggccatcttcggttcagaggttcccttcccctctctc

SEQ ID NO: 8157 - DNA, 40 bp, Artificial Sequence
  Description of Artificial Sequence: Synthetic primer
cattagcagacccaggggtccaagttaggttaggtgatta

SEQ ID NO: 8158 - DNA, 40 bp, Artificial Sequence
  Description of Artificial Sequence: Synthetic primer
cctccaacagtccaagatggggacacaccaggctactcac

SEQ ID NO: 8159 - DNA, 40 bp, Artificial Sequence
  Description of Artificial Sequence: Synthetic primer
ggccacttccatccccacagccctgtttctgtgtttttgg

SEQ ID NO: 8160 - DNA, 40 bp, Artificial Sequence
  Description of Artificial Sequence: Synthetic primer
acctggagttgggtcccctgatgtaggcagcacccataac

SEQ ID NO: 8161 - DNA, 40 bp, Artificial Sequence
  Description of Artificial Sequence: Synthetic primer
agagacttggagccaccttcacctgtaaccaagtatcctc

SEQ ID NO: 8162 - DNA, 40 bp, Artificial Sequence
  Description of Artificial Sequence: Synthetic primer
ggaaactaaattttctgtgactttctcatttctttttcag

SEQ ID NO: 8163 - DNA, 40 bp, Artificial Sequence
  Description of Artificial Sequence: Synthetic primer
aacatactaaatgctccagtacttgtggactgatatttga

SEQ ID NO: 8164 - DNA, 40 bp, Artificial Sequence
  Description of Artificial Sequence: Synthetic primer
tgccctttacaccactgcccaagtaaagcttagtaacatt

SEQ ID NO: 8165 - DNA, 40 bp, Artificial Sequence
  Description of Artificial Sequence: Synthetic primer
tggaagagacaggcccggaggggtgaggcagtctttactc

SEQ ID NO: 8166 - DNA, 40 bp, Artificial Sequence
  Description of Artificial Sequence: Synthetic primer
atggccgttgtacactcatcttcctagggataaaattagg

SEQ ID NO: 8167 - DNA, 40 bp, Artificial Sequence
  Description of Artificial Sequence: Synthetic primer
gaaacagtatttggaacacaaaactcaacaatgctatctg

SEQ ID NO: 8168 - DNA, 40 bp, Artificial Sequence
  Description of Artificial Sequence: Synthetic primer
acatcaccgtcatgtgtgctgaacactctcagctgactca

SEQ ID NO: 8169 - DNA, 40 bp, Artificial Sequence
  Description of Artificial Sequence: Synthetic primer
catcctgcactcaattaaccttcatatttcacacctaatc

SEQ ID NO: 8170 - DNA, 40 bp, Artificial Sequence
  Description of Artificial Sequence: Synthetic primer
cataaaaaacagatatgctacattaacctgcaaaggagtg

SEQ ID NO: 8171 - DNA, 40 bp, Artificial Sequence
  Description of Artificial Sequence: Synthetic primer
agagttgaaagatgccatttccccaaacgaaagtaatctg

SEQ ID NO: 8172 - DNA, 40 bp, Artificial Sequence
  Description of Artificial Sequence: Synthetic primer
gtaaaaacccactagtacacagcaaagaatccaaaaactg

SEQ ID NO: 8173 - DNA, 40 bp, Artificial Sequence
  Description of Artificial Sequence: Synthetic primer
gtttcagtgtgacctacggttcttcactcttccctcttac

SEQ ID NO: 8174 - DNA, 40 bp, Artificial Sequence
  Description of Artificial Sequence: Synthetic primer
aacaacctaacaactacaccatcacaaatggtggcctctc

SEQ ID NO: 8175 - DNA, 40 bp, Artificial Sequence
  Description of Artificial Sequence: Synthetic primer
tctttacacagctgcaatatataaatgtgttaactcaaaa

SEQ ID NO: 8176 - DNA, 40 bp, Artificial Sequence
  Description of Artificial Sequence: Synthetic primer
acccctgtggaattttgtctcttcaatatcagaaggaatt

SEQ ID NO: 8177 - DNA, 40 bp, Artificial Sequence
  Description of Artificial Sequence: Synthetic primer
ggccaggggtccagacgccgcgcgcactcaccttccttgc

SEQ ID NO: 8178 - DNA, 40 bp, Artificial Sequence
  Description of Artificial Sequence: Synthetic primer
cgaggccggcgtgcaggcgtgcgggtgtgcgggagccggg

SEQ ID NO: 8179 - DNA, 40 bp, Artificial Sequence
  Description of Artificial Sequence: Synthetic primer
tgcaaaattaatcccttaatatacatttctaaattattcc

SEQ ID NO: 8180 - DNA, 40 bp, Artificial Sequence
  Description of Artificial Sequence: Synthetic primer
cagtagaaattacaatcagttaactctcagttcagtcctg

SEQ ID NO: 8181 - DNA, 40 bp, Artificial Sequence
  Description of Artificial Sequence: Synthetic primer
ctagtttctgcttctatcctctcccttatgatgattttcc

SEQ ID NO: 8182 - DNA, 40 bp, Artificial Sequence
  Description of Artificial Sequence: Synthetic primer
cgtgagccactgtgcccagcctcaagtcccatcttgattc

SEQ ID NO: 8183 - DNA, 40 bp, Artificial Sequence
  Description of Artificial Sequence: Synthetic primer
gtttaattgaacacaatattgaaaaataattatatatatt

SEQ ID NO: 8184 - DNA, 40 bp, Artificial Sequence
  Description of Artificial Sequence: Synthetic primer
caaaaataaaacctgccaaacaacaaagtgctcaatctac

SEQ ID NO: 8185 - DNA, 40 bp, Artificial Sequence
  Description of Artificial Sequence: Synthetic primer
tcatgcctgcagccatgctggttacattttcctctgtatc

SEQ ID NO: 8186 - DNA, 40 bp, Artificial Sequence
  Description of Artificial Sequence: Synthetic primer
tgcacatttttctgctcattatgtcaccattatctcttcc

SEQ ID NO: 8187 - DNA, 40 bp, Artificial Sequence
  Description of Artificial Sequence: Synthetic primer
tcacgactaaatcacttctaattcactaaatacgtttcac

SEQ ID NO: 8188 - DNA, 40 bp, Artificial Sequence
  Description of Artificial Sequence: Synthetic primer
ggatgatactggttgacacaattgttttattttatttcag

SEQ ID NO: 8189 - DNA, 40 bp, Artificial Sequence
  Description of Artificial Sequence: Synthetic primer
caacaagttagcttactggttatgttaagtttgttgtatt

SEQ ID NO: 8190 - DNA, 40 bp, Artificial Sequence
  Description of Artificial Sequence: Synthetic primer
tagagaaagaatatcaaaaagctgtgtgaatgcgtcaaat

SEQ ID NO: 8191 - DNA, 40 bp, Artificial Sequence
  Description of Artificial Sequence: Synthetic primer
tccattttcttgttttcatttggtaatactgtctttgctc

SEQ ID NO: 8192 - DNA, 40 bp, Artificial Sequence
  Description of Artificial Sequence: Synthetic primer
aagtgggcaacttaagaaaaattctgaagttcaagataag

SEQ ID NO: 8193 - DNA, 40 bp, Artificial Sequence
  Description of Artificial Sequence: Synthetic primer
atgccttcttgaaggacttccatgtcactgtgatcttttc

SEQ ID NO: 8194 - DNA, 40 bp, Artificial Sequence
  Description of Artificial Sequence: Synthetic primer
ggaagttaaatgtggaactttgtgggaagccacggattac

SEQ ID NO: 8195 - DNA, 40 bp, Artificial Sequence
  Description of Artificial Sequence: Synthetic primer
tcccattttggagaaccatgaggcattctacaatctagcc

SEQ ID NO: 8196 - DNA, 40 bp, Artificial Sequence
  Description of Artificial Sequence: Synthetic primer
agttcattctctaagtgatgacttttaaatttattttctg

SEQ ID NO: 8197 - DNA, 40 bp, Artificial Sequence
  Description of Artificial Sequence: Synthetic primer
tttggtataattttactaactctaagatattaactctatc

SEQ ID NO: 8198 - DNA, 40 bp, Artificial Sequence
  Description of Artificial Sequence: Synthetic primer
aatacatagatggattcttaccttagctttctcatttttc

SEQ ID NO: 8199 - DNA, 40 bp, Artificial Sequence
  Description of Artificial Sequence: Synthetic primer
tagaaaagagtattattgtcctaagttatggaacattgtg

SEQ ID NO: 8200 - DNA, 40 bp, Artificial Sequence
  Description of Artificial Sequence: Synthetic primer
aggagttaaaatctgaagaaaaggcataattcaaagaaac

SEQ ID NO: 8201 - DNA, 40 bp, Artificial Sequence
  Description of Artificial Sequence: Synthetic primer
tgaagggctgtgtgtatgtaaactgttttgctgttgtctc

SEQ ID NO: 8202 - DNA, 40 bp, Artificial Sequence
  Description of Artificial Sequence: Synthetic primer
atccagtcaaggccaccatttcggtaccacccatgtcacc

SEQ ID NO: 8203 - DNA, 40 bp, Artificial Sequence
  Description of Artificial Sequence: Synthetic primer
tgtcctggaggaatcaaagtatgtgtttggttgtctttgc

SEQ ID NO: 8204 - DNA, 40 bp, Artificial Sequence
  Description of Artificial Sequence: Synthetic primer
aggagactgggcggccaggctctcggagttccacacacac

SEQ ID NO: 8205 - DNA, 40 bp, Artificial Sequence
  Description of Artificial Sequence: Synthetic primer
cctatccatcttgtcgttctgaaccgctgatgctttgctc

SEQ ID NO: 8206 - DNA, 40 bp, Artificial Sequence
  Description of Artificial Sequence: Synthetic primer
accctctcacccataaagtcctatttctcttgaaccaatg

SEQ ID NO: 8207 - DNA, 40 bp, Artificial Sequence
  Description of Artificial Sequence: Synthetic primer
atccacagaccacagcacccaccggagagccataacactg

SEQ ID NO: 8208 - DNA, 40 bp, Artificial Sequence
  Description of Artificial Sequence: Synthetic primer
tcccaggcccttccttttatattgactgcgtcaccacagc

SEQ ID NO: 8209 - DNA, 40 bp, Artificial Sequence
  Description of Artificial Sequence: Synthetic primer
gcgccccgccaccgcagcgcccggcagtccgcggcccaac

SEQ ID NO: 8210 - DNA, 40 bp, Artificial Sequence
  Description of Artificial Sequence: Synthetic primer
gctccgcccggtcccgccgctcccaggccccgcctcgacc

SEQ ID NO: 8211 - DNA, 40 bp, Artificial Sequence
  Description of Artificial Sequence: Synthetic primer
ctacatgtagcagccacaggcatgaatggctaaatccttg

SEQ ID NO: 8212 - DNA, 40 bp, Artificial Sequence
  Description of Artificial Sequence: Synthetic primer
atcttcagtgctaaaacagatctgaacactaacaaatgcc

SEQ ID NO: 8213 - DNA, 40 bp, Artificial Sequence
  Description of Artificial Sequence: Synthetic primer
aagccaactggcttaacacaggtcaataagaaactatcac

SEQ ID NO: 8214 - DNA, 40 bp, Artificial Sequence
  Description of Artificial Sequence: Synthetic primer
tctatttcctaagcatttaggatgtgactaacactgtccc

SEQ ID NO: 8215 - DNA, 40 bp, Artificial Sequence
  Description of Artificial Sequence: Synthetic primer
gtttttacttttgaaatggaaaagtgacagtattttttat

SEQ ID NO: 8216 - DNA, 40 bp, Artificial Sequence
  Description of Artificial Sequence: Synthetic primer
gggaagtcattgtacaacacataggaaaaacacaacttac

SEQ ID NO: 8217 - DNA, 40 bp, Artificial Sequence
  Description of Artificial Sequence: Synthetic primer
atgctgggtgaaggtgtgtggctcctggtggtgacaaaac

SEQ ID NO: 8218 - DNA, 40 bp, Artificial Sequence
  Description of Artificial Sequence: Synthetic primer
agggccggtgcagctcccgcacgggccacgcccccaactg

SEQ ID NO: 8219 - DNA, 40 bp, Artificial Sequence
  Description of Artificial Sequence: Synthetic primer
ggcaggcgactgttggccaaatgagcccctgccctgtctc

SEQ ID NO: 8220 - DNA, 40 bp, Artificial Sequence
  Description of Artificial Sequence: Synthetic primer
cggcaggacccaggcctggcctctggccatggagtccagg

SEQ ID NO: 8221 - DNA, 40 bp, Artificial Sequence
  Description of Artificial Sequence: Synthetic primer
atcacttcttccattgcatctttctcatctttctccaaac

SEQ ID NO: 8222 - DNA, 40 bp, Artificial Sequence
  Description of Artificial Sequence: Synthetic primer
cacttatcaaaactgaaaaattacaatgaaaggtttgtac

SEQ ID NO: 8223 - DNA, 40 bp, Artificial Sequence
  Description of Artificial Sequence: Synthetic primer
gggcctcaaggcactcacctgtgcggccatggggacactc

SEQ ID NO: 8224 - DNA, 40 bp, Artificial Sequence
  Description of Artificial Sequence: Synthetic primer
ggagtggcagctgcccggggccgacagctcctgttccctg

SEQ ID NO: 8225 - DNA, 40 bp, Artificial Sequence
  Description of Artificial Sequence: Synthetic primer
aggactgctggacatgcagtggatgctgacttttctctat

SEQ ID NO: 8226 - DNA, 40 bp, Artificial Sequence
  Description of Artificial Sequence: Synthetic primer
tcaatttaaactgcacacggtactttaatagaacaagaag

SEQ ID NO: 8227 - DNA, 40 bp, Artificial Sequence
  Description of Artificial Sequence: Synthetic primer
tcagtcctcaggcccgccctgcccactggccccccgccgg

SEQ ID NO: 8228 - DNA, 40 bp, Artificial Sequence
  Description of Artificial Sequence: Synthetic primer
agtcctaagtcttcctgtgcccgcccctcccacggtccag

SEQ ID NO: 8229 - DNA, 40 bp, Artificial Sequence
  Description of Artificial Sequence: Synthetic primer
tctgcctgagttctgtgtgcagcctaaaaatgttctctcc

SEQ ID NO: 8230 - DNA, 40 bp, Artificial Sequence
  Description of Artificial Sequence: Synthetic primer
gaaggactcttaagaacatatttggtgtcttatactgaac

SEQ ID NO: 8231 - DNA, 40 bp, Artificial Sequence
  Description of Artificial Sequence: Synthetic primer
ctatgacattaatatatataccttattttctcttaatttc

SEQ ID NO: 8232 - DNA, 40 bp, Artificial Sequence
  Description of Artificial Sequence: Synthetic primer
ctattacaagcatgtaatcactcattgcagattcctaaag

SEQ ID NO: 8233 - DNA, 40 bp, Artificial Sequence
  Description of Artificial Sequence: Synthetic primer
cttctcagtggccctcacttctctgttttattgtcgttac

SEQ ID NO: 8234 - DNA, 40 bp, Artificial Sequence
  Description of Artificial Sequence: Synthetic primer
atgtgctctgtctctcaaaggcccatcccacacttgaaag

SEQ ID NO: 8235 - DNA, 40 bp, Artificial Sequence
  Description of Artificial Sequence: Synthetic primer
acaagatgtataatgacctataattttaagtgtgaaaacc

SEQ ID NO: 8236 - DNA, 40 bp, Artificial Sequence
  Description of Artificial Sequence: Synthetic primer
aaacttcactgatttgttttgagtttgactctttttcagc

SEQ ID NO: 8237 - DNA, 40 bp, Artificial Sequence
  Description of Artificial Sequence: Synthetic primer
ccttaattaaaatatatgatagacatttctatatgacttc

SEQ ID NO: 8238 - DNA, 40 bp, Artificial Sequence
  Description of Artificial Sequence: Synthetic primer
aatattatatggacaatttagatgtaatatgaaaccaagt

SEQ ID NO: 8239 - DNA, 40 bp, Artificial Sequence
  Description of Artificial Sequence: Synthetic primer
aagcccgtggctgctgtcaccacctgtagtgcccagacct

SEQ ID NO: 8240 - DNA, 40 bp, Artificial Sequence
  Description of Artificial Sequence: Synthetic primer
gagtaagagactgatctgtgccctcccttccccctcgtcc

SEQ ID NO: 8241 - DNA, 40 bp, Artificial Sequence
  Description of Artificial Sequence: Synthetic primer
cttctgagacctggccctgcttggatcatattggcctgtc

SEQ ID NO: 8242 - DNA, 40 bp, Artificial Sequence
  Description of Artificial Sequence: Synthetic primer
ctggagtctccccaagccactttcagcttgtgggaattgg

SEQ ID NO: 8243 - DNA, 40 bp, Artificial Sequence
  Description of Artificial Sequence: Synthetic primer
cttggcgtccagctcagccactaatgcaagtcaccacaac

SEQ ID NO: 8244 - DNA, 40 bp, Artificial Sequence
  Description of Artificial Sequence: Synthetic primer
ataagccttgcataaatggctgtactgtaattgattattc

SEQ ID NO: 8245 - DNA, 40 bp, Artificial Sequence
  Description of Artificial Sequence: Synthetic primer
acaaaactagtctaattcatttcttaattctctcaaatcc

SEQ ID NO: 8246 - DNA, 40 bp, Artificial Sequence
  Description of Artificial Sequence: Synthetic primer
caaagaaatactttggcttgtatctttctttctcttactg

SEQ ID NO: 8247 - DNA, 40 bp, Artificial Sequence
  Description of Artificial Sequence: Synthetic primer
tcctcctatgagagagtggaaaaaaaaaattccagtaacc

SEQ ID NO: 8248 - DNA, 40 bp, Artificial Sequence
  Description of Artificial Sequence: Synthetic primer
agatattttcccactataaatctctgctattcaaagtctg

SEQ ID NO: 8249 - DNA, 40 bp, Artificial Sequence
  Description of Artificial Sequence: Synthetic primer
tagggctgggcagagagagctccgactctgacacgggaag

SEQ ID NO: 8250 - DNA, 40 bp, Artificial Sequence
  Description of Artificial Sequence: Synthetic primer
cacgaggcaagcttggtcaccagcctctactgagtttcgc

SEQ ID NO: 8251 - DNA, 40 bp, Artificial Sequence
  Description of Artificial Sequence: Synthetic primer
aataattgtcaatgttttctttttctttcaattgcttttt

SEQ ID NO: 8252 - DNA, 40 bp, Artificial Sequence
  Description of Artificial Sequence: Synthetic primer
atgaagagctgaatcattcactgcaatactctaaaaatgg

SEQ ID NO: 8253 - DNA, 40 bp, Artificial Sequence
  Description of Artificial Sequence: Synthetic primer
ttaaccttgagattttttctaagaatctttctctttttcc

SEQ ID NO: 8254 - DNA, 40 bp, Artificial Sequence
  Description of Artificial Sequence: Synthetic primer
atcacagagtatgaagagtttttcttgtagtatctaggaa

SEQ ID NO: 8255 - DNA, 40 bp, Artificial Sequence
  Description of Artificial Sequence: Synthetic primer
atttcaaaggggacaccaacccgtctaccccattgcagag

SEQ ID NO: 8256 - DNA, 40 bp, Artificial Sequence
  Description of Artificial Sequence: Synthetic primer
tgctagggcctagggtgaggcttatgggcttttactcctc

SEQ ID NO: 8257 - DNA, 40 bp, Artificial Sequence
  Description of Artificial Sequence: Synthetic primer
ctcagggcatagcactactttatgaatggagaggctgctg

SEQ ID NO: 8258 - DNA, 40 bp, Artificial Sequence
  Description of Artificial Sequence: Synthetic primer
tgctggccgttatccttcaggtttccttctctcatggttc

SEQ ID NO: 8259 - DNA, 40 bp, Artificial Sequence
  Description of Artificial Sequence: Synthetic primer
gaaggcacctctgtaagttcccagacctcccgataaaacg

SEQ ID NO: 8260 - DNA, 40 bp, Artificial Sequence
  Description of Artificial Sequence: Synthetic primer
ccaaccccattctcaaaggcctctgttcttcccgtttttg

SEQ ID NO: 8261 - DNA, 40 bp, Artificial Sequence
  Description of Artificial Sequence: Synthetic primer
tctgcttgtttgcatatgacttggggagtccatcgtcttg

SEQ ID NO: 8262 - DNA, 40 bp, Artificial Sequence
  Description of Artificial Sequence: Synthetic primer
cccggccacagatgtgagccgagtcttcctacctcaatgc

SEQ ID NO: 8263 - DNA, 40 bp, Artificial Sequence
  Description of Artificial Sequence: Synthetic primer
ttaagttttaatttttcctttactatttgccatattcttg

SEQ ID NO: 8264 - DNA, 40 bp, Artificial Sequence
  Description of Artificial Sequence: Synthetic primer
atgattcagtcctgaactatttcattaaacccagagaata

SEQ ID NO: 8265 - DNA, 40 bp, Artificial Sequence
  Description of Artificial Sequence: Synthetic primer
ccttcctgcagagcgagctgccctcggaggccggcgtggg

SEQ ID NO: 8266 - DNA, 40 bp, Artificial Sequence
  Description of Artificial Sequence: Synthetic primer
agctctggccagccaagcgcactcacagagagctccagag

SEQ ID NO: 8267 - DNA, 40 bp, Artificial Sequence
  Description of Artificial Sequence: Synthetic primer
caactcccctctacagccaaggagactatgtccccaagtg

SEQ ID NO: 8268 - DNA, 40 bp, Artificial Sequence
  Description of Artificial Sequence: Synthetic primer
cctagggcagagctgtgcaagggcctggtatgatgttgtg

SEQ ID NO: 8269 - DNA, 40 bp, Artificial Sequence
  Description of Artificial Sequence: Synthetic primer
gggtgcccagcccctgagcccaggtgagggaggtgagtgg

SEQ ID NO: 8270 - DNA, 40 bp, Artificial Sequence
  Description of Artificial Sequence: Synthetic primer
actgggagattgggaggtggcggggaaagtgtgacttggg

SEQ ID NO: 8271 - DNA, 40 bp, Artificial Sequence
  Description of Artificial Sequence: Synthetic primer
cctcatcctgactggtcctcctttcctgggtgggaaagtc

SEQ ID NO: 8272 - DNA, 40 bp, Artificial Sequence
  Description of Artificial Sequence: Synthetic primer
tctgcctctgagggactctgaaccctacttatcctgcacc

SEQ ID NO: 8273 - DNA, 40 bp, Artificial Sequence
  Description of Artificial Sequence: Synthetic primer
agtcactccttaggacttctcactgccccttccccagtag

SEQ ID NO: 8274 - DNA, 40 bp, Artificial Sequence
  Description of Artificial Sequence: Synthetic primer
ggtgcttcaggggtgtctgcaaaggagctctgcttcacag

SEQ ID NO: 8275 - DNA, 40 bp, Artificial Sequence
  Description of Artificial Sequence: Synthetic primer
caattcctgcaaagcagctctaagaccggggtcccaaatg

SEQ ID NO: 8276 - DNA, 40 bp, Artificial Sequence
  Description of Artificial Sequence: Synthetic primer
tacctcaagggagagctggcttcttaactaaaacttaata

SEQ ID NO: 8277 - DNA, 40 bp, Artificial Sequence
  Description of Artificial Sequence: Synthetic primer
tccagtgaaaatgtataagcgtaccataggaaacagatgc

SEQ ID NO: 8278 - DNA, 40 bp, Artificial Sequence
  Description of Artificial Sequence: Synthetic primer
caataagctgggttattatttacagttctttttctgtttc

SEQ ID NO: 8279 - DNA, 40 bp, Artificial Sequence
  Description of Artificial Sequence: Synthetic primer
ttattacaaaattaacaaggaaggcagaacgcacgtccac

SEQ ID NO: 8280 - DNA, 40 bp, Artificial Sequence
  Description of Artificial Sequence: Synthetic primer
aatcagcatatgtgtaaagatttatacagttgaaaacttg

SEQ ID NO: 8281 - DNA, 40 bp, Artificial Sequence
  Description of Artificial Sequence: Synthetic primer
ctcccagcccgcgtggggtctgcaccggcccccggcactg

SEQ ID NO: 8282 - DNA, 40 bp, Artificial Sequence
  Description of Artificial Sequence: Synthetic primer
cccatcctctggggccgcccaccccaggacctggccctga

SEQ ID NO: 8283 - DNA, 40 bp, Artificial Sequence
  Description of Artificial Sequence: Synthetic primer
agaggaaggtcattcatttttggtttcatttaacattttg

SEQ ID NO: 8284 - DNA, 40 bp, Artificial Sequence
  Description of Artificial Sequence: Synthetic primer
atggtcagatgctgacaaacaagaaagagggtctatgtac

SEQ ID NO: 8285 - DNA, 40 bp, Artificial Sequence
  Description of Artificial Sequence: Synthetic primer
ttctacatattatttgacatacttctatcttcccatgttc

SEQ ID NO: 8286 - DNA, 40 bp, Artificial Sequence
  Description of Artificial Sequence: Synthetic primer
tgatacagaggcccagctgtagttctattaccaagttttg

SEQ ID NO: 8287 - DNA, 40 bp, Artificial Sequence
  Description of Artificial Sequence: Synthetic primer
cggcgccgccgctggctcccggcctggctccctcgcactc

SEQ ID NO: 8288 - DNA, 40 bp, Artificial Sequence
  Description of Artificial Sequence: Synthetic primer
ccaggaggaggaccgggatccatgtgtctttcctggtgac

SEQ ID NO: 8289 - DNA, 40 bp, Artificial Sequence
  Description of Artificial Sequence: Synthetic primer
cctctcctgtgaagatctggccagcacctccccgtgagcg

SEQ ID NO: 8290 - DNA, 40 bp, Artificial Sequence
  Description of Artificial Sequence: Synthetic primer
ggtgcccctcccagggtgcactcacctgtgctgatgctgc

SEQ ID NO: 8291 - DNA, 40 bp, Artificial Sequence
  Description of Artificial Sequence: Synthetic primer
acatcctggaggcacttctgacttgctgtcttttcactcc

SEQ ID NO: 8292 - DNA, 40 bp, Artificial Sequence
  Description of Artificial Sequence: Synthetic primer
aggaatcacacctcctgggtcctggctctgccacacaccc

SEQ ID NO: 8293 - DNA, 40 bp, Artificial Sequence
  Description of Artificial Sequence: Synthetic primer
gaccaccaggcggccctgaggagggcaggtgggcacacag

SEQ ID NO: 8294 - DNA, 40 bp, Artificial Sequence
  Description of Artificial Sequence: Synthetic primer
gggaccggccctccagactgagcacccgtctctgcctctg

SEQ ID NO: 8295 - DNA, 40 bp, Artificial Sequence
  Description of Artificial Sequence: Synthetic primer
ttttaattaaaaattaaattggtagagtgattaaaaacat

SEQ ID NO: 8296 - DNA, 40 bp, Artificial Sequence
  Description of Artificial Sequence: Synthetic primer
ataaaacagatatgctatagtacagaaggcaaaagaaaag

SEQ ID NO: 8297 - DNA, 40 bp, Artificial Sequence
  Description of Artificial Sequence: Synthetic primer
aaaaaagatcagttgtaaacttaggcttttcatttgttta

SEQ ID NO: 8298 - DNA, 40 bp, Artificial Sequence
  Description of Artificial Sequence: Synthetic primer
ggaaaacatgtaacatctattaaatactactaaaacaaac

SEQ ID NO: 8299 - DNA, 40 bp, Artificial Sequence
  Description of Artificial Sequence: Synthetic primer
taagagcagaggctcagctgtggtaagaaagttgtttttc

SEQ ID NO: 8300 - DNA, 40 bp, Artificial Sequence
  Description of Artificial Sequence: Synthetic primer
agctttttacaagtaacaactccactgtacaaaatatagc

SEQ ID NO: 8301 - DNA, 40 bp, Artificial Sequence
  Description of Artificial Sequence: Synthetic primer
agtctaatttataaagtttatataagaaataattggtttc

SEQ ID NO: 8302 - DNA, 40 bp, Artificial Sequence
  Description of Artificial Sequence: Synthetic primer
ttttttgcaaatgaaactgagtcactttaaggattaaaag

SEQ ID NO: 8303 - DNA, 40 bp, Artificial Sequence
  Description of Artificial Sequence: Synthetic primer
ctgccctccccttccccgcctctcataggcatttcctgtc

SEQ ID NO: 8304 - DNA, 40 bp, Artificial Sequence
  Description of Artificial Sequence: Synthetic primer
ctattatccccaaccctagtttgtgcctagcagagagcag

SEQ ID NO: 8305 - DNA, 40 bp, Artificial Sequence
  Description of Artificial Sequence: Synthetic primer
gtggtttcttgtacataatgatgatgaggttctatttctc

SEQ ID NO: 8306 - DNA, 40 bp, Artificial Sequence
  Description of Artificial Sequence: Synthetic primer
taatgttgtttgtttgtgtatttttctttgcatattattc

SEQ ID NO: 8307 - DNA, 40 bp, Artificial Sequence
  Description of Artificial Sequence: Synthetic primer
ttatatttataaaactagctgaaagaaaaatgttttatcc

SEQ ID NO: 8308 - DNA, 40 bp, Artificial Sequence
  Description of Artificial Sequence: Synthetic primer
caataaagtttgaagtctgtgctctaaaatttcatttatc

SEQ ID NO: 8309 - DNA, 40 bp, Artificial Sequence
  Description of Artificial Sequence: Synthetic primer
ggtggaaacaggtgatgactgtccctgactaccccctctg

SEQ ID NO: 8310 - DNA, 40 bp, Artificial Sequence
  Description of Artificial Sequence: Synthetic primer
tctgctagtcatccacccaggggtagtcccatctcaagtc

SEQ ID NO: 8311 - DNA, 40 bp, Artificial Sequence
  Description of Artificial Sequence: Synthetic primer
catgataactaggaaaggatttgagcgacaaaatggaaac

SEQ ID NO: 8312 - DNA, 40 bp, Artificial Sequence
  Description of Artificial Sequence: Synthetic primer
cactgtggatggagaatgatgttttctgttctgtaattgc

SEQ ID NO: 8313 - DNA, 40 bp, Artificial Sequence
  Description of Artificial Sequence: Synthetic primer
caggaaatattttctctccagtcttccattcaaaacacac

SEQ ID NO: 8314 - DNA, 40 bp, Artificial Sequence
  Description of Artificial Sequence: Synthetic primer
gatttatataatattaatgtctgtttattgtcttttgttg

SEQ ID NO: 8315 - DNA, 40 bp, Artificial Sequence
  Description of Artificial Sequence: Synthetic primer
gtaacaaacacaatttaatcttcactttataccatttttc

SEQ ID NO: 8316 - DNA, 40 bp, Artificial Sequence
  Description of Artificial Sequence: Synthetic primer
ccatagttcagaatttattctatatccaaccctaactttg

SEQ ID NO: 8317 - DNA, 40 bp, Artificial Sequence
  Description of Artificial Sequence: Synthetic primer
gcattgaagtctcatggaagccagcccctcagggcaactg

SEQ ID NO: 8318 - DNA, 40 bp, Artificial Sequence
  Description of Artificial Sequence: Synthetic primer
tgaggacctggtcctctgactgctcttttcacccatctac

SEQ ID NO: 8319 - DNA, 40 bp, Artificial Sequence
  Description of Artificial Sequence: Synthetic primer
ggactgtgcctacccactatgaatgagcagaaaaccatag

SEQ ID NO: 8320 - DNA, 40 bp, Artificial Sequence
  Description of Artificial Sequence: Synthetic primer
cagaaaattgtgacatcctgtgtgaggatgagctctttac

SEQ ID NO: 8321 - DNA, 40 bp, Artificial Sequence
  Description of Artificial Sequence: Synthetic primer
cctgctctagcacttggtcatgctgccatctctgtgtctc

SEQ ID NO: 8322 - DNA, 40 bp, Artificial Sequence
  Description of Artificial Sequence: Synthetic primer
atgcccaggctctacccggccggaagaaagcagcgcctac

SEQ ID NO: 8323 - DNA, 40 bp, Artificial Sequence
  Description of Artificial Sequence: Synthetic primer
agaaaagatgtgtgaagattctttaaaaactgtactgtgg

SEQ ID NO: 8324 - DNA, 40 bp, Artificial Sequence
  Description of Artificial Sequence: Synthetic primer
ttgcttttatgaagcacccttaaaatgccgtttctgctgc

SEQ ID NO: 8325 - DNA, 40 bp, Artificial Sequence
  Description of Artificial Sequence: Synthetic primer
tcttcagaagaaaatctttgaagttttcacagaaactttg

SEQ ID NO: 8326 - DNA, 40 bp, Artificial Sequence
  Description of Artificial Sequence: Synthetic primer
cattgatcttatttgcctataatcttgttttcaacacctc

SEQ ID NO: 8327 - DNA, 40 bp, Artificial Sequence
  Description of Artificial Sequence: Synthetic primer
tggagccttgtatatagacggtaaaataaacaccaagacg

SEQ ID NO: 8328 - DNA, 40 bp, Artificial Sequence
  Description of Artificial Sequence: Synthetic primer
tctttattcaattgaagtgaagaatatttttctttgtatg

SEQ ID NO: 8329 - DNA, 40 bp, Artificial Sequence
  Description of Artificial Sequence: Synthetic primer
gagccactgcgcctggctggatatatatacttttaatgtg

SEQ ID NO: 8330 - DNA, 40 bp, Artificial Sequence
  Description of Artificial Sequence: Synthetic primer
tttatttgaatcactgcaactgttgttggcttgaacttac

SEQ ID NO: 8331 - DNA, 40 bp, Artificial Sequence
  Description of Artificial Sequence: Synthetic primer
tttcaaaatattttgattcttattgatgccccatgttttg

SEQ ID NO: 8332 - DNA, 40 bp, Artificial Sequence
  Description of Artificial Sequence: Synthetic primer
ctaaaggcaactgcctttaacatgtataatcactgcaagt

SEQ ID NO: 8333 - DNA, 40 bp, Artificial Sequence
  Description of Artificial Sequence: Synthetic primer
ggtcagtctaacaatccattttgtggcatatatttaaaac

SEQ ID NO: 8334 - DNA, 40 bp, Artificial Sequence
  Description of Artificial Sequence: Synthetic primer
aacctattagcctattagtaccagtgacatcttttcatcc

SEQ ID NO: 8335 - DNA, 40 bp, Artificial Sequence
  Description of Artificial Sequence: Synthetic primer
ctttcaagaataactataatattgctagacagttcattac

SEQ ID NO: 8336 - DNA, 40 bp, Artificial Sequence
  Description of Artificial Sequence: Synthetic primer
actgtgttctattcctgttaaagatgttttctgcatttgg

SEQ ID NO: 8337 - DNA, 40 bp, Artificial Sequence
  Description of Artificial Sequence: Synthetic primer
agtgcatcatggtgtgggcacgcatgcttttcccgtcttc

SEQ ID NO: 8338 - DNA, 40 bp, Artificial Sequence
  Description of Artificial Sequence: Synthetic primer
aaaatcagcaacttccaagtaatccaaagtccacttcttg

SEQ ID NO: 8339 - DNA, 40 bp, Artificial Sequence
  Description of Artificial Sequence: Synthetic primer
ttgactgtgtactccaaagtctcagctacccagagtgacc

SEQ ID NO: 8340 - DNA, 40 bp, Artificial Sequence
  Description of Artificial Sequence: Synthetic primer
aggggaagggaaagaagatgctaagagagagaaatctggc

SEQ ID NO: 8341 - DNA, 40 bp, Artificial Sequence
  Description of Artificial Sequence: Synthetic primer
ctgacctgggccactagccacctccccacactgagaactg

SEQ ID NO: 8342 - DNA, 40 bp, Artificial Sequence
  Description of Artificial Sequence: Synthetic primer
tgaggaggctgggccactcacctcaggcgccacaaagttg

SEQ ID NO: 8343 - DNA, 40 bp, Artificial Sequence
  Description of Artificial Sequence: Synthetic primer
gagagctgtgttttgcatacatggtctgtggtctgttttg

SEQ ID NO: 8344 - DNA, 40 bp, Artificial Sequence
  Description of Artificial Sequence: Synthetic primer
gccaagacctgtctttcccatttgcatttctagctctgtg

SEQ ID NO: 8345 - DNA, 40 bp, Artificial Sequence
  Description of Artificial Sequence: Synthetic primer
cgtctgttaggcaggcagcaaggtccacttcaccagacac

SEQ ID NO: 8346 - DNA, 40 bp, Artificial Sequence
  Description of Artificial Sequence: Synthetic primer
cttctccctgctggcttcttcaatcctcaccaaaggtctg

SEQ ID NO: 8347 - DNA, 40 bp, Artificial Sequence
  Description of Artificial Sequence: Synthetic primer
caggcataaacctgggacgcactgttttctcttttgtttc

SEQ ID NO: 8348 - DNA, 40 bp, Artificial Sequence
  Description of Artificial Sequence: Synthetic primer
agatggggagtaagggcacgggtgcaccaccatagaagag

SEQ ID NO: 8349 - DNA, 40 bp, Artificial Sequence
  Description of Artificial Sequence: Synthetic primer
ctagtagggtcctggtatggggaacgccattttcattaac

SEQ ID NO: 8350 - DNA, 40 bp, Artificial Sequence
  Description of Artificial Sequence: Synthetic primer
ttttatatcagtatattgaattagtagctgttaatgtttc

SEQ ID NO: 8351 - DNA, 40 bp, Artificial Sequence
  Description of Artificial Sequence: Synthetic primer
ttatcatcctcaaaatgtggttatattttcttttcctttc

SEQ ID NO: 8352 - DNA, 40 bp, Artificial Sequence
  Description of Artificial Sequence: Synthetic primer
gagttagtaaaacaaatacattctcttttgttaattcata

SEQ ID NO: 8353 - DNA, 40 bp, Artificial Sequence
  Description of Artificial Sequence: Synthetic primer
acgttccacatgctgaccctgccttgccatggtccctctc

SEQ ID NO: 8354 - DNA, 40 bp, Artificial Sequence
  Description of Artificial Sequence: Synthetic primer
tctgaggactctggagtatgacaaacacaaggcaggaagg

SEQ ID NO: 8355 - DNA, 40 bp, Artificial Sequence
  Description of Artificial Sequence: Synthetic primer
tgtttagctctagactaagttgctttcaagtgataattgc

SEQ ID NO: 8356 - DNA, 40 bp, Artificial Sequence
  Description of Artificial Sequence: Synthetic primer
tgaaaaattctaagaaatttgatgttaaaaatctcagtac

SEQ ID NO: 8357 - DNA, 40 bp, Artificial Sequence
  Description of Artificial Sequence: Synthetic primer
aatcttctgtatcattacactgaagttgactaattttccc

SEQ ID NO: 8358 - DNA, 40 bp, Artificial Sequence
  Description of Artificial Sequence: Synthetic primer
acaaaatcttactcctttaacagtaaaaagattgctttcg

SEQ ID NO: 8359 - DNA, 40 bp, Artificial Sequence
  Description of Artificial Sequence: Synthetic primer
ttttactgaacatgcttcattttgtgatttgagtcatttc

SEQ ID NO: 8360 - DNA, 40 bp, Artificial Sequence
  Description of Artificial Sequence: Synthetic primer
gacacaaataaggtttcaattaaacaacttcttttttttt

SEQ ID NO: 8361 - DNA, 40 bp, Artificial Sequence
  Description of Artificial Sequence: Synthetic primer
aaaaaatttacctaaaattttgaatggataatcgttcttc

SEQ ID NO: 8362 - DNA, 40 bp, Artificial Sequence
  Description of Artificial Sequence: Synthetic primer
ttgccttatattgataatgaaagcatatttgccattttgg

SEQ ID NO: 8363 - DNA, 40 bp, Artificial Sequence
  Description of Artificial Sequence: Synthetic primer
tatacagagtgacaaattcgttttataacacaggcaactg

SEQ ID NO: 8364 - DNA, 40 bp, Artificial Sequence
  Description of Artificial Sequence: Synthetic primer
ttaggaataggcagttctgcagatagaggaaagaataatg

SEQ ID NO: 8365 - DNA, 40 bp, Artificial Sequence
  Description of Artificial Sequence: Synthetic primer
tttataatgtcacacaggaattctgtttcatcgctgagtg

SEQ ID NO: 8366 - DNA, 40 bp, Artificial Sequence
  Description of Artificial Sequence: Synthetic primer
aaggtgtcccttccttttcctagaagcagacagtgtaagg

SEQ ID NO: 8367 - DNA, 40 bp, Artificial Sequence
  Description of Artificial Sequence: Synthetic primer
tcctgaaatgggacagctgacccacacatgtgtatctgac

SEQ ID NO: 8368 - DNA, 40 bp, Artificial Sequence
  Description of Artificial Sequence: Synthetic primer
cacacactcttgaccagcaccaccgggctcgcgtaaaagc

SEQ ID NO: 8369 - DNA, 40 bp, Artificial Sequence
  Description of Artificial Sequence: Synthetic primer
ggtttgcttggatattgaagggagcggatgcttttatttc

SEQ ID NO: 8370 - DNA, 40 bp, Artificial Sequence
  Description of Artificial Sequence: Synthetic primer
tccctgagaatggtgtcttatatctggaactcactgcttc

SEQ ID NO: 8371 - DNA, 40 bp, Artificial Sequence
  Description of Artificial Sequence: Synthetic primer
cctcagcatcacaggacccaatcttagtccaggatagtag

SEQ ID NO: 8372 - DNA, 40 bp, Artificial Sequence
  Description of Artificial Sequence: Synthetic primer
catctgtcaagtctgagcaagaacaaaatcagaagtttac

SEQ ID NO: 8373 - DNA, 40 bp, Artificial Sequence
  Description of Artificial Sequence: Synthetic primer
agatgtttaacctctttcaacatatctgtttcttttcctg

SEQ ID NO: 8374 - DNA, 40 bp, Artificial Sequence
  Description of Artificial Sequence: Synthetic primer
gacacgagctattccattctgacttctttctgcctcttgc

SEQ ID NO: 8375 - DNA, 40 bp, Artificial Sequence
  Description of Artificial Sequence: Synthetic primer
gtgtcaagggagaaatattctgaccacgaaagaagaagac

SEQ ID NO: 8376 - DNA, 40 bp, Artificial Sequence
  Description of Artificial Sequence: Synthetic primer
ggttaggcacttcagattccctagtaatgttgagaaaatg

SEQ ID NO: 8377 - DNA, 40 bp, Artificial Sequence
  Description of Artificial Sequence: Synthetic primer
tttgtagattgttttgaaaagattggcattaaattgtggc

SEQ ID NO: 8378 - DNA, 40 bp, Artificial Sequence
  Description of Artificial Sequence: Synthetic primer
ttaattttttcaaggaagacttactactgatttatttcac

SEQ ID NO: 8379 - DNA, 40 bp, Artificial Sequence
  Description of Artificial Sequence: Synthetic primer
tttaaaatgtttggatcttgggttttggcaatttaagtac

SEQ ID NO: 8380 - DNA, 40 bp, Artificial Sequence
  Description of Artificial Sequence: Synthetic primer
gtcataacatatgtggcatgggaattacagttagttcagg

SEQ ID NO: 8381 - DNA, 40 bp, Artificial Sequence
  Description of Artificial Sequence: Synthetic primer
taaatctgtttcgctagatgtctaaactgagtaaaaatag

SEQ ID NO: 8382 - DNA, 40 bp, Artificial Sequence
  Description of Artificial Sequence: Synthetic primer
gcatgctgaagtgtgcaggggcatgcccaagagtcaaggg

SEQ ID NO: 8383 - DNA, 40 bp, Artificial Sequence
  Description of Artificial Sequence: Synthetic primer
tccaagagttacatccctgcctctcacttcctctccttac

SEQ ID NO: 8384 - DNA, 40 bp, Artificial Sequence
  Description of Artificial Sequence: Synthetic primer
cccacaagcaaaagcactccccgtcaggttcctcgctgtc

SEQ ID NO: 8385 - DNA, 40 bp, Artificial Sequence
  Description of Artificial Sequence: Synthetic primer
gtttcaggtcgacattgatgacttactgactgacttttcc

SEQ ID NO: 8386 - DNA, 40 bp, Artificial Sequence
  Description of Artificial Sequence: Synthetic primer
ctgagagaactgaaatcctaaatgcctgcccccacccaag

SEQ ID NO: 8387 - DNA, 40 bp, Artificial Sequence
  Description of Artificial Sequence: Synthetic primer
acctgctggtcagtagaccccttcttcctcccctgcttgc

SEQ ID NO: 8388 - DNA, 40 bp, Artificial Sequence
  Description of Artificial Sequence: Synthetic primer
aaacttgtttgactagtattcagtatgtgagattattaag

SEQ ID NO: 8389 - DNA, 40 bp, Artificial Sequence
  Description of Artificial Sequence: Synthetic primer
gacagtgaagatatgtcattgcctttgctctctgccttgc

SEQ ID NO: 8390 - DNA, 40 bp, Artificial Sequence
  Description of Artificial Sequence: Synthetic primer
cagaggagaatgccctgtttgttaaccatgtttcttttgg

SEQ ID NO: 8391 - DNA, 40 bp, Artificial Sequence
  Description of Artificial Sequence: Synthetic primer
ttatggacataaaacctagaacacttcacttaaaacatac

SEQ ID NO: 8392 - DNA, 40 bp, Artificial Sequence
  Description of Artificial Sequence: Synthetic primer
gtttcctttcaaacttatccgtttttaagaaatgggagtc

SEQ ID NO: 8393 - DNA, 40 bp, Artificial Sequence
  Description of Artificial Sequence: Synthetic primer
tgctttaggaaaccaaatatcactgctaacccatatgtcg

SEQ ID NO: 8394 - DNA, 40 bp, Artificial Sequence
  Description of Artificial Sequence: Synthetic primer
ccccatcaggggcctgctcccctgcagccctcccccaacc

SEQ ID NO: 8395 - DNA, 40 bp, Artificial Sequence
  Description of Artificial Sequence: Synthetic primer
gtggccataccttcacaagctgtaggtcctggtgggacag

SEQ ID NO: 8396 - DNA, 40 bp, Artificial Sequence
  Description of Artificial Sequence: Synthetic primer
ggaaatacagtccccacgggccctctgaggtcagtgtctc

SEQ ID NO: 8397 - DNA, 40 bp, Artificial Sequence
  Description of Artificial Sequence: Synthetic primer
agaagttctaagctatggctaacttgcttgctctcttctg

SEQ ID NO: 8398 - DNA, 40 bp, Artificial Sequence
  Description of Artificial Sequence: Synthetic primer
aaactgatggaggggaagaaaggacaggctgcaggcccta

SEQ ID NO: 8399 - DNA, 40 bp, Artificial Sequence
  Description of Artificial Sequence: Synthetic primer
ttgtgccagcagggcagctggggctgcctccctgaggatc

SEQ ID NO: 8400 - DNA, 40 bp, Artificial Sequence
  Description of Artificial Sequence: Synthetic primer
cggggcggggcgggtccctggctagctgtggggtggagag

SEQ ID NO: 8401 - DNA, 40 bp, Artificial Sequence
  Description of Artificial Sequence: Synthetic primer
tcgctttccacctctcagggagcagatcaaacgggtgaag

SEQ ID NO: 8402 - DNA, 40 bp, Artificial Sequence
  Description of Artificial Sequence: Synthetic primer
catcgcggcgctccccgcccacgcccgcgcccccagactc

SEQ ID NO: 8403 - DNA, 40 bp, Artificial Sequence
  Description of Artificial Sequence: Synthetic primer
cgggccagcgccgcgcgctctgatccgaggagaccccgcg

SEQ ID NO: 8404 - DNA, 40 bp, Artificial Sequence
  Description of Artificial Sequence: Synthetic primer
cccggaaggaggcctcaccctctggtcctgcctgctcacc

SEQ ID NO: 8405 - DNA, 40 bp, Artificial Sequence
  Description of Artificial Sequence: Synthetic primer
aggcaggtctcccggctgccgtgcaggagcacacactcac

SEQ ID NO: 8406 - DNA, 40 bp, Artificial Sequence
  Description of Artificial Sequence: Synthetic primer
taaaatagcaggctcttatttttctttttgtttgtttgta

SEQ ID NO: 8407 - DNA, 40 bp, Artificial Sequence
  Description of Artificial Sequence: Synthetic primer
aatttttttatattgtttttaacttactgatttaagcatg

SEQ ID NO: 8408 - DNA, 40 bp, Artificial Sequence
  Description of Artificial Sequence: Synthetic primer
tttcagaaatgatttacttacaaattccatatttgaatgc

SEQ ID NO: 8409 - DNA, 40 bp, Artificial Sequence
  Description of Artificial Sequence: Synthetic primer
attctcctaactcttaagaagggctgcataaaatacttac

SEQ ID NO: 8410 - DNA, 40 bp, Artificial Sequence
  Description of Artificial Sequence: Synthetic primer
aaatcaacgtttagagacccgtgggtttgttcttaattgg

SEQ ID NO: 8411 - DNA, 40 bp, Artificial Sequence
  Description of Artificial Sequence: Synthetic primer
tattgaaagggagatcacatggcacaccgtcccagctcac

SEQ ID NO: 8412 - DNA, 40 bp, Artificial Sequence
  Description of Artificial Sequence: Synthetic primer
attcaaaacctgctttcatcaaattaaactaacttctttc

SEQ ID NO: 8413 - DNA, 40 bp, Artificial Sequence
  Description of Artificial Sequence: Synthetic primer
caagtgtatataccagtgcattgactgaacttttcttttc

SEQ ID NO: 8414 - DNA, 40 bp, Artificial Sequence
  Description of Artificial Sequence: Synthetic primer
ttatgattcatcaggagagcatttaagggagagataagag

SEQ ID NO: 8415 - DNA, 40 bp, Artificial Sequence
  Description of Artificial Sequence: Synthetic primer
ggtttttttgttttgttttgtttttctgtttctccctctg

SEQ ID NO: 8416 - DNA, 40 bp, Artificial Sequence
  Description of Artificial Sequence: Synthetic primer
ataattaaattagaagaattaataacttggttttttttgg

SEQ ID NO: 8417 - DNA, 40 bp, Artificial Sequence
  Description of Artificial Sequence: Synthetic primer
acaaacagtgtgtgtgatgagtaactcaaactcagcttgc

SEQ ID NO: 8418 - DNA, 40 bp, Artificial Sequence
  Description of Artificial Sequence: Synthetic primer
gagaattgcagaatctgtttcactgtgcttgtcccccatc

SEQ ID NO: 8419 - DNA, 40 bp, Artificial Sequence
  Description of Artificial Sequence: Synthetic primer
ccatggcctgggcaaggcactgagaagtgtggggcttccg

SEQ ID NO: 8420 - DNA, 40 bp, Artificial Sequence
  Description of Artificial Sequence: Synthetic primer
ggaaataaattatatgcagtcttaatctattccaacattt

SEQ ID NO: 8421 - DNA, 40 bp, Artificial Sequence
  Description of Artificial Sequence: Synthetic primer
agctacttttctccttctctgacttacatttcatttttac

SEQ ID NO: 8422 - DNA, 40 bp, Artificial Sequence
  Description of Artificial Sequence: Synthetic primer
gaccttgggctatgaggaccagaaggattagaggactgtg

SEQ ID NO: 8423 - DNA, 40 bp, Artificial Sequence
  Description of Artificial Sequence: Synthetic primer
gcagaaacagctgaagggacaggcaccctcagtgcgtgag

SEQ ID NO: 8424 - DNA, 40 bp, Artificial Sequence
  Description of Artificial Sequence: Synthetic primer
ggagttcacgcttcagcctgtgacctctgtgggccagttc

SEQ ID NO: 8425 - DNA, 40 bp, Artificial Sequence
  Description of Artificial Sequence: Synthetic primer
ggctgcctcggaggagggaatctcagcacctttttgtccc

SEQ ID NO: 8426 - DNA, 40 bp, Artificial Sequence
  Description of Artificial Sequence: Synthetic primer
gccctaaacctacacataaacattagcaattaagaacacc

SEQ ID NO: 8427 - DNA, 40 bp, Artificial Sequence
  Description of Artificial Sequence: Synthetic primer
ggaaaatatattgttctagtcataaaaaaggaaactagag

SEQ ID NO: 8428 - DNA, 40 bp, Artificial Sequence
  Description of Artificial Sequence: Synthetic primer
aggatatcagttaacccacagtaaaaatgtcccatcatag

SEQ ID NO: 8429 - DNA, 40 bp, Artificial Sequence
  Description of Artificial Sequence: Synthetic primer
tgtaaaatgtctttaacaaagtatttcactaattttattg

SEQ ID NO: 8430 - DNA, 40 bp, Artificial Sequence
  Description of Artificial Sequence: Synthetic primer
cttttgactattaaaaattattgattatctttttattttc

SEQ ID NO: 8431 - DNA, 40 bp, Artificial Sequence
  Description of Artificial Sequence: Synthetic primer
taagaaatacatccttccattacacaagcccccaccctag

SEQ ID NO: 8432 - DNA, 40 bp, Artificial Sequence
  Description of Artificial Sequence: Synthetic primer
acaaaagaataaatatcaagccttctcactaggcactatc

SEQ ID NO: 8433 - DNA, 40 bp, Artificial Sequence
  Description of Artificial Sequence: Synthetic primer
tggttacagagaatctctctaaaactaaaacctctttctg

SEQ ID NO: 8434 - DNA, 40 bp, Artificial Sequence
  Description of Artificial Sequence: Synthetic primer
ctcagttcccttaaagcacagcccagggaaacctcctcac

SEQ ID NO: 8435 - DNA, 40 bp, Artificial Sequence
  Description of Artificial Sequence: Synthetic primer
gcagaagcggacactccccgcacgcccgagccggcgcccc

SEQ ID NO: 8436 - DNA, 40 bp, Artificial Sequence
  Description of Artificial Sequence: Synthetic primer
tgttgttggctgttggtgaggaaggtgaagcactcagttg

SEQ ID NO: 8437 - DNA, 40 bp, Artificial Sequence
  Description of Artificial Sequence: Synthetic primer
tttgccgggaggagacgtcaatgcctgcagcctcactcac

SEQ ID NO: 8438 - DNA, 40 bp, Artificial Sequence
  Description of Artificial Sequence: Synthetic primer
ggcataactgcacccttggtctcctccaccgcttcttgtc

SEQ ID NO: 8439 - DNA, 40 bp, Artificial Sequence
  Description of Artificial Sequence: Synthetic primer
gtaggacctgatttccttactgcctcttgcttctcttttc

SEQ ID NO: 8440 - DNA, 40 bp, Artificial Sequence
  Description of Artificial Sequence: Synthetic primer
cttcttcctctctctcattcttcagaggacctcatcatgg

SEQ ID NO: 8441 - DNA, 40 bp, Artificial Sequence
  Description of Artificial Sequence: Synthetic primer
actaggtaaagactacctaagaacaagctctcagaaaaaa

SEQ ID NO: 8442 - DNA, 40 bp, Artificial Sequence
  Description of Artificial Sequence: Synthetic primer
atgtaaatatcaaggctttggatagtcaggggagcaaaag

SEQ ID NO: 8443 - DNA, 40 bp, Artificial Sequence
  Description of Artificial Sequence: Synthetic primer
ttcaaactgtaggtgaaaatgatctttgttgggtttttcc

SEQ ID NO: 8444 - DNA, 40 bp, Artificial Sequence
  Description of Artificial Sequence: Synthetic primer
gcgtgggcggacaggccctacccagccctcaccacactcc

SEQ ID NO: 8445 - DNA, 40 bp, Artificial Sequence
  Description of Artificial Sequence: Synthetic primer
ccccaacgggaagaaatgacagcaatacaggggactcacc

SEQ ID NO: 8446 - DNA, 40 bp, Artificial Sequence
  Description of Artificial Sequence: Synthetic primer
attgccttgcccttgtagatgtgcttaagtgtcatagctg

SEQ ID NO: 8447 - DNA, 40 bp, Artificial Sequence
  Description of Artificial Sequence: Synthetic primer
tttctgtgagagtgggtggtgaaagaaacaaaacaaaatc

SEQ ID NO: 8448 - DNA, 40 bp, Artificial Sequence
  Description of Artificial Sequence: Synthetic primer
ttggaagactttatgggtaaatattatcacatagaatgag

SEQ ID NO: 8449 - DNA, 40 bp, Artificial Sequence
  Description of Artificial Sequence: Synthetic primer
attaaatcaggactcatttgatagattttggaagcaaatg

SEQ ID NO: 8450 - DNA, 40 bp, Artificial Sequence
  Description of Artificial Sequence: Synthetic primer
aggttctccagctaggggaaaggtggcctcaggtcagtgc

SEQ ID NO: 8451 - DNA, 40 bp, Artificial Sequence
  Description of Artificial Sequence: Synthetic primer
ggggcagaggcccgagccacggctgtgcctcaggttgcgc

SEQ ID NO: 8452 - DNA, 40 bp, Artificial Sequence
  Description of Artificial Sequence: Synthetic primer
aaaaaaatagtgccaatcgattacattttactgctgaata

SEQ ID NO: 8453 - DNA, 40 bp, Artificial Sequence
  Description of Artificial Sequence: Synthetic primer
gtggcacagcctggctcgctcacagagatgccctctctgc

SEQ ID NO: 8454 - DNA, 40 bp, Artificial Sequence
  Description of Artificial Sequence: Synthetic primer
ctcctactcccaaccagaacccattttggtaccatctttc

SEQ ID NO: 8455 - DNA, 40 bp, Artificial Sequence
  Description of Artificial Sequence: Synthetic primer
ttcaggtatggtgcctagtttccagtgcatctgtacctcc

SEQ ID NO: 8456 - DNA, 40 bp, Artificial Sequence
  Description of Artificial Sequence: Synthetic primer
gcagtgggcacaaaggtgagtgtgttgtttttgtgaccag

SEQ ID NO: 8457 - DNA, 40 bp, Artificial Sequence
  Description of Artificial Sequence: Synthetic primer
agaattattagaaattgttctgattatatcttcttttgca

SEQ ID NO: 8458 - DNA, 40 bp, Artificial Sequence
  Description of Artificial Sequence: Synthetic primer
attcagaaaaatctagaagtgcataaaagattcagtgtcg

SEQ ID NO: 8459 - DNA, 40 bp, Artificial Sequence
  Description of Artificial Sequence: Synthetic primer
gctgctggtgagctgccggtgtgtgtcactaaatgatggg

SEQ ID NO: 8460 - DNA, 40 bp, Artificial Sequence
  Description of Artificial Sequence: Synthetic primer
aaatgtaggcttttatgcagacttttcgggtatataattg

SEQ ID NO: 8461 - DNA, 40 bp, Artificial Sequence
  Description of Artificial Sequence: Synthetic primer
ataatacagcctcactgaattaatgtgttttcccccaaac

SEQ ID NO: 8462 - DNA, 40 bp, Artificial Sequence
  Description of Artificial Sequence: Synthetic primer
agggagctttgagcaaaggctccccagggtcaatctctcc

SEQ ID NO: 8463 - DNA, 40 bp, Artificial Sequence
  Description of Artificial Sequence: Synthetic primer
tgtggatgtgggtggaaggaggcctgagactgaaatgaac

SEQ ID NO: 8464 - DNA, 40 bp, Artificial Sequence
  Description of Artificial Sequence: Synthetic primer
tccccgactgcctgaaccgcgccaggagacggaccgcaag

SEQ ID NO: 8465 - DNA, 40 bp, Artificial Sequence
  Description of Artificial Sequence: Synthetic primer
caccgtcggaagctgcgggagctgaaactgcgccatcgtc

SEQ ID NO: 8466 - DNA, 40 bp, Artificial Sequence
  Description of Artificial Sequence: Synthetic primer
gagaactctgagtggccacctccccacaacacacagttgg

SEQ ID NO: 8467 - DNA, 40 bp, Artificial Sequence
  Description of Artificial Sequence: Synthetic primer
tcatcctccctccagccatggctcctcacccacccctccc

SEQ ID NO: 8468 - DNA, 40 bp, Artificial Sequence
  Description of Artificial Sequence: Synthetic primer
cactttacactgagggaaagaaggcccctcacgtcctgtg

SEQ ID NO: 8469 - DNA, 40 bp, Artificial Sequence
  Description of Artificial Sequence: Synthetic primer
accggcgcttggctgcgacaggccacaggcctgtgctcgc

SEQ ID NO: 8470 - DNA, 40 bp, Artificial Sequence
  Description of Artificial Sequence: Synthetic primer
tagggtctgtggggctgcctctcctccgggtcctccattc

SEQ ID NO: 8471 - DNA, 40 bp, Artificial Sequence
  Description of Artificial Sequence: Synthetic primer
gcaggatccggggctcgccacccctcccgtctcatcctcc

SEQ ID NO: 8472 - DNA, 40 bp, Artificial Sequence
  Description of Artificial Sequence: Synthetic primer
gagccagcacattgtcacagataggaatgtgtgtccttac

SEQ ID NO: 8473 - DNA, 40 bp, Artificial Sequence
  Description of Artificial Sequence: Synthetic primer
ctgggaacacctgcaccgaggcagctacgtggcggtggcc

SEQ ID NO: 8474 - DNA, 40 bp, Artificial Sequence
  Description of Artificial Sequence: Synthetic primer
tttttttcattgtcggatacaggcatttcaaagggaaacc

SEQ ID NO: 8475 - DNA, 40 bp, Artificial Sequence
  Description of Artificial Sequence: Synthetic primer
ccgctcagataaggaacagagaagtgcacaaattcaaggc

SEQ ID NO: 8476 - DNA, 40 bp, Artificial Sequence
  Description of Artificial Sequence: Synthetic primer
tggaagggtatcggcggggtcggtggggagccagggctgt

SEQ ID NO: 8477 - DNA, 40 bp, Artificial Sequence
  Description of Artificial Sequence: Synthetic primer
agtccacgacgggtcagtcctggatttacagtgacttctc

SEQ ID NO: 8478 - DNA, 40 bp, Artificial Sequence
  Description of Artificial Sequence: Synthetic primer
tgctggtgattgagcttttgctctgggatctgtggtcttc

SEQ ID NO: 8479 - DNA, 40 bp, Artificial Sequence
  Description of Artificial Sequence: Synthetic primer
gcagcttcaggaaaagggacccaggcagcggcagggatgc

SEQ ID NO: 8480 - DNA, 40 bp, Artificial Sequence
  Description of Artificial Sequence: Synthetic primer
ggcgggacgcccggaggctctgctgaccctgtgccccttg

SEQ ID NO: 8481 - DNA, 40 bp, Artificial Sequence
  Description of Artificial Sequence: Synthetic primer
caccccagcaggagcaccccagagctcagccgcagcacag

SEQ ID NO: 8482 - DNA, 40 bp, Artificial Sequence
  Description of Artificial Sequence: Synthetic primer
ttcagaaatcaataaaattctcttcatgcttttattttac

SEQ ID NO: 8483 - DNA, 40 bp, Artificial Sequence
  Description of Artificial Sequence: Synthetic primer
tatgtgctactcctaactgtgactttcactgtaatctctg

SEQ ID NO: 8484 - DNA, 40 bp, Artificial Sequence
  Description of Artificial Sequence: Synthetic primer
ggccatggaatctgtcagcaacctcacccttccttgttcc

SEQ ID NO: 8485 - DNA, 40 bp, Artificial Sequence
  Description of Artificial Sequence: Synthetic primer
ggctggcccttgttcctgtcggggtgcgagggctcctgag

SEQ ID NO: 8486 - DNA, 40 bp, Artificial Sequence
  Description of Artificial Sequence: Synthetic primer
gccgattccctccattctctcttgttactcatgccactgc

SEQ ID NO: 8487 - DNA, 40 bp, Artificial Sequence
  Description of Artificial Sequence: Synthetic primer
aggttggcccctaaagccctcttggcttgagtagggttcg

SEQ ID NO: 8488 - DNA, 40 bp, Artificial Sequence
  Description of Artificial Sequence: Synthetic primer
tgtgtttttaactgtttttaatcttgagtcctcttctttc

SEQ ID NO: 8489 - DNA, 40 bp, Artificial Sequence
  Description of Artificial Sequence: Synthetic primer
aattaaatctagtttttttaataactgaaataattaaaag

SEQ ID NO: 8490 - DNA, 40 bp, Artificial Sequence
  Description of Artificial Sequence: Synthetic primer
aatccagcctgaagagttgaattagaattgtcagtaaaaa

SEQ ID NO: 8491 - DNA, 40 bp, Artificial Sequence
  Description of Artificial Sequence: Synthetic primer
tgtctcttaaataaataaaaataaaactgataaatagata

SEQ ID NO: 8492 - DNA, 40 bp, Artificial Sequence
  Description of Artificial Sequence: Synthetic primer
gtggtggctccagccagagcccagagtgggagaagtcctg

SEQ ID NO: 8493 - DNA, 40 bp, Artificial Sequence
  Description of Artificial Sequence: Synthetic primer
ggggaccaggtgtgtccccagggtaggcccctcacttctc

SEQ ID NO: 8494 - DNA, 40 bp, Artificial Sequence
  Description of Artificial Sequence: Synthetic primer
acttctattctcatctccaagcttctctgcccccgtgctc

SEQ ID NO: 8495 - DNA, 40 bp, Artificial Sequence
  Description of Artificial Sequence: Synthetic primer
gaaagtgtgacgatttggatagaaaaataacatctcgttg

SEQ ID NO: 8496 - DNA, 40 bp, Artificial Sequence
  Description of Artificial Sequence: Synthetic primer
aacttcatatattatcttatcgctatatttgaattctgta

SEQ ID NO: 8497 - DNA, 40 bp, Artificial Sequence
  Description of Artificial Sequence: Synthetic primer
taattttcttaaagtttgtagtagagaaagaataagcatg

SEQ ID NO: 8498 - DNA, 40 bp, Artificial Sequence
  Description of Artificial Sequence: Synthetic primer
ctgttaaagaaatccagatcattacgcaacatagaactaa

SEQ ID NO: 8499 - DNA, 40 bp, Artificial Sequence
  Description of Artificial Sequence: Synthetic primer
tgccaagatgctattaggaacaaaagcatacaccataggc

SEQ ID NO: 8500 - DNA, 40 bp, Artificial Sequence
  Description of Artificial Sequence: Synthetic primer
gggtcatctttctgctaccacagggtcctcctatgtcctg

SEQ ID NO: 8501 - DNA, 40 bp, Artificial Sequence
  Description of Artificial Sequence: Synthetic primer
cgttttaaatagcacttagtttcataacaaacatagaaac

SEQ ID NO: 8502 - DNA, 40 bp, Artificial Sequence
  Description of Artificial Sequence: Synthetic primer
cctctccctgcattcttgtgatgggaacgaacccctcctc

SEQ ID NO: 8503 - DNA, 40 bp, Artificial Sequence
  Description of Artificial Sequence: Synthetic primer
ctgggctctggcgctgccctcctgctgccccaccctcagg

SEQ ID NO: 8504 - DNA, 40 bp, Artificial Sequence
  Description of Artificial Sequence: Synthetic primer
ggactgtgaggagtcacgggccgcgcaggggcaaaattcg

SEQ ID NO: 8505 - DNA, 40 bp, Artificial Sequence
  Description of Artificial Sequence: Synthetic primer
tctgccgacgggagcagcattagcaaaccttggctctaac

SEQ ID NO: 8506 - DNA, 40 bp, Artificial Sequence
  Description of Artificial Sequence: Synthetic primer
attcaaagcaggcagagatgggagccatgtagggctcagg

SEQ ID NO: 8507 - DNA, 40 bp, Artificial Sequence
  Description of Artificial Sequence: Synthetic primer
tcttggggccccaggcctcactccagtcttcttggttgtc

SEQ ID NO: 8508 - DNA, 40 bp, Artificial Sequence
  Description of Artificial Sequence: Synthetic primer
gctcatttctaaaacagttcatggatcactaaacaatctc

SEQ ID NO: 8509 - DNA, 40 bp, Artificial Sequence
  Description of Artificial Sequence: Synthetic primer
caatgcttcaatgaattcatgctgagaatgtgtttcattg

SEQ ID NO: 8510 - DNA, 40 bp, Artificial Sequence
  Description of Artificial Sequence: Synthetic primer
gggagagtggcttagtaacaggcttatgttctcttttctc

SEQ ID NO: 8511 - DNA, 40 bp, Artificial Sequence
  Description of Artificial Sequence: Synthetic primer
gggaagagggaaatgggaacctggcctaaggtgctcttcc

SEQ ID NO: 8512 - DNA, 40 bp, Artificial Sequence
  Description of Artificial Sequence: Synthetic primer
ccgaaagataacacaccaagttcagatcaacttttaaatc

SEQ ID NO: 8513 - DNA, 40 bp, Artificial Sequence
  Description of Artificial Sequence: Synthetic primer
taatttgcagaatgtgttgaaattaatgaaatccatcttc

SEQ ID NO: 8514 - DNA, 40 bp, Artificial Sequence
  Description of Artificial Sequence: Synthetic primer
agcatttactcctagagtatgtatctagtctctctttctc

SEQ ID NO: 8515 - DNA, 40 bp, Artificial Sequence
  Description of Artificial Sequence: Synthetic primer
ttataataacagaaaattcttaagtaaaaaaaaaccaaaa

SEQ ID NO: 8516 - DNA, 40 bp, Artificial Sequence
  Description of Artificial Sequence: Synthetic primer
tgctgtcctctacccaggtcctgctcaaacagagttactg

SEQ ID NO: 8517 - DNA, 40 bp, Artificial Sequence
  Description of Artificial Sequence: Synthetic primer
ggaacaggtggcagtggggacagcacggaggcctgcacac

SEQ ID NO: 8518 - DNA, 40 bp, Artificial Sequence
  Description of Artificial Sequence: Synthetic primer
tggttttggttcctgccctgaagctccctcctccccgaag

SEQ ID NO: 8519 - DNA, 40 bp, Artificial Sequence
  Description of Artificial Sequence: Synthetic primer
ttcacagcaaccagccgtggtgacgtgtgcgccccttctc

SEQ ID NO: 8520 - DNA, 40 bp, Artificial Sequence
  Description of Artificial Sequence: Synthetic primer
tgaagacctctggggaggcctgcggtttttgttattttac

SEQ ID NO: 8521 - DNA, 40 bp, Artificial Sequence
  Description of Artificial Sequence: Synthetic primer
cgcccctcctgacagcgtgttcttcttattttgcttacag

SEQ ID NO: 8522 - DNA, 40 bp, Artificial Sequence
  Description of Artificial Sequence: Synthetic primer
gatgcgagcccctagcctcactcaccccatccttcacagg

SEQ ID NO: 8523 - DNA, 40 bp, Artificial Sequence
  Description of Artificial Sequence: Synthetic primer
gtagtttaaggagatttggattaatctgactatataattc

SEQ ID NO: 8524 - DNA, 40 bp, Artificial Sequence
  Description of Artificial Sequence: Synthetic primer
ctaggtagacccgaccaggctatgcatctcccctcattcc

SEQ ID NO: 8525 - DNA, 40 bp, Artificial Sequence
  Description of Artificial Sequence: Synthetic primer
ctcccggccttgccactgcccctctatgtctcggtttccc

SEQ ID NO: 8526 - DNA, 40 bp, Artificial Sequence
  Description of Artificial Sequence: Synthetic primer
agaagtatatactaatctgaaataaagatcattctgtcag

SEQ ID NO: 8527 - DNA, 40 bp, Artificial Sequence
  Description of Artificial Sequence: Synthetic primer
atgactgataataatttgtaacatgtacttatttttcttg

SEQ ID NO: 8528 - DNA, 40 bp, Artificial Sequence
  Description of Artificial Sequence: Synthetic primer
cagagcagtaacctaaaatgcttatttatttattctttgc

SEQ ID NO: 8529 - DNA, 40 bp, Artificial Sequence
  Description of Artificial Sequence: Synthetic primer
cacaggctggcagagacacagaagcaggcaacaatttatc

SEQ ID NO: 8530 - DNA, 40 bp, Artificial Sequence
  Description of Artificial Sequence: Synthetic primer
atctaaaaacaatgaccaaattaccagctctcctagatac

SEQ ID NO: 8531 - DNA, 40 bp, Artificial Sequence
  Description of Artificial Sequence: Synthetic primer
atttttaaacgtttgatacatgaaattcaacagccctctg

SEQ ID NO: 8532 - DNA, 40 bp, Artificial Sequence
  Description of Artificial Sequence: Synthetic primer
tgtgccgtttggattgaatgcttcgtgtttctttctccac

SEQ ID NO: 8533 - DNA, 40 bp, Artificial Sequence
  Description of Artificial Sequence: Synthetic primer
aatgtgcctagaaaagatatccaacagtaattccgctttc

SEQ ID NO: 8534 - DNA, 40 bp, Artificial Sequence
  Description of Artificial Sequence: Synthetic primer
ctggtcacagagcctgcagcccacccatgaagccagagtc

SEQ ID NO: 8535 - DNA, 40 bp, Artificial Sequence
  Description of Artificial Sequence: Synthetic primer
cacctaagataataggtgaccttcagtgttggcttcttgc

SEQ ID NO: 8536 - DNA, 40 bp, Artificial Sequence
  Description of Artificial Sequence: Synthetic primer
aaactttataagatcctggctatcctgtggatttttaggc

SEQ ID NO: 8537 - DNA, 40 bp, Artificial Sequence
  Description of Artificial Sequence: Synthetic primer
gagccctgttgctctgctccaagccattgcacgttttgag

SEQ ID NO: 8538 - DNA, 40 bp, Artificial Sequence
  Description of Artificial Sequence: Synthetic primer
gtggtatctcccaagaaaccatgatcaagataacctagtg

SEQ ID NO: 8539 - DNA, 40 bp, Artificial Sequence
  Description of Artificial Sequence: Synthetic primer
ctaaatggtctgatgctttgagacatactcaacctaagcg

SEQ ID NO: 8540 - DNA, 40 bp, Artificial Sequence
  Description of Artificial Sequence: Synthetic primer
gagatggggcctctggggcagggctcagccttgatgagtc

SEQ ID NO: 8541 - DNA, 40 bp, Artificial Sequence
  Description of Artificial Sequence: Synthetic primer
gctgtacccggctccccatcgccacatcccctcccctgag

SEQ ID NO: 8542 - DNA, 40 bp, Artificial Sequence
  Description of Artificial Sequence: Synthetic primer
tgtattaaaattaaaatgcttccagaattaagaggcagtc

SEQ ID NO: 8543 - DNA, 40 bp, Artificial Sequence
  Description of Artificial Sequence: Synthetic primer
gcttgttttcactttcacagttattttattttattttcag

SEQ ID NO: 8544 - DNA, 40 bp, Artificial Sequence
  Description of Artificial Sequence: Synthetic primer
gtcactggatcagttaagcttctcaccaaaaagtcttcag

SEQ ID NO: 8545 - DNA, 40 bp, Artificial Sequence
  Description of Artificial Sequence: Synthetic primer
cttcagggaccgactcgccgctatcactctgcctctgtag

SEQ ID NO: 8546 - DNA, 40 bp, Artificial Sequence
  Description of Artificial Sequence: Synthetic primer
aatcatgtctattctaattttagtttcctttttctctacc

SEQ ID NO: 8547 - DNA, 40 bp, Artificial Sequence
  Description of Artificial Sequence: Synthetic primer
aaaattaaagctcagaaatccacattgacatcaaatcatg

SEQ ID NO: 8548 - DNA, 40 bp, Artificial Sequence
  Description of Artificial Sequence: Synthetic primer
agtctgaactaatagggacaaacgcaatatagacaaagtg

SEQ ID NO: 8549 - DNA, 40 bp, Artificial Sequence
  Description of Artificial Sequence: Synthetic primer
gagtcactgaggcttatgaatgtttacattttgtttgttg

SEQ ID NO: 8550 - DNA, 40 bp, Artificial Sequence
  Description of Artificial Sequence: Synthetic primer
aattcatactttataaatttttctacataaagtttttctg

SEQ ID NO: 8551 - DNA, 40 bp, Artificial Sequence
  Description of Artificial Sequence: Synthetic primer
aaagcacttttgcataacagctggcaaacgacaagcctac

SEQ ID NO: 8552 - DNA, 40 bp, Artificial Sequence
  Description of Artificial Sequence: Synthetic primer
ggacacttttacaactcactgggttctttgctgatctttc

SEQ ID NO: 8553 - DNA, 40 bp, Artificial Sequence
  Description of Artificial Sequence: Synthetic primer
gcttgtttacttcatcaagtcattaagggtgcagagctag

SEQ ID NO: 8554 - DNA, 40 bp, Artificial Sequence
  Description of Artificial Sequence: Synthetic primer
tgagagttcttccccagtgacattacttactttttctctg

SEQ ID NO: 8555 - DNA, 40 bp, Artificial Sequence
  Description of Artificial Sequence: Synthetic primer
aggagccgctgaaaagtacaggcatgggataagaaaacag

SEQ ID NO: 8556 - DNA, 40 bp, Artificial Sequence
  Description of Artificial Sequence: Synthetic primer
tctccagcaatgacattagttccaaactcactcttcttac

SEQ ID NO: 8557 - DNA, 40 bp, Artificial Sequence
  Description of Artificial Sequence: Synthetic primer
ctcaaacaactccgccgttgcatgaggagaggggcaccag

SEQ ID NO: 8558 - DNA, 40 bp, Artificial Sequence
  Description of Artificial Sequence: Synthetic primer
ctaccccacgaatccctctaaaaccagtcaaggtagatgc

SEQ ID NO: 8559 - DNA, 40 bp, Artificial Sequence
  Description of Artificial Sequence: Synthetic primer
ctgttgaagagtccttgttttcccatcacttccccacatc

SEQ ID NO: 8560 - DNA, 40 bp, Artificial Sequence
  Description of Artificial Sequence: Synthetic primer
cggcggccgcccgtgcccggccgctccccgcccccatcgc

SEQ ID NO: 8561 - DNA, 40 bp, Artificial Sequence
  Description of Artificial Sequence: Synthetic primer
ggggatggagggaagcttgggctgctgctggctggtcctg

SEQ ID NO: 8562 - DNA, 40 bp, Artificial Sequence
  Description of Artificial Sequence: Synthetic primer
ggttgtgggtgtgaggcaggtgtaccctaaccttattctc

SEQ ID NO: 8563 - DNA, 40 bp, Artificial Sequence
  Description of Artificial Sequence: Synthetic primer
ttttaaaattttatttttacttaggcttctcctggcaatc

SEQ ID NO: 8564 - DNA, 40 bp, Artificial Sequence
  Description of Artificial Sequence: Synthetic primer
ggcctggaatctcctctatcactagactcaatttgcttac

SEQ ID NO: 8565 - DNA, 40 bp, Artificial Sequence
  Description of Artificial Sequence: Synthetic primer
cactgattacactaaaatgtaaagcaagtttaattgaaat

SEQ ID NO: 8566 - DNA, 40 bp, Artificial Sequence
  Description of Artificial Sequence: Synthetic primer
aaaatgtcttgttcaagctcatattatttcagatatttac

SEQ ID NO: 8567 - DNA, 40 bp, Artificial Sequence
  Description of Artificial Sequence: Synthetic primer
ttttatgcataagtgatgaggaaacaaaagaactaatatc

SEQ ID NO: 8568 - DNA, 40 bp, Artificial Sequence
  Description of Artificial Sequence: Synthetic primer
agcctgctgagccccacaagcacatgcccaacagacagtg

SEQ ID NO: 8569 - DNA, 40 bp, Artificial Sequence
  Description of Artificial Sequence: Synthetic primer
gagtggaagctgtagctcactctcccctccaagatatgag

SEQ ID NO: 8570 - DNA, 40 bp, Artificial Sequence
  Description of Artificial Sequence: Synthetic primer
acggagcctgcaaaatctgacttgtctaaactggaatcag

SEQ ID NO: 8571 - DNA, 40 bp, Artificial Sequence
  Description of Artificial Sequence: Synthetic primer
agctcagacctacaagcaagactgggagaactagcaggtg

SEQ ID NO: 8572 - DNA, 40 bp, Artificial Sequence
  Description of Artificial Sequence: Synthetic primer
caagcgagaacggaattacagaagttcacgccaaatcagc

SEQ ID NO: 8573 - DNA, 40 bp, Artificial Sequence
  Description of Artificial Sequence: Synthetic primer
tgtcttttttattgagggacagagaagacaagctacgtga

SEQ ID NO: 8574 - DNA, 40 bp, Artificial Sequence
  Description of Artificial Sequence: Synthetic primer
gaagcagacatctgagggagcaaacagcacaactgattcc

SEQ ID NO: 8575 - DNA, 40 bp, Artificial Sequence
  Description of Artificial Sequence: Synthetic primer
ggttcatcaggtgaccagccgccttatctggatgccaagc

SEQ ID NO: 8576 - DNA, 40 bp, Artificial Sequence
  Description of Artificial Sequence: Synthetic primer
aactctgctgcagaccttgaacatcccgaaccaagtttgc

SEQ ID NO: 8577 - DNA, 40 bp, Artificial Sequence
  Description of Artificial Sequence: Synthetic primer
cagaaacgtgacagaaaagatgctggcacagacaaaaacc

SEQ ID NO: 8578 - DNA, 40 bp, Artificial Sequence
  Description of Artificial Sequence: Synthetic primer
gccccagaggacagggacaagcctgcacaccaagcaagtg

SEQ ID NO: 8579 - DNA, 40 bp, Artificial Sequence
  Description of Artificial Sequence: Synthetic primer
gctcaaggtgagagtcctgctgcaaatgaggggacaacag

SEQ ID NO: 8580 - DNA, 40 bp, Artificial Sequence
  Description of Artificial Sequence: Synthetic primer
cagacacaaaggcctctgatgttgacaccagctccagcac

SEQ ID NO: 8581 - DNA, 40 bp, Artificial Sequence
  Description of Artificial Sequence: Synthetic primer
gaaaagtttggtgagcacccctgctgggcccgtgaacgtc

SEQ ID NO: 8582 - DNA, 40 bp, Artificial Sequence
  Description of Artificial Sequence: Synthetic primer
ggacattgaatttcagcagtcagtgtccaagtcccaggtc

SEQ ID NO: 8583 - DNA, 40 bp, Artificial Sequence
  Description of Artificial Sequence: Synthetic primer
gaagtcaaccatgtcccctcggggcccagcatcccagcag

SEQ ID NO: 8584 - DNA, 40 bp, Artificial Sequence
  Description of Artificial Sequence: Synthetic primer
ccttcctgtcgctcgagccacagcccctgtgcagtcagag

SEQ ID NO: 8585 - DNA, 40 bp, Artificial Sequence
  Description of Artificial Sequence: Synthetic primer
ttcgttctttatctgtcttttcattttttgtatagcgctc

SEQ ID NO: 8586 - DNA, 40 bp, Artificial Sequence
  Description of Artificial Sequence: Synthetic primer
tccaccacttcaacatggcttgaaagccccttttcctttg

SEQ ID NO: 8587 - DNA, 40 bp, Artificial Sequence
  Description of Artificial Sequence: Synthetic primer
atacctgcagctgtttgagctgtggttttgagggaatggg

SEQ ID NO: 8588 - DNA, 40 bp, Artificial Sequence
  Description of Artificial Sequence: Synthetic primer
agcctatgggatcctcatcttcatggaaggaaccatgtcg

SEQ ID NO: 8589 - DNA, 40 bp, Artificial Sequence
  Description of Artificial Sequence: Synthetic primer
tttgttcctttctaaagaactagagagtctttcatctcgc

SEQ ID NO: 8590 - DNA, 40 bp, Artificial Sequence
  Description of Artificial Sequence: Synthetic primer
cgtgtgagctccataaatctgctatggaacagaactactg

SEQ ID NO: 8591 - DNA, 40 bp, Artificial Sequence
  Description of Artificial Sequence: Synthetic primer
tcaggctctggatctacgttgctctctgcctgggaaaacg

SEQ ID NO: 8592 - DNA, 40 bp, Artificial Sequence
  Description of Artificial Sequence: Synthetic primer
catggtcacccatggttgcatagacgctccttacattccg

SEQ ID NO: 8593 - DNA, 40 bp, Artificial Sequence
  Description of Artificial Sequence: Synthetic primer
ttgatttggagtttttttcaggggccggttttttctctac

SEQ ID NO: 8594 - DNA, 40 bp, Artificial Sequence
  Description of Artificial Sequence: Synthetic primer
gttttctggctccccagaaatgtcattgatgatggagccg

SEQ ID NO: 8595 - DNA, 40 bp, Artificial Sequence
  Description of Artificial Sequence: Synthetic primer
actgaggaggagtggaatggggtttctcactctgcttttc

SEQ ID NO: 8596 - DNA, 40 bp, Artificial Sequence
  Description of Artificial Sequence: Synthetic primer
ggaagtgacacttgtggcagacacatacttggggtccatg

SEQ ID NO: 8597 - DNA, 40 bp, Artificial Sequence
  Description of Artificial Sequence: Synthetic primer
tcactggagtggtgagaacattcactggccccgtaagaac

SEQ ID NO: 8598 - DNA, 40 bp, Artificial Sequence
  Description of Artificial Sequence: Synthetic primer
gagcttgagggcctttggatggaggctgcgatgctgtgac

SEQ ID NO: 8599 - DNA, 40 bp, Artificial Sequence
  Description of Artificial Sequence: Synthetic primer
atggcccgggtccacttggtcgaggagaatgagcatctag

SEQ ID NO: 8600 - DNA, 40 bp, Artificial Sequence
  Description of Artificial Sequence: Synthetic primer
tcacatcccgtggcacagtataggggtgcagtcggtactc

SEQ ID NO: 8601 - DNA, 40 bp, Artificial Sequence
  Description of Artificial Sequence: Synthetic primer
aggcttcctaaagaacgcatcatgattccctgccttccac

SEQ ID NO: 8602 - DNA, 40 bp, Artificial Sequence
  Description of Artificial Sequence: Synthetic primer
tgagatccaggtgcccctctctgtctcttttagccaagcc

SEQ ID NO: 8603 - DNA, 40 bp, Artificial Sequence
  Description of Artificial Sequence: Synthetic primer
gacagaattttgtttttgtttttgttttgacataattttt

SEQ ID NO: 8604 - DNA, 40 bp, Artificial Sequence
  Description of Artificial Sequence: Synthetic primer
tagcagcactatattcaccaggattccccagagccgatgg

SEQ ID NO: 8605 - DNA, 40 bp, Artificial Sequence
  Description of Artificial Sequence: Synthetic primer
ggcggggctcccacatgggtgacagcctgctgtgtgtcct

SEQ ID NO: 8606 - DNA, 40 bp, Artificial Sequence
  Description of Artificial Sequence: Synthetic primer
gtgggatccaggtttcccctactatctcctacctgttccc

SEQ ID NO: 8607 - DNA, 40 bp, Artificial Sequence
  Description of Artificial Sequence: Synthetic primer
ggagctgggtcggtgctcctggcaggtaacggcttgttcc

SEQ ID NO: 8608 - DNA, 40 bp, Artificial Sequence
  Description of Artificial Sequence: Synthetic primer
cctgagtgggcctggggtcccacagggcagaatgggcagg

SEQ ID NO: 8609 - DNA, 40 bp, Artificial Sequence
  Description of Artificial Sequence: Synthetic primer
aggactggggtctgcattgccctgttctggttgcccctac

SEQ ID NO: 8610 - DNA, 40 bp, Artificial Sequence
  Description of Artificial Sequence: Synthetic primer
acttgtgagccagggtcctcacacccactggcctaccacc

SEQ ID NO: 8611 - DNA, 40 bp, Artificial Sequence
  Description of Artificial Sequence: Synthetic primer
acagcgtcttattctctgggatgaatgagtaatatatgtg

SEQ ID NO: 8612 - DNA, 40 bp, Artificial Sequence
  Description of Artificial Sequence: Synthetic primer
tcatgtttgccggattacttgttaaacgtgttctgatctg

SEQ ID NO: 8613 - DNA, 40 bp, Artificial Sequence
  Description of Artificial Sequence: Synthetic primer
ctacaaggctgagacctgagttgataaaatttctttgttc

SEQ ID NO: 8614 - DNA, 40 bp, Artificial Sequence
  Description of Artificial Sequence: Synthetic primer
ttctctatttttcttttcaaggaaagctgatacctatttc

SEQ ID NO: 8615 - DNA, 40 bp, Artificial Sequence
  Description of Artificial Sequence: Synthetic primer
tgaatttttcttaacactctcctatccctgtaactgtgtc

SEQ ID NO: 8616 - DNA, 40 bp, Artificial Sequence
  Description of Artificial Sequence: Synthetic primer
atggccacaggactagcatcagcattcaagacaagacagg

SEQ ID NO: 8617 - DNA, 40 bp, Artificial Sequence
  Description of Artificial Sequence: Synthetic primer
ccccacctgggcaggctggggtgactcactggcccccact

SEQ ID NO: 8618 - DNA, 40 bp, Artificial Sequence
  Description of Artificial Sequence: Synthetic primer
gtgggcacgggcacgggtggtagaagaggtgggcacaggc

SEQ ID NO: 8619 - DNA, 40 bp, Artificial Sequence
  Description of Artificial Sequence: Synthetic primer
agagacaagaaaaagtaaaatcaaactagcccactatttc

SEQ ID NO: 8620 - DNA, 40 bp, Artificial Sequence
  Description of Artificial Sequence: Synthetic primer
attgctgatttttacaagatgttttggtaattttgtcatg

SEQ ID NO: 8621 - DNA, 40 bp, Artificial Sequence
  Description of Artificial Sequence: Synthetic primer
gctatattcccaaagtgatagggctgaaggaggggccttg

SEQ ID NO: 8622 - DNA, 40 bp, Artificial Sequence
  Description of Artificial Sequence: Synthetic primer
tgtggtaacattgaatggtttccgttgggttttctcttcc

SEQ ID NO: 8623 - DNA, 40 bp, Artificial Sequence
  Description of Artificial Sequence: Synthetic primer
gaagtgtgttagtgacagtccccttcagttctggaaaacg

SEQ ID NO: 8624 - DNA, 40 bp, Artificial Sequence
  Description of Artificial Sequence: Synthetic primer
ccaatatgactgttttcctaccaatgccatttttatttcc

SEQ ID NO: 8625 - DNA, 40 bp, Artificial Sequence
  Description of Artificial Sequence: Synthetic primer
atcccgagctttgtcggcacaatactggctcagacaggtg

SEQ ID NO: 8626 - DNA, 40 bp, Artificial Sequence
  Description of Artificial Sequence: Synthetic primer
ccagtgtgccccaccattctcgggtagccgctgtgaactc

SEQ ID NO: 8627 - DNA, 40 bp, Artificial Sequence
  Description of Artificial Sequence: Synthetic primer
ataccattaaattaaataacccaccaataaagtaacagtg

SEQ ID NO: 8628 - DNA, 40 bp, Artificial Sequence
  Description of Artificial Sequence: Synthetic primer
cattatcctatattaaccttcaattttcatttgttttctc

SEQ ID NO: 8629 - DNA, 40 bp, Artificial Sequence
  Description of Artificial Sequence: Synthetic primer
tgtggtactcagagttctgatgtgccctgtcttgccctca

SEQ ID NO: 8630 - DNA, 40 bp, Artificial Sequence
  Description of Artificial Sequence: Synthetic primer
gattgaaggtaggagataagaggtggggcagaagaaggtc

SEQ ID NO: 8631 - DNA, 40 bp, Artificial Sequence
  Description of Artificial Sequence: Synthetic primer
ggcagagagcgggaaggagggcccattctctgcagtcctc

SEQ ID NO: 8632 - DNA, 40 bp, Artificial Sequence
  Description of Artificial Sequence: Synthetic primer
ggcctgttagcatctttgcttttcctggacagcctcaccc

SEQ ID NO: 8633 - DNA, 40 bp, Artificial Sequence
  Description of Artificial Sequence: Synthetic primer
ttgagttcttgagttcctcaaaagagaaatcacgcattta

SEQ ID NO: 8634 - DNA, 40 bp, Artificial Sequence
  Description of Artificial Sequence: Synthetic primer
catcggaactgctgtctgcatttatgaacccccagccttg

SEQ ID NO: 8635 - DNA, 40 bp, Artificial Sequence
  Description of Artificial Sequence: Synthetic primer
aatatgtctatatctatttcatcacaatataaaaaaatac

SEQ ID NO: 8636 - DNA, 40 bp, Artificial Sequence
  Description of Artificial Sequence: Synthetic primer
aaataaccactctcttcttggctgtgttctctacctgttg

SEQ ID NO: 8637 - DNA, 40 bp, Artificial Sequence
  Description of Artificial Sequence: Synthetic primer
cttagccatttaggtcaatatcctgttgtttttctcttac

SEQ ID NO: 8638 - DNA, 40 bp, Artificial Sequence
  Description of Artificial Sequence: Synthetic primer
gctccaaagaccaggctcccacagcctttcacgccaacag

SEQ ID NO: 8639 - DNA, 40 bp, Artificial Sequence
  Description of Artificial Sequence: Synthetic primer
tcttttagaatcttcttttcacactaaggaatcatttatc

SEQ ID NO: 8640 - DNA, 40 bp, Artificial Sequence
  Description of Artificial Sequence: Synthetic primer
ttttgtgtctgttagtgtacctgtggttggtctacctgtc

SEQ ID NO: 8641 - DNA, 40 bp, Artificial Sequence
  Description of Artificial Sequence: Synthetic primer
tttcggtgatctttagcatactttttaaatttttctgttt

SEQ ID NO: 8642 - DNA, 40 bp, Artificial Sequence
  Description of Artificial Sequence: Synthetic primer
gataaacctcacaaaagagtgaattcacattttatttatg

SEQ ID NO: 8643 - DNA, 40 bp, Artificial Sequence
  Description of Artificial Sequence: Synthetic primer
aggggtggccaacgcacactctctcctcctgtcccctctc

SEQ ID NO: 8644 - DNA, 40 bp, Artificial Sequence
  Description of Artificial Sequence: Synthetic primer
tcagctctggaacgaggggctcggggtcgagactggaatg

SEQ ID NO: 8645 - DNA, 40 bp, Artificial Sequence
  Description of Artificial Sequence: Synthetic primer
tactattaaaagaagtttctctaacaagcagataaaatgg

SEQ ID NO: 8646 - DNA, 40 bp, Artificial Sequence
  Description of Artificial Sequence: Synthetic primer
acattaaaatggatgtctaatttatactttttgttttata

SEQ ID NO: 8647 - DNA, 40 bp, Artificial Sequence
  Description of Artificial Sequence: Synthetic primer
ttggcttcctggagcccctgtccccattcctaacccactg

SEQ ID NO: 8648 - DNA, 40 bp, Artificial Sequence
  Description of Artificial Sequence: Synthetic primer
tgctgcccagggcagggctatagtgagccggagtgtggag

SEQ ID NO: 8649 - DNA, 40 bp, Artificial Sequence
  Description of Artificial Sequence: Synthetic primer
agtggagtggaatggcactggctggccactcagctcagcg

SEQ ID NO: 8650 - DNA, 40 bp, Artificial Sequence
  Description of Artificial Sequence: Synthetic primer
aggggctctaggaggtaccttttgctcctcaccctggatc

SEQ ID NO: 8651 - DNA, 40 bp, Artificial Sequence
  Description of Artificial Sequence: Synthetic primer
tgcaggactcagtgtgtccggcagacagtcctacctggtt

SEQ ID NO: 8652 - DNA, 40 bp, Artificial Sequence
  Description of Artificial Sequence: Synthetic primer
gacggccgtccctcggcccactcaccgccctgcccttttg

SEQ ID NO: 8653 - DNA, 40 bp, Artificial Sequence
  Description of Artificial Sequence: Synthetic primer
acataccacaaaatttaattctttaaaagaaaaagatgac

SEQ ID NO: 8654 - DNA, 40 bp, Artificial Sequence
  Description of Artificial Sequence: Synthetic primer
tttttattacatgttttctactcatttgttaaaccaacag

SEQ ID NO: 8655 - DNA, 40 bp, Artificial Sequence
  Description of Artificial Sequence: Synthetic primer
aaggattcagaaggagaaagctcattaggaagtaactgac

SEQ ID NO: 8656 - DNA, 40 bp, Artificial Sequence
  Description of Artificial Sequence: Synthetic primer
ttatcgaagtatgtcctaattccttgctatgaagctttgg

SEQ ID NO: 8657 - DNA, 40 bp, Artificial Sequence
  Description of Artificial Sequence: Synthetic primer
attgtttaactgtgatagacgtgatagttaaactttggtg

SEQ ID NO: 8658 - DNA, 40 bp, Artificial Sequence
  Description of Artificial Sequence: Synthetic primer
gtacacacatacacacgcctctgtctctctctcacatggg

SEQ ID NO: 8659 - DNA, 40 bp, Artificial Sequence
  Description of Artificial Sequence: Synthetic primer
gaagccttatgtaacttaggaagaagctaattgtatactg

SEQ ID NO: 8660 - DNA, 40 bp, Artificial Sequence
  Description of Artificial Sequence: Synthetic primer
cacaaaagagcacaggctctctgtgcaatgactatcaagc

SEQ ID NO: 8661 - DNA, 40 bp, Artificial Sequence
  Description of Artificial Sequence: Synthetic primer
gaaaacgaaataacacaaatttttaaggttactgatttac

SEQ ID NO: 8662 - DNA, 40 bp, Artificial Sequence
  Description of Artificial Sequence: Synthetic primer
gacataaaaaatcagagtgtaaacctaataaaatgtttac

SEQ ID NO: 8663 - DNA, 40 bp, Artificial Sequence
  Description of Artificial Sequence: Synthetic primer
tttaaaaaaagttatctcttacaaggctgttttactcctg

SEQ ID NO: 8664 - DNA, 40 bp, Artificial Sequence
  Description of Artificial Sequence: Synthetic primer
aagaatggaagactttccatgtatctactttatgaaaaag

SEQ ID NO: 8665 - DNA, 40 bp, Artificial Sequence
  Description of Artificial Sequence: Synthetic primer
aattttcataattaagactttgtatttgtattgatatttg

SEQ ID NO: 8666 - DNA, 40 bp, Artificial Sequence
  Description of Artificial Sequence: Synthetic primer
ttaataataaaatattccacaatctaagttcaatctcctc

SEQ ID NO: 8667 - DNA, 40 bp, Artificial Sequence
  Description of Artificial Sequence: Synthetic primer
gtcagtgttgaaagctactggaaaatggaatgtccctacc

SEQ ID NO: 8668 - DNA, 40 bp, Artificial Sequence
  Description of Artificial Sequence: Synthetic primer
agccgtttctttacattgttcttctttctactttcttttc

SEQ ID NO: 8669 - DNA, 40 bp, Artificial Sequence
  Description of Artificial Sequence: Synthetic primer
ctggacatggcactccctgatcctcagctgccctctctcc

SEQ ID NO: 8670 - DNA, 40 bp, Artificial Sequence
  Description of Artificial Sequence: Synthetic primer
agaggcgaccctggggcccggaagcagctgtggctggagc

SEQ ID NO: 8671 - DNA, 40 bp, Artificial Sequence
  Description of Artificial Sequence: Synthetic primer
ggtaaaatcagtcaatcagtcctgttcagaagaactttcg

SEQ ID NO: 8672 - DNA, 40 bp, Artificial Sequence
  Description of Artificial Sequence: Synthetic primer
aattctgaaaatttcttttgcaattctttgtaacccttag

SEQ ID NO: 8673 - DNA, 40 bp, Artificial Sequence
  Description of Artificial Sequence: Synthetic primer
gtcctagtcatagggatcaatgctgccctaggacctgtgg

SEQ ID NO: 8674 - DNA, 40 bp, Artificial Sequence
  Description of Artificial Sequence: Synthetic primer
tcctgccccgggttggtccaccactcactgttttgtttcc

SEQ ID NO: 8675 - DNA, 40 bp, Artificial Sequence
  Description of Artificial Sequence: Synthetic primer
tttcacgaagtgtggtgatatcaaactctacaggcacata

SEQ ID NO: 8676 - DNA, 40 bp, Artificial Sequence
  Description of Artificial Sequence: Synthetic primer
atcctttatatttttccagcatcattttatacatccttac

SEQ ID NO: 8677 - DNA, 40 bp, Artificial Sequence
  Description of Artificial Sequence: Synthetic primer
aatcaggatgatgttgtgctgcatgttagctcaaagacta

SEQ ID NO: 8678 - DNA, 40 bp, Artificial Sequence
  Description of Artificial Sequence: Synthetic primer
ggaatgccactggtgctggattttgaagggcggggcaagc

SEQ ID NO: 8679 - DNA, 40 bp, Artificial Sequence
  Description of Artificial Sequence: Synthetic primer
acatgcacattgtgccaccacattgcagtaacccccatgc

SEQ ID NO: 8680 - DNA, 40 bp, Artificial Sequence
  Description of Artificial Sequence: Synthetic primer
acgtgaagacggctgctcccatcccacccgcggcgggcac

SEQ ID NO: 8681 - DNA, 40 bp, Artificial Sequence
  Description of Artificial Sequence: Synthetic primer
ttatgattttgcagaaaacagatctgtatttatttcagtg

SEQ ID NO: 8682 - DNA, 40 bp, Artificial Sequence
  Description of Artificial Sequence: Synthetic primer
gacaggttttgaaagatatttgtgttactaatgactgtgc

SEQ ID NO: 8683 - DNA, 40 bp, Artificial Sequence
  Description of Artificial Sequence: Synthetic primer
ttccacttatatttaaactgagcttgttggaataaggatg

SEQ ID NO: 8684 - DNA, 40 bp, Artificial Sequence
  Description of Artificial Sequence: Synthetic primer
aaaaccacgtctatggaaattccctgtgggaacagcttac

SEQ ID NO: 8685 - DNA, 40 bp, Artificial Sequence
  Description of Artificial Sequence: Synthetic primer
aaatgtctaattttccgatatgtgatttatttagtcttta

SEQ ID NO: 8686 - DNA, 40 bp, Artificial Sequence
  Description of Artificial Sequence: Synthetic primer
aacatggcagaattgaagaattacgtaaataatgactggg

SEQ ID NO: 8687 - DNA, 40 bp, Artificial Sequence
  Description of Artificial Sequence: Synthetic primer
cacagcagctccttctccagctgctgcccagcccccaacc

SEQ ID NO: 8688 - DNA, 40 bp, Artificial Sequence
  Description of Artificial Sequence: Synthetic primer
ataaagggacgccctgccctgtgcctgacttgcgctgctc

SEQ ID NO: 8689 - DNA, 40 bp, Artificial Sequence
  Description of Artificial Sequence: Synthetic primer
taccctccacagtcacggtgccggaccctctcccgataac

SEQ ID NO: 8690 - DNA, 40 bp, Artificial Sequence
  Description of Artificial Sequence: Synthetic primer
acccagatcctgtccaaccactgcggtggcagctggaaac

SEQ ID NO: 8691 - DNA, 40 bp, Artificial Sequence
  Description of Artificial Sequence: Synthetic primer
aaaaaaaaggaactaaaataatttcctattttccattaca

SEQ ID NO: 8692 - DNA, 40 bp, Artificial Sequence
  Description of Artificial Sequence: Synthetic primer
tatattgttgctcaaagtcatataaagatcacatttactg

SEQ ID NO: 8693 - DNA, 40 bp, Artificial Sequence
  Description of Artificial Sequence: Synthetic primer
tacagtctgtttgggaaatgaaagttactagaaccaacac

SEQ ID NO: 8694 - DNA, 40 bp, Artificial Sequence
  Description of Artificial Sequence: Synthetic primer
tccccatttttttctcctatttcttttttttgtttcatcc

SEQ ID NO: 8695 - DNA, 40 bp, Artificial Sequence
  Description of Artificial Sequence: Synthetic primer
ggctgcagagttcggattcttgaggatgctgtgaaaagtg

SEQ ID NO: 8696 - DNA, 40 bp, Artificial Sequence
  Description of Artificial Sequence: Synthetic primer
ccgagcctctgtttatttcctttcctactatcaatactcg

SEQ ID NO: 8697 - DNA, 40 bp, Artificial Sequence
  Description of Artificial Sequence: Synthetic primer
ctagcaaagtatatggaagcttcttcaggaaatagtaaac

SEQ ID NO: 8698 - DNA, 40 bp, Artificial Sequence
  Description of Artificial Sequence: Synthetic primer
cagactaaaaattaatgaaatttaatataaaacaaataag

SEQ ID NO: 8699 - DNA, 40 bp, Artificial Sequence
  Description of Artificial Sequence: Synthetic primer
tggcagagagacatgcttgttcctctggattggaaagatg

SEQ ID NO: 8700 - DNA, 40 bp, Artificial Sequence
  Description of Artificial Sequence: Synthetic primer
cactttacagtatttgccactaatttttttttccttcttc

SEQ ID NO: 8701 - DNA, 40 bp, Artificial Sequence
  Description of Artificial Sequence: Synthetic primer
gtgggtgtgccctgtggctgagagagcccctctttttatc

SEQ ID NO: 8702 - DNA, 40 bp, Artificial Sequence
  Description of Artificial Sequence: Synthetic primer
ctgctttctacttacctcggcctgtgctgtaatgctggag

SEQ ID NO: 8703 - DNA, 40 bp, Artificial Sequence
  Description of Artificial Sequence: Synthetic primer
aaaaaccttgttatataggcccagttctaactaaataatc

SEQ ID NO: 8704 - DNA, 40 bp, Artificial Sequence
  Description of Artificial Sequence: Synthetic primer
ttgctgaatgttaacattaatgcttattttaccttttttt

SEQ ID NO: 8705 - DNA, 40 bp, Artificial Sequence
  Description of Artificial Sequence: Synthetic primer
aaacatttatgtacaatatgtattcagagtatcccctttt

SEQ ID NO: 8706 - DNA, 40 bp, Artificial Sequence
  Description of Artificial Sequence: Synthetic primer
tcaacaatatgcatatttttacaacttatatttaatttag

SEQ ID NO: 8707 - DNA, 40 bp, Artificial Sequence
  Description of Artificial Sequence: Synthetic primer
ctagccattgggcagtaggcaggcagtagatgttggttcc

SEQ ID NO: 8708 - DNA, 40 bp, Artificial Sequence
  Description of Artificial Sequence: Synthetic primer
gctctgctctcttcagacaggagattgtcactttccttcc

SEQ ID NO: 8709 - DNA, 40 bp, Artificial Sequence
  Description of Artificial Sequence: Synthetic primer
caatgaaattcagtcctggaaggaaaagaagaagtaactg

SEQ ID NO: 8710 - DNA, 40 bp, Artificial Sequence
  Description of Artificial Sequence: Synthetic primer
agtgaagagcccatgttaagttgattttaaaaaagaaagc

SEQ ID NO: 8711 - DNA, 40 bp, Artificial Sequence
  Description of Artificial Sequence: Synthetic primer
aatagttagaacattgtcactaactggtctggtattctcg

SEQ ID NO: 8712 - DNA, 40 bp, Artificial Sequence
  Description of Artificial Sequence: Synthetic primer
caatgaggaacttagaagaaaaacttcataacatactcac

SEQ ID NO: 8713 - DNA, 40 bp, Artificial Sequence
  Description of Artificial Sequence: Synthetic primer
gttagagattggctttggtgctagtgccatcttttatttc

SEQ ID NO: 8714 - DNA, 40 bp, Artificial Sequence
  Description of Artificial Sequence: Synthetic primer
ggtggaaaagatctgccgtacgcatttaaaaaatggccgg

SEQ ID NO: 8715 - DNA, 40 bp, Artificial Sequence
  Description of Artificial Sequence: Synthetic primer
ttgtcctcgtgagcgctcgtgtaagcaggtggtcatgctg

SEQ ID NO: 8716 - DNA, 40 bp, Artificial Sequence
  Description of Artificial Sequence: Synthetic primer
ttcatggcacttcataattttatcatttcattttattttc

SEQ ID NO: 8717 - DNA, 40 bp, Artificial Sequence
  Description of Artificial Sequence: Synthetic primer
agaggttatttcaaggagaaaaagaaggggcctagggaac

SEQ ID NO: 8718 - DNA, 40 bp, Artificial Sequence
  Description of Artificial Sequence: Synthetic primer
ggctgaaacagctgggttgtgggtgcttcccatgtgtggc

SEQ ID NO: 8719 - DNA, 40 bp, Artificial Sequence
  Description of Artificial Sequence: Synthetic primer
aagtatcctattaactactcagctataaaataaacaggtc

SEQ ID NO: 8720 - DNA, 40 bp, Artificial Sequence
  Description of Artificial Sequence: Synthetic primer
gtgtgtgtatttgccttgcagatcctttacctcctgctag

SEQ ID NO: 8721 - DNA, 40 bp, Artificial Sequence
  Description of Artificial Sequence: Synthetic primer
ctcccacgcgctgcactcacacagggccctgctcactcag

SEQ ID NO: 8722 - DNA, 40 bp, Artificial Sequence
  Description of Artificial Sequence: Synthetic primer
tcccctcgtgtgagggttccgacaactcttcttctcttgg

SEQ ID NO: 8723 - DNA, 40 bp, Artificial Sequence
  Description of Artificial Sequence: Synthetic primer
agacctgcccctgactgtggtggccagggcagctgtttgc

SEQ ID NO: 8724 - DNA, 40 bp, Artificial Sequence
  Description of Artificial Sequence: Synthetic primer
tgagcttgcttttcactataattctgacttaatctggttg

SEQ ID NO: 8725 - DNA, 40 bp, Artificial Sequence
  Description of Artificial Sequence: Synthetic primer
cgaagatgtgaatatttctaaaatttcagcttgcctcttg

SEQ ID NO: 8726 - DNA, 40 bp, Artificial Sequence
  Description of Artificial Sequence: Synthetic primer
gctcacttgcttttctctctccacattaaacaccaaacag

SEQ ID NO: 8727 - DNA, 40 bp, Artificial Sequence
  Description of Artificial Sequence: Synthetic primer
cactctgctggtcaggtccttgttgatgaggccatccttg

SEQ ID NO: 8728 - DNA, 40 bp, Artificial Sequence
  Description of Artificial Sequence: Synthetic primer
tggcctaacccggagaactttgatccagctcgattcttgg

SEQ ID NO: 8729 - DNA, 40 bp, Artificial Sequence
  Description of Artificial Sequence: Synthetic primer
tatttgtttggctgtttgtacagaaaaatgataattaaac

SEQ ID NO: 8730 - DNA, 40 bp, Artificial Sequence
  Description of Artificial Sequence: Synthetic primer
caaattaatgtttcattttaaggaaaatatgactctatgc

SEQ ID NO: 8731 - DNA, 40 bp, Artificial Sequence
  Description of Artificial Sequence: Synthetic primer
ggatttatgcaggggagagcctgacgtgaaattcaaatgg

SEQ ID NO: 8732 - DNA, 40 bp, Artificial Sequence
  Description of Artificial Sequence: Synthetic primer
aaatggggtccacatttcagcatctctgtatttgtcttac

SEQ ID NO: 8733 - DNA, 40 bp, Artificial Sequence
  Description of Artificial Sequence: Synthetic primer
agcctggcacccctcccctattccttctcacctgattatg

SEQ ID NO: 8734 - DNA, 40 bp, Artificial Sequence
  Description of Artificial Sequence: Synthetic primer
gacaggcagcgttatggacacactcaatgcactcactcac

SEQ ID NO: 8735 - DNA, 40 bp, Artificial Sequence
  Description of Artificial Sequence: Synthetic primer
ctcacagtaaaacccactaatacttgaaggtcattctttt

SEQ ID NO: 8736 - DNA, 40 bp, Artificial Sequence
  Description of Artificial Sequence: Synthetic primer
caggaaaatacatggagctgatgggcgtggggaagtcagc

SEQ ID NO: 8737 - DNA, 40 bp, Artificial Sequence
  Description of Artificial Sequence: Synthetic primer
gtttttttcttactaggtcatgttcacggaggaggatgtc

SEQ ID NO: 8738 - DNA, 40 bp, Artificial Sequence
  Description of Artificial Sequence: Synthetic primer
cagtgtatgttgggatgcaaacagggaggcttatgacatc

SEQ ID NO: 8739 - DNA, 40 bp, Artificial Sequence
  Description of Artificial Sequence: Synthetic primer
acagagaaagaagaacacatcccacagtgcataaataacc

SEQ ID NO: 8740 - DNA, 40 bp, Artificial Sequence
  Description of Artificial Sequence: Synthetic primer
tgcttgtttatagttactaaagcacctggtgggctcaaag

SEQ ID NO: 8741 - DNA, 40 bp, Artificial Sequence
  Description of Artificial Sequence: Synthetic primer
agggatctttttctggcacaggttgtttggttactcactg

SEQ ID NO: 8742 - DNA, 40 bp, Artificial Sequence
  Description of Artificial Sequence: Synthetic primer
ccacgcacaggagaactggaaatcaaatcctgctgaaaac

SEQ ID NO: 8743 - DNA, 40 bp, Artificial Sequence
  Description of Artificial Sequence: Synthetic primer
caaaaatgaaattgttttgattttgttttaatttcttcag

SEQ ID NO: 8744 - DNA, 40 bp, Artificial Sequence
  Description of Artificial Sequence: Synthetic primer
aaaaaaaaacatgcaaaatcacattattgccaacatgact

SEQ ID NO: 8745 - DNA, 40 bp, Artificial Sequence
  Description of Artificial Sequence: Synthetic primer
gttgtaggttataactatccatttgtctgaaaaactttgc

SEQ ID NO: 8746 - DNA, 40 bp, Artificial Sequence
  Description of Artificial Sequence: Synthetic primer
cgaaaacgagaaaaaccttatctgattattttgcaaccac

SEQ ID NO: 8747 - DNA, 40 bp, Artificial Sequence
  Description of Artificial Sequence: Synthetic primer
aaagaacatttctgatttgctttcttttttcctttactgg

SEQ ID NO: 8748 - DNA, 40 bp, Artificial Sequence
  Description of Artificial Sequence: Synthetic primer
ctatttgaagctagaagatccttactagtctgaagaagtc

SEQ ID NO: 8749 - DNA, 40 bp, Artificial Sequence
  Description of Artificial Sequence: Synthetic primer
gcagcctgtgttggtcctaaaggtggtcctttgtttgtag

SEQ ID NO: 8750 - DNA, 40 bp, Artificial Sequence
  Description of Artificial Sequence: Synthetic primer
ataacatccctgggaaagttctgcaacccaagagtgatag

SEQ ID NO: 8751 - DNA, 40 bp, Artificial Sequence
  Description of Artificial Sequence: Synthetic primer
caaaagttataattccatgttctgtgattttctttttgtg

SEQ ID NO: 8752 - DNA, 40 bp, Artificial Sequence
  Description of Artificial Sequence: Synthetic primer
cccactgctgccctcttggcccttggactgccatatcctc

SEQ ID NO: 8753 - DNA, 40 bp, Artificial Sequence
  Description of Artificial Sequence: Synthetic primer
ggagcggaggcaggggatcctgaaggccaaggaaaagagc

SEQ ID NO: 8754 - DNA, 40 bp, Artificial Sequence
  Description of Artificial Sequence: Synthetic primer
agacatatgctgccgagtgaccagtgggctgacctttctc

SEQ ID NO: 8755 - DNA, 40 bp, Artificial Sequence
  Description of Artificial Sequence: Synthetic primer
cgccacccacgccccagccattcgctctgagacacctgag

SEQ ID NO: 8756 - DNA, 40 bp, Artificial Sequence
  Description of Artificial Sequence: Synthetic primer
agggttctgtttttaagtatatttttttctttgacttatc

SEQ ID NO: 8757 - DNA, 40 bp, Artificial Sequence
  Description of Artificial Sequence: Synthetic primer
catgacattaaatgttaaaatacagtaactttgtcttttc

SEQ ID NO: 8758 - DNA, 40 bp, Artificial Sequence
  Description of Artificial Sequence: Synthetic primer
agaatagattatctcttttccttaatgttctttctctttg

SEQ ID NO: 8759 - DNA, 40 bp, Artificial Sequence
  Description of Artificial Sequence: Synthetic primer
gcaacattagtgcatttccagatctattgtcagcacctgg

SEQ ID NO: 8760 - DNA, 40 bp, Artificial Sequence
  Description of Artificial Sequence: Synthetic primer
aatgaaaatgagtttgcttttagggaaaaggtttctaata

SEQ ID NO: 8761 - DNA, 40 bp, Artificial Sequence
  Description of Artificial Sequence: Synthetic primer
taaaaaatgaacaatgagagaatgttaaatgctcaaaaag

SEQ ID NO: 8762 - DNA, 40 bp, Artificial Sequence
  Description of Artificial Sequence: Synthetic primer
ggaccaatcattaaaattccttgaccacatcaaacctgtg

SEQ ID NO: 8763 - DNA, 40 bp, Artificial Sequence
  Description of Artificial Sequence: Synthetic primer
aagattataacgtgcatgtcctttttcccttttcgtgttc

SEQ ID NO: 8764 - DNA, 40 bp, Artificial Sequence
  Description of Artificial Sequence: Synthetic primer
agcctgtgttcagccatgtgcatgcagctcacaagtaagg

SEQ ID NO: 8765 - DNA, 40 bp, Artificial Sequence
  Description of Artificial Sequence: Synthetic primer
cacgcccaggtccaggcccaggccggtagggatcctctag

SEQ ID NO: 8766 - DNA, 40 bp, Artificial Sequence
  Description of Artificial Sequence: Synthetic primer
ctggctcagtggcgctaagccgtgccaggcgtgtgtgcag

SEQ ID NO: 8767 - DNA, 40 bp, Artificial Sequence
  Description of Artificial Sequence: Synthetic primer
ccagatgcacggctgtcccttggggctctaggtcatgcag

SEQ ID NO: 8768 - DNA, 40 bp, Artificial Sequence
  Description of Artificial Sequence: Synthetic primer
gtatacttcctgactgtacagccggccagcgtgacagatg

SEQ ID NO: 8769 - DNA, 40 bp, Artificial Sequence
  Description of Artificial Sequence: Synthetic primer
ctggtgctggatcccgcgctgcctgcgctggtcagttgtg

SEQ ID NO: 8770 - DNA, 40 bp, Artificial Sequence
  Description of Artificial Sequence: Synthetic primer
cagggcagccagtgtgaggggcgatgatgctgaagtccac

SEQ ID NO: 8771 - DNA, 40 bp, Artificial Sequence
  Description of Artificial Sequence: Synthetic primer
gaaacccagtctggaaggtcaggcaggcccagccccactg

SEQ ID NO: 8772 - DNA, 40 bp, Artificial Sequence
  Description of Artificial Sequence: Synthetic primer
gggcaataccctttcaacgaacacctcacacaccttaaac

SEQ ID NO: 8773 - DNA, 40 bp, Artificial Sequence
  Description of Artificial Sequence: Synthetic primer
cgcgtgtgtgtgtgtgtctaaatggcttctttgttactac

SEQ ID NO: 8774 - DNA, 40 bp, Artificial Sequence
  Description of Artificial Sequence: Synthetic primer
agggatccacttccttgccctgctcagcccctccctcctc

SEQ ID NO: 8775 - DNA, 40 bp, Artificial Sequence
  Description of Artificial Sequence: Synthetic primer
cagactcttcattcatcaaaccctcccgggcattttcctg

SEQ ID NO: 8776 - DNA, 40 bp, Artificial Sequence
  Description of Artificial Sequence: Synthetic primer
aaaaaatactagagcagatggttgaaatacttttaactgc

SEQ ID NO: 8777 - DNA, 40 bp, Artificial Sequence
  Description of Artificial Sequence: Synthetic primer
gcacattaaggaccaatatatgtagtacttgattaattgc

SEQ ID NO: 8778 - DNA, 40 bp, Artificial Sequence
  Description of Artificial Sequence: Synthetic primer
cctgcaggcacctgacctggctctgtgactccctctatgc

SEQ ID NO: 8779 - DNA, 40 bp, Artificial Sequence
  Description of Artificial Sequence: Synthetic primer
tacagaagaggggcaccgcccagaccctggcgggcagcac

SEQ ID NO: 8780 - DNA, 40 bp, Artificial Sequence
  Description of Artificial Sequence: Synthetic primer
ttaggcctgcaacacataatcaactttcactaccaagttc

SEQ ID NO: 8781 - DNA, 40 bp, Artificial Sequence
  Description of Artificial Sequence: Synthetic primer
gtttatattgaaatgattgaattccatggtgaatactttg

SEQ ID NO: 8782 - DNA, 40 bp, Artificial Sequence
  Description of Artificial Sequence: Synthetic primer
caaggcggcctggtcctgagcccttctgatgctgccctta

SEQ ID NO: 8783 - DNA, 40 bp, Artificial Sequence
  Description of Artificial Sequence: Synthetic primer
aactggatgcctttgttgtaaacggtggccgtgtcctctg

SEQ ID NO: 8784 - DNA, 40 bp, Artificial Sequence
  Description of Artificial Sequence: Synthetic primer
ccaggccctcacctgggtgcccaccatcccctccctgtgc

SEQ ID NO: 8785 - DNA, 40 bp, Artificial Sequence
  Description of Artificial Sequence: Synthetic primer
attcacccgagccacacagctccagcggatgcaggagagg

SEQ ID NO: 8786 - DNA, 40 bp, Artificial Sequence
  Description of Artificial Sequence: Synthetic primer
ggcttataacatgacactgagacttggtggaagtcagagc

SEQ ID NO: 8787 - DNA, 40 bp, Artificial Sequence
  Description of Artificial Sequence: Synthetic primer
ccatgagatgtggaactcacaggaagctgcccacacagac

SEQ ID NO: 8788 - DNA, 40 bp, Artificial Sequence
  Description of Artificial Sequence: Synthetic primer
ttgggatgtgtttgtatgcacgtttttgcttctgatttta

SEQ ID NO: 8789 - DNA, 40 bp, Artificial Sequence
  Description of Artificial Sequence: Synthetic primer
aacaaaacttaaaaggcaccatgcacttaattggccgtac

SEQ ID NO: 8790 - DNA, 40 bp, Artificial Sequence
  Description of Artificial Sequence: Synthetic primer
ccatagacaaataatctattttatatcttctttatgtgcc

SEQ ID NO: 8791 - DNA, 40 bp, Artificial Sequence
  Description of Artificial Sequence: Synthetic primer
gtcaaggtgtcctccttcgggagttgccgctcctcagtgg

SEQ ID NO: 8792 - DNA, 40 bp, Artificial Sequence
  Description of Artificial Sequence: Synthetic primer
gtgtcagatgaaatcctgtgaacttggcgttccttttcac

SEQ ID NO: 8793 - DNA, 40 bp, Artificial Sequence
  Description of Artificial Sequence: Synthetic primer
tcttggaaagctacctgtccacgtgcaccggggtctcaag

SEQ ID NO: 8794 - DNA, 40 bp, Artificial Sequence
  Description of Artificial Sequence: Synthetic primer
aacctcacttcctaacatgtcagcttcttatcttttcttc

SEQ ID NO: 8795 - DNA, 40 bp, Artificial Sequence
  Description of Artificial Sequence: Synthetic primer
ttgcatcccggggttaaggggtatggcccatatgtctctg

SEQ ID NO: 8796 - DNA, 40 bp, Artificial Sequence
  Description of Artificial Sequence: Synthetic primer
ggctgaaggcacttccgttgagcatctagacgtttccttg

SEQ ID NO: 8797 - DNA, 40 bp, Artificial Sequence
  Description of Artificial Sequence: Synthetic primer
tgagtgacgcggcccgttaagtcgtagcccttaagtgagc

SEQ ID NO: 8798 - DNA, 40 bp, Artificial Sequence
  Description of Artificial Sequence: Synthetic primer
taaaaagtagaagagtatactcacaatatttctgatgagg

SEQ ID NO: 8799 - DNA, 40 bp, Artificial Sequence
  Description of Artificial Sequence: Synthetic primer
acactggaggtgtccaatgctccatgaaaaccacataaag

SEQ ID NO: 8800 - DNA, 40 bp, Artificial Sequence
  Description of Artificial Sequence: Synthetic primer
tcattgccatgactctcaggaattggccctatacttaggc

SEQ ID NO: 8801 - DNA, 40 bp, Artificial Sequence
  Description of Artificial Sequence: Synthetic primer
ctggggcagatgcggctcagctgatgagttgtcctgactg

SEQ ID NO: 8802 - DNA, 40 bp, Artificial Sequence
  Description of Artificial Sequence: Synthetic primer
ttgaatgtaaaactaaaatatgattcaccacaaacagttc

SEQ ID NO: 8803 - DNA, 40 bp, Artificial Sequence
  Description of Artificial Sequence: Synthetic primer
tcaaggattatattaaataactagggtggttttgtttttg

SEQ ID NO: 8804 - DNA, 40 bp, Artificial Sequence
  Description of Artificial Sequence: Synthetic primer
gacccgactcgctggcgcttcatggagaacttccaaaagg

SEQ ID NO: 8805 - DNA, 40 bp, Artificial Sequence
  Description of Artificial Sequence: Synthetic primer
caatcaaggaggtccccagttaggagtcccgggtacagag

SEQ ID NO: 8806 - DNA, 40 bp, Artificial Sequence
  Description of Artificial Sequence: Synthetic primer
gattcaagtcagtgaatacactttctgctggttttaaatg

SEQ ID NO: 8807 - DNA, 40 bp, Artificial Sequence
  Description of Artificial Sequence: Synthetic primer
tccatattaatagttagaagccacatcttatacttgctac

SEQ ID NO: 8808 - DNA, 40 bp, Artificial Sequence
  Description of Artificial Sequence: Synthetic primer
tgcatacaagtcaatggcatttcctcagtagaaggtatag

SEQ ID NO: 8809 - DNA, 40 bp, Artificial Sequence
  Description of Artificial Sequence: Synthetic primer
attctcctagtaaaaagcaagaactgttaaaaatcatctc

SEQ ID NO: 8810 - DNA, 40 bp, Artificial Sequence
  Description of Artificial Sequence: Synthetic primer
gtgggtgtgaggaccctggctcacaagtccctctttggtc

SEQ ID NO: 8811 - DNA, 40 bp, Artificial Sequence
  Description of Artificial Sequence: Synthetic primer
gtgaccctggcccaggcctgacctggcccagcccccagac

SEQ ID NO: 8812 - DNA, 40 bp, Artificial Sequence
  Description of Artificial Sequence: Synthetic primer
ggcctagggaacagtggggctggagcaccaggatgagtcc

SEQ ID NO: 8813 - DNA, 40 bp, Artificial Sequence
  Description of Artificial Sequence: Synthetic primer
cccgtaaaggcagacaaaggaaggggcgggacagggactg

SEQ ID NO: 8814 - DNA, 40 bp, Artificial Sequence
  Description of Artificial Sequence: Synthetic primer
ctggcatcagcactggtgggcccaagagccataaccacag

SEQ ID NO: 8815 - DNA, 40 bp, Artificial Sequence
  Description of Artificial Sequence: Synthetic primer
gcggggaaagaggccaaactgagccaccacgaacaccagg

SEQ ID NO: 8816 - DNA, 40 bp, Artificial Sequence
  Description of Artificial Sequence: Synthetic primer
aattatcaaaacttctaagttgaaaatcatgaaaaattac

SEQ ID NO: 8817 - DNA, 40 bp, Artificial Sequence
  Description of Artificial Sequence: Synthetic primer
gccatggatgtgtatcctaacagtgctgattgcttctttc

SEQ ID NO: 8818 - DNA, 40 bp, Artificial Sequence
  Description of Artificial Sequence: Synthetic primer
catttctcagtatttcatgtgatatctgtctttttcttcc

SEQ ID NO: 8819 - DNA, 40 bp, Artificial Sequence
  Description of Artificial Sequence: Synthetic primer
aggcctttctccacttagattttctccaattttatttgtg

SEQ ID NO: 8820 - DNA, 40 bp, Artificial Sequence
  Description of Artificial Sequence: Synthetic primer
taaaagtgcacagaaaacgcttacttatactctcttatac

SEQ ID NO: 8821 - DNA, 40 bp, Artificial Sequence
  Description of Artificial Sequence: Synthetic primer
ctaaattaatagaacctgacttaaaatggaatagtaaatc

SEQ ID NO: 8822 - DNA, 40 bp, Artificial Sequence
  Description of Artificial Sequence: Synthetic primer
attcagaaagttctcttacttactggatttctttttatgc

SEQ ID NO: 8823 - DNA, 40 bp, Artificial Sequence
  Description of Artificial Sequence: Synthetic primer
ttttgatatgaaaggttagaatttctaagaagttatcctg

SEQ ID NO: 8824 - DNA, 40 bp, Artificial Sequence
  Description of Artificial Sequence: Synthetic primer
tttcatataaaggcagcacaaatacactaatagacaaatc

SEQ ID NO: 8825 - DNA, 40 bp, Artificial Sequence
  Description of Artificial Sequence: Synthetic primer
ttgttaaatctattttgccaaatgttttacaagaaaattc

SEQ ID NO: 8826 - DNA, 40 bp, Artificial Sequence
  Description of Artificial Sequence: Synthetic primer
tttttagtagtgaatttcaaaatcctttttaaccttatag

SEQ ID NO: 8827 - DNA, 40 bp, Artificial Sequence
  Description of Artificial Sequence: Synthetic primer
gtttacaagagggaatactgaataaaaatggataaactac

SEQ ID NO: 8828 - DNA, 40 bp, Artificial Sequence
  Description of Artificial Sequence: Synthetic primer
tttgtgtggttctcagtccatgctcctgttggactgtcac

SEQ ID NO: 8829 - DNA, 40 bp, Artificial Sequence
  Description of Artificial Sequence: Synthetic primer
ttaaaatttaactgttgattgatttcttttctgtctttaa

SEQ ID NO: 8830 - DNA, 40 bp, Artificial Sequence
  Description of Artificial Sequence: Synthetic primer
gacccaagctgcctgacccgcacgcccagggccccctctc

SEQ ID NO: 8831 - DNA, 40 bp, Artificial Sequence
  Description of Artificial Sequence: Synthetic primer
gtcagggtgtggcctggccggggctggctgggtgcagagc

SEQ ID NO: 8832 - DNA, 40 bp, Artificial Sequence
  Description of Artificial Sequence: Synthetic primer
gcaaggcctctgctgccctcccactgttcctctcctctcc

SEQ ID NO: 8833 - DNA, 40 bp, Artificial Sequence
  Description of Artificial Sequence: Synthetic primer
gtccccaccagtgggacaatgtcaacggtcgctcatctac

SEQ ID NO: 8834 - DNA, 40 bp, Artificial Sequence
  Description of Artificial Sequence: Synthetic primer
aggtaattaattagtagaacaaataggaacacacacacac

SEQ ID NO: 8835 - DNA, 40 bp, Artificial Sequence
  Description of Artificial Sequence: Synthetic primer
tcagagctctcattattaatccatgaattttgtcttacag

SEQ ID NO: 8836 - DNA, 40 bp, Artificial Sequence
  Description of Artificial Sequence: Synthetic primer
tgtgagagtttatcagctaatacataaaacttcaaaatag

SEQ ID NO: 8837 - DNA, 40 bp, Artificial Sequence
  Description of Artificial Sequence: Synthetic primer
atttgtaattagattcaacaatacatttacccatttttcc

SEQ ID NO: 8838 - DNA, 40 bp, Artificial Sequence
  Description of Artificial Sequence: Synthetic primer
ccaaaccctcacagacctcagcctcccctccccccaaaac

SEQ ID NO: 8839 - DNA, 40 bp, Artificial Sequence
  Description of Artificial Sequence: Synthetic primer
aggccggcccctgaccgcccatctctcctggtcctcctcg

SEQ ID NO: 8840 - DNA, 40 bp, Artificial Sequence
  Description of Artificial Sequence: Synthetic primer
caccagcttcctttggtaagctctggacatctttgttttc

SEQ ID NO: 8841 - DNA, 40 bp, Artificial Sequence
  Description of Artificial Sequence: Synthetic primer
tgtgtaagccaaatgaggtggactctccgcgggactattc

SEQ ID NO: 8842 - DNA, 40 bp, Artificial Sequence
  Description of Artificial Sequence: Synthetic primer
gccctggcaaccctctcaccgcctttgctccttgtctctg

SEQ ID NO: 8843 - DNA, 40 bp, Artificial Sequence
  Description of Artificial Sequence: Synthetic primer
gcagtgttggtgacaaaggcccttttcggaaagctgcggc

SEQ ID NO: 8844 - DNA, 40 bp, Artificial Sequence
  Description of Artificial Sequence: Synthetic primer
tcccgctcagctacaggcctgtgtcaccactccccacagg

SEQ ID NO: 8845 - DNA, 40 bp, Artificial Sequence
  Description of Artificial Sequence: Synthetic primer
gggctgtggactgagttacctttgtgtcctgtgttggttc

SEQ ID NO: 8846 - DNA, 40 bp, Artificial Sequence
  Description of Artificial Sequence: Synthetic primer
ctgggctctcctctgctccctgtgtgttttcctctcctct

SEQ ID NO: 8847 - DNA, 40 bp, Artificial Sequence
  Description of Artificial Sequence: Synthetic primer
ttgtgggaatcagcttccaaggactaggtcatttattggc

SEQ ID NO: 8848 - DNA, 40 bp, Artificial Sequence
  Description of Artificial Sequence: Synthetic primer
gatagcaaatacttaggtaaatgctgaactgtggatagtg

SEQ ID NO: 8849 - DNA, 40 bp, Artificial Sequence
  Description of Artificial Sequence: Synthetic primer
ctactccccttgagcatttacttcaaagcagactaaaaag

SEQ ID NO: 8850 - DNA, 40 bp, Artificial Sequence
  Description of Artificial Sequence: Synthetic primer
gacagctcagggctgtatcacagagattaggaacatctgc

SEQ ID NO: 8851 - DNA, 40 bp, Artificial Sequence
  Description of Artificial Sequence: Synthetic primer
tctgtgagtttgagttttgaatatgtgcattgattctctc

SEQ ID NO: 8852 - DNA, 40 bp, Artificial Sequence
  Description of Artificial Sequence: Synthetic primer
tgtatatccaggtttgaggagtagggtcttaaaatatcca

SEQ ID NO: 8853 - DNA, 40 bp, Artificial Sequence
  Description of Artificial Sequence: Synthetic primer
ctaacagttcttttgaactttggctttcaaatctttctag

SEQ ID NO: 8854 - DNA, 40 bp, Artificial Sequence
  Description of Artificial Sequence: Synthetic primer
tctaaacagtatactaagtagcaaacaaacaagcagtttc

SEQ ID NO: 8855 - DNA, 40 bp, Artificial Sequence
  Description of Artificial Sequence: Synthetic primer
agctgttttgcactcctcaatctgtctccaactaagaggc

SEQ ID NO: 8856 - DNA, 40 bp, Artificial Sequence
  Description of Artificial Sequence: Synthetic primer
gtaaaaagcaatactaaactataattttaactggaatttg

SEQ ID NO: 8857 - DNA, 40 bp, Artificial Sequence
  Description of Artificial Sequence: Synthetic primer
tgagactccatctcaaaaacaattaaaaataaaaggaatc

SEQ ID NO: 8858 - DNA, 40 bp, Artificial Sequence
  Description of Artificial Sequence: Synthetic primer
acacttgtttacattcactgctacttaaattatcctttcc

SEQ ID NO: 8859 - DNA, 40 bp, Artificial Sequence
  Description of Artificial Sequence: Synthetic primer
gggctgggtgcctgcctcccacccactgtccctgctcctc

SEQ ID NO: 8860 - DNA, 40 bp, Artificial Sequence
  Description of Artificial Sequence: Synthetic primer
agtgggagcatactgccacaggctgctgtgtcccaagacc

SEQ ID NO: 8861 - DNA, 40 bp, Artificial Sequence
  Description of Artificial Sequence: Synthetic primer
tgcagtatttaagctaatgcaagtgttatttacatttttc

SEQ ID NO: 8862 - DNA, 40 bp, Artificial Sequence
  Description of Artificial Sequence: Synthetic primer
tgactcagaagaagcaacgcccttagcaataaaattagag

SEQ ID NO: 8863 - DNA, 40 bp, Artificial Sequence
  Description of Artificial Sequence: Synthetic primer
actgtggcagtagagaaactccacagggtggaaatggatg

SEQ ID NO: 8864 - DNA, 40 bp, Artificial Sequence
  Description of Artificial Sequence: Synthetic primer
cccatgggttctatgaaagcagggagtcttgtcttacccc

SEQ ID NO: 8865 - DNA, 40 bp, Artificial Sequence
  Description of Artificial Sequence: Synthetic primer
ggatatcccctcacacacatatgcagtagccatgctgacc

SEQ ID NO: 8866 - DNA, 40 bp, Artificial Sequence
  Description of Artificial Sequence: Synthetic primer
aagagatacaaagaagaatctcaccctagggaacagtggg

SEQ ID NO: 8867 - DNA, 40 bp, Artificial Sequence
  Description of Artificial Sequence: Synthetic primer
aaaaactcccataaacttatgttatttctatttttctttc

SEQ ID NO: 8868 - DNA, 40 bp, Artificial Sequence
  Description of Artificial Sequence: Synthetic primer
acagacatcttcaaggagacttaaaaacaacataaaaagg

SEQ ID NO: 8869 - DNA, 40 bp, Artificial Sequence
  Description of Artificial Sequence: Synthetic primer
gcacataacgggctttaattttctttttatcctctgcttc

SEQ ID NO: 8870 - DNA, 40 bp, Artificial Sequence
  Description of Artificial Sequence: Synthetic primer
ctcctccatgtgatatataatgtaaaaatactgcaccaac

SEQ ID NO: 8871 - DNA, 40 bp, Artificial Sequence
  Description of Artificial Sequence: Synthetic primer
tgggcatcgggtgagcactgatgagcattttggacttagg

SEQ ID NO: 8872 - DNA, 40 bp, Artificial Sequence
  Description of Artificial Sequence: Synthetic primer
aacaccctcaactcaaaagagcccaggaggcaagcagcag

SEQ ID NO: 8873 - DNA, 40 bp, Artificial Sequence
  Description of Artificial Sequence: Synthetic primer
aaaaaatgttttctaaaatggaaaattgttatgtttttac

SEQ ID NO: 8874 - DNA, 40 bp, Artificial Sequence
  Description of Artificial Sequence: Synthetic primer
ttgaatatttaaagaccagtttctaatctgttttgttttt

SEQ ID NO: 8875 - DNA, 40 bp, Artificial Sequence
  Description of Artificial Sequence: Synthetic primer
tagaagtggcaattttccatttaactaaagatttgatgtc

SEQ ID NO: 8876 - DNA, 40 bp, Artificial Sequence
  Description of Artificial Sequence: Synthetic primer
ttaagtcaagcatggattataatataaacttgttgaaatc

SEQ ID NO: 8877 - DNA, 40 bp, Artificial Sequence
  Description of Artificial Sequence: Synthetic primer
agcattacttctccctagcctatctctgatgataactaac

SEQ ID NO: 8878 - DNA, 40 bp, Artificial Sequence
  Description of Artificial Sequence: Synthetic primer
ttaaaataatttcaaaacagtggggcaaagaaccactcac

SEQ ID NO: 8879 - DNA, 40 bp, Artificial Sequence
  Description of Artificial Sequence: Synthetic primer
atcactgttccttattctttgctaatctgcttttcctctg

SEQ ID NO: 8880 - DNA, 40 bp, Artificial Sequence
  Description of Artificial Sequence: Synthetic primer
gatgcaagcctggagcagtgtgaaggtgagacacacacag

SEQ ID NO: 8881 - DNA, 40 bp, Artificial Sequence
  Description of Artificial Sequence: Synthetic primer
cagaactattatgaacttttaaaatccacactccatcagg

SEQ ID NO: 8882 - DNA, 40 bp, Artificial Sequence
  Description of Artificial Sequence: Synthetic primer
ccatgcctctgcttcccttgtccattctttccttcaaatg

SEQ ID NO: 8883 - DNA, 40 bp, Artificial Sequence
  Description of Artificial Sequence: Synthetic primer
aaagcaactctcagttaagcaagagcgtggatgacagtgc

SEQ ID NO: 8884 - DNA, 40 bp, Artificial Sequence
  Description of Artificial Sequence: Synthetic primer
atcacccagatctgtaacccagcattcatctttatttcag

SEQ ID NO: 8885 - DNA, 40 bp, Artificial Sequence
  Description of Artificial Sequence: Synthetic primer
cagtttccccaactggaaccaggagtcggacagtcccaag

SEQ ID NO: 8886 - DNA, 40 bp, Artificial Sequence
  Description of Artificial Sequence: Synthetic primer
aggcctggtgagcgctgggcgagggtggagctgggcagtg

SEQ ID NO: 8887 - DNA, 40 bp, Artificial Sequence
  Description of Artificial Sequence: Synthetic primer
agagcctggaaaaggagctcttgaaccatgtttgcccaag

SEQ ID NO: 8888 - DNA, 40 bp, Artificial Sequence
  Description of Artificial Sequence: Synthetic primer
catgtggcttaaagcctcccttcctcttactctctgcctg

SEQ ID NO: 8889 - DNA, 40 bp, Artificial Sequence
  Description of Artificial Sequence: Synthetic primer
gtccttatcatcagaatccctccctcccgtccctgtgacc

SEQ ID NO: 8890 - DNA, 40 bp, Artificial Sequence
  Description of Artificial Sequence: Synthetic primer
gtggacgggtggggagacgagttcaagaaagagaaaagac

SEQ ID NO: 8891 - DNA, 40 bp, Artificial Sequence
  Description of Artificial Sequence: Synthetic primer
catcgtgcaacatgaggtgactgcctgaacagcccacctg

SEQ ID NO: 8892 - DNA, 40 bp, Artificial Sequence
  Description of Artificial Sequence: Synthetic primer
tttccctcattccctccccactgcctacttctacttcctc

SEQ ID NO: 8893 - DNA, 40 bp, Artificial Sequence
  Description of Artificial Sequence: Synthetic primer
gagactcgaacttgagcgggtgcccgaaaggccgcaggag

SEQ ID NO: 8894 - DNA, 40 bp, Artificial Sequence
  Description of Artificial Sequence: Synthetic primer
ggtggtcccaagcgccgcgctcccctctgcccacgtcctc

SEQ ID NO: 8895 - DNA, 40 bp, Artificial Sequence
  Description of Artificial Sequence: Synthetic primer
tatcgttttctatgtgctgatcttctccacccgccctgac

SEQ ID NO: 8896 - DNA, 40 bp, Artificial Sequence
  Description of Artificial Sequence: Synthetic primer
cttgaaactgattgttttccattgtcacctgtgggatcac

SEQ ID NO: 8897 - DNA, 40 bp, Artificial Sequence
  Description of Artificial Sequence: Synthetic primer
tgttataaacgtgttacagcagcatttttggaaagaaaac

SEQ ID NO: 8898 - DNA, 40 bp, Artificial Sequence
  Description of Artificial Sequence: Synthetic primer
catgcccagagcccacactcacccaggttgcaggataacg

SEQ ID NO: 8899 - DNA, 40 bp, Artificial Sequence
  Description of Artificial Sequence: Synthetic primer
gcgctggggctgcccaagtgcctggcctggccgccacagc

SEQ ID NO: 8900 - DNA, 40 bp, Artificial Sequence
  Description of Artificial Sequence: Synthetic primer
aggctctgcctgcccgcagagtgccagctgatgaagacgg

SEQ ID NO: 8901 - DNA, 40 bp, Artificial Sequence
  Description of Artificial Sequence: Synthetic primer
gcgcctagagggaaagcgagagggagacggacgttgagag

SEQ ID NO: 8902 - DNA, 40 bp, Artificial Sequence
  Description of Artificial Sequence: Synthetic primer
ccggctaccgccggcgcgaccgcagttccaccatactcac

SEQ ID NO: 8903 - DNA, 40 bp, Artificial Sequence
  Description of Artificial Sequence: Synthetic primer
cctgccgcgctcgcccgggccgcccggagcccagatgagc

SEQ ID NO: 8904 - DNA, 40 bp, Artificial Sequence
  Description of Artificial Sequence: Synthetic primer
tgcccggtgcccgagccagcgccccgactcgggccgcccc

SEQ ID NO: 8905 - DNA, 40 bp, Artificial Sequence
  Description of Artificial Sequence: Synthetic primer
ggaagggtcaggaaagccagcccatgtcccacccccactg

SEQ ID NO: 8906 - DNA, 40 bp, Artificial Sequence
  Description of Artificial Sequence: Synthetic primer
ccccaagggatcctccaaggatgctgtgtagataagtaag

SEQ ID NO: 8907 - DNA, 40 bp, Artificial Sequence
  Description of Artificial Sequence: Synthetic primer
tggagtccccatcccagatccgtgagtgacccccatcatg

SEQ ID NO: 8908 - DNA, 40 bp, Artificial Sequence
  Description of Artificial Sequence: Synthetic primer
gaaggtcccacctcccctgcccatcagtctctctgcttag

SEQ ID NO: 8909 - DNA, 40 bp, Artificial Sequence
  Description of Artificial Sequence: Synthetic primer
caggttaggaaatattaacctaaaaatgtaatttccatag

SEQ ID NO: 8910 - DNA, 40 bp, Artificial Sequence
  Description of Artificial Sequence: Synthetic primer
tctaaatctaagaaaatttgagttgaaatcatggtattgc

SEQ ID NO: 8911 - DNA, 40 bp, Artificial Sequence
  Description of Artificial Sequence: Synthetic primer
ggtgcagccgcttcctctcacgtgtgtggccttgtgtgtc

SEQ ID NO: 8912 - DNA, 40 bp, Artificial Sequence
  Description of Artificial Sequence: Synthetic primer
cattttacaaaaactcgcaaatggacggacagagagagag

SEQ ID NO: 8913 - DNA, 40 bp, Artificial Sequence
  Description of Artificial Sequence: Synthetic primer
ctctagcgtgcccctggtgcctgcatgctgatgcctctcc

SEQ ID NO: 8914 - DNA, 40 bp, Artificial Sequence
  Description of Artificial Sequence: Synthetic primer
cgctggcctgcggcagctgctgggcctctccagcatgtac

SEQ ID NO: 8915 - DNA, 40 bp, Artificial Sequence
  Description of Artificial Sequence: Synthetic primer
actcctggggacaggacagcctggcagcgctgctgacctc

SEQ ID NO: 8916 - DNA, 40 bp, Artificial Sequence
  Description of Artificial Sequence: Synthetic primer
gtgggtgtcgtcctgtgagggcgtgggagtcactgtgtgc

SEQ ID NO: 8917 - DNA, 40 bp, Artificial Sequence
  Description of Artificial Sequence: Synthetic primer
ctgcgcggagcaggcaccaggggtcgcacaggtgagtcat

SEQ ID NO: 8918 - DNA, 40 bp, Artificial Sequence
  Description of Artificial Sequence: Synthetic primer
ccagtggtctgtctaatgaagttccctctgtcctcaaagg

SEQ ID NO: 8919 - DNA, 40 bp, Artificial Sequence
  Description of Artificial Sequence: Synthetic primer
ccctaaatttagaaccgagcagtcaaatgaactcaacaac

SEQ ID NO: 8920 - DNA, 40 bp, Artificial Sequence
  Description of Artificial Sequence: Synthetic primer
gtttaaaactgctttctactcatgcccctcaaacttattt

SEQ ID NO: 8921 - DNA, 40 bp, Artificial Sequence
  Description of Artificial Sequence: Synthetic primer
tctcagagggcccagcctaccaaggtgacatcaaaacaag

SEQ ID NO: 8922 - DNA, 40 bp, Artificial Sequence
  Description of Artificial Sequence: Synthetic primer
gtccaaggcagccccaggcacaggcagaagtggggacagg

SEQ ID NO: 8923 - DNA, 40 bp, Artificial Sequence
  Description of Artificial Sequence: Synthetic primer
ctcctgatctggtacaggcctgcagcctcacctgacctcc

SEQ ID NO: 8924 - DNA, 40 bp, Artificial Sequence
  Description of Artificial Sequence: Synthetic primer
tgcacacggcagcaggggcagccgggatgtggcttacgtg

SEQ ID NO: 8925 - DNA, 40 bp, Artificial Sequence
  Description of Artificial Sequence: Synthetic primer
catgttagaatcatcctggcttctgttctcattctccttc

SEQ ID NO: 8926 - DNA, 40 bp, Artificial Sequence
  Description of Artificial Sequence: Synthetic primer
acaggtcccgcccctcccacataggccccgccccctccag

SEQ ID NO: 8927 - DNA, 40 bp, Artificial Sequence
  Description of Artificial Sequence: Synthetic primer
ggagtgctggacatgccgagtgctgtccccttccctccag

SEQ ID NO: 8928 - DNA, 40 bp, Artificial Sequence
  Description of Artificial Sequence: Synthetic primer
aaagattaatttctggacaggtataaaataactggctacc

SEQ ID NO: 8929 - DNA, 40 bp, Artificial Sequence
  Description of Artificial Sequence: Synthetic primer
tgcttccttgattaaagatgtaagatttttttcttctccc

SEQ ID NO: 8930 - DNA, 40 bp, Artificial Sequence
  Description of Artificial Sequence: Synthetic primer
tcatttcacttgtataaataatccctcaaattttattttc

SEQ ID NO: 8931 - DNA, 40 bp, Artificial Sequence
  Description of Artificial Sequence: Synthetic primer
gtaattatcagaaagcaatttctctgatggcaaccaatat

SEQ ID NO: 8932 - DNA, 40 bp, Artificial Sequence
  Description of Artificial Sequence: Synthetic primer
accagattcatttatatgtacacagggcagcacccacctg

SEQ ID NO: 8933 - DNA, 40 bp, Artificial Sequence
  Description of Artificial Sequence: Synthetic primer
gctgggcggctagccaggctgaccagaccttctctctccc

SEQ ID NO: 8934 - DNA, 40 bp, Artificial Sequence
  Description of Artificial Sequence: Synthetic primer
actcatgtggctttaacagacaatactgattccttttctc

SEQ ID NO: 8935 - DNA, 40 bp, Artificial Sequence
  Description of Artificial Sequence: Synthetic primer
tttttttcttcctcttctctgttttctgttttagttgctg

SEQ ID NO: 8936 - DNA, 40 bp, Artificial Sequence
  Description of Artificial Sequence: Synthetic primer
ttggttgtgttgtctttcctccgacagttctgagttcacg

SEQ ID NO: 8937 - DNA, 40 bp, Artificial Sequence
  Description of Artificial Sequence: Synthetic primer
cagactattgtcttaacagtgtattaacttgggatcttgc

SEQ ID NO: 8938 - DNA, 40 bp, Artificial Sequence
  Description of Artificial Sequence: Synthetic primer
atgcactgtgggaccaagctcccatgttccggcgtgatgc

SEQ ID NO: 8939 - DNA, 40 bp, Artificial Sequence
  Description of Artificial Sequence: Synthetic primer
gaagtcaaaggaagacgatcggggcacccctgaggctgac

SEQ ID NO: 8940 - DNA, 40 bp, Artificial Sequence
  Description of Artificial Sequence: Synthetic primer
agggaaaaccccaagggttcggtgggactggggtcaggtg

SEQ ID NO: 8941 - DNA, 40 bp, Artificial Sequence
  Description of Artificial Sequence: Synthetic primer
tgccctgtagttgttaaacacctgtgtcctgcattgttcc

SEQ ID NO: 8942 - DNA, 40 bp, Artificial Sequence
  Description of Artificial Sequence: Synthetic primer
tgcctgttcaaaatgtgccctatttttcttcgttgtaaag

SEQ ID NO: 8943 - DNA, 40 bp, Artificial Sequence
  Description of Artificial Sequence: Synthetic primer
ggagaaggtgagaaaaatgcactgcactcagggaacttac

SEQ ID NO: 8944 - DNA, 40 bp, Artificial Sequence
  Description of Artificial Sequence: Synthetic primer
ccttccgtggggcaccttgttgtctgttgaccatactagc

SEQ ID NO: 8945 - DNA, 40 bp, Artificial Sequence
  Description of Artificial Sequence: Synthetic primer
ccacaacctaccagcctgggccaatgtcagcccagccata

SEQ ID NO: 8946 - DNA, 40 bp, Artificial Sequence
  Description of Artificial Sequence: Synthetic primer
tccactcaactgccaagtgtgaatgtgcacaggactgaac

SEQ ID NO: 8947 - DNA, 40 bp, Artificial Sequence
  Description of Artificial Sequence: Synthetic primer
tttttaggatggtacgttatctcattgtgtgtactttctc

SEQ ID NO: 8948 - DNA, 40 bp, Artificial Sequence
  Description of Artificial Sequence: Synthetic primer
tttaaaattccatcatttaattgtaaacgtgttactcctc

SEQ ID NO: 8949 - DNA, 40 bp, Artificial Sequence
  Description of Artificial Sequence: Synthetic primer
gacagactcatctaacaaaaacttagattaacataggaag

SEQ ID NO: 8950 - DNA, 40 bp, Artificial Sequence
  Description of Artificial Sequence: Synthetic primer
ttttatgtgaatattattcagaaaatatatttaatagatc

SEQ ID NO: 8951 - DNA, 40 bp, Artificial Sequence
  Description of Artificial Sequence: Synthetic primer
cacaaacttttaggaagttttgccaactcaaaaagctcac

SEQ ID NO: 8952 - DNA, 40 bp, Artificial Sequence
  Description of Artificial Sequence: Synthetic primer
ggggtataaatacacatgtgcttctagaaataaggcttcg

SEQ ID NO: 8953 - DNA, 40 bp, Artificial Sequence
  Description of Artificial Sequence: Synthetic primer
aaaaaccaattttgaatatttgatttctttcctttctttc

SEQ ID NO: 8954 - DNA, 40 bp, Artificial Sequence
  Description of Artificial Sequence: Synthetic primer
tgcgaaggctccctctcacctgcagagatgggtatgaagg

SEQ ID NO: 8955 - DNA, 40 bp, Artificial Sequence
  Description of Artificial Sequence: Synthetic primer
catgctggcgctgggaaccctgaagctctgagccacattc

SEQ ID NO: 8956 - DNA, 40 bp, Artificial Sequence
  Description of Artificial Sequence: Synthetic primer
ccatctttatcatttcttccagtgttctaattgcactgtt

SEQ ID NO: 8957 - DNA, 40 bp, Artificial Sequence
  Description of Artificial Sequence: Synthetic primer
tgctcattagagggactcttcccaatggaagcacagactg

SEQ ID NO: 8958 - DNA, 40 bp, Artificial Sequence
  Description of Artificial Sequence: Synthetic primer
tccagagcaccaggaatattaacactgaatgcatcaaaag

SEQ ID NO: 8959 - DNA, 40 bp, Artificial Sequence
  Description of Artificial Sequence: Synthetic primer
acgcatgtccagcacatgccctgcccgtctctcacctgtg

SEQ ID NO: 8960 - DNA, 40 bp, Artificial Sequence
  Description of Artificial Sequence: Synthetic primer
atagtgttttagccaagatccaggattgatgttgcttttc

SEQ ID NO: 8961 - DNA, 40 bp, Artificial Sequence
  Description of Artificial Sequence: Synthetic primer
gaacatgataaaatatgctatattccttttaagtgaaaag

SEQ ID NO: 8962 - DNA, 40 bp, Artificial Sequence
  Description of Artificial Sequence: Synthetic primer
ccagcctcctatgccagttgcccctcacacacagccatcc

SEQ ID NO: 8963 - DNA, 40 bp, Artificial Sequence
  Description of Artificial Sequence: Synthetic primer
catccttgtagaagctatctgattgttatctttttattgg

SEQ ID NO: 8964 - DNA, 40 bp, Artificial Sequence
  Description of Artificial Sequence: Synthetic primer
actaaatgaaaactcattgctatctttaaaaacctccaac

SEQ ID NO: 8965 - DNA, 40 bp, Artificial Sequence
  Description of Artificial Sequence: Synthetic primer
ggctggcaaatggctgactggcttggtgtggctgagcatg

SEQ ID NO: 8966 - DNA, 40 bp, Artificial Sequence
  Description of Artificial Sequence: Synthetic primer
taaataataaaataacacagtttatatctgtaatgactgg

SEQ ID NO: 8967 - DNA, 40 bp, Artificial Sequence
  Description of Artificial Sequence: Synthetic primer
aatcaaaaggttcattcatatgatgctctcttgattttac

SEQ ID NO: 8968 - DNA, 40 bp, Artificial Sequence
  Description of Artificial Sequence: Synthetic primer
tctgtataaattattaaaacaggactatccccttacatac

SEQ ID NO: 8969 - DNA, 40 bp, Artificial Sequence
  Description of Artificial Sequence: Synthetic primer
tttccatttaatagaataaagaagaaacataatgtaaaac

SEQ ID NO: 8970 - DNA, 40 bp, Artificial Sequence
  Description of Artificial Sequence: Synthetic primer
atctgggacttgtgccagccagggacagacccttcatttg

SEQ ID NO: 8971 - DNA, 40 bp, Artificial Sequence
  Description of Artificial Sequence: Synthetic primer
gtggccaagatggctgagccctggccagagccctggtgtg

SEQ ID NO: 8972 - DNA, 40 bp, Artificial Sequence
  Description of Artificial Sequence: Synthetic primer
cagttaaagggttacagaaactgactgtgtgtcttatttc

SEQ ID NO: 8973 - DNA, 40 bp, Artificial Sequence
  Description of Artificial Sequence: Synthetic primer
taaattcctagggttatatagttagaaatatataattctc

SEQ ID NO: 8974 - DNA, 40 bp, Artificial Sequence
  Description of Artificial Sequence: Synthetic primer
gatgataaaattacacaagcttcacaatcacaagaaagtg

SEQ ID NO: 8975 - DNA, 40 bp, Artificial Sequence
  Description of Artificial Sequence: Synthetic primer
ttcttggctgctataaataatgctactagaagttgatggc

SEQ ID NO: 8976 - DNA, 40 bp, Artificial Sequence
  Description of Artificial Sequence: Synthetic primer
gggcttccgggatggggctgacttgtccttgtttgaactc

SEQ ID NO: 8977 - DNA, 40 bp, Artificial Sequence
  Description of Artificial Sequence: Synthetic primer
caaataggctttgtgatgctttaccaagtcccagtctatg

SEQ ID NO: 8978 - DNA, 40 bp, Artificial Sequence
  Description of Artificial Sequence: Synthetic primer
attttagataaaaagagaaaaagtaaaaaattaaaacttt

SEQ ID NO: 8979 - DNA, 40 bp, Artificial Sequence
  Description of Artificial Sequence: Synthetic primer
acgtcctctcaccatttcaggatagtccctgaccctcttc

SEQ ID NO: 8980 - DNA, 40 bp, Artificial Sequence
  Description of Artificial Sequence: Synthetic primer
cagttttaggcgctttctcctgagagtccacatgttcctg

SEQ ID NO: 8981 - DNA, 40 bp, Artificial Sequence
  Description of Artificial Sequence: Synthetic primer
cagtcactgcagcagcgagtatgcggccagctccccaggg

SEQ ID NO: 8982 - DNA, 40 bp, Artificial Sequence
  Description of Artificial Sequence: Synthetic primer
ggtattaatatacctctattcagtttttatatcattattc

SEQ ID NO: 8983 - DNA, 40 bp, Artificial Sequence
  Description of Artificial Sequence: Synthetic primer
tcagtgattaaacattgatgttggtgttgtattattttgc

SEQ ID NO: 8984 - DNA, 40 bp, Artificial Sequence
  Description of Artificial Sequence: Synthetic primer
cacttcccgtgccgctgcgccccgagatccctccgtccag

SEQ ID NO: 8985 - DNA, 40 bp, Artificial Sequence
  Description of Artificial Sequence: Synthetic primer
agtgtccctgtggccctcggcctcggccaggtggccgcgc

SEQ ID NO: 8986 - DNA, 40 bp, Artificial Sequence
  Description of Artificial Sequence: Synthetic primer
tcgctggtgccgggttccggggagctggcggtggagagac

SEQ ID NO: 8987 - DNA, 40 bp, Artificial Sequence
  Description of Artificial Sequence: Synthetic primer
tggcgggaggctccatagccattggattcaaccgcagcac

SEQ ID NO: 8988 - DNA, 40 bp, Artificial Sequence
  Description of Artificial Sequence: Synthetic primer
cctcctcgtcggagcactcctcggagaacgggagtttgcg

SEQ ID NO: 8989 - DNA, 40 bp, Artificial Sequence
  Description of Artificial Sequence: Synthetic primer
ggtgctcagctccatgcagcacttcagcgaggccttccac

SEQ ID NO: 8990 - DNA, 40 bp, Artificial Sequence
  Description of Artificial Sequence: Synthetic primer
agctgaagcgccacatgaagacgcacatgcacaaatcgtc

SEQ ID NO: 8991 - DNA, 40 bp, Artificial Sequence
  Description of Artificial Sequence: Synthetic primer
gaagagatggccctggccacccatcacccgagtgcctttg

SEQ ID NO: 8992 - DNA, 40 bp, Artificial Sequence
  Description of Artificial Sequence: Synthetic primer
tgttgaggatgccatggtgaccagagtgcccaccccactg

SEQ ID NO: 8993 - DNA, 40 bp, Artificial Sequence
  Description of Artificial Sequence: Synthetic primer
ccggcttccctcctgtaccagcccaagacagacaaaacag

SEQ ID NO: 8994 - DNA, 40 bp, Artificial Sequence
  Description of Artificial Sequence: Synthetic primer
aatgtgttttataatttagactagtgaatatttttctttg

SEQ ID NO: 8995 - DNA, 40 bp, Artificial Sequence
  Description of Artificial Sequence: Synthetic primer
tgactgccataaaaaatatctaatttatgacaataaaaac

SEQ ID NO: 8996 - DNA, 40 bp, Artificial Sequence
  Description of Artificial Sequence: Synthetic primer
gaattcagcttttccttaaagtcacttcatttttattttc

SEQ ID NO: 8997 - DNA, 40 bp, Artificial Sequence
  Description of Artificial Sequence: Synthetic primer
attttcagaaacgatcagttgaaatttcagaagtgaaaag

SEQ ID NO: 8998 - DNA, 40 bp, Artificial Sequence
  Description of Artificial Sequence: Synthetic primer
gggccacagcacccaggacatctgtcttcccacccacagg

SEQ ID NO: 8999 - DNA, 40 bp, Artificial Sequence
  Description of Artificial Sequence: Synthetic primer
cagtcactccaattctgagtctctcctcattcccagcagc

SEQ ID NO: 9000 - DNA, 40 bp, Artificial Sequence
  Description of Artificial Sequence: Synthetic primer
caacattgaaacgaaagtttgataaagacttatttacttc

SEQ ID NO: 9001 - DNA, 40 bp, Artificial Sequence
  Description of Artificial Sequence: Synthetic primer
tgtataactcgatataattagtcttttcattaatttgttc

SEQ ID NO: 9002 - DNA, 40 bp, Artificial Sequence
  Description of Artificial Sequence: Synthetic primer
tccggcaccctcccgccccgtctcgtactgtcgccgtcac

SEQ ID NO: 9003 - DNA, 40 bp, Artificial Sequence
  Description of Artificial Sequence: Synthetic primer
gtccgggagcctcgcctccgccgggatgcggtgctgcagg

SEQ ID NO: 9004 - DNA, 40 bp, Artificial Sequence
  Description of Artificial Sequence: Synthetic primer
aaagtaagattttgctttggtattctgataaaatgttcac

SEQ ID NO: 9005 - DNA, 40 bp, Artificial Sequence
  Description of Artificial Sequence: Synthetic primer
aaaatgggccatgcagaagaaacaaatctttgataagtac

SEQ ID NO: 9006 - DNA, 40 bp, Artificial Sequence
  Description of Artificial Sequence: Synthetic primer
gcagaagctgctgggatgacagggctggaatatgacttgc

SEQ ID NO: 9007 - DNA, 40 bp, Artificial Sequence
  Description of Artificial Sequence: Synthetic primer
ctgggccacaagccaagtggctctctgtgcctttgtcctg

SEQ ID NO: 9008 - DNA, 40 bp, Artificial Sequence
  Description of Artificial Sequence: Synthetic primer
atcctgggttcagcagaaagaggactcagaatagaaaatc

SEQ ID NO: 9009 - DNA, 40 bp, Artificial Sequence
  Description of Artificial Sequence: Synthetic primer
agatatctttgaaaatgactgctaccttatatcccttctc

SEQ ID NO: 9010 - DNA, 40 bp, Artificial Sequence
  Description of Artificial Sequence: Synthetic primer
gtattaaatagtgaatcacattttaattttttaactttgc

SEQ ID NO: 9011 - DNA, 40 bp, Artificial Sequence
  Description of Artificial Sequence: Synthetic primer
gataaactgggacaaaggaatttctccaggaatcttaatc

SEQ ID NO: 9012 - DNA, 40 bp, Artificial Sequence
  Description of Artificial Sequence: Synthetic primer
ggggagatggccctaattatgtccggacttttttttcccc

SEQ ID NO: 9013 - DNA, 40 bp, Artificial Sequence
  Description of Artificial Sequence: Synthetic primer
ccgtgtcaaggaagagaggaggcttccccagtgctgggag

SEQ ID NO: 9014 - DNA, 40 bp, Artificial Sequence
  Description of Artificial Sequence: Synthetic primer
tctccagccagccccgactccaaaagtctggtccacattg

SEQ ID NO: 9015 - DNA, 40 bp, Artificial Sequence
  Description of Artificial Sequence: Synthetic primer
ggcctcttctgctgtcccctcaccattcagcatgagaacc

SEQ ID NO: 9016 - DNA, 40 bp, Artificial Sequence
  Description of Artificial Sequence: Synthetic primer
ctacagatgctgtagaggccagagcacggtaaacagcaac

SEQ ID NO: 9017 - DNA, 40 bp, Artificial Sequence
  Description of Artificial Sequence: Synthetic primer
gtctttaaaaaaaagaagaaaaaaaaaagtagtttgatag

SEQ ID NO: 9018 - DNA, 40 bp, Artificial Sequence
  Description of Artificial Sequence: Synthetic primer
catcttcaaacccacttgtgaatttgtttcttttctctac

SEQ ID NO: 9019 - DNA, 40 bp, Artificial Sequence
  Description of Artificial Sequence: Synthetic primer
tgtacagctgtatttctgagccaacgttaggtaatttgcc

SEQ ID NO: 9020 - DNA, 40 bp, Artificial Sequence
  Description of Artificial Sequence: Synthetic primer
ccaaccagcttaaaagtaacaacgggcaggtttcctcatc

SEQ ID NO: 9021 - DNA, 40 bp, Artificial Sequence
  Description of Artificial Sequence: Synthetic primer
ggttttagattttgtctcatgtgttaagagaaagctatgg

SEQ ID NO: 9022 - DNA, 40 bp, Artificial Sequence
  Description of Artificial Sequence: Synthetic primer
aaatttgtatatttagttgctttaaaactttatttcatgc

SEQ ID NO: 9023 - DNA, 40 bp, Artificial Sequence
  Description of Artificial Sequence: Synthetic primer
ctacaatgtctatgtataaataaagtgtataatcaatcac

SEQ ID NO: 9024 - DNA, 40 bp, Artificial Sequence
  Description of Artificial Sequence: Synthetic primer
tccccagcccacaccctgggcgggtttctttcctccatac

SEQ ID NO: 9025 - DNA, 40 bp, Artificial Sequence
  Description of Artificial Sequence: Synthetic primer
gtgtgtaccacagacattaccacttacgcccagtgacgag

SEQ ID NO: 9026 - DNA, 40 bp, Artificial Sequence
  Description of Artificial Sequence: Synthetic primer
tgtattatttgttttgtgtttagaaccacccattgtttgc

SEQ ID NO: 9027 - DNA, 40 bp, Artificial Sequence
  Description of Artificial Sequence: Synthetic primer
agagcagaagaggtctaccagctggctgcccaggtttacc

SEQ ID NO: 9028 - DNA, 40 bp, Artificial Sequence
  Description of Artificial Sequence: Synthetic primer
gtccacctggtcagataagaaaatgttagaagtgttcagc

SEQ ID NO: 9029 - DNA, 40 bp, Artificial Sequence
  Description of Artificial Sequence: Synthetic primer
atatttggaacccaccagaaaaatgaaggaaattaaatcc

SEQ ID NO: 9030 - DNA, 40 bp, Artificial Sequence
  Description of Artificial Sequence: Synthetic primer
ggaaccagggccaggcaagactcaggagtcaccaggaacc

SEQ ID NO: 9031 - DNA, 40 bp, Artificial Sequence
  Description of Artificial Sequence: Synthetic primer
cagctgcctgggcccctgcccaacagtgcccccctctccc

SEQ ID NO: 9032 - DNA, 40 bp, Artificial Sequence
  Description of Artificial Sequence: Synthetic primer
gacaccggggttccttcccctaatgggtcaccttctcttg

SEQ ID NO: 9033 - DNA, 40 bp, Artificial Sequence
  Description of Artificial Sequence: Synthetic primer
cctgaggacacatcagggcttctgcggacttggccttctg

SEQ ID NO: 9034 - DNA, 40 bp, Artificial Sequence
  Description of Artificial Sequence: Synthetic primer
aaatacatttttaactatatgactgaatgaatatctctgg

SEQ ID NO: 9035 - DNA, 40 bp, Artificial Sequence
  Description of Artificial Sequence: Synthetic primer
cacgttcttctgctgtatgtaacctgtcttttctatgatc

SEQ ID NO: 9036 - DNA, 40 bp, Artificial Sequence
  Description of Artificial Sequence: Synthetic primer
tcagttataatttcaacatgtatggttgttattgtttttg

SEQ ID NO: 9037 - DNA, 40 bp, Artificial Sequence
  Description of Artificial Sequence: Synthetic primer
aacaaacaaatcaaaagtctgttccgactccaagattgac

SEQ ID NO: 9038 - DNA, 40 bp, Artificial Sequence
  Description of Artificial Sequence: Synthetic primer
aggggaggacccactgctgggagtccgtgcccaaccctgc

SEQ ID NO: 9039 - DNA, 40 bp, Artificial Sequence
  Description of Artificial Sequence: Synthetic primer
ccagctctggccggggcaggccacatttgtggctcatgcc

SEQ ID NO: 9040 - DNA, 40 bp, Artificial Sequence
  Description of Artificial Sequence: Synthetic primer
gggccaaagctctgcttgatggggtctcaagttgcctttc

SEQ ID NO: 9041 - DNA, 40 bp, Artificial Sequence
  Description of Artificial Sequence: Synthetic primer
cgtcccgggaggcaccagcgggatgcttgcgcgactattc

SEQ ID NO: 9042 - DNA, 40 bp, Artificial Sequence
  Description of Artificial Sequence: Synthetic primer
tcccctggggttttaggaccctcccaacgccccctaagcc

SEQ ID NO: 9043 - DNA, 40 bp, Artificial Sequence
  Description of Artificial Sequence: Synthetic primer
cgggcatttcccggaacccagaccgggcgctttggaaggg

SEQ ID NO: 9044 - DNA, 40 bp, Artificial Sequence
  Description of Artificial Sequence: Synthetic primer
gggaaaagagggcgccatgtgacatcactcctttccatcg

SEQ ID NO: 9045 - DNA, 40 bp, Artificial Sequence
  Description of Artificial Sequence: Synthetic primer
ttactcagggagagcctacatgtgcccagctgcccaggag

SEQ ID NO: 9046 - DNA, 40 bp, Artificial Sequence
  Description of Artificial Sequence: Synthetic primer
gggatgtctctcaatgaagagatcacacaggggtgttttc

SEQ ID NO: 9047 - DNA, 40 bp, Artificial Sequence
  Description of Artificial Sequence: Synthetic primer
caacaaaagaccttcacatgtttgtctttccttttgtctg

SEQ ID NO: 9048 - DNA, 40 bp, Artificial Sequence
  Description of Artificial Sequence: Synthetic primer
attaaccgccagatttgaatcgcgggacccgttggcagag

SEQ ID NO: 9049 - DNA, 40 bp, Artificial Sequence
  Description of Artificial Sequence: Synthetic primer
aggcccagtcacagtggcctcgctagggacagggcaaggc

SEQ ID NO: 9050 - DNA, 40 bp, Artificial Sequence
  Description of Artificial Sequence: Synthetic primer
ctgctcaatggggcttgactgctccttctaaagaattgtg

SEQ ID NO: 9051 - DNA, 40 bp, Artificial Sequence
  Description of Artificial Sequence: Synthetic primer
aaaaaccccaaagacaattaatccaaaacaggaataaaaa

SEQ ID NO: 9052 - DNA, 40 bp, Artificial Sequence
  Description of Artificial Sequence: Synthetic primer
tattgatagaataataacaatagtacggtaatgaagaagc

SEQ ID NO: 9053 - DNA, 40 bp, Artificial Sequence
  Description of Artificial Sequence: Synthetic primer
gttcatcttctatctagcagttgtgattctttctttctac

SEQ ID NO: 9054 - DNA, 40 bp, Artificial Sequence
  Description of Artificial Sequence: Synthetic primer
aaagggctcaaaaataaggcttctcatccccatctcaaag

SEQ ID NO: 9055 - DNA, 40 bp, Artificial Sequence
  Description of Artificial Sequence: Synthetic primer
ggaataaccttgattctcccacttgaaaaagctcactgtg

SEQ ID NO: 9056 - DNA, 40 bp, Artificial Sequence
  Description of Artificial Sequence: Synthetic primer
tgggaactggtccgttcctttcaggagtgggcagcccctc

SEQ ID NO: 9057 - DNA, 40 bp, Artificial Sequence
  Description of Artificial Sequence: Synthetic primer
ctgcttaggctgcagaggccttgagcgccgagcttagcag

SEQ ID NO: 9058 - DNA, 40 bp, Artificial Sequence
  Description of Artificial Sequence: Synthetic primer
gactagtgactataactgctatttctttctattttcatgg

SEQ ID NO: 9059 - DNA, 40 bp, Artificial Sequence
  Description of Artificial Sequence: Synthetic primer
aagtcttatggagagaatacggaaattcctaggtttgacc

SEQ ID NO: 9060 - DNA, 40 bp, Artificial Sequence
  Description of Artificial Sequence: Synthetic primer
gattggccacgaggggcgtggagggagaagaaggctgggg

SEQ ID NO: 9061 - DNA, 40 bp, Artificial Sequence
  Description of Artificial Sequence: Synthetic primer
tcctgtcctttctacaccctcgcatctcaagaccttgtcc

SEQ ID NO: 9062 - DNA, 40 bp, Artificial Sequence
  Description of Artificial Sequence: Synthetic primer
gcaaaatcaagctgttttcttttgaaagttcaaactcatc

SEQ ID NO: 9063 - DNA, 40 bp, Artificial Sequence
  Description of Artificial Sequence: Synthetic primer
ttcccggagacctggagcaccttttcattggagtacttac

SEQ ID NO: 9064 - DNA, 40 bp, Artificial Sequence
  Description of Artificial Sequence: Synthetic primer
accctgcttctgcccgtctgagcctgtgggcttccttcag

SEQ ID NO: 9065 - DNA, 40 bp, Artificial Sequence
  Description of Artificial Sequence: Synthetic primer
ccttacagtgtctgggtaagagatatgcactggggaaagg

SEQ ID NO: 9066 - DNA, 40 bp, Artificial Sequence
  Description of Artificial Sequence: Synthetic primer
tctcttgtttgaaaaacatacatcaagttggggatgagag

SEQ ID NO: 9067 - DNA, 40 bp, Artificial Sequence
  Description of Artificial Sequence: Synthetic primer
catgatgcatcttctactcaggcattgaagcaaagcatac

SEQ ID NO: 9068 - DNA, 40 bp, Artificial Sequence
  Description of Artificial Sequence: Synthetic primer
gcgccatggccggagctcccggggcgcagcgctgacggcg

SEQ ID NO: 9069 - DNA, 40 bp, Artificial Sequence
  Description of Artificial Sequence: Synthetic primer
cgccctccctgcctcacccgcgccgctccccgccctctcc

SEQ ID NO: 9070 - DNA, 40 bp, Artificial Sequence
  Description of Artificial Sequence: Synthetic primer
tgaaaagatttctattcttatgagggtgaccgacatctgg

SEQ ID NO: 9071 - DNA, 40 bp, Artificial Sequence
  Description of Artificial Sequence: Synthetic primer
ggaaacctgggataaagctataacctggggaactgtgttc

SEQ ID NO: 9072 - DNA, 40 bp, Artificial Sequence
  Description of Artificial Sequence: Synthetic primer
aagggaaagagaaagggaaagggaaagacccacagctaac

SEQ ID NO: 9073 - DNA, 40 bp, Artificial Sequence
  Description of Artificial Sequence: Synthetic primer
ttttttgtagagacagagtctggccatgttacccaatctg

SEQ ID NO: 9074 - DNA, 40 bp, Artificial Sequence
  Description of Artificial Sequence: Synthetic primer
ttgaaaaaacatgtaattgctatttaagtgtatgatttta

SEQ ID NO: 9075 - DNA, 40 bp, Artificial Sequence
  Description of Artificial Sequence: Synthetic primer
gtaattttgacatactctatgaagaaaaatcctaacacac

SEQ ID NO: 9076 - DNA, 40 bp, Artificial Sequence
  Description of Artificial Sequence: Synthetic primer
agggctcacagtggagcttgtgtgtgtaatgcttcacctg

SEQ ID NO: 9077 - DNA, 40 bp, Artificial Sequence
  Description of Artificial Sequence: Synthetic primer
ggcttggagccctggcgccctctggtggccaacatggtaa

SEQ ID NO: 9078 - DNA, 40 bp, Artificial Sequence
  Description of Artificial Sequence: Synthetic primer
gatatcattagctgtattctccttccgaatgacatttatc

SEQ ID NO: 9079 - DNA, 40 bp, Artificial Sequence
  Description of Artificial Sequence: Synthetic primer
tagtaaaatatttcaatgacacttttaccagtaattaagc

SEQ ID NO: 9080 - DNA, 40 bp, Artificial Sequence
  Description of Artificial Sequence: Synthetic primer
acagctttccaggaggagccagcgtgggagaaagaatctg

SEQ ID NO: 9081 - DNA, 40 bp, Artificial Sequence
  Description of Artificial Sequence: Synthetic primer
cctcctgcatgtcctgctgccctgagctgtcccgagctag

SEQ ID NO: 9082 - DNA, 40 bp, Artificial Sequence
  Description of Artificial Sequence: Synthetic primer
gcatcaggtaagtggtggtcaccagtcctctgccctcttc

SEQ ID NO: 9083 - DNA, 40 bp, Artificial Sequence
  Description of Artificial Sequence: Synthetic primer
ctggcagaaagatggcgctcaggccagccccgcccagtac

SEQ ID NO: 9084 - DNA, 40 bp, Artificial Sequence
  Description of Artificial Sequence: Synthetic primer
ggggcagcaggagggcagcgccagagcccagcccgtggtc

SEQ ID NO: 9085 - DNA, 40 bp, Artificial Sequence
  Description of Artificial Sequence: Synthetic primer
agccacactcgggaagggatgccatgtccacagcacacac

SEQ ID NO: 9086 - DNA, 40 bp, Artificial Sequence
  Description of Artificial Sequence: Synthetic primer
accgggctggcttgggtgaggagttcgagaaggagatcag

SEQ ID NO: 9087 - DNA, 40 bp, Artificial Sequence
  Description of Artificial Sequence: Synthetic primer
cccaggccagttctgtggtagacgtggtcagtcctgtcac

SEQ ID NO: 9088 - DNA, 40 bp, Artificial Sequence
  Description of Artificial Sequence: Synthetic primer
gtccttcatactccccgctccccaggtccctgagctcctc

SEQ ID NO: 9089 - DNA, 40 bp, Artificial Sequence
  Description of Artificial Sequence: Synthetic primer
ctcagctctgcccgcagtacctggccattgtctctcacag

SEQ ID NO: 9090 - DNA, 40 bp, Artificial Sequence
  Description of Artificial Sequence: Synthetic primer
ataataactgttttaccctcttttctttttctttttgaac

SEQ ID NO: 9091 - DNA, 40 bp, Artificial Sequence
  Description of Artificial Sequence: Synthetic primer
tttacatagctgcattcggagatactctatgtgagacatg

SEQ ID NO: 9092 - DNA, 40 bp, Artificial Sequence
  Description of Artificial Sequence: Synthetic primer
ttggaaacataaatatgtgggtttgcaatttataaagcag

SEQ ID NO: 9093 - DNA, 40 bp, Artificial Sequence
  Description of Artificial Sequence: Synthetic primer
acgatggcctccatatatacttcttataatattccttgag

SEQ ID NO: 9094 - DNA, 40 bp, Artificial Sequence
  Description of Artificial Sequence: Synthetic primer
ttagcaggagagttaaatactaatactaataatgaagaag

SEQ ID NO: 9095 - DNA, 40 bp, Artificial Sequence
  Description of Artificial Sequence: Synthetic primer
aggcatctcctccagagggatccgccagcccgtccagcag

SEQ ID NO: 9096 - DNA, 40 bp, Artificial Sequence
  Description of Artificial Sequence: Synthetic primer
agacagatgggtggatcaggggacgggatggggtacacag

SEQ ID NO: 9097 - DNA, 40 bp, Artificial Sequence
  Description of Artificial Sequence: Synthetic primer
gttggtgccctcgtgggctccctgcctgccgtctgctcac

SEQ ID NO: 9098 - DNA, 40 bp, Artificial Sequence
  Description of Artificial Sequence: Synthetic primer
gctgcagctcagggaactcatccagccttcctccctcctg

SEQ ID NO: 9099 - DNA, 40 bp, Artificial Sequence
  Description of Artificial Sequence: Synthetic primer
agccagctttggagaacacccaaagcctaccaccctaccc

SEQ ID NO: 9100 - DNA, 40 bp, Artificial Sequence
  Description of Artificial Sequence: Synthetic primer
atgggagtgtaagtgaaaacatgcagtactgaccttcctg

SEQ ID NO: 9101 - DNA, 40 bp, Artificial Sequence
  Description of Artificial Sequence: Synthetic primer
tcaatgattataacagtaaatgactaaagcagttttgaac

SEQ ID NO: 9102 - DNA, 40 bp, Artificial Sequence
  Description of Artificial Sequence: Synthetic primer
acactatcgaggaaaccgattcttatattgttttcttttt

SEQ ID NO: 9103 - DNA, 40 bp, Artificial Sequence
  Description of Artificial Sequence: Synthetic primer
tgctacgccttccacagccaccacttccgtccagaagcac

SEQ ID NO: 9104 - DNA, 40 bp, Artificial Sequence
  Description of Artificial Sequence: Synthetic primer
ctgcagcctacagagtccgcaagccaagggcaggctcaag

SEQ ID NO: 9105 - DNA, 40 bp, Artificial Sequence
  Description of Artificial Sequence: Synthetic primer
gtggcctgtttgactctgtctcctcttgtcttctcctttg

SEQ ID NO: 9106 - DNA, 40 bp, Artificial Sequence
  Description of Artificial Sequence: Synthetic primer
agaaaaaagttaaaacctatttaaaatgtggaaaaattgc

SEQ ID NO: 9107 - DNA, 40 bp, Artificial Sequence
  Description of Artificial Sequence: Synthetic primer
atgaaatttcacctaatggattaaagtaccaaaaataatc

SEQ ID NO: 9108 - DNA, 40 bp, Artificial Sequence
  Description of Artificial Sequence: Synthetic primer
gcaggggctgcaggcccaggcttttccagtgcttctgacg

SEQ ID NO: 9109 - DNA, 40 bp, Artificial Sequence
  Description of Artificial Sequence: Synthetic primer
cagagttgggctgaggactcagctgtggagcccccgcacc

SEQ ID NO: 9110 - DNA, 40 bp, Artificial Sequence
  Description of Artificial Sequence: Synthetic primer
tcttatttttcatattacataacattcttattcttttaac

SEQ ID NO: 9111 - DNA, 40 bp, Artificial Sequence
  Description of Artificial Sequence: Synthetic primer
tttctagtactttcaaattcttgatttctcttttctgatg

SEQ ID NO: 9112 - DNA, 40 bp, Artificial Sequence
  Description of Artificial Sequence: Synthetic primer
ggaagtgttttgagcaagtgagcccggtcagctgaagaag

SEQ ID NO: 9113 - DNA, 40 bp, Artificial Sequence
  Description of Artificial Sequence: Synthetic primer
ctcaaagatgtttcacaactttttatctgttttcctacag

SEQ ID NO: 9114 - DNA, 40 bp, Artificial Sequence
  Description of Artificial Sequence: Synthetic primer
ggggacgcagcaacgcgtatgcacgcaggtggggcgcaca

SEQ ID NO: 9115 - DNA, 40 bp, Artificial Sequence
  Description of Artificial Sequence: Synthetic primer
ggggcctggcggcactgacctgaggccacctttcccctag

SEQ ID NO: 9116 - DNA, 40 bp, Artificial Sequence
  Description of Artificial Sequence: Synthetic primer
tgctgcattgcagccgccgcggcgccgctcggctcttcac

SEQ ID NO: 9117 - DNA, 40 bp, Artificial Sequence
  Description of Artificial Sequence: Synthetic primer
gcgcggccgcgttccttaccctgcatgctgctgacggccg

SEQ ID NO: 9118 - DNA, 40 bp, Artificial Sequence
  Description of Artificial Sequence: Synthetic primer
cttctgggtcctaccacagcacaagagtgggaagaatctg

SEQ ID NO: 9119 - DNA, 40 bp, Artificial Sequence
  Description of Artificial Sequence: Synthetic primer
ctttggtgttgcttttggctggaagccttggtttctcttg

SEQ ID NO: 9120 - DNA, 40 bp, Artificial Sequence
  Description of Artificial Sequence: Synthetic primer
gcttgcctgtctctgtgggctgaaggctgttccctgtttc

SEQ ID NO: 9121 - DNA, 40 bp, Artificial Sequence
  Description of Artificial Sequence: Synthetic primer
atgccagcagacgccttgccccacgtaccctgggcacccc

SEQ ID NO: 9122 - DNA, 40 bp, Artificial Sequence
  Description of Artificial Sequence: Synthetic primer
gggagtggaagtcagcctgtgtcatcgtgcctggtactgc

SEQ ID NO: 9123 - DNA, 40 bp, Artificial Sequence
  Description of Artificial Sequence: Synthetic primer
acccagcacccggcccctccccaccagccaaagcccaaag

SEQ ID NO: 9124 - DNA, 40 bp, Artificial Sequence
  Description of Artificial Sequence: Synthetic primer
tccttgacataatttgatcaaacctgggatctaacaaaac

SEQ ID NO: 9125 - DNA, 40 bp, Artificial Sequence
  Description of Artificial Sequence: Synthetic primer
atacaagaggctgttttcctagcgtggcttgctgcctttg

SEQ ID NO: 9126 - DNA, 40 bp, Artificial Sequence
  Description of Artificial Sequence: Synthetic primer
tggcatgttttcctactgacagctgcctttttggggactg

SEQ ID NO: 9127 - DNA, 40 bp, Artificial Sequence
  Description of Artificial Sequence: Synthetic primer
atgtgaaattggccagaatggagagttctgggtggatctg

SEQ ID NO: 9128 - DNA, 40 bp, Artificial Sequence
  Description of Artificial Sequence: Synthetic primer
cactcaggccctgacccgcccctctcccgcccctcgtcca

SEQ ID NO: 9129 - DNA, 40 bp, Artificial Sequence
  Description of Artificial Sequence: Synthetic primer
ccctgtgcccgccccgagcgcagctgcctgtgtgcgggtg

SEQ ID NO: 9130 - DNA, 40 bp, Artificial Sequence
  Description of Artificial Sequence: Synthetic primer
cttgcagcccgtggtagggaacctcacccaaaggcattga

SEQ ID NO: 9131 - DNA, 40 bp, Artificial Sequence
  Description of Artificial Sequence: Synthetic primer
ctgctggttacctccagccctgccccgcctcccccgatac

SEQ ID NO: 9132 - DNA, 40 bp, Artificial Sequence
  Description of Artificial Sequence: Synthetic primer
cctgcaccccggtcctcctacctgagccactgccctcctc

SEQ ID NO: 9133 - DNA, 40 bp, Artificial Sequence
  Description of Artificial Sequence: Synthetic primer
gcacaaggtcgcgccccaaggggctgcacggagaagattc

SEQ ID NO: 9134 - DNA, 40 bp, Artificial Sequence
  Description of Artificial Sequence: Synthetic primer
tctgtaccttttgccatctcaaatatttttgttaatcagc

SEQ ID NO: 9135 - DNA, 40 bp, Artificial Sequence
  Description of Artificial Sequence: Synthetic primer
acctggtgatcatttatcaagtgcatttcttatccatttc

SEQ ID NO: 9136 - DNA, 40 bp, Artificial Sequence
  Description of Artificial Sequence: Synthetic primer
cctttcagcttcctgatttctcccgattccttccttctcc

SEQ ID NO: 9137 - DNA, 40 bp, Artificial Sequence
  Description of Artificial Sequence: Synthetic primer
caggtgctcaggccagggccccagaggacgggccacactg

SEQ ID NO: 9138 - DNA, 40 bp, Artificial Sequence
  Description of Artificial Sequence: Synthetic primer
tattatgaaaatgttccttcaagtctgtgccttatgaatc

SEQ ID NO: 9139 - DNA, 40 bp, Artificial Sequence
  Description of Artificial Sequence: Synthetic primer
gagtagactactatcatgaggctgaagatgacagaatgtc

SEQ ID NO: 9140 - DNA, 40 bp, Artificial Sequence
  Description of Artificial Sequence: Synthetic primer
tctgttactataaggtagccattattcaaaatgtgaactg

SEQ ID NO: 9141 - DNA, 40 bp, Artificial Sequence
  Description of Artificial Sequence: Synthetic primer
attttaacattatgatagaagctattttttgatatacttc

SEQ ID NO: 9142 - DNA, 40 bp, Artificial Sequence
  Description of Artificial Sequence: Synthetic primer
ccccatctctggagccacccctccccatccctgtgtttag

SEQ ID NO: 9143 - DNA, 40 bp, Artificial Sequence
  Description of Artificial Sequence: Synthetic primer
cgccttgttcccctgctggccaaatgctgacttgctcacc

SEQ ID NO: 9144 - DNA, 40 bp, Artificial Sequence
  Description of Artificial Sequence: Synthetic primer
aacacaaaggtttttataagttctgtggatcttttaattg

SEQ ID NO: 9145 - DNA, 40 bp, Artificial Sequence
  Description of Artificial Sequence: Synthetic primer
tgctttacaacttgagaaccataaatatttgggagaagtg

SEQ ID NO: 9146 - DNA, 40 bp, Artificial Sequence
  Description of Artificial Sequence: Synthetic primer
tgccccttagaattatgaaaaatcctgacacaaaatgatg

SEQ ID NO: 9147 - DNA, 40 bp, Artificial Sequence
  Description of Artificial Sequence: Synthetic primer
accctcacgcaatgctgactctatctggtcaaccactgac

SEQ ID NO: 9148 - DNA, 40 bp, Artificial Sequence
  Description of Artificial Sequence: Synthetic primer
ttgttcccatcttgagctctacattatggattcctcattc

SEQ ID NO: 9149 - DNA, 40 bp, Artificial Sequence
  Description of Artificial Sequence: Synthetic primer
atatactaatacttcttaaccagctttgaacttttctttg

SEQ ID NO: 9150 - DNA, 40 bp, Artificial Sequence
  Description of Artificial Sequence: Synthetic primer
ctatatgcaaatgtcagcttacttgagaataaagaaaaag

SEQ ID NO: 9151 - DNA, 40 bp, Artificial Sequence
  Description of Artificial Sequence: Synthetic primer
cttattacaactacattacatttattcttctccctttttt

SEQ ID NO: 9152 - DNA, 40 bp, Artificial Sequence
  Description of Artificial Sequence: Synthetic primer
actgtctttagtcctaatggatttattcatttgtcttctg

SEQ ID NO: 9153 - DNA, 40 bp, Artificial Sequence
  Description of Artificial Sequence: Synthetic primer
attcttcttcaggaaaaggtataatgaaaatcaatgaaac

SEQ ID NO: 9154 - DNA, 40 bp, Artificial Sequence
  Description of Artificial Sequence: Synthetic primer
tctaaataatttaacacatttttaatatatttgggttttt

SEQ ID NO: 9155 - DNA, 40 bp, Artificial Sequence
  Description of Artificial Sequence: Synthetic primer
ggagaaaacttttcctatctgtcagattacatgaaatact

SEQ ID NO: 9156 - DNA, 40 bp, Artificial Sequence
  Description of Artificial Sequence: Synthetic primer
aagagtagtagcttgatagtaaacataaaatgacttatgc

SEQ ID NO: 9157 - DNA, 40 bp, Artificial Sequence
  Description of Artificial Sequence: Synthetic primer
ttgttctattttattttatttacaccatcatttcctttgc

SEQ ID NO: 9158 - DNA, 40 bp, Artificial Sequence
  Description of Artificial Sequence: Synthetic primer
accctgagaaatgaaaaccaagtagaggaaaaataaactc

SEQ ID NO: 9159 - DNA, 40 bp, Artificial Sequence
  Description of Artificial Sequence: Synthetic primer
ttgacagttaaatcataacactgttcttccccttctttag

SEQ ID NO: 9160 - DNA, 40 bp, Artificial Sequence
  Description of Artificial Sequence: Synthetic primer
aaggctgaccaccaaaccagtggttagatgagaaactgcc

SEQ ID NO: 9161 - DNA, 40 bp, Artificial Sequence
  Description of Artificial Sequence: Synthetic primer
tcaagtctcatatgctacatactgtgtctttttgaatacc

SEQ ID NO: 9162 - DNA, 40 bp, Artificial Sequence
  Description of Artificial Sequence: Synthetic primer
gtctacatttttgtaaatgtctttctttttcttttctctc

SEQ ID NO: 9163 - DNA, 40 bp, Artificial Sequence
  Description of Artificial Sequence: Synthetic primer
gcacttgcatttaaatacctatttctgtgctgaagttttg

SEQ ID NO: 9164 - DNA, 40 bp, Artificial Sequence
  Description of Artificial Sequence: Synthetic primer
tgattaatgcaaagtacctaactccactgatttctttttc

SEQ ID NO: 9165 - DNA, 40 bp, Artificial Sequence
  Description of Artificial Sequence: Synthetic primer
tgtacaatgtggtaagttagtgcctatgtgacagcaaacc

SEQ ID NO: 9166 - DNA, 40 bp, Artificial Sequence
  Description of Artificial Sequence: Synthetic primer
ctggggactaagtccaccctgtgcgtgggattctcttctc

SEQ ID NO: 9167 - DNA, 40 bp, Artificial Sequence
  Description of Artificial Sequence: Synthetic primer
gaccagcagcaactgagggagccccggtgcctgtgtggag

SEQ ID NO: 9168 - DNA, 40 bp, Artificial Sequence
  Description of Artificial Sequence: Synthetic primer
atttccataccctataaaccaccccgcccctccctattcc

SEQ ID NO: 9169 - DNA, 40 bp, Artificial Sequence
  Description of Artificial Sequence: Synthetic primer
aagaagcagttctgttgttcttggatgtggggaggagagg

SEQ ID NO: 9170 - DNA, 40 bp, Artificial Sequence
  Description of Artificial Sequence: Synthetic primer
cttgcctcatattaacaagtaatctgtttctgagaagtat

SEQ ID NO: 9171 - DNA, 40 bp, Artificial Sequence
  Description of Artificial Sequence: Synthetic primer
ttcttaagatgagcaagtaaattccaaggtgaaggaaacc

SEQ ID NO: 9172 - DNA, 40 bp, Artificial Sequence
  Description of Artificial Sequence: Synthetic primer
cactgtgttctctaaaaacctaacccaggacaaaggtgtg

SEQ ID NO: 9173 - DNA, 40 bp, Artificial Sequence
  Description of Artificial Sequence: Synthetic primer
ttaaagctgatttatgaaagccaacaaagcattttattag

SEQ ID NO: 9174 - DNA, 40 bp, Artificial Sequence
  Description of Artificial Sequence: Synthetic primer
tacagcacctctgaaaatgaaaagaaaacatgcaaacagc

SEQ ID NO: 9175 - DNA, 40 bp, Artificial Sequence
  Description of Artificial Sequence: Synthetic primer
gtcctctctggcactctaataattgtgcttttgtttctcc

SEQ ID NO: 9176 - DNA, 40 bp, Artificial Sequence
  Description of Artificial Sequence: Synthetic primer
tccaaattcgttctgtgccctgaccttctgcctctcattc

SEQ ID NO: 9177 - DNA, 40 bp, Artificial Sequence
  Description of Artificial Sequence: Synthetic primer
gctgagaagagacatctggacttagccaagaaggtggtgg

SEQ ID NO: 9178 - DNA, 40 bp, Artificial Sequence
  Description of Artificial Sequence: Synthetic primer
gcacaaaaattccttccagttcaaatattctgattcaacc

SEQ ID NO: 9179 - DNA, 40 bp, Artificial Sequence
  Description of Artificial Sequence: Synthetic primer
caaacacttttcagctcaagctatgaagtattaataaggc

SEQ ID NO: 9180 - DNA, 40 bp, Artificial Sequence
  Description of Artificial Sequence: Synthetic primer
gcttactaggaagtttttccatggcttctttttaaaatcc

SEQ ID NO: 9181 - DNA, 40 bp, Artificial Sequence
  Description of Artificial Sequence: Synthetic primer
cccttatctaaatatcatttaaccccatttctttctttgc

SEQ ID NO: 9182 - DNA, 40 bp, Artificial Sequence
  Description of Artificial Sequence: Synthetic primer
gagagtccccagcgggagatgaagcagggccccaggagtg

SEQ ID NO: 9183 - DNA, 40 bp, Artificial Sequence
  Description of Artificial Sequence: Synthetic primer
acaaaggttgtggggcaggactgacgtggcccggggtatc

SEQ ID NO: 9184 - DNA, 40 bp, Artificial Sequence
  Description of Artificial Sequence: Synthetic primer
ccactgtgtgagtgatccaacccaaacctccagagaagag

SEQ ID NO: 9185 - DNA, 40 bp, Artificial Sequence
  Description of Artificial Sequence: Synthetic primer
gcacaaacagccgcgttgtttatggcctgggatttgtttt

SEQ ID NO: 9186 - DNA, 40 bp, Artificial Sequence
  Description of Artificial Sequence: Synthetic primer
gtggccccacgtaatgaataattcccaaggtgagaagcac

SEQ ID NO: 9187 - DNA, 40 bp, Artificial Sequence
  Description of Artificial Sequence: Synthetic primer
aagaactttgtgaatactcctggtgattgtgagttcaatc

SEQ ID NO: 9188 - DNA, 40 bp, Artificial Sequence
  Description of Artificial Sequence: Synthetic primer
actaatacaacaaacatagtatattttttattacatgctg

SEQ ID NO: 9189 - DNA, 40 bp, Artificial Sequence
  Description of Artificial Sequence: Synthetic primer
ggatatggagtttatatatatttacatgaatttctttttt

SEQ ID NO: 9190 - DNA, 40 bp, Artificial Sequence
  Description of Artificial Sequence: Synthetic primer
ggatatgaagtcaattatattggaaattaatgcttaatac

SEQ ID NO: 9191 - DNA, 40 bp, Artificial Sequence
  Description of Artificial Sequence: Synthetic primer
taattaaatgtcctttggaaagaacttgaagtaatgtttt

SEQ ID NO: 9192 - DNA, 40 bp, Artificial Sequence
  Description of Artificial Sequence: Synthetic primer
aacaatttctgtatatcctaggaagcaccgactggctctc

SEQ ID NO: 9193 - DNA, 40 bp, Artificial Sequence
  Description of Artificial Sequence: Synthetic primer
aagttcgcattttgaagtgcactttcccctcctttcgtgg

SEQ ID NO: 9194 - DNA, 40 bp, Artificial Sequence
  Description of Artificial Sequence: Synthetic primer
gacaacattggtgtgtaacaaaatccgtatttataatgtg

SEQ ID NO: 9195 - DNA, 40 bp, Artificial Sequence
  Description of Artificial Sequence: Synthetic primer
acctggtaagaaaaaaaataaagtcttccttataaaatac

SEQ ID NO: 9196 - DNA, 40 bp, Artificial Sequence
  Description of Artificial Sequence: Synthetic primer
agtgtttttctgaacaaaacgtgatactatacaacaaagg

SEQ ID NO: 9197 - DNA, 40 bp, Artificial Sequence
  Description of Artificial Sequence: Synthetic primer
gccttgaaactcacctttgttgttggacactttctttttg

SEQ ID NO: 9198 - DNA, 40 bp, Artificial Sequence
  Description of Artificial Sequence: Synthetic primer
gtatttttgctttacaagctttaattcgcaaagaagattt

SEQ ID NO: 9199 - DNA, 40 bp, Artificial Sequence
  Description of Artificial Sequence: Synthetic primer
gaatttttaatgtaattttaaaacttttacttcttacttc

SEQ ID NO: 9200 - DNA, 40 bp, Artificial Sequence
  Description of Artificial Sequence: Synthetic primer
cgtaaacatctttggtctgctcgaatcttaccccctcctg

SEQ ID NO: 9201 - DNA, 40 bp, Artificial Sequence
  Description of Artificial Sequence: Synthetic primer
tgtttctaacacttgccgtttcctgctgtccccctgcccc

SEQ ID NO: 9202 - DNA, 40 bp, Artificial Sequence
  Description of Artificial Sequence: Synthetic primer
cgctctctctcagtccatttactcagaataaatacacatc

SEQ ID NO: 9203 - DNA, 40 bp, Artificial Sequence
  Description of Artificial Sequence: Synthetic primer
cttcactcactgtctggggctggtcctggagtttgtcttg

SEQ ID NO: 9204 - DNA, 40 bp, Artificial Sequence
  Description of Artificial Sequence: Synthetic primer
ttgcttttcagaaggacgcatgctgtttcttagggacacg

SEQ ID NO: 9205 - DNA, 40 bp, Artificial Sequence
  Description of Artificial Sequence: Synthetic primer
aattatttttatgtctatttcaaacattcctccaaaagag

SEQ ID NO: 9206 - DNA, 40 bp, Artificial Sequence
  Description of Artificial Sequence: Synthetic primer
ccaattggcacccactaagagagcccagcgccaagtcctg

SEQ ID NO: 9207 - DNA, 40 bp, Artificial Sequence
  Description of Artificial Sequence: Synthetic primer
gtgtgtgtgtgtatgtgtgttcagccgcagagacttgagc

SEQ ID NO: 9208 - DNA, 40 bp, Artificial Sequence
  Description of Artificial Sequence: Synthetic primer
acagcatctctcctctccccagccaccacggcttttccag

SEQ ID NO: 9209 - DNA, 40 bp, Artificial Sequence
  Description of Artificial Sequence: Synthetic primer
tgtctcctctgacccctgactccgcccctctctgcctcac

SEQ ID NO: 9210 - DNA, 40 bp, Artificial Sequence
  Description of Artificial Sequence: Synthetic primer
tcagtgaacacacgtggtattgaggctgccgcgtttctcc

SEQ ID NO: 9211 - DNA, 40 bp, Artificial Sequence
  Description of Artificial Sequence: Synthetic primer
agctgccttcccctttaagtcacaccacccagaaatcagc

SEQ ID NO: 9212 - DNA, 40 bp, Artificial Sequence
  Description of Artificial Sequence: Synthetic primer
gaggccagggtatcaagaaggccttggtcctagtctaacc

SEQ ID NO: 9213 - DNA, 40 bp, Artificial Sequence
  Description of Artificial Sequence: Synthetic primer
gctcttggcattctaatggctaatgttgtcttctttattg

SEQ ID NO: 9214 - DNA, 40 bp, Artificial Sequence
  Description of Artificial Sequence: Synthetic primer
cactatatttccatactactcatgaggtgtttattctttg

SEQ ID NO: 9215 - DNA, 40 bp, Artificial Sequence
  Description of Artificial Sequence: Synthetic primer
tcttgaataaattaagaacaccaaaacattttaaacagag

SEQ ID NO: 9216 - DNA, 40 bp, Artificial Sequence
  Description of Artificial Sequence: Synthetic primer
gactgagttgtactcaggaacactcctttatatgttggac

SEQ ID NO: 9217 - DNA, 40 bp, Artificial Sequence
  Description of Artificial Sequence: Synthetic primer
aaagggatttatctttacaattcagttttcttttgttcag

SEQ ID NO: 9218 - DNA, 40 bp, Artificial Sequence
  Description of Artificial Sequence: Synthetic primer
tgggtaatgtaagagctgtttgcatcttatctcacctctc

SEQ ID NO: 9219 - DNA, 40 bp, Artificial Sequence
  Description of Artificial Sequence: Synthetic primer
atgagggataaaggggagcatggagtaagagacctggaag

SEQ ID NO: 9220 - DNA, 40 bp, Artificial Sequence
  Description of Artificial Sequence: Synthetic primer
atcacgcgccccagtcgacgctgagctcctctgctactca

SEQ ID NO: 9221 - DNA, 40 bp, Artificial Sequence
  Description of Artificial Sequence: Synthetic primer
cttcggagaactggcccgacggcaatccccaccccgactc

SEQ ID NO: 9222 - DNA, 40 bp, Artificial Sequence
  Description of Artificial Sequence: Synthetic primer
gacctctgtcgccctcctttggaggtaacgcttgcttctc

SEQ ID NO: 9223 - DNA, 40 bp, Artificial Sequence
  Description of Artificial Sequence: Synthetic primer
gaggctgcttcactggtggctcccctcaaaactccatcac

SEQ ID NO: 9224 - DNA, 40 bp, Artificial Sequence
  Description of Artificial Sequence: Synthetic primer
taaaaccctgaggtctctgcgccaccccacccctcccaca

SEQ ID NO: 9225 - DNA, 40 bp, Artificial Sequence
  Description of Artificial Sequence: Synthetic primer
gccgcagcagtcgccagggagccgcagggaagtatggagc

SEQ ID NO: 9226 - DNA, 40 bp, Artificial Sequence
  Description of Artificial Sequence: Synthetic primer
aaatggtgcctttctggacccgagctgcagtggcgagatg

SEQ ID NO: 9227 - DNA, 40 bp, Artificial Sequence
  Description of Artificial Sequence: Synthetic primer
caccactgctgctgggaaagagtcgtggggctgctgacgc

SEQ ID NO: 9228 - DNA, 40 bp, Artificial Sequence
  Description of Artificial Sequence: Synthetic primer
gaccaaagtgcaatttaagcaagtttctgggcctcacttc

SEQ ID NO: 9229 - DNA, 40 bp, Artificial Sequence
  Description of Artificial Sequence: Synthetic primer
aatggtcatttttgtttgttaatatgatttactgtactac

SEQ ID NO: 9230 - DNA, 40 bp, Artificial Sequence
  Description of Artificial Sequence: Synthetic primer
tttttgtgagagtcactccctaaatccagaacattttctc

SEQ ID NO: 9231 - DNA, 40 bp, Artificial Sequence
  Description of Artificial Sequence: Synthetic primer
tttgagatgaggctgtaggtgaatttatggagaatccttg

SEQ ID NO: 9232 - DNA, 40 bp, Artificial Sequence
  Description of Artificial Sequence: Synthetic primer
ggatacttaggtgtcactctataatcacttgttcattttc

SEQ ID NO: 9233 - DNA, 40 bp, Artificial Sequence
  Description of Artificial Sequence: Synthetic primer
acattcaggctctgacagctgcttccaacttatgttcctc

SEQ ID NO: 9234 - DNA, 40 bp, Artificial Sequence
  Description of Artificial Sequence: Synthetic primer
ggtatgggaaaaaggtcatggttcatccaggctcctcctc

SEQ ID NO: 9235 - DNA, 40 bp, Artificial Sequence
  Description of Artificial Sequence: Synthetic primer
caggacagaagaaaactttcagtccgtcctctcattcctg

SEQ ID NO: 9236 - DNA, 40 bp, Artificial Sequence
  Description of Artificial Sequence: Synthetic primer
ggcagcaaggaaggcaggggtcctaaggtgtgtcctcctg

SEQ ID NO: 9237 - DNA, 40 bp, Artificial Sequence
  Description of Artificial Sequence: Synthetic primer
tgaggccagaggcttgggctggatcctttacccctgtctg

SEQ ID NO: 9238 - DNA, 40 bp, Artificial Sequence
  Description of Artificial Sequence: Synthetic primer
tttgcaatctatatgcctttaatccttaagtttgaattac

SEQ ID NO: 9239 - DNA, 40 bp, Artificial Sequence
  Description of Artificial Sequence: Synthetic primer
ttatcaatgctacagttaagattatttttatatttcctag

SEQ ID NO: 9240 - DNA, 40 bp, Artificial Sequence
  Description of Artificial Sequence: Synthetic primer
ccaccatgcccagccagattatcctttctgagtttgctac

SEQ ID NO: 9241 - DNA, 40 bp, Artificial Sequence
  Description of Artificial Sequence: Synthetic primer
aaataaatgacaaggcatgtattttttttttctttttagg

SEQ ID NO: 9242 - DNA, 40 bp, Artificial Sequence
  Description of Artificial Sequence: Synthetic primer
caggcagccactcccaaggtccagcagggctgctcacggg

SEQ ID NO: 9243 - DNA, 40 bp, Artificial Sequence
  Description of Artificial Sequence: Synthetic primer
gtggggtgggcacttggccggatccactttcctgactgtc

SEQ ID NO: 9244 - DNA, 40 bp, Artificial Sequence
  Description of Artificial Sequence: Synthetic primer
tttctaaacatcccagcctcttccagccccggctatactc

SEQ ID NO: 9245 - DNA, 40 bp, Artificial Sequence
  Description of Artificial Sequence: Synthetic primer
gatgtgaagtagtttatttagcatgcttcattcattttac

SEQ ID NO: 9246 - DNA, 40 bp, Artificial Sequence
  Description of Artificial Sequence: Synthetic primer
catgaagcctcctggccatgtgcgccctcccggtttggac

SEQ ID NO: 9247 - DNA, 40 bp, Artificial Sequence
  Description of Artificial Sequence: Synthetic primer
gtgcgcacacgttactgtttgcacagattcaggatccaag

SEQ ID NO: 9248 - DNA, 40 bp, Artificial Sequence
  Description of Artificial Sequence: Synthetic primer
gctctgtgacagagcagctgactccaccactgtcctgtgc

SEQ ID NO: 9249 - DNA, 40 bp, Artificial Sequence
  Description of Artificial Sequence: Synthetic primer
ggatgcggttggtcccagggatcgaaaggcctgctgacac

SEQ ID NO: 9250 - DNA, 40 bp, Artificial Sequence
  Description of Artificial Sequence: Synthetic primer
agtaaacagtaaatccaagttcattacaggaaacccaacc

SEQ ID NO: 9251 - DNA, 40 bp, Artificial Sequence
  Description of Artificial Sequence: Synthetic primer
gttttaaccaaatttatattgcatatgaatatctctctac

SEQ ID NO: 9252 - DNA, 40 bp, Artificial Sequence
  Description of Artificial Sequence: Synthetic primer
gcgcagccaggggtccgggaaggcgccgtccgctgcgctg

SEQ ID NO: 9253 - DNA, 40 bp, Artificial Sequence
  Description of Artificial Sequence: Synthetic primer
cgactgtcaagcgcagcggagaggcggggaccccaggaag

SEQ ID NO: 9254 - DNA, 40 bp, Artificial Sequence
  Description of Artificial Sequence: Synthetic primer
atgtgaacctgttggtttcctagataataccttttgtgtc

SEQ ID NO: 9255 - DNA, 40 bp, Artificial Sequence
  Description of Artificial Sequence: Synthetic primer
cccagacaagcagttcttatcacagaattcctccaggctt

SEQ ID NO: 9256 - DNA, 40 bp, Artificial Sequence
  Description of Artificial Sequence: Synthetic primer
aagcacacagatcagcgacaggatgacaggaagagcacag

SEQ ID NO: 9257 - DNA, 40 bp, Artificial Sequence
  Description of Artificial Sequence: Synthetic primer
cactgacaagctcctcgtcagtggcccgcttctgtctccc

SEQ ID NO: 9258 - DNA, 40 bp, Artificial Sequence
  Description of Artificial Sequence: Synthetic primer
accagaggagccagccccaggctctgcctggagtgggccc

SEQ ID NO: 9259 - DNA, 40 bp, Artificial Sequence
  Description of Artificial Sequence: Synthetic primer
gtgaagagtcggggcccaaaataactggggactgtcatcc

SEQ ID NO: 9260 - DNA, 40 bp, Artificial Sequence
  Description of Artificial Sequence: Synthetic primer
aaggcacagagggcctcagcactggccccacaaacccatc

SEQ ID NO: 9261 - DNA, 40 bp, Artificial Sequence
  Description of Artificial Sequence: Synthetic primer
acagcagtgggcacctgcctggggcccagcctcactgacg

SEQ ID NO: 9262 - DNA, 40 bp, Artificial Sequence
  Description of Artificial Sequence: Synthetic primer
ttattggaagtgtcactctcaggatagcagcttatttttc

SEQ ID NO: 9263 - DNA, 40 bp, Artificial Sequence
  Description of Artificial Sequence: Synthetic primer
ctcacagatcctctgtgcaataacttcccttttctttttt

SEQ ID NO: 9264 - DNA, 40 bp, Artificial Sequence
  Description of Artificial Sequence: Synthetic primer
atataggtccattttaaaaataatttttacgttgaactac

SEQ ID NO: 9265 - DNA, 40 bp, Artificial Sequence
  Description of Artificial Sequence: Synthetic primer
tataatatcatccattgctctttcttatcacttctttcac

SEQ ID NO: 9266 - DNA, 40 bp, Artificial Sequence
  Description of Artificial Sequence: Synthetic primer
ttggacgttcctttgttcctgggtatttatcttctccttc

SEQ ID NO: 9267 - DNA, 40 bp, Artificial Sequence
  Description of Artificial Sequence: Synthetic primer
aagattcctcagctgacctaaagataacaaactctctacc

SEQ ID NO: 9268 - DNA, 40 bp, Artificial Sequence
  Description of Artificial Sequence: Synthetic primer
atcttgtgcaattgattactttaaattaaatgattttatg

SEQ ID NO: 9269 - DNA, 40 bp, Artificial Sequence
  Description of Artificial Sequence: Synthetic primer
tttttaggtagagctacacattgttttataccagcttatc

SEQ ID NO: 9270 - DNA, 40 bp, Artificial Sequence
  Description of Artificial Sequence: Synthetic primer
tgaatgagctctttcctttttaaaatatcagttttacatc

SEQ ID NO: 9271 - DNA, 40 bp, Artificial Sequence
  Description of Artificial Sequence: Synthetic primer
ggaaatcattaccaaaattcatcaaccattaaatccttac

SEQ ID NO: 9272 - DNA, 40 bp, Artificial Sequence
  Description of Artificial Sequence: Synthetic primer
ttaacattaactgagttaatggtaataatattatccttgg

SEQ ID NO: 9273 - DNA, 40 bp, Artificial Sequence
  Description of Artificial Sequence: Synthetic primer
tatatatattttataacactgagagacattacttatttta

SEQ ID NO: 9274 - DNA, 40 bp, Artificial Sequence
  Description of Artificial Sequence: Synthetic primer
attattgatatgcagcaataacgttgactttattttttcc

SEQ ID NO: 9275 - DNA, 40 bp, Artificial Sequence
  Description of Artificial Sequence: Synthetic primer
ttctgtttctcaccatatcaaatacaaaatacctgcctac

SEQ ID NO: 9276 - DNA, 40 bp, Artificial Sequence
  Description of Artificial Sequence: Synthetic primer
gtcgtattttctggacagtttttgatggtctccgtcttcc

SEQ ID NO: 9277 - DNA, 40 bp, Artificial Sequence
  Description of Artificial Sequence: Synthetic primer
gaaatgttaaaaatcatctttccacacacacaagggaagc

SEQ ID NO: 9278 - DNA, 40 bp, Artificial Sequence
  Description of Artificial Sequence: Synthetic primer
cagccactgaggctgctgccctgtgtctcctcctgacacc

SEQ ID NO: 9279 - DNA, 40 bp, Artificial Sequence
  Description of Artificial Sequence: Synthetic primer
atctgaatgtccttagtgaagggcgtgccggtgtcctgtc

SEQ ID NO: 9280 - DNA, 40 bp, Artificial Sequence
  Description of Artificial Sequence: Synthetic primer
gggagccctgtccaggtgggaggctggacacaggctggag

SEQ ID NO: 9281 - DNA, 40 bp, Artificial Sequence
  Description of Artificial Sequence: Synthetic primer
tggtgagaccccttcagaccctacagagaccccactgctc

SEQ ID NO: 9282 - DNA, 40 bp, Artificial Sequence
  Description of Artificial Sequence: Synthetic primer
tgggaatgaacactaaacacactcacgctatgagcctctg

SEQ ID NO: 9283 - DNA, 40 bp, Artificial Sequence
  Description of Artificial Sequence: Synthetic primer
ctataacataatcagaaaaataatcttgtaaaatgtctga

SEQ ID NO: 9284 - DNA, 40 bp, Artificial Sequence
  Description of Artificial Sequence: Synthetic primer
agtatcagagacaatggtaagattaatattctcaatacat

SEQ ID NO: 9285 - DNA, 40 bp, Artificial Sequence
  Description of Artificial Sequence: Synthetic primer
ccaatcttattcgtccgggtgatgcaaaagcagtttgtgg

SEQ ID NO: 9286 - DNA, 40 bp, Artificial Sequence
  Description of Artificial Sequence: Synthetic primer
tgaaagaggcagctgcactaaaatgttaacaagttttaac

SEQ ID NO: 9287 - DNA, 40 bp, Artificial Sequence
  Description of Artificial Sequence: Synthetic primer
agctgagcaaaagtagatattacaagaccagcatgtactc

SEQ ID NO: 9288 - DNA, 40 bp, Artificial Sequence
  Description of Artificial Sequence: Synthetic primer
cgccttcagaagagggtgcattttcaggaggaagcgatgg

SEQ ID NO: 9289 - DNA, 40 bp, Artificial Sequence
  Description of Artificial Sequence: Synthetic primer
cctcatgaagttcttcacatacctagcctttcttctcaac

SEQ ID NO: 9290 - DNA, 40 bp, Artificial Sequence
  Description of Artificial Sequence: Synthetic primer
aaggcactagctgccattaaatgctccctgagtgccacag

SEQ ID NO: 9291 - DNA, 40 bp, Artificial Sequence
  Description of Artificial Sequence: Synthetic primer
cagagttgcccactccaccctgtacccatcatgcccactg

SEQ ID NO: 9292 - DNA, 40 bp, Artificial Sequence
  Description of Artificial Sequence: Synthetic primer
ctccatctcgttgccgattcatatattcatagtcttcatc

SEQ ID NO: 9293 - DNA, 40 bp, Artificial Sequence
  Description of Artificial Sequence: Synthetic primer
aagcacaaaggggacccaactaagggcctgatcctactgc

SEQ ID NO: 9294 - DNA, 40 bp, Artificial Sequence
  Description of Artificial Sequence: Synthetic primer
cccagaaagacccctgaaaggaaagtcctcctttctgcag

SEQ ID NO: 9295 - DNA, 40 bp, Artificial Sequence
  Description of Artificial Sequence: Synthetic primer
ccttgaataaagaagggaacagagatgagtactaacattc

SEQ ID NO: 9296 - DNA, 40 bp, Artificial Sequence
  Description of Artificial Sequence: Synthetic primer
tcatccataaatatcttacttcaaagaaaagctgtcaaac

SEQ ID NO: 9297 - DNA, 40 bp, Artificial Sequence
  Description of Artificial Sequence: Synthetic primer
taaatgaatgaatttaaaagaaaaatatgtatttttcttt

SEQ ID NO: 9298 - DNA, 40 bp, Artificial Sequence
  Description of Artificial Sequence: Synthetic primer
tggtattattaattctgcttttgtaaaatgtattacttca

SEQ ID NO: 9299 - DNA, 40 bp, Artificial Sequence
  Description of Artificial Sequence: Synthetic primer
aattcataatgcagaaaacataaattattaatacacaacc

SEQ ID NO: 9300 - DNA, 40 bp, Artificial Sequence
  Description of Artificial Sequence: Synthetic primer
taagaataacataatgcacatttcatctttttcattctag

SEQ ID NO: 9301 - DNA, 40 bp, Artificial Sequence
  Description of Artificial Sequence: Synthetic primer
acagaagaggctcctcaatgtggggaggggaagacaagac

SEQ ID NO: 9302 - DNA, 40 bp, Artificial Sequence
  Description of Artificial Sequence: Synthetic primer
gagagagagagagagagagactgactgagcaggaatggtg

SEQ ID NO: 9303 - DNA, 40 bp, Artificial Sequence
  Description of Artificial Sequence: Synthetic primer
ctttatgtaggattcagagtaaaatcaaagtgtttgttcc

SEQ ID NO: 9304 - DNA, 40 bp, Artificial Sequence
  Description of Artificial Sequence: Synthetic primer
acaattggtggcgatggttttctccttccatttatctttc

SEQ ID NO: 9305 - DNA, 40 bp, Artificial Sequence
  Description of Artificial Sequence: Synthetic primer
cttaaatgtaccattcttaagaaacagaaaaacactgatc

SEQ ID NO: 9306 - DNA, 40 bp, Artificial Sequence
  Description of Artificial Sequence: Synthetic primer
tcaggaagataatgtgactttagagcttatgatgttttcc

SEQ ID NO: 9307 - DNA, 40 bp, Artificial Sequence
  Description of Artificial Sequence: Synthetic primer
tctttttctgttttcacttggggcagtgttacattactgg

SEQ ID NO: 9308 - DNA, 40 bp, Artificial Sequence
  Description of Artificial Sequence: Synthetic primer
gcagacacagcagtggatgctgaactcttggggttctctg

SEQ ID NO: 9309 - DNA, 40 bp, Artificial Sequence
  Description of Artificial Sequence: Synthetic primer
tcattttaccggacactaaacccaaaattaaggataatgg

SEQ ID NO: 9310 - DNA, 40 bp, Artificial Sequence
  Description of Artificial Sequence: Synthetic primer
aaagcttttggaagaaagcattgcaaacctcaataggtcg

SEQ ID NO: 9311 - DNA, 40 bp, Artificial Sequence
  Description of Artificial Sequence: Synthetic primer
cctcctaccaagccacggctgcagtctaattacctttcac

SEQ ID NO: 9312 - DNA, 40 bp, Artificial Sequence
  Description of Artificial Sequence: Synthetic primer
atcaattcctgatctgcagcgtcctcctcccatctgtccc

SEQ ID NO: 9313 - DNA, 40 bp, Artificial Sequence
  Description of Artificial Sequence: Synthetic primer
aaaagataccttgcttgttataagagtaaaatttgatttg

SEQ ID NO: 9314 - DNA, 40 bp, Artificial Sequence
  Description of Artificial Sequence: Synthetic primer
ttgaacagaaaccttcattttgccaaaagttagagaaaaa

SEQ ID NO: 9315 - DNA, 40 bp, Artificial Sequence
  Description of Artificial Sequence: Synthetic primer
ctgggtaatgtgctgcagttctaatagtgtcttctactgc

SEQ ID NO: 9316 - DNA, 40 bp, Artificial Sequence
  Description of Artificial Sequence: Synthetic primer
agctgagcctcacttagatgatgacagagggtttatccac

SEQ ID NO: 9317 - DNA, 40 bp, Artificial Sequence
  Description of Artificial Sequence: Synthetic primer
tcttgcctgatgctggatccccgaccctcccccaccttgc

SEQ ID NO: 9318 - DNA, 40 bp, Artificial Sequence
  Description of Artificial Sequence: Synthetic primer
gagggaagaaggctgagttggggaggggaggagaaccagc

SEQ ID NO: 9319 - DNA, 40 bp, Artificial Sequence
  Description of Artificial Sequence: Synthetic primer
agtcgctaccgggaaaataggccccgaggcttcccttctg

SEQ ID NO: 9320 - DNA, 40 bp, Artificial Sequence
  Description of Artificial Sequence: Synthetic primer
ccggttacgcggttgcacgtcggccccagccctgaggagc

SEQ ID NO: 9321 - DNA, 40 bp, Artificial Sequence
  Description of Artificial Sequence: Synthetic primer
gaaagacacacttgtgctttaggaatgcttcgttaactcc

SEQ ID NO: 9322 - DNA, 40 bp, Artificial Sequence
  Description of Artificial Sequence: Synthetic primer
cgttccttaaacatatatagtaatgttcccttctctgctc

SEQ ID NO: 9323 - DNA, 40 bp, Artificial Sequence
  Description of Artificial Sequence: Synthetic primer
cctgctgatgtcattaagattaacatagcagccaaagagg

SEQ ID NO: 9324 - DNA, 40 bp, Artificial Sequence
  Description of Artificial Sequence: Synthetic primer
aggcctgtagtagcacttcctgactgtttgccccactttc

SEQ ID NO: 9325 - DNA, 40 bp, Artificial Sequence
  Description of Artificial Sequence: Synthetic primer
aactcattatcaggtctatcaactcttgtatttgttctcc

SEQ ID NO: 9326 - DNA, 40 bp, Artificial Sequence
  Description of Artificial Sequence: Synthetic primer
ggggagagaggaaggaggaggaagagaaagaaaagtatct

SEQ ID NO: 9327 - DNA, 40 bp, Artificial Sequence
  Description of Artificial Sequence: Synthetic primer
gggtcggcggccccacaggggacagagtggaaggggtgct

SEQ ID NO: 9328 - DNA, 40 bp, Artificial Sequence
  Description of Artificial Sequence: Synthetic primer
ggagggccgtggtgtgggcggagcagctggtacagtttgc

SEQ ID NO: 9329 - DNA, 40 bp, Artificial Sequence
  Description of Artificial Sequence: Synthetic primer
ggtgagggctgaggtgacccttgtctctgtgttcttgtcc

SEQ ID NO: 9330 - DNA, 40 bp, Artificial Sequence
  Description of Artificial Sequence: Synthetic primer
ccccaccagaccatgagaggccctgcggcccagcccagag

SEQ ID NO: 9331 - DNA, 40 bp, Artificial Sequence
  Description of Artificial Sequence: Synthetic primer
gggattaaggggccttctagggaggctcccgcagcacggg

SEQ ID NO: 9332 - DNA, 40 bp, Artificial Sequence
  Description of Artificial Sequence: Synthetic primer
cacatgccgagcggtgctgatgtgaggtgggttttctccc

SEQ ID NO: 9333 - DNA, 40 bp, Artificial Sequence
  Description of Artificial Sequence: Synthetic primer
aacccttcttgtagctcagtctaggactctgactctgttc

SEQ ID NO: 9334 - DNA, 40 bp, Artificial Sequence
  Description of Artificial Sequence: Synthetic primer
aagtatccttaaatagctccttctcttccctcatctctcc

SEQ ID NO: 9335 - DNA, 40 bp, Artificial Sequence
  Description of Artificial Sequence: Synthetic primer
tcctgaatctgctgtgatccaagaaatcgttgtttctttc

SEQ ID NO: 9336 - DNA, 40 bp, Artificial Sequence
  Description of Artificial Sequence: Synthetic primer
tgaataatcaagtagcctaatatatgggaattcagcactc

SEQ ID NO: 9337 - DNA, 40 bp, Artificial Sequence
  Description of Artificial Sequence: Synthetic primer
ctcccacctcttccctctcagtctcagctgctctcttctc

SEQ ID NO: 9338 - DNA, 40 bp, Artificial Sequence
  Description of Artificial Sequence: Synthetic primer
ggaacgaactgcctctgtgcgggaaggcggaatgccaagg

SEQ ID NO: 9339 - DNA, 40 bp, Artificial Sequence
  Description of Artificial Sequence: Synthetic primer
gaaggaaaaagaccatttgctgactccgttgttttatttc

SEQ ID NO: 9340 - DNA, 40 bp, Artificial Sequence
  Description of Artificial Sequence: Synthetic primer
agaatcaatgcaagctgaaaaagatatggcttaaaatgtg

SEQ ID NO: 9341 - DNA, 40 bp, Artificial Sequence
  Description of Artificial Sequence: Synthetic primer
ttgtgtctgtgtgggcagcttcctgtgagttccacatctc

SEQ ID NO: 9342 - DNA, 40 bp, Artificial Sequence
  Description of Artificial Sequence: Synthetic primer
cgggatgcgcacctgaggggtctgttttgtgtcgcttccg

SEQ ID NO: 9343 - DNA, 40 bp, Artificial Sequence
  Description of Artificial Sequence: Synthetic primer
cagcttttccatgatcatgcctctgcttttttttgcttgg

SEQ ID NO: 9344 - DNA, 40 bp, Artificial Sequence
  Description of Artificial Sequence: Synthetic primer
ccaaaaaaccaaagtgagaataatcactaaaggttagaac

SEQ ID NO: 9345 - DNA, 40 bp, Artificial Sequence
  Description of Artificial Sequence: Synthetic primer
tatttaatcagtataatatggcagagtaaaacattatttc

SEQ ID NO: 9346 - DNA, 40 bp, Artificial Sequence
  Description of Artificial Sequence: Synthetic primer
gatttcctaatgtctacttcaacacggttgcttcatctac

SEQ ID NO: 9347 - DNA, 40 bp, Artificial Sequence
  Description of Artificial Sequence: Synthetic primer
aatgactaaaaatgaacaatatacaagtatgtctgagttc

SEQ ID NO: 9348 - DNA, 40 bp, Artificial Sequence
  Description of Artificial Sequence: Synthetic primer
atattgcttgaaaatgatactgctatctattaaactgtac

SEQ ID NO: 9349 - DNA, 40 bp, Artificial Sequence
  Description of Artificial Sequence: Synthetic primer
aagcgcgggtaagcgtccaggcctcagggtcaggctccag

SEQ ID NO: 9350 - DNA, 40 bp, Artificial Sequence
  Description of Artificial Sequence: Synthetic primer
ctcccacgggccatgagccaggcgctgactgcccccactc

SEQ ID NO: 9351 - DNA, 40 bp, Artificial Sequence
  Description of Artificial Sequence: Synthetic primer
atatttttagcaacaaatatgttatttcccctcaatactc

SEQ ID NO: 9352 - DNA, 40 bp, Artificial Sequence
  Description of Artificial Sequence: Synthetic primer
tttttaaatgttaagcattcgtttaatgtgttgtaaaata

SEQ ID NO: 9353 - DNA, 40 bp, Artificial Sequence
  Description of Artificial Sequence: Synthetic primer
gacccatcagggctggtgggcagggtctaatgtccttctc

SEQ ID NO: 9354 - DNA, 40 bp, Artificial Sequence
  Description of Artificial Sequence: Synthetic primer
gcgtcccgccccacctccctcctccctgccccggccattc

SEQ ID NO: 9355 - DNA, 40 bp, Artificial Sequence
  Description of Artificial Sequence: Synthetic primer
ctgtgtgaaatatttgatgaggtcctctgtttgccttttc

SEQ ID NO: 9356 - DNA, 40 bp, Artificial Sequence
  Description of Artificial Sequence: Synthetic primer
gccctcacacgcgccagagcagacgtgtggcagagaaagc

SEQ ID NO: 9357 - DNA, 40 bp, Artificial Sequence
  Description of Artificial Sequence: Synthetic primer
ccccagccctggtgccatctgacccaagcttcctgtgccc

SEQ ID NO: 9358 - DNA, 40 bp, Artificial Sequence
  Description of Artificial Sequence: Synthetic primer
gcacccagggcacgtggcagggtgggacgtactcgctgtg

SEQ ID NO: 9359 - DNA, 40 bp, Artificial Sequence
  Description of Artificial Sequence: Synthetic primer
gacttcctaactcggcctcccctgttcccattactctaac

SEQ ID NO: 9360 - DNA, 40 bp, Artificial Sequence
  Description of Artificial Sequence: Synthetic primer
gctgctcctctccaccctgcctgtctctcttggctttccc

SEQ ID NO: 9361 - DNA, 40 bp, Artificial Sequence
  Description of Artificial Sequence: Synthetic primer
cagtaagttttgttggcttactttaaaattatttctctcc

SEQ ID NO: 9362 - DNA, 40 bp, Artificial Sequence
  Description of Artificial Sequence: Synthetic primer
tttgaaaagtactactatgttctctaataaaaaatagtag

SEQ ID NO: 9363 - DNA, 40 bp, Artificial Sequence
  Description of Artificial Sequence: Synthetic primer
acttaaaattatttatttgattgtatttttattcatgtgc

SEQ ID NO: 9364 - DNA, 40 bp, Artificial Sequence
  Description of Artificial Sequence: Synthetic primer
gaatgtcataggtgtaagtgatatcataagcaaaacagac

SEQ ID NO: 9365 - DNA, 40 bp, Artificial Sequence
  Description of Artificial Sequence: Synthetic primer
gctcgagaacatccctttgtgctcacacagcatactcaag

SEQ ID NO: 9366 - DNA, 40 bp, Artificial Sequence
  Description of Artificial Sequence: Synthetic primer
gaagctttgccacatctgtactcacagttcatgtcacttg

SEQ ID NO: 9367 - DNA, 40 bp, Artificial Sequence
  Description of Artificial Sequence: Synthetic primer
ccgtgtcctgaatttctctggactctcccattatttctac

SEQ ID NO: 9368 - DNA, 40 bp, Artificial Sequence
  Description of Artificial Sequence: Synthetic primer
gcctgtgaaaccaggctcaagcccaggacgggagggtgtg

SEQ ID NO: 9369 - DNA, 40 bp, Artificial Sequence
  Description of Artificial Sequence: Synthetic primer
tttgaaacagaaaagctaaatttaattgcatctattgacc

SEQ ID NO: 9370 - DNA, 40 bp, Artificial Sequence
  Description of Artificial Sequence: Synthetic primer
attggtaggatggaaactgttggaaccaaaggtatattgg

SEQ ID NO: 9371 - DNA, 40 bp, Artificial Sequence
  Description of Artificial Sequence: Synthetic primer
ttgatgaatctgagagtttttgatttatgggtcttcaaac

SEQ ID NO: 9372 - DNA, 40 bp, Artificial Sequence
  Description of Artificial Sequence: Synthetic primer
aaagccaaatacaagttctcattaaaataattaccaaagc

SEQ ID NO: 9373 - DNA, 40 bp, Artificial Sequence
  Description of Artificial Sequence: Synthetic primer
atctagagatgatttcttagattgtcttgtgttttgtttg

SEQ ID NO: 9374 - DNA, 40 bp, Artificial Sequence
  Description of Artificial Sequence: Synthetic primer
gagctaggaattataaggagagaatgcagaagaaaatgtg

SEQ ID NO: 9375 - DNA, 40 bp, Artificial Sequence
  Description of Artificial Sequence: Synthetic primer
tagtccacatgccaaaagttagttatgctttaacactaag

SEQ ID NO: 9376 - DNA, 40 bp, Artificial Sequence
  Description of Artificial Sequence: Synthetic primer
aaagttattcttagcatatttatgcaatggtatctttttc

SEQ ID NO: 9377 - DNA, 40 bp, Artificial Sequence
  Description of Artificial Sequence: Synthetic primer
ggcttggcattaaactgttagacatcaaaactcccagtcc

SEQ ID NO: 9378 - DNA, 40 bp, Artificial Sequence
  Description of Artificial Sequence: Synthetic primer
tgtggagtggggctgaccctgcctgggttcatcttgtgtc

SEQ ID NO: 9379 - DNA, 40 bp, Artificial Sequence
  Description of Artificial Sequence: Synthetic primer
cacactgaaaccaaaatccgattctgggttaataagtgac

SEQ ID NO: 9380 - DNA, 40 bp, Artificial Sequence
  Description of Artificial Sequence: Synthetic primer
ggaatttcgtgttgcctctgtagacgtcctgcaaggtttt

SEQ ID NO: 9381 - DNA, 40 bp, Artificial Sequence
  Description of Artificial Sequence: Synthetic primer
gtcgaggctgggacctgcccaccgccgccctcccatctgc

SEQ ID NO: 9382 - DNA, 40 bp, Artificial Sequence
  Description of Artificial Sequence: Synthetic primer
gcctcccaggggtgggaggaacccttgtggcggggcttgg

SEQ ID NO: 9383 - DNA, 40 bp, Artificial Sequence
  Description of Artificial Sequence: Synthetic primer
tttaaaaaaatcaaacccttgtttttctgcttctccaaca

SEQ ID NO: 9384 - DNA, 40 bp, Artificial Sequence
  Description of Artificial Sequence: Synthetic primer
tgaggaaaataaaatgaataatgagaaatgctcacaaagc

SEQ ID NO: 9385 - DNA, 40 bp, Artificial Sequence
  Description of Artificial Sequence: Synthetic primer
tctggcctagcccagtcctgccccattggctcagccctca

SEQ ID NO: 9386 - DNA, 40 bp, Artificial Sequence
  Description of Artificial Sequence: Synthetic primer
ccctgaagcaggcacagggtgggccatcatgagacataat

SEQ ID NO: 9387 - DNA, 40 bp, Artificial Sequence
  Description of Artificial Sequence: Synthetic primer
tttattgtgtgatacatgtttactttaaattgtttttctt

SEQ ID NO: 9388 - DNA, 40 bp, Artificial Sequence
  Description of Artificial Sequence: Synthetic primer
gatgagggaatacataaaagttaacacacaatctttttgc

SEQ ID NO: 9389 - DNA, 40 bp, Artificial Sequence
  Description of Artificial Sequence: Synthetic primer
cccacacgccccacacatggtctctgtgcttcagctgctc

SEQ ID NO: 9390 - DNA, 40 bp, Artificial Sequence
  Description of Artificial Sequence: Synthetic primer
aggggcccgtgggcttactggggctggtgtctccccacag

SEQ ID NO: 9391 - DNA, 40 bp, Artificial Sequence
  Description of Artificial Sequence: Synthetic primer
ctcatatacccagcagagctgactctctctatgcctttgc

SEQ ID NO: 9392 - DNA, 40 bp, Artificial Sequence
  Description of Artificial Sequence: Synthetic primer
ccagcaggcctgtgtgtgtgccaggctcagctggccgtgg

SEQ ID NO: 9393 - DNA, 40 bp, Artificial Sequence
  Description of Artificial Sequence: Synthetic primer
gctcggccctccccgcgcgcgcgaggccccagatggcgag

SEQ ID NO: 9394 - DNA, 40 bp, Artificial Sequence
  Description of Artificial Sequence: Synthetic primer
tccaggcggcatggagaaggacggcctgtgccgcgctgac

SEQ ID NO: 9395 - DNA, 40 bp, Artificial Sequence
  Description of Artificial Sequence: Synthetic primer
tcctgaaaacttcctggttcctgaaaactttgcttctcac

SEQ ID NO: 9396 - DNA, 40 bp, Artificial Sequence
  Description of Artificial Sequence: Synthetic primer
gagatagcaaacacaaatttcagagtgaatgccagataac

SEQ ID NO: 9397 - DNA, 40 bp, Artificial Sequence
  Description of Artificial Sequence: Synthetic primer
gcttgagtcttttcagcatgaaaaaattttaatttgtgac

SEQ ID NO: 9398 - DNA, 40 bp, Artificial Sequence
  Description of Artificial Sequence: Synthetic primer
tgatataaatttgtagacttccagataataatttgcttac

SEQ ID NO: 9399 - DNA, 40 bp, Artificial Sequence
  Description of Artificial Sequence: Synthetic primer
gaattgtaacaatgacacaaacgacaaccttcacttgagc

SEQ ID NO: 9400 - DNA, 40 bp, Artificial Sequence
  Description of Artificial Sequence: Synthetic primer
agagctttagctgagaggtagacaattgtaacaacacctg

SEQ ID NO: 9401 - DNA, 40 bp, Artificial Sequence
  Description of Artificial Sequence: Synthetic primer
taaaatgatacttcagtgactaaatcatcttagatttgac

SEQ ID NO: 9402 - DNA, 40 bp, Artificial Sequence
  Description of Artificial Sequence: Synthetic primer
agtatcttctgagcaatacaatctggcacttactggtttg

SEQ ID NO: 9403 - DNA, 40 bp, Artificial Sequence
  Description of Artificial Sequence: Synthetic primer
caggccaggcctcaacgcccatgtctttgcagccgaggag

SEQ ID NO: 9404 - DNA, 40 bp, Artificial Sequence
  Description of Artificial Sequence: Synthetic primer
cgggcaggcagctcagaacctggtatctactttctgttac

SEQ ID NO: 9405 - DNA, 40 bp, Artificial Sequence
  Description of Artificial Sequence: Synthetic primer
agggcattaaaacaaaacaaaaaggtactgaaatattgtg

SEQ ID NO: 9406 - DNA, 40 bp, Artificial Sequence
  Description of Artificial Sequence: Synthetic primer
gactgtatatgctctttcatggttgttttcttcttggacg

SEQ ID NO: 9407 - DNA, 40 bp, Artificial Sequence
  Description of Artificial Sequence: Synthetic primer
attgtatttttctttaattaaccaagtgttgatgatattg

SEQ ID NO: 9408 - DNA, 40 bp, Artificial Sequence
  Description of Artificial Sequence: Synthetic primer
tatgtagggattatatatttgataggtttttccagttttg

SEQ ID NO: 9409 - DNA, 40 bp, Artificial Sequence
  Description of Artificial Sequence: Synthetic primer
tgatgtattttccacagatgtttcatgatttccagttttc

SEQ ID NO: 9410 - DNA, 40 bp, Artificial Sequence
  Description of Artificial Sequence: Synthetic primer
aaaataaattattcttaaaagttacacgagacaaaaatac

SEQ ID NO: 9411 - DNA, 40 bp, Artificial Sequence
  Description of Artificial Sequence: Synthetic primer
ctgaactgctctcgccttgaacctgttttggcagataaac

SEQ ID NO: 9412 - DNA, 40 bp, Artificial Sequence
  Description of Artificial Sequence: Synthetic primer
taatttatacctcacagtttataagtggggaactgatgtg

SEQ ID NO: 9413 - DNA, 40 bp, Artificial Sequence
  Description of Artificial Sequence: Synthetic primer
aacatcaacatggctctagttgtcgacacctactatgatg

SEQ ID NO: 9414 - DNA, 40 bp, Artificial Sequence
  Description of Artificial Sequence: Synthetic primer
ccatgcctttgaaagcaacaattttatttacttcttgacg

SEQ ID NO: 9415 - DNA, 40 bp, Artificial Sequence
  Description of Artificial Sequence: Synthetic primer
tgtggggaaagacatgtcgctggcaggtccctctgttgac

SEQ ID NO: 9416 - DNA, 40 bp, Artificial Sequence
  Description of Artificial Sequence: Synthetic primer
atccagagtttatggaacagaacctgattattcttgtgtg

SEQ ID NO: 9417 - DNA, 40 bp, Artificial Sequence
  Description of Artificial Sequence: Synthetic primer
tgaatttacagtttagtgaattaataatccttttgttttc

SEQ ID NO: 9418 - DNA, 40 bp, Artificial Sequence
  Description of Artificial Sequence: Synthetic primer
tgaataatcatcaagcctcattatatgtcctcttactctc

SEQ ID NO: 9419 - DNA, 40 bp, Artificial Sequence
  Description of Artificial Sequence: Synthetic primer
tacctgggaaaattatgcttactaatgtggttttaatttc

SEQ ID NO: 9420 - DNA, 40 bp, Artificial Sequence
  Description of Artificial Sequence: Synthetic primer
ttgcacttatgcttaaaatctatttgcagtttgaatggtc

SEQ ID NO: 9421 - DNA, 40 bp, Artificial Sequence
  Description of Artificial Sequence: Synthetic primer
tctgtctcactctttgctgcagttcttttgttcttggtag

SEQ ID NO: 9422 - DNA, 40 bp, Artificial Sequence
  Description of Artificial Sequence: Synthetic primer
tggggcctcttgagttcctaataggcttcttttgctttgc

SEQ ID NO: 9423 - DNA, 40 bp, Artificial Sequence
  Description of Artificial Sequence: Synthetic primer
tcagctctgaggcagagctgagggtcaccagccccacgta

SEQ ID NO: 9424 - DNA, 40 bp, Artificial Sequence
  Description of Artificial Sequence: Synthetic primer
gagccagggtgccgctctggcctgttgattggcagctcag

SEQ ID NO: 9425 - DNA, 40 bp, Artificial Sequence
  Description of Artificial Sequence: Synthetic primer
ggttgctgtgtgcattgcattctctcagaatccttctttc

SEQ ID NO: 9426 - DNA, 40 bp, Artificial Sequence
  Description of Artificial Sequence: Synthetic primer
tggacatactgcacctcccctgaggcagcactgcctggcc

SEQ ID NO: 9427 - DNA, 40 bp, Artificial Sequence
  Description of Artificial Sequence: Synthetic primer
aacctcgggcaaggtggccacgcaccctggtgcccgcaag

SEQ ID NO: 9428 - DNA, 40 bp, Artificial Sequence
  Description of Artificial Sequence: Synthetic primer
ggggtggccctgggcggctgtcctaacccttcgcctcttg

SEQ ID NO: 9429 - DNA, 40 bp, Artificial Sequence
  Description of Artificial Sequence: Synthetic primer
aaagaaatgctgcagaaacatttggcacattccattctta

SEQ ID NO: 9430 - DNA, 40 bp, Artificial Sequence
  Description of Artificial Sequence: Synthetic primer
gcagaactgcctattcctaactgactcatcatttcatctc

SEQ ID NO: 9431 - DNA, 40 bp, Artificial Sequence
  Description of Artificial Sequence: Synthetic primer
ctgccggcccatgtggccccactcggtgatggctgtgtgc

SEQ ID NO: 9432 - DNA, 40 bp, Artificial Sequence
  Description of Artificial Sequence: Synthetic primer
aaaaggaaggaagacagtcgtgcaggtgaggggtacgaac

SEQ ID NO: 9433 - DNA, 40 bp, Artificial Sequence
  Description of Artificial Sequence: Synthetic primer
ccacgcccctactcctcctccaaaggccgccacccacacc

SEQ ID NO: 9434 - DNA, 40 bp, Artificial Sequence
  Description of Artificial Sequence: Synthetic primer
cgctcgctcaggtcctcgctgtcagactgtcctgtctccc

SEQ ID NO: 9435 - DNA, 40 bp, Artificial Sequence
  Description of Artificial Sequence: Synthetic primer
ttgtgtattttgagatcatctcctaactccctatgtcttc

SEQ ID NO: 9436 - DNA, 40 bp, Artificial Sequence
  Description of Artificial Sequence: Synthetic primer
tcagagagaacttaagtacatcagggtactttgaacattc

SEQ ID NO: 9437 - DNA, 40 bp, Artificial Sequence
  Description of Artificial Sequence: Synthetic primer
ccggctcccggccgcgggtgggcaggagggagacgcagag

SEQ ID NO: 9438 - DNA, 40 bp, Artificial Sequence
  Description of Artificial Sequence: Synthetic primer
ttttttagaagcagcgatcggagatggatgtctctctttg

SEQ ID NO: 9439 - DNA, 40 bp, Artificial Sequence
  Description of Artificial Sequence: Synthetic primer
aagcagtttctgctgggacaggtgtgaggagtgggcatgg

SEQ ID NO: 9440 - DNA, 40 bp, Artificial Sequence
  Description of Artificial Sequence: Synthetic primer
cagttcccagactaacggtgctgcgctctgctatctatcc

SEQ ID NO: 9441 - DNA, 40 bp, Artificial Sequence
  Description of Artificial Sequence: Synthetic primer
caggtcctctccgccctcacccgacctgtctgccttcctc

SEQ ID NO: 9442 - DNA, 40 bp, Artificial Sequence
  Description of Artificial Sequence: Synthetic primer
ctcccgagttctgggcatttcgcccggctcgaggtgcagg

SEQ ID NO: 9443 - DNA, 40 bp, Artificial Sequence
  Description of Artificial Sequence: Synthetic primer
ctgacgcctctgcccaccgctctcccgacccgccctgtgc

SEQ ID NO: 9444 - DNA, 40 bp, Artificial Sequence
  Description of Artificial Sequence: Synthetic primer
gaccccaagcccagaacccttcgccggacgcctcacacgg

SEQ ID NO: 9445 - DNA, 40 bp, Artificial Sequence
  Description of Artificial Sequence: Synthetic primer
gagggaatgaagacagcctctcatcctgtccccccaaccc

SEQ ID NO: 9446 - DNA, 40 bp, Artificial Sequence
  Description of Artificial Sequence: Synthetic primer
tgtccaggtgggtctgtgtcccactaagctgagtgggtcc

SEQ ID NO: 9447 - DNA, 40 bp, Artificial Sequence
  Description of Artificial Sequence: Synthetic primer
tttaagagaatgttgaaaataatcatttttcatgaaaatc

SEQ ID NO: 9448 - DNA, 40 bp, Artificial Sequence
  Description of Artificial Sequence: Synthetic primer
cctctactttagagaccaaaaacagttccaagggaaatac

SEQ ID NO: 9449 - DNA, 40 bp, Artificial Sequence
  Description of Artificial Sequence: Synthetic primer
taggcagtgaagtaaatttgtggatattaacctttttgtc

SEQ ID NO: 9450 - DNA, 40 bp, Artificial Sequence
  Description of Artificial Sequence: Synthetic primer
aggccaggactgaccacacagtgacatcatcagttaaaac

SEQ ID NO: 9451 - DNA, 40 bp, Artificial Sequence
  Description of Artificial Sequence: Synthetic primer
ggggcgatcccaaagagttagaggagggaagagaaagtgg

SEQ ID NO: 9452 - DNA, 40 bp, Artificial Sequence
  Description of Artificial Sequence: Synthetic primer
ggcggcggcggcggcggcaacatggcctcggctggtaacg

SEQ ID NO: 9453 - DNA, 40 bp, Artificial Sequence
  Description of Artificial Sequence: Synthetic primer
gcttggcttcaagttgtctttttaatgatcctctattctg

SEQ ID NO: 9454 - DNA, 40 bp, Artificial Sequence
  Description of Artificial Sequence: Synthetic primer
gtgaaattctaaatagtacctgctgtaagtcttcactttc

SEQ ID NO: 9455 - DNA, 40 bp, Artificial Sequence
  Description of Artificial Sequence: Synthetic primer
tttttttccctcaaagaaaaatattaacaacataattatt

SEQ ID NO: 9456 - DNA, 40 bp, Artificial Sequence
  Description of Artificial Sequence: Synthetic primer
acttagagtggtagaaatataatcagatatattccagaag

SEQ ID NO: 9457 - DNA, 40 bp, Artificial Sequence
  Description of Artificial Sequence: Synthetic primer
tcattaaatgatggttctatgtcttattatttattgttac

SEQ ID NO: 9458 - DNA, 40 bp, Artificial Sequence
  Description of Artificial Sequence: Synthetic primer
atctatagaaatgattgaacatccctactgattagatttc

SEQ ID NO: 9459 - DNA, 40 bp, Artificial Sequence
  Description of Artificial Sequence: Synthetic primer
cttgtccttaaggcctctgtgctttttaacaaatggtttc

SEQ ID NO: 9460 - DNA, 40 bp, Artificial Sequence
  Description of Artificial Sequence: Synthetic primer
gcatgcactccctggacatgtggacacatggaccatggtc

SEQ ID NO: 9461 - DNA, 40 bp, Artificial Sequence
  Description of Artificial Sequence: Synthetic primer
ttccatgtatttttcagtaattggaacttatatggtaatg

SEQ ID NO: 9462 - DNA, 40 bp, Artificial Sequence
  Description of Artificial Sequence: Synthetic primer
tgcccagccccaaggaagttttctaacctcttaaagaatc

SEQ ID NO: 9463 - DNA, 40 bp, Artificial Sequence
  Description of Artificial Sequence: Synthetic primer
aaaggattatgtgctacaaaattgagtgccagttcagagg

SEQ ID NO: 9464 - DNA, 40 bp, Artificial Sequence
  Description of Artificial Sequence: Synthetic primer
ccaaagccatctagacctaccccaggtaatacaagtaaac

SEQ ID NO: 9465 - DNA, 40 bp, Artificial Sequence
  Description of Artificial Sequence: Synthetic primer
tctgttgttgttgttgttgttgttgttgaactagaaggtc

SEQ ID NO: 9466 - DNA, 40 bp, Artificial Sequence
  Description of Artificial Sequence: Synthetic primer
gctgctacagccaaagctgtcatcacatttggaactactg

SEQ ID NO: 9467 - DNA, 40 bp, Artificial Sequence
  Description of Artificial Sequence: Synthetic primer
ggggctgctgcctagtcatttctgactcaattttcccaac

SEQ ID NO: 9468 - DNA, 40 bp, Artificial Sequence
  Description of Artificial Sequence: Synthetic primer
ctcaggccttcaggagggaaggctggggctggggagaacc

SEQ ID NO: 9469 - DNA, 40 bp, Artificial Sequence
  Description of Artificial Sequence: Synthetic primer
cagaaatacaatgttcatttctactgttgtttttgttctc

SEQ ID NO: 9470 - DNA, 40 bp, Artificial Sequence
  Description of Artificial Sequence: Synthetic primer
agtgtagccatagtctctcttatctaaaccagtaacctac

SEQ ID NO: 9471 - DNA, 40 bp, Artificial Sequence
  Description of Artificial Sequence: Synthetic primer
aggcaaggccacaatggccatgctgagggtactggcatgg

SEQ ID NO: 9472 - DNA, 40 bp, Artificial Sequence
  Description of Artificial Sequence: Synthetic primer
caagggtcctcccagaccctatctctggcctgactctttc

SEQ ID NO: 9473 - DNA, 40 bp, Artificial Sequence
  Description of Artificial Sequence: Synthetic primer
ccgcccaccaccaagtttctgatcctttttcttttctctc

SEQ ID NO: 9474 - DNA, 40 bp, Artificial Sequence
  Description of Artificial Sequence: Synthetic primer
tgcaaataatattacattagaatgagaaatttacttagat

SEQ ID NO: 9475 - DNA, 40 bp, Artificial Sequence
  Description of Artificial Sequence: Synthetic primer
gctgacttgttttatgcggtgtactttgtgttacttttcc

SEQ ID NO: 9476 - DNA, 40 bp, Artificial Sequence
  Description of Artificial Sequence: Synthetic primer
caatgatatcaagcaactgcaaagaggagaaagtatatgg

SEQ ID NO: 9477 - DNA, 40 bp, Artificial Sequence
  Description of Artificial Sequence: Synthetic primer
aatgctgctcattttctgtttgtcttttcactaaagtttg

SEQ ID NO: 9478 - DNA, 40 bp, Artificial Sequence
  Description of Artificial Sequence: Synthetic primer
ttcctcagtagtagcacagaggaaaggacattcacacaaa

SEQ ID NO: 9479 - DNA, 40 bp, Artificial Sequence
  Description of Artificial Sequence: Synthetic primer
tctgggaatgactacaaagtctcaaacaaggaaatcaagg

SEQ ID NO: 9480 - DNA, 40 bp, Artificial Sequence
  Description of Artificial Sequence: Synthetic primer
atatgaggagtcatttattaaaacgtatgttggtttccac

SEQ ID NO: 9481 - DNA, 40 bp, Artificial Sequence
  Description of Artificial Sequence: Synthetic primer
tttgctgcatgtggacaagtaagaacgaagttgagagttc

SEQ ID NO: 9482 - DNA, 40 bp, Artificial Sequence
  Description of Artificial Sequence: Synthetic primer
ttttacttacctctcgtttttgtctgtctgtctgtttgtc

SEQ ID NO: 9483 - DNA, 40 bp, Artificial Sequence
  Description of Artificial Sequence: Synthetic primer
cgatttatttatttttttaattgaagtttcctttttttcc

SEQ ID NO: 9484 - DNA, 40 bp, Artificial Sequence
  Description of Artificial Sequence: Synthetic primer
catgaatgtacatagttacaatctttccttcaagaacatg

SEQ ID NO: 9485 - DNA, 40 bp, Artificial Sequence
  Description of Artificial Sequence: Synthetic primer
gagggtagacgccctcagcccatccacccaaccccactgc

SEQ ID NO: 9486 - DNA, 40 bp, Artificial Sequence
  Description of Artificial Sequence: Synthetic primer
ggcagggcctggctggggcagggccagggtggggccttac

SEQ ID NO: 9487 - DNA, 40 bp, Artificial Sequence
  Description of Artificial Sequence: Synthetic primer
attctaatggaggaagagatggcctggtaaacacaatatc

SEQ ID NO: 9488 - DNA, 40 bp, Artificial Sequence
  Description of Artificial Sequence: Synthetic primer
gccaaacaacagtgtgtttatgactggaaggattgatgct

SEQ ID NO: 9489 - DNA, 40 bp, Artificial Sequence
  Description of Artificial Sequence: Synthetic primer
agcggagccgcgggcgggagggcggacggaccgactgacg

SEQ ID NO: 9490 - DNA, 40 bp, Artificial Sequence
  Description of Artificial Sequence: Synthetic primer
cagcctcccatcggcgctccagcctcagcctccaggttcc

SEQ ID NO: 9491 - DNA, 40 bp, Artificial Sequence
  Description of Artificial Sequence: Synthetic primer
cttcctgaagggaggatgggctaaggcaggcacacagtgg

SEQ ID NO: 9492 - DNA, 40 bp, Artificial Sequence
  Description of Artificial Sequence: Synthetic primer
ctccctcttcctgggcataggtgatctccaccctctgtgc

SEQ ID NO: 9493 - DNA, 40 bp, Artificial Sequence
  Description of Artificial Sequence: Synthetic primer
ccccaggggcgtgtcccctgtgagcacccagccaggcaac

SEQ ID NO: 9494 - DNA, 40 bp, Artificial Sequence
  Description of Artificial Sequence: Synthetic primer
cgcacgtgtggattatattggcagtctttatattcttatg

SEQ ID NO: 9495 - DNA, 40 bp, Artificial Sequence
  Description of Artificial Sequence: Synthetic primer
cagaactaaattttatatacatctctcaaaggtacatgag

SEQ ID NO: 9496 - DNA, 40 bp, Artificial Sequence
  Description of Artificial Sequence: Synthetic primer
atagcaattcattaactatatattcaccactgagcaaatg

SEQ ID NO: 9497 - DNA, 40 bp, Artificial Sequence
  Description of Artificial Sequence: Synthetic primer
tctctctctccctctcccctcgcttccaatgaatctcttc

SEQ ID NO: 9498 - DNA, 40 bp, Artificial Sequence
  Description of Artificial Sequence: Synthetic primer
cacagatctcaggtcccacacccttaagagaagaaaactc

SEQ ID NO: 9499 - DNA, 40 bp, Artificial Sequence
  Description of Artificial Sequence: Synthetic primer
gagtccgactctagccgtaggacacaggacaaacgcttcg

SEQ ID NO: 9500 - DNA, 40 bp, Artificial Sequence
  Description of Artificial Sequence: Synthetic primer
tcagcacggccctccctccgcatggagtaacactcaccag

SEQ ID NO: 9501 - DNA, 40 bp, Artificial Sequence
  Description of Artificial Sequence: Synthetic primer
gatgtgagcgctgtgaacaccccacgtgtctttctttttc

SEQ ID NO: 9502 - DNA, 40 bp, Artificial Sequence
  Description of Artificial Sequence: Synthetic primer
agagggctcagagtcctctggtggggaggggttttgcaca

SEQ ID NO: 9503 - DNA, 40 bp, Artificial Sequence
  Description of Artificial Sequence: Synthetic primer
tcctgagtcggggagctccaggccccagcgccttccttcc

SEQ ID NO: 9504 - DNA, 40 bp, Artificial Sequence
  Description of Artificial Sequence: Synthetic primer
ctcaggggctgggattcccacagaacggctggggcaagtc

SEQ ID NO: 9505 - DNA, 40 bp, Artificial Sequence
  Description of Artificial Sequence: Synthetic primer
gaaaattctcacttgcctaaaatacatatggaccatggag

SEQ ID NO: 9506 - DNA, 40 bp, Artificial Sequence
  Description of Artificial Sequence: Synthetic primer
aatgagcagttattcttgggaaatttcttcctattattgc

SEQ ID NO: 9507 - DNA, 40 bp, Artificial Sequence
  Description of Artificial Sequence: Synthetic primer
ccagcttcttccccaggagggcccatctgaccatacctac

SEQ ID NO: 9508 - DNA, 40 bp, Artificial Sequence
  Description of Artificial Sequence: Synthetic primer
accatggtcaagcgggcaggcctcccatcttccctccccc

SEQ ID NO: 9509 - DNA, 40 bp, Artificial Sequence
  Description of Artificial Sequence: Synthetic primer
tatgtaggggccaataattatattcgaggttactgttaaa

SEQ ID NO: 9510 - DNA, 40 bp, Artificial Sequence
  Description of Artificial Sequence: Synthetic primer
agatttttaaattctaacattgttagtttgtaataaaatg

SEQ ID NO: 9511 - DNA, 40 bp, Artificial Sequence
  Description of Artificial Sequence: Synthetic primer
tgttgaaccatctgtcctgagatcgatttcatttcatatt

SEQ ID NO: 9512 - DNA, 40 bp, Artificial Sequence
  Description of Artificial Sequence: Synthetic primer
ctagataatttcacataagtaagatttagtaacacttttc

SEQ ID NO: 9513 - DNA, 40 bp, Artificial Sequence
  Description of Artificial Sequence: Synthetic primer
ttgttgatatcacagggtatgtttttgtttttcttcattt

SEQ ID NO: 9514 - DNA, 40 bp, Artificial Sequence
  Description of Artificial Sequence: Synthetic primer
atcaccacatagagagtacctgggaacaacctactttgag

SEQ ID NO: 9515 - DNA, 40 bp, Artificial Sequence
  Description of Artificial Sequence: Synthetic primer
tagcggccggcctttctacaagtacatggaaaactgatag

SEQ ID NO: 9516 - DNA, 40 bp, Artificial Sequence
  Description of Artificial Sequence: Synthetic primer
actgcggttttaccctggcaattcgaatgactctgctttc

SEQ ID NO: 9517 - DNA, 40 bp, Artificial Sequence
  Description of Artificial Sequence: Synthetic primer
gaggcctgaagagtccctggcctgaccaggtacagggaac

SEQ ID NO: 9518 - DNA, 40 bp, Artificial Sequence
  Description of Artificial Sequence: Synthetic primer
cttccctgccccatcctggcccttcacccggggctgaccc

SEQ ID NO: 9519 - DNA, 40 bp, Artificial Sequence
  Description of Artificial Sequence: Synthetic primer
ctggctacccgccgcagaccgagcccttattctcatccac

SEQ ID NO: 9520 - DNA, 40 bp, Artificial Sequence
  Description of Artificial Sequence: Synthetic primer
aggccggtggcgggcagcggccgcggatggggcagctcac

SEQ ID NO: 9521 - DNA, 40 bp, Artificial Sequence
  Description of Artificial Sequence: Synthetic primer
ctttcagatccccaactgtccctgcccctatcccttacac

SEQ ID NO: 9522 - DNA, 40 bp, Artificial Sequence
  Description of Artificial Sequence: Synthetic primer
gaggagcaatcacaggtggggttcctggctaatcactctc

SEQ ID NO: 9523 - DNA, 40 bp, Artificial Sequence
  Description of Artificial Sequence: Synthetic primer
agaaattcattcatggtgggactctggggatgtggaggac

SEQ ID NO: 9524 - DNA, 40 bp, Artificial Sequence
  Description of Artificial Sequence: Synthetic primer
cctccacaggttcttaccttctacctctttcctgctttag

SEQ ID NO: 9525 - DNA, 40 bp, Artificial Sequence
  Description of Artificial Sequence: Synthetic primer
atcttgtcattattaagagagaagaaaattaatgtgttcc

SEQ ID NO: 9526 - DNA, 40 bp, Artificial Sequence
  Description of Artificial Sequence: Synthetic primer
tttattcccttgagaaatcatgagttaattaacaatcggg

SEQ ID NO: 9527 - DNA, 40 bp, Artificial Sequence
  Description of Artificial Sequence: Synthetic primer
tgtgtgaacggaacagttcaccccagtatggccttcttgc

SEQ ID NO: 9528 - DNA, 40 bp, Artificial Sequence
  Description of Artificial Sequence: Synthetic primer
tcactggacaacaaactaattagcacttttcaaaataatg

SEQ ID NO: 9529 - DNA, 40 bp, Artificial Sequence
  Description of Artificial Sequence: Synthetic primer
cccctttcagaccccggccagcctatgatgggccacacac

SEQ ID NO: 9530 - DNA, 40 bp, Artificial Sequence
  Description of Artificial Sequence: Synthetic primer
gggatgtgagtcagagcctttagtccatttcctttttctg

SEQ ID NO: 9531 - DNA, 40 bp, Artificial Sequence
  Description of Artificial Sequence: Synthetic primer
ttttaaattttaatgatcatgttgtaacttcatctttttc

SEQ ID NO: 9532 - DNA, 40 bp, Artificial Sequence
  Description of Artificial Sequence: Synthetic primer
cctccacagtctcaaaacattaatattttattaaatttcc

SEQ ID NO: 9533 - DNA, 40 bp, Artificial Sequence
  Description of Artificial Sequence: Synthetic primer
gatcacccgtcagtccctctattgttcctatttcccctac

SEQ ID NO: 9534 - DNA, 40 bp, Artificial Sequence
  Description of Artificial Sequence: Synthetic primer
agagaaggcttcctctaccaccttcacccttgaccttgtc

SEQ ID NO: 9535 - DNA, 40 bp, Artificial Sequence
  Description of Artificial Sequence: Synthetic primer
gatatttacatttacttaccttttatatttttaagtaatc

SEQ ID NO: 9536 - DNA, 40 bp, Artificial Sequence
  Description of Artificial Sequence: Synthetic primer
ttgttataaatgaagctaaaaattataaaaactaacatat

SEQ ID NO: 9537 - DNA, 40 bp, Artificial Sequence
  Description of Artificial Sequence: Synthetic primer
cctaagaacgccctcctggctgatcctggtggcccagacc

SEQ ID NO: 9538 - DNA, 40 bp, Artificial Sequence
  Description of Artificial Sequence: Synthetic primer
tggggaaggaatctcaagcccattctcctaactcttgtcc

SEQ ID NO: 9539 - DNA, 40 bp, Artificial Sequence
  Description of Artificial Sequence: Synthetic primer
gagatgggctgaacaaaagttcagttctgtgagagaaacc

SEQ ID NO: 9540 - DNA, 40 bp, Artificial Sequence
  Description of Artificial Sequence: Synthetic primer
gcagaccacctgcctctgtgcagaacgtgaaggaagacgc

SEQ ID NO: 9541 - DNA, 40 bp, Artificial Sequence
  Description of Artificial Sequence: Synthetic primer
gttctgagaagcaggtaaggacatttgtctccctctgacc

SEQ ID NO: 9542 - DNA, 40 bp, Artificial Sequence
  Description of Artificial Sequence: Synthetic primer
catatataaagataaccataacaaatagacataggagtac

SEQ ID NO: 9543 - DNA, 40 bp, Artificial Sequence
  Description of Artificial Sequence: Synthetic primer
ctcttctaatagcaatttaaattcggcaggaaattaaaag

SEQ ID NO: 9544 - DNA, 40 bp, Artificial Sequence
  Description of Artificial Sequence: Synthetic primer
gtaacctttaaaaagccattaattaccacaaatcccagtg

SEQ ID NO: 9545 - DNA, 40 bp, Artificial Sequence
  Description of Artificial Sequence: Synthetic primer
ttaaagcatttctctaaatatgttttaatcttttggcccc

SEQ ID NO: 9546 - DNA, 40 bp, Artificial Sequence
  Description of Artificial Sequence: Synthetic primer
tgaccagctggaggagagggaaagcagtttctaatgactg

SEQ ID NO: 9547 - DNA, 40 bp, Artificial Sequence
  Description of Artificial Sequence: Synthetic primer
aataaaacaatcgacaaaacaactgaatagaataactatc

SEQ ID NO: 9548 - DNA, 40 bp, Artificial Sequence
  Description of Artificial Sequence: Synthetic primer
ataacaaactgtttttgtttttatttttcctggtgtttag

SEQ ID NO: 9549 - DNA, 40 bp, Artificial Sequence
  Description of Artificial Sequence: Synthetic primer
tggctgccacacttccattaattatcacatggtctctttg

SEQ ID NO: 9550 - DNA, 40 bp, Artificial Sequence
  Description of Artificial Sequence: Synthetic primer
caccatcagggaaccaaactccccagcccagagccattac

SEQ ID NO: 9551 - DNA, 40 bp, Artificial Sequence
  Description of Artificial Sequence: Synthetic primer
cgccccgccgcccgcacagcggcccgcacctgcaccatga

SEQ ID NO: 9552 - DNA, 40 bp, Artificial Sequence
  Description of Artificial Sequence: Synthetic primer
gcgtgtttctaggtcgtggcgtcgggcttccggagctttg

SEQ ID NO: 9553 - DNA, 40 bp, Artificial Sequence
  Description of Artificial Sequence: Synthetic primer
ttgttgagatgacccttaagcaaatgaatgatagctcttc

SEQ ID NO: 9554 - DNA, 40 bp, Artificial Sequence
  Description of Artificial Sequence: Synthetic primer
tctccctctccaccttttttgccttaaattcattaaaagc

SEQ ID NO: 9555 - DNA, 40 bp, Artificial Sequence
  Description of Artificial Sequence: Synthetic primer
tttcctcacttgaggagatgatgtccaggcagagcaaatg

SEQ ID NO: 9556 - DNA, 40 bp, Artificial Sequence
  Description of Artificial Sequence: Synthetic primer
acatctttcactgtttatttcattaagtgaaatctgtttc

SEQ ID NO: 9557 - DNA, 40 bp, Artificial Sequence
  Description of Artificial Sequence: Synthetic primer
ttcctggtgactgacttagcatcttacatcttttgtttgc

SEQ ID NO: 9558 - DNA, 40 bp, Artificial Sequence
  Description of Artificial Sequence: Synthetic primer
cacgcgccgcatggcgggtctcacctcaggcctctcattg

SEQ ID NO: 9559 - DNA, 40 bp, Artificial Sequence
  Description of Artificial Sequence: Synthetic primer
acgtaaatacaagatattgatacttttttattatttgtgg

SEQ ID NO: 9560 - DNA, 40 bp, Artificial Sequence
  Description of Artificial Sequence: Synthetic primer
ttcctaatagctcttcgctgttttatcacttagaaacaag

SEQ ID NO: 9561 - DNA, 40 bp, Artificial Sequence
  Description of Artificial Sequence: Synthetic primer
acagcaaggcaggctgatggctcctgcactcttcatttag

SEQ ID NO: 9562 - DNA, 40 bp, Artificial Sequence
  Description of Artificial Sequence: Synthetic primer
tcttcatgagatgttgtaaagaaaagtttgctggagatac

SEQ ID NO: 9563 - DNA, 40 bp, Artificial Sequence
  Description of Artificial Sequence: Synthetic primer
cagggcctggagggaccaggacagggtgagtttaggactg

SEQ ID NO: 9564 - DNA, 40 bp, Artificial Sequence
  Description of Artificial Sequence: Synthetic primer
cctgccctgtgctgcccaaccaagccatctctgcccacag

SEQ ID NO: 9565 - DNA, 40 bp, Artificial Sequence
  Description of Artificial Sequence: Synthetic primer
ttcccctgatgcctccagttgacaagaggggtaaggagtg

SEQ ID NO: 9566 - DNA, 40 bp, Artificial Sequence
  Description of Artificial Sequence: Synthetic primer
gggagaggtgctgaagcccctgtttcctgatgtctgatac

SEQ ID NO: 9567 - DNA, 40 bp, Artificial Sequence
  Description of Artificial Sequence: Synthetic primer
agacctaattcataacttaaaaccatagtgataaaaattc

SEQ ID NO: 9568 - DNA, 40 bp, Artificial Sequence
  Description of Artificial Sequence: Synthetic primer
taagatgaatcttaaggttatttccttgctgtttcttttc

SEQ ID NO: 9569 - DNA, 40 bp, Artificial Sequence
  Description of Artificial Sequence: Synthetic primer
aactgacatggtgcaatatgattttcttttcttttcaatc

SEQ ID NO: 9570 - DNA, 40 bp, Artificial Sequence
  Description of Artificial Sequence: Synthetic primer
ggagggcgctacaagacagacagcacaaggagccagcacg

SEQ ID NO: 9571 - DNA, 40 bp, Artificial Sequence
  Description of Artificial Sequence: Synthetic primer
gagacagggatcagagcctgaatagatccttgtcctctgc

SEQ ID NO: 9572 - DNA, 40 bp, Artificial Sequence
  Description of Artificial Sequence: Synthetic primer
aaactggggctggggcttggaggagtccattgttatcagg

SEQ ID NO: 9573 - DNA, 40 bp, Artificial Sequence
  Description of Artificial Sequence: Synthetic primer
actccaaacctcgtattgctttcttgaggttggtggtgac

SEQ ID NO: 9574 - DNA, 40 bp, Artificial Sequence
  Description of Artificial Sequence: Synthetic primer
ttacaggagcaccaagcaggaccccgcccacccatccttg

SEQ ID NO: 9575 - DNA, 40 bp, Artificial Sequence
  Description of Artificial Sequence: Synthetic primer
gacttagaaagctgctcacttcaatgaaaatactctctgc

SEQ ID NO: 9576 - DNA, 40 bp, Artificial Sequence
  Description of Artificial Sequence: Synthetic primer
agggcctttctaaaatatgcacctcgattttctcattcag

SEQ ID NO: 9577 - DNA, 40 bp, Artificial Sequence
  Description of Artificial Sequence: Synthetic primer
aggtagttaagaaacccctatagatacatgataataattc

SEQ ID NO: 9578 - DNA, 40 bp, Artificial Sequence
  Description of Artificial Sequence: Synthetic primer
ttaaaatgctctgtggtttaaagttctgccagatgacctg

SEQ ID NO: 9579 - DNA, 40 bp, Artificial Sequence
  Description of Artificial Sequence: Synthetic primer
cccttcaatatcattgaaaggtcaactttgtttctgtttg

SEQ ID NO: 9580 - DNA, 40 bp, Artificial Sequence
  Description of Artificial Sequence: Synthetic primer
attggagtatgggattcactgataaataaccttcaaaatc

SEQ ID NO: 9581 - DNA, 40 bp, Artificial Sequence
  Description of Artificial Sequence: Synthetic primer
tctgcagaggccacagctatgaactttgcttgggtgatgc

SEQ ID NO: 9582 - DNA, 40 bp, Artificial Sequence
  Description of Artificial Sequence: Synthetic primer
agggacccctggtggtgggcacggggcaggccgggaggac

SEQ ID NO: 9583 - DNA, 40 bp, Artificial Sequence
  Description of Artificial Sequence: Synthetic primer
cgggcagctgaggacccgtgaagcctggtgactggcactg

SEQ ID NO: 9584 - DNA, 40 bp, Artificial Sequence
  Description of Artificial Sequence: Synthetic primer
accccacctccaaccagtgcccaccctgggagcccctgag

SEQ ID NO: 9585 - DNA, 40 bp, Artificial Sequence
  Description of Artificial Sequence: Synthetic primer
ggccaatatttacaatagcgggcaactgattcaagtcaag

SEQ ID NO: 9586 - DNA, 40 bp, Artificial Sequence
  Description of Artificial Sequence: Synthetic primer
ttctttaattttgttctatatttaaccgacctatttgaac

SEQ ID NO: 9587 - DNA, 40 bp, Artificial Sequence
  Description of Artificial Sequence: Synthetic primer
gggaagggattaatttttcacatgtgtttcttgtattgac

SEQ ID NO: 9588 - DNA, 40 bp, Artificial Sequence
  Description of Artificial Sequence: Synthetic primer
aaaaaaccctgaacagaagcactacttagattaaatggac

SEQ ID NO: 9589 - DNA, 40 bp, Artificial Sequence
  Description of Artificial Sequence: Synthetic primer
tcctttcaatattttctttttaatgattttctgaaattgg

SEQ ID NO: 9590 - DNA, 40 bp, Artificial Sequence
  Description of Artificial Sequence: Synthetic primer
aggtcagtgcatttaaaccaagattgtgccatttttaata

SEQ ID NO: 9591 - DNA, 40 bp, Artificial Sequence
  Description of Artificial Sequence: Synthetic primer
gaatgagtaagatcattctgtgaacgttagttcagcactc

SEQ ID NO: 9592 - DNA, 40 bp, Artificial Sequence
  Description of Artificial Sequence: Synthetic primer
cttcttctttctaatcttatttgcattcatattatccacc

SEQ ID NO: 9593 - DNA, 40 bp, Artificial Sequence
  Description of Artificial Sequence: Synthetic primer
gtttgcttcttcaggtagaatatattcccagtgtcctcag

SEQ ID NO: 9594 - DNA, 40 bp, Artificial Sequence
  Description of Artificial Sequence: Synthetic primer
gcttcacactaacactgtgattgggtttctttctcttttc

SEQ ID NO: 9595 - DNA, 40 bp, Artificial Sequence
  Description of Artificial Sequence: Synthetic primer
gggcaagtggtgagaggccccactgacctcagtctgtttc

SEQ ID NO: 9596 - DNA, 40 bp, Artificial Sequence
  Description of Artificial Sequence: Synthetic primer
caagagggacccattttgcttgtgaggggagaacttgtgg

SEQ ID NO: 9597 - DNA, 40 bp, Artificial Sequence
  Description of Artificial Sequence: Synthetic primer
tgagtttgattagcttaaaacggcttttctatttgttttg

SEQ ID NO: 9598 - DNA, 40 bp, Artificial Sequence
  Description of Artificial Sequence: Synthetic primer
attagggaaccgtgtctcgattaaacccctgggcattggg

SEQ ID NO: 9599 - DNA, 40 bp, Artificial Sequence
  Description of Artificial Sequence: Synthetic primer
atttgatgcctgggtcccagagaggcatcagaccatctac

SEQ ID NO: 9600 - DNA, 40 bp, Artificial Sequence
  Description of Artificial Sequence: Synthetic primer
agacctccctgagcactttcctcctccctctcctctcttc

SEQ ID NO: 9601 - DNA, 40 bp, Artificial Sequence
  Description of Artificial Sequence: Synthetic primer
cttttgatttcaaataatgacctaattaatttggttattc

SEQ ID NO: 9602 - DNA, 40 bp, Artificial Sequence
  Description of Artificial Sequence: Synthetic primer
atgagtttatttgtaaatgaaagtaatatttgctgtgttg

SEQ ID NO: 9603 - DNA, 40 bp, Artificial Sequence
  Description of Artificial Sequence: Synthetic primer
aaatacttatcaagataaaatgtaatttcttttttcttcc

SEQ ID NO: 9604 - DNA, 40 bp, Artificial Sequence
  Description of Artificial Sequence: Synthetic primer
ttcttttgacaacaaatagagctttaagtctaaaatattc

SEQ ID NO: 9605 - DNA, 40 bp, Artificial Sequence
  Description of Artificial Sequence: Synthetic primer
agaaataacctctcacaggtaggatgggtgaggggcatcc

SEQ ID NO: 9606 - DNA, 40 bp, Artificial Sequence
  Description of Artificial Sequence: Synthetic primer
tggctctccccagcaccaaagggtgagatctgagatccag

SEQ ID NO: 9607 - DNA, 40 bp, Artificial Sequence
  Description of Artificial Sequence: Synthetic primer
gcgtgaaatattgcatcgatatattcattcgaaatatttc

SEQ ID NO: 9608 - DNA, 40 bp, Artificial Sequence
  Description of Artificial Sequence: Synthetic primer
gagaagcaattttacatataaatgcaagtaacatactcac

SEQ ID NO: 9609 - DNA, 40 bp, Artificial Sequence
  Description of Artificial Sequence: Synthetic primer
aattcatggcttttctgttcttcattttcatacccatctc

SEQ ID NO: 9610 - DNA, 40 bp, Artificial Sequence
  Description of Artificial Sequence: Synthetic primer
tgcctgtaagataatgatagacagcaacatctctctttgc

SEQ ID NO: 9611 - DNA, 40 bp, Artificial Sequence
  Description of Artificial Sequence: Synthetic primer
ctgcccgggaccctgctccagcctggcccgcctccaagtc

SEQ ID NO: 9612 - DNA, 40 bp, Artificial Sequence
  Description of Artificial Sequence: Synthetic primer
gggctgccctggggcccacctgaccactcctgtcctctgc

SEQ ID NO: 9613 - DNA, 40 bp, Artificial Sequence
  Description of Artificial Sequence: Synthetic primer
aacaagtggtctggtcggtcagccccagtgcctcagatgg

SEQ ID NO: 9614 - DNA, 40 bp, Artificial Sequence
  Description of Artificial Sequence: Synthetic primer
tcatgaagtttcttttattggtggttttaagttgattttc

SEQ ID NO: 9615 - DNA, 40 bp, Artificial Sequence
  Description of Artificial Sequence: Synthetic primer
tctcttttttcctaaacttttgatttacttctgtgttttc

SEQ ID NO: 9616 - DNA, 40 bp, Artificial Sequence
  Description of Artificial Sequence: Synthetic primer
gcagcttgtttgttcatgtgacattgattggtactacttc

SEQ ID NO: 9617 - DNA, 40 bp, Artificial Sequence
  Description of Artificial Sequence: Synthetic primer
gccattgctacctgaaagacctcttgagagaactgactcc

SEQ ID NO: 9618 - DNA, 40 bp, Artificial Sequence
  Description of Artificial Sequence: Synthetic primer
cctactgacaaaccccatgcctctttgtcccagagactcc

SEQ ID NO: 9619 - DNA, 40 bp, Artificial Sequence
  Description of Artificial Sequence: Synthetic primer
cctcctgccaaggcctttttatatgagccaacaactcagg

SEQ ID NO: 9620 - DNA, 40 bp, Artificial Sequence
  Description of Artificial Sequence: Synthetic primer
ttggtccctgacccagcgaggtctctgaccttatctaaag

SEQ ID NO: 9621 - DNA, 40 bp, Artificial Sequence
  Description of Artificial Sequence: Synthetic primer
gagtattctggtccacaggcctcagtgctttttctttagc

SEQ ID NO: 9622 - DNA, 40 bp, Artificial Sequence
  Description of Artificial Sequence: Synthetic primer
cccggggattggctaagaggccctggggtctgctcagccc

SEQ ID NO: 9623 - DNA, 40 bp, Artificial Sequence
  Description of Artificial Sequence: Synthetic primer
ttatccatatcaatccatggccctgacagacatcagaaag

SEQ ID NO: 9624 - DNA, 40 bp, Artificial Sequence
  Description of Artificial Sequence: Synthetic primer
ctgcatcaaagacccctcagattttcacacgctttttctc

SEQ ID NO: 9625 - DNA, 40 bp, Artificial Sequence
  Description of Artificial Sequence: Synthetic primer
tataagaaatgacaagttcttctcccttcttctgcatgtg

SEQ ID NO: 9626 - DNA, 40 bp, Artificial Sequence
  Description of Artificial Sequence: Synthetic primer
cttcagcgttgctttggatggccccgcctccttgcactcc

SEQ ID NO: 9627 - DNA, 40 bp, Artificial Sequence
  Description of Artificial Sequence: Synthetic primer
aacaaccacatagcaatctaaatgtgtgtatacagtaggg

SEQ ID NO: 9628 - DNA, 40 bp, Artificial Sequence
  Description of Artificial Sequence: Synthetic primer
agtgtgttcttggttctttctaccctcctgagaatggatt

SEQ ID NO: 9629 - DNA, 40 bp, Artificial Sequence
  Description of Artificial Sequence: Synthetic primer
ttctgtcggggaagggtggggtggggcggggcaggcactc

SEQ ID NO: 9630 - DNA, 40 bp, Artificial Sequence
  Description of Artificial Sequence: Synthetic primer
ctcacaccccgcccctcgcaccccattcacgtccccactc

SEQ ID NO: 9631 - DNA, 40 bp, Artificial Sequence
  Description of Artificial Sequence: Synthetic primer
atcagccatgtaagctatagtgagttttatttatgtaatg

SEQ ID NO: 9632 - DNA, 40 bp, Artificial Sequence
  Description of Artificial Sequence: Synthetic primer
cccaaaattttgaagcagaacaaaattctaccaccacaaa

SEQ ID NO: 9633 - DNA, 40 bp, Artificial Sequence
  Description of Artificial Sequence: Synthetic primer
agcccacctccatccaaagcggaggggacccccaaagcag

SEQ ID NO: 9634 - DNA, 40 bp, Artificial Sequence
  Description of Artificial Sequence: Synthetic primer
caactccactgcgccgggctgaggagcaggaattaggagc

SEQ ID NO: 9635 - DNA, 40 bp, Artificial Sequence
  Description of Artificial Sequence: Synthetic primer
gcttttgtaatatctcctcttaacttggaaatggaaaatg

SEQ ID NO: 9636 - DNA, 40 bp, Artificial Sequence
  Description of Artificial Sequence: Synthetic primer
caatttttttttctaaacgtgccttctgtttccttgcttg

SEQ ID NO: 9637 - DNA, 40 bp, Artificial Sequence
  Description of Artificial Sequence: Synthetic primer
attttgggaagttatgaagacgtgttaataaaaggtgatc

SEQ ID NO: 9638 - DNA, 40 bp, Artificial Sequence
  Description of Artificial Sequence: Synthetic primer
ggtaggtctcataattaaaaacattcagacaatcactatc

SEQ ID NO: 9639 - DNA, 40 bp, Artificial Sequence
  Description of Artificial Sequence: Synthetic primer
catcccatcctctcccacggtgacctgaagccttttgtcg

SEQ ID NO: 9640 - DNA, 40 bp, Artificial Sequence
  Description of Artificial Sequence: Synthetic primer
ccccaccctgccagcaagattgcaggggcactgcctccag

SEQ ID NO: 9641 - DNA, 40 bp, Artificial Sequence
  Description of Artificial Sequence: Synthetic primer
attaatcaataatgaaagcattcacctcacagggcccaac

SEQ ID NO: 9642 - DNA, 40 bp, Artificial Sequence
  Description of Artificial Sequence: Synthetic primer
ggtgccagtgcctgacagacgtttcctgtttgaccttttc

SEQ ID NO: 9643 - DNA, 40 bp, Artificial Sequence
  Description of Artificial Sequence: Synthetic primer
acaatgaagaaacaccaccacttatcactgctttattcac

SEQ ID NO: 9644 - DNA, 40 bp, Artificial Sequence
  Description of Artificial Sequence: Synthetic primer
gtcttcctttgcggccgggtatgtggctttccttctaaag

SEQ ID NO: 9645 - DNA, 40 bp, Artificial Sequence
  Description of Artificial Sequence: Synthetic primer
agaatgtaaccaccaccaataacgaatcgactgtatcttc

SEQ ID NO: 9646 - DNA, 40 bp, Artificial Sequence
  Description of Artificial Sequence: Synthetic primer
atgcagcagtgaaggtcaccagccagcagcagtgccttac

SEQ ID NO: 9647 - DNA, 40 bp, Artificial Sequence
  Description of Artificial Sequence: Synthetic primer
gccccttcctttgtctgcctttacgggttcagcgcatcac

SEQ ID NO: 9648 - DNA, 40 bp, Artificial Sequence
  Description of Artificial Sequence: Synthetic primer
ttctgagaccctgtgtgttgcccctctggtccccaacatg

SEQ ID NO: 9649 - DNA, 40 bp, Artificial Sequence
  Description of Artificial Sequence: Synthetic primer
gcagggcagctaggggtctctgcattctccacatggtctc

SEQ ID NO: 9650 - DNA, 40 bp, Artificial Sequence
  Description of Artificial Sequence: Synthetic primer
cccagctcctacctcctctgccacttcctctttctctttg

SEQ ID NO: 9651 - DNA, 40 bp, Artificial Sequence
  Description of Artificial Sequence: Synthetic primer
ttcagggattaaaaatgctgtttttccaacctaaaagttc

SEQ ID NO: 9652 - DNA, 40 bp, Artificial Sequence
  Description of Artificial Sequence: Synthetic primer
agaggtttccaatgtagttggggctttcatactgattttc

SEQ ID NO: 9653 - DNA, 40 bp, Artificial Sequence
  Description of Artificial Sequence: Synthetic primer
agctttggcagcctctccacgctccctccactccctctgc

SEQ ID NO: 9654 - DNA, 40 bp, Artificial Sequence
  Description of Artificial Sequence: Synthetic primer
tgccacaggcctgagagtggagctggagagactgagaggg

SEQ ID NO: 9655 - DNA, 40 bp, Artificial Sequence
  Description of Artificial Sequence: Synthetic primer
gtttgaattcagtactcccttggaactaatgccacatttc

SEQ ID NO: 9656 - DNA, 40 bp, Artificial Sequence
  Description of Artificial Sequence: Synthetic primer
ggttgagaggtcaacatctcagagtgaaacacccacttac

SEQ ID NO: 9657 - DNA, 40 bp, Artificial Sequence
  Description of Artificial Sequence: Synthetic primer
acttcctgaaataatttcaccttcgtttttttccttctgc

SEQ ID NO: 9658 - DNA, 40 bp, Artificial Sequence
  Description of Artificial Sequence: Synthetic primer
gggtgcggcgcgagaccctctcttcagagccccgggctta

SEQ ID NO: 9659 - DNA, 40 bp, Artificial Sequence
  Description of Artificial Sequence: Synthetic primer
actccatcaacagtcatccactgcctgtgacatgaaactc

SEQ ID NO: 9660 - DNA, 40 bp, Artificial Sequence
  Description of Artificial Sequence: Synthetic primer
tacatgattgatcttttagtcaatttatttgtctttacag

SEQ ID NO: 9661 - DNA, 40 bp, Artificial Sequence
  Description of Artificial Sequence: Synthetic primer
gggccgcacttactctgaagggtccaggctcttcctttcg

SEQ ID NO: 9662 - DNA, 40 bp, Artificial Sequence
  Description of Artificial Sequence: Synthetic primer
gcggcgcgcccgcagcccggtgattcgctctctctctttg

SEQ ID NO: 9663 - DNA, 40 bp, Artificial Sequence
  Description of Artificial Sequence: Synthetic primer
ggtgacacccaaactggggactgacgcttctattttcctc

SEQ ID NO: 9664 - DNA, 40 bp, Artificial Sequence
  Description of Artificial Sequence: Synthetic primer
ggacaggccacatttgttgtccccactccagtcctcttgc

SEQ ID NO: 9665 - DNA, 40 bp, Artificial Sequence
  Description of Artificial Sequence: Synthetic primer
tatttctactaatacattcttttaaaaaaaaaataaaaac

SEQ ID NO: 9666 - DNA, 40 bp, Artificial Sequence
  Description of Artificial Sequence: Synthetic primer
agaggctgagaactgtaactggtcttaagtgtgtgtgctc

SEQ ID NO: 9667 - DNA, 40 bp, Artificial Sequence
  Description of Artificial Sequence: Synthetic primer
ccttcctggaacaaaattgaacaggcccaggggaacagag

SEQ ID NO: 9668 - DNA, 40 bp, Artificial Sequence
  Description of Artificial Sequence: Synthetic primer
gcatggcctggggccatccctgccagccacacacctgctc

SEQ ID NO: 9669 - DNA, 40 bp, Artificial Sequence
  Description of Artificial Sequence: Synthetic primer
gagatcttgggacttaaaaatcacacactgagtagaaatg

SEQ ID NO: 9670 - DNA, 40 bp, Artificial Sequence
  Description of Artificial Sequence: Synthetic primer
ttttcttcatgaataattgatttttggatttttgtctttg

SEQ ID NO: 9671 - DNA, 40 bp, Artificial Sequence
  Description of Artificial Sequence: Synthetic primer
tagacctgaagtatccgtcttgaattgtcttatcttgttc

SEQ ID NO: 9672 - DNA, 40 bp, Artificial Sequence
  Description of Artificial Sequence: Synthetic primer
ggtacttctctgccaaatccctcccagagaaacagagaac

SEQ ID NO: 9673 - DNA, 40 bp, Artificial Sequence
  Description of Artificial Sequence: Synthetic primer
tcatttctcttgcttacatgaactctatgtcgtggcattc

SEQ ID NO: 9674 - DNA, 40 bp, Artificial Sequence
  Description of Artificial Sequence: Synthetic primer
ttttttaaataataaaaggaaagtcaagaggtaagatgac

SEQ ID NO: 9675 - DNA, 40 bp, Artificial Sequence
  Description of Artificial Sequence: Synthetic primer
cagtccccgtgatcaaacaataagatcagagagaacagac

SEQ ID NO: 9676 - DNA, 40 bp, Artificial Sequence
  Description of Artificial Sequence: Synthetic primer
cactgtcaagtctaaaaatacatggggagataatcacatt

SEQ ID NO: 9677 - DNA, 40 bp, Artificial Sequence
  Description of Artificial Sequence: Synthetic primer
acgttttttctacatataaacatttgaaagcagtgaatac

SEQ ID NO: 9678 - DNA, 40 bp, Artificial Sequence
  Description of Artificial Sequence: Synthetic primer
ttaatgacaaaatggtgttttttgtattatttcttgagag

SEQ ID NO: 9679 - DNA, 40 bp, Artificial Sequence
  Description of Artificial Sequence: Synthetic primer
agaggcaactccaattcctgctaaacagtaggaagggttc

SEQ ID NO: 9680 - DNA, 40 bp, Artificial Sequence
  Description of Artificial Sequence: Synthetic primer
atagtgttacctgcctcccagggtcaactcacatcttctg

SEQ ID NO: 9681 - DNA, 40 bp, Artificial Sequence
  Description of Artificial Sequence: Synthetic primer
ttatctaggatcaatgtgtgattttcaatatcttttcttc

SEQ ID NO: 9682 - DNA, 40 bp, Artificial Sequence
  Description of Artificial Sequence: Synthetic primer
tcctgccttctattaagcattaaaaacaaaacatacttac

SEQ ID NO: 9683 - DNA, 40 bp, Artificial Sequence
  Description of Artificial Sequence: Synthetic primer
atacatttagggtatgattcacatatttattttgtccttc

SEQ ID NO: 9684 - DNA, 40 bp, Artificial Sequence
  Description of Artificial Sequence: Synthetic primer
tgacattccctgatatttaagttaacaacttttgtgtgcc

SEQ ID NO: 9685 - DNA, 40 bp, Artificial Sequence
  Description of Artificial Sequence: Synthetic primer
caccccacaccacagtgccctgcccgggccaccccaccag

SEQ ID NO: 9686 - DNA, 40 bp, Artificial Sequence
  Description of Artificial Sequence: Synthetic primer
ccacccagctgcaactgtgtgggcactcacgtgttctctg

SEQ ID NO: 9687 - DNA, 40 bp, Artificial Sequence
  Description of Artificial Sequence: Synthetic primer
tggaatgaacaaaatactgaattgcaaacctcaagtgaac

SEQ ID NO: 9688 - DNA, 40 bp, Artificial Sequence
  Description of Artificial Sequence: Synthetic primer
aaagtattagttaaaatttcttctttgtgtgaaaactcac

SEQ ID NO: 9689 - DNA, 40 bp, Artificial Sequence
  Description of Artificial Sequence: Synthetic primer
ccccactctatcccagcctggcctttgcttctctcaacag

SEQ ID NO: 9690 - DNA, 40 bp, Artificial Sequence
  Description of Artificial Sequence: Synthetic primer
ctacctgggatcccctagggagggaacacgaaacagcttg

SEQ ID NO: 9691 - DNA, 40 bp, Artificial Sequence
  Description of Artificial Sequence: Synthetic primer
gccttgaaaacttggtatttccatcctaatgtgatgtgtc

SEQ ID NO: 9692 - DNA, 40 bp, Artificial Sequence
  Description of Artificial Sequence: Synthetic primer
gccaaacacataccttgaatttaaaataggtttcaatggg

SEQ ID NO: 9693 - DNA, 40 bp, Artificial Sequence
  Description of Artificial Sequence: Synthetic primer
cgcgggcggtgcgcgcgaggcgggcgggcgggcggaaggg

SEQ ID NO: 9694 - DNA, 40 bp, Artificial Sequence
  Description of Artificial Sequence: Synthetic primer
tcagagttcacgtcaaaccaaggaaacaatacaaacagag

SEQ ID NO: 9695 - DNA, 40 bp, Artificial Sequence
  Description of Artificial Sequence: Synthetic primer
tgtgactacttcaaaaccccttttctgttttcattgtttc

SEQ ID NO: 9696 - DNA, 40 bp, Artificial Sequence
  Description of Artificial Sequence: Synthetic primer
ctcctccgccccgccctgcccctccggcgccacccctccc

SEQ ID NO: 9697 - DNA, 40 bp, Artificial Sequence
  Description of Artificial Sequence: Synthetic primer
tggcttgagggtgttgcgaggagcttgtgttttccacttg

SEQ ID NO: 9698 - DNA, 40 bp, Artificial Sequence
  Description of Artificial Sequence: Synthetic primer
cctgctgggcgggaggggctgcgtggtgctgcctggtgag

SEQ ID NO: 9699 - DNA, 40 bp, Artificial Sequence
  Description of Artificial Sequence: Synthetic primer
ggtgggcaggtcccagcctcgacccagccctggggattcc

SEQ ID NO: 9700 - DNA, 40 bp, Artificial Sequence
  Description of Artificial Sequence: Synthetic primer
aaaccaagtaaatgtttctttctcggtttccagatttaac

SEQ ID NO: 9701 - DNA, 40 bp, Artificial Sequence
  Description of Artificial Sequence: Synthetic primer
tgtatgacagtctgtaatttttaaagtagtattatgcaca

SEQ ID NO: 9702 - DNA, 40 bp, Artificial Sequence
  Description of Artificial Sequence: Synthetic primer
gggtgattattttgacgagctgtcattcttttatttgttc

SEQ ID NO: 9703 - DNA, 40 bp, Artificial Sequence
  Description of Artificial Sequence: Synthetic primer
tggcctataggtaagtcctagcaaataggtattgttaaaa

SEQ ID NO: 9704 - DNA, 40 bp, Artificial Sequence
  Description of Artificial Sequence: Synthetic primer
gagtgactttgagctcagagctgtcagtgagtgctccctg

SEQ ID NO: 9705 - DNA, 40 bp, Artificial Sequence
  Description of Artificial Sequence: Synthetic primer
gtgtgtgtcccagcccaggtgtaacaggcagcggacttgg

SEQ ID NO: 9706 - DNA, 40 bp, Artificial Sequence
  Description of Artificial Sequence: Synthetic primer
aatggaacatattcagagaggttcagttttaatgcctgtg

SEQ ID NO: 9707 - DNA, 40 bp, Artificial Sequence
  Description of Artificial Sequence: Synthetic primer
atttaagacataaacaaagaattgtaatgttcaaacaaca

SEQ ID NO: 9708 - DNA, 40 bp, Artificial Sequence
  Description of Artificial Sequence: Synthetic primer
ttaatcagtaactgatgcatggcagttctattaaaggata

SEQ ID NO: 9709 - DNA, 40 bp, Artificial Sequence
  Description of Artificial Sequence: Synthetic primer
ttttcgtttttggatggttggtgatttgtttgcttctccg

SEQ ID NO: 9710 - DNA, 40 bp, Artificial Sequence
  Description of Artificial Sequence: Synthetic primer
tgtttgtaaggtttgagatttcagaattattcactttttg

SEQ ID NO: 9711 - DNA, 40 bp, Artificial Sequence
  Description of Artificial Sequence: Synthetic primer
aacatccattatattaagaaaaggcagagtcccaaatccc

SEQ ID NO: 9712 - DNA, 40 bp, Artificial Sequence
  Description of Artificial Sequence: Synthetic primer
ttttccaaacattttttaatcccaaatgattactgatgtc

SEQ ID NO: 9713 - DNA, 40 bp, Artificial Sequence
  Description of Artificial Sequence: Synthetic primer
tactgaatgctttagggttattcagccttctctatttttg

SEQ ID NO: 9714 - DNA, 40 bp, Artificial Sequence
  Description of Artificial Sequence: Synthetic primer
ctaaatctccacctgatatcaccaacttgaagtcctaatg

SEQ ID NO: 9715 - DNA, 40 bp, Artificial Sequence
  Description of Artificial Sequence: Synthetic primer
ctgcactgaagttggttcttctcacccagtgcaggctcag

SEQ ID NO: 9716 - DNA, 40 bp, Artificial Sequence
  Description of Artificial Sequence: Synthetic primer
tgcttttaggagctccgtccgacagaacggttgggccttg

SEQ ID NO: 9717 - DNA, 40 bp, Artificial Sequence
  Description of Artificial Sequence: Synthetic primer
gccgggttccaagcgccccgccgctatgcccccgccttcg

SEQ ID NO: 9718 - DNA, 40 bp, Artificial Sequence
  Description of Artificial Sequence: Synthetic primer
tcttatttcttaaagccttccttctcatcctccataaacg

SEQ ID NO: 9719 - DNA, 40 bp, Artificial Sequence
  Description of Artificial Sequence: Synthetic primer
gaagacgcgcgccccgcagcccaccgtccctcctacacac

SEQ ID NO: 9720 - DNA, 40 bp, Artificial Sequence
  Description of Artificial Sequence: Synthetic primer
tggcgcccaccagcggccgccctccggggcccgcgtgggc

SEQ ID NO: 9721 - DNA, 40 bp, Artificial Sequence
  Description of Artificial Sequence: Synthetic primer
gtcgtcatggcaatcacgtgccttctctggttcattttgc

SEQ ID NO: 9722 - DNA, 40 bp, Artificial Sequence
  Description of Artificial Sequence: Synthetic primer
cgtggaggtgacagaggagctcaattttcccgagctgacc

SEQ ID NO: 9723 - DNA, 40 bp, Artificial Sequence
  Description of Artificial Sequence: Synthetic primer
ctgacagctccgaggaactttctcccacggccaagtttac

SEQ ID NO: 9724 - DNA, 40 bp, Artificial Sequence
  Description of Artificial Sequence: Synthetic primer
aatattaaatgtggatattagcttcttggaacaactgaag

SEQ ID NO: 9725 - DNA, 40 bp, Artificial Sequence
  Description of Artificial Sequence: Synthetic primer
gggaagatgttatcaatgcctccaggaaagctcacctttc

SEQ ID NO: 9726 - DNA, 40 bp, Artificial Sequence
  Description of Artificial Sequence: Synthetic primer
tgctgtccgctcggggacggcaaaggagcaacctgagctg

SEQ ID NO: 9727 - DNA, 40 bp, Artificial Sequence
  Description of Artificial Sequence: Synthetic primer
tggccaccgcccacctgcgcttcgtctccagcgtcagttc

SEQ ID NO: 9728 - DNA, 40 bp, Artificial Sequence
  Description of Artificial Sequence: Synthetic primer
catcgcctttctgctgaagttcctaaagtgtctccttctg

SEQ ID NO: 9729 - DNA, 40 bp, Artificial Sequence
  Description of Artificial Sequence: Synthetic primer
gagtggctctagcctgcgcctgtgataggacgacgtggag

SEQ ID NO: 9730 - DNA, 40 bp, Artificial Sequence
  Description of Artificial Sequence: Synthetic primer
agctgcctacatctgaaaccagaacccggagaagctacag

SEQ ID NO: 9731 - DNA, 40 bp, Artificial Sequence
  Description of Artificial Sequence: Synthetic primer
ttctttgctcactttcactcactctctttttcatttctcc

SEQ ID NO: 9732 - DNA, 40 bp, Artificial Sequence
  Description of Artificial Sequence: Synthetic primer
tgtggcagcaggaccaccctgtgacacggctccttttctg

SEQ ID NO: 9733 - DNA, 40 bp, Artificial Sequence
  Description of Artificial Sequence: Synthetic primer
atgcatccacccgccccacctcgccctgccacccgcttac

SEQ ID NO: 9734 - DNA, 40 bp, Artificial Sequence
  Description of Artificial Sequence: Synthetic primer
tagcggtgatcctggtcatcacataaatgactctctttcc

SEQ ID NO: 9735 - DNA, 40 bp, Artificial Sequence
  Description of Artificial Sequence: Synthetic primer
tcttaagtgtcagtgcaataaagttttgtctctaccttag

SEQ ID NO: 9736 - DNA, 40 bp, Artificial Sequence
  Description of Artificial Sequence: Synthetic primer
aatataatgaaagacttctctatcaaaggtaaatgggaag

SEQ ID NO: 9737 - DNA, 40 bp, Artificial Sequence
  Description of Artificial Sequence: Synthetic primer
taagtaaccaaattttccctgggtttacctttttctttag

SEQ ID NO: 9738 - DNA, 40 bp, Artificial Sequence
  Description of Artificial Sequence: Synthetic primer
ggtttactagtttattatctactcacccatgtggcttaac

SEQ ID NO: 9739 - DNA, 40 bp, Artificial Sequence
  Description of Artificial Sequence: Synthetic primer
aatatttccatagaaagaatacaataaaacataaaaatac

SEQ ID NO: 9740 - DNA, 40 bp, Artificial Sequence
  Description of Artificial Sequence: Synthetic primer
agtaataatgaataaataaataataatgataaagaatcac

SEQ ID NO: 9741 - DNA, 40 bp, Artificial Sequence
  Description of Artificial Sequence: Synthetic primer
tagttcctggaaaatggcatattataattttggaactcac

SEQ ID NO: 9742 - DNA, 40 bp, Artificial Sequence
  Description of Artificial Sequence: Synthetic primer
ctcacagcgagagtcctgtcttccctgcctgtgggtctgg

SEQ ID NO: 9743 - DNA, 40 bp, Artificial Sequence
  Description of Artificial Sequence: Synthetic primer
gaagggctggagtgatgggatcatgaggaaatgttcaaag

SEQ ID NO: 9744 - DNA, 40 bp, Artificial Sequence
  Description of Artificial Sequence: Synthetic primer
gctggatgaagcttggcctcagccccacacccaccctgag

SEQ ID NO: 9745 - DNA, 40 bp, Artificial Sequence
  Description of Artificial Sequence: Synthetic primer
gcccctcccttgtgacctgagggcaggtccccactctgtc

SEQ ID NO: 9746 - DNA, 40 bp, Artificial Sequence
  Description of Artificial Sequence: Synthetic primer
tccggcccgggtgggccgaagtctgaccctttttgtctcc

SEQ ID NO: 9747 - DNA, 40 bp, Artificial Sequence
  Description of Artificial Sequence: Synthetic primer
ttacaggccttcggctccacctggtccaccgccagtctcc

SEQ ID NO: 9748 - DNA, 40 bp, Artificial Sequence
  Description of Artificial Sequence: Synthetic primer
cccaactcagtcctgtccctgccgcttccatccaggcact

SEQ ID NO: 9749 - DNA, 40 bp, Artificial Sequence
  Description of Artificial Sequence: Synthetic primer
gacggggcccagagccaggggccggggccagcgctgaggc

SEQ ID NO: 9750 - DNA, 40 bp, Artificial Sequence
  Description of Artificial Sequence: Synthetic primer
ttaatatgaatgaaatttgaaattttctaagagatttttg

SEQ ID NO: 9751 - DNA, 40 bp, Artificial Sequence
  Description of Artificial Sequence: Synthetic primer
aatatataaactttgcaacaagaaaataaaattagtaaaa

SEQ ID NO: 9752 - DNA, 40 bp, Artificial Sequence
  Description of Artificial Sequence: Synthetic primer
gactggccgtggtcaaaaataacttgccctttctcccttc

SEQ ID NO: 9753 - DNA, 40 bp, Artificial Sequence
  Description of Artificial Sequence: Synthetic primer
gtggaaagggagatgcaactggcggcttcagagtgtgagg

SEQ ID NO: 9754 - DNA, 40 bp, Artificial Sequence
  Description of Artificial Sequence: Synthetic primer
tctccatgcactgtgaccttactcactgtctccttctctg

SEQ ID NO: 9755 - DNA, 40 bp, Artificial Sequence
  Description of Artificial Sequence: Synthetic primer
agctttgtttgatgagatgcacgtgctgtaacgtggtgtg

SEQ ID NO: 9756 - DNA, 40 bp, Artificial Sequence
  Description of Artificial Sequence: Synthetic primer
atttagaattcatttgctatgctctaggttaatatttatg

SEQ ID NO: 9757 - DNA, 40 bp, Artificial Sequence
  Description of Artificial Sequence: Synthetic primer
taattttaaaattacattaactgagtcttccttcttgttc

SEQ ID NO: 9758 - DNA, 40 bp, Artificial Sequence
  Description of Artificial Sequence: Synthetic primer
accaaggccggcagagcccaaggctgactcccaaagacac

SEQ ID NO: 9759 - DNA, 40 bp, Artificial Sequence
  Description of Artificial Sequence: Synthetic primer
gaaacttgggtgattcttgtgtttatttacaatcctcttg

SEQ ID NO: 9760 - DNA, 40 bp, Artificial Sequence
  Description of Artificial Sequence: Synthetic primer
tcaaattgtgcacatactgaggtgacaactggtctctgtc

SEQ ID NO: 9761 - DNA, 40 bp, Artificial Sequence
  Description of Artificial Sequence: Synthetic primer
gttctacacctcggaccccagccaggcgtgcctctttgtc

SEQ ID NO: 9762 - DNA, 40 bp, Artificial Sequence
  Description of Artificial Sequence: Synthetic primer
cacaccagggcaaaacagcacagtgaaagccagccacctg

SEQ ID NO: 9763 - DNA, 40 bp, Artificial Sequence
  Description of Artificial Sequence: Synthetic primer
ccatttacagaaacaaacctccccaccaaaatgagaaaac

SEQ ID NO: 9764 - DNA, 40 bp, Artificial Sequence
  Description of Artificial Sequence: Synthetic primer
cccacaggaagcctggcctgaccaatccctgcctctcaat

SEQ ID NO: 9765 - DNA, 40 bp, Artificial Sequence
  Description of Artificial Sequence: Synthetic primer
aggcctaggcccctgtagggcatggtggggcagtgacatg

SEQ ID NO: 9766 - DNA, 40 bp, Artificial Sequence
  Description of Artificial Sequence: Synthetic primer
agggtatttgaagtataccatacaactgttttgaaaatcc

SEQ ID NO: 9767 - DNA, 40 bp, Artificial Sequence
  Description of Artificial Sequence: Synthetic primer
ctggcttaatggcaacgaagcagagccccaattcagtaac

SEQ ID NO: 9768 - DNA, 40 bp, Artificial Sequence
  Description of Artificial Sequence: Synthetic primer
gagccggccctccccttctccattacctccttgcttggtg

SEQ ID NO: 9769 - DNA, 40 bp, Artificial Sequence
  Description of Artificial Sequence: Synthetic primer
agccccattgtcctgtcgccctgactcttccttgcttctc

SEQ ID NO: 9770 - DNA, 40 bp, Artificial Sequence
  Description of Artificial Sequence: Synthetic primer
ggatgggtgggcggggtcctgcttggtgctcctgtaactc

SEQ ID NO: 9771 - DNA, 40 bp, Artificial Sequence
  Description of Artificial Sequence: Synthetic primer
tcccacccagcccagccgaacctggccctgcagctattac

SEQ ID NO: 9772 - DNA, 40 bp, Artificial Sequence
  Description of Artificial Sequence: Synthetic primer
ttgttgattagttcaagctcttgcctttctctaaactttc

SEQ ID NO: 9773 - DNA, 40 bp, Artificial Sequence
  Description of Artificial Sequence: Synthetic primer
ttttcttgtttttgtctgttttatgtgctgatgggttggg

SEQ ID NO: 9774 - DNA, 40 bp, Artificial Sequence
  Description of Artificial Sequence: Synthetic primer
aggccctgcaacctcagtgtcacacgaatgactctttttc

SEQ ID NO: 9775 - DNA, 40 bp, Artificial Sequence
  Description of Artificial Sequence: Synthetic primer
gaacaaggcccaccgaggacttggatccccactgcatctg

SEQ ID NO: 9776 - DNA, 40 bp, Artificial Sequence
  Description of Artificial Sequence: Synthetic primer
ataccagtgtcctcccacattgattctatatctcatcttc

SEQ ID NO: 9777 - DNA, 40 bp, Artificial Sequence
  Description of Artificial Sequence: Synthetic primer
ggaggtggttaagggtgcaagaatatgaaaataaatgatc

SEQ ID NO: 9778 - DNA, 40 bp, Artificial Sequence
  Description of Artificial Sequence: Synthetic primer
atatgcaaatgggtgaatttttaagcatattattttcctc

SEQ ID NO: 9779 - DNA, 40 bp, Artificial Sequence
  Description of Artificial Sequence: Synthetic primer
tgactcagcacagaccaataatacatgcagcttttaactg

SEQ ID NO: 9780 - DNA, 40 bp, Artificial Sequence
  Description of Artificial Sequence: Synthetic primer
taaacattcaaccataacaacgtattatattcttggtaac

SEQ ID NO: 9781 - DNA, 40 bp, Artificial Sequence
  Description of Artificial Sequence: Synthetic primer
catttggctgatgtgattaatggatatcactcttccttgc

SEQ ID NO: 9782 - DNA, 40 bp, Artificial Sequence
  Description of Artificial Sequence: Synthetic primer
cttctccttttcccttgttatcaagcaaatggggcctggc

SEQ ID NO: 9783 - DNA, 40 bp, Artificial Sequence
  Description of Artificial Sequence: Synthetic primer
gcctgagctgagcagtgcagtgatgatgagtgacctctgc

SEQ ID NO: 9784 - DNA, 40 bp, Artificial Sequence
  Description of Artificial Sequence: Synthetic primer
ggaaaagccaatagaaaagggatattgcacctacttgtgg

SEQ ID NO: 9785 - DNA, 40 bp, Artificial Sequence
  Description of Artificial Sequence: Synthetic primer
gaaaaaaaagccccaaccacacaccagcggctgcaggact

SEQ ID NO: 9786 - DNA, 40 bp, Artificial Sequence
  Description of Artificial Sequence: Synthetic primer
aaataagcactttactaacaacaggattctcagggaatgg

SEQ ID NO: 9787 - DNA, 40 bp, Artificial Sequence
  Description of Artificial Sequence: Synthetic primer
gtagagtcggggaaagggagagaggacaaggagaggattc

SEQ ID NO: 9788 - DNA, 40 bp, Artificial Sequence
  Description of Artificial Sequence: Synthetic primer
aacagttagcagaggcagcagcactaggttaaagaaagag

SEQ ID NO: 9789 - DNA, 40 bp, Artificial Sequence
  Description of Artificial Sequence: Synthetic primer
atgatgctgagcttggctcatacctgtgctttgctttcag

SEQ ID NO: 9790 - DNA, 40 bp, Artificial Sequence
  Description of Artificial Sequence: Synthetic primer
cacctcctcacccaccttactcatccacgacttgcgtttg

SEQ ID NO: 9791 - DNA, 40 bp, Artificial Sequence
  Description of Artificial Sequence: Synthetic primer
cctctctcgggctacggcggccttcacagcacgcggttcc

SEQ ID NO: 9792 - DNA, 40 bp, Artificial Sequence
  Description of Artificial Sequence: Synthetic primer
cctgttagttattcaggactaacaagttttcctcccaatc

SEQ ID NO: 9793 - DNA, 40 bp, Artificial Sequence
  Description of Artificial Sequence: Synthetic primer
ttgttaaaatgataccatatctgtaagacactgctaaagc

SEQ ID NO: 9794 - DNA, 40 bp, Artificial Sequence
  Description of Artificial Sequence: Synthetic primer
ggagtgatactgtttcagtggtttcttgacctttttgttg

SEQ ID NO: 9795 - DNA, 40 bp, Artificial Sequence
  Description of Artificial Sequence: Synthetic primer
gcttattctctaagagctcctgcaaaccacagtattttac

SEQ ID NO: 9796 - DNA, 40 bp, Artificial Sequence
  Description of Artificial Sequence: Synthetic primer
agggagaggtgaaggcccagatgtggagggctccaaggac

SEQ ID NO: 9797 - DNA, 40 bp, Artificial Sequence
  Description of Artificial Sequence: Synthetic primer
gagcggtgcagcttcctggtaggccaggagctaatggatc

SEQ ID NO: 9798 - DNA, 40 bp, Artificial Sequence
  Description of Artificial Sequence: Synthetic primer
atttgctgagctcaacagacacttcacagaacagaaaaag

SEQ ID NO: 9799 - DNA, 40 bp, Artificial Sequence
  Description of Artificial Sequence: Synthetic primer
agagacattttctcttagttgtcctttgccccaccctgtg

SEQ ID NO: 9800 - DNA, 40 bp, Artificial Sequence
  Description of Artificial Sequence: Synthetic primer
aaatctaaacatttttgacatttcaaaaaaaaatgtaaag

SEQ ID NO: 9801 - DNA, 40 bp, Artificial Sequence
  Description of Artificial Sequence: Synthetic primer
taggtgtaataaccaagaaaggcttgtgtctacatttttc

SEQ ID NO: 9802 - DNA, 40 bp, Artificial Sequence
  Description of Artificial Sequence: Synthetic primer
cctttccaacaagggtgccaagcgccggtcttgaacgaag

SEQ ID NO: 9803 - DNA, 40 bp, Artificial Sequence
  Description of Artificial Sequence: Synthetic primer
cttttcttctggagactaacatgggctggttcccccttcc

SEQ ID NO: 9804 - DNA, 40 bp, Artificial Sequence
  Description of Artificial Sequence: Synthetic primer
catgcctcgtcccacgggacaccagttccctggcgtgtgc

SEQ ID NO: 9805 - DNA, 40 bp, Artificial Sequence
  Description of Artificial Sequence: Synthetic primer
gcaaagtccccgaagagatcctatgaatggcgcgtcacac

SEQ ID NO: 9806 - DNA, 40 bp, Artificial Sequence
  Description of Artificial Sequence: Synthetic primer
tatttgttaacaaatgtggttagtgcaatgagttccctga

SEQ ID NO: 9807 - DNA, 40 bp, Artificial Sequence
  Description of Artificial Sequence: Synthetic primer
ggatgagccaagcaggcactaatctctagctatgctcctg

SEQ ID NO: 9808 - DNA, 40 bp, Artificial Sequence
  Description of Artificial Sequence: Synthetic primer
aaatttctttaaactctttatctactttctgttacctgtc

SEQ ID NO: 9809 - DNA, 40 bp, Artificial Sequence
  Description of Artificial Sequence: Synthetic primer
tgctaactctatggcctgcttatctgttcctcctcctgtg

SEQ ID NO: 9810 - DNA, 40 bp, Artificial Sequence
  Description of Artificial Sequence: Synthetic primer
aaaagtttctgaacaagaatctacaggaatagccacatac

SEQ ID NO: 9811 - DNA, 40 bp, Artificial Sequence
  Description of Artificial Sequence: Synthetic primer
tatctactgcatgaatctgagggtcatgcctgcctttctg

SEQ ID NO: 9812 - DNA, 40 bp, Artificial Sequence
  Description of Artificial Sequence: Synthetic primer
gtaaactgctttggatagattacactctttttaattttat

SEQ ID NO: 9813 - DNA, 40 bp, Artificial Sequence
  Description of Artificial Sequence: Synthetic primer
aagatgattatttactatagaattgtttacggtatgtctc

SEQ ID NO: 9814 - DNA, 40 bp, Artificial Sequence
  Description of Artificial Sequence: Synthetic primer
taatctttttatttatttatttatttttgctatgttttca

SEQ ID NO: 9815 - DNA, 40 bp, Artificial Sequence
  Description of Artificial Sequence: Synthetic primer
aataaacatttcatccagcattgagttatcttgtgttatc

SEQ ID NO: 9816 - DNA, 40 bp, Artificial Sequence
  Description of Artificial Sequence: Synthetic primer
tgttatggacctttgcgtttatgcctccctagaagttttt

SEQ ID NO: 9817 - DNA, 40 bp, Artificial Sequence
  Description of Artificial Sequence: Synthetic primer
caaaaacataatgcatcaaggacacaatccctttttctgg

SEQ ID NO: 9818 - DNA, 40 bp, Artificial Sequence
  Description of Artificial Sequence: Synthetic primer
tctctacgaggagttttaattctgttacttaaccaagcac

SEQ ID NO: 9819 - DNA, 40 bp, Artificial Sequence
  Description of Artificial Sequence: Synthetic primer
aacagatgtgaaagagatcagctgtgccgagacctaatgc

SEQ ID NO: 9820 - DNA, 40 bp, Artificial Sequence
  Description of Artificial Sequence: Synthetic primer
tagattatcagttaactatctgtatttgttcttgaaattg

SEQ ID NO: 9821 - DNA, 40 bp, Artificial Sequence
  Description of Artificial Sequence: Synthetic primer
ataaaagttatctgtaattattattattgttgtcactatc

SEQ ID NO: 9822 - DNA, 40 bp, Artificial Sequence
  Description of Artificial Sequence: Synthetic primer
ccaaataatgatgccactaagcagcacatctaaaataatc

SEQ ID NO: 9823 - DNA, 40 bp, Artificial Sequence
  Description of Artificial Sequence: Synthetic primer
gtgagagagagatcctgcttactgaaacatgaaaaccttg

SEQ ID NO: 9824 - DNA, 40 bp, Artificial Sequence
  Description of Artificial Sequence: Synthetic primer
ccctcaggacagttttgaactggttgctttctttttattg

SEQ ID NO: 9825 - DNA, 40 bp, Artificial Sequence
  Description of Artificial Sequence: Synthetic primer
tagaacatctgttccttgtgagtcttggttgaggagtttg

SEQ ID NO: 9826 - DNA, 40 bp, Artificial Sequence
  Description of Artificial Sequence: Synthetic primer
ctatacggttgaagacttcctatggcaataaacagctgac

SEQ ID NO: 9827 - DNA, 40 bp, Artificial Sequence
  Description of Artificial Sequence: Synthetic primer
aactgcatttgtctgatcccactttcaatctttgatacag

SEQ ID NO: 9828 - DNA, 40 bp, Artificial Sequence
  Description of Artificial Sequence: Synthetic primer
tgttttccaaagttctgtatactaaaaatctctttttctc

SEQ ID NO: 9829 - DNA, 40 bp, Artificial Sequence
  Description of Artificial Sequence: Synthetic primer
tcacattattcatacaaactacatattttagacaaaggac

SEQ ID NO: 9830 - DNA, 40 bp, Artificial Sequence
  Description of Artificial Sequence: Synthetic primer
cctcgaggtcccaggtcccagtcggtgatgaaaaatgatg

SEQ ID NO: 9831 - DNA, 40 bp, Artificial Sequence
  Description of Artificial Sequence: Synthetic primer
ccgccttccctcctgtcagcgcatctctccaatctgactc

SEQ ID NO: 9832 - DNA, 40 bp, Artificial Sequence
  Description of Artificial Sequence: Synthetic primer
agttctgcagaaatagcacctgatcctgatttctgtctcc

SEQ ID NO: 9833 - DNA, 40 bp, Artificial Sequence
  Description of Artificial Sequence: Synthetic primer
ttaaaagaagagaaaagaaaaagaagagcaggagatagtg

SEQ ID NO: 9834 - DNA, 40 bp, Artificial Sequence
  Description of Artificial Sequence: Synthetic primer
tcttcctgtctcctcctttctttctccctatttctgtttg

SEQ ID NO: 9835 - DNA, 40 bp, Artificial Sequence
  Description of Artificial Sequence: Synthetic primer
ggcccctagtgctttttggctggcgtgtgggttcccaagg

SEQ ID NO: 9836 - DNA, 40 bp, Artificial Sequence
  Description of Artificial Sequence: Synthetic primer
ctgaggggcccatctcgcctgcactgaccaacgccctctg

SEQ ID NO: 9837 - DNA, 40 bp, Artificial Sequence
  Description of Artificial Sequence: Synthetic primer
gtgtgcatgtgtgtagggtgctgcttgcccatgaagagcg

SEQ ID NO: 9838 - DNA, 40 bp, Artificial Sequence
  Description of Artificial Sequence: Synthetic primer
taaacagtggaattctagagtcacacttcctaaaatatgc

SEQ ID NO: 9839 - DNA, 40 bp, Artificial Sequence
  Description of Artificial Sequence: Synthetic primer
ttctagaatttaactgaatcaatgactgatttttaccaag

SEQ ID NO: 9840 - DNA, 40 bp, Artificial Sequence
  Description of Artificial Sequence: Synthetic primer
tggcaattacctacctgttctgtagtttaaattatgtttc

SEQ ID NO: 9841 - DNA, 40 bp, Artificial Sequence
  Description of Artificial Sequence: Synthetic primer
gatgacaaataatgtcatcattatttgtcacataatgttc

SEQ ID NO: 9842 - DNA, 40 bp, Artificial Sequence
  Description of Artificial Sequence: Synthetic primer
agacaggtagaacttgagggaaatccaaagctggccaatg

SEQ ID NO: 9843 - DNA, 40 bp, Artificial Sequence
  Description of Artificial Sequence: Synthetic primer
agctggtcttagttggcttttttcccacatgtgtctttcc

SEQ ID NO: 9844 - DNA, 40 bp, Artificial Sequence
  Description of Artificial Sequence: Synthetic primer
tatattgccatctttacgaaccaacccatgctttaatcac

SEQ ID NO: 9845 - DNA, 40 bp, Artificial Sequence
  Description of Artificial Sequence: Synthetic primer
cagcctaagcagctagagggttaggacttgttattatctg

SEQ ID NO: 9846 - DNA, 40 bp, Artificial Sequence
  Description of Artificial Sequence: Synthetic primer
ccctggtggcgggaggtcctcagccctcaccggcctgtcc

SEQ ID NO: 9847 - DNA, 40 bp, Artificial Sequence
  Description of Artificial Sequence: Synthetic primer
ggggcctcagagaaccagccgggttagggtgagggcaggg

SEQ ID NO: 9848 - DNA, 40 bp, Artificial Sequence
  Description of Artificial Sequence: Synthetic primer
cttccttccctccctgggccctcagccagccctcctcctg

SEQ ID NO: 9849 - DNA, 40 bp, Artificial Sequence
  Description of Artificial Sequence: Synthetic primer
ggactgatttgctgccctcctctttgtccccatcctacag

SEQ ID NO: 9850 - DNA, 40 bp, Artificial Sequence
  Description of Artificial Sequence: Synthetic primer
cgcggcgctctcccggcgctgctgcctcggcttggtctcg

SEQ ID NO: 9851 - DNA, 40 bp, Artificial Sequence
  Description of Artificial Sequence: Synthetic primer
gcggccggcaccagcagccaacttgctccgtggagggtac

SEQ ID NO: 9852 - DNA, 40 bp, Artificial Sequence
  Description of Artificial Sequence: Synthetic primer
ggttggagtccatatgcccagctcaccctctcctttcttg

SEQ ID NO: 9853 - DNA, 40 bp, Artificial Sequence
  Description of Artificial Sequence: Synthetic primer
aatatcagtgtaaccttcatccaaatgcctgcccacgatg

SEQ ID NO: 9854 - DNA, 40 bp, Artificial Sequence
  Description of Artificial Sequence: Synthetic primer
tcttttgagcctgccccactgagcactctccttttctttc

SEQ ID NO: 9855 - DNA, 40 bp, Artificial Sequence
  Description of Artificial Sequence: Synthetic primer
cctcccctgcccatgcccaacccttcctaccaacagcagc

SEQ ID NO: 9856 - DNA, 40 bp, Artificial Sequence
  Description of Artificial Sequence: Synthetic primer
tatagaagatttatatattctctttgttgctgtgacttcc

SEQ ID NO: 9857 - DNA, 40 bp, Artificial Sequence
  Description of Artificial Sequence: Synthetic primer
gaaagaagattaaattctgagatcctagcctgtcacttac

SEQ ID NO: 9858 - DNA, 40 bp, Artificial Sequence
  Description of Artificial Sequence: Synthetic primer
cagctaacaatagcaacgagctacataacaaaaactaagc

SEQ ID NO: 9859 - DNA, 40 bp, Artificial Sequence
  Description of Artificial Sequence: Synthetic primer
acactaatttcttacaaatgtatattttattttctttcag

SEQ ID NO: 9860 - DNA, 40 bp, Artificial Sequence
  Description of Artificial Sequence: Synthetic primer
atctcccaggcctgactgtagatggagaagtggccctcac

SEQ ID NO: 9861 - DNA, 40 bp, Artificial Sequence
  Description of Artificial Sequence: Synthetic primer
taaggttctggatgcccatccccaccctgctgggctacag

SEQ ID NO: 9862 - DNA, 40 bp, Artificial Sequence
  Description of Artificial Sequence: Synthetic primer
gccattggcctagtcttaaaggcataagtcaaatgtactc

SEQ ID NO: 9863 - DNA, 40 bp, Artificial Sequence
  Description of Artificial Sequence: Synthetic primer
aaatttcaactcctttctagttacgaatatagtgacattt

SEQ ID NO: 9864 - DNA, 40 bp, Artificial Sequence
  Description of Artificial Sequence: Synthetic primer
ggtctccatggagacagcctatgtatatgttttcccctca

SEQ ID NO: 9865 - DNA, 40 bp, Artificial Sequence
  Description of Artificial Sequence: Synthetic primer
ggctccaagaagcagctgcaaggggcgtggccgcagtggc

SEQ ID NO: 9866 - DNA, 40 bp, Artificial Sequence
  Description of Artificial Sequence: Synthetic primer
gcagtggaacgtctcctatcctgctcacctctacttcttc

SEQ ID NO: 9867 - DNA, 40 bp, Artificial Sequence
  Description of Artificial Sequence: Synthetic primer
ctgcccgtcaggtctcttgccttatctgactcttgttttc

SEQ ID NO: 9868 - DNA, 40 bp, Artificial Sequence
  Description of Artificial Sequence: Synthetic primer
aaggagcagatctcagccttggtttcttgtctttcacctc

SEQ ID NO: 9869 - DNA, 40 bp, Artificial Sequence
  Description of Artificial Sequence: Synthetic primer
tcctctctagagtgatccacaggaagaataaatatgaaac

SEQ ID NO: 9870 - DNA, 40 bp, Artificial Sequence
  Description of Artificial Sequence: Synthetic primer
cgcgaggcgaggtggcgtcggcggccgccgcgctggctgc

SEQ ID NO: 9871 - DNA, 40 bp, Artificial Sequence
  Description of Artificial Sequence: Synthetic primer
cgccatcggcacccgcgctccgagcaggggttgacggccg

SEQ ID NO: 9872 - DNA, 40 bp, Artificial Sequence
  Description of Artificial Sequence: Synthetic primer
tcatgattcatcttactagcctcaaacatatcttctttgc

SEQ ID NO: 9873 - DNA, 40 bp, Artificial Sequence
  Description of Artificial Sequence: Synthetic primer
gagtactaaatttgagtaatctaggaacctcaaggcaaag

SEQ ID NO: 9874 - DNA, 40 bp, Artificial Sequence
  Description of Artificial Sequence: Synthetic primer
aaagctaaagaccagaacctgggaatgcagaacccccttc

SEQ ID NO: 9875 - DNA, 40 bp, Artificial Sequence
  Description of Artificial Sequence: Synthetic primer
cagtttccccaggcacctgcccacactaacctgtatcttc

SEQ ID NO: 9876 - DNA, 40 bp, Artificial Sequence
  Description of Artificial Sequence: Synthetic primer
agcctttgcgggtgagcggccccacggagcgctcctccac

SEQ ID NO: 9877 - DNA, 40 bp, Artificial Sequence
  Description of Artificial Sequence: Synthetic primer
caccattgcgcccgatgagatcaccgtcagcagcgacttc

SEQ ID NO: 9878 - DNA, 40 bp, Artificial Sequence
  Description of Artificial Sequence: Synthetic primer
agccaggacccacagccctccccagctgcccaggaagagc

SEQ ID NO: 9879 - DNA, 40 bp, Artificial Sequence
  Description of Artificial Sequence: Synthetic primer
tgggtctgggcaacaagttgcagggaagtcttaagagagc

SEQ ID NO: 9880 - DNA, 40 bp, Artificial Sequence
  Description of Artificial Sequence: Synthetic primer
atagatagatagatagataaataaaacaaaccacacacac

SEQ ID NO: 9881 - DNA, 40 bp, Artificial Sequence
  Description of Artificial Sequence: Synthetic primer
ttaaaagagatatgattaaggaaaagttataattaatgac

SEQ ID NO: 9882 - DNA, 40 bp, Artificial Sequence
  Description of Artificial Sequence: Synthetic primer
taaatttagaagttcttgtgaaccacagatgtattaacct

SEQ ID NO: 9883 - DNA, 40 bp, Artificial Sequence
  Description of Artificial Sequence: Synthetic primer
gaatatgctaacaattttactctaagcatttattaaaaac

SEQ ID NO: 9884 - DNA, 40 bp, Artificial Sequence
  Description of Artificial Sequence: Synthetic primer
ctaagactgttttttttccttcccgtttttgtctcttcac

SEQ ID NO: 9885 - DNA, 40 bp, Artificial Sequence
  Description of Artificial Sequence: Synthetic primer
ggtatttgtgcagatcaatccaatagtgatgccccgtagg

SEQ ID NO: 9886 - DNA, 40 bp, Artificial Sequence
  Description of Artificial Sequence: Synthetic primer
agaagatgatctcatcaaacctgaggaagaggaagaggag

SEQ ID NO: 9887 - DNA, 40 bp, Artificial Sequence
  Description of Artificial Sequence: Synthetic primer
gagcttgctggggaccctgaagctgtacccgaatctgacg

SEQ ID NO: 9888 - DNA, 40 bp, Artificial Sequence
  Description of Artificial Sequence: Synthetic primer
caaatcagcccagatcaaagtgccatctcagtgccatctc

SEQ ID NO: 9889 - DNA, 40 bp, Artificial Sequence
  Description of Artificial Sequence: Synthetic primer
acttcaccccacccatgcagctggctgaaatccccgagac

SEQ ID NO: 9890 - DNA, 40 bp, Artificial Sequence
  Description of Artificial Sequence: Synthetic primer
agcaagggccacatctccatgagaaccaagtcagcgtctc

SEQ ID NO: 9891 - DNA, 40 bp, Artificial Sequence
  Description of Artificial Sequence: Synthetic primer
ggatctttttctacatttcctcctccttcttcttcttccc

SEQ ID NO: 9892 - DNA, 40 bp, Artificial Sequence
  Description of Artificial Sequence: Synthetic primer
gaactctgtatcgacttccttgctgttcttttggtcctgc

SEQ ID NO: 9893 - DNA, 40 bp, Artificial Sequence
  Description of Artificial Sequence: Synthetic primer
aatccactgtctacgacttgctgtgaatgatctgaaactg

SEQ ID NO: 9894 - DNA, 40 bp, Artificial Sequence
  Description of Artificial Sequence: Synthetic primer
gcgggtaatgcccagccccaaaatcactctgacccattcg

SEQ ID NO: 9895 - DNA, 40 bp, Artificial Sequence
  Description of Artificial Sequence: Synthetic primer
tggctacagtctgggagcgcccatagatttgtgactgatg

SEQ ID NO: 9896 - DNA, 40 bp, Artificial Sequence
  Description of Artificial Sequence: Synthetic primer
ggtattaagaagggtttacgtgcatattttctggcttacg

SEQ ID NO: 9897 - DNA, 40 bp, Artificial Sequence
  Description of Artificial Sequence: Synthetic primer
caatttaccataatattctgagacaggagtggaataacac

SEQ ID NO: 9898 - DNA, 40 bp, Artificial Sequence
  Description of Artificial Sequence: Synthetic primer
catgtaaatttccttgcattattttctgtttattttcttc

SEQ ID NO: 9899 - DNA, 40 bp, Artificial Sequence
  Description of Artificial Sequence: Synthetic primer
ccggggaaagaattcgaggaaaaattgaggaaagccctag

SEQ ID NO: 9900 - DNA, 40 bp, Artificial Sequence
  Description of Artificial Sequence: Synthetic primer
gcaaaattaatcgacctgtttataatttctggttttcttg

SEQ ID NO: 9901 - DNA, 40 bp, Artificial Sequence
  Description of Artificial Sequence: Synthetic primer
accggagggtggcagagcgagaagcagccttcagtatggc

SEQ ID NO: 9902 - DNA, 40 bp, Artificial Sequence
  Description of Artificial Sequence: Synthetic primer
gcagggaggtgggtggcagcggcccctcctctgcttagtg

SEQ ID NO: 9903 - DNA, 40 bp, Artificial Sequence
  Description of Artificial Sequence: Synthetic primer
acttccccatgtgttgggagctgtccttcccctgcacctg

SEQ ID NO: 9904 - DNA, 40 bp, Artificial Sequence
  Description of Artificial Sequence: Synthetic primer
aggaacaagctaccttttgagagaagtgccgaggcaaagg

SEQ ID NO: 9905 - DNA, 40 bp, Artificial Sequence
  Description of Artificial Sequence: Synthetic primer
acgcccagagcccctaaccggggccacgggccacacgtcc

SEQ ID NO: 9906 - DNA, 40 bp, Artificial Sequence
  Description of Artificial Sequence: Synthetic primer
aaggttaccaagcagtggaattggccagttgcctaaaaag

SEQ ID NO: 9907 - DNA, 40 bp, Artificial Sequence
  Description of Artificial Sequence: Synthetic primer
aacttgccttcttcaaatattctgagggctgtttttaatg

SEQ ID NO: 9908 - DNA, 40 bp, Artificial Sequence
  Description of Artificial Sequence: Synthetic primer
atatcgtctacacaattggacaaattcatcttttctgctc

SEQ ID NO: 9909 - DNA, 40 bp, Artificial Sequence
  Description of Artificial Sequence: Synthetic primer
attatttctaaccagtaattaaattcttttggtttttgtc

SEQ ID NO: 9910 - DNA, 40 bp, Artificial Sequence
  Description of Artificial Sequence: Synthetic primer
ctgaacacttgatcacatgccaccctgccccaccccagtc

SEQ ID NO: 9911 - DNA, 40 bp, Artificial Sequence
  Description of Artificial Sequence: Synthetic primer
gaggaaggattaatttaaagttctcttctcttccttctcc

SEQ ID NO: 9912 - DNA, 40 bp, Artificial Sequence
  Description of Artificial Sequence: Synthetic primer
tctgtgttgttagggatcagggtcgctgctcacgctcttg

SEQ ID NO: 9913 - DNA, 40 bp, Artificial Sequence
  Description of Artificial Sequence: Synthetic primer
ttctctataaacagtgcagaccagggcctcctgggcaagc

SEQ ID NO: 9914 - DNA, 40 bp, Artificial Sequence
  Description of Artificial Sequence: Synthetic primer
aggaatgttaacatagacttttgtatgtttatatatatcc

SEQ ID NO: 9915 - DNA, 40 bp, Artificial Sequence
  Description of Artificial Sequence: Synthetic primer
cctttgtatacaatcattggcatttgaaacaaaaaattgc

SEQ ID NO: 9916 - DNA, 40 bp, Artificial Sequence
  Description of Artificial Sequence: Synthetic primer
taactatgcttcagtgaaagggtttttcaatatatatcac

SEQ ID NO: 9917 - DNA, 40 bp, Artificial Sequence
  Description of Artificial Sequence: Synthetic primer
aatgctttgctaaatgtgaccagctaattggtgttttacc

SEQ ID NO: 9918 - DNA, 40 bp, Artificial Sequence
  Description of Artificial Sequence: Synthetic primer
tcattctgtttctcaagtaactgtttttcatcactttttg

SEQ ID NO: 9919 - DNA, 40 bp, Artificial Sequence
  Description of Artificial Sequence: Synthetic primer
ggggtgcaatgcagccagagagcaccgaaaaggtcacgag

SEQ ID NO: 9920 - DNA, 40 bp, Artificial Sequence
  Description of Artificial Sequence: Synthetic primer
ccctatacctacagggaatgtactaccttgaggaacatgg

SEQ ID NO: 9921 - DNA, 40 bp, Artificial Sequence
  Description of Artificial Sequence: Synthetic primer
gcctccttaccctttgtgtctcctcaccttggcctcactg

SEQ ID NO: 9922 - DNA, 40 bp, Artificial Sequence
  Description of Artificial Sequence: Synthetic primer
acattttatttactgtattacaaaaaatcactgtaaagac

SEQ ID NO: 9923 - DNA, 40 bp, Artificial Sequence
  Description of Artificial Sequence: Synthetic primer
ggcctggccgcctccagctctctcccgctcaagtctaagg

SEQ ID NO: 9924 - DNA, 40 bp, Artificial Sequence
  Description of Artificial Sequence: Synthetic primer
gaattaatccccatgtaaggccatctcattgttgatcttc

SEQ ID NO: 9925 - DNA, 40 bp, Artificial Sequence
  Description of Artificial Sequence: Synthetic primer
tttcccgtttcctttcagttcaatttcttgtcttcttgtg

SEQ ID NO: 9926 - DNA, 40 bp, Artificial Sequence
  Description of Artificial Sequence: Synthetic primer
cagatgctccaggacaaaggccctgcccagcccacctcac

SEQ ID NO: 9927 - DNA, 40 bp, Artificial Sequence
  Description of Artificial Sequence: Synthetic primer
agcccactcgcacctgaatactcttaattcaggccagttg

SEQ ID NO: 9928 - DNA, 40 bp, Artificial Sequence
  Description of Artificial Sequence: Synthetic primer
tcctatggaagatctttggttctgaagtgatttgtttctc

SEQ ID NO: 9929 - DNA, 40 bp, Artificial Sequence
  Description of Artificial Sequence: Synthetic primer
tgtaaagataaatcatgattaataatttaagaataaaatt

SEQ ID NO: 9930 - DNA, 40 bp, Artificial Sequence
  Description of Artificial Sequence: Synthetic primer
ttaataactttcttaatactgttacctttaattcctgtac

SEQ ID NO: 9931 - DNA, 40 bp, Artificial Sequence
  Description of Artificial Sequence: Synthetic primer
tccccgctgggcgctaggcacgctcaagggacccctcctc

SEQ ID NO: 9932 - DNA, 40 bp, Artificial Sequence
  Description of Artificial Sequence: Synthetic primer
ctgccactctcccgcgctctcctagctccctgcgaagcag

SEQ ID NO: 9933 - DNA, 40 bp, Artificial Sequence
  Description of Artificial Sequence: Synthetic primer
aaatataaggctatcctaatatgtgttaaattctttgttc

SEQ ID NO: 9934 - DNA, 40 bp, Artificial Sequence
  Description of Artificial Sequence: Synthetic primer
acatatagactgatatcaaatccttatgaaaatagactgt

SEQ ID NO: 9935 - DNA, 40 bp, Artificial Sequence
  Description of Artificial Sequence: Synthetic primer
tgcatttgattgatgtaacatggactatttattattttct

SEQ ID NO: 9936 - DNA, 40 bp, Artificial Sequence
  Description of Artificial Sequence: Synthetic primer
aagagcccatcctcacactaaaatttcccatgactacatg

SEQ ID NO: 9937 - DNA, 40 bp, Artificial Sequence
  Description of Artificial Sequence: Synthetic primer
cctctcgactcctctgttgaatgtgtctgtctctaactgc

SEQ ID NO: 9938 - DNA, 40 bp, Artificial Sequence
  Description of Artificial Sequence: Synthetic primer
agcatcccgccagctccctcaggcacccacacaccttgtg

SEQ ID NO: 9939 - DNA, 40 bp, Artificial Sequence
  Description of Artificial Sequence: Synthetic primer
tggtcactaaaccttaagatgagcattgttttgtgttttc

SEQ ID NO: 9940 - DNA, 40 bp, Artificial Sequence
  Description of Artificial Sequence: Synthetic primer
tttaatatcagcccaaaaccctaatttcagctatattccc

SEQ ID NO: 9941 - DNA, 40 bp, Artificial Sequence
  Description of Artificial Sequence: Synthetic primer
caaaatttgtatctatccaagttttaggagattcagaagg

SEQ ID NO: 9942 - DNA, 40 bp, Artificial Sequence
  Description of Artificial Sequence: Synthetic primer
ccactcccctttgctctttgccattaacttggatttcttg

SEQ ID NO: 9943 - DNA, 40 bp, Artificial Sequence
  Description of Artificial Sequence: Synthetic primer
cagttgtacaatctcctgggaggtccatgacctctgcttg

SEQ ID NO: 9944 - DNA, 40 bp, Artificial Sequence
  Description of Artificial Sequence: Synthetic primer
acatgttcttctatgacatttctccctcactgggtttccc

SEQ ID NO: 9945 - DNA, 40 bp, Artificial Sequence
  Description of Artificial Sequence: Synthetic primer
atttcaaaaaaggcacattcatagacaaaaaagattgtag

SEQ ID NO: 9946 - DNA, 40 bp, Artificial Sequence
  Description of Artificial Sequence: Synthetic primer
caccaggagttctcctgacccttaaaaattgacaccaaag

SEQ ID NO: 9947 - DNA, 40 bp, Artificial Sequence
  Description of Artificial Sequence: Synthetic primer
attcttctccacttggaaatctcccttgttaaaagaggtc

SEQ ID NO: 9948 - DNA, 40 bp, Artificial Sequence
  Description of Artificial Sequence: Synthetic primer
gtgtcacttcttatttaaaactgactttaccattttattg

SEQ ID NO: 9949 - DNA, 40 bp, Artificial Sequence
  Description of Artificial Sequence: Synthetic primer
ttggaagacaatgtatcataataaatcttgggcagagagg

SEQ ID NO: 9950 - DNA, 40 bp, Artificial Sequence
  Description of Artificial Sequence: Synthetic primer
catttcgtgtgagagcaaatcctttgactatactaattcc

SEQ ID NO: 9951 - DNA, 40 bp, Artificial Sequence
  Description of Artificial Sequence: Synthetic primer
aggttggccaggagctctcatgggtgaacattttcctttc

SEQ ID NO: 9952 - DNA, 40 bp, Artificial Sequence
  Description of Artificial Sequence: Synthetic primer
accctcctgtagtcaggaaggaccacttcagtgcagcagc

SEQ ID NO: 9953 - DNA, 40 bp, Artificial Sequence
  Description of Artificial Sequence: Synthetic primer
tcctgatcccctagaacccaagagtccaggtacctcttcc

SEQ ID NO: 9954 - DNA, 40 bp, Artificial Sequence
  Description of Artificial Sequence: Synthetic primer
ggtgtcactcctcaaatctgtgccacaataatcagacctc

SEQ ID NO: 9955 - DNA, 40 bp, Artificial Sequence
  Description of Artificial Sequence: Synthetic primer
gcctggcccagccccacatccagcagccccgtctgtgtcc

SEQ ID NO: 9956 - DNA, 40 bp, Artificial Sequence
  Description of Artificial Sequence: Synthetic primer
agccacactcaccctgctgtaggcatccgtgcgcctgtcc

SEQ ID NO: 9957 - DNA, 40 bp, Artificial Sequence
  Description of Artificial Sequence: Synthetic primer
gaaatgtattagaagatgaagtgcgtcagaagaagataac

SEQ ID NO: 9958 - DNA, 40 bp, Artificial Sequence
  Description of Artificial Sequence: Synthetic primer
tacaggccacactgccattcaggacaaacccaaagtagtc

SEQ ID NO: 9959 - DNA, 40 bp, Artificial Sequence
  Description of Artificial Sequence: Synthetic primer
ggatttcaataagcttgaagaaagtaacagcattttctga

SEQ ID NO: 9960 - DNA, 40 bp, Artificial Sequence
  Description of Artificial Sequence: Synthetic primer
tgtataagtttttatctctaattgaaactcttcccctttt

SEQ ID NO: 9961 - DNA, 40 bp, Artificial Sequence
  Description of Artificial Sequence: Synthetic primer
gttttcatttggttaaggtttggggttaattttggaattg

SEQ ID NO: 9962 - DNA, 40 bp, Artificial Sequence
  Description of Artificial Sequence: Synthetic primer
acttgttaatattcacgataaagaaaaattccagagaaag

SEQ ID NO: 9963 - DNA, 40 bp, Artificial Sequence
  Description of Artificial Sequence: Synthetic primer
cagtagctgcacaacgtaattgccatcagccctactgagg

SEQ ID NO: 9964 - DNA, 40 bp, Artificial Sequence
  Description of Artificial Sequence: Synthetic primer
gagttacttactaaataaaaataaaacactatttctcaat

SEQ ID NO: 9965 - DNA, 40 bp, Artificial Sequence
  Description of Artificial Sequence: Synthetic primer
tggggagcgtcttccctctctgatagctgcacccccttcc

SEQ ID NO: 9966 - DNA, 40 bp, Artificial Sequence
  Description of Artificial Sequence: Synthetic primer
gcttccagggaagcagccagctaacaacctcactaaaatc

SEQ ID NO: 9967 - DNA, 40 bp, Artificial Sequence
  Description of Artificial Sequence: Synthetic primer
aggtaaaatatatggagcaggtataataaactcctattcg

SEQ ID NO: 9968 - DNA, 40 bp, Artificial Sequence
  Description of Artificial Sequence: Synthetic primer
aaaaaaaaacaaaaaacagcggttctatgtgaaaagatga

SEQ ID NO: 9969 - DNA, 40 bp, Artificial Sequence
  Description of Artificial Sequence: Synthetic primer
gccgtgtctcactgtctgcccaagccctgatgcatgatac

SEQ ID NO: 9970 - DNA, 40 bp, Artificial Sequence
  Description of Artificial Sequence: Synthetic primer
attaatgatggtcctgatcagcaaaatacaagaaagagac

SEQ ID NO: 9971 - DNA, 40 bp, Artificial Sequence
  Description of Artificial Sequence: Synthetic primer
tgggaagagatcaccctgtccctctgatgtcttccaaatc

SEQ ID NO: 9972 - DNA, 40 bp, Artificial Sequence
  Description of Artificial Sequence: Synthetic primer
gattgtattttgtagtccaccatcctgataaggttaaggg

SEQ ID NO: 9973 - DNA, 40 bp, Artificial Sequence
  Description of Artificial Sequence: Synthetic primer
atttctactgctttagtgaaccttttgcatatttgtttgg

SEQ ID NO: 9974 - DNA, 40 bp, Artificial Sequence
  Description of Artificial Sequence: Synthetic primer
gcattctctgctctctctctaatactctttctttttcttc

SEQ ID NO: 9975 - DNA, 40 bp, Artificial Sequence
  Description of Artificial Sequence: Synthetic primer
gttttggcaaggcaaaaataagcataatccagtataaaaa

SEQ ID NO: 9976 - DNA, 40 bp, Artificial Sequence
  Description of Artificial Sequence: Synthetic primer
aatatattgtggttatctttctctgctgtagctctttgag

SEQ ID NO: 9977 - DNA, 40 bp, Artificial Sequence
  Description of Artificial Sequence: Synthetic primer
agacagcccactggggacccagctcaagctcttcaaaacg

SEQ ID NO: 9978 - DNA, 40 bp, Artificial Sequence
  Description of Artificial Sequence: Synthetic primer
gccaatctttcacccttaggcatcatccttctttctctcc

SEQ ID NO: 9979 - DNA, 40 bp, Artificial Sequence
  Description of Artificial Sequence: Synthetic primer
cttcggtgggtgacgcggtacagctgcccaagggcgttcg

SEQ ID NO: 9980 - DNA, 40 bp, Artificial Sequence
  Description of Artificial Sequence: Synthetic primer
ccccgccgcagcttctaggaagaagggctgatttcattcc

SEQ ID NO: 9981 - DNA, 40 bp, Artificial Sequence
  Description of Artificial Sequence: Synthetic primer
cacaggactagacacatcacaggactagaacagaagttca

SEQ ID NO: 9982 - DNA, 40 bp, Artificial Sequence
  Description of Artificial Sequence: Synthetic primer
gttatcatttttacttttgtgtaattctttactatttttg

SEQ ID NO: 9983 - DNA, 40 bp, Artificial Sequence
  Description of Artificial Sequence: Synthetic primer
tctgctgtccaagctctcatttaaggtggtgactttcttc

SEQ ID NO: 9984 - DNA, 40 bp, Artificial Sequence
  Description of Artificial Sequence: Synthetic primer
taaccacctctctcccaactcccaaatatccccagtttcc

SEQ ID NO: 9985 - DNA, 40 bp, Artificial Sequence
  Description of Artificial Sequence: Synthetic primer
gggaaagttggttgggtgggagggagccaggttgggatgg

SEQ ID NO: 9986 - DNA, 40 bp, Artificial Sequence
  Description of Artificial Sequence: Synthetic primer
cctctctccatcactcccacgtggtaatgccccctcccgt

SEQ ID NO: 9987 - DNA, 40 bp, Artificial Sequence
  Description of Artificial Sequence: Synthetic primer
ttattaagaatttaccagagtgaaaaataataaatacaac

SEQ ID NO: 9988 - DNA, 40 bp, Artificial Sequence
  Description of Artificial Sequence: Synthetic primer
aaaataactaatttatataatggacttaatctgttttcag

SEQ ID NO: 9989 - DNA, 40 bp, Artificial Sequence
  Description of Artificial Sequence: Synthetic primer
tttcacaaaagagacaaatttggttttaaaattaatgaag

SEQ ID NO: 9990 - DNA, 40 bp, Artificial Sequence
  Description of Artificial Sequence: Synthetic primer
aaaaatacttagaagatgcagtcccagaaaaacatataac

SEQ ID NO: 9991 - DNA, 40 bp, Artificial Sequence
  Description of Artificial Sequence: Synthetic primer
ggctggtaattgtttacaaaaatggaaagttgaggagaat

SEQ ID NO: 9992 - DNA, 40 bp, Artificial Sequence
  Description of Artificial Sequence: Synthetic primer
aaaaatcaaatatgttattttagatttttcttcttccttc

SEQ ID NO: 9993 - DNA, 40 bp, Artificial Sequence
  Description of Artificial Sequence: Synthetic primer
gcctgccttggggctggggctggggtggaggccagccagt

SEQ ID NO: 9994 - DNA, 40 bp, Artificial Sequence
  Description of Artificial Sequence: Synthetic primer
gcccagcagcctttctgggcccaggagaggactgggcagg

SEQ ID NO: 9995 - DNA, 40 bp, Artificial Sequence
  Description of Artificial Sequence: Synthetic primer
tcactacactccctagcccctccgctgcctcctggcactc

SEQ ID NO: 9996 - DNA, 40 bp, Artificial Sequence
  Description of Artificial Sequence: Synthetic primer
ggggcttggaggcagagtcagtgccaacccaaaccctctc

SEQ ID NO: 9997 - DNA, 40 bp, Artificial Sequence
  Description of Artificial Sequence: Synthetic primer
aaattggtttagaaaattccatatcttccttctttaaaac

SEQ ID NO: 9998 - DNA, 40 bp, Artificial Sequence
  Description of Artificial Sequence: Synthetic primer
gttaaacttctagttcaccttaaacttcattttggttctg

SEQ ID NO: 9999 - DNA, 40 bp, Artificial Sequence
  Description of Artificial Sequence: Synthetic primer
ctgtgatccctcaggccctttccttgactctgttggtgtc

SEQ ID NO: 10000 - DNA, 40 bp, Artificial Sequence
  Description of Artificial Sequence: Synthetic primer
tctccctcaggcaggtaggtctcttccccagcccccttac

SEQ ID NO: 10001 - DNA, 40 bp, Artificial Sequence
  Description of Artificial Sequence: Synthetic primer
ccagagggtgccaggcagcactggctttctagcccggggc

SEQ ID NO: 10002 - DNA, 40 bp, Artificial Sequence
  Description of Artificial Sequence: Synthetic primer
ctggaggaaatcctgcaatgtcacctgaggcttcattttc

SEQ ID NO: 10003 - DNA, 40 bp, Artificial Sequence
  Description of Artificial Sequence: Synthetic primer
aaactgcttagtaactagcagaagtgttcctaaaagagtc

SEQ ID NO: 10004 - DNA, 40 bp, Artificial Sequence
  Description of Artificial Sequence: Synthetic primer
tgtgtgtgtgaatgtgggtgggtgtgtctatatccatctc

SEQ ID NO: 10005 - DNA, 40 bp, Artificial Sequence
  Description of Artificial Sequence: Synthetic primer
tagccttggggaagttgcgatctgccgagggcagtgaagc

SEQ ID NO: 10006 - DNA, 40 bp, Artificial Sequence
  Description of Artificial Sequence: Synthetic primer
aagtcgatggagacatgctctttgattgctgttataatgg

SEQ ID NO: 10007 - DNA, 40 bp, Artificial Sequence
  Description of Artificial Sequence: Synthetic primer
ctgaaggcaaccttcaactcagacctgcccgccacaaagc

SEQ ID NO: 10008 - DNA, 40 bp, Artificial Sequence
  Description of Artificial Sequence: Synthetic primer
gacgacttctgagtccagacatctctatccgccagtacag

SEQ ID NO: 10009 - DNA, 40 bp, Artificial Sequence
  Description of Artificial Sequence: Synthetic primer
aaatttcgttagtactttctatgtgaatttatgttttgtt

SEQ ID NO: 10010 - DNA, 40 bp, Artificial Sequence
  Description of Artificial Sequence: Synthetic primer
cctcccttctttgtctcatgggtcccaaattatatcttac

SEQ ID NO: 10011 - DNA, 40 bp, Artificial Sequence
  Description of Artificial Sequence: Synthetic primer
tctctttttgtgcacatactcctttgaattgtatgtttgg

SEQ ID NO: 10012 - DNA, 40 bp, Artificial Sequence
  Description of Artificial Sequence: Synthetic primer
ctgggaaatgtgaggtttccactttgtctatgcgtcctac

SEQ ID NO: 10013 - DNA, 40 bp, Artificial Sequence
  Description of Artificial Sequence: Synthetic primer
ggggacccagcccaccgcgcgggtcggggctcaccagccg

SEQ ID NO: 10014 - DNA, 40 bp, Artificial Sequence
  Description of Artificial Sequence: Synthetic primer
gggcatcgcagatgccagccgcgggactgagtcttccccc

SEQ ID NO: 10015 - DNA, 40 bp, Artificial Sequence
  Description of Artificial Sequence: Synthetic primer
gtgtggtactttattttttatgttctttttttaaatctgg

SEQ ID NO: 10016 - DNA, 40 bp, Artificial Sequence
  Description of Artificial Sequence: Synthetic primer
cgggctaacatgctgtttgccttacagggaccagtgtatc

SEQ ID NO: 10017 - DNA, 40 bp, Artificial Sequence
  Description of Artificial Sequence: Synthetic primer
cgggccggacttggctgggctcccttcaccctctgcggag

SEQ ID NO: 10018 - DNA, 40 bp, Artificial Sequence
  Description of Artificial Sequence: Synthetic primer
gcgcgcactgggttccggctcccaggtgccgagcccgccg

SEQ ID NO: 10019 - DNA, 40 bp, Artificial Sequence
  Description of Artificial Sequence: Synthetic primer
ctccccatcaccgtcgcctcctatgtctcgctctcacctc

SEQ ID NO: 10020 - DNA, 40 bp, Artificial Sequence
  Description of Artificial Sequence: Synthetic primer
gcactcatgggcgaggacgaggctgggtgggcaccagcgg

SEQ ID NO: 10021 - DNA, 40 bp, Artificial Sequence
  Description of Artificial Sequence: Synthetic primer
agtcacaatcatcaaatacaccaagttaaggtagagtcag

SEQ ID NO: 10022 - DNA, 40 bp, Artificial Sequence
  Description of Artificial Sequence: Synthetic primer
ggcctagggtcttgttccactaatggttggcctcactgtg

SEQ ID NO: 10023 - DNA, 40 bp, Artificial Sequence
  Description of Artificial Sequence: Synthetic primer
tgacttctaagaagaaagaattcagagaaaaaaagatatc

SEQ ID NO: 10024 - DNA, 40 bp, Artificial Sequence
  Description of Artificial Sequence: Synthetic primer
tacccctgataaattaacatacttgctcctccttaatgta

SEQ ID NO: 10025 - DNA, 40 bp, Artificial Sequence
  Description of Artificial Sequence: Synthetic primer
tacttataaagcactataacccacacaattatttgtagac

SEQ ID NO: 10026 - DNA, 40 bp, Artificial Sequence
  Description of Artificial Sequence: Synthetic primer
taaaatttaaatattcagtaatgttaatttgatgtttttt

SEQ ID NO: 10027 - DNA, 40 bp, Artificial Sequence
  Description of Artificial Sequence: Synthetic primer
ccggctgcgtttacctgttgccagtactcctccagagacg

SEQ ID NO: 10028 - DNA, 40 bp, Artificial Sequence
  Description of Artificial Sequence: Synthetic primer
tcccaccgcgcgcctcgccgccctcgcgaccgcgggctcc

SEQ ID NO: 10029 - DNA, 40 bp, Artificial Sequence
  Description of Artificial Sequence: Synthetic primer
gcttctcctctggaccggctcatcctcccagcaggcagac

SEQ ID NO: 10030 - DNA, 40 bp, Artificial Sequence
  Description of Artificial Sequence: Synthetic primer
ctgctggccagccctcctgactccccttcccaccccacag

SEQ ID NO: 10031 - DNA, 40 bp, Artificial Sequence
  Description of Artificial Sequence: Synthetic primer
tagaaagtttgtcagtcctgttaaaggagaggttcttatg

SEQ ID NO: 10032 - DNA, 40 bp, Artificial Sequence
  Description of Artificial Sequence: Synthetic primer
gaccattagtgaaggtaaagatggctagagcccagaaagc

SEQ ID NO: 10033 - DNA, 40 bp, Artificial Sequence
  Description of Artificial Sequence: Synthetic primer
tatatatagatgtagcaagattaattttgtttattttgtg

SEQ ID NO: 10034 - DNA, 40 bp, Artificial Sequence
  Description of Artificial Sequence: Synthetic primer
ggctgtatatgttcacagtgatttttaaatggaatcaaac

SEQ ID NO: 10035 - DNA, 40 bp, Artificial Sequence
  Description of Artificial Sequence: Synthetic primer
tattgctccaatccgtattatttacaaagtaactgaaatt

SEQ ID NO: 10036 - DNA, 40 bp, Artificial Sequence
  Description of Artificial Sequence: Synthetic primer
gggacaggacgactgactgtgtgtgtttccccctccctcc

SEQ ID NO: 10037 - DNA, 40 bp, Artificial Sequence
  Description of Artificial Sequence: Synthetic primer
ctcctctccagcccgcagcccgcagcccgcagccctcagg

SEQ ID NO: 10038 - DNA, 40 bp, Artificial Sequence
  Description of Artificial Sequence: Synthetic primer
gccctgagggcaggacttgaccccaggcttccgggcactt

SEQ ID NO: 10039 - DNA, 40 bp, Artificial Sequence
  Description of Artificial Sequence: Synthetic primer
gatgtgccctggtcagggacagttacagcgccactgtctg

SEQ ID NO: 10040 - DNA, 40 bp, Artificial Sequence
  Description of Artificial Sequence: Synthetic primer
ttttcatccatccacataagattctgacatttaaactatg

SEQ ID NO: 10041 - DNA, 40 bp, Artificial Sequence
  Description of Artificial Sequence: Synthetic primer
tgcaatttgctgtcttctttcagtctccagtggcaatttc

SEQ ID NO: 10042 - DNA, 40 bp, Artificial Sequence
  Description of Artificial Sequence: Synthetic primer
ttatcattaaaatcagcagcagatgttaaaataactatac

SEQ ID NO: 10043 - DNA, 40 bp, Artificial Sequence
  Description of Artificial Sequence: Synthetic primer
ataactatttacaaagttaagtagactaaaatgtccttgc

SEQ ID NO: 10044 - DNA, 40 bp, Artificial Sequence
  Description of Artificial Sequence: Synthetic primer
aacatttctccttcttacactttcgaagagcgtttaacat

SEQ ID NO: 10045 - DNA, 40 bp, Artificial Sequence
  Description of Artificial Sequence: Synthetic primer
gccaatatcatatttaatgcaaccaaagcaagattatgtc

SEQ ID NO: 10046 - DNA, 40 bp, Artificial Sequence
  Description of Artificial Sequence: Synthetic primer
ttaatttatcataaataaaatagcatactcactattaagc

SEQ ID NO: 10047 - DNA, 40 bp, Artificial Sequence
  Description of Artificial Sequence: Synthetic primer
aatatctaataggaaaagcccctcctcctgctaatgatat

SEQ ID NO: 10048 - DNA, 40 bp, Artificial Sequence
  Description of Artificial Sequence: Synthetic primer
gggcaccgcaggctggcagccccacccctgctcccagcac

SEQ ID NO: 10049 - DNA, 40 bp, Artificial Sequence
  Description of Artificial Sequence: Synthetic primer
gcccaggactcctggctgctgggactcacgtgtgtccctg

SEQ ID NO: 10050 - DNA, 40 bp, Artificial Sequence
  Description of Artificial Sequence: Synthetic primer
acgcggcccacctgcggcggcgcggggagacggctgcact

SEQ ID NO: 10051 - DNA, 40 bp, Artificial Sequence
  Description of Artificial Sequence: Synthetic primer
gaggtgatccctagcccgcctgggaggagcgcctggactc

SEQ ID NO: 10052 - DNA, 40 bp, Artificial Sequence
  Description of Artificial Sequence: Synthetic primer
gctgcaggggttgcactgacccctgtgcctgcctcttctc

SEQ ID NO: 10053 - DNA, 40 bp, Artificial Sequence
  Description of Artificial Sequence: Synthetic primer
acccgcctgtcccctccacaaacccagagctgagatcctg

SEQ ID NO: 10054 - DNA, 40 bp, Artificial Sequence
  Description of Artificial Sequence: Synthetic primer
gccctgtcgcccacgcggcgccaacctgcccctgctgacc

SEQ ID NO: 10055 - DNA, 40 bp, Artificial Sequence
  Description of Artificial Sequence: Synthetic primer
gcccctaaacccagccgggcctctgactggtggctgtttc

SEQ ID NO: 10056 - DNA, 40 bp, Artificial Sequence
  Description of Artificial Sequence: Synthetic primer
ccctaaacgtggactcatccattcctcccataagcctctc

SEQ ID NO: 10057 - DNA, 40 bp, Artificial Sequence
  Description of Artificial Sequence: Synthetic primer
tgactttgtagaatgtgaaatggaagaatctgtgaggtgc

SEQ ID NO: 10058 - DNA, 40 bp, Artificial Sequence
  Description of Artificial Sequence: Synthetic primer
agttatttatggtcgtttttaaggataagctgttaacgtg

SEQ ID NO: 10059 - DNA, 40 bp, Artificial Sequence
  Description of Artificial Sequence: Synthetic primer
ctttttaatcaaaaagaaaagaaagcaaattccccaaaac

SEQ ID NO: 10060 - DNA, 40 bp, Artificial Sequence
  Description of Artificial Sequence: Synthetic primer
ctttggtgctggtctggcatcgacactgagccacctctgc

SEQ ID NO: 10061 - DNA, 40 bp, Artificial Sequence
  Description of Artificial Sequence: Synthetic primer
ctgaccgctgcccctgcctcccaggccagcctgtgccgcc

SEQ ID NO: 10062 - DNA, 40 bp, Artificial Sequence
  Description of Artificial Sequence: Synthetic primer
aaacttcctccctgggagatggaaatgggacgttgtcctc

SEQ ID NO: 10063 - DNA, 40 bp, Artificial Sequence
  Description of Artificial Sequence: Synthetic primer
ttcttctctttctgcctggccacacaaaattttgcctctg

SEQ ID NO: 10064 - DNA, 40 bp, Artificial Sequence
  Description of Artificial Sequence: Synthetic primer
ggagctagcagtgtaaacagagtacatacataaaaattac

SEQ ID NO: 10065 - DNA, 40 bp, Artificial Sequence
  Description of Artificial Sequence: Synthetic primer
ttaacaggaaatttctaaatgtgacatgacctacttactg

SEQ ID NO: 10066 - DNA, 40 bp, Artificial Sequence
  Description of Artificial Sequence: Synthetic primer
tattactattccacattctatcatgtaatccagttatgtc

SEQ ID NO: 10067 - DNA, 40 bp, Artificial Sequence
  Description of Artificial Sequence: Synthetic primer
tcattttttcacttgcttttcttttatcttaatgtttttc

SEQ ID NO: 10068 - DNA, 40 bp, Artificial Sequence
  Description of Artificial Sequence: Synthetic primer
catggcgaggggcgtgctcatcaccattgatctgtagctg

SEQ ID NO: 10069 - DNA, 40 bp, Artificial Sequence
  Description of Artificial Sequence: Synthetic primer
ctgtaagagtccttccgactctgacagctgcctttcctgc

SEQ ID NO: 10070 - DNA, 40 bp, Artificial Sequence
  Description of Artificial Sequence: Synthetic primer
ccttcgtgggcatgcttcccctccccattctgtcttcatc

SEQ ID NO: 10071 - DNA, 40 bp, Artificial Sequence
  Description of Artificial Sequence: Synthetic primer
atcaggctgttctccctgataaagcaccctccatcgtttg

SEQ ID NO: 10072 - DNA, 40 bp, Artificial Sequence
  Description of Artificial Sequence: Synthetic primer
ttacgaaaaaatgttaaaaagtcataatgtttttcttttc

SEQ ID NO: 10073 - DNA, 40 bp, Artificial Sequence
  Description of Artificial Sequence: Synthetic primer
ttttttttaagtgaaaaataacattctgtgaactacttac

SEQ ID NO: 10074 - DNA, 40 bp, Artificial Sequence
  Description of Artificial Sequence: Synthetic primer
ctcagccccacagagttggggtgactccacagggtgaagg

SEQ ID NO: 10075 - DNA, 40 bp, Artificial Sequence
  Description of Artificial Sequence: Synthetic primer
catcctgggtactacaagttgcctgatctttttgcttctc

SEQ ID NO: 10076 - DNA, 40 bp, Artificial Sequence
  Description of Artificial Sequence: Synthetic primer
ttgatattgaagtttaaaaaagtgaatgacattatatctc

SEQ ID NO: 10077 - DNA, 40 bp, Artificial Sequence
  Description of Artificial Sequence: Synthetic primer
aacattaattttaaaaaccaaaaattctaaattccattac

SEQ ID NO: 10078 - DNA, 40 bp, Artificial Sequence
  Description of Artificial Sequence: Synthetic primer
ggccctgggagggcatgggtggcacctgagccaggctccc

SEQ ID NO: 10079 - DNA, 40 bp, Artificial Sequence
  Description of Artificial Sequence: Synthetic primer
gggacgtgacctgtcccaggccaagcgcgacataccacac

SEQ ID NO: 10080 - DNA, 40 bp, Artificial Sequence
  Description of Artificial Sequence: Synthetic primer
gaaaactgaggagaggggctaagatgaagaggagaccttg

SEQ ID NO: 10081 - DNA, 40 bp, Artificial Sequence
  Description of Artificial Sequence: Synthetic primer
tcaaatctgggccagcttctccgagatccccaatacgacc

SEQ ID NO: 10082 - DNA, 40 bp, Artificial Sequence
  Description of Artificial Sequence: Synthetic primer
gagggctggcccagcgtgctgacctctgccccctcctttc

SEQ ID NO: 10083 - DNA, 40 bp, Artificial Sequence
  Description of Artificial Sequence: Synthetic primer
agaaaagccggggcggagggcgagggctgtgtccatgtgg

SEQ ID NO: 10084 - DNA, 40 bp, Artificial Sequence
  Description of Artificial Sequence: Synthetic primer
taaattaaaaatgttagtggtcatttttctaatgtctttc

SEQ ID NO: 10085 - DNA, 40 bp, Artificial Sequence
  Description of Artificial Sequence: Synthetic primer
attgaaattgtagaaaggaaatgcagttttagtgggagac

SEQ ID NO: 10086 - DNA, 40 bp, Artificial Sequence
  Description of Artificial Sequence: Synthetic primer
tttcccgtcatttgcaagagaaacacacaaagcaatgcac

SEQ ID NO: 10087 - DNA, 40 bp, Artificial Sequence
  Description of Artificial Sequence: Synthetic primer
cacagcatcctaaccaagcaatgacccttgtggatgtttt

SEQ ID NO: 10088 - DNA, 40 bp, Artificial Sequence
  Description of Artificial Sequence: Synthetic primer
gacagacacaagtgacagtgctgatggcccttctgattgc

SEQ ID NO: 10089 - DNA, 40 bp, Artificial Sequence
  Description of Artificial Sequence: Synthetic primer
ttcattatctataactgaagacactactagagcagcatag

SEQ ID NO: 10090 - DNA, 40 bp, Artificial Sequence
  Description of Artificial Sequence: Synthetic primer
acactgactttaagagctctgccgtccgattgttctgttc

SEQ ID NO: 10091 - DNA, 40 bp, Artificial Sequence
  Description of Artificial Sequence: Synthetic primer
ggggttctcagaatcaaagcaacagccttgttgaaagatg

SEQ ID NO: 10092 - DNA, 40 bp, Artificial Sequence
  Description of Artificial Sequence: Synthetic primer
agcccgcgccagcatgatgaacaacagcggctactcagac

SEQ ID NO: 10093 - DNA, 40 bp, Artificial Sequence
  Description of Artificial Sequence: Synthetic primer
atgggacgaccctatccccgcagcgcccgtgccctcgccc

SEQ ID NO: 10094 - DNA, 40 bp, Artificial Sequence
  Description of Artificial Sequence: Synthetic primer
tgagccaaatctggtgctaatgcctttgtctgtctgttgc

SEQ ID NO: 10095 - DNA, 40 bp, Artificial Sequence
  Description of Artificial Sequence: Synthetic primer
gtttctgcacaaaagcagcttagtctggagaagaaacaag

SEQ ID NO: 10096 - DNA, 40 bp, Artificial Sequence
  Description of Artificial Sequence: Synthetic primer
atgtatggaatttttctttatgaactcatagtatgaaatg

SEQ ID NO: 10097 - DNA, 40 bp, Artificial Sequence
  Description of Artificial Sequence: Synthetic primer
aaaaatatcaactattatacctttaaaaaagaatgaaaag

SEQ ID NO: 10098 - DNA, 40 bp, Artificial Sequence
  Description of Artificial Sequence: Synthetic primer
aggggagtggaatacagagtggtggggtgagatttttgtc

SEQ ID NO: 10099 - DNA, 40 bp, Artificial Sequence
  Description of Artificial Sequence: Synthetic primer
ctctttctcttatcctgatgggttgtgtttggtttctttc

SEQ ID NO: 10100 - DNA, 40 bp, Artificial Sequence
  Description of Artificial Sequence: Synthetic primer
cagcagctggcgctgggctgggtggggccgacgccagccc

SEQ ID NO: 10101 - DNA, 40 bp, Artificial Sequence
  Description of Artificial Sequence: Synthetic primer
atgccagcctcagggccacgggcccagccctcatttctcc

SEQ ID NO: 10102 - DNA, 40 bp, Artificial Sequence
  Description of Artificial Sequence: Synthetic primer
gcggcctgccttcaccacctctgacatggctgtgtctgtc

SEQ ID NO: 10103 - DNA, 40 bp, Artificial Sequence
  Description of Artificial Sequence: Synthetic primer
ggaaggagacatgtcagaaggccctcctgatggacaactc

SEQ ID NO: 10104 - DNA, 40 bp, Artificial Sequence
  Description of Artificial Sequence: Synthetic primer
cccagctcagatcttctccccgctgggcagggaaagccag

SEQ ID NO: 10105 - DNA, 40 bp, Artificial Sequence
  Description of Artificial Sequence: Synthetic primer
gcctttatcctgccctcctcccttcccaagtaaatgagtc

SEQ ID NO: 10106 - DNA, 40 bp, Artificial Sequence
  Description of Artificial Sequence: Synthetic primer
ctaataggcattcaatacgtgagtagaaattggttaactg

SEQ ID NO: 10107 - DNA, 40 bp, Artificial Sequence
  Description of Artificial Sequence: Synthetic primer
attatttttagagttaagacaagctccaaagaaagtttac

SEQ ID NO: 10108 - DNA, 40 bp, Artificial Sequence
  Description of Artificial Sequence: Synthetic primer
cactgcaggcctctctgagtgtggagagaaaagggagtgg

SEQ ID NO: 10109 - DNA, 40 bp, Artificial Sequence
  Description of Artificial Sequence: Synthetic primer
ggggagcgaagctcatgactgtcccgtctgcccacctctg

SEQ ID NO: 10110 - DNA, 40 bp, Artificial Sequence
  Description of Artificial Sequence: Synthetic primer
ggccagggctaggaggaatcccagtgttgccctgacatcc

SEQ ID NO: 10111 - DNA, 40 bp, Artificial Sequence
  Description of Artificial Sequence: Synthetic primer
cactggctgccctgacttcatccccactcctggccacctg

SEQ ID NO: 10112 - DNA, 40 bp, Artificial Sequence
  Description of Artificial Sequence: Synthetic primer
ccacggtcttagggatcccaaggaagagaagtgagtgtgc

SEQ ID NO: 10113 - DNA, 40 bp, Artificial Sequence
  Description of Artificial Sequence: Synthetic primer
tcccctacggcaggacccggatgtaatcaacaccgctttg

SEQ ID NO: 10114 - DNA, 40 bp, Artificial Sequence
  Description of Artificial Sequence: Synthetic primer
tgctataggattattctttttggtgggtttctctgtaaac

SEQ ID NO: 10115 - DNA, 40 bp, Artificial Sequence
  Description of Artificial Sequence: Synthetic primer
gttgcacaaggtccacggatccagaaacaagcccaccagc

SEQ ID NO: 10116 - DNA, 40 bp, Artificial Sequence
  Description of Artificial Sequence: Synthetic primer
aaagttttgcattctcacttttatatatgtgcctcttaac

SEQ ID NO: 10117 - DNA, 40 bp, Artificial Sequence
  Description of Artificial Sequence: Synthetic primer
aatcataccaagttagtctgtccaaaagagacaacacatc

SEQ ID NO: 10118 - DNA, 40 bp, Artificial Sequence
  Description of Artificial Sequence: Synthetic primer
taattttttgttgttcttgtgttgaattttctgtgatttt

SEQ ID NO: 10119 - DNA, 40 bp, Artificial Sequence
  Description of Artificial Sequence: Synthetic primer
caaaagaatggaggtgtccattgtaatataaccccaaaag

SEQ ID NO: 10120 - DNA, 40 bp, Artificial Sequence
  Description of Artificial Sequence: Synthetic primer
caggcctggcgcctcagtagggcctccacacggcctcctc

SEQ ID NO: 10121 - DNA, 40 bp, Artificial Sequence
  Description of Artificial Sequence: Synthetic primer
gtggcctccgcaacctcctactcacttccgctccgttctc

SEQ ID NO: 10122 - DNA, 40 bp, Artificial Sequence
  Description of Artificial Sequence: Synthetic primer
tttaactggtagagattggtgatcaataatcaccctgttg

SEQ ID NO: 10123 - DNA, 40 bp, Artificial Sequence
  Description of Artificial Sequence: Synthetic primer
aaagttctctctctaaaacactgatttcccatttatattc

SEQ ID NO: 10124 - DNA, 40 bp, Artificial Sequence
  Description of Artificial Sequence: Synthetic primer
tttgttttaaacaaaagtgttaggattttatttttatttt

SEQ ID NO: 10125 - DNA, 40 bp, Artificial Sequence
  Description of Artificial Sequence: Synthetic primer
cataatttaactttagattaataatggtaatctctaactg

SEQ ID NO: 10126 - DNA, 40 bp, Artificial Sequence
  Description of Artificial Sequence: Synthetic primer
taaatataaaattctataaaacaggtcactgaactaaaaa

SEQ ID NO: 10127 - DNA, 40 bp, Artificial Sequence
  Description of Artificial Sequence: Synthetic primer
ggatttttggattcacctgaatagcaccactgaaaagatg

SEQ ID NO: 10128 - DNA, 40 bp, Artificial Sequence
  Description of Artificial Sequence: Synthetic primer
tgaccaggtcagggctgatggaaacctgaccacttctctc

SEQ ID NO: 10129 - DNA, 40 bp, Artificial Sequence
  Description of Artificial Sequence: Synthetic primer
ttcctgatgaaaaccaggaaaggccaggaggaaatctcag

SEQ ID NO: 10130 - DNA, 40 bp, Artificial Sequence
  Description of Artificial Sequence: Synthetic primer
aggcaggcctgcacagcacccgggcaatgcacacgctctc

SEQ ID NO: 10131 - DNA, 40 bp, Artificial Sequence
  Description of Artificial Sequence: Synthetic primer
gcatgtgtttcttgccttcctgtgctcagaggccctgatc

SEQ ID NO: 10132 - DNA, 40 bp, Artificial Sequence
  Description of Artificial Sequence: Synthetic primer
acacatttgggaggaaaaaccatctttacacatttagagg

SEQ ID NO: 10133 - DNA, 40 bp, Artificial Sequence
  Description of Artificial Sequence: Synthetic primer
tgaccatcctgtctgcacctatgtcccttcctttctgtag

SEQ ID NO: 10134 - DNA, 40 bp, Artificial Sequence
  Description of Artificial Sequence: Synthetic primer
ctggaaaactttctttcagtgatacatttttcctgttttt

SEQ ID NO: 10135 - DNA, 40 bp, Artificial Sequence
  Description of Artificial Sequence: Synthetic primer
attattacatttgaaatattagcatttaataaatataatg

SEQ ID NO: 10136 - DNA, 40 bp, Artificial Sequence
  Description of Artificial Sequence: Synthetic primer
ggtttaattcttttgtatgtgttttacatttttcactttc

SEQ ID NO: 10137 - DNA, 40 bp, Artificial Sequence
  Description of Artificial Sequence: Synthetic primer
gccagtcacagaccaggaatgcaatgtgggtttttcctgc

SEQ ID NO: 10138 - DNA, 40 bp, Artificial Sequence
  Description of Artificial Sequence: Synthetic primer
atgacatctatgaatgtaccatgttaatgtcttcttgttc

SEQ ID NO: 10139 - DNA, 40 bp, Artificial Sequence
  Description of Artificial Sequence: Synthetic primer
tacttttttctcaactatttaaaagattttttaaagtatg

SEQ ID NO: 10140 - DNA, 40 bp, Artificial Sequence
  Description of Artificial Sequence: Synthetic primer
gcatagtatgttgtaaaaatatctcagcgcgtaggacagg

SEQ ID NO: 10141 - DNA, 40 bp, Artificial Sequence
  Description of Artificial Sequence: Synthetic primer
gagctccttttcacctgggtccttttcggtctcttcaaag

SEQ ID NO: 10142 - DNA, 40 bp, Artificial Sequence
  Description of Artificial Sequence: Synthetic primer
ctttccctctgtccacaccctcatcctgactctgtctctc

SEQ ID NO: 10143 - DNA, 40 bp, Artificial Sequence
  Description of Artificial Sequence: Synthetic primer
gtgacataggctctccagggactgccagagagaaggatgc

SEQ ID NO: 10144 - DNA, 40 bp, Artificial Sequence
  Description of Artificial Sequence: Synthetic primer
cctctcgcctcctgctccacccacaccatctctccctcac

SEQ ID NO: 10145 - DNA, 40 bp, Artificial Sequence
  Description of Artificial Sequence: Synthetic primer
tagtgggtggatggtgcatctggggaggaggtcccagcag

SEQ ID NO: 10146 - DNA, 40 bp, Artificial Sequence
  Description of Artificial Sequence: Synthetic primer
gttccataatgaagttaatgtctccaccactggatttctc

SEQ ID NO: 10147 - DNA, 40 bp, Artificial Sequence
  Description of Artificial Sequence: Synthetic primer
tggcttacagctagtttgccagttagtaagcttggcagtc

SEQ ID NO: 10148 - DNA, 40 bp, Artificial Sequence
  Description of Artificial Sequence: Synthetic primer
tgccaaaacaatattaaaaacagatgacatcacctaaaag

SEQ ID NO: 10149 - DNA, 40 bp, Artificial Sequence
  Description of Artificial Sequence: Synthetic primer
tagtaccctatctgtggcctctgaaatttggaaagaaaaa

SEQ ID NO: 10150 - DNA, 40 bp, Artificial Sequence
  Description of Artificial Sequence: Synthetic primer
ataatttctaataatatattttctacctgtaaattttgtc

SEQ ID NO: 10151 - DNA, 40 bp, Artificial Sequence
  Description of Artificial Sequence: Synthetic primer
ctactattttccaatggtatctcaatatcctacgtacagg

SEQ ID NO: 10152 - DNA, 40 bp, Artificial Sequence
  Description of Artificial Sequence: Synthetic primer
agggtggttcccagaattgttgatgagactgtttctcctg

SEQ ID NO: 10153 - DNA, 40 bp, Artificial Sequence
  Description of Artificial Sequence: Synthetic primer
ggggagtgaagggcaatgaagggtacatcctggggtccag

SEQ ID NO: 10154 - DNA, 40 bp, Artificial Sequence
  Description of Artificial Sequence: Synthetic primer
aaagtaacatttccaatctactaatgctaatactgtttcg

SEQ ID NO: 10155 - DNA, 40 bp, Artificial Sequence
  Description of Artificial Sequence: Synthetic primer
actgcattctgactttcagtaaggcaatgaaaaataatac

SEQ ID NO: 10156 - DNA, 40 bp, Artificial Sequence
  Description of Artificial Sequence: Synthetic primer
cccaccccacccctttccctatttcttacaggagacagac

SEQ ID NO: 10157 - DNA, 40 bp, Artificial Sequence
  Description of Artificial Sequence: Synthetic primer
gcatggccattttccccaagcctgccctcccctaccatac

SEQ ID NO: 10158 - DNA, 40 bp, Artificial Sequence
  Description of Artificial Sequence: Synthetic primer
tcaacacttcttgcaattcctgccccacacccctgcatcg

SEQ ID NO: 10159 - DNA, 40 bp, Artificial Sequence
  Description of Artificial Sequence: Synthetic primer
ctacaccctctaagggatctcaaagcgtgaccagagcagc

SEQ ID NO: 10160 - DNA, 40 bp, Artificial Sequence
  Description of Artificial Sequence: Synthetic primer
tcgaagccccgacgccgggccaccgcacgcttctttgctc

SEQ ID NO: 10161 - DNA, 40 bp, Artificial Sequence
  Description of Artificial Sequence: Synthetic primer
gcgcccagtccctggcgcaggcgctgtgcggctttggtgc

SEQ ID NO: 10162 - DNA, 40 bp, Artificial Sequence
  Description of Artificial Sequence: Synthetic primer
ttcacaacacattcaatgagaggcatatatacaatgatac

SEQ ID NO: 10163 - DNA, 40 bp, Artificial Sequence
  Description of Artificial Sequence: Synthetic primer
tcacatcaaattctacgaaagcttcatattttattatact

SEQ ID NO: 10164 - DNA, 40 bp, Artificial Sequence
  Description of Artificial Sequence: Synthetic primer
ggtttttagagaaggaaaactatggtaggaaactggtgac

SEQ ID NO: 10165 - DNA, 40 bp, Artificial Sequence
  Description of Artificial Sequence: Synthetic primer
agttatgctggcacaagcaaaaataccaggggaaaaatac

SEQ ID NO: 10166 - DNA, 40 bp, Artificial Sequence
  Description of Artificial Sequence: Synthetic primer
ggtttcaaatgaaccctgcgctgtcatcttttctgagcac

SEQ ID NO: 10167 - DNA, 40 bp, Artificial Sequence
  Description of Artificial Sequence: Synthetic primer
cactgccagcagcgctttccctgccctggctgtctgtgac

SEQ ID NO: 10168 - DNA, 40 bp, Artificial Sequence
  Description of Artificial Sequence: Synthetic primer
tcattttcaaccacaaacaagtactattaaaaagtcatac

SEQ ID NO: 10169 - DNA, 40 bp, Artificial Sequence
  Description of Artificial Sequence: Synthetic primer
aagaactactgatttcaacttctttggcttaattctctcg

SEQ ID NO: 10170 - DNA, 40 bp, Artificial Sequence
  Description of Artificial Sequence: Synthetic primer
gtatatagtttggccgactgtatctctgaaaataccaaac

SEQ ID NO: 10171 - DNA, 40 bp, Artificial Sequence
  Description of Artificial Sequence: Synthetic primer
tttacagttggctactgtgatttaatctgttgtgtatttt

SEQ ID NO: 10172 - DNA, 40 bp, Artificial Sequence
  Description of Artificial Sequence: Synthetic primer
ttgacttattaaacattcccttgatttcactttattcttc

SEQ ID NO: 10173 - DNA, 40 bp, Artificial Sequence
  Description of Artificial Sequence: Synthetic primer
aattattaatgacatttggacatgcattttatcccactag

SEQ ID NO: 10174 - DNA, 40 bp, Artificial Sequence
  Description of Artificial Sequence: Synthetic primer
ccaacccgggcacccatgcaaagggacaggatgcttcgtc

SEQ ID NO: 10175 - DNA, 40 bp, Artificial Sequence
  Description of Artificial Sequence: Synthetic primer
gccatgtcccttgtgtgggactaaagcccctcctctcctg

SEQ ID NO: 10176 - DNA, 40 bp, Artificial Sequence
  Description of Artificial Sequence: Synthetic primer
tatttagaatttcatgttaatatattgtgttctttttaac

SEQ ID NO: 10177 - DNA, 40 bp, Artificial Sequence
  Description of Artificial Sequence: Synthetic primer
ctaaagatgacaatttgagcttaaaaaattattttaaaac

SEQ ID NO: 10178 - DNA, 40 bp, Artificial Sequence
  Description of Artificial Sequence: Synthetic primer
aaggcctgcagcaggacgaggacctgagccaggaatgcag

SEQ ID NO: 10179 - DNA, 40 bp, Artificial Sequence
  Description of Artificial Sequence: Synthetic primer
acctaccaggccgtgtcctctcaggcccagcccccagcag

SEQ ID NO: 10180 - DNA, 40 bp, Artificial Sequence
  Description of Artificial Sequence: Synthetic primer
aattcaagttaatttatttcagattgaatttagtggaagc

SEQ ID NO: 10181 - DNA, 40 bp, Artificial Sequence
  Description of Artificial Sequence: Synthetic primer
gcacattgccaagtatatattgtatgagttgaaggaaaac

SEQ ID NO: 10182 - DNA, 40 bp, Artificial Sequence
  Description of Artificial Sequence: Synthetic primer
ataacaattcagccacaaagtaaaaatgttgtgtgtttac

SEQ ID NO: 10183 - DNA, 40 bp, Artificial Sequence
  Description of Artificial Sequence: Synthetic primer
caggcacgaaggtgaattaaaatcaaaaggagatacttac

SEQ ID NO: 10184 - DNA, 40 bp, Artificial Sequence
  Description of Artificial Sequence: Synthetic primer
gaaacataaggattattgttcatcaaaaagctactagaac

SEQ ID NO: 10185 - DNA, 40 bp, Artificial Sequence
  Description of Artificial Sequence: Synthetic primer
tgactgttgccccttatctatgtgaacagtcacaactgag

SEQ ID NO: 10186 - DNA, 40 bp, Artificial Sequence
  Description of Artificial Sequence: Synthetic primer
ctcacttctataaatagactggggcaaacacaaaaacctg

SEQ ID NO: 10187 - DNA, 40 bp, Artificial Sequence
  Description of Artificial Sequence: Synthetic primer
tttaatgacaattcagtttttgagtaccttgttatttttg

SEQ ID NO: 10188 - DNA, 40 bp, Artificial Sequence
  Description of Artificial Sequence: Synthetic primer
aagttctcttctgaggactctaatttcttggcccctcttc

SEQ ID NO: 10189 - DNA, 40 bp, Artificial Sequence
  Description of Artificial Sequence: Synthetic primer
atttcattaatactggagcccacttcattagtactggaac

SEQ ID NO: 10190 - DNA, 40 bp, Artificial Sequence
  Description of Artificial Sequence: Synthetic primer
tgtttctttaaggacccagagtgggcagagaatgttgcac

SEQ ID NO: 10191 - DNA, 40 bp, Artificial Sequence
  Description of Artificial Sequence: Synthetic primer
tcttggaaggctaggattgacaaattctttaagttcactg

SEQ ID NO: 10192 - DNA, 40 bp, Artificial Sequence
  Description of Artificial Sequence: Synthetic primer
cattctgaatagaatcaccttttgttttattctcatgacc

SEQ ID NO: 10193 - DNA, 40 bp, Artificial Sequence
  Description of Artificial Sequence: Synthetic primer
ccatcatgtgagtcatcagaacctaacagttcatcacttc

SEQ ID NO: 10194 - DNA, 40 bp, Artificial Sequence
  Description of Artificial Sequence: Synthetic primer
gcttagcaggagtcctagccctttcacccatacacatttg

SEQ ID NO: 10195 - DNA, 40 bp, Artificial Sequence
  Description of Artificial Sequence: Synthetic primer
ccaagtacagtgagcacaattagccgtaataacattagag

SEQ ID NO: 10196 - DNA, 40 bp, Artificial Sequence
  Description of Artificial Sequence: Synthetic primer
agaatacattcaaggtttcaaagcgccagtcatttgctcc

SEQ ID NO: 10197 - DNA, 40 bp, Artificial Sequence
  Description of Artificial Sequence: Synthetic primer
acagcgatactttcccagagctgaagttaacaaatgcacc

SEQ ID NO: 10198 - DNA, 40 bp, Artificial Sequence
  Description of Artificial Sequence: Synthetic primer
tcagggaactaaccaaacggagcagaatggtcaagtgatg

SEQ ID NO: 10199 - DNA, 40 bp, Artificial Sequence
  Description of Artificial Sequence: Synthetic primer
gatgttccttggataacactaaatagcagcattcagaaag

SEQ ID NO: 10200 - DNA, 40 bp, Artificial Sequence
  Description of Artificial Sequence: Synthetic primer
aatgatctttgattttactgctctgcttttgttgttgaag

SEQ ID NO: 10201 - DNA, 40 bp, Artificial Sequence
  Description of Artificial Sequence: Synthetic primer
gtgtacactaggaatcatataaaaagcacataatgcaaac

SEQ ID NO: 10202 - DNA, 40 bp, Artificial Sequence
  Description of Artificial Sequence: Synthetic primer
tgtcactattgcatatgctaactttttctgtttacatttc

SEQ ID NO: 10203 - DNA, 40 bp, Artificial Sequence
  Description of Artificial Sequence: Synthetic primer
ccataaggacttatctgttaatgtttctattgtccttgtg

SEQ ID NO: 10204 - DNA, 40 bp, Artificial Sequence
  Description of Artificial Sequence: Synthetic primer
gttatttattcaactaatagtcttttaattttttttaatc

SEQ ID NO: 10205 - DNA, 40 bp, Artificial Sequence
  Description of Artificial Sequence: Synthetic primer
ctatataataccgaattttccaaggttattacatagctga

SEQ ID NO: 10206 - DNA, 40 bp, Artificial Sequence
  Description of Artificial Sequence: Synthetic primer
ttgactttctaaaaggtgctatttctttttcttttctctg

SEQ ID NO: 10207 - DNA, 40 bp, Artificial Sequence
  Description of Artificial Sequence: Synthetic primer
tttgtaaatacagcatttacttttctaaaaatttactttt

SEQ ID NO: 10208 - DNA, 40 bp, Artificial Sequence
  Description of Artificial Sequence: Synthetic primer
cccttgctcttctcccaccgcctttgctctgttccccaac

SEQ ID NO: 10209 - DNA, 40 bp, Artificial Sequence
  Description of Artificial Sequence: Synthetic primer
ccctgaggctgcctgacacatggcattcccttccttcttc

SEQ ID NO: 10210 - DNA, 40 bp, Artificial Sequence
  Description of Artificial Sequence: Synthetic primer
tttaatttaccaatttcctttgtaaagctttataaagtcc

SEQ ID NO: 10211 - DNA, 40 bp, Artificial Sequence
  Description of Artificial Sequence: Synthetic primer
agacttcttcatcttgttccttgttctattgcttttacag

SEQ ID NO: 10212 - DNA, 40 bp, Artificial Sequence
  Description of Artificial Sequence: Synthetic primer
aaaaaaaacatgttcatgctgtgtatgtaatagaatgtta

SEQ ID NO: 10213 - DNA, 40 bp, Artificial Sequence
  Description of Artificial Sequence: Synthetic primer
agatatagacacaggtagaagactgcactatagtaatgat

SEQ ID NO: 10214 - DNA, 40 bp, Artificial Sequence
  Description of Artificial Sequence: Synthetic primer
cttggacaagctcaaaagacagtttttcttctctcctctc

SEQ ID NO: 10215 - DNA, 40 bp, Artificial Sequence
  Description of Artificial Sequence: Synthetic primer
gggtggctgaacttcaggagaaggatcaaagagtaagcgc

SEQ ID NO: 10216 - DNA, 40 bp, Artificial Sequence
  Description of Artificial Sequence: Synthetic primer
ctcagagtgatcttgtctgaggaaaggccagccccacttg

SEQ ID NO: 10217 - DNA, 40 bp, Artificial Sequence
  Description of Artificial Sequence: Synthetic primer
agagagttgaaaggcctaatgacagggtctgtgaagagtg

SEQ ID NO: 10218 - DNA, 40 bp, Artificial Sequence
  Description of Artificial Sequence: Synthetic primer
tcttcagtggaaaccccgagaagactgatcagttcttcag

SEQ ID NO: 10219 - DNA, 40 bp, Artificial Sequence
  Description of Artificial Sequence: Synthetic primer
aatatcatagctcaagaaggaaagagaaatatacacttac

SEQ ID NO: 10220 - DNA, 40 bp, Artificial Sequence
  Description of Artificial Sequence: Synthetic primer
cttcacttgcctatttctgccattcagtgacatgtgttgc

SEQ ID NO: 10221 - DNA, 40 bp, Artificial Sequence
  Description of Artificial Sequence: Synthetic primer
ctctctctggaaggtaaaggagaaagggaaagagaagtgc

SEQ ID NO: 10222 - DNA, 40 bp, Artificial Sequence
  Description of Artificial Sequence: Synthetic primer
taagcaccttactcaaacaagtcagagaagaaacacaatg

SEQ ID NO: 10223 - DNA, 40 bp, Artificial Sequence
  Description of Artificial Sequence: Synthetic primer
cctcttgctttccccaggctttgtggagctcagcctgttc

SEQ ID NO: 10224 - DNA, 40 bp, Artificial Sequence
  Description of Artificial Sequence: Synthetic primer
aatgtcacctgaatgtcagccctgctccatgactctgtcc

SEQ ID NO: 10225 - DNA, 40 bp, Artificial Sequence
  Description of Artificial Sequence: Synthetic primer
aagtgcaggatctcagaagttcagaaggatgtgtgtatgc

SEQ ID NO: 10226 - DNA, 40 bp, Artificial Sequence
  Description of Artificial Sequence: Synthetic primer
gacacagaggcctttctggaggggtccaccttctgggaac

SEQ ID NO: 10227 - DNA, 40 bp, Artificial Sequence
  Description of Artificial Sequence: Synthetic primer
gggtgggtccatggtcctttgtgtctccccgcccggtgca

SEQ ID NO: 10228 - DNA, 40 bp, Artificial Sequence
  Description of Artificial Sequence: Synthetic primer
gaaaaaaaccaatccaattgtactcataaatcttccaaag

SEQ ID NO: 10229 - DNA, 40 bp, Artificial Sequence
  Description of Artificial Sequence: Synthetic primer
ttaggctcacattttgctcaactgctctttcttgtgtatg

SEQ ID NO: 10230 - DNA, 40 bp, Artificial Sequence
  Description of Artificial Sequence: Synthetic primer
gttaaaatgaatttaaatggttttcttttctcctccaacc

SEQ ID NO: 10231 - DNA, 40 bp, Artificial Sequence
  Description of Artificial Sequence: Synthetic primer
tttttatcgaaagttgaaactaaaaatcctttgcaggact

SEQ ID NO: 10232 - DNA, 40 bp, Artificial Sequence
  Description of Artificial Sequence: Synthetic primer
aattactaatctgttggtacatgaaaataaatgtagtctg

SEQ ID NO: 10233 - DNA, 40 bp, Artificial Sequence
  Description of Artificial Sequence: Synthetic primer
atgttaatattctgtgttgccaaattgaaagatttattac

SEQ ID NO: 10234 - DNA, 40 bp, Artificial Sequence
  Description of Artificial Sequence: Synthetic primer
ctgaatgggtggccagggtggggcctgtcctgtatcactc

SEQ ID NO: 10235 - DNA, 40 bp, Artificial Sequence
  Description of Artificial Sequence: Synthetic primer
cccactctgacccctctctgacacaaggctttcttatctc

SEQ ID NO: 10236 - DNA, 40 bp, Artificial Sequence
  Description of Artificial Sequence: Synthetic primer
aatggtctgcagcccaaccgaaatgttaattctgttttac

SEQ ID NO: 10237 - DNA, 40 bp, Artificial Sequence
  Description of Artificial Sequence: Synthetic primer
aaatttaaagcttaaataatagaactgcttatagaattac

SEQ ID NO: 10238 - DNA, 40 bp, Artificial Sequence
  Description of Artificial Sequence: Synthetic primer
ggaagaccttctgacttagagtgtattcacctgttttacc

SEQ ID NO: 10239 - DNA, 40 bp, Artificial Sequence
  Description of Artificial Sequence: Synthetic primer
ccaccacacctgcctgtgctctcctcgaaggacaaacgag

SEQ ID NO: 10240 - DNA, 40 bp, Artificial Sequence
  Description of Artificial Sequence: Synthetic primer
tagtacatttaaaatatttcacaagacaccaatccctaac

SEQ ID NO: 10241 - DNA, 40 bp, Artificial Sequence
  Description of Artificial Sequence: Synthetic primer
atattttgtgtctcttggatggaatgagcatcttgtgatg

SEQ ID NO: 10242 - DNA, 40 bp, Artificial Sequence
  Description of Artificial Sequence: Synthetic primer
ttcctagggacaagccgcccgctgagctagcaaggaatgc

SEQ ID NO: 10243 - DNA, 40 bp, Artificial Sequence
  Description of Artificial Sequence: Synthetic primer
aggcagaaacgctattgccttccttgctgtcctttcttac

SEQ ID NO: 10244 - DNA, 40 bp, Artificial Sequence
  Description of Artificial Sequence: Synthetic primer
catgttaataaccttagtcatacattattgtctctctttc

SEQ ID NO: 10245 - DNA, 40 bp, Artificial Sequence
  Description of Artificial Sequence: Synthetic primer
tgtgtgttcctcagtgggcctcacctgcccaaaacttagg

SEQ ID NO: 10246 - DNA, 40 bp, Artificial Sequence
  Description of Artificial Sequence: Synthetic primer
aattataaaggaattattctgccaggcttttgaatttctc

SEQ ID NO: 10247 - DNA, 40 bp, Artificial Sequence
  Description of Artificial Sequence: Synthetic primer
actttctagtaatcaagagtgattggtttttcttcacatc

SEQ ID NO: 10248 - DNA, 40 bp, Artificial Sequence
  Description of Artificial Sequence: Synthetic primer
gagctctgtccaaaggctggcctcacactgtctgggaagg

SEQ ID NO: 10249 - DNA, 40 bp, Artificial Sequence
  Description of Artificial Sequence: Synthetic primer
tgtggtgttgcccaccagcccctcacccgcagtctgtctg

SEQ ID NO: 10250 - DNA, 40 bp, Artificial Sequence
  Description of Artificial Sequence: Synthetic primer
gccagtaggacgcctggcgccaacaccgccttcccacacc

SEQ ID NO: 10251 - DNA, 40 bp, Artificial Sequence
  Description of Artificial Sequence: Synthetic primer
tggctctgcccagttcccgcctccacccctgaagcctgag

SEQ ID NO: 10252 - DNA, 40 bp, Artificial Sequence
  Description of Artificial Sequence: Synthetic primer
ttatgtcacactgacatacttagtggcagctgtcaaggtc

SEQ ID NO: 10253 - DNA, 40 bp, Artificial Sequence
  Description of Artificial Sequence: Synthetic primer
aagcctattggtatataaataaagctttgccttttctttc

SEQ ID NO: 10254 - DNA, 40 bp, Artificial Sequence
  Description of Artificial Sequence: Synthetic primer
ccctccacccatcacaggccccaatatgattctcttcctg

SEQ ID NO: 10255 - DNA, 40 bp, Artificial Sequence
  Description of Artificial Sequence: Synthetic primer
gggctgccctacagagagtgctggtagggacagggttgcc

SEQ ID NO: 10256 - DNA, 40 bp, Artificial Sequence
  Description of Artificial Sequence: Synthetic primer
caaataacggagtagaaattgcagttacctgtctctgaag

SEQ ID NO: 10257 - DNA, 40 bp, Artificial Sequence
  Description of Artificial Sequence: Synthetic primer
tggaaagcgagtttgaagtcttacgggtttctgatgttcc

SEQ ID NO: 10258 - DNA, 40 bp, Artificial Sequence
  Description of Artificial Sequence: Synthetic primer
tctctctcttgccatcgtcccagcaaagtctttaaagacc

SEQ ID NO: 10259 - DNA, 40 bp, Artificial Sequence
  Description of Artificial Sequence: Synthetic primer
tttcttttctctcgtactggctcattgaatcgtgttcttg

SEQ ID NO: 10260 - DNA, 40 bp, Artificial Sequence
  Description of Artificial Sequence: Synthetic primer
agcacagggagagcgatctcagcattgtgctcggcatcag

SEQ ID NO: 10261 - DNA, 40 bp, Artificial Sequence
  Description of Artificial Sequence: Synthetic primer
ctgagcagcgctcagaatggaagccatcgccaaatatgac

SEQ ID NO: 10262 - DNA, 40 bp, Artificial Sequence
  Description of Artificial Sequence: Synthetic primer
cctagagaaaggctagtcccttttcttccccattcatttc

SEQ ID NO: 10263 - DNA, 40 bp, Artificial Sequence
  Description of Artificial Sequence: Synthetic primer
tgaatacacataatttgcccactaaaatgtataaaatgaa

SEQ ID NO: 10264 - DNA, 40 bp, Artificial Sequence
  Description of Artificial Sequence: Synthetic primer
tacagaaaacagtggatatttccgtggctcttattcaaac

SEQ ID NO: 10265 - DNA, 40 bp, Artificial Sequence
  Description of Artificial Sequence: Synthetic primer
agaaaaatcttgatttgctctggagtttacaggatttgat

SEQ ID NO: 10266 - DNA, 40 bp, Artificial Sequence
  Description of Artificial Sequence: Synthetic primer
tggctgtgcgcctgggcatggctgtgtgggcgtggctgtg

SEQ ID NO: 10267 - DNA, 40 bp, Artificial Sequence
  Description of Artificial Sequence: Synthetic primer
ggagaatagggcagagactggctgtgggtgggacctaagc

SEQ ID NO: 10268 - DNA, 40 bp, Artificial Sequence
  Description of Artificial Sequence: Synthetic primer
gactgacttgaactgtatccatagacttctttccctaaac

SEQ ID NO: 10269 - DNA, 40 bp, Artificial Sequence
  Description of Artificial Sequence: Synthetic primer
aaccacggcattactaaaaaatttcgcttttaaaagaagg

SEQ ID NO: 10270 - DNA, 40 bp, Artificial Sequence
  Description of Artificial Sequence: Synthetic primer
gttgtgttttccatatgtgcttccccagaccgcccaggtt

SEQ ID NO: 10271 - DNA, 40 bp, Artificial Sequence
  Description of Artificial Sequence: Synthetic primer
cagaatagtgcaactggaagaagggaaatgttggcagtgg

SEQ ID NO: 10272 - DNA, 40 bp, Artificial Sequence
  Description of Artificial Sequence: Synthetic primer
actcctacttgcattttactttcattgccatttttacagg

SEQ ID NO: 10273 - DNA, 40 bp, Artificial Sequence
  Description of Artificial Sequence: Synthetic primer
cgctcaccttcccctctctttggcacttaccttctttggg

SEQ ID NO: 10274 - DNA, 40 bp, Artificial Sequence
  Description of Artificial Sequence: Synthetic primer
atgcaactctgcaattccaagaatgctttcgtttttctac

SEQ ID NO: 10275 - DNA, 40 bp, Artificial Sequence
  Description of Artificial Sequence: Synthetic primer
ttttctgtaatcctgggaaattagttggaaatactcgacg

SEQ ID NO: 10276 - DNA, 40 bp, Artificial Sequence
  Description of Artificial Sequence: Synthetic primer
gtaagctttcttcattggaaaaacagagagaacacagaac

SEQ ID NO: 10277 - DNA, 40 bp, Artificial Sequence
  Description of Artificial Sequence: Synthetic primer
gaacgcgcttgcttttaggagacagccactttctgtgtgg

SEQ ID NO: 10278 - DNA, 40 bp, Artificial Sequence
  Description of Artificial Sequence: Synthetic primer
tcctgacagtacttacctaccacatccaactccttctctc

SEQ ID NO: 10279 - DNA, 40 bp, Artificial Sequence
  Description of Artificial Sequence: Synthetic primer
tggatcaagaggtagggtgaggccaggctcaaggtaaagg

SEQ ID NO: 10280 - DNA, 40 bp, Artificial Sequence
  Description of Artificial Sequence: Synthetic primer
gagacagtggcagtcaagatctttccctatgaggagtatg

SEQ ID NO: 10281 - DNA, 40 bp, Artificial Sequence
  Description of Artificial Sequence: Synthetic primer
gttctcatgcttcagattgatgtctgagaagatgtccttc

SEQ ID NO: 10282 - DNA, 40 bp, Artificial Sequence
  Description of Artificial Sequence: Synthetic primer
ctcacaatctaacaccgcccaccttggccagaaaggaagg

SEQ ID NO: 10283 - DNA, 40 bp, Artificial Sequence
  Description of Artificial Sequence: Synthetic primer
cctaggacttactggtataccctcttgtcccttctccttc

SEQ ID NO: 10284 - DNA, 40 bp, Artificial Sequence
  Description of Artificial Sequence: Synthetic primer
cccgcctcccggggactgacagatggaaagcccagctcag

SEQ ID NO: 10285 - DNA, 40 bp, Artificial Sequence
  Description of Artificial Sequence: Synthetic primer
gtgggtggagcaggaggcgagaggggctcctgagagcagg

SEQ ID NO: 10286 - DNA, 40 bp, Artificial Sequence
  Description of Artificial Sequence: Synthetic primer
caggacaaattaaacagtagcaaatgaaataggaactctc

SEQ ID NO: 10287 - DNA, 40 bp, Artificial Sequence
  Description of Artificial Sequence: Synthetic primer
gttcaaaactacttccacaatcaatcttgatctctcctcc

SEQ ID NO: 10288 - DNA, 40 bp, Artificial Sequence
  Description of Artificial Sequence: Synthetic primer
tcttctataggagagtctgtgtgtttgtagaaggagtatg

SEQ ID NO: 10289 - DNA, 40 bp, Artificial Sequence
  Description of Artificial Sequence: Synthetic primer
ggttgacagggacttgtcttctaacccatctttttccttc

SEQ ID NO: 10290 - DNA, 40 bp, Artificial Sequence
  Description of Artificial Sequence: Synthetic primer
tttatctcctcacaaaagttaggagaatagtaaatacctt

SEQ ID NO: 10291 - DNA, 40 bp, Artificial Sequence
  Description of Artificial Sequence: Synthetic primer
caagcagtcataggaagtaatattaaacatataaacacac

SEQ ID NO: 10292 - DNA, 40 bp, Artificial Sequence
  Description of Artificial Sequence: Synthetic primer
acggaccaggcgcctccccgggctttcctgaagtccaagc

SEQ ID NO: 10293 - DNA, 40 bp, Artificial Sequence
  Description of Artificial Sequence: Synthetic primer
caccggcgccatctccccactccccagtctagccggaagg

SEQ ID NO: 10294 - DNA, 40 bp, Artificial Sequence
  Description of Artificial Sequence: Synthetic primer
atatagtagactctaacagggcttaaaaagtcaaagaagc

SEQ ID NO: 10295 - DNA, 40 bp, Artificial Sequence
  Description of Artificial Sequence: Synthetic primer
aggtaagagcataggaatagacttatgagactgaatatgc

SEQ ID NO: 10296 - DNA, 40 bp, Artificial Sequence
  Description of Artificial Sequence: Synthetic primer
gcttgctccttctttgccttaatcactgtgtcctctctcc

SEQ ID NO: 10297 - DNA, 40 bp, Artificial Sequence
  Description of Artificial Sequence: Synthetic primer
attgaattagaaacatttagaacctgggtgtgtgcaactc

SEQ ID NO: 10298 - DNA, 40 bp, Artificial Sequence
  Description of Artificial Sequence: Synthetic primer
gtcattttaattgactccagtttaatgttaaaaatgaaac

SEQ ID NO: 10299 - DNA, 40 bp, Artificial Sequence
  Description of Artificial Sequence: Synthetic primer
aggcctgcctctctttacctaaaaagcagtaatgacctac

SEQ ID NO: 10300 - DNA, 40 bp, Artificial Sequence
  Description of Artificial Sequence: Synthetic primer
ggagaactagctgaaccctatctccttcctcccaccctac

SEQ ID NO: 10301 - DNA, 40 bp, Artificial Sequence
  Description of Artificial Sequence: Synthetic primer
gggcctggggaggcctgatacagcctccgggagggctggg

SEQ ID NO: 10302 - DNA, 40 bp, Artificial Sequence
  Description of Artificial Sequence: Synthetic primer
acttctcttcttaatgatttggaaaagcagtgtattttag

SEQ ID NO: 10303 - DNA, 40 bp, Artificial Sequence
  Description of Artificial Sequence: Synthetic primer
taaaattctaatattttatagaaacccaaacaaaatcaag

SEQ ID NO: 10304 - DNA, 40 bp, Artificial Sequence
  Description of Artificial Sequence: Synthetic primer
cgtttcttgttacctaagaaaggagtcagtcatctaacac

SEQ ID NO: 10305 - DNA, 40 bp, Artificial Sequence
  Description of Artificial Sequence: Synthetic primer
ctcctggagcaagtcacagccctctcttatcccctcttaa

SEQ ID NO: 10306 - DNA, 40 bp, Artificial Sequence
  Description of Artificial Sequence: Synthetic primer
ccccggatgagcagcagtcgcaggggaagctccagctctc

SEQ ID NO: 10307 - DNA, 40 bp, Artificial Sequence
  Description of Artificial Sequence: Synthetic primer
tccgctgggtcctcagggagtggggacagcagcggtgtgc

SEQ ID NO: 10308 - DNA, 40 bp, Artificial Sequence
  Description of Artificial Sequence: Synthetic primer
aaagatacacggttggattttatcttactttattttgttc

SEQ ID NO: 10309 - DNA, 40 bp, Artificial Sequence
  Description of Artificial Sequence: Synthetic primer
aacaattaaagagaaacatatttgaaaagtactattaggg

SEQ ID NO: 10310 - DNA, 40 bp, Artificial Sequence
  Description of Artificial Sequence: Synthetic primer
aaaaattcctattgaaatttgtctttttaatatggctgag

SEQ ID NO: 10311 - DNA, 40 bp, Artificial Sequence
  Description of Artificial Sequence: Synthetic primer
cattttatatgctcaattaactgtgccatctcattgtctc

SEQ ID NO: 10312 - DNA, 40 bp, Artificial Sequence
  Description of Artificial Sequence: Synthetic primer
ggccaaggagacgggcgctccagggtcccagccacctgtc

SEQ ID NO: 10313 - DNA, 40 bp, Artificial Sequence
  Description of Artificial Sequence: Synthetic primer
aggccaacagctcctgctcccagaatccctgtcttctctg

SEQ ID NO: 10314 - DNA, 40 bp, Artificial Sequence
  Description of Artificial Sequence: Synthetic primer
atcaatacttccaggacctttgatctaaaatatctcttcc

SEQ ID NO: 10315 - DNA, 40 bp, Artificial Sequence
  Description of Artificial Sequence: Synthetic primer
aagtaggtgtggtgatcatgcttaatgctatatgtaaaat

SEQ ID NO: 10316 - DNA, 40 bp, Artificial Sequence
  Description of Artificial Sequence: Synthetic primer
taataagcaaactaagtcatttacagtctgggctgcagtg

SEQ ID NO: 10317 - DNA, 40 bp, Artificial Sequence
  Description of Artificial Sequence: Synthetic primer
atgcaggtatcacacaaattacagaagattaccaagatgg

SEQ ID NO: 10318 - DNA, 40 bp, Artificial Sequence
  Description of Artificial Sequence: Synthetic primer
ggggtggaaggatttctgtgtctgaggaccccttctgtcc

SEQ ID NO: 10319 - DNA, 40 bp, Artificial Sequence
  Description of Artificial Sequence: Synthetic primer
cccaacagcactcagccaatgccaagacagccactcaatg

SEQ ID NO: 10320 - DNA, 40 bp, Artificial Sequence
  Description of Artificial Sequence: Synthetic primer
cttgattattcactatttcacttgtttatttttcttttcc

SEQ ID NO: 10321 - DNA, 40 bp, Artificial Sequence
  Description of Artificial Sequence: Synthetic primer
acaaggagctgaatgaaatatgtaggtataagaaaaatgc

SEQ ID NO: 10322 - DNA, 40 bp, Artificial Sequence
  Description of Artificial Sequence: Synthetic primer
tcgggtggaaggacccatcaccaccaccccacaccacacg

SEQ ID NO: 10323 - DNA, 40 bp, Artificial Sequence
  Description of Artificial Sequence: Synthetic primer
ttggccgtgacagactgtgatggtcatcgtgtgttctgtc

SEQ ID NO: 10324 - DNA, 40 bp, Artificial Sequence
  Description of Artificial Sequence: Synthetic primer
agcaaataatcatccacagcaaatgctcacagataaaatg

SEQ ID NO: 10325 - DNA, 40 bp, Artificial Sequence
  Description of Artificial Sequence: Synthetic primer
cgcagataccttgcttgagttgttgatttgggtctcttag

SEQ ID NO: 10326 - DNA, 40 bp, Artificial Sequence
  Description of Artificial Sequence: Synthetic primer
aagatattttaggaatgaacggattagtgatccccatctc

SEQ ID NO: 10327 - DNA, 40 bp, Artificial Sequence
  Description of Artificial Sequence: Synthetic primer
aaaccttaagtggttccaagtcacattaaagcagaggtcc

SEQ ID NO: 10328 - DNA, 40 bp, Artificial Sequence
  Description of Artificial Sequence: Synthetic primer
atgtaatttcagcacaaactgtagtttctttgtgtcttgg

SEQ ID NO: 10329 - DNA, 40 bp, Artificial Sequence
  Description of Artificial Sequence: Synthetic primer
tcctaaaacaggatccacccaaccacacagaaggaagtgg

SEQ ID NO: 10330 - DNA, 40 bp, Artificial Sequence
  Description of Artificial Sequence: Synthetic primer
cctgcaggcagagcctgttcccgggatggggccacactta

SEQ ID NO: 10331 - DNA, 40 bp, Artificial Sequence
  Description of Artificial Sequence: Synthetic primer
ggggaggaggaagcctcgggtcccagcccctctctgattg

SEQ ID NO: 10332 - DNA, 40 bp, Artificial Sequence
  Description of Artificial Sequence: Synthetic primer
taccttaactctactggtaaaagttaaaatacacagaaag

SEQ ID NO: 10333 - DNA, 40 bp, Artificial Sequence
  Description of Artificial Sequence: Synthetic primer
taaactatctttatctaaattgagttattatcatgctcta

SEQ ID NO: 10334 - DNA, 40 bp, Artificial Sequence
  Description of Artificial Sequence: Synthetic primer
cccagtgggaggtatgtgccctcggggcagctattgatac

SEQ ID NO: 10335 - DNA, 40 bp, Artificial Sequence
  Description of Artificial Sequence: Synthetic primer
ccctggtccctaatgctcccagccctaaccccttcaggag

SEQ ID NO: 10336 - DNA, 40 bp, Artificial Sequence
  Description of Artificial Sequence: Synthetic primer
attgttacattagcagggcaggtggaattgctggtctcag

SEQ ID NO: 10337 - DNA, 40 bp, Artificial Sequence
  Description of Artificial Sequence: Synthetic primer
cccagtagtctctgcaactcatgtttccttgtctgttttg

SEQ ID NO: 10338 - DNA, 40 bp, Artificial Sequence
  Description of Artificial Sequence: Synthetic primer
tatactaactaaagattgtttcaatggttctgattaaatg

SEQ ID NO: 10339 - DNA, 40 bp, Artificial Sequence
  Description of Artificial Sequence: Synthetic primer
agggttcctacctaacaatgcttaactgtttttgtttttc

SEQ ID NO: 10340 - DNA, 40 bp, Artificial Sequence
  Description of Artificial Sequence: Synthetic primer
cagaggaaatcagaaaatctctctggaggatgacgtaggc

SEQ ID NO: 10341 - DNA, 40 bp, Artificial Sequence
  Description of Artificial Sequence: Synthetic primer
gggacctgactcagctcctctgacttttctctctttgtag

SEQ ID NO: 10342 - DNA, 40 bp, Artificial Sequence
  Description of Artificial Sequence: Synthetic primer
cccaaggccggagaggtggggccctgcctggggattctgg

SEQ ID NO: 10343 - DNA, 40 bp, Artificial Sequence
  Description of Artificial Sequence: Synthetic primer
tagaggttcccgcatagcggctcactcttccctctctccc

SEQ ID NO: 10344 - DNA, 40 bp, Artificial Sequence
  Description of Artificial Sequence: Synthetic primer
cgggtagggtggaccggagtctcctcatggtgtcacttgc

SEQ ID NO: 10345 - DNA, 40 bp, Artificial Sequence
  Description of Artificial Sequence: Synthetic primer
aagtccccaactcccagccccaaccagctcctatctcctc

SEQ ID NO: 10346 - DNA, 40 bp, Artificial Sequence
  Description of Artificial Sequence: Synthetic primer
taagtcattttacgtagtcaacagagttaactgaaactgc

SEQ ID NO: 10347 - DNA, 40 bp, Artificial Sequence
  Description of Artificial Sequence: Synthetic primer
aaaatagaagtatgtttttaaattaaaaggcttattgttg

SEQ ID NO: 10348 - DNA, 40 bp, Artificial Sequence
  Description of Artificial Sequence: Synthetic primer
aaatgaaaaaccttacaggaaatggctcgcccccttaatc

SEQ ID NO: 10349 - DNA, 40 bp, Artificial Sequence
  Description of Artificial Sequence: Synthetic primer
aaataatttctataaaataataagcatcagcatttgactt

SEQ ID NO: 10350 - DNA, 40 bp, Artificial Sequence
  Description of Artificial Sequence: Synthetic primer
ttttatgtatcatattagttgtaacttatgagcagctgtg

SEQ ID NO: 10351 - DNA, 40 bp, Artificial Sequence
  Description of Artificial Sequence: Synthetic primer
atcctcccagtctccccactcccttcacagagaaaatgtg

SEQ ID NO: 10352 - DNA, 40 bp, Artificial Sequence
  Description of Artificial Sequence: Synthetic primer
ctactaccatttatcattaaggtacaagacacttatttac

SEQ ID NO: 10353 - DNA, 40 bp, Artificial Sequence
  Description of Artificial Sequence: Synthetic primer
aagaaataaagctgtcaatgagatagtaacaataaaatag

SEQ ID NO: 10354 - DNA, 40 bp, Artificial Sequence
  Description of Artificial Sequence: Synthetic primer
gtcccatggaattttcgcttcccacaggtctctgctaggg

SEQ ID NO: 10355 - DNA, 40 bp, Artificial Sequence
  Description of Artificial Sequence: Synthetic primer
ttttcctcttgcagcagccagactgccttccgggtcactg

SEQ ID NO: 10356 - DNA, 40 bp, Artificial Sequence
  Description of Artificial Sequence: Synthetic primer
ctggggctcgggttggctctaaagtagtcctttctgtgtc

SEQ ID NO: 10357 - DNA, 40 bp, Artificial Sequence
  Description of Artificial Sequence: Synthetic primer
tgcatgatgagggtaaaatgcagcagggattatctgaacc

SEQ ID NO: 10358 - DNA, 40 bp, Artificial Sequence
  Description of Artificial Sequence: Synthetic primer
ccccgtgaaggaaactggggagtcttgagggacccccgac

SEQ ID NO: 10359 - DNA, 40 bp, Artificial Sequence
  Description of Artificial Sequence: Synthetic primer
cagcgatagaggggacaccgtcagagcccagacccaaaag

SEQ ID NO: 10360 - DNA, 40 bp, Artificial Sequence
  Description of Artificial Sequence: Synthetic primer
ggggtgtgcgccggaggagccggcgcagggacggggcgcg

SEQ ID NO: 10361 - DNA, 40 bp, Artificial Sequence
  Description of Artificial Sequence: Synthetic primer
accggctggagcgcccgccccgcggcctcgcctctcctcc

SEQ ID NO: 10362 - DNA, 40 bp, Artificial Sequence
  Description of Artificial Sequence: Synthetic primer
ttgcaaagttatatgcaaatcacagagcccggcccttttc

SEQ ID NO: 10363 - DNA, 40 bp, Artificial Sequence
  Description of Artificial Sequence: Synthetic primer
gccacggctaacccggtgagctgcagggacaagtcccagg

SEQ ID NO: 10364 - DNA, 40 bp, Artificial Sequence
  Description of Artificial Sequence: Synthetic primer
aaatccaaaattctcatgtgaatttttttaaatctccaac

SEQ ID NO: 10365 - DNA, 40 bp, Artificial Sequence
  Description of Artificial Sequence: Synthetic primer
cctgagtttagttcttgcccagacctggaaagctaaggac

SEQ ID NO: 10366 - DNA, 40 bp, Artificial Sequence
  Description of Artificial Sequence: Synthetic primer
ggaagtgtatgaggtacaactgatggctgattttctttag

SEQ ID NO: 10367 - DNA, 40 bp, Artificial Sequence
  Description of Artificial Sequence: Synthetic primer
tagttaaaaggaaaatcttatgatagttatttggacacag

SEQ ID NO: 10368 - DNA, 40 bp, Artificial Sequence
  Description of Artificial Sequence: Synthetic primer
ttagtttgcttcaacaacatcaatgcaaggttaatagaag

SEQ ID NO: 10369 - DNA, 40 bp, Artificial Sequence
  Description of Artificial Sequence: Synthetic primer
actgaacaattgcatttatctcaataacttacaactgaat

SEQ ID NO: 10370 - DNA, 40 bp, Artificial Sequence
  Description of Artificial Sequence: Synthetic primer
gaattaaatgaggtcttctcctacctttcttcactaaaac

SEQ ID NO: 10371 - DNA, 40 bp, Artificial Sequence
  Description of Artificial Sequence: Synthetic primer
catctctttacgaatgagacgtgtccacaatcttacttac

SEQ ID NO: 10372 - DNA, 40 bp, Artificial Sequence
  Description of Artificial Sequence: Synthetic primer
gtttttttaaaccttccaaggcaagttcatggatactaag

SEQ ID NO: 10373 - DNA, 40 bp, Artificial Sequence
  Description of Artificial Sequence: Synthetic primer
ctaaatgctacaatctcataaaactcgactcagtaaggac

SEQ ID NO: 10374 - DNA, 40 bp, Artificial Sequence
  Description of Artificial Sequence: Synthetic primer
taatgtataggtttatatacattttgattttcttttgaac

SEQ ID NO: 10375 - DNA, 40 bp, Artificial Sequence
  Description of Artificial Sequence: Synthetic primer
cttttaagaggagagatttttaaaaagtcatttattttgc

SEQ ID NO: 10376 - DNA, 40 bp, Artificial Sequence
  Description of Artificial Sequence: Synthetic primer
acaacagcaaatctatgtgttttcaggtttatttccttag

SEQ ID NO: 10377 - DNA, 40 bp, Artificial Sequence
  Description of Artificial Sequence: Synthetic primer
acagcagttccccatgggtctcagtaaatgtctgaattac

SEQ ID NO: 10378 - DNA, 40 bp, Artificial Sequence
  Description of Artificial Sequence: Synthetic primer
ccaggtcagagtccttcaccatcctgtctccctttctctc

SEQ ID NO: 10379 - DNA, 40 bp, Artificial Sequence
  Description of Artificial Sequence: Synthetic primer
tcccacgagcccagcttgacccatgtcttgtccgcgttcg

SEQ ID NO: 10380 - DNA, 40 bp, Artificial Sequence
  Description of Artificial Sequence: Synthetic primer
ttatggttgtaattgctaagaaaaatcctctcttcctcac

SEQ ID NO: 10381 - DNA, 40 bp, Artificial Sequence
  Description of Artificial Sequence: Synthetic primer
aacaaaacacaaaactctttagagaatcactcccacttac

SEQ ID NO: 10382 - DNA, 40 bp, Artificial Sequence
  Description of Artificial Sequence: Synthetic primer
atgcagcagccaatataaaaagctatgtaaagtctgtaag

SEQ ID NO: 10383 - DNA, 40 bp, Artificial Sequence
  Description of Artificial Sequence: Synthetic primer
ttttgttgacatttgttaacactgttgattgcttgtttgg

SEQ ID NO: 10384 - DNA, 40 bp, Artificial Sequence
  Description of Artificial Sequence: Synthetic primer
gggcctgagtcgtgtcgccctagttgctccactttgaaac

SEQ ID NO: 10385 - DNA, 40 bp, Artificial Sequence
  Description of Artificial Sequence: Synthetic primer
ccctattggatgaagcagagctaatttctttttcttttac

SEQ ID NO: 10386 - DNA, 40 bp, Artificial Sequence
  Description of Artificial Sequence: Synthetic primer
gaagagaaaaatcccggagttttttccattaacaattctc

SEQ ID NO: 10387 - DNA, 40 bp, Artificial Sequence
  Description of Artificial Sequence: Synthetic primer
aaaattatttgacacttactaaaaactatacgacacttac

SEQ ID NO: 10388 - DNA, 40 bp, Artificial Sequence
  Description of Artificial Sequence: Synthetic primer
gtggttgccttttaatttttgaattatgtctttagttatg

SEQ ID NO: 10389 - DNA, 40 bp, Artificial Sequence
  Description of Artificial Sequence: Synthetic primer
aattatcagccatataaaaatgaaatgtagagataccaac

SEQ ID NO: 10390 - DNA, 40 bp, Artificial Sequence
  Description of Artificial Sequence: Synthetic primer
acaaaaaagcaactagtatgattttatgtataaattaatc

SEQ ID NO: 10391 - DNA, 40 bp, Artificial Sequence
  Description of Artificial Sequence: Synthetic primer
aacatgaaattcatattatagtactaaatgttttcaaagg

SEQ ID NO: 10392 - DNA, 40 bp, Artificial Sequence
  Description of Artificial Sequence: Synthetic primer
ctcaagtaaaacttacttgtgctaaaacttactaaatatg

SEQ ID NO: 10393 - DNA, 40 bp, Artificial Sequence
  Description of Artificial Sequence: Synthetic primer
ctcagtggagctcgagaaataacacacattatagaacaaa

SEQ ID NO: 10394 - DNA, 40 bp, Artificial Sequence
  Description of Artificial Sequence: Synthetic primer
gaaaatggggaggcggtgtccctggggtggggagttcctg

SEQ ID NO: 10395 - DNA, 40 bp, Artificial Sequence
  Description of Artificial Sequence: Synthetic primer
agggaacctagggtctcaccaagctctcctttccttctgc

SEQ ID NO: 10396 - DNA, 40 bp, Artificial Sequence
  Description of Artificial Sequence: Synthetic primer
tcagagtaagtagcactgcacagcatgtgaacggcagacg

SEQ ID NO: 10397 - DNA, 40 bp, Artificial Sequence
  Description of Artificial Sequence: Synthetic primer
tgtgaattatttttctttgtcatggtttctttatgttgcc

SEQ ID NO: 10398 - DNA, 40 bp, Artificial Sequence
  Description of Artificial Sequence: Synthetic primer
agaccctcctgaagactgcaaagtaacttaattcttgctc

SEQ ID NO: 10399 - DNA, 40 bp, Artificial Sequence
  Description of Artificial Sequence: Synthetic primer
aaaagcaacatttccgatagtctttgggcacaggatcagg

SEQ ID NO: 10400 - DNA, 40 bp, Artificial Sequence
  Description of Artificial Sequence: Synthetic primer
atgttttttaaggacaaaactatgctttgccccatgcaca

SEQ ID NO: 10401 - DNA, 40 bp, Artificial Sequence
  Description of Artificial Sequence: Synthetic primer
catattgtaatccctaaggggacatttaaaccaccttgtg

SEQ ID NO: 10402 - DNA, 40 bp, Artificial Sequence
  Description of Artificial Sequence: Synthetic primer
tgctcttgtctttaatctgtccaatttcctaatctctgtg

SEQ ID NO: 10403 - DNA, 40 bp, Artificial Sequence
  Description of Artificial Sequence: Synthetic primer
aacctggattagacagcgcactaaaacaacagcgaacttc

SEQ ID NO: 10404 - DNA, 40 bp, Artificial Sequence
  Description of Artificial Sequence: Synthetic primer
ctcccaaagccattacggtggggaggggagatcgccatac

SEQ ID NO: 10405 - DNA, 40 bp, Artificial Sequence
  Description of Artificial Sequence: Synthetic primer
ccaagctttcttccccagctacttcagattccccctgtcc

SEQ ID NO: 10406 - DNA, 40 bp, Artificial Sequence
  Description of Artificial Sequence: Synthetic primer
gaatctttttattttatttggcaggactgccgtcccatac

SEQ ID NO: 10407 - DNA, 40 bp, Artificial Sequence
  Description of Artificial Sequence: Synthetic primer
aacaattgacattcatctattttgatgccttcatcttcag

SEQ ID NO: 10408 - DNA, 40 bp, Artificial Sequence
  Description of Artificial Sequence: Synthetic primer
tgacaagttttcttctcaatcaattgcctttgagggactc

SEQ ID NO: 10409 - DNA, 40 bp, Artificial Sequence
  Description of Artificial Sequence: Synthetic primer
tatgcttcaaacatgtatttggtttattttcttaccttac

SEQ ID NO: 10410 - DNA, 40 bp, Artificial Sequence
  Description of Artificial Sequence: Synthetic primer
atttttttacatatacatgacatagacactaaaatcaatc

SEQ ID NO: 10411 - DNA, 40 bp, Artificial Sequence
  Description of Artificial Sequence: Synthetic primer
agtcttcttcatatataatgggcctaataatttttccatg

SEQ ID NO: 10412 - DNA, 40 bp, Artificial Sequence
  Description of Artificial Sequence: Synthetic primer
aagcgtattgtcacactgtaaaactgaatggtgagaagtg

SEQ ID NO: 10413 - DNA, 40 bp, Artificial Sequence
  Description of Artificial Sequence: Synthetic primer
tcctaccgttccagatttctacaaaagcacagacacgtac

SEQ ID NO: 10414 - DNA, 40 bp, Artificial Sequence
  Description of Artificial Sequence: Synthetic primer
agagagctcttgacgatgacgaagatgtaaaagtgtgtgc

SEQ ID NO: 10415 - DNA, 40 bp, Artificial Sequence
  Description of Artificial Sequence: Synthetic primer
ggctcccgaatggaagggaactgacaccggcatctccaac

SEQ ID NO: 10416 - DNA, 40 bp, Artificial Sequence
  Description of Artificial Sequence: Synthetic primer
catcactgttctcggtggagctgtttatacgcatttcttc

SEQ ID NO: 10417 - DNA, 40 bp, Artificial Sequence
  Description of Artificial Sequence: Synthetic primer
gctgctcaagcacttcagcatgtgtttcattctttgacac

SEQ ID NO: 10418 - DNA, 40 bp, Artificial Sequence
  Description of Artificial Sequence: Synthetic primer
attctgtatgaattctatcttagcactctggaactatcac

SEQ ID NO: 10419 - DNA, 40 bp, Artificial Sequence
  Description of Artificial Sequence: Synthetic primer
tctgtataaagcttacatattatctgtttttatttcttag

SEQ ID NO: 10420 - DNA, 40 bp, Artificial Sequence
  Description of Artificial Sequence: Synthetic primer
cactgctatgagcctcctcaagctcagagcccacaaactg

SEQ ID NO: 10421 - DNA, 40 bp, Artificial Sequence
  Description of Artificial Sequence: Synthetic primer
agtcatagtgtcttatactaagagtaggatatgtctgttt

SEQ ID NO: 10422 - DNA, 40 bp, Artificial Sequence
  Description of Artificial Sequence: Synthetic primer
ttaggtacttggtttatatattaaagatcttactttcttg

SEQ ID NO: 10423 - DNA, 40 bp, Artificial Sequence
  Description of Artificial Sequence: Synthetic primer
taacagtttaccaaagttgaatcatatataagcttagttc

SEQ ID NO: 10424 - DNA, 40 bp, Artificial Sequence
  Description of Artificial Sequence: Synthetic primer
ggtacaagcattccatgggcaacttctctgtttctttttc

SEQ ID NO: 10425 - DNA, 40 bp, Artificial Sequence
  Description of Artificial Sequence: Synthetic primer
ccatagtggagagctgtaaattctggcttataaggtgttc

SEQ ID NO: 10426 - DNA, 40 bp, Artificial Sequence
  Description of Artificial Sequence: Synthetic primer
tcctggattcatgtagcaaacataccccggtttcctcctg

SEQ ID NO: 10427 - DNA, 40 bp, Artificial Sequence
  Description of Artificial Sequence: Synthetic primer
ggtgtctcctggggacctgtcctctgatgggctcttgttc

SEQ ID NO: 10428 - DNA, 40 bp, Artificial Sequence
  Description of Artificial Sequence: Synthetic primer
cctcatttaggatgtcagggctgaacctatactaatgttg

SEQ ID NO: 10429 - DNA, 40 bp, Artificial Sequence
  Description of Artificial Sequence: Synthetic primer
caataattatcaagaagatggtctcataaatataatggtg

SEQ ID NO: 10430 - DNA, 40 bp, Artificial Sequence
  Description of Artificial Sequence: Synthetic primer
cctgttactcttagggaactatcttatgtgtggcatttcc

SEQ ID NO: 10431 - DNA, 40 bp, Artificial Sequence
  Description of Artificial Sequence: Synthetic primer
ttttagagaatatacatctaagaagaggagggtatatttt

SEQ ID NO: 10432 - DNA, 40 bp, Artificial Sequence
  Description of Artificial Sequence: Synthetic primer
ctcccataccacgcctgggttgttcccacggacctttctc

SEQ ID NO: 10433 - DNA, 40 bp, Artificial Sequence
  Description of Artificial Sequence: Synthetic primer
cccctggcaatctcagccccacaagccccacagtcttttc

SEQ ID NO: 10434 - DNA, 40 bp, Artificial Sequence
  Description of Artificial Sequence: Synthetic primer
aataccaattgaattttgtgcttcttgagaatatagaaac

SEQ ID NO: 10435 - DNA, 40 bp, Artificial Sequence
  Description of Artificial Sequence: Synthetic primer
atgaatggattcaaatgcaggggaaggaatagtcatcagc

SEQ ID NO: 10436 - DNA, 40 bp, Artificial Sequence
  Description of Artificial Sequence: Synthetic primer
ccaaaatgaatgacacatgttccaacataaattgaactcc

SEQ ID NO: 10437 - DNA, 40 bp, Artificial Sequence
  Description of Artificial Sequence: Synthetic primer
tttgttttgttcttgttaattcttttgttagtatacatta

SEQ ID NO: 10438 - DNA, 40 bp, Artificial Sequence
  Description of Artificial Sequence: Synthetic primer
cccaagaagtacttgtttatttacaattatattggtctac

SEQ ID NO: 10439 - DNA, 40 bp, Artificial Sequence
  Description of Artificial Sequence: Synthetic primer
tgaacctttagttacttaggaacctaaagaatgttataag

SEQ ID NO: 10440 - DNA, 40 bp, Artificial Sequence
  Description of Artificial Sequence: Synthetic primer
aggtgtaacgtgtttcgctgatgtgtcataatatttttgt

SEQ ID NO: 10441 - DNA, 40 bp, Artificial Sequence
  Description of Artificial Sequence: Synthetic primer
agccaatgtcattacttttaagtctgcaatactgaaaatg

SEQ ID NO: 10442 - DNA, 40 bp, Artificial Sequence
  Description of Artificial Sequence: Synthetic primer
atagtgtatctgacctattatcaatcatgtttatactttt

SEQ ID NO: 10443 - DNA, 40 bp, Artificial Sequence
  Description of Artificial Sequence: Synthetic primer
tgaactaaaaattttcatcactaaaactctaagggctaag

SEQ ID NO: 10444 - DNA, 40 bp, Artificial Sequence
  Description of Artificial Sequence: Synthetic primer
aaataattatattttggatgacgtagcatcattactaagc

SEQ ID NO: 10445 - DNA, 40 bp, Artificial Sequence
  Description of Artificial Sequence: Synthetic primer
ttttttcagggacacagttccagacaaccacagcactaac

SEQ ID NO: 10446 - DNA, 40 bp, Artificial Sequence
  Description of Artificial Sequence: Synthetic primer
aaacggagggaatatgcatgtcccaaggccccggctgtcc

SEQ ID NO: 10447 - DNA, 40 bp, Artificial Sequence
  Description of Artificial Sequence: Synthetic primer
gccgccgtctgggttgtgttgtcaccatcacctttgtgtc

SEQ ID NO: 10448 - DNA, 40 bp, Artificial Sequence
  Description of Artificial Sequence: Synthetic primer
cacactgctcaagcctcacactaatgctgcctgtgtatgc

SEQ ID NO: 10449 - DNA, 40 bp, Artificial Sequence
  Description of Artificial Sequence: Synthetic primer
agctggtttgggtaggcctgggccaggcacatggtagggg

SEQ ID NO: 10450 - DNA, 40 bp, Artificial Sequence
  Description of Artificial Sequence: Synthetic primer
ccgcagggcggtgctggcgctcgcctatcgctctgctctc

SEQ ID NO: 10451 - DNA, 40 bp, Artificial Sequence
  Description of Artificial Sequence: Synthetic primer
ccagacagtgcggagcagcagcagcagcagaagccggtac

SEQ ID NO: 10452 - DNA, 40 bp, Artificial Sequence
  Description of Artificial Sequence: Synthetic primer
tgttgaacatatacttcctctactccatttgagaaataag

SEQ ID NO: 10453 - DNA, 40 bp, Artificial Sequence
  Description of Artificial Sequence: Synthetic primer
atagctgtgattatgtgatttttcactttctcctacattc

SEQ ID NO: 10454 - DNA, 40 bp, Artificial Sequence
  Description of Artificial Sequence: Synthetic primer
tgagttttgagtattttcaaaagcttcagaatctcttttc

SEQ ID NO: 10455 - DNA, 40 bp, Artificial Sequence
  Description of Artificial Sequence: Synthetic primer
ccataaaattccctgtgggtgtttcctgtgagtggatttc

SEQ ID NO: 10456 - DNA, 40 bp, Artificial Sequence
  Description of Artificial Sequence: Synthetic primer
cctgggtattggtgcgggtgattctgtgcaggagagactg

SEQ ID NO: 10457 - DNA, 40 bp, Artificial Sequence
  Description of Artificial Sequence: Synthetic primer
gggagacctaagggtcctcacagtccatccagacagtccg

SEQ ID NO: 10458 - DNA, 40 bp, Artificial Sequence
  Description of Artificial Sequence: Synthetic primer
ggtgggcctggagctgggtggggttggcacggtgctgtgt

SEQ ID NO: 10459 - DNA, 40 bp, Artificial Sequence
  Description of Artificial Sequence: Synthetic primer
attcgggtggccagacccagccctgactggcccctctgcc

SEQ ID NO: 10460 - DNA, 40 bp, Artificial Sequence
  Description of Artificial Sequence: Synthetic primer
ccccggcagccctgcctgttccagtgtcttctctctctcc

SEQ ID NO: 10461 - DNA, 40 bp, Artificial Sequence
  Description of Artificial Sequence: Synthetic primer
ccgcctccccgccgtggccccaggtgggcgaggaccccgc

SEQ ID NO: 10462 - DNA, 40 bp, Artificial Sequence
  Description of Artificial Sequence: Synthetic primer
gggttagctcaaggcagctaagcaggtccagcccaagaac

SEQ ID NO: 10463 - DNA, 40 bp, Artificial Sequence
  Description of Artificial Sequence: Synthetic primer
gtggcccagaatccttgggtggaaattgccttaacctgac

SEQ ID NO: 10464 - DNA, 40 bp, Artificial Sequence
  Description of Artificial Sequence: Synthetic primer
aagaagtttaaaatcttgctttctgatataatttgttttg

SEQ ID NO: 10465 - DNA, 40 bp, Artificial Sequence
  Description of Artificial Sequence: Synthetic primer
catacatttctatcttcaagggactaggagatgcacttac

SEQ ID NO: 10466 - DNA, 40 bp, Artificial Sequence
  Description of Artificial Sequence: Synthetic primer
agataatattttctttaaaagtaggaaaaatatttgtgag

SEQ ID NO: 10467 - DNA, 40 bp, Artificial Sequence
  Description of Artificial Sequence: Synthetic primer
gaataatatctgcgatttatcttgaatgttttattcttac

SEQ ID NO: 10468 - DNA, 40 bp, Artificial Sequence
  Description of Artificial Sequence: Synthetic primer
cccggtggcctgctcctgcctgtcactgacccctctctcc

SEQ ID NO: 10469 - DNA, 40 bp, Artificial Sequence
  Description of Artificial Sequence: Synthetic primer
ctgggtggaccacctgcccaccccatccagttgggaagct

SEQ ID NO: 10470 - DNA, 40 bp, Artificial Sequence
  Description of Artificial Sequence: Synthetic primer
tgcccatgtcacatgttgacccttttctctcttaatttca

SEQ ID NO: 10471 - DNA, 40 bp, Artificial Sequence
  Description of Artificial Sequence: Synthetic primer
ccaaatctattaatttttctttatatttgtaagaaactgg

SEQ ID NO: 10472 - DNA, 40 bp, Artificial Sequence
  Description of Artificial Sequence: Synthetic primer
tccccactgctgctgcgggactgggcttggtaacgtcctg

SEQ ID NO: 10473 - DNA, 40 bp, Artificial Sequence
  Description of Artificial Sequence: Synthetic primer
tccagctcccagcactgccgcctccatgcccctcactcac

SEQ ID NO: 10474 - DNA, 40 bp, Artificial Sequence
  Description of Artificial Sequence: Synthetic primer
ttttaacgttgttaaagattaagttgtttatttgttttat

SEQ ID NO: 10475 - DNA, 40 bp, Artificial Sequence
  Description of Artificial Sequence: Synthetic primer
aagatcataactccttgacttttctgagataactatattg

SEQ ID NO: 10476 - DNA, 40 bp, Artificial Sequence
  Description of Artificial Sequence: Synthetic primer
ggccagggtgagacgggcggccctgggcagggcggtgatc

SEQ ID NO: 10477 - DNA, 40 bp, Artificial Sequence
  Description of Artificial Sequence: Synthetic primer
tgccctttaggccttccttttgcctcaggcccatccctac

SEQ ID NO: 10478 - DNA, 40 bp, Artificial Sequence
  Description of Artificial Sequence: Synthetic primer
accctggcatggcaggagtaggagggagggagaggctagg

SEQ ID NO: 10479 - DNA, 40 bp, Artificial Sequence
  Description of Artificial Sequence: Synthetic primer
aagcacttggatgccggtaatccccactctcttccctctc

SEQ ID NO: 10480 - DNA, 40 bp, Artificial Sequence
  Description of Artificial Sequence: Synthetic primer
gaatacttaagacagtatttcatgtttatttgttgtcttg

SEQ ID NO: 10481 - DNA, 40 bp, Artificial Sequence
  Description of Artificial Sequence: Synthetic primer
tgcgtagcatgacacaattcaataacatccacagttgtag

SEQ ID NO: 10482 - DNA, 40 bp, Artificial Sequence
  Description of Artificial Sequence: Synthetic primer
aagtgctttagtattttgtaaaaaagacattttaatggtc

SEQ ID NO: 10483 - DNA, 40 bp, Artificial Sequence
  Description of Artificial Sequence: Synthetic primer
agagtaatttcagttaatatgacatcctttccccctgctc

SEQ ID NO: 10484 - DNA, 40 bp, Artificial Sequence
  Description of Artificial Sequence: Synthetic primer
ttattcctttctgtgctgccccatgagaagtgaagagaac

SEQ ID NO: 10485 - DNA, 40 bp, Artificial Sequence
  Description of Artificial Sequence: Synthetic primer
cattgctgctacttcctggagcttaatgcgctttgctttt

SEQ ID NO: 10486 - DNA, 40 bp, Artificial Sequence
  Description of Artificial Sequence: Synthetic primer
gaaaatgtacagaccacgtataatgagaaatgaaaatgag

SEQ ID NO: 10487 - DNA, 40 bp, Artificial Sequence
  Description of Artificial Sequence: Synthetic primer
ggaattacttattcttaccttaattttcttttcttttcag

SEQ ID NO: 10488 - DNA, 40 bp, Artificial Sequence
  Description of Artificial Sequence: Synthetic primer
agagacttgggatttgcacggcagcagagtcaccgtggag

SEQ ID NO: 10489 - DNA, 40 bp, Artificial Sequence
  Description of Artificial Sequence: Synthetic primer
tcggggcggccctgccagcagcctcccgaccccacctacc

SEQ ID NO: 10490 - DNA, 40 bp, Artificial Sequence
  Description of Artificial Sequence: Synthetic primer
gcaccattcccaaaccctctgtgcccctccaggtgtgctg

SEQ ID NO: 10491 - DNA, 40 bp, Artificial Sequence
  Description of Artificial Sequence: Synthetic primer
cctggcaagtgggcggagcctgaccctcttggccccacag

SEQ ID NO: 10492 - DNA, 40 bp, Artificial Sequence
  Description of Artificial Sequence: Synthetic primer
ctgtaccttcctttttgccacccctcacccacacctctgc

SEQ ID NO: 10493 - DNA, 40 bp, Artificial Sequence
  Description of Artificial Sequence: Synthetic primer
gggtcttgggtgtgtgttgtgcctgctacttcccctcacc

SEQ ID NO: 10494 - DNA, 40 bp, Artificial Sequence
  Description of Artificial Sequence: Synthetic primer
gactgtcctttctgactgcatcctattcagagcgtgcttc

SEQ ID NO: 10495 - DNA, 40 bp, Artificial Sequence
  Description of Artificial Sequence: Synthetic primer
caggagagacaggaagagaagaagcttggtcctggagacc

SEQ ID NO: 10496 - DNA, 40 bp, Artificial Sequence
  Description of Artificial Sequence: Synthetic primer
ctcccacagctctgctggccaggcccctgcacccccactc

SEQ ID NO: 10497 - DNA, 40 bp, Artificial Sequence
  Description of Artificial Sequence: Synthetic primer
agccgcgtggcccatcctgtgtgacgccggcccctgtttc

SEQ ID NO: 10498 - DNA, 40 bp, Artificial Sequence
  Description of Artificial Sequence: Synthetic primer
agtgttaaaatgcctccttcataacctgagacttactttc

SEQ ID NO: 10499 - DNA, 40 bp, Artificial Sequence
  Description of Artificial Sequence: Synthetic primer
cctaaaggttagtataaagtctgttcctcttacttggtgc

SEQ ID NO: 10500 - DNA, 40 bp, Artificial Sequence
  Description of Artificial Sequence: Synthetic primer
gaggcctgtgtgggaacacacggtcattctaggggccttc

SEQ ID NO: 10501 - DNA, 40 bp, Artificial Sequence
  Description of Artificial Sequence: Synthetic primer
tttataggtatgcttgtaggtatgaggggactgatgaagg

SEQ ID NO: 10502 - DNA, 40 bp, Artificial Sequence
  Description of Artificial Sequence: Synthetic primer
ttaataaataacattatattaagagagtcttctttttacc

SEQ ID NO: 10503 - DNA, 40 bp, Artificial Sequence
  Description of Artificial Sequence: Synthetic primer
aaattcccaatgccccatacagcatgcggtgctaaagtac

SEQ ID NO: 10504 - DNA, 40 bp, Artificial Sequence
  Description of Artificial Sequence: Synthetic primer
agtaaaaggaggattttatagaacagatggcaagtgaatg

SEQ ID NO: 10505 - DNA, 40 bp, Artificial Sequence
  Description of Artificial Sequence: Synthetic primer
ttaatttgtcatgactctttaaaatgaatcttattgtttt

SEQ ID NO: 10506 - DNA, 40 bp, Artificial Sequence
  Description of Artificial Sequence: Synthetic primer
tcccaagcgtgtaagttctgacagtgctcccccaatctcc

SEQ ID NO: 10507 - DNA, 40 bp, Artificial Sequence
  Description of Artificial Sequence: Synthetic primer
ccccacagcccctcgctcagggtgctggccatggtcctca

SEQ ID NO: 10508 - DNA, 40 bp, Artificial Sequence
  Description of Artificial Sequence: Synthetic primer
cagagaaaaggttttattaatgatttttgctcacagtgtc

SEQ ID NO: 10509 - DNA, 40 bp, Artificial Sequence
  Description of Artificial Sequence: Synthetic primer
aagctcacgtcagccccaccagtttcatcgagttctagcc

SEQ ID NO: 10510 - DNA, 40 bp, Artificial Sequence
  Description of Artificial Sequence: Synthetic primer
agagcagatcccatccctccacccctggggcaggcacacc

SEQ ID NO: 10511 - DNA, 40 bp, Artificial Sequence
  Description of Artificial Sequence: Synthetic primer
tggttgaggcctcctggcctcagggtccctgagcctgagc

SEQ ID NO: 10512 - DNA, 40 bp, Artificial Sequence
  Description of Artificial Sequence: Synthetic primer
accatttaatttctcatgagctcttatgtgttatgtttgg

SEQ ID NO: 10513 - DNA, 40 bp, Artificial Sequence
  Description of Artificial Sequence: Synthetic primer
acattctcaagggtaaggtttttatcattcctctacttac

SEQ ID NO: 10514 - DNA, 40 bp, Artificial Sequence
  Description of Artificial Sequence: Synthetic primer
gaatttttattatagaattccttacattttgttgctgttc

SEQ ID NO: 10515 - DNA, 40 bp, Artificial Sequence
  Description of Artificial Sequence: Synthetic primer
acctttgctcaacatacggaaacacaggtcttatgactac

SEQ ID NO: 10516 - DNA, 40 bp, Artificial Sequence
  Description of Artificial Sequence: Synthetic primer
gcatgcatggaacttgaggagacaaacacggaagtggatg

SEQ ID NO: 10517 - DNA, 40 bp, Artificial Sequence
  Description of Artificial Sequence: Synthetic primer
ccaaatcgattaataagatgtctctttttgctttttcttc

SEQ ID NO: 10518 - DNA, 40 bp, Artificial Sequence
  Description of Artificial Sequence: Synthetic primer
ggaggtggggttttgttaacgtgaatttaatctttttgac

SEQ ID NO: 10519 - DNA, 40 bp, Artificial Sequence
  Description of Artificial Sequence: Synthetic primer
tgccctgcacgctggcagtgctggtggcccggactcttac

SEQ ID NO: 10520 - DNA, 40 bp, Artificial Sequence
  Description of Artificial Sequence: Synthetic primer
ttcatcaagattaataactggtgtacttgataggcatttg

SEQ ID NO: 10521 - DNA, 40 bp, Artificial Sequence
  Description of Artificial Sequence: Synthetic primer
caaacagaactgttttagatatgctgggtattcaataaac

SEQ ID NO: 10522 - DNA, 40 bp, Artificial Sequence
  Description of Artificial Sequence: Synthetic primer
aatttctttgatctaatgattctggttctcttacccttac

SEQ ID NO: 10523 - DNA, 40 bp, Artificial Sequence
  Description of Artificial Sequence: Synthetic primer
tttctttttcttacttgcttctgtcactcaataaaaagcc

SEQ ID NO: 10524 - DNA, 40 bp, Artificial Sequence
  Description of Artificial Sequence: Synthetic primer
ttgctttgggtaggattgattttactctaaccctaatttc

SEQ ID NO: 10525 - DNA, 40 bp, Artificial Sequence
  Description of Artificial Sequence: Synthetic primer
taatcattttatgaggtttcaatacataaggtaagaagtc

SEQ ID NO: 10526 - DNA, 40 bp, Artificial Sequence
  Description of Artificial Sequence: Synthetic primer
accctcatttaaaaagtctatcaaggcaatctaaacatag

SEQ ID NO: 10527 - DNA, 40 bp, Artificial Sequence
  Description of Artificial Sequence: Synthetic primer
tttttaaaatatgtagttgtaaaggaaaacatgcccaaac

SEQ ID NO: 10528 - DNA, 40 bp, Artificial Sequence
  Description of Artificial Sequence: Synthetic primer
agaaaagaaagaaagaggccttccagaatttagccaatag

SEQ ID NO: 10529 - DNA, 40 bp, Artificial Sequence
  Description of Artificial Sequence: Synthetic primer
aagatttaaaactcactaagatcttgtattcatatttttt

SEQ ID NO: 10530 - DNA, 40 bp, Artificial Sequence
  Description of Artificial Sequence: Synthetic primer
agccatattgttacagctgcttttctgacccgtgttaatc

SEQ ID NO: 10531 - DNA, 40 bp, Artificial Sequence
  Description of Artificial Sequence: Synthetic primer
ttggccatccaaaattgatccagctgagagaggcactaag

SEQ ID NO: 10532 - DNA, 40 bp, Artificial Sequence
  Description of Artificial Sequence: Synthetic primer
cctgccccttccctgtttctagatccgtccttctgctacc

SEQ ID NO: 10533 - DNA, 40 bp, Artificial Sequence
  Description of Artificial Sequence: Synthetic primer
gactcaagagccctaatcaaaagtaatttccccctaaaag

SEQ ID NO: 10534 - DNA, 40 bp, Artificial Sequence
  Description of Artificial Sequence: Synthetic primer
ggccctggcgagcctgatccctcacgccgggcacccacac

SEQ ID NO: 10535 - DNA, 40 bp, Artificial Sequence
  Description of Artificial Sequence: Synthetic primer
atctgtctggaaagtgttttaatttgccttctcttctgtc

SEQ ID NO: 10536 - DNA, 40 bp, Artificial Sequence
  Description of Artificial Sequence: Synthetic primer
tttgaatgactaaacataactttattggtttttctccttc

SEQ ID NO: 10537 - DNA, 40 bp, Artificial Sequence
  Description of Artificial Sequence: Synthetic primer
ctattttgaattcaagtaattacaattctaaaataattca

SEQ ID NO: 10538 - DNA, 40 bp, Artificial Sequence
  Description of Artificial Sequence: Synthetic primer
gtggggccgagagccatgcccacctgcagccccccacagc

SEQ ID NO: 10539 - DNA, 40 bp, Artificial Sequence
  Description of Artificial Sequence: Synthetic primer
tcacagtcctcccttctctaacctggcctcttgtttcttc

SEQ ID NO: 10540 - DNA, 40 bp, Artificial Sequence
  Description of Artificial Sequence: Synthetic primer
tcttaatagcacgcggcttaaatgaagtgaatgcactgag

SEQ ID NO: 10541 - DNA, 40 bp, Artificial Sequence
  Description of Artificial Sequence: Synthetic primer
aggcgatactgaggaggattttattgtattttcatttcag

SEQ ID NO: 10542 - DNA, 40 bp, Artificial Sequence
  Description of Artificial Sequence: Synthetic primer
aggcattatcacagatcaaaatgagttttacccaagaacc

SEQ ID NO: 10543 - DNA, 40 bp, Artificial Sequence
  Description of Artificial Sequence: Synthetic primer
aatcccctgatgatgggatttagttgagccttacgtctgc

SEQ ID NO: 10544 - DNA, 40 bp, Artificial Sequence
  Description of Artificial Sequence: Synthetic primer
aatagccatttccttgtaattgttgtacccacccgtttag

SEQ ID NO: 10545 - DNA, 40 bp, Artificial Sequence
  Description of Artificial Sequence: Synthetic primer
aagggagtcagagtcgtatttgacgatctctcctgtcttc

SEQ ID NO: 10546 - DNA, 40 bp, Artificial Sequence
  Description of Artificial Sequence: Synthetic primer
ttactattattgggttacttacgcgagaattcccgtttgc

SEQ ID NO: 10547 - DNA, 40 bp, Artificial Sequence
  Description of Artificial Sequence: Synthetic primer
cgccgccgccgccgcccgccccgcagcccaccatgtctcg

SEQ ID NO: 10548 - DNA, 40 bp, Artificial Sequence
  Description of Artificial Sequence: Synthetic primer
tcatgcgccttttagccacatgtcagaaagctcattatgg

SEQ ID NO: 10549 - DNA, 40 bp, Artificial Sequence
  Description of Artificial Sequence: Synthetic primer
tataagggatataatacttctcaaatcatacatatctcac

SEQ ID NO: 10550 - DNA, 40 bp, Artificial Sequence
  Description of Artificial Sequence: Synthetic primer
atgtaatatttttaaaaaattgaaaatgcaaatagttttg

SEQ ID NO: 10551 - DNA, 40 bp, Artificial Sequence
  Description of Artificial Sequence: Synthetic primer
tccagctgtatttgacaacttggtctctttattctcttag

SEQ ID NO: 10552 - DNA, 40 bp, Artificial Sequence
  Description of Artificial Sequence: Synthetic primer
gggtgacgggaggtagggagggagacccagcagacattta

SEQ ID NO: 10553 - DNA, 40 bp, Artificial Sequence
  Description of Artificial Sequence: Synthetic primer
ttatgttgcatcctttctaacacaatttgtactttgttcc

SEQ ID NO: 10554 - DNA, 40 bp, Artificial Sequence
  Description of Artificial Sequence: Synthetic primer
tgtctgcatgaatgtgtacgcaggcggggagatgcagagg

SEQ ID NO: 10555 - DNA, 40 bp, Artificial Sequence
  Description of Artificial Sequence: Synthetic primer
acagagatgtgtatgcactacttttgctgtctcgctctgc

SEQ ID NO: 10556 - DNA, 40 bp, Artificial Sequence
  Description of Artificial Sequence: Synthetic primer
tcagctgcacagaggtgtctgattcagtctttttctcctc

SEQ ID NO: 10557 - DNA, 40 bp, Artificial Sequence
  Description of Artificial Sequence: Synthetic primer
tgccatgtgtatgggcagtgggagaaggatttcaggttgg

SEQ ID NO: 10558 - DNA, 40 bp, Artificial Sequence
  Description of Artificial Sequence: Synthetic primer
tagtgtccttctgtgcttgtatgacccaagctcctaatcc

SEQ ID NO: 10559 - DNA, 40 bp, Artificial Sequence
  Description of Artificial Sequence: Synthetic primer
gccccaatcactcagtctagttcacagctgcccacagcag

SEQ ID NO: 10560 - DNA, 40 bp, Artificial Sequence
  Description of Artificial Sequence: Synthetic primer
cggcaagggcagtcgtggctgagcgtgcccgcgcaacgtc

SEQ ID NO: 10561 - DNA, 40 bp, Artificial Sequence
  Description of Artificial Sequence: Synthetic primer
ccgcggcgggcctgtgggagcggggtcatcttctctctgc

SEQ ID NO: 10562 - DNA, 40 bp, Artificial Sequence
  Description of Artificial Sequence: Synthetic primer
tctgtctctgccatagatacacgggcacaacgccctcacc

SEQ ID NO: 10563 - DNA, 40 bp, Artificial Sequence
  Description of Artificial Sequence: Synthetic primer
ggcctcccgggttggctgggcattggggtgggccctgctc

SEQ ID NO: 10564 - DNA, 40 bp, Artificial Sequence
  Description of Artificial Sequence: Synthetic primer
tctctctcacacacctccatttcctcaaactttccttctc

SEQ ID NO: 10565 - DNA, 40 bp, Artificial Sequence
  Description of Artificial Sequence: Synthetic primer
ccccaagacatgcccatgatgagaggagctgatgagaagc

SEQ ID NO: 10566 - DNA, 40 bp, Artificial Sequence
  Description of Artificial Sequence: Synthetic primer
gctcacacaccctccacgacacccaaggtttatcccacac

SEQ ID NO: 10567 - DNA, 40 bp, Artificial Sequence
  Description of Artificial Sequence: Synthetic primer
tgttcccagaaagaaagaggtgatcatttaccaagtcacc

SEQ ID NO: 10568 - DNA, 40 bp, Artificial Sequence
  Description of Artificial Sequence: Synthetic primer
ttaagaaaatttttcttatcagcttttatttgtttacctc

SEQ ID NO: 10569 - DNA, 40 bp, Artificial Sequence
  Description of Artificial Sequence: Synthetic primer
acaccttgttttcctaaccccaagacccacactatgaatc

SEQ ID NO: 10570 - DNA, 40 bp, Artificial Sequence
  Description of Artificial Sequence: Synthetic primer
aaaagctatagtttatgcattaggaatcatctggtacttg

SEQ ID NO: 10571 - DNA, 40 bp, Artificial Sequence
  Description of Artificial Sequence: Synthetic primer
gatatttggttcccctgagtgttaattagttattattttt

SEQ ID NO: 10572 - DNA, 40 bp, Artificial Sequence
  Description of Artificial Sequence: Synthetic primer
tcaatcaggtatgattaagtaaacagtttgttgcctattt

SEQ ID NO: 10573 - DNA, 40 bp, Artificial Sequence
  Description of Artificial Sequence: Synthetic primer
ggcaacttagcttttatctatgaattaatttctttttctg

SEQ ID NO: 10574 - DNA, 40 bp, Artificial Sequence
  Description of Artificial Sequence: Synthetic primer
gactgatgtaatgatctcactttcctaccttaggtgtttc

SEQ ID NO: 10575 - DNA, 40 bp, Artificial Sequence
  Description of Artificial Sequence: Synthetic primer
ttcttaaatacaggtagtcgtcatgtacttttcatatttg

SEQ ID NO: 10576 - DNA, 40 bp, Artificial Sequence
  Description of Artificial Sequence: Synthetic primer
tgtcctattggaagatatcctcatgctgtctctttttctg

SEQ ID NO: 10577 - DNA, 40 bp, Artificial Sequence
  Description of Artificial Sequence: Synthetic primer
ctttacatggtacgagtgcccatgatatgcaggaatcaag

SEQ ID NO: 10578 - DNA, 40 bp, Artificial Sequence
  Description of Artificial Sequence: Synthetic primer
agccaccttcaggtagtggtttgggaaatcaagcaataac

SEQ ID NO: 10579 - DNA, 40 bp, Artificial Sequence
  Description of Artificial Sequence: Synthetic primer
gcgagtaagagatgaagcaggaatacaagtcaataaagtg

SEQ ID NO: 10580 - DNA, 40 bp, Artificial Sequence
  Description of Artificial Sequence: Synthetic primer
gacaggaggtcagagctgccctgacctttctcgttcctgc

SEQ ID NO: 10581 - DNA, 40 bp, Artificial Sequence
  Description of Artificial Sequence: Synthetic primer
cccaaggccaccagggcagagggattcagggaccacagac

SEQ ID NO: 10582 - DNA, 40 bp, Artificial Sequence
  Description of Artificial Sequence: Synthetic primer
aagggctattccaggagcatggattattccatttctttct

SEQ ID NO: 10583 - DNA, 40 bp, Artificial Sequence
  Description of Artificial Sequence: Synthetic primer
gatggaatccacatcagcctcgtgactccaaaatcatgtg

SEQ ID NO: 10584 - DNA, 40 bp, Artificial Sequence
  Description of Artificial Sequence: Synthetic primer
ggccggcgtggaggcggcggcggatttgaagggaggagac

SEQ ID NO: 10585 - DNA, 40 bp, Artificial Sequence
  Description of Artificial Sequence: Synthetic primer
ctgcagtttcataatttccgtgggtcgggccgggcgggcc

SEQ ID NO: 10586 - DNA, 40 bp, Artificial Sequence
  Description of Artificial Sequence: Synthetic primer
gctccagccaggagcgcatgtacctgccgtccggcgccgc

SEQ ID NO: 10587 - DNA, 40 bp, Artificial Sequence
  Description of Artificial Sequence: Synthetic primer
gctgcggtgtaccaccaccatcaccaccacccctacgtgc

SEQ ID NO: 10588 - DNA, 40 bp, Artificial Sequence
  Description of Artificial Sequence: Synthetic primer
tttttttgaagacaggaagagccttaagttgtggcagatt

SEQ ID NO: 10589 - DNA, 40 bp, Artificial Sequence
  Description of Artificial Sequence: Synthetic primer
agaatgaaagcaccatttccctgtttcagcataacattgc

SEQ ID NO: 10590 - DNA, 40 bp, Artificial Sequence
  Description of Artificial Sequence: Synthetic primer
tgggaaaataactgataatataatgctgactctggaaatg

SEQ ID NO: 10591 - DNA, 40 bp, Artificial Sequence
  Description of Artificial Sequence: Synthetic primer
atataatcattatatgctgcaagaggggtttttctccagg

SEQ ID NO: 10592 - DNA, 40 bp, Artificial Sequence
  Description of Artificial Sequence: Synthetic primer
tcacacttgaatatgttacaaataacaataaagagttttc

SEQ ID NO: 10593 - DNA, 40 bp, Artificial Sequence
  Description of Artificial Sequence: Synthetic primer
aaatgaagatgtacaatgtctgaaaagtaaacttaaaaaa

SEQ ID NO: 10594 - DNA, 40 bp, Artificial Sequence
  Description of Artificial Sequence: Synthetic primer
taatgtaatttccaacacatattgtccaattttccaagtg

SEQ ID NO: 10595 - DNA, 40 bp, Artificial Sequence
  Description of Artificial Sequence: Synthetic primer
tatatttaataattatgtattgtagtgattgactgtggac

SEQ ID NO: 10596 - DNA, 40 bp, Artificial Sequence
  Description of Artificial Sequence: Synthetic primer
ctgttggagtacaactccatattttctgatggttccattt

SEQ ID NO: 10597 - DNA, 40 bp, Artificial Sequence
  Description of Artificial Sequence: Synthetic primer
aaatggtttctctacttgaaaatggggttttcctttcatc

SEQ ID NO: 10598 - DNA, 40 bp, Artificial Sequence
  Description of Artificial Sequence: Synthetic primer
ccactgaatcaatgagaaatcaaaggtgatacttgaaatc

SEQ ID NO: 10599 - DNA, 40 bp, Artificial Sequence
  Description of Artificial Sequence: Synthetic primer
cttatctctaatataatatacttttctttttgaatgacag

SEQ ID NO: 10600 - DNA, 40 bp, Artificial Sequence
  Description of Artificial Sequence: Synthetic primer
cccgaggacacctgggtaaagttgcgatacgcagtcaatg

SEQ ID NO: 10601 - DNA, 40 bp, Artificial Sequence
  Description of Artificial Sequence: Synthetic primer
tcatttatgttaccttgcttactgaagtcagtgctttcgg

SEQ ID NO: 10602 - DNA, 40 bp, Artificial Sequence
  Description of Artificial Sequence: Synthetic primer
gtttaaaaaattcttattgcttggtttttcattgttttta

SEQ ID NO: 10603 - DNA, 40 bp, Artificial Sequence
  Description of Artificial Sequence: Synthetic primer
atcagaaacaagagcttccctttggtgtgaaagaaagtac

SEQ ID NO: 10604 - DNA, 40 bp, Artificial Sequence
  Description of Artificial Sequence: Synthetic primer
cccgctcagcagcgctcacctccttcaccgcctgctgcac

SEQ ID NO: 10605 - DNA, 40 bp, Artificial Sequence
  Description of Artificial Sequence: Synthetic primer
catggatatactaacaatccctccaagtcgctgacctctg

SEQ ID NO: 10606 - DNA, 40 bp, Artificial Sequence
  Description of Artificial Sequence: Synthetic primer
cacgataagtaaacaaaatgaagaaacacatacactcaag

SEQ ID NO: 10607 - DNA, 40 bp, Artificial Sequence
  Description of Artificial Sequence: Synthetic primer
actgtaaataattaacaaaatataaagacaattttttttc

SEQ ID NO: 10608 - DNA, 40 bp, Artificial Sequence
  Description of Artificial Sequence: Synthetic primer
gcggagtctctggtctggagctggagcaggcaggggcttc

SEQ ID NO: 10609 - DNA, 40 bp, Artificial Sequence
  Description of Artificial Sequence: Synthetic primer
tccagcgcttcattaggctctactctcctttttatttcag

SEQ ID NO: 10610 - DNA, 40 bp, Artificial Sequence
  Description of Artificial Sequence: Synthetic primer
ttttactaattttaccccttcccacactcttgcctgcttc

SEQ ID NO: 10611 - DNA, 40 bp, Artificial Sequence
  Description of Artificial Sequence: Synthetic primer
tagagaaagatatccaatatggtccctaagaacagcaagc

SEQ ID NO: 10612 - DNA, 40 bp, Artificial Sequence
  Description of Artificial Sequence: Synthetic primer
gagagctgtcgtgaatgaggcacacatctcacttggtctg

SEQ ID NO: 10613 - DNA, 40 bp, Artificial Sequence
  Description of Artificial Sequence: Synthetic primer
gcaggtctttgagaggagcctgtcattcccttgcacagtg

SEQ ID NO: 10614 - DNA, 40 bp, Artificial Sequence
  Description of Artificial Sequence: Synthetic primer
tgggatcgtcggcctcgcgggcctccggacctgcccttcg

SEQ ID NO: 10615 - DNA, 40 bp, Artificial Sequence
  Description of Artificial Sequence: Synthetic primer
aagagggtcctcctgctaagtgcagctccacttagctccc

SEQ ID NO: 10616 - DNA, 40 bp, Artificial Sequence
  Description of Artificial Sequence: Synthetic primer
tatagcagtcaaccaagaaaagggaaaaaaacccagagag

SEQ ID NO: 10617 - DNA, 40 bp, Artificial Sequence
  Description of Artificial Sequence: Synthetic primer
cctgtgtcgtctagccttttcttttgcttcccttgttttc

SEQ ID NO: 10618 - DNA, 40 bp, Artificial Sequence
  Description of Artificial Sequence: Synthetic primer
accccagactgaggtatcgcctcatttcccagggcctctt

SEQ ID NO: 10619 - DNA, 40 bp, Artificial Sequence
  Description of Artificial Sequence: Synthetic primer
cccttggggacttttcacctctgatttctggtttttctcc

SEQ ID NO: 10620 - DNA, 40 bp, Artificial Sequence
  Description of Artificial Sequence: Synthetic primer
tggccctggaggagcagccccacccaggcaccgccacagg

SEQ ID NO: 10621 - DNA, 40 bp, Artificial Sequence
  Description of Artificial Sequence: Synthetic primer
gagagctcctgtgccttcttctctatccccgtgcccacag

SEQ ID NO: 10622 - DNA, 40 bp, Artificial Sequence
  Description of Artificial Sequence: Synthetic primer
aattcaaatattgcaggcaggacaaccattactgggatgc

SEQ ID NO: 10623 - DNA, 40 bp, Artificial Sequence
  Description of Artificial Sequence: Synthetic primer
cagaatatcctgatggcttatatgcctgaaattaattttg

SEQ ID NO: 10624 - DNA, 40 bp, Artificial Sequence
  Description of Artificial Sequence: Synthetic primer
ataatggtgaaaatgaagaattgcataaccagcgagtctg

SEQ ID NO: 10625 - DNA, 40 bp, Artificial Sequence
  Description of Artificial Sequence: Synthetic primer
ggcagtggaaactgcttcctgggaatactgatgatgtgcc

SEQ ID NO: 10626 - DNA, 40 bp, Artificial Sequence
  Description of Artificial Sequence: Synthetic primer
tgttatctatgagtagcaaatcaactcaagcaggcagcag

SEQ ID NO: 10627 - DNA, 40 bp, Artificial Sequence
  Description of Artificial Sequence: Synthetic primer
ttgggtaaagtttgtttgtgatgctatatgaagactactc

SEQ ID NO: 10628 - DNA, 40 bp, Artificial Sequence
  Description of Artificial Sequence: Synthetic primer
atttctatgatatgctctatttttcccctataagtatgtc

SEQ ID NO: 10629 - DNA, 40 bp, Artificial Sequence
  Description of Artificial Sequence: Synthetic primer
ctttttttacctttgttttacagcaattatcacaagaaac

SEQ ID NO: 10630 - DNA, 40 bp, Artificial Sequence
  Description of Artificial Sequence: Synthetic primer
gagcaaaggaaagcaatagtgcaatctcttgtgttaaaaa

SEQ ID NO: 10631 - DNA, 40 bp, Artificial Sequence
  Description of Artificial Sequence: Synthetic primer
ctcaaatttttcttaacatatctatagaaaatttacattg

SEQ ID NO: 10632 - DNA, 40 bp, Artificial Sequence
  Description of Artificial Sequence: Synthetic primer
ggtgaagattcagccccaggtgggcacacactacgtcacc

SEQ ID NO: 10633 - DNA, 40 bp, Artificial Sequence
  Description of Artificial Sequence: Synthetic primer
cactactgagaatcaaacttcctaacctgttcctatctgc

SEQ ID NO: 10634 - DNA, 40 bp, Artificial Sequence
  Description of Artificial Sequence: Synthetic primer
ttgtttaaatgagataaaatattaaaagtatacagtttgg

SEQ ID NO: 10635 - DNA, 40 bp, Artificial Sequence
  Description of Artificial Sequence: Synthetic primer
tcagcctgtacaaaaacagctcaaacactgtaggtaaggg

SEQ ID NO: 10636 - DNA, 40 bp, Artificial Sequence
  Description of Artificial Sequence: Synthetic primer
gcgaatgcgctctactcaccacagccttgttttccttaac

SEQ ID NO: 10637 - DNA, 40 bp, Artificial Sequence
  Description of Artificial Sequence: Synthetic primer
ggctttttaaatccacagcttacttatcaagtctctttac

SEQ ID NO: 10638 - DNA, 40 bp, Artificial Sequence
  Description of Artificial Sequence: Synthetic primer
agtggggacggcctgagctctggctctggcacgggcagcc

SEQ ID NO: 10639 - DNA, 40 bp, Artificial Sequence
  Description of Artificial Sequence: Synthetic primer
tccatctccaggagacgtccctgaccttacagtcctgccg

SEQ ID NO: 10640 - DNA, 40 bp, Artificial Sequence
  Description of Artificial Sequence: Synthetic primer
aggctccctccagctgcgccctgacctcctgctgttgctc

SEQ ID NO: 10641 - DNA, 40 bp, Artificial Sequence
  Description of Artificial Sequence: Synthetic primer
tttctggggtcagggctatagcaggaagttggctgtaacc

SEQ ID NO: 10642 - DNA, 40 bp, Artificial Sequence
  Description of Artificial Sequence: Synthetic primer
ttatttattctggaaaaataacactcaatgttctattttc

SEQ ID NO: 10643 - DNA, 40 bp, Artificial Sequence
  Description of Artificial Sequence: Synthetic primer
tagctcctgtgaccactggagaacaccacacacaaaagtg

SEQ ID NO: 10644 - DNA, 40 bp, Artificial Sequence
  Description of Artificial Sequence: Synthetic primer
gtgtaaatgctggtccatggcttacagatgtgactctttc

SEQ ID NO: 10645 - DNA, 40 bp, Artificial Sequence
  Description of Artificial Sequence: Synthetic primer
cactgaaaatcctatggatgaaacaaaattaggtaaaagg

SEQ ID NO: 10646 - DNA, 40 bp, Artificial Sequence
  Description of Artificial Sequence: Synthetic primer
cccaccactgcctgactgtctcttggctccccatcccatc

SEQ ID NO: 10647 - DNA, 40 bp, Artificial Sequence
  Description of Artificial Sequence: Synthetic primer
tcaggggatgtgtgctgtaccccaggagtgaggcaagttc

SEQ ID NO: 10648 - DNA, 40 bp, Artificial Sequence
  Description of Artificial Sequence: Synthetic primer
tgttaagcttataaagttgaactttttttttttttttacc

SEQ ID NO: 10649 - DNA, 40 bp, Artificial Sequence
  Description of Artificial Sequence: Synthetic primer
agcaaaagaaaaataggaccacaaaatagactgtacctac

SEQ ID NO: 10650 - DNA, 40 bp, Artificial Sequence
  Description of Artificial Sequence: Synthetic primer
ccaggagcgatcgtttgcaacctgctctgtgctgcatttc

SEQ ID NO: 10651 - DNA, 40 bp, Artificial Sequence
  Description of Artificial Sequence: Synthetic primer
ggtgcagtggctgcccacctcaccctgcagctggccttac

SEQ ID NO: 10652 - DNA, 40 bp, Artificial Sequence
  Description of Artificial Sequence: Synthetic primer
cgtgcatgagctcagcatgaggaaggcaactgaagcagtg

SEQ ID NO: 10653 - DNA, 40 bp, Artificial Sequence
  Description of Artificial Sequence: Synthetic primer
gctgttgctgaactgaaaagatgaaaaagggatagaaaac

SEQ ID NO: 10654 - DNA, 40 bp, Artificial Sequence
  Description of Artificial Sequence: Synthetic primer
aatagactgcaagctcttgagttcccacaaaggcgtgttc

SEQ ID NO: 10655 - DNA, 40 bp, Artificial Sequence
  Description of Artificial Sequence: Synthetic primer
gttattaagtagatgtgcatatatttacaatattaatttc

SEQ ID NO: 10656 - DNA, 40 bp, Artificial Sequence
  Description of Artificial Sequence: Synthetic primer
gtaatatgatgcttatctttttgccattatattttcttac

SEQ ID NO: 10657 - DNA, 40 bp, Artificial Sequence
  Description of Artificial Sequence: Synthetic primer
aagttacataagtccaatagtcacatggtggttctctata

SEQ ID NO: 10658 - DNA, 40 bp, Artificial Sequence
  Description of Artificial Sequence: Synthetic primer
caccctggaaagttccctcatcagttcctcacgtgaatcc

SEQ ID NO: 10659 - DNA, 40 bp, Artificial Sequence
  Description of Artificial Sequence: Synthetic primer
cgccgcaacactgcgtgcttccatctaggtgccgttctag

SEQ ID NO: 10660 - DNA, 40 bp, Artificial Sequence
  Description of Artificial Sequence: Synthetic primer
gatgtgatacgcttgctcatgtcctctttgcccgaatacc

SEQ ID NO: 10661 - DNA, 40 bp, Artificial Sequence
  Description of Artificial Sequence: Synthetic primer
tttcacgactagcgcttgtgtctatctctctctctctttt

SEQ ID NO: 10662 - DNA, 40 bp, Artificial Sequence
  Description of Artificial Sequence: Synthetic primer
gacaagctcacccagggccagcctctccattccttctcac

SEQ ID NO: 10663 - DNA, 40 bp, Artificial Sequence
  Description of Artificial Sequence: Synthetic primer
tctccatggtgctggtgacagagcctgggtgggcatctcg

SEQ ID NO: 10664 - DNA, 40 bp, Artificial Sequence
  Description of Artificial Sequence: Synthetic primer
ccattacaaagaaagccggactcttttcttataactgagc

SEQ ID NO: 10665 - DNA, 40 bp, Artificial Sequence
  Description of Artificial Sequence: Synthetic primer
tcgaaaaattaaaaagccacgaaattaactaactctctac

SEQ ID NO: 10666 - DNA, 40 bp, Artificial Sequence
  Description of Artificial Sequence: Synthetic primer
atggtgaatgtagatttctcccttcatcttaaccttttcc

SEQ ID NO: 10667 - DNA, 40 bp, Artificial Sequence
  Description of Artificial Sequence: Synthetic primer
tgtcttccatactactcgtatcaatctgatcctaaaaccc

SEQ ID NO: 10668 - DNA, 40 bp, Artificial Sequence
  Description of Artificial Sequence: Synthetic primer
tttaaggctgttagctagactcatatctaaagcaattaag

SEQ ID NO: 10669 - DNA, 40 bp, Artificial Sequence
  Description of Artificial Sequence: Synthetic primer
aagtcagttacttcctaatgagctttctccttctgaatcc

SEQ ID NO: 10670 - DNA, 40 bp, Artificial Sequence
  Description of Artificial Sequence: Synthetic primer
ttactgtgtatataattgaataaatcaataacaatagtcc

SEQ ID NO: 10671 - DNA, 40 bp, Artificial Sequence
  Description of Artificial Sequence: Synthetic primer
cagtttattgttattttaaaatattattttgttttgtgac

SEQ ID NO: 10672 - DNA, 40 bp, Artificial Sequence
  Description of Artificial Sequence: Synthetic primer
gtattgatattactgatcatttgtgctacattaaaaattc

SEQ ID NO: 10673 - DNA, 40 bp, Artificial Sequence
  Description of Artificial Sequence: Synthetic primer
aaaacacaagtttaagtaaactaaaaaaattccctgtaac

SEQ ID NO: 10674 - DNA, 40 bp, Artificial Sequence
  Description of Artificial Sequence: Synthetic primer
ttgaaggtgaataattcttcaactaaagtagatctcattg

SEQ ID NO: 10675 - DNA, 40 bp, Artificial Sequence
  Description of Artificial Sequence: Synthetic primer
gtttgcacatcaccctgaggaaatttacactgtgactcgg

SEQ ID NO: 10676 - DNA, 40 bp, Artificial Sequence
  Description of Artificial Sequence: Synthetic primer
gctggaggtcaggccggtgcttcttaccacccctgtctgc

SEQ ID NO: 10677 - DNA, 40 bp, Artificial Sequence
  Description of Artificial Sequence: Synthetic primer
acgaacagtgactgatattcaggagccccgaggggtgggg

SEQ ID NO: 10678 - DNA, 40 bp, Artificial Sequence
  Description of Artificial Sequence: Synthetic primer
cctgatagttgctaagaaccggtcactgaaaatgaaagtg

SEQ ID NO: 10679 - DNA, 40 bp, Artificial Sequence
  Description of Artificial Sequence: Synthetic primer
gtaattttaaaacttgtttagccaaatggtacttcttttc

SEQ ID NO: 10680 - DNA, 40 bp, Artificial Sequence
  Description of Artificial Sequence: Synthetic primer
tggaccagggaggaaggggcttcccacacccatgtgactc

SEQ ID NO: 10681 - DNA, 40 bp, Artificial Sequence
  Description of Artificial Sequence: Synthetic primer
aagatgcccctccacccttggataccgcatctcatgctag

SEQ ID NO: 10682 - DNA, 40 bp, Artificial Sequence
  Description of Artificial Sequence: Synthetic primer
gcacacacccctctgtgtctaattgcacattgttctcatc

SEQ ID NO: 10683 - DNA, 40 bp, Artificial Sequence
  Description of Artificial Sequence: Synthetic primer
gaggggaggtaccttcaggagcagttgatatttggtgatc

SEQ ID NO: 10684 - DNA, 40 bp, Artificial Sequence
  Description of Artificial Sequence: Synthetic primer
ctaaaatacatttcattttaataaaacagttatattgctc

SEQ ID NO: 10685 - DNA, 40 bp, Artificial Sequence
  Description of Artificial Sequence: Synthetic primer
ggatgggacatatttacttctgtctttaatcttctcttgc

SEQ ID NO: 10686 - DNA, 40 bp, Artificial Sequence
  Description of Artificial Sequence: Synthetic primer
cacaacagactgactctgtccctttgccttccttccctac

SEQ ID NO: 10687 - DNA, 40 bp, Artificial Sequence
  Description of Artificial Sequence: Synthetic primer
gggtctgttaactagggaatcttaggacatttgacatggc

SEQ ID NO: 10688 - DNA, 40 bp, Artificial Sequence
  Description of Artificial Sequence: Synthetic primer
ccaggactgtcttccagcaggaggccactgtctgcagctc

SEQ ID NO: 10689 - DNA, 40 bp, Artificial Sequence
  Description of Artificial Sequence: Synthetic primer
ccctagtgggcagaggccgcaggtgcgaggcgggcacagg

SEQ ID NO: 10690 - DNA, 40 bp, Artificial Sequence
  Description of Artificial Sequence: Synthetic primer
gccctgcctttcacaacacgctcataacatactccacacc

SEQ ID NO: 10691 - DNA, 40 bp, Artificial Sequence
  Description of Artificial Sequence: Synthetic primer
gccagcggagggcacaagggagccccgtcgctctgatccc

SEQ ID NO: 10692 - DNA, 40 bp, Artificial Sequence
  Description of Artificial Sequence: Synthetic primer
gtgcgtggaaccggagtccccggtgcgcggcgccaggtac

SEQ ID NO: 10693 - DNA, 40 bp, Artificial Sequence
  Description of Artificial Sequence: Synthetic primer
agccagacgccctcagacagcaaagcctacccccgcgccg

SEQ ID NO: 10694 - DNA, 40 bp, Artificial Sequence
  Description of Artificial Sequence: Synthetic primer
gtacatgagacgtcattaacctctacatccttcattttcc

SEQ ID NO: 10695 - DNA, 40 bp, Artificial Sequence
  Description of Artificial Sequence: Synthetic primer
gctggctacctggggcacccaccatcacagggcccactcc

SEQ ID NO: 10696 - DNA, 40 bp, Artificial Sequence
  Description of Artificial Sequence: Synthetic primer
gggaagggtggggtgtctctgtccccactcctgcaagcac

SEQ ID NO: 10697 - DNA, 40 bp, Artificial Sequence
  Description of Artificial Sequence: Synthetic primer
ccgtgctcaccgccctgtccctctccctcttctcccttcc

SEQ ID NO: 10698 - DNA, 40 bp, Artificial Sequence
  Description of Artificial Sequence: Synthetic primer
tggtggcccagagatgtgtctgacctgtgatctttgtctg

SEQ ID NO: 10699 - DNA, 40 bp, Artificial Sequence
  Description of Artificial Sequence: Synthetic primer
caagaaaggggacagggaaagtcggcagcacaagctgaac

SEQ ID NO: 10700 - DNA, 40 bp, Artificial Sequence
  Description of Artificial Sequence: Synthetic primer
tgcgaaaagctaacctaacactaaagtgacttcttttctg

SEQ ID NO: 10701 - DNA, 40 bp, Artificial Sequence
  Description of Artificial Sequence: Synthetic primer
tgaccctggtccttttccctcctctccttccccaagaaac

SEQ ID NO: 10702 - DNA, 40 bp, Artificial Sequence
  Description of Artificial Sequence: Synthetic primer
gttgccctgggtcctctttaaagtgtcattttgactctac

SEQ ID NO: 10703 - DNA, 40 bp, Artificial Sequence
  Description of Artificial Sequence: Synthetic primer
ttatttcctgcctcatgaaagcctttatctttttactttg

SEQ ID NO: 10704 - DNA, 40 bp, Artificial Sequence
  Description of Artificial Sequence: Synthetic primer
ttttacattcatgctctgaagacagaacctgacagatatt

SEQ ID NO: 10705 - DNA, 40 bp, Artificial Sequence
  Description of Artificial Sequence: Synthetic primer
ggactgaaatttaattgtttctaaggcgtgtttttattag

SEQ ID NO: 10706 - DNA, 40 bp, Artificial Sequence
  Description of Artificial Sequence: Synthetic primer
ttgagttctgtccccacagctacgagatcatggtgaaatg

SEQ ID NO: 10707 - DNA, 40 bp, Artificial Sequence
  Description of Artificial Sequence: Synthetic primer
cagctcactggtataacttccagctttatccagacctttc

SEQ ID NO: 10708 - DNA, 40 bp, Artificial Sequence
  Description of Artificial Sequence: Synthetic primer
tgacgtacattcaaaggcattttgatgtaaataaatttag

SEQ ID NO: 10709 - DNA, 40 bp, Artificial Sequence
  Description of Artificial Sequence: Synthetic primer
aatgcataggatgatcactgctctccaactatttctgttg

SEQ ID NO: 10710 - DNA, 40 bp, Artificial Sequence
  Description of Artificial Sequence: Synthetic primer
ggttgctgctattgttgctacttttattattactgttatt

SEQ ID NO: 10711 - DNA, 40 bp, Artificial Sequence
  Description of Artificial Sequence: Synthetic primer
tgaaagcttttaaatctggttcattgttttcttttcctag

SEQ ID NO: 10712 - DNA, 40 bp, Artificial Sequence
  Description of Artificial Sequence: Synthetic primer
agagcacactgttttaagaataattaacattttgtttttg

SEQ ID NO: 10713 - DNA, 40 bp, Artificial Sequence
  Description of Artificial Sequence: Synthetic primer
taattacttataggtaagcattaaaaacatgaattagtaa

SEQ ID NO: 10714 - DNA, 40 bp, Artificial Sequence
  Description of Artificial Sequence: Synthetic primer
aactacattgatttttctgtttataaatcagcatattttg

SEQ ID NO: 10715 - DNA, 40 bp, Artificial Sequence
  Description of Artificial Sequence: Synthetic primer
gcaactccaaatcccaccaagcttactctttattttcttc

SEQ ID NO: 10716 - DNA, 40 bp, Artificial Sequence
  Description of Artificial Sequence: Synthetic primer
ctggtgccaccgtcatcaccttcctttcatgctctcttcc

SEQ ID NO: 10717 - DNA, 40 bp, Artificial Sequence
  Description of Artificial Sequence: Synthetic primer
cccagcctcagcagccgagaacaagcctcgtccgcacacc

SEQ ID NO: 10718 - DNA, 40 bp, Artificial Sequence
  Description of Artificial Sequence: Synthetic primer
ggcgcacactccctgattgatgcccctgtggctggcttcc

SEQ ID NO: 10719 - DNA, 40 bp, Artificial Sequence
  Description of Artificial Sequence: Synthetic primer
gagggccaggggctgggaaagggtggtcacagatttaggc

SEQ ID NO: 10720 - DNA, 40 bp, Artificial Sequence
  Description of Artificial Sequence: Synthetic primer
agatcataaggccgcgccgactctaccattgcctttctcc

SEQ ID NO: 10721 - DNA, 40 bp, Artificial Sequence
  Description of Artificial Sequence: Synthetic primer
gaggacttgtcgtccctcagctccatcccggggccctctg

SEQ ID NO: 10722 - DNA, 40 bp, Artificial Sequence
  Description of Artificial Sequence: Synthetic primer
tctgcagagccagagggcaggccggcttctcggtgtgtgc

SEQ ID NO: 10723 - DNA, 40 bp, Artificial Sequence
  Description of Artificial Sequence: Synthetic primer
gggcaactaacctgaatccatgaaaacaaggagaatctgg

SEQ ID NO: 10724 - DNA, 40 bp, Artificial Sequence
  Description of Artificial Sequence: Synthetic primer
agtacgaggaagagttcgactacgagaccgagagcgagac

SEQ ID NO: 10725 - DNA, 40 bp, Artificial Sequence
  Description of Artificial Sequence: Synthetic primer
gccgcgatcgtcttcaggctcggtctcgggctcagtggtg

SEQ ID NO: 10726 - DNA, 40 bp, Artificial Sequence
  Description of Artificial Sequence: Synthetic primer
ttgtcactatctgacactaccctgcagttcatggagcaac

SEQ ID NO: 10727 - DNA, 40 bp, Artificial Sequence
  Description of Artificial Sequence: Synthetic primer
ctgttgggcagagtacttgatttttaaatgtggtcttttg

SEQ ID NO: 10728 - DNA, 40 bp, Artificial Sequence
  Description of Artificial Sequence: Synthetic primer
cagtctcaccactgaccagtttgtctgtctgtgtgtgtcc

SEQ ID NO: 10729 - DNA, 40 bp, Artificial Sequence
  Description of Artificial Sequence: Synthetic primer
gggctgcaacccggcgcccgcgtccctgcccccacacagc

SEQ ID NO: 10730 - DNA, 40 bp, Artificial Sequence
  Description of Artificial Sequence: Synthetic primer
caaggcctggcatgcggggcaggagtatctcccgggactc

SEQ ID NO: 10731 - DNA, 40 bp, Artificial Sequence
  Description of Artificial Sequence: Synthetic primer
cagttgctggccaggtaaacggcctgctcctcccacctag

SEQ ID NO: 10732 - DNA, 40 bp, Artificial Sequence
  Description of Artificial Sequence: Synthetic primer
tgaggacaggccctgcacgccatctcgctcaataaagacc

SEQ ID NO: 10733 - DNA, 40 bp, Artificial Sequence
  Description of Artificial Sequence: Synthetic primer
gaaagagagagagagagaacttttgagcatttaaaaacag

SEQ ID NO: 10734 - DNA, 40 bp, Artificial Sequence
  Description of Artificial Sequence: Synthetic primer
ggttccatggccctgaccccaaactccttctccctccatc

SEQ ID NO: 10735 - DNA, 40 bp, Artificial Sequence
  Description of Artificial Sequence: Synthetic primer
gaacaccagagagcctgctgggaattcctggaggagcagg

SEQ ID NO: 10736 - DNA, 40 bp, Artificial Sequence
  Description of Artificial Sequence: Synthetic primer
attttaaaatttttaaaggagtgtgtggtagatgactgac

SEQ ID NO: 10737 - DNA, 40 bp, Artificial Sequence
  Description of Artificial Sequence: Synthetic primer
tttttcacgttatgaaatgtttcttttgggataatttggg

SEQ ID NO: 10738 - DNA, 40 bp, Artificial Sequence
  Description of Artificial Sequence: Synthetic primer
attcatacatgatactaaataagccaacacaccacagatg

SEQ ID NO: 10739 - DNA, 40 bp, Artificial Sequence
  Description of Artificial Sequence: Synthetic primer
cgcttgtttgcttacacctcctcatgtggctgatgttttc

SEQ ID NO: 10740 - DNA, 40 bp, Artificial Sequence
  Description of Artificial Sequence: Synthetic primer
tggaatcagtgatttcagattgtttgtttcttttttctcc

SEQ ID NO: 10741 - DNA, 40 bp, Artificial Sequence
  Description of Artificial Sequence: Synthetic primer
caacattccatgatgaccaaatatttactaaaaagaatag

SEQ ID NO: 10742 - DNA, 40 bp, Artificial Sequence
  Description of Artificial Sequence: Synthetic primer
gcagagtccacgctcctcatggctcagcctggaattgctc

SEQ ID NO: 10743 - DNA, 40 bp, Artificial Sequence
  Description of Artificial Sequence: Synthetic primer
ctcttttccctcacatcttcaccacaatgtgcttttctcc

SEQ ID NO: 10744 - DNA, 40 bp, Artificial Sequence
  Description of Artificial Sequence: Synthetic primer
tattagatggtctccatttacaattaaaccaataataaag

SEQ ID NO: 10745 - DNA, 40 bp, Artificial Sequence
  Description of Artificial Sequence: Synthetic primer
aacctttagtattagatagtggtgcacttaaaaataaatg

SEQ ID NO: 10746 - DNA, 40 bp, Artificial Sequence
  Description of Artificial Sequence: Synthetic primer
acagaaatttgaaatgtaaccagataatggctgacaatgg

SEQ ID NO: 10747 - DNA, 40 bp, Artificial Sequence
  Description of Artificial Sequence: Synthetic primer
aaaccactgtattagtttatgactgccattcttatttttt

SEQ ID NO: 10748 - DNA, 40 bp, Artificial Sequence
  Description of Artificial Sequence: Synthetic primer
ggcctccctgtcccacacaacttcctgcttgtccccttcc

SEQ ID NO: 10749 - DNA, 40 bp, Artificial Sequence
  Description of Artificial Sequence: Synthetic primer
accccgctccccttttggtagcgcccgggtctctcagtcg

SEQ ID NO: 10750 - DNA, 40 bp, Artificial Sequence
  Description of Artificial Sequence: Synthetic primer
agatacctcagctagaggtaacagtgtgtctctcttcttc

SEQ ID NO: 10751 - DNA, 40 bp, Artificial Sequence
  Description of Artificial Sequence: Synthetic primer
acatatcttctgagcaactcttcagtgcatatctttgttc

SEQ ID NO: 10752 - DNA, 40 bp, Artificial Sequence
  Description of Artificial Sequence: Synthetic primer
cccttaaaataaccattgtccctcacatgtgcactcttcc

SEQ ID NO: 10753 - DNA, 40 bp, Artificial Sequence
  Description of Artificial Sequence: Synthetic primer
aaacctttttaaaccaccatgaccaggtaaaaagaatttc

SEQ ID NO: 10754 - DNA, 40 bp, Artificial Sequence
  Description of Artificial Sequence: Synthetic primer
tcaaaaagtatttgaaagttagtaaaaaaactgactgtcc

SEQ ID NO: 10755 - DNA, 40 bp, Artificial Sequence
  Description of Artificial Sequence: Synthetic primer
gtcattagaactgctcttgacttctgtcccgttcttcatc

SEQ ID NO: 10756 - DNA, 40 bp, Artificial Sequence
  Description of Artificial Sequence: Synthetic primer
tttggtcggctttagggtcccatccctgaggcagcctgtt

SEQ ID NO: 10757 - DNA, 40 bp, Artificial Sequence
  Description of Artificial Sequence: Synthetic primer
ggtggcaacttgcctcccggtgcgggcgtctctcccccac

SEQ ID NO: 10758 - DNA, 40 bp, Artificial Sequence
  Description of Artificial Sequence: Synthetic primer
tgcaaaattgtttgaaatcaaaagtaggaaactaaagaag

SEQ ID NO: 10759 - DNA, 40 bp, Artificial Sequence
  Description of Artificial Sequence: Synthetic primer
tttcctagaaagcccttcctttcccttttatgctctgttc

SEQ ID NO: 10760 - DNA, 40 bp, Artificial Sequence
  Description of Artificial Sequence: Synthetic primer
ctcagctgtaagaaatgcaagatggcaggaaagcaaagag

SEQ ID NO: 10761 - DNA, 40 bp, Artificial Sequence
  Description of Artificial Sequence: Synthetic primer
aaagctgactgacaattcaaaagttgtttttcccatcttc

SEQ ID NO: 10762 - DNA, 40 bp, Artificial Sequence
  Description of Artificial Sequence: Synthetic primer
ggcaggaggagggaatggcctcagggcaccccccttgtcc

SEQ ID NO: 10763 - DNA, 40 bp, Artificial Sequence
  Description of Artificial Sequence: Synthetic primer
gggccagctctgacccctggttctcccacacccccaccag

SEQ ID NO: 10764 - DNA, 40 bp, Artificial Sequence
  Description of Artificial Sequence: Synthetic primer
tttatcgaggaagaccacagggtgctgtagggcagcacat

SEQ ID NO: 10765 - DNA, 40 bp, Artificial Sequence
  Description of Artificial Sequence: Synthetic primer
aggctatgggtagacttgcatttcaaatccttctcttttg

SEQ ID NO: 10766 - DNA, 40 bp, Artificial Sequence
  Description of Artificial Sequence: Synthetic primer
cagcaagacttgccgatttttgaatgaaggcctaaatgac

SEQ ID NO: 10767 - DNA, 40 bp, Artificial Sequence
  Description of Artificial Sequence: Synthetic primer
aagtgtgaagtcactggcagggaagaggtaattaacaaac

SEQ ID NO: 10768 - DNA, 40 bp, Artificial Sequence
  Description of Artificial Sequence: Synthetic primer
gaaccttgtcctcctctttgcctggctctaggtcccttgg

SEQ ID NO: 10769 - DNA, 40 bp, Artificial Sequence
  Description of Artificial Sequence: Synthetic primer
tgcccagcctgggataccacccttctaacccaccctcacc

SEQ ID NO: 10770 - DNA, 40 bp, Artificial Sequence
  Description of Artificial Sequence: Synthetic primer
ggaggcagaagccgtcacagtggtgatgggctggcagtag

SEQ ID NO: 10771 - DNA, 40 bp, Artificial Sequence
  Description of Artificial Sequence: Synthetic primer
ggggccctcgcggggcccgttctcacaaccctcggaaccc

SEQ ID NO: 10772 - DNA, 40 bp, Artificial Sequence
  Description of Artificial Sequence: Synthetic primer
gcttgctgtccccaaaacctgcagggccatggggaggctc

SEQ ID NO: 10773 - DNA, 40 bp, Artificial Sequence
  Description of Artificial Sequence: Synthetic primer
tgagccgcaggaggcttgctccccacccacctccccttcc

SEQ ID NO: 10774 - DNA, 40 bp, Artificial Sequence
  Description of Artificial Sequence: Synthetic primer
gagagtacaggaggagcccctggatctaactacccctgtc

SEQ ID NO: 10775 - DNA, 40 bp, Artificial Sequence
  Description of Artificial Sequence: Synthetic primer
agaacagacagacagacagccctctgcagccccgactcac

SEQ ID NO: 10776 - DNA, 40 bp, Artificial Sequence
  Description of Artificial Sequence: Synthetic primer
aagctctggtttcagtgtcatgtgtctattctttatttcc

SEQ ID NO: 10777 - DNA, 40 bp, Artificial Sequence
  Description of Artificial Sequence: Synthetic primer
ttcaagacaaaacaagagcacagttgaaacatctaatttg

SEQ ID NO: 10778 - DNA, 40 bp, Artificial Sequence
  Description of Artificial Sequence: Synthetic primer
tttatatgtgtactagtcaataaacttatatattttctcc

SEQ ID NO: 10779 - DNA, 40 bp, Artificial Sequence
  Description of Artificial Sequence: Synthetic primer
caacggaaatatctaactgaaaggcaaaaattcatcacac

SEQ ID NO: 10780 - DNA, 40 bp, Artificial Sequence
  Description of Artificial Sequence: Synthetic primer
gaatttcattttattctttgaggcattagtcactagttgt

SEQ ID NO: 10781 - DNA, 40 bp, Artificial Sequence
  Description of Artificial Sequence: Synthetic primer
gaacatttgtcatttattcttttctactccttgtattttg

SEQ ID NO: 10782 - DNA, 40 bp, Artificial Sequence
  Description of Artificial Sequence: Synthetic primer
ataatttatttcatgcagatattatttgttgtgtgctttc

SEQ ID NO: 10783 - DNA, 40 bp, Artificial Sequence
  Description of Artificial Sequence: Synthetic primer
tgtatttaacactcataaacactcagtcaagatgaaaaaa

SEQ ID NO: 10784 - DNA, 40 bp, Artificial Sequence
  Description of Artificial Sequence: Synthetic primer
ctctgctgatgagtggatctgcactgggaagagagagcag

SEQ ID NO: 10785 - DNA, 40 bp, Artificial Sequence
  Description of Artificial Sequence: Synthetic primer
ctcaccttgcacttctctcatcattatccttgtttctctc

SEQ ID NO: 10786 - DNA, 40 bp, Artificial Sequence
  Description of Artificial Sequence: Synthetic primer
tttttagtggcagaatatttctacagggttatgtcctttc

SEQ ID NO: 10787 - DNA, 40 bp, Artificial Sequence
  Description of Artificial Sequence: Synthetic primer
aacagacctttctgaggttagctgattcttgatgcttctc

SEQ ID NO: 10788 - DNA, 40 bp, Artificial Sequence
  Description of Artificial Sequence: Synthetic primer
ctgttctctcacccactcacacttaatttttcttttcctc

SEQ ID NO: 10789 - DNA, 40 bp, Artificial Sequence
  Description of Artificial Sequence: Synthetic primer
acagctcataatcagcctctgtacaggtatggggctacag

SEQ ID NO: 10790 - DNA, 40 bp, Artificial Sequence
  Description of Artificial Sequence: Synthetic primer
ccggcctcaccaggcgcagcctggccacttccctctactg

SEQ ID NO: 10791 - DNA, 40 bp, Artificial Sequence
  Description of Artificial Sequence: Synthetic primer
gttctcctccctgttccgtggctcataactctctccttcg

SEQ ID NO: 10792 - DNA, 40 bp, Artificial Sequence
  Description of Artificial Sequence: Synthetic primer
gggttggttcctaaggatcttgacctcgggcagctttgag

SEQ ID NO: 10793 - DNA, 40 bp, Artificial Sequence
  Description of Artificial Sequence: Synthetic primer
cacaacctcagcctccccttctctgctgttggctgcccag

SEQ ID NO: 10794 - DNA, 40 bp, Artificial Sequence
  Description of Artificial Sequence: Synthetic primer
gcatcgggcgagggccgcccagcgaggcagtgcgggcacg

SEQ ID NO: 10795 - DNA, 40 bp, Artificial Sequence
  Description of Artificial Sequence: Synthetic primer
tggtgctggcgctcagcatgcgtgcctgcacgcggcgcgg

SEQ ID NO: 10796 - DNA, 40 bp, Artificial Sequence
  Description of Artificial Sequence: Synthetic primer
actagagggcaacctgcttattgggaacatggcagtgagc

SEQ ID NO: 10797 - DNA, 40 bp, Artificial Sequence
  Description of Artificial Sequence: Synthetic primer
cccggttggtcttacttagaaaaggggccttaggtataac

SEQ ID NO: 10798 - DNA, 40 bp, Artificial Sequence
  Description of Artificial Sequence: Synthetic primer
ttaggggagagaggcaggtgggccacggggctagggaagc

SEQ ID NO: 10799 - DNA, 40 bp, Artificial Sequence
  Description of Artificial Sequence: Synthetic primer
cgggctgccctgacaggctctgctcactccctctatgtag

SEQ ID NO: 10800 - DNA, 40 bp, Artificial Sequence
  Description of Artificial Sequence: Synthetic primer
aatccctttagaatggccatccatattttgttttacactg

SEQ ID NO: 10801 - DNA, 40 bp, Artificial Sequence
  Description of Artificial Sequence: Synthetic primer
tagtattcaatatctaaagtacaagaagccaataagatac

SEQ ID NO: 10802 - DNA, 40 bp, Artificial Sequence
  Description of Artificial Sequence: Synthetic primer
ccccgggctcaatggccaggcatccccgccccctacaacc

SEQ ID NO: 10803 - DNA, 40 bp, Artificial Sequence
  Description of Artificial Sequence: Synthetic primer
cctctcccacatgcctgggcccacttacctctcacctgtg

SEQ ID NO: 10804 - DNA, 40 bp, Artificial Sequence
  Description of Artificial Sequence: Synthetic primer
tgcaacttataatgcaagttggacaagggatattggactc

SEQ ID NO: 10805 - DNA, 40 bp, Artificial Sequence
  Description of Artificial Sequence: Synthetic primer
tcttcaagggattaagctaggatatcatttcagttacttg

SEQ ID NO: 10806 - DNA, 40 bp, Artificial Sequence
  Description of Artificial Sequence: Synthetic primer
cggggtcccaaggacccagacgcagagcccagcgccttcc

SEQ ID NO: 10807 - DNA, 40 bp, Artificial Sequence
  Description of Artificial Sequence: Synthetic primer
caccccgagcccttggggcgcactcgctcagctgtcttcg

SEQ ID NO: 10808 - DNA, 40 bp, Artificial Sequence
  Description of Artificial Sequence: Synthetic primer
ctggccttaggacatttggccttgctatatattccgacag

SEQ ID NO: 10809 - DNA, 40 bp, Artificial Sequence
  Description of Artificial Sequence: Synthetic primer
ctcactccgaagcccctctgagttgattgagccatctttg

SEQ ID NO: 10810 - DNA, 40 bp, Artificial Sequence
  Description of Artificial Sequence: Synthetic primer
ccccagaagaggggccctgccccaccccacccacctaccc

SEQ ID NO: 10811 - DNA, 40 bp, Artificial Sequence
  Description of Artificial Sequence: Synthetic primer
gtcacctgggcctcagtttaccctgcctgctgcttccacc

SEQ ID NO: 10812 - DNA, 40 bp, Artificial Sequence
  Description of Artificial Sequence: Synthetic primer
tttaacataagcatgatgacatatttttacttagcttgag

SEQ ID NO: 10813 - DNA, 40 bp, Artificial Sequence
  Description of Artificial Sequence: Synthetic primer
ggagcagaaagttaaatctcttaaattcttgtattcttag

SEQ ID NO: 10814 - DNA, 40 bp, Artificial Sequence
  Description of Artificial Sequence: Synthetic primer
cttctgtttcaaaatctctatttgaagtggactgtttatc

SEQ ID NO: 10815 - DNA, 40 bp, Artificial Sequence
  Description of Artificial Sequence: Synthetic primer
catccgctctgttctgaagaagccctggatccagacattg

SEQ ID NO: 10816 - DNA, 40 bp, Artificial Sequence
  Description of Artificial Sequence: Synthetic primer
cattctcaaaagtgtgcctatgcttaattgtaattacttg

SEQ ID NO: 10817 - DNA, 40 bp, Artificial Sequence
  Description of Artificial Sequence: Synthetic primer
ccttgtagaactgctaacctggaatccaaccagaaaacac

SEQ ID NO: 10818 - DNA, 40 bp, Artificial Sequence
  Description of Artificial Sequence: Synthetic primer
acggctctgcataaccgggacctgccgggcccccaccccg

SEQ ID NO: 10819 - DNA, 40 bp, Artificial Sequence
  Description of Artificial Sequence: Synthetic primer
gtccctttcccgcctccccgtcgccgctgatagcgtctcc

SEQ ID NO: 10820 - DNA, 40 bp, Artificial Sequence
  Description of Artificial Sequence: Synthetic primer
tgtgattgttcattcatgatcccactgccttcttttcttg

SEQ ID NO: 10821 - DNA, 40 bp, Artificial Sequence
  Description of Artificial Sequence: Synthetic primer
gtttggctaagagcagccaccaaggctcagctaggcagtg

SEQ ID NO: 10822 - DNA, 40 bp, Artificial Sequence
  Description of Artificial Sequence: Synthetic primer
caaaaaaatgtaatggctacagagaagagagagcatagtg

SEQ ID NO: 10823 - DNA, 40 bp, Artificial Sequence
  Description of Artificial Sequence: Synthetic primer
ttctctcctctccctccttcccatctgtctccgtcttctc

SEQ ID NO: 10824 - DNA, 40 bp, Artificial Sequence
  Description of Artificial Sequence: Synthetic primer
agtaaaatgtacaaagaaaaacaatttgttacttaagcag

SEQ ID NO: 10825 - DNA, 40 bp, Artificial Sequence
  Description of Artificial Sequence: Synthetic primer
atgctgttttaaatgtttgattataatattaatataatcg

SEQ ID NO: 10826 - DNA, 40 bp, Artificial Sequence
  Description of Artificial Sequence: Synthetic primer
ctgcttcaagccaaaatcctttggtacatcccccctgtat

SEQ ID NO: 10827 - DNA, 40 bp, Artificial Sequence
  Description of Artificial Sequence: Synthetic primer
tccaatgcttaaaagatgcataactttacttgcttttccc

SEQ ID NO: 10828 - DNA, 40 bp, Artificial Sequence
  Description of Artificial Sequence: Synthetic primer
agttcttcagttcctttttcttctaatattgctgcctgtg

SEQ ID NO: 10829 - DNA, 40 bp, Artificial Sequence
  Description of Artificial Sequence: Synthetic primer
aacctgctctgagcctgatggatccttctccagccctcac

SEQ ID NO: 10830 - DNA, 40 bp, Artificial Sequence
  Description of Artificial Sequence: Synthetic primer
ggcccaatctacagactgggaaactgaggctagccctgcg

SEQ ID NO: 10831 - DNA, 40 bp, Artificial Sequence
  Description of Artificial Sequence: Synthetic primer
cttggctccaggagttcctgcggatgatgggatgtgagcg

SEQ ID NO: 10832 - DNA, 40 bp, Artificial Sequence
  Description of Artificial Sequence: Synthetic primer
agggaatgaaagttcattttaaaaacacatgtagaaacct

SEQ ID NO: 10833 - DNA, 40 bp, Artificial Sequence
  Description of Artificial Sequence: Synthetic primer
agctataactttattggaaaaactctaaaacctttagttc

SEQ ID NO: 10834 - DNA, 40 bp, Artificial Sequence
  Description of Artificial Sequence: Synthetic primer
tttccaattgaggtcttacatatgtttctttgatcttatc

SEQ ID NO: 10835 - DNA, 40 bp, Artificial Sequence
  Description of Artificial Sequence: Synthetic primer
catatggagactgggtacatttgaataatgagagaaaatg

SEQ ID NO: 10836 - DNA, 40 bp, Artificial Sequence
  Description of Artificial Sequence: Synthetic primer
taccactctccggcccctccccgagccccgcccccacgtt

SEQ ID NO: 10837 - DNA, 40 bp, Artificial Sequence
  Description of Artificial Sequence: Synthetic primer
acccctcccgacgctgagggccggctccctcccctccaac

SEQ ID NO: 10838 - DNA, 40 bp, Artificial Sequence
  Description of Artificial Sequence: Synthetic primer
tatatattccacattagttttaaaaaaaaatcagaaatgc

SEQ ID NO: 10839 - DNA, 40 bp, Artificial Sequence
  Description of Artificial Sequence: Synthetic primer
caatagtattacctatcccatcactcccatctcacacagc

SEQ ID NO: 10840 - DNA, 40 bp, Artificial Sequence
  Description of Artificial Sequence: Synthetic primer
ttctgctaactttacactatttttcctccttgttttcctc

SEQ ID NO: 10841 - DNA, 40 bp, Artificial Sequence
  Description of Artificial Sequence: Synthetic primer
ttaatcacacacaaaatacggttataaaagactgacttac

SEQ ID NO: 10842 - DNA, 40 bp, Artificial Sequence
  Description of Artificial Sequence: Synthetic primer
ccttcaagcgatcccagggcggggcccagccctgcactcc

SEQ ID NO: 10843 - DNA, 40 bp, Artificial Sequence
  Description of Artificial Sequence: Synthetic primer
caggcgtcagtcccagagttggccacgaccttcctcttcc

SEQ ID NO: 10844 - DNA, 40 bp, Artificial Sequence
  Description of Artificial Sequence: Synthetic primer
atgcccttacattaattactgtgataatatgtttttgtgt

SEQ ID NO: 10845 - DNA, 40 bp, Artificial Sequence
  Description of Artificial Sequence: Synthetic primer
aataattaaaataattttacaaaaaacatgtatggatatt

SEQ ID NO: 10846 - DNA, 40 bp, Artificial Sequence
  Description of Artificial Sequence: Synthetic primer
attattgtaccatccttccattaaagagagagagattttc

SEQ ID NO: 10847 - DNA, 40 bp, Artificial Sequence
  Description of Artificial Sequence: Synthetic primer
cttactcttgactctaattaaagaaaaattaaatcataat

SEQ ID NO: 10848 - DNA, 40 bp, Artificial Sequence
  Description of Artificial Sequence: Synthetic primer
ggctgtcaggaccagggctgtgggtctcctgatgcctagc

SEQ ID NO: 10849 - DNA, 40 bp, Artificial Sequence
  Description of Artificial Sequence: Synthetic primer
aatgatccaaatggctggtgagattgcagacggcatggcc

SEQ ID NO: 10850 - DNA, 40 bp, Artificial Sequence
  Description of Artificial Sequence: Synthetic primer
aggccgtgggaggcagcgttggctgcttcgacacactgag

SEQ ID NO: 10851 - DNA, 40 bp, Artificial Sequence
  Description of Artificial Sequence: Synthetic primer
ttcagctgggctccaaggcaacgccaggactaaagaaggg

SEQ ID NO: 10852 - DNA, 40 bp, Artificial Sequence
  Description of Artificial Sequence: Synthetic primer
atttcatgttgtgcttgaaaataaaaccaaaagtggtagc

SEQ ID NO: 10853 - DNA, 40 bp, Artificial Sequence
  Description of Artificial Sequence: Synthetic primer
aagcttgcgagaaaataaatcagtaaaagaatttcctatc

SEQ ID NO: 10854 - DNA, 40 bp, Artificial Sequence
  Description of Artificial Sequence: Synthetic primer
tatggttgtaaggccctgcaatgaccccgttctctctgtc

SEQ ID NO: 10855 - DNA, 40 bp, Artificial Sequence
  Description of Artificial Sequence: Synthetic primer
gtgcccacccgctctccacccatctcacttagctccaatg

SEQ ID NO: 10856 - DNA, 40 bp, Artificial Sequence
  Description of Artificial Sequence: Synthetic primer
tcagtctctgtctactacacaaggagctcagagaggtttc

SEQ ID NO: 10857 - DNA, 40 bp, Artificial Sequence
  Description of Artificial Sequence: Synthetic primer
ggttttccctgtagccttgcgtattcctgagctgcaacat

SEQ ID NO: 10858 - DNA, 40 bp, Artificial Sequence
  Description of Artificial Sequence: Synthetic primer
agctgtggaattccccatgaacattcaaaacactaacagg

SEQ ID NO: 10859 - DNA, 40 bp, Artificial Sequence
  Description of Artificial Sequence: Synthetic primer
ttcattggtgtcctgcttccttgtgattaacactgctttg

SEQ ID NO: 10860 - DNA, 40 bp, Artificial Sequence
  Description of Artificial Sequence: Synthetic primer
ctctaaaaagaaaaataaaagggaaaacgtgacctaaagg

SEQ ID NO: 10861 - DNA, 40 bp, Artificial Sequence
  Description of Artificial Sequence: Synthetic primer
aagaatatacagatgaaaaattctggcatactgaatatac

SEQ ID NO: 10862 - DNA, 40 bp, Artificial Sequence
  Description of Artificial Sequence: Synthetic primer
taaacaattactcagtatgccctattcgggaaaaagactc

SEQ ID NO: 10863 - DNA, 40 bp, Artificial Sequence
  Description of Artificial Sequence: Synthetic primer
ccttgaagaagccttattctcaccatccctcactcacttc

SEQ ID NO: 10864 - DNA, 40 bp, Artificial Sequence
  Description of Artificial Sequence: Synthetic primer
ggggtggggcacggggtgggtgttggggcggctcccttac

SEQ ID NO: 10865 - DNA, 40 bp, Artificial Sequence
  Description of Artificial Sequence: Synthetic primer
ggacagagtattttacatctcagtgatctcttttattact

SEQ ID NO: 10866 - DNA, 40 bp, Artificial Sequence
  Description of Artificial Sequence: Synthetic primer
tgcagtaggatctctcctataggaagctggaaaagctttg

SEQ ID NO: 10867 - DNA, 40 bp, Artificial Sequence
  Description of Artificial Sequence: Synthetic primer
aaaaaataaagggttcttactagttccaaataatttaatc

SEQ ID NO: 10868 - DNA, 40 bp, Artificial Sequence
  Description of Artificial Sequence: Synthetic primer
gagggataccctgagttaaacatgtgcctccttcccacag

SEQ ID NO: 10869 - DNA, 40 bp, Artificial Sequence
  Description of Artificial Sequence: Synthetic primer
ttctatttattaaatgctgatactattctctaaatttctg

SEQ ID NO: 10870 - DNA, 40 bp, Artificial Sequence
  Description of Artificial Sequence: Synthetic primer
gggacgggacgcaggtttggttggagctttgaccttttgc

SEQ ID NO: 10871 - DNA, 40 bp, Artificial Sequence
  Description of Artificial Sequence: Synthetic primer
accacacaaaagctaaaacctccaccttcttcacttccac

SEQ ID NO: 10872 - DNA, 40 bp, Artificial Sequence
  Description of Artificial Sequence: Synthetic primer
cactggctggaagaactctggggagagggagaagaagtgg

SEQ ID NO: 10873 - DNA, 40 bp, Artificial Sequence
  Description of Artificial Sequence: Synthetic primer
acattagaaaaaggccaaaaggaaattatgagaatagcag

SEQ ID NO: 10874 - DNA, 40 bp, Artificial Sequence
  Description of Artificial Sequence: Synthetic primer
attatttttaaaatagtaaaatgttaataacttatgatgc

SEQ ID NO: 10875 - DNA, 40 bp, Artificial Sequence
  Description of Artificial Sequence: Synthetic primer
gggacccataagccaccaagggtgttctccgcaggatcag

SEQ ID NO: 10876 - DNA, 40 bp, Artificial Sequence
  Description of Artificial Sequence: Synthetic primer
tacattatttacattgatgtattgtatatcaaccaattat

SEQ ID NO: 10877 - DNA, 40 bp, Artificial Sequence
  Description of Artificial Sequence: Synthetic primer
tcctggagatgcgcctttgacctctcagcttccccctcag

SEQ ID NO: 10878 - DNA, 40 bp, Artificial Sequence
  Description of Artificial Sequence: Synthetic primer
ctgcctccagggccgttggtgagtgtggccagcccatgcc

SEQ ID NO: 10879 - DNA, 40 bp, Artificial Sequence
  Description of Artificial Sequence: Synthetic primer
cacagatcctgtttagggctccttctacagcaagtctcag

SEQ ID NO: 10880 - DNA, 40 bp, Artificial Sequence
  Description of Artificial Sequence: Synthetic primer
tcgggtacttgaatctagttttccctgacggtcaaagttg

SEQ ID NO: 10881 - DNA, 40 bp, Artificial Sequence
  Description of Artificial Sequence: Synthetic primer
cacgcacttaaccttacttgcaaaatttgtgtctgacctc

SEQ ID NO: 10882 - DNA, 40 bp, Artificial Sequence
  Description of Artificial Sequence: Synthetic primer
ctttctacagcaaaacaaaagaactgtgtgagtgcaagtg

SEQ ID NO: 10883 - DNA, 40 bp, Artificial Sequence
  Description of Artificial Sequence: Synthetic primer
ctcaggctcagggcttgtgtgggcgaggctgaggctcttg

SEQ ID NO: 10884 - DNA, 40 bp, Artificial Sequence
  Description of Artificial Sequence: Synthetic primer
agtacaggggctgcaggcctcctgggcccaggccttcagc

SEQ ID NO: 10885 - DNA, 40 bp, Artificial Sequence
  Description of Artificial Sequence: Synthetic primer
atgctagggacttggggagcttaaatgactcaaaggtgac

SEQ ID NO: 10886 - DNA, 40 bp, Artificial Sequence
  Description of Artificial Sequence: Synthetic primer
gtgttctaatggcccttccttgtcttcttcatctctctcc

SEQ ID NO: 10887 - DNA, 40 bp, Artificial Sequence
  Description of Artificial Sequence: Synthetic primer
catttaacaattattttattctggggttagagttttcaag

SEQ ID NO: 10888 - DNA, 40 bp, Artificial Sequence
  Description of Artificial Sequence: Synthetic primer
tcatatactcattaagatgaacattcgccattttgtactt

SEQ ID NO: 10889 - DNA, 40 bp, Artificial Sequence
  Description of Artificial Sequence: Synthetic primer
gcgcttcgggtgaattcataccagagccaccgggtgtgac

SEQ ID NO: 10890 - DNA, 40 bp, Artificial Sequence
  Description of Artificial Sequence: Synthetic primer
atgaggcacatgtacataccctctgttgtatggctgttgg

SEQ ID NO: 10891 - DNA, 40 bp, Artificial Sequence
  Description of Artificial Sequence: Synthetic primer
ggttgacacagagaggcaaaggtctggagttggggacacc

SEQ ID NO: 10892 - DNA, 40 bp, Artificial Sequence
  Description of Artificial Sequence: Synthetic primer
gaaggacaccacccctcctctggaggccatgctctgtgcc

SEQ ID NO: 10893 - DNA, 40 bp, Artificial Sequence
  Description of Artificial Sequence: Synthetic primer
ggaaatgggagcgtcatccccagtcaccgttttgttcctc

SEQ ID NO: 10894 - DNA, 40 bp, Artificial Sequence
  Description of Artificial Sequence: Synthetic primer
ccacccatgtgttccccagccccacccatttcctctcctc

SEQ ID NO: 10895 - DNA, 40 bp, Artificial Sequence
  Description of Artificial Sequence: Synthetic primer
ttataattttcatatgcctaatcttgatggaaatggtttt

SEQ ID NO: 10896 - DNA, 40 bp, Artificial Sequence
  Description of Artificial Sequence: Synthetic primer
gtgttccacaatacaaccattgctctgaggcagcaatctg

SEQ ID NO: 10897 - DNA, 40 bp, Artificial Sequence
  Description of Artificial Sequence: Synthetic primer
tgggaccgcacgggagccgaggcaggggatgggtgtcagc

SEQ ID NO: 10898 - DNA, 40 bp, Artificial Sequence
  Description of Artificial Sequence: Synthetic primer
tctgggatggcccatgtgaccgccagccctgcccatgtcc

SEQ ID NO: 10899 - DNA, 40 bp, Artificial Sequence
  Description of Artificial Sequence: Synthetic primer
ccacaggccctgtgataggaagctgtggagtgatgagctg

SEQ ID NO: 10900 - DNA, 40 bp, Artificial Sequence
  Description of Artificial Sequence: Synthetic primer
ctgccagccccgactgccacgtgctcccttcctcttctgc

SEQ ID NO: 10901 - DNA, 40 bp, Artificial Sequence
  Description of Artificial Sequence: Synthetic primer
tgccctcgacaaagcaacaggtcccgcaggggtggtactc

SEQ ID NO: 10902 - DNA, 40 bp, Artificial Sequence
  Description of Artificial Sequence: Synthetic primer
ggtggtggtggtgcgggtgagactgacctctcttctcctg

SEQ ID NO: 10903 - DNA, 40 bp, Artificial Sequence
  Description of Artificial Sequence: Synthetic primer
cctgcctgctaagcctgccttccacaccctacggccaatc

SEQ ID NO: 10904 - DNA, 40 bp, Artificial Sequence
  Description of Artificial Sequence: Synthetic primer
ggctcctggccagaggggccaatcgctgttaaccctaccc

SEQ ID NO: 10905 - DNA, 40 bp, Artificial Sequence
  Description of Artificial Sequence: Synthetic primer
aaaagacaaaaagtattaaatagcattgtcactaaacaag

SEQ ID NO: 10906 - DNA, 40 bp, Artificial Sequence
  Description of Artificial Sequence: Synthetic primer
catccttgatattagtctgaaatagagatgtccagtgtac

SEQ ID NO: 10907 - DNA, 40 bp, Artificial Sequence
  Description of Artificial Sequence: Synthetic primer
tcctgctgggccctgtcctcagagctccctgtgcactatc

SEQ ID NO: 10908 - DNA, 40 bp, Artificial Sequence
  Description of Artificial Sequence: Synthetic primer
ccccagctcatcccgtctctctagcccctgtgcctcattg

SEQ ID NO: 10909 - DNA, 40 bp, Artificial Sequence
  Description of Artificial Sequence: Synthetic primer
tattcactgatacctggaagtagtcgcttactcatttctc

SEQ ID NO: 10910 - DNA, 40 bp, Artificial Sequence
  Description of Artificial Sequence: Synthetic primer
caatccatttaggactaccctcatcaccccaaaatacatg

SEQ ID NO: 10911 - DNA, 40 bp, Artificial Sequence
  Description of Artificial Sequence: Synthetic primer
gcccaatctccccaaacaaagcagagtgtaataaaacgtg

SEQ ID NO: 10912 - DNA, 40 bp, Artificial Sequence
  Description of Artificial Sequence: Synthetic primer
aacacatggcaatgctaaccatctttaacatctatctttg

SEQ ID NO: 10913 - DNA, 40 bp, Artificial Sequence
  Description of Artificial Sequence: Synthetic primer
gaagaattttatcagttctcactttgctgatctctcgttc

SEQ ID NO: 10914 - DNA, 40 bp, Artificial Sequence
  Description of Artificial Sequence: Synthetic primer
cagaaagcacagacatcaatcaaaaagtcacccccaagcg

SEQ ID NO: 10915 - DNA, 40 bp, Artificial Sequence
  Description of Artificial Sequence: Synthetic primer
gtgaaagataaactaggatgttagtgtttggatatatttt

SEQ ID NO: 10916 - DNA, 40 bp, Artificial Sequence
  Description of Artificial Sequence: Synthetic primer
gtagcccaactagtttttcttaaatctgaaaaggaaaccc

SEQ ID NO: 10917 - DNA, 40 bp, Artificial Sequence
  Description of Artificial Sequence: Synthetic primer
aataaattatttacacgggagctgggctggtgtgcagtgg

SEQ ID NO: 10918 - DNA, 40 bp, Artificial Sequence
  Description of Artificial Sequence: Synthetic primer
tggtctgaggcctagtgggcggcatgggctgaggacctgc

SEQ ID NO: 10919 - DNA, 40 bp, Artificial Sequence
  Description of Artificial Sequence: Synthetic primer
aggctcaggtgattccttcaggcaggccctctggctctcc

SEQ ID NO: 10920 - DNA, 40 bp, Artificial Sequence
  Description of Artificial Sequence: Synthetic primer
gtaaactgtttaactgtgctggtggtttcccattctctag

SEQ ID NO: 10921 - DNA, 40 bp, Artificial Sequence
  Description of Artificial Sequence: Synthetic primer
ccttcatctggaagctgtttcctttcatttcatcatgcac

SEQ ID NO: 10922 - DNA, 40 bp, Artificial Sequence
  Description of Artificial Sequence: Synthetic primer
attcacaggggagagcggatattccaggaggcagtctaag

SEQ ID NO: 10923 - DNA, 40 bp, Artificial Sequence
  Description of Artificial Sequence: Synthetic primer
ttacactctacatcttttctggattcctgccttttacagc

SEQ ID NO: 10924 - DNA, 40 bp, Artificial Sequence
  Description of Artificial Sequence: Synthetic primer
agtgtgagactccaaaacaatgaatatgcactcagaaaac

SEQ ID NO: 10925 - DNA, 40 bp, Artificial Sequence
  Description of Artificial Sequence: Synthetic primer
tgtatgactatttctttcctactcttcattgtacttcaac

SEQ ID NO: 10926 - DNA, 40 bp, Artificial Sequence
  Description of Artificial Sequence: Synthetic primer
ctcctgagcttagagatgagccatgctttggctttccacg

SEQ ID NO: 10927 - DNA, 40 bp, Artificial Sequence
  Description of Artificial Sequence: Synthetic primer
ggtttatgggatattgatggtgcttgacttctcttgtcac

SEQ ID NO: 10928 - DNA, 40 bp, Artificial Sequence
  Description of Artificial Sequence: Synthetic primer
caagctctgggatcaaacaaagaccagcaaaaactctccc

SEQ ID NO: 10929 - DNA, 40 bp, Artificial Sequence
  Description of Artificial Sequence: Synthetic primer
ttctgttctattatgaagtgtcctcagttgtctatttttc

SEQ ID NO: 10930 - DNA, 40 bp, Artificial Sequence
  Description of Artificial Sequence: Synthetic primer
ttgaaagtttgttacagagcgtttaaatgcatttggctta

SEQ ID NO: 10931 - DNA, 40 bp, Artificial Sequence
  Description of Artificial Sequence: Synthetic primer
ataccgcctttcatacatctgctcatatttcgtcatcttc

SEQ ID NO: 10932 - DNA, 40 bp, Artificial Sequence
  Description of Artificial Sequence: Synthetic primer
atatttgctaaattcagaagcaattgacataaagcctgag

SEQ ID NO: 10933 - DNA, 40 bp, Artificial Sequence
  Description of Artificial Sequence: Synthetic primer
gaaaaaatgggaggggaaacatggaagggtaaggtaaagc

SEQ ID NO: 10934 - DNA, 40 bp, Artificial Sequence
  Description of Artificial Sequence: Synthetic primer
atgggtgtttagatagtgccttcaaaatatcctgtgtagc

SEQ ID NO: 10935 - DNA, 40 bp, Artificial Sequence
  Description of Artificial Sequence: Synthetic primer
taaaggctattgcttctattgctgaaaaatactttggttc

SEQ ID NO: 10936 - DNA, 40 bp, Artificial Sequence
  Description of Artificial Sequence: Synthetic primer
ctgttaaaggactatcaagtactgaacagacaaacaaaag

SEQ ID NO: 10937 - DNA, 40 bp, Artificial Sequence
  Description of Artificial Sequence: Synthetic primer
gtttatgaatatcttcctataacgaaagtgtctgcttttt

SEQ ID NO: 10938 - DNA, 40 bp, Artificial Sequence
  Description of Artificial Sequence: Synthetic primer
ataaggaagtataaacaaatgtaactaattaaaaccaaag

SEQ ID NO: 10939 - DNA, 40 bp, Artificial Sequence
  Description of Artificial Sequence: Synthetic primer
gtcctactcacctcctcaaacagccagacccacccagtgc

SEQ ID NO: 10940 - DNA, 40 bp, Artificial Sequence
  Description of Artificial Sequence: Synthetic primer
tgggttttaggggtcaggagtaaagtagaactgtaaaatt

SEQ ID NO: 10941 - DNA, 40 bp, Artificial Sequence
  Description of Artificial Sequence: Synthetic primer
cccgggctggcgccccgtgccatgcgggagcgctggggcg

SEQ ID NO: 10942 - DNA, 40 bp, Artificial Sequence
  Description of Artificial Sequence: Synthetic primer
tggctaacagaaggcaccaaggccgccgacagccactcac

SEQ ID NO: 10943 - DNA, 40 bp, Artificial Sequence
  Description of Artificial Sequence: Synthetic primer
acctgccagccataaccatagacttaactgaacttatttt

SEQ ID NO: 10944 - DNA, 40 bp, Artificial Sequence
  Description of Artificial Sequence: Synthetic primer
atggagcacaaatctctctacttcaggactttaaattatg

SEQ ID NO: 10945 - DNA, 40 bp, Artificial Sequence
  Description of Artificial Sequence: Synthetic primer
tgacgtcgactgggcggcacgcgtccaccccacccctggg

SEQ ID NO: 10946 - DNA, 40 bp, Artificial Sequence
  Description of Artificial Sequence: Synthetic primer
gggccaagtcacacctgtactttttttttccccctcctct

SEQ ID NO: 10947 - DNA, 40 bp, Artificial Sequence
  Description of Artificial Sequence: Synthetic primer
aaggtgaaagtttgggaaacagatggttgagagacatttt

SEQ ID NO: 10948 - DNA, 40 bp, Artificial Sequence
  Description of Artificial Sequence: Synthetic primer
ctatgtaagggacattgacactttttgtttctaccttctc

SEQ ID NO: 10949 - DNA, 40 bp, Artificial Sequence
  Description of Artificial Sequence: Synthetic primer
tctttttgcttgttttgctcattttgatttttcattttac

SEQ ID NO: 10950 - DNA, 40 bp, Artificial Sequence
  Description of Artificial Sequence: Synthetic primer
acaagtcctaacatgtaagttaacttttctgaggttcttc

SEQ ID NO: 10951 - DNA, 40 bp, Artificial Sequence
  Description of Artificial Sequence: Synthetic primer
accacggtgtattctgctaaccactcacactcctggtctg

SEQ ID NO: 10952 - DNA, 40 bp, Artificial Sequence
  Description of Artificial Sequence: Synthetic primer
ggagcagctgggctccctgctggccactgcagggcccagc

SEQ ID NO: 10953 - DNA, 40 bp, Artificial Sequence
  Description of Artificial Sequence: Synthetic primer
tcccaggaaataggctgtttctaatttttaaatattttct

SEQ ID NO: 10954 - DNA, 40 bp, Artificial Sequence
  Description of Artificial Sequence: Synthetic primer
gtttataattaggctctagtttaaaatgacccattgaagc

SEQ ID NO: 10955 - DNA, 40 bp, Artificial Sequence
  Description of Artificial Sequence: Synthetic primer
atttgtagattcatgatgctttttgtagttagaagacaac

SEQ ID NO: 10956 - DNA, 40 bp, Artificial Sequence
  Description of Artificial Sequence: Synthetic primer
gggcttttgggacttctccaggcctcacctgcctctctgg

SEQ ID NO: 10957 - DNA, 40 bp, Artificial Sequence
  Description of Artificial Sequence: Synthetic primer
gccctctacctggtacttggatgcaccaccccaccctgtg

SEQ ID NO: 10958 - DNA, 40 bp, Artificial Sequence
  Description of Artificial Sequence: Synthetic primer
gtagagcccggcgtgacagggctgctggtgtctgctctcg

SEQ ID NO: 10959 - DNA, 40 bp, Artificial Sequence
  Description of Artificial Sequence: Synthetic primer
tgccacctctggcctcttctggaacggagtctgattttgg

SEQ ID NO: 10960 - DNA, 40 bp, Artificial Sequence
  Description of Artificial Sequence: Synthetic primer
cgaggaaaacctcctttggcattatattctttaggaaaaa

SEQ ID NO: 10961 - DNA, 40 bp, Artificial Sequence
  Description of Artificial Sequence: Synthetic primer
ctgagagggaatctctttcataaaatttacccataaggtc

SEQ ID NO: 10962 - DNA, 40 bp, Artificial Sequence
  Description of Artificial Sequence: Synthetic primer
agccagtgctgttccctgaccgctttgctaaatcattttc

SEQ ID NO: 10963 - DNA, 40 bp, Artificial Sequence
  Description of Artificial Sequence: Synthetic primer
tcaggtgggcggggctaaggccacacaagtcggggtgtag

SEQ ID NO: 10964 - DNA, 40 bp, Artificial Sequence
  Description of Artificial Sequence: Synthetic primer
cttcacatttaaaagttttttgaaactttttttaatggac

SEQ ID NO: 10965 - DNA, 40 bp, Artificial Sequence
  Description of Artificial Sequence: Synthetic primer
ataaagcaagtatagaacatagaaatatggaactctgtac

SEQ ID NO: 10966 - DNA, 40 bp, Artificial Sequence
  Description of Artificial Sequence: Synthetic primer
cggtacagaaaaatctcccacagagcccagaaaaagaagc

SEQ ID NO: 10967 - DNA, 40 bp, Artificial Sequence
  Description of Artificial Sequence: Synthetic primer
tgatttagtttatcataacgtatctaaatatgctgctttg

SEQ ID NO: 10968 - DNA, 40 bp, Artificial Sequence
  Description of Artificial Sequence: Synthetic primer
cattttagcatccctctcaaagccacagtgctgcgtcacc

SEQ ID NO: 10969 - DNA, 40 bp, Artificial Sequence
  Description of Artificial Sequence: Synthetic primer
ctgtggcgtctccaccacggactctcaacttgctccacag

SEQ ID NO: 10970 - DNA, 40 bp, Artificial Sequence
  Description of Artificial Sequence: Synthetic primer
ggcccgccctaaccccgccgccccgcagacctacgtgcag

SEQ ID NO: 10971 - DNA, 40 bp, Artificial Sequence
  Description of Artificial Sequence: Synthetic primer
ccgactcggagaccttagcaggaaccccgcacgctcaggc

SEQ ID NO: 10972 - DNA, 40 bp, Artificial Sequence
  Description of Artificial Sequence: Synthetic primer
gccgccgttgcgcttgctcccgggcggtcctggcctgtgc

SEQ ID NO: 10973 - DNA, 40 bp, Artificial Sequence
  Description of Artificial Sequence: Synthetic primer
cccgcgcggggcgggcccaggcaggaagtgggcgcactta

SEQ ID NO: 10974 - DNA, 40 bp, Artificial Sequence
  Description of Artificial Sequence: Synthetic primer
gtggctgccaggccctcaccacatctctgggtgggtcctc

SEQ ID NO: 10975 - DNA, 40 bp, Artificial Sequence
  Description of Artificial Sequence: Synthetic primer
tggcgggccggccgggcggtagcatgggaggggcagagcg

SEQ ID NO: 10976 - DNA, 40 bp, Artificial Sequence
  Description of Artificial Sequence: Synthetic primer
agagctcccagggtttaggactgatgtgtccccatgatcg

SEQ ID NO: 10977 - DNA, 40 bp, Artificial Sequence
  Description of Artificial Sequence: Synthetic primer
tgggcgctgggcctcggagtctgacccgccctgcccttag

SEQ ID NO: 10978 - DNA, 40 bp, Artificial Sequence
  Description of Artificial Sequence: Synthetic primer
ggagaagctggcccagatttgatcccttccctccccacca

SEQ ID NO: 10979 - DNA, 40 bp, Artificial Sequence
  Description of Artificial Sequence: Synthetic primer
ggctcacgtcccacatgtcccttctcggaccagtgtccag

SEQ ID NO: 10980 - DNA, 40 bp, Artificial Sequence
  Description of Artificial Sequence: Synthetic primer
ccttcatgggaatttaaaggagctggaaagagtgctcacc

SEQ ID NO: 10981 - DNA, 40 bp, Artificial Sequence
  Description of Artificial Sequence: Synthetic primer
ccccataggagctggaggcagagatagtgtgtatgcgaca

SEQ ID NO: 10982 - DNA, 40 bp, Artificial Sequence
  Description of Artificial Sequence: Synthetic primer
cctggccctcgctcagtggcccgggcgggcgggcgggtgg

SEQ ID NO: 10983 - DNA, 40 bp, Artificial Sequence
  Description of Artificial Sequence: Synthetic primer
aaggagggtgggtgagtggggctggggtgagggcgcttcc

SEQ ID NO: 10984 - DNA, 40 bp, Artificial Sequence
  Description of Artificial Sequence: Synthetic primer
acatttgtgacttcatctaatcacctcctaccagtctgtg

SEQ ID NO: 10985 - DNA, 40 bp, Artificial Sequence
  Description of Artificial Sequence: Synthetic primer
atgttaatctttttattttatggcaagttcaacattattc

SEQ ID NO: 10986 - DNA, 40 bp, Artificial Sequence
  Description of Artificial Sequence: Synthetic primer
ccagcttgttcatgtctggattcacattaactctatgacc

SEQ ID NO: 10987 - DNA, 40 bp, Artificial Sequence
  Description of Artificial Sequence: Synthetic primer
ccagatagaacagacacagctactctcagaaagcacttac

SEQ ID NO: 10988 - DNA, 40 bp, Artificial Sequence
  Description of Artificial Sequence: Synthetic primer
gttttcttttctcgtagtttgactacatgtcaacctgtcc

SEQ ID NO: 10989 - DNA, 40 bp, Artificial Sequence
  Description of Artificial Sequence: Synthetic primer
attcagatgttttgtaattgtcattgaagaaaggactgac

SEQ ID NO: 10990 - DNA, 40 bp, Artificial Sequence
  Description of Artificial Sequence: Synthetic primer
cgggccccatgagctactgaggcctgctcggcagtgtgtg

SEQ ID NO: 10991 - DNA, 40 bp, Artificial Sequence
  Description of Artificial Sequence: Synthetic primer
tcccactgacggtggggttgtccgtccttctcccccacag

SEQ ID NO: 10992 - DNA, 40 bp, Artificial Sequence
  Description of Artificial Sequence: Synthetic primer
tttagtatttgtaaatataatttaaattggttgtgttttc

SEQ ID NO: 10993 - DNA, 40 bp, Artificial Sequence
  Description of Artificial Sequence: Synthetic primer
tcagttaactggtgaacataaaattgtcacttgtagaaac

SEQ ID NO: 10994 - DNA, 40 bp, Artificial Sequence
  Description of Artificial Sequence: Synthetic primer
gttgctctcagattctggacagcagcagccaagttcagtg

SEQ ID NO: 10995 - DNA, 40 bp, Artificial Sequence
  Description of Artificial Sequence: Synthetic primer
catacagaacaccacgtcccctctacaaggagccaccatg

SEQ ID NO: 10996 - DNA, 40 bp, Artificial Sequence
  Description of Artificial Sequence: Synthetic primer
caaggaaatataagcctggcctctctatataaatcttttc

SEQ ID NO: 10997 - DNA, 40 bp, Artificial Sequence
  Description of Artificial Sequence: Synthetic primer
tgtttgtttcatattaacagcattaatttaatatttgttg

SEQ ID NO: 10998 - DNA, 40 bp, Artificial Sequence
  Description of Artificial Sequence: Synthetic primer
ctgcttcattcacaaccgccctgctctgtgcttcttcctc

SEQ ID NO: 10999 - DNA, 40 bp, Artificial Sequence
  Description of Artificial Sequence: Synthetic primer
agaccaatgactttagaaaacgcccagccccgtctcttac

SEQ ID NO: 11000 - DNA, 40 bp, Artificial Sequence
  Description of Artificial Sequence: Synthetic primer
tctctatacaggaagttgggacagccggggatggttcctc

SEQ ID NO: 11001 - DNA, 40 bp, Artificial Sequence
  Description of Artificial Sequence: Synthetic primer
ctcactgcctcctcccatacttggctctattctgcttctc

SEQ ID NO: 11002 - DNA, 40 bp, Artificial Sequence
  Description of Artificial Sequence: Synthetic primer
aacaaaacaaaacaaaaccacaccacatatataaccttgc

SEQ ID NO: 11003 - DNA, 40 bp, Artificial Sequence
  Description of Artificial Sequence: Synthetic primer
acaacctggcttgtgccatccccgtgactatcactaacag

SEQ ID NO: 11004 - DNA, 40 bp, Artificial Sequence
  Description of Artificial Sequence: Synthetic primer
cagcatttagtgtgaccgactggccaaattaagtatctcc

SEQ ID NO: 11005 - DNA, 40 bp, Artificial Sequence
  Description of Artificial Sequence: Synthetic primer
aatttagaaatagtcttttccagggatttttcatctttac

SEQ ID NO: 11006 - DNA, 40 bp, Artificial Sequence
  Description of Artificial Sequence: Synthetic primer
atttccatcttacaatgaaaacagactaacaaattggaac

SEQ ID NO: 11007 - DNA, 40 bp, Artificial Sequence
  Description of Artificial Sequence: Synthetic primer
ttagaccggtagactcatgtaatactatttggtccttcag

SEQ ID NO: 11008 - DNA, 40 bp, Artificial Sequence
  Description of Artificial Sequence: Synthetic primer
ggcccgcggtcaccctcagcctgccccgtttctcttcctc

SEQ ID NO: 11009 - DNA, 40 bp, Artificial Sequence
  Description of Artificial Sequence: Synthetic primer
acacaggagggctgcaggcggcagctcggcccccggcccg

SEQ ID NO: 11010 - DNA, 40 bp, Artificial Sequence
  Description of Artificial Sequence: Synthetic primer
cttagattttaactaatatgtaatataaaataattgtttc

SEQ ID NO: 11011 - DNA, 40 bp, Artificial Sequence
  Description of Artificial Sequence: Synthetic primer
acttttctcatactgtattagaatttagaaaaatttaaac

SEQ ID NO: 11012 - DNA, 40 bp, Artificial Sequence
  Description of Artificial Sequence: Synthetic primer
tattttttttacagacagtgatgtgtgttctgaaattgtg

SEQ ID NO: 11013 - DNA, 40 bp, Artificial Sequence
  Description of Artificial Sequence: Synthetic primer
aataatgggttactaatcacacttatttcaaggaaaaatt

SEQ ID NO: 11014 - DNA, 40 bp, Artificial Sequence
  Description of Artificial Sequence: Synthetic primer
catatcaatgtgactaaaaacactaaatcccggcacactc

SEQ ID NO: 11015 - DNA, 40 bp, Artificial Sequence
  Description of Artificial Sequence: Synthetic primer
atctcggggagagcgaagggtgaggctgggcccggagagc

SEQ ID NO: 11016 - DNA, 40 bp, Artificial Sequence
  Description of Artificial Sequence: Synthetic primer
accctggacagcgtccgggcctctgccggggctggtgaac

SEQ ID NO: 11017 - DNA, 40 bp, Artificial Sequence
  Description of Artificial Sequence: Synthetic primer
actgcgccccgctgctcaggttgctggggccggcgccggg

SEQ ID NO: 11018 - DNA, 40 bp, Artificial Sequence
  Description of Artificial Sequence: Synthetic primer
atgtaggtgacttgcattgtgcatcctgtgtttgattcac

SEQ ID NO: 11019 - DNA, 40 bp, Artificial Sequence
  Description of Artificial Sequence: Synthetic primer
tggggaaaaagctggcagaaacactggaaaaagaaaggtg

SEQ ID NO: 11020 - DNA, 40 bp, Artificial Sequence
  Description of Artificial Sequence: Synthetic primer
tgctcctcaccagctaggctgccccttccgcccgctgacc

SEQ ID NO: 11021 - DNA, 40 bp, Artificial Sequence
  Description of Artificial Sequence: Synthetic primer
cgcccacctgtctccacgctcaccccgtacagctcacctg

SEQ ID NO: 11022 - DNA, 40 bp, Artificial Sequence
  Description of Artificial Sequence: Synthetic primer
tagaaatgcattttatatatatcctaaacgcgtggtcaac

SEQ ID NO: 11023 - DNA, 40 bp, Artificial Sequence
  Description of Artificial Sequence: Synthetic primer
tgtagtcaagattacataggaagaaatgaacatctgattc

SEQ ID NO: 11024 - DNA, 40 bp, Artificial Sequence
  Description of Artificial Sequence: Synthetic primer
aaacctgtgaggttcactgtaggtaaattaaaaagctgtc

SEQ ID NO: 11025 - DNA, 40 bp, Artificial Sequence
  Description of Artificial Sequence: Synthetic primer
tcatttatctggactatcaacttactattgcttttctgtc

SEQ ID NO: 11026 - DNA, 40 bp, Artificial Sequence
  Description of Artificial Sequence: Synthetic primer
agctaaaagctttagaagctgtttgtacactgtatttttc

SEQ ID NO: 11027 - DNA, 40 bp, Artificial Sequence
  Description of Artificial Sequence: Synthetic primer
agtgaatttaaacataataaatatgttttcttttttgcct

SEQ ID NO: 11028 - DNA, 40 bp, Artificial Sequence
  Description of Artificial Sequence: Synthetic primer
cttcccaaattagagaactaccctggaatgaccctgttcc

SEQ ID NO: 11029 - DNA, 40 bp, Artificial Sequence
  Description of Artificial Sequence: Synthetic primer
aaaatcaattttctttattattattctcttttaccttttg

SEQ ID NO: 11030 - DNA, 40 bp, Artificial Sequence
  Description of Artificial Sequence: Synthetic primer
ttcattgactagatgaatgtatacttaggtatctcttttg

SEQ ID NO: 11031 - DNA, 40 bp, Artificial Sequence
  Description of Artificial Sequence: Synthetic primer
aaatagactgctttaggtaatgagccaccagtgtccaaaa

SEQ ID NO: 11032 - DNA, 40 bp, Artificial Sequence
  Description of Artificial Sequence: Synthetic primer
caggaaacacagcattcagccggcctacacgtgggacatc

SEQ ID NO: 11033 - DNA, 40 bp, Artificial Sequence
  Description of Artificial Sequence: Synthetic primer
gcgcgatccaccctgtcacagcgcgtgttcccgtttcctc

SEQ ID NO: 11034 - DNA, 40 bp, Artificial Sequence
  Description of Artificial Sequence: Synthetic primer
actgtgaggggcttcacatacaataatccttgttctcttc

SEQ ID NO: 11035 - DNA, 40 bp, Artificial Sequence
  Description of Artificial Sequence: Synthetic primer
caggctgggctgcctgagccccaggaggagcttggagacc

SEQ ID NO: 11036 - DNA, 40 bp, Artificial Sequence
  Description of Artificial Sequence: Synthetic primer
tacggccttcactatgtaaaggtcagtctttttatttctc

SEQ ID NO: 11037 - DNA, 40 bp, Artificial Sequence
  Description of Artificial Sequence: Synthetic primer
tgcttctcttacatgccagttctctaggttttgtatttct

SEQ ID NO: 11038 - DNA, 40 bp, Artificial Sequence
  Description of Artificial Sequence: Synthetic primer
gggagggatggggttggggacagggctggggtctgcatgg

SEQ ID NO: 11039 - DNA, 40 bp, Artificial Sequence
  Description of Artificial Sequence: Synthetic primer
cttttctcccttcccctaccctcctttctgtccccatccc

SEQ ID NO: 11040 - DNA, 40 bp, Artificial Sequence
  Description of Artificial Sequence: Synthetic primer
ggctcagccagactcacttcccatagagtgatacttggac

SEQ ID NO: 11041 - DNA, 40 bp, Artificial Sequence
  Description of Artificial Sequence: Synthetic primer
cccaagttctgacccgcctaggccctttcccccccagctt

SEQ ID NO: 11042 - DNA, 40 bp, Artificial Sequence
  Description of Artificial Sequence: Synthetic primer
agtccatcagtaaggaactaaagggccggtaagtaggaag

SEQ ID NO: 11043 - DNA, 40 bp, Artificial Sequence
  Description of Artificial Sequence: Synthetic primer
ctgtgagccacactgagcctttttcccttctttgtgtttg

SEQ ID NO: 11044 - DNA, 40 bp, Artificial Sequence
  Description of Artificial Sequence: Synthetic primer
ttaaccataaattgatggcactttttcttttaacttttcg

SEQ ID NO: 11045 - DNA, 40 bp, Artificial Sequence
  Description of Artificial Sequence: Synthetic primer
atttccataccaaataccgaaataaaaaacacatttaaag

SEQ ID NO: 11046 - DNA, 40 bp, Artificial Sequence
  Description of Artificial Sequence: Synthetic primer
ggggcccacaggatgctctgcctaacacccactttccaca

SEQ ID NO: 11047 - DNA, 40 bp, Artificial Sequence
  Description of Artificial Sequence: Synthetic primer
gacgaggacaagtgcctgtgggaggcacccgctggaatgg

SEQ ID NO: 11048 - DNA, 40 bp, Artificial Sequence
  Description of Artificial Sequence: Synthetic primer
tagggcctaagctgcctccctctgaggccacgttgtatcc

SEQ ID NO: 11049 - DNA, 40 bp, Artificial Sequence
  Description of Artificial Sequence: Synthetic primer
gccagggtttcccagggagggttgcagttcctgacctctg

SEQ ID NO: 11050 - DNA, 40 bp, Artificial Sequence
  Description of Artificial Sequence: Synthetic primer
tttcttattaataaaacaaaatagctttttgcttttcacc

SEQ ID NO: 11051 - DNA, 40 bp, Artificial Sequence
  Description of Artificial Sequence: Synthetic primer
atgttttatttttttaaaggattaggttttgcttaagtac

SEQ ID NO: 11052 - DNA, 40 bp, Artificial Sequence
  Description of Artificial Sequence: Synthetic primer
aatgtttcgttttgtttttaacttcattgtttctgctctc

SEQ ID NO: 11053 - DNA, 40 bp, Artificial Sequence
  Description of Artificial Sequence: Synthetic primer
gatataaaataaccagttgctgcaagtcagttgaaaaatc

SEQ ID NO: 11054 - DNA, 40 bp, Artificial Sequence
  Description of Artificial Sequence: Synthetic primer
gaccacaccgtaacgccccttccttcctccctctctcacc

SEQ ID NO: 11055 - DNA, 40 bp, Artificial Sequence
  Description of Artificial Sequence: Synthetic primer
ccagaggacgtcggaaatggcagcgagctgctccacacac

SEQ ID NO: 11056 - DNA, 40 bp, Artificial Sequence
  Description of Artificial Sequence: Synthetic primer
gagggcccctgcctcagccactgttagggtctcccttctg

SEQ ID NO: 11057 - DNA, 40 bp, Artificial Sequence
  Description of Artificial Sequence: Synthetic primer
cctgaattatgatcctttcctaggtaccccatggccttag

SEQ ID NO: 11058 - DNA, 40 bp, Artificial Sequence
  Description of Artificial Sequence: Synthetic primer
aatgctgacatgatattacagtggtaggattttctttttc

SEQ ID NO: 11059 - DNA, 40 bp, Artificial Sequence
  Description of Artificial Sequence: Synthetic primer
agaggaataaaataaccacaacaggttcaatcttggctat

SEQ ID NO: 11060 - DNA, 40 bp, Artificial Sequence
  Description of Artificial Sequence: Synthetic primer
cttgtctctctagggaaagaattgagacctaaaggatttg

SEQ ID NO: 11061 - DNA, 40 bp, Artificial Sequence
  Description of Artificial Sequence: Synthetic primer
aggcccactctactggagctgcttctactccttctcacac

SEQ ID NO: 11062 - DNA, 40 bp, Artificial Sequence
  Description of Artificial Sequence: Synthetic primer
gcgtgctgatgctagcccctctccctgctcccccatgtgc

SEQ ID NO: 11063 - DNA, 40 bp, Artificial Sequence
  Description of Artificial Sequence: Synthetic primer
gccgtgcctgcccagccctgtcccacctccaccccgtgtg

SEQ ID NO: 11064 - DNA, 40 bp, Artificial Sequence
  Description of Artificial Sequence: Synthetic primer
atctgtgcacagcagagggaccgcaccaggccaggcactc

SEQ ID NO: 11065 - DNA, 40 bp, Artificial Sequence
  Description of Artificial Sequence: Synthetic primer
gcctgtgaagccccagcacctctcatccccaccccatctc

SEQ ID NO: 11066 - DNA, 40 bp, Artificial Sequence
  Description of Artificial Sequence: Synthetic primer
caatactatatactaagatttgtaattatgccaagaaacc

SEQ ID NO: 11067 - DNA, 40 bp, Artificial Sequence
  Description of Artificial Sequence: Synthetic primer
ttggattgtgtccgttgagctagctctctcattttttttc

SEQ ID NO: 11068 - DNA, 40 bp, Artificial Sequence
  Description of Artificial Sequence: Synthetic primer
agttgacacccgccacaaggaccgaaaggttcggcgcaag

SEQ ID NO: 11069 - DNA, 40 bp, Artificial Sequence
  Description of Artificial Sequence: Synthetic primer
ggaaaggggcagaggtggccggttgttgcgactcataaac

SEQ ID NO: 11070 - DNA, 40 bp, Artificial Sequence
  Description of Artificial Sequence: Synthetic primer
caaggcggggtccagggttcacaaggtccccgtagtcagg

SEQ ID NO: 11071 - DNA, 40 bp, Artificial Sequence
  Description of Artificial Sequence: Synthetic primer
gaggccaaagccccgccctcggctgaagccccgccctctg

SEQ ID NO: 11072 - DNA, 40 bp, Artificial Sequence
  Description of Artificial Sequence: Synthetic primer
ttttttaatttaccttttcctataaggactccaatttttg

SEQ ID NO: 11073 - DNA, 40 bp, Artificial Sequence
  Description of Artificial Sequence: Synthetic primer
cacttgagcaagtgtttccattccagaaaatgtcttattt

SEQ ID NO: 11074 - DNA, 40 bp, Artificial Sequence
  Description of Artificial Sequence: Synthetic primer
aagacttgctgtattttacatctgtgaaagggtatgatcc

SEQ ID NO: 11075 - DNA, 40 bp, Artificial Sequence
  Description of Artificial Sequence: Synthetic primer
aatgcaagcaggaaatcaggttttcaagcccagagatttc

SEQ ID NO: 11076 - DNA, 40 bp, Artificial Sequence
  Description of Artificial Sequence: Synthetic primer
cttctaagaaaaggaaaaacgacgcaggatgacaggaaac

SEQ ID NO: 11077 - DNA, 40 bp, Artificial Sequence
  Description of Artificial Sequence: Synthetic primer
gcatggctcttagatttgagtgattatttcttatttcttc

SEQ ID NO: 11078 - DNA, 40 bp, Artificial Sequence
  Description of Artificial Sequence: Synthetic primer
cggtcaggggccggcctctcaggtcacttgcctggccacc

SEQ ID NO: 11079 - DNA, 40 bp, Artificial Sequence
  Description of Artificial Sequence: Synthetic primer
agcacccaggccgggctgcgtgggcctcacctctcttcac

SEQ ID NO: 11080 - DNA, 40 bp, Artificial Sequence
  Description of Artificial Sequence: Synthetic primer
aggcactgtgactgccctgcaggggccagggaaggtactc

SEQ ID NO: 11081 - DNA, 40 bp, Artificial Sequence
  Description of Artificial Sequence: Synthetic primer
ttccccacaattgtccccaaggcctcagctcccctctccc

SEQ ID NO: 11082 - DNA, 40 bp, Artificial Sequence
  Description of Artificial Sequence: Synthetic primer
agcaagaatgcctgggactgaggggagatatttttgtttg

SEQ ID NO: 11083 - DNA, 40 bp, Artificial Sequence
  Description of Artificial Sequence: Synthetic primer
ttaacaagttacactctagatcctaaacgtaagaagcaac

SEQ ID NO: 11084 - DNA, 40 bp, Artificial Sequence
  Description of Artificial Sequence: Synthetic primer
atcactcccctgcccataggaggaggccctttcccagacg

SEQ ID NO: 11085 - DNA, 40 bp, Artificial Sequence
  Description of Artificial Sequence: Synthetic primer
taagaaagaaaagtgacagtgtgaatgctcccattgtttc

SEQ ID NO: 11086 - DNA, 40 bp, Artificial Sequence
  Description of Artificial Sequence: Synthetic primer
cactagtccaggtgagccagcgccctctgccttctccaac

SEQ ID NO: 11087 - DNA, 40 bp, Artificial Sequence
  Description of Artificial Sequence: Synthetic primer
ttgccccgccccaataacaccacgcccacactggaatcac

SEQ ID NO: 11088 - DNA, 40 bp, Artificial Sequence
  Description of Artificial Sequence: Synthetic primer
tgagggtcccactgccctccctccacacctgcccctctcg

SEQ ID NO: 11089 - DNA, 40 bp, Artificial Sequence
  Description of Artificial Sequence: Synthetic primer
gtggggcagagcaggatggatgaggggatggacccagagg

SEQ ID NO: 11090 - DNA, 40 bp, Artificial Sequence
  Description of Artificial Sequence: Synthetic primer
atatatattattcctataagaattaacttatttttgattc

SEQ ID NO: 11091 - DNA, 40 bp, Artificial Sequence
  Description of Artificial Sequence: Synthetic primer
tgctgagataaacaagtgttcactaggcatggatatagtg

SEQ ID NO: 11092 - DNA, 40 bp, Artificial Sequence
  Description of Artificial Sequence: Synthetic primer
ctggcaagtcctctgccacaggaggaagactcggcctgac

SEQ ID NO: 11093 - DNA, 40 bp, Artificial Sequence
  Description of Artificial Sequence: Synthetic primer
tgaaccactgtgcccagccctgatttgcctttttaatgcc

SEQ ID NO: 11094 - DNA, 40 bp, Artificial Sequence
  Description of Artificial Sequence: Synthetic primer
tctgtttagctgacacacacttgccctctctcccacgccg

SEQ ID NO: 11095 - DNA, 40 bp, Artificial Sequence
  Description of Artificial Sequence: Synthetic primer
atactttggtgaattaaaaagtgcccaaggaggggattgg

SEQ ID NO: 11096 - DNA, 40 bp, Artificial Sequence
  Description of Artificial Sequence: Synthetic primer
gcaaagccagagcagccgagagtccccgccacagcagcag

SEQ ID NO: 11097 - DNA, 40 bp, Artificial Sequence
  Description of Artificial Sequence: Synthetic primer
gcagcagccctgcccgcagccgttgccccgcctccacctc

SEQ ID NO: 11098 - DNA, 40 bp, Artificial Sequence
  Description of Artificial Sequence: Synthetic primer
ggtcccagagatgctggtcacccctctacaacttcatctg

SEQ ID NO: 11099 - DNA, 40 bp, Artificial Sequence
  Description of Artificial Sequence: Synthetic primer
gcagggccaggagagctccgcgccagcccctcagcctcac

SEQ ID NO: 11100 - DNA, 40 bp, Artificial Sequence
  Description of Artificial Sequence: Synthetic primer
ccagcccacttttcccacccacccagacactctccctctc

SEQ ID NO: 11101 - DNA, 40 bp, Artificial Sequence
  Description of Artificial Sequence: Synthetic primer
tatttggaagatgaaatgcttctctcgttacctgccttac

SEQ ID NO: 11102 - DNA, 40 bp, Artificial Sequence
  Description of Artificial Sequence: Synthetic primer
ctggctgacaggaagcccggtcaggccaggccaggagatg

SEQ ID NO: 11103 - DNA, 40 bp, Artificial Sequence
  Description of Artificial Sequence: Synthetic primer
gctggaatcctcctgggctccttcctagcccctcactcac

SEQ ID NO: 11104 - DNA, 40 bp, Artificial Sequence
  Description of Artificial Sequence: Synthetic primer
gcgcccagcccatttgtaactttattgttttctcttacag

SEQ ID NO: 11105 - DNA, 40 bp, Artificial Sequence
  Description of Artificial Sequence: Synthetic primer
tagcataattaaaacaatccatgcataaaaaggaaaatgc

SEQ ID NO: 11106 - DNA, 40 bp, Artificial Sequence
  Description of Artificial Sequence: Synthetic primer
ttgaatgttcagcaaatgacatatctctgcatgtgttttc

SEQ ID NO: 11107 - DNA, 40 bp, Artificial Sequence
  Description of Artificial Sequence: Synthetic primer
aaatttttcaaaaagaatattggattatcaaagaaattac

SEQ ID NO: 11108 - DNA, 40 bp, Artificial Sequence
  Description of Artificial Sequence: Synthetic primer
ctgggaagatcaggtattaggtagccgattggcaggtcac

SEQ ID NO: 11109 - DNA, 40 bp, Artificial Sequence
  Description of Artificial Sequence: Synthetic primer
gcccttgccttgctgtgactatgtcatggttcttaactag

SEQ ID NO: 11110 - DNA, 40 bp, Artificial Sequence
  Description of Artificial Sequence: Synthetic primer
gctcagcctggagcgccctggccccggctgctccgagggg

SEQ ID NO: 11111 - DNA, 40 bp, Artificial Sequence
  Description of Artificial Sequence: Synthetic primer
acctcagggccttatgtttctgtccctttgtttccttcag

SEQ ID NO: 11112 - DNA, 40 bp, Artificial Sequence
  Description of Artificial Sequence: Synthetic primer
tgcccacctcctctggatacccattctctcttctgtcatc

SEQ ID NO: 11113 - DNA, 40 bp, Artificial Sequence
  Description of Artificial Sequence: Synthetic primer
tctgcctttcaattcactgtcctcactctgacttctcttg

SEQ ID NO: 11114 - DNA, 40 bp, Artificial Sequence
  Description of Artificial Sequence: Synthetic primer
gacaaggaacaaatgttctgttgttcttttttcttttgtg

SEQ ID NO: 11115 - DNA, 40 bp, Artificial Sequence
  Description of Artificial Sequence: Synthetic primer
agcaggtgaatgggtgggaactatgtgtcaggccctgcgc

SEQ ID NO: 11116 - DNA, 40 bp, Artificial Sequence
  Description of Artificial Sequence: Synthetic primer
cacagtgcagcgaaaactagaaaattctgaagaatcaaac

SEQ ID NO: 11117 - DNA, 40 bp, Artificial Sequence
  Description of Artificial Sequence: Synthetic primer
gtaattatatccaattgctatttactttcccatctttccc

SEQ ID NO: 11118 - DNA, 40 bp, Artificial Sequence
  Description of Artificial Sequence: Synthetic primer
tctcctcctcccctggcagcctgaagacaggtgcaaagtc

SEQ ID NO: 11119 - DNA, 40 bp, Artificial Sequence
  Description of Artificial Sequence: Synthetic primer
cctgtgtctttgagacacagctaatgagagcattcttggg

SEQ ID NO: 11120 - DNA, 40 bp, Artificial Sequence
  Description of Artificial Sequence: Synthetic primer
gctttctgccgtaaaaacaagaagaaacatgtctcatagc

SEQ ID NO: 11121 - DNA, 40 bp, Artificial Sequence
  Description of Artificial Sequence: Synthetic primer
gaaaatgttttaaaatgagcttgctaagtaattcagtggc

SEQ ID NO: 11122 - DNA, 40 bp, Artificial Sequence
  Description of Artificial Sequence: Synthetic primer
gggtgagcagactgggtgctctgggactgtacccccgacc

SEQ ID NO: 11123 - DNA, 40 bp, Artificial Sequence
  Description of Artificial Sequence: Synthetic primer
ccccttccagcccagacagctgcgccagcccccgtttcac

SEQ ID NO: 11124 - DNA, 40 bp, Artificial Sequence
  Description of Artificial Sequence: Synthetic primer
aactaaagaggccaattggaaaactaatggttatttacac

SEQ ID NO: 11125 - DNA, 40 bp, Artificial Sequence
  Description of Artificial Sequence: Synthetic primer
tttacatagtaccagttttgtccttggaatgactcagtgc

SEQ ID NO: 11126 - DNA, 40 bp, Artificial Sequence
  Description of Artificial Sequence: Synthetic primer
ccagtgccccagctcttaaggaagaggaggtccctgctga

SEQ ID NO: 11127 - DNA, 40 bp, Artificial Sequence
  Description of Artificial Sequence: Synthetic primer
ctcccctggggaggctggggtggggctggaggcttcactc

SEQ ID NO: 11128 - DNA, 40 bp, Artificial Sequence
  Description of Artificial Sequence: Synthetic primer
agggctgaggaggccagggtgccgacaggacagataatgc

SEQ ID NO: 11129 - DNA, 40 bp, Artificial Sequence
  Description of Artificial Sequence: Synthetic primer
cttgatttttgatggccctgctctctggcgttctctcctc

SEQ ID NO: 11130 - DNA, 40 bp, Artificial Sequence
  Description of Artificial Sequence: Synthetic primer
cgagtgtgtgcatatgtgtatgttgagtgtatacattagt

SEQ ID NO: 11131 - DNA, 40 bp, Artificial Sequence
  Description of Artificial Sequence: Synthetic primer
ttatggatcatactgctaaacactaatataacctttggaa

SEQ ID NO: 11132 - DNA, 40 bp, Artificial Sequence
  Description of Artificial Sequence: Synthetic primer
tagtgaaatgctacacatcttgaacagcctttctctttcg

SEQ ID NO: 11133 - DNA, 40 bp, Artificial Sequence
  Description of Artificial Sequence: Synthetic primer
cacagttgaatttcctggaatgcccacatatactcgtgag

SEQ ID NO: 11134 - DNA, 40 bp, Artificial Sequence
  Description of Artificial Sequence: Synthetic primer
gttgtttcaacatctctgataaacctctgaatacagaaac

SEQ ID NO: 11135 - DNA, 40 bp, Artificial Sequence
  Description of Artificial Sequence: Synthetic primer
tctcaacagatgatactatgagcacacaaacagaatcaac

SEQ ID NO: 11136 - DNA, 40 bp, Artificial Sequence
  Description of Artificial Sequence: Synthetic primer
atgacaaaagcagctgcatgcatacaatgaaagctaatgg

SEQ ID NO: 11137 - DNA, 40 bp, Artificial Sequence
  Description of Artificial Sequence: Synthetic primer
atgtattctgttcttaaaatgtattcatcctgtttgtatg

SEQ ID NO: 11138 - DNA, 40 bp, Artificial Sequence
  Description of Artificial Sequence: Synthetic primer
accctaaatgtgatcattataacccaccattttcttggtc

SEQ ID NO: 11139 - DNA, 40 bp, Artificial Sequence
  Description of Artificial Sequence: Synthetic primer
ttgtgtcgttgtttcttctgggtcccaaaaattatataag

SEQ ID NO: 11140 - DNA, 40 bp, Artificial Sequence
  Description of Artificial Sequence: Synthetic primer
gggagctgatgttggggatgagggttctgggtgggagtgg

SEQ ID NO: 11141 - DNA, 40 bp, Artificial Sequence
  Description of Artificial Sequence: Synthetic primer
gttcagggaatgagacaggctatcaagaaatcaggaaatc

SEQ ID NO: 11142 - DNA, 40 bp, Artificial Sequence
  Description of Artificial Sequence: Synthetic primer
aacagagattgggactcccttctaatcagggttctctttc

SEQ ID NO: 11143 - DNA, 40 bp, Artificial Sequence
  Description of Artificial Sequence: Synthetic primer
atttccccacatcagtgcatgcgtgttattaacccaagag

SEQ ID NO: 11144 - DNA, 40 bp, Artificial Sequence
  Description of Artificial Sequence: Synthetic primer
cttactggaaactagtgaaataaaattagtaacataccag

SEQ ID NO: 11145 - DNA, 40 bp, Artificial Sequence
  Description of Artificial Sequence: Synthetic primer
gtgttcgtgtacatgtgtatgtgtctatcaacttatcttt

SEQ ID NO: 11146 - DNA, 40 bp, Artificial Sequence
  Description of Artificial Sequence: Synthetic primer
taaagatgatccgacaagtgagagacaggatcaggtcagc

SEQ ID NO: 11147 - DNA, 40 bp, Artificial Sequence
  Description of Artificial Sequence: Synthetic primer
caattaaccctgattactggtttccaacaggttcttgctg

SEQ ID NO: 11148 - DNA, 40 bp, Artificial Sequence
  Description of Artificial Sequence: Synthetic primer
ggcggcgcagccggggccgccggaggagcgcgggtgacct

SEQ ID NO: 11149 - DNA, 40 bp, Artificial Sequence
  Description of Artificial Sequence: Synthetic primer
ccccgccccgctcactcacctccgggtccagaggcactag

SEQ ID NO: 11150 - DNA, 40 bp, Artificial Sequence
  Description of Artificial Sequence: Synthetic primer
atctcaattcaaacgtcacctcctccaggcagccctccac

SEQ ID NO: 11151 - DNA, 40 bp, Artificial Sequence
  Description of Artificial Sequence: Synthetic primer
ttcttctatctctgactcctccccattccctctcaccttc

SEQ ID NO: 11152 - DNA, 40 bp, Artificial Sequence
  Description of Artificial Sequence: Synthetic primer
tggtgtttgtcagcctgtgtttgttttgtgtctgatgttc

SEQ ID NO: 11153 - DNA, 40 bp, Artificial Sequence
  Description of Artificial Sequence: Synthetic primer
cttttccctagggacatgtgaaacacgttgggaaaaaatc

SEQ ID NO: 11154 - DNA, 40 bp, Artificial Sequence
  Description of Artificial Sequence: Synthetic primer
ggaatggagaggaggatgttcactcacccgaaccaagtag

SEQ ID NO: 11155 - DNA, 40 bp, Artificial Sequence
  Description of Artificial Sequence: Synthetic primer
gctgggcagcagcccctctttcacctcaactatggatctc

SEQ ID NO: 11156 - DNA, 40 bp, Artificial Sequence
  Description of Artificial Sequence: Synthetic primer
aatacagtttaaaaagttattattttactattaatttcag

SEQ ID NO: 11157 - DNA, 40 bp, Artificial Sequence
  Description of Artificial Sequence: Synthetic primer
attgatagagctttacaaataataaaagtaattggacttc

SEQ ID NO: 11158 - DNA, 40 bp, Artificial Sequence
  Description of Artificial Sequence: Synthetic primer
ggccacgggcctgctggctggaatcccaccttggctgtgg

SEQ ID NO: 11159 - DNA, 40 bp, Artificial Sequence
  Description of Artificial Sequence: Synthetic primer
tgcagccctctccctggcggctccccagcccccttgctga

SEQ ID NO: 11160 - DNA, 40 bp, Artificial Sequence
  Description of Artificial Sequence: Synthetic primer
ttttgtctacatactctccatagtatcttaaaacaatttc

SEQ ID NO: 11161 - DNA, 40 bp, Artificial Sequence
  Description of Artificial Sequence: Synthetic primer
gcacaattactaaaacaatgttggaaacatgcctaaaaag

SEQ ID NO: 11162 - DNA, 40 bp, Artificial Sequence
  Description of Artificial Sequence: Synthetic primer
tgtttccctgctgccaggatggagtgccagcccccttctc

SEQ ID NO: 11163 - DNA, 40 bp, Artificial Sequence
  Description of Artificial Sequence: Synthetic primer
aaagcaagccctggcctaccgagagacacagccttcaccg

SEQ ID NO: 11164 - DNA, 40 bp, Artificial Sequence
  Description of Artificial Sequence: Synthetic primer
agtgttaactgggcccaactgtgtctaaatacaatctttc

SEQ ID NO: 11165 - DNA, 40 bp, Artificial Sequence
  Description of Artificial Sequence: Synthetic primer
gccttcacctatgtttccagtggttgcaggtatatgaggg

SEQ ID NO: 11166 - DNA, 40 bp, Artificial Sequence
  Description of Artificial Sequence: Synthetic primer
cgtcctccgctcctccgtcttctcccagtcttccctcgtc

SEQ ID NO: 11167 - DNA, 40 bp, Artificial Sequence
  Description of Artificial Sequence: Synthetic primer
gtgaccctgacaggtcctgcctatggcgcggcagaccacc

SEQ ID NO: 11168 - DNA, 40 bp, Artificial Sequence
  Description of Artificial Sequence: Synthetic primer
gtcccagcgggccgcccgctccgtaccctgcggcttggtg

SEQ ID NO: 11169 - DNA, 40 bp, Artificial Sequence
  Description of Artificial Sequence: Synthetic primer
tggcggggaacggggacctgccagggtcggggccggtgtg

SEQ ID NO: 11170 - DNA, 40 bp, Artificial Sequence
  Description of Artificial Sequence: Synthetic primer
atttggtagaagcgcaattgggaatgctcagaaacagcac

SEQ ID NO: 11171 - DNA, 40 bp, Artificial Sequence
  Description of Artificial Sequence: Synthetic primer
agaacaatgaagtctgttttcttgatcttttctccgttag

SEQ ID NO: 11172 - DNA, 40 bp, Artificial Sequence
  Description of Artificial Sequence: Synthetic primer
aagagaagaggtcagacaggccagcctcccacccacaaac

SEQ ID NO: 11173 - DNA, 40 bp, Artificial Sequence
  Description of Artificial Sequence: Synthetic primer
cccatctggtgggccagagaggccttgcctatccccttgg

SEQ ID NO: 11174 - DNA, 40 bp, Artificial Sequence
  Description of Artificial Sequence: Synthetic primer
ttgcataggagataatcataggaatcccaaattaatacac

SEQ ID NO: 11175 - DNA, 40 bp, Artificial Sequence
  Description of Artificial Sequence: Synthetic primer
tatgtttttctaatgtgttaaagttcattggaacagaaag

SEQ ID NO: 11176 - DNA, 40 bp, Artificial Sequence
  Description of Artificial Sequence: Synthetic primer
aaaattttgttagattacattaagggcagtggtttgtttg

SEQ ID NO: 11177 - DNA, 40 bp, Artificial Sequence
  Description of Artificial Sequence: Synthetic primer
aaaatgattatgtctctaacaattaattccattttgtttt

SEQ ID NO: 11178 - DNA, 40 bp, Artificial Sequence
  Description of Artificial Sequence: Synthetic primer
cttgggtggatgcgccaggagaggaactgacaggaacaac

SEQ ID NO: 11179 - DNA, 40 bp, Artificial Sequence
  Description of Artificial Sequence: Synthetic primer
cagggtggcagtcgcggtttctgggtgtgtccccacagtc

SEQ ID NO: 11180 - DNA, 40 bp, Artificial Sequence
  Description of Artificial Sequence: Synthetic primer
cacatacacttctcctcaaaatattagcaatgattccaac

SEQ ID NO: 11181 - DNA, 40 bp, Artificial Sequence
  Description of Artificial Sequence: Synthetic primer
tttcaacaaaattaagcaagatttgtcttctcttctttcc

SEQ ID NO: 11182 - DNA, 40 bp, Artificial Sequence
  Description of Artificial Sequence: Synthetic primer
acatcactcataattgagaggtaatatttttgttctcttc

SEQ ID NO: 11183 - DNA, 40 bp, Artificial Sequence
  Description of Artificial Sequence: Synthetic primer
tattgtatgtaaactatctcaataaacctgacataaaagt

SEQ ID NO: 11184 - DNA, 40 bp, Artificial Sequence
  Description of Artificial Sequence: Synthetic primer
aaattctagatatttttgctatgggaagacattagactga

SEQ ID NO: 11185 - DNA, 40 bp, Artificial Sequence
  Description of Artificial Sequence: Synthetic primer
ataaaaggaaaagcacttgtaatgaagcagtttgttttcc

SEQ ID NO: 11186 - DNA, 40 bp, Artificial Sequence
  Description of Artificial Sequence: Synthetic primer
atattttcttatgtttgtacattaaagctttttattttgg

SEQ ID NO: 11187 - DNA, 40 bp, Artificial Sequence
  Description of Artificial Sequence: Synthetic primer
tcatacagaaaatgtataacatcatagtaggaaaaacgac

SEQ ID NO: 11188 - DNA, 40 bp, Artificial Sequence
  Description of Artificial Sequence: Synthetic primer
tttttttctcttttcttctattctgtgctcatgttgtgtc

SEQ ID NO: 11189 - DNA, 40 bp, Artificial Sequence
  Description of Artificial Sequence: Synthetic primer
caccaggaaaattaaaaggaaaaaaaatcaggtatacttc

SEQ ID NO: 11190 - DNA, 40 bp, Artificial Sequence
  Description of Artificial Sequence: Synthetic primer
ctcggttctgtgtccccacctgaaccgagctcttctctgc

SEQ ID NO: 11191 - DNA, 40 bp, Artificial Sequence
  Description of Artificial Sequence: Synthetic primer
cagtggtcagacaggcagggtctgcaggagagatgaggtc

SEQ ID NO: 11192 - DNA, 40 bp, Artificial Sequence
  Description of Artificial Sequence: Synthetic primer
gacatttttagttggattccacccagccaagtagaatgtg

SEQ ID NO: 11193 - DNA, 40 bp, Artificial Sequence
  Description of Artificial Sequence: Synthetic primer
aggggagaccctggattctctctttagggagcttctcttc

SEQ ID NO: 11194 - DNA, 40 bp, Artificial Sequence
  Description of Artificial Sequence: Synthetic primer
ggcagcgcctcccttgctagagctcactgtattaaactcc

SEQ ID NO: 11195 - DNA, 40 bp, Artificial Sequence
  Description of Artificial Sequence: Synthetic primer
atcagtaaattactgccttacccataacaactttgactgt

SEQ ID NO: 11196 - DNA, 40 bp, Artificial Sequence
  Description of Artificial Sequence: Synthetic primer
gtttttaactgatgaatttaactaagagagatagggatag

SEQ ID NO: 11197 - DNA, 40 bp, Artificial Sequence
  Description of Artificial Sequence: Synthetic primer
tctgctccatttatttctgttcaaactgtttagtttttgg

SEQ ID NO: 11198 - DNA, 40 bp, Artificial Sequence
  Description of Artificial Sequence: Synthetic primer
accttccttcaagcttcatccttcagttttactttaatgg

SEQ ID NO: 11199 - DNA, 40 bp, Artificial Sequence
  Description of Artificial Sequence: Synthetic primer
ccctccaccgccaaccaatcccctgtttgtagcccaaggg

SEQ ID NO: 11200 - DNA, 40 bp, Artificial Sequence
  Description of Artificial Sequence: Synthetic primer
cacgaaaagcaacggtgtggtactttaggtatgtttttac

SEQ ID NO: 11201 - DNA, 40 bp, Artificial Sequence
  Description of Artificial Sequence: Synthetic primer
taacccttcatctactacactgatatggttaatatattag

SEQ ID NO: 11202 - DNA, 40 bp, Artificial Sequence
  Description of Artificial Sequence: Synthetic primer
tgaaaatgaaatgaaaccaacaaatacattaggagcgaag

SEQ ID NO: 11203 - DNA, 40 bp, Artificial Sequence
  Description of Artificial Sequence: Synthetic primer
tctctactaaagttatataaaatcatattttcccccttcc

SEQ ID NO: 11204 - DNA, 40 bp, Artificial Sequence
  Description of Artificial Sequence: Synthetic primer
cctccacatcgctgtccctgacctgccattttgattggtg

SEQ ID NO: 11205 - DNA, 40 bp, Artificial Sequence
  Description of Artificial Sequence: Synthetic primer
agtggatgacaggtggggacgcagctccggaataccttac

SEQ ID NO: 11206 - DNA, 40 bp, Artificial Sequence
  Description of Artificial Sequence: Synthetic primer
cccctctaatggtgcccaaagccgcagctgcccacctgcc

SEQ ID NO: 11207 - DNA, 40 bp, Artificial Sequence
  Description of Artificial Sequence: Synthetic primer
agtgggtggtcggctcgcccctggatgtgcgctgatcttg

SEQ ID NO: 11208 - DNA, 40 bp, Artificial Sequence
  Description of Artificial Sequence: Synthetic primer
atacacctgctgggacaggggcctcacagctttgtctttc

SEQ ID NO: 11209 - DNA, 40 bp, Artificial Sequence
  Description of Artificial Sequence: Synthetic primer
aggggctgtcgctgaagtgactggtggctgggcaggtctc

SEQ ID NO: 11210 - DNA, 40 bp, Artificial Sequence
  Description of Artificial Sequence: Synthetic primer
tgcaagaagccatcttgaacatctttgtttctcttccttg

SEQ ID NO: 11211 - DNA, 40 bp, Artificial Sequence
  Description of Artificial Sequence: Synthetic primer
tgccaaatcaatataaagaagtaaaagaaatcccaagtag

SEQ ID NO: 11212 - DNA, 40 bp, Artificial Sequence
  Description of Artificial Sequence: Synthetic primer
aaataacaaagcattatggtttatgttgattttatttttc

SEQ ID NO: 11213 - DNA, 40 bp, Artificial Sequence
  Description of Artificial Sequence: Synthetic primer
ttctaccatgatttaaaaatccaccagtaattgtctatgt

SEQ ID NO: 11214 - DNA, 40 bp, Artificial Sequence
  Description of Artificial Sequence: Synthetic primer
ctctgtccctcgtgggctgagggccaggcttttcctcctc

SEQ ID NO: 11215 - DNA, 40 bp, Artificial Sequence
  Description of Artificial Sequence: Synthetic primer
ctctcctcccacctaccccaggccagcccacccctgctgc

SEQ ID NO: 11216 - DNA, 40 bp, Artificial Sequence
  Description of Artificial Sequence: Synthetic primer
cctgtcaggtgacatttataggccagaaatataaaaatgg

SEQ ID NO: 11217 - DNA, 40 bp, Artificial Sequence
  Description of Artificial Sequence: Synthetic primer
ccagctaccgtgacatttcttgactcttcatttgtttttc

SEQ ID NO: 11218 - DNA, 40 bp, Artificial Sequence
  Description of Artificial Sequence: Synthetic primer
caacaatatggtttaaaatactttacagaccagtgaactg

SEQ ID NO: 11219 - DNA, 40 bp, Artificial Sequence
  Description of Artificial Sequence: Synthetic primer
taccaacaggctaatgtatttatactacatattttcttcc

SEQ ID NO: 11220 - DNA, 40 bp, Artificial Sequence
  Description of Artificial Sequence: Synthetic primer
ggcacttctcttgctagcacatgtatcgctaatatttttc

SEQ ID NO: 11221 - DNA, 40 bp, Artificial Sequence
  Description of Artificial Sequence: Synthetic primer
ctgtttctttgaaacttaaggtcagttagttataattcca

SEQ ID NO: 11222 - DNA, 40 bp, Artificial Sequence
  Description of Artificial Sequence: Synthetic primer
ggctcctagggcagggtgggctgggctgcaagaaggatgg

SEQ ID NO: 11223 - DNA, 40 bp, Artificial Sequence
  Description of Artificial Sequence: Synthetic primer
gcggctctcatctggggagcaggaagacgcaggccaactg

SEQ ID NO: 11224 - DNA, 40 bp, Artificial Sequence
  Description of Artificial Sequence: Synthetic primer
cttaaaacttgcctgtatgtttttaacctttgcgtctgtc

SEQ ID NO: 11225 - DNA, 40 bp, Artificial Sequence
  Description of Artificial Sequence: Synthetic primer
cctggatgaagtcacagtcaccacattttcccactcaagc

SEQ ID NO: 11226 - DNA, 40 bp, Artificial Sequence
  Description of Artificial Sequence: Synthetic primer
gaggaaggcagagctggcttcccagccaagacgggactta

SEQ ID NO: 11227 - DNA, 40 bp, Artificial Sequence
  Description of Artificial Sequence: Synthetic primer
aggttctgaacagctggtagatgggctggcttactgaagg

SEQ ID NO: 11228 - DNA, 40 bp, Artificial Sequence
  Description of Artificial Sequence: Synthetic primer
cgaaaccaccctcccgtgcagccgagcccagccgctctcc

SEQ ID NO: 11229 - DNA, 40 bp, Artificial Sequence
  Description of Artificial Sequence: Synthetic primer
accctatgctctgtgtggatcccacccggcccggaccctc

SEQ ID NO: 11230 - DNA, 40 bp, Artificial Sequence
  Description of Artificial Sequence: Synthetic primer
ggactgctctcccctagaagctaacctttgacctctgacc

SEQ ID NO: 11231 - DNA, 40 bp, Artificial Sequence
  Description of Artificial Sequence: Synthetic primer
cacacagccccacatggtcaggggctttccacctgcaccc

SEQ ID NO: 11232 - DNA, 40 bp, Artificial Sequence
  Description of Artificial Sequence: Synthetic primer
cttgtccagcaaccatttttgtgcccatgttttctcattc

SEQ ID NO: 11233 - DNA, 40 bp, Artificial Sequence
  Description of Artificial Sequence: Synthetic primer
tggtggcatttacgaatcacttcttcaggggactgagttc

SEQ ID NO: 11234 - DNA, 40 bp, Artificial Sequence
  Description of Artificial Sequence: Synthetic primer
aaaaaagcccattattgttggctaaatgactatggaaaag

SEQ ID NO: 11235 - DNA, 40 bp, Artificial Sequence
  Description of Artificial Sequence: Synthetic primer
aatcttttgtgtgtaggagttgaccagctttccttttctg

SEQ ID NO: 11236 - DNA, 40 bp, Artificial Sequence
  Description of Artificial Sequence: Synthetic primer
tgtatttacctatagtctaaattataccatctataatgtg

SEQ ID NO: 11237 - DNA, 40 bp, Artificial Sequence
  Description of Artificial Sequence: Synthetic primer
gtcttagcaaagtagtcatggcattagtgaccagggtttg

SEQ ID NO: 11238 - DNA, 40 bp, Artificial Sequence
  Description of Artificial Sequence: Synthetic primer
gcgcggtctgcacacactgcagctgctagaggccttttcg

SEQ ID NO: 11239 - DNA, 40 bp, Artificial Sequence
  Description of Artificial Sequence: Synthetic primer
actgctcagtcttttctttaaagtcctctgttctttttcc

SEQ ID NO: 11240 - DNA, 40 bp, Artificial Sequence
  Description of Artificial Sequence: Synthetic primer
tgggtctagcctctcaccacccacccctctgtctctcttc

SEQ ID NO: 11241 - DNA, 40 bp, Artificial Sequence
  Description of Artificial Sequence: Synthetic primer
ggggcccctcctcatgagtccaagatctgcccccccatcc

SEQ ID NO: 11242 - DNA, 40 bp, Artificial Sequence
  Description of Artificial Sequence: Synthetic primer
aatatgagaaagaaatgcagaattcttaatcgttgctatt

SEQ ID NO: 11243 - DNA, 40 bp, Artificial Sequence
  Description of Artificial Sequence: Synthetic primer
tatggaaaaattatacagaagagctcttcatttatgttac

SEQ ID NO: 11244 - DNA, 40 bp, Artificial Sequence
  Description of Artificial Sequence: Synthetic primer
tcaggaaagcaattccaatctcaaagcctgaccaagacac

SEQ ID NO: 11245 - DNA, 40 bp, Artificial Sequence
  Description of Artificial Sequence: Synthetic primer
gtatcctatttcctataaaaattatgtttttgtccctgtg

SEQ ID NO: 11246 - DNA, 40 bp, Artificial Sequence
  Description of Artificial Sequence: Synthetic primer
tttttggtgagaagtaggattattttctatcttttctttc

SEQ ID NO: 11247 - DNA, 40 bp, Artificial Sequence
  Description of Artificial Sequence: Synthetic primer
aaaaaattccgagcatgttaaaagcaatggtgaaggatac

SEQ ID NO: 11248 - DNA, 40 bp, Artificial Sequence
  Description of Artificial Sequence: Synthetic primer
caaggggacagaaatgcctatggggcaggggagccattcc

SEQ ID NO: 11249 - DNA, 40 bp, Artificial Sequence
  Description of Artificial Sequence: Synthetic primer
ctcagtcttgctggcctttcttcttccgacacactcctgc

SEQ ID NO: 11250 - DNA, 40 bp, Artificial Sequence
  Description of Artificial Sequence: Synthetic primer
agatgtctacttaaagaatggagcacagttaatgttgaag

SEQ ID NO: 11251 - DNA, 40 bp, Artificial Sequence
  Description of Artificial Sequence: Synthetic primer
ataaaaagatgctgcttttggaaaacaaacagaaactgac

SEQ ID NO: 11252 - DNA, 40 bp, Artificial Sequence
  Description of Artificial Sequence: Synthetic primer
ttcagtacaaaaggtccaagaacatgaaagggaaaaggtg

SEQ ID NO: 11253 - DNA, 40 bp, Artificial Sequence
  Description of Artificial Sequence: Synthetic primer
ggtactgggtcccatgctgacaccggcctgtcccctttcc

SEQ ID NO: 11254 - DNA, 40 bp, Artificial Sequence
  Description of Artificial Sequence: Synthetic primer
ggggttcggctggcctggggacccaatctgctgcttcatc

SEQ ID NO: 11255 - DNA, 40 bp, Artificial Sequence
  Description of Artificial Sequence: Synthetic primer
tggattcatactcgccatgttggggttgtgtcctgggttc

SEQ ID NO: 11256 - DNA, 40 bp, Artificial Sequence
  Description of Artificial Sequence: Synthetic primer
ggaaggggcgcctgctgccactgcccgggaggcatgctgg

SEQ ID NO: 11257 - DNA, 40 bp, Artificial Sequence
  Description of Artificial Sequence: Synthetic primer
aggcagactctgctgaggcacgttgcgggtgttcatggtg

SEQ ID NO: 11258 - DNA, 40 bp, Artificial Sequence
  Description of Artificial Sequence: Synthetic primer
cccaacatccagcaagccctgcagcagcggattctgcagc

SEQ ID NO: 11259 - DNA, 40 bp, Artificial Sequence
  Description of Artificial Sequence: Synthetic primer
atgccatgcaggctggcgtgccgcggcccggtgtgcctcc

SEQ ID NO: 11260 - DNA, 40 bp, Artificial Sequence
  Description of Artificial Sequence: Synthetic primer
ccccgtgagcctgaatgtgccccgacccaaccaggtgagc

SEQ ID NO: 11261 - DNA, 40 bp, Artificial Sequence
  Description of Artificial Sequence: Synthetic primer
ctccgccagcagcagatccagcaccgcctgcagcaggccc

SEQ ID NO: 11262 - DNA, 40 bp, Artificial Sequence
  Description of Artificial Sequence: Synthetic primer
tcatgtaatatgtgctcagtataggtttatgaatctgttg

SEQ ID NO: 11263 - DNA, 40 bp, Artificial Sequence
  Description of Artificial Sequence: Synthetic primer
ttgttttcttctcgatgactttgagatctctttatttctc

SEQ ID NO: 11264 - DNA, 40 bp, Artificial Sequence
  Description of Artificial Sequence: Synthetic primer
tgtccactgctccgcgctgaccatgttcctcaccacacag

SEQ ID NO: 11265 - DNA, 40 bp, Artificial Sequence
  Description of Artificial Sequence: Synthetic primer
cgagggccgtaaaaacacgggtatgtgagccaaagcactg

SEQ ID NO: 11266 - DNA, 40 bp, Artificial Sequence
  Description of Artificial Sequence: Synthetic primer
aagaagaaaactgaaataaaaagactccaaccttctgtac

SEQ ID NO: 11267 - DNA, 40 bp, Artificial Sequence
  Description of Artificial Sequence: Synthetic primer
aaaaattatcacagacttttaaaagagagtcattttgttt

SEQ ID NO: 11268 - DNA, 40 bp, Artificial Sequence
  Description of Artificial Sequence: Synthetic primer
aagaagaaaacaaaacaaacatggaggcatgggttgcagc

SEQ ID NO: 11269 - DNA, 40 bp, Artificial Sequence
  Description of Artificial Sequence: Synthetic primer
tcttcaagacaatctttggaaggttcttcagccacagagc

SEQ ID NO: 11270 - DNA, 40 bp, Artificial Sequence
  Description of Artificial Sequence: Synthetic primer
gtttaaaataataactgaccttctcgatatgtttcctctc

SEQ ID NO: 11271 - DNA, 40 bp, Artificial Sequence
  Description of Artificial Sequence: Synthetic primer
ctctcagcctggaagccttttagcctacaggatccacctc

SEQ ID NO: 11272 - DNA, 40 bp, Artificial Sequence
  Description of Artificial Sequence: Synthetic primer
tccagaacactggcaagggatgggaacctaacttcttctg

SEQ ID NO: 11273 - DNA, 40 bp, Artificial Sequence
  Description of Artificial Sequence: Synthetic primer
ataaatatagagctattcagtattactaaatgatcagatc

SEQ ID NO: 11274 - DNA, 40 bp, Artificial Sequence
  Description of Artificial Sequence: Synthetic primer
atattcagaaataataatgtcacttgaaagccattaactg

SEQ ID NO: 11275 - DNA, 40 bp, Artificial Sequence
  Description of Artificial Sequence: Synthetic primer
tccacccacttctgtgtcacgcgtgtgcaggtggggactg

SEQ ID NO: 11276 - DNA, 40 bp, Artificial Sequence
  Description of Artificial Sequence: Synthetic primer
agagaaccccatcttggatttgttctgatgatcatttctg

SEQ ID NO: 11277 - DNA, 40 bp, Artificial Sequence
  Description of Artificial Sequence: Synthetic primer
acccatggaggccatggggtcagatggtatcttcttgctg

SEQ ID NO: 11278 - DNA, 40 bp, Artificial Sequence
  Description of Artificial Sequence: Synthetic primer
tttttcttatccatattctaaccacctcttctatcttttc

SEQ ID NO: 11279 - DNA, 40 bp, Artificial Sequence
  Description of Artificial Sequence: Synthetic primer
tggaagcgcgttacccgggtccaaaatgcccaagaagaag

SEQ ID NO: 11280 - DNA, 40 bp, Artificial Sequence
  Description of Artificial Sequence: Synthetic primer
ccagccgggccccgaggttcaccgcccgccccatacttac

SEQ ID NO: 11281 - DNA, 40 bp, Artificial Sequence
  Description of Artificial Sequence: Synthetic primer
gccaataactccctagccaagtctctacctcctgcttttc

SEQ ID NO: 11282 - DNA, 40 bp, Artificial Sequence
  Description of Artificial Sequence: Synthetic primer
agacctgttgagtgtaactaccttttccctttgttttctc

SEQ ID NO: 11283 - DNA, 40 bp, Artificial Sequence
  Description of Artificial Sequence: Synthetic primer
tcttaacccttccctgttttgctcttttctctctccctac

SEQ ID NO: 11284 - DNA, 40 bp, Artificial Sequence
  Description of Artificial Sequence: Synthetic primer
agacaaccggccatggagagggagaagtgctaaagtcagg

SEQ ID NO: 11285 - DNA, 40 bp, Artificial Sequence
  Description of Artificial Sequence: Synthetic primer
atcagctccaggcagtctctgtggctttcctgacttttcc

SEQ ID NO: 11286 - DNA, 40 bp, Artificial Sequence
  Description of Artificial Sequence: Synthetic primer
ccggcggagagcgacctcggggttaaggggtggggctgac

SEQ ID NO: 11287 - DNA, 40 bp, Artificial Sequence
  Description of Artificial Sequence: Synthetic primer
tcctttatttaataattgctgtctcactgtctatacttca

SEQ ID NO: 11288 - DNA, 40 bp, Artificial Sequence
  Description of Artificial Sequence: Synthetic primer
atgaaatccttccaaacagtaacaaatgtgtcacgaatag

SEQ ID NO: 11289 - DNA, 40 bp, Artificial Sequence
  Description of Artificial Sequence: Synthetic primer
ggggtaagggaagtaggtggaagattcagccaagctcaag

SEQ ID NO: 11290 - DNA, 40 bp, Artificial Sequence
  Description of Artificial Sequence: Synthetic primer
cctgggccgaaaggcgacatttctggaaggaaaaacttac

SEQ ID NO: 11291 - DNA, 40 bp, Artificial Sequence
  Description of Artificial Sequence: Synthetic primer
gccctggagtgccaccccgagagaggttgcgtcccagagc

SEQ ID NO: 11292 - DNA, 40 bp, Artificial Sequence
  Description of Artificial Sequence: Synthetic primer
ggtgtggaggcgttggagcatctgagtccaggggaacagc

SEQ ID NO: 11293 - DNA, 40 bp, Artificial Sequence
  Description of Artificial Sequence: Synthetic primer
aacccgctggactacggcagcgcctgggcggctgcggcgg

SEQ ID NO: 11294 - DNA, 40 bp, Artificial Sequence
  Description of Artificial Sequence: Synthetic primer
aggtgctggcagctgctgcggcagccccttgctggcggcc

SEQ ID NO: 11295 - DNA, 40 bp, Artificial Sequence
  Description of Artificial Sequence: Synthetic primer
tgcattcggccaatggggcacaaggagtgggacgcacagc

SEQ ID NO: 11296 - DNA, 40 bp, Artificial Sequence
  Description of Artificial Sequence: Synthetic primer
gggtcccgctgcacccgcgccatgcaggctcgccaggtcc

SEQ ID NO: 11297 - DNA, 40 bp, Artificial Sequence
  Description of Artificial Sequence: Synthetic primer
ggcctcccctaaaagtcccctgcggtcccttcctcctcac

SEQ ID NO: 11298 - DNA, 40 bp, Artificial Sequence
  Description of Artificial Sequence: Synthetic primer
gagaggagccccatgcacccctccagccaccctctcctcc

SEQ ID NO: 11299 - DNA, 40 bp, Artificial Sequence
  Description of Artificial Sequence: Synthetic primer
taaaacaagtaaacattactaatgagatgtttttgccttc

SEQ ID NO: 11300 - DNA, 40 bp, Artificial Sequence
  Description of Artificial Sequence: Synthetic primer
atctgaagatggggctggtgcaaaatagttcttgctaaag

SEQ ID NO: 11301 - DNA, 40 bp, Artificial Sequence
  Description of Artificial Sequence: Synthetic primer
caggttattgacacatctaacacaataggctaccaaggag

SEQ ID NO: 11302 - DNA, 40 bp, Artificial Sequence
  Description of Artificial Sequence: Synthetic primer
cctaattctcatatctgtttctctatgcttttctcctctg

SEQ ID NO: 11303 - DNA, 40 bp, Artificial Sequence
  Description of Artificial Sequence: Synthetic primer
gccccagccctcctgatccctcgcagcccggctccggccg

SEQ ID NO: 11304 - DNA, 40 bp, Artificial Sequence
  Description of Artificial Sequence: Synthetic primer
cgagcccggggagggcgagaacgcgccccgggctacctcg

SEQ ID NO: 11305 - DNA, 40 bp, Artificial Sequence
  Description of Artificial Sequence: Synthetic primer
ctaaaagttcaataaaaattttaaatgcattaaccagtgg

SEQ ID NO: 11306 - DNA, 40 bp, Artificial Sequence
  Description of Artificial Sequence: Synthetic primer
ttttacatatatctaaactacctactttctacttaaaaag

SEQ ID NO: 11307 - DNA, 40 bp, Artificial Sequence
  Description of Artificial Sequence: Synthetic primer
gctcaggcctgacactggggagaagagcctgatggtgagg

SEQ ID NO: 11308 - DNA, 40 bp, Artificial Sequence
  Description of Artificial Sequence: Synthetic primer
ttctctgctgatgatatgacccttggcatccccctactgc

SEQ ID NO: 11309 - DNA, 40 bp, Artificial Sequence
  Description of Artificial Sequence: Synthetic primer
attttaaaaacagctctctgagatggatataattatcctg

SEQ ID NO: 11310 - DNA, 40 bp, Artificial Sequence
  Description of Artificial Sequence: Synthetic primer
agtgagggagcatgactaaaaatagaaaaatgatgaaaag

SEQ ID NO: 11311 - DNA, 40 bp, Artificial Sequence
  Description of Artificial Sequence: Synthetic primer
ttcccatggcctcactaatcccaggactcccacaatccac

SEQ ID NO: 11312 - DNA, 40 bp, Artificial Sequence
  Description of Artificial Sequence: Synthetic primer
gggagccgctgacctgctgtcctcttctccctccccttag

SEQ ID NO: 11313 - DNA, 40 bp, Artificial Sequence
  Description of Artificial Sequence: Synthetic primer
ggctgttatccttacagtagtttttttttaatcttattgc

SEQ ID NO: 11314 - DNA, 40 bp, Artificial Sequence
  Description of Artificial Sequence: Synthetic primer
gcaacttacacttcaggttggcctccctggttgttctctg

SEQ ID NO: 11315 - DNA, 40 bp, Artificial Sequence
  Description of Artificial Sequence: Synthetic primer
atgagtttgctgggaaacagaaaagcgtgcattctagagg

SEQ ID NO: 11316 - DNA, 40 bp, Artificial Sequence
  Description of Artificial Sequence: Synthetic primer
atattaataatttctaaacgctcatcacttgatacttgtg

SEQ ID NO: 11317 - DNA, 40 bp, Artificial Sequence
  Description of Artificial Sequence: Synthetic primer
ctcagaatggaggctgctgaccccgggtcccctgccctgc

SEQ ID NO: 11318 - DNA, 40 bp, Artificial Sequence
  Description of Artificial Sequence: Synthetic primer
cccacactccccaagccctgccacaggtggcatgggccag

SEQ ID NO: 11319 - DNA, 40 bp, Artificial Sequence
  Description of Artificial Sequence: Synthetic primer
gattggaagaaatgtcaaaaggaaggatcaaaataagctc

SEQ ID NO: 11320 - DNA, 40 bp, Artificial Sequence
  Description of Artificial Sequence: Synthetic primer
tgaggcattactgttgactttacatatgatttaattttta

SEQ ID NO: 11321 - DNA, 40 bp, Artificial Sequence
  Description of Artificial Sequence: Synthetic primer
tcagccccagccccaagctggctaaagctccttcttattc

SEQ ID NO: 11322 - DNA, 40 bp, Artificial Sequence
  Description of Artificial Sequence: Synthetic primer
ggagctgccactgagactcacaggagacgttgacctgaac

SEQ ID NO: 11323 - DNA, 40 bp, Artificial Sequence
  Description of Artificial Sequence: Synthetic primer
atgagtccacgttttctacacgctacaggataggaagagc

SEQ ID NO: 11324 - DNA, 40 bp, Artificial Sequence
  Description of Artificial Sequence: Synthetic primer
gggagaacttgtgcacgtatctcccctccgaatcccaacg

SEQ ID NO: 11325 - DNA, 40 bp, Artificial Sequence
  Description of Artificial Sequence: Synthetic primer
agaaggccttcagctcttccagggtttccttcttggtgac

SEQ ID NO: 11326 - DNA, 40 bp, Artificial Sequence
  Description of Artificial Sequence: Synthetic primer
gcgccacgttatagcccggggccacgccttcgtcctggtc

SEQ ID NO: 11327 - DNA, 40 bp, Artificial Sequence
  Description of Artificial Sequence: Synthetic primer
tagtatattctagtcatgcctaactatgctattctttgtc

SEQ ID NO: 11328 - DNA, 40 bp, Artificial Sequence
  Description of Artificial Sequence: Synthetic primer
atattctatagccagggagattaagaatgccagtgagtac

SEQ ID NO: 11329 - DNA, 40 bp, Artificial Sequence
  Description of Artificial Sequence: Synthetic primer
tttattttcataaataacagtgtattaggtaaatattgga

SEQ ID NO: 11330 - DNA, 40 bp, Artificial Sequence
  Description of Artificial Sequence: Synthetic primer
ttggtaagcaacgtatactatttgttttcctaatgtttag

SEQ ID NO: 11331 - DNA, 40 bp, Artificial Sequence
  Description of Artificial Sequence: Synthetic primer
ggaatgacaggcggggtcccaggccagccccttcgccaac

SEQ ID NO: 11332 - DNA, 40 bp, Artificial Sequence
  Description of Artificial Sequence: Synthetic primer
aggctgtcttcattccctcttgaccacccctcgtttcttc

SEQ ID NO: 11333 - DNA, 40 bp, Artificial Sequence
  Description of Artificial Sequence: Synthetic primer
tattcccatttatagacactgtagttaatgaacttgcata

SEQ ID NO: 11334 - DNA, 40 bp, Artificial Sequence
  Description of Artificial Sequence: Synthetic primer
catgactttcatgtactctcccaccttattttcaatgatc

SEQ ID NO: 11335 - DNA, 40 bp, Artificial Sequence
  Description of Artificial Sequence: Synthetic primer
tttaagtacaactttttaactaattattttcctcttcttg

SEQ ID NO: 11336 - DNA, 40 bp, Artificial Sequence
  Description of Artificial Sequence: Synthetic primer
ttagggctagatcataaaatcataaaaacatatagaagag

SEQ ID NO: 11337 - DNA, 40 bp, Artificial Sequence
  Description of Artificial Sequence: Synthetic primer
gccaagcctcacgctgatacagggcaagctcaggtttctg

SEQ ID NO: 11338 - DNA, 40 bp, Artificial Sequence
  Description of Artificial Sequence: Synthetic primer
acattaaagaatgtcattatgtctcaactagccactctcc

SEQ ID NO: 11339 - DNA, 40 bp, Artificial Sequence
  Description of Artificial Sequence: Synthetic primer
agaataagaagcacctcgaattctctggataataaagaag

SEQ ID NO: 11340 - DNA, 40 bp, Artificial Sequence
  Description of Artificial Sequence: Synthetic primer
aaaagcaacttcatcttcacaagtcaaaagtatatttccc

SEQ ID NO: 11341 - DNA, 40 bp, Artificial Sequence
  Description of Artificial Sequence: Synthetic primer
tataagttcattttttttcttttcaaaattactagatatg

SEQ ID NO: 11342 - DNA, 40 bp, Artificial Sequence
  Description of Artificial Sequence: Synthetic primer
ctaattcatatactaagtgatttttatttaaattcttttg

SEQ ID NO: 11343 - DNA, 40 bp, Artificial Sequence
  Description of Artificial Sequence: Synthetic primer
atggcagaaacaccagccaggtctcatgggcctcgtcctc

SEQ ID NO: 11344 - DNA, 40 bp, Artificial Sequence
  Description of Artificial Sequence: Synthetic primer
gtctctgtgacccggcgatgtgccccggtgctgacctgtg

SEQ ID NO: 11345 - DNA, 40 bp, Artificial Sequence
  Description of Artificial Sequence: Synthetic primer
aagcattagtgcttgaagtttctccagtgagcaagtctac

SEQ ID NO: 11346 - DNA, 40 bp, Artificial Sequence
  Description of Artificial Sequence: Synthetic primer
cttccaatcttcataatcctcttgtgcttgtctctctttg

SEQ ID NO: 11347 - DNA, 40 bp, Artificial Sequence
  Description of Artificial Sequence: Synthetic primer
cagcgtgctcatgcctgacttacagcaggcgttcactttc

SEQ ID NO: 11348 - DNA, 40 bp, Artificial Sequence
  Description of Artificial Sequence: Synthetic primer
gcggctggctcccctggcaggaagggagggctggctttac

SEQ ID NO: 11349 - DNA, 40 bp, Artificial Sequence
  Description of Artificial Sequence: Synthetic primer
aaactaagatagaaatgtactgaagaaagaagaaagagag

SEQ ID NO: 11350 - DNA, 40 bp, Artificial Sequence
  Description of Artificial Sequence: Synthetic primer
ggaaatgaaacctaacaacatgctttgcttgcttttaccc

SEQ ID NO: 11351 - DNA, 40 bp, Artificial Sequence
  Description of Artificial Sequence: Synthetic primer
gccagtgcatggggtgggcagaagggagagtttggtactc

SEQ ID NO: 11352 - DNA, 40 bp, Artificial Sequence
  Description of Artificial Sequence: Synthetic primer
ccctttccctctgctcctaggctcacgccctggctgtctg

SEQ ID NO: 11353 - DNA, 40 bp, Artificial Sequence
  Description of Artificial Sequence: Synthetic primer
gctctcctgttatgtgcccttaagtacaaccagtgtaaat

SEQ ID NO: 11354 - DNA, 40 bp, Artificial Sequence
  Description of Artificial Sequence: Synthetic primer
aattctttaagcacatgaataaaaatacaatcaaataaat

SEQ ID NO: 11355 - DNA, 40 bp, Artificial Sequence
  Description of Artificial Sequence: Synthetic primer
tctcacaattgccagttaacgtcttccttctctctctgtc

SEQ ID NO: 11356 - DNA, 40 bp, Artificial Sequence
  Description of Artificial Sequence: Synthetic primer
aggtgggcctgaggttcagagccatggacccccacacagc

SEQ ID NO: 11357 - DNA, 40 bp, Artificial Sequence
  Description of Artificial Sequence: Synthetic primer
ctgagaaaaattgcacatgagaattttttttcttgctttg

SEQ ID NO: 11358 - DNA, 40 bp, Artificial Sequence
  Description of Artificial Sequence: Synthetic primer
ggtgactcaggtgtgatcttccagtgagagcaggaatgcc

SEQ ID NO: 11359 - DNA, 40 bp, Artificial Sequence
  Description of Artificial Sequence: Synthetic primer
gaaagcagttcacacactgtgctgcctgggacactgaacg

SEQ ID NO: 11360 - DNA, 40 bp, Artificial Sequence
  Description of Artificial Sequence: Synthetic primer
agttgaacttgtgcctgtctctttgttgcaagtgtctctg

SEQ ID NO: 11361 - DNA, 40 bp, Artificial Sequence
  Description of Artificial Sequence: Synthetic primer
tgaggcccagtgttcttgggtgccaaagccatgtggactg

SEQ ID NO: 11362 - DNA, 40 bp, Artificial Sequence
  Description of Artificial Sequence: Synthetic primer
cagggcctggtaagggccagtcctaagtgtgatcctctcc

SEQ ID NO: 11363 - DNA, 40 bp, Artificial Sequence
  Description of Artificial Sequence: Synthetic primer
gagatagcgtgcaagtttctctctctacttggttgcattg

SEQ ID NO: 11364 - DNA, 40 bp, Artificial Sequence
  Description of Artificial Sequence: Synthetic primer
cttggtactagccacttttgagaggcttattaaataattg

SEQ ID NO: 11365 - DNA, 40 bp, Artificial Sequence
  Description of Artificial Sequence: Synthetic primer
aatttatgcaaaataatgatgtgccagtcttcacccactg

SEQ ID NO: 11366 - DNA, 40 bp, Artificial Sequence
  Description of Artificial Sequence: Synthetic primer
ggagggtagctgcccagtttgctcatggcctgctctcatc

SEQ ID NO: 11367 - DNA, 40 bp, Artificial Sequence
  Description of Artificial Sequence: Synthetic primer
attgaagtagaaacactgaaggccttccaaaaaaaaaaac

SEQ ID NO: 11368 - DNA, 40 bp, Artificial Sequence
  Description of Artificial Sequence: Synthetic primer
ctcttctaaagataattttatttatctaatgttgttttct

SEQ ID NO: 11369 - DNA, 40 bp, Artificial Sequence
  Description of Artificial Sequence: Synthetic primer
gggccttcacctgcccatctggcccttgacccccgctcac

SEQ ID NO: 11370 - DNA, 40 bp, Artificial Sequence
  Description of Artificial Sequence: Synthetic primer
agcaacaggcaaggactctgaggttagaaagtggcaaagg

SEQ ID NO: 11371 - DNA, 40 bp, Artificial Sequence
  Description of Artificial Sequence: Synthetic primer
tgggtttcccagggtggcttctgatatgtcctttcttctg

SEQ ID NO: 11372 - DNA, 40 bp, Artificial Sequence
  Description of Artificial Sequence: Synthetic primer
gaatctatggcaggcctcctggagggccaccactgtccag

SEQ ID NO: 11373 - DNA, 40 bp, Artificial Sequence
  Description of Artificial Sequence: Synthetic primer
gccagggctggtgatgacggtggcctgggagggtgacctc

SEQ ID NO: 11374 - DNA, 40 bp, Artificial Sequence
  Description of Artificial Sequence: Synthetic primer
ccctctatagctagtaagaagtaatgggttttggctgttc

SEQ ID NO: 11375 - DNA, 40 bp, Artificial Sequence
  Description of Artificial Sequence: Synthetic primer
acttggaggtcaccaagtgcatttttccagagggccacag

SEQ ID NO: 11376 - DNA, 40 bp, Artificial Sequence
  Description of Artificial Sequence: Synthetic primer
ataaaaaatattttttcaccgaccatgaaataatttccag

SEQ ID NO: 11377 - DNA, 40 bp, Artificial Sequence
  Description of Artificial Sequence: Synthetic primer
ttagctagacacacaaaaaatcatttttttctttcccctc

SEQ ID NO: 11378 - DNA, 40 bp, Artificial Sequence
  Description of Artificial Sequence: Synthetic primer
aggaggaagggcaggaggcagcgaccctgcaggaggcaag

SEQ ID NO: 11379 - DNA, 40 bp, Artificial Sequence
  Description of Artificial Sequence: Synthetic primer
gagggtggcaagaggccgaatggcccaccctcaccacctg

SEQ ID NO: 11380 - DNA, 40 bp, Artificial Sequence
  Description of Artificial Sequence: Synthetic primer
actactggggtgttcctgagaaatttttgccaacaagaag

SEQ ID NO: 11381 - DNA, 40 bp, Artificial Sequence
  Description of Artificial Sequence: Synthetic primer
tacagtgagaaatttttgtctctgcttttcattttattag

SEQ ID NO: 11382 - DNA, 40 bp, Artificial Sequence
  Description of Artificial Sequence: Synthetic primer
gactacttttcagctaatggttaagagttgaagactgtgc

SEQ ID NO: 11383 - DNA, 40 bp, Artificial Sequence
  Description of Artificial Sequence: Synthetic primer
atactttgcatagtttaacattaatcttctctccttttag

SEQ ID NO: 11384 - DNA, 40 bp, Artificial Sequence
  Description of Artificial Sequence: Synthetic primer
ggccacctccttgtcaaccctgtttttctccctcttattg

SEQ ID NO: 11385 - DNA, 40 bp, Artificial Sequence
  Description of Artificial Sequence: Synthetic primer
ggggcatgagctggggtggggaaatagggtttccaatgct

SEQ ID NO: 11386 - DNA, 40 bp, Artificial Sequence
  Description of Artificial Sequence: Synthetic primer
ctgtatagcaatccttctgactcattgtttttgtttattc

SEQ ID NO: 11387 - DNA, 40 bp, Artificial Sequence
  Description of Artificial Sequence: Synthetic primer
atccaggacctcatagcaggactgaaagacgaatggtttg

SEQ ID NO: 11388 - DNA, 40 bp, Artificial Sequence
  Description of Artificial Sequence: Synthetic primer
cgggcgcctgacttcacttccggctaacgcgctcggcttg

SEQ ID NO: 11389 - DNA, 40 bp, Artificial Sequence
  Description of Artificial Sequence: Synthetic primer
ggggctggacggcttctttccccggcttcgcgcccgcccg

SEQ ID NO: 11390 - DNA, 40 bp, Artificial Sequence
  Description of Artificial Sequence: Synthetic primer
tcatctctatcactttttctcattgtgtcccttttctctc

SEQ ID NO: 11391 - DNA, 40 bp, Artificial Sequence
  Description of Artificial Sequence: Synthetic primer
agagaatgaaagggaaaaagaaaagccaaagcgtactgac

SEQ ID NO: 11392 - DNA, 40 bp, Artificial Sequence
  Description of Artificial Sequence: Synthetic primer
gagctgagagtgcagtgggtgggaggtcagccttccctat

SEQ ID NO: 11393 - DNA, 40 bp, Artificial Sequence
  Description of Artificial Sequence: Synthetic primer
gccaggagcctcccctcttactgcccttctcccgttacag

SEQ ID NO: 11394 - DNA, 40 bp, Artificial Sequence
  Description of Artificial Sequence: Synthetic primer
taggacatgtattgttgacaaaattagttctttttctttt

SEQ ID NO: 11395 - DNA, 40 bp, Artificial Sequence
  Description of Artificial Sequence: Synthetic primer
taacaaagttggtagataaatttgatatatgaaaatattc

SEQ ID NO: 11396 - DNA, 40 bp, Artificial Sequence
  Description of Artificial Sequence: Synthetic primer
tgcaaaaggcacatggggaggattctaatgcctctttctc

SEQ ID NO: 11397 - DNA, 40 bp, Artificial Sequence
  Description of Artificial Sequence: Synthetic primer
gcttcctgggtccaaggagagcaagtgagagtggaggacc

SEQ ID NO: 11398 - DNA, 40 bp, Artificial Sequence
  Description of Artificial Sequence: Synthetic primer
ggcacatttctccgaggtgtgaaatttggaggctataatc

SEQ ID NO: 11399 - DNA, 40 bp, Artificial Sequence
  Description of Artificial Sequence: Synthetic primer
tttagcaaggtcattgcatattcgctcagtagcatataat

SEQ ID NO: 11400 - DNA, 40 bp, Artificial Sequence
  Description of Artificial Sequence: Synthetic primer
cttgtgcacagaaggacttaagctgctccctgctgacatc

SEQ ID NO: 11401 - DNA, 40 bp, Artificial Sequence
  Description of Artificial Sequence: Synthetic primer
cagggatcccctgcgtagtgaggtctgtgggcatttgttg

SEQ ID NO: 11402 - DNA, 40 bp, Artificial Sequence
  Description of Artificial Sequence: Synthetic primer
gggcagaaagcctctgatatctcaagctttccttttcctg

SEQ ID NO: 11403 - DNA, 40 bp, Artificial Sequence
  Description of Artificial Sequence: Synthetic primer
cccgctgctgtgttccccacgctccagacccagcagtgac

SEQ ID NO: 11404 - DNA, 40 bp, Artificial Sequence
  Description of Artificial Sequence: Synthetic primer
taacacatatcctgatactttatgtataaaattatacttg

SEQ ID NO: 11405 - DNA, 40 bp, Artificial Sequence
  Description of Artificial Sequence: Synthetic primer
tttaccaggctaacaataatatgtaaaaatacaccatttc

SEQ ID NO: 11406 - DNA, 40 bp, Artificial Sequence
  Description of Artificial Sequence: Synthetic primer
gctggtgaggggacaggctggcgtgggtcacgggaggaag

SEQ ID NO: 11407 - DNA, 40 bp, Artificial Sequence
  Description of Artificial Sequence: Synthetic primer
gggtgtggggctgaggccaagcttcatccagccttcattc

SEQ ID NO: 11408 - DNA, 40 bp, Artificial Sequence
  Description of Artificial Sequence: Synthetic primer
ctaccttatctcccatctacccacctttgagggccagagc

SEQ ID NO: 11409 - DNA, 40 bp, Artificial Sequence
  Description of Artificial Sequence: Synthetic primer
gcctccacctgccctgggccctgactcctgtttaactctg

SEQ ID NO: 11410 - DNA, 40 bp, Artificial Sequence
  Description of Artificial Sequence: Synthetic primer
ctggattccctgcatctcccacccctctggccggctgctc

SEQ ID NO: 11411 - DNA, 40 bp, Artificial Sequence
  Description of Artificial Sequence: Synthetic primer
ccagattctaaaccttccctcccttcttcccccatttccc

SEQ ID NO: 11412 - DNA, 40 bp, Artificial Sequence
  Description of Artificial Sequence: Synthetic primer
gttcaaggatgacccctgggcaggtggggcccgcactggc

SEQ ID NO: 11413 - DNA, 40 bp, Artificial Sequence
  Description of Artificial Sequence: Synthetic primer
tcctgggaggggagctgggctgggcctgtgactcctcagc

SEQ ID NO: 11414 - DNA, 40 bp, Artificial Sequence
  Description of Artificial Sequence: Synthetic primer
tattgatcgggagagccggagcgagctcttcggggagcag

SEQ ID NO: 11415 - DNA, 40 bp, Artificial Sequence
  Description of Artificial Sequence: Synthetic primer
ggcgcgggagccggcgagacacgcccttacctttcttttc

SEQ ID NO: 11416 - DNA, 40 bp, Artificial Sequence
  Description of Artificial Sequence: Synthetic primer
tccctaccccgtcccttgggctgggagtagagggatggtg

SEQ ID NO: 11417 - DNA, 40 bp, Artificial Sequence
  Description of Artificial Sequence: Synthetic primer
cagggctcaggacaggcctgggctgactccccccacaccc

SEQ ID NO: 11418 - DNA, 40 bp, Artificial Sequence
  Description of Artificial Sequence: Synthetic primer
tgaaatagaaatctttacctgaaggagctgtgtttcaacc

SEQ ID NO: 11419 - DNA, 40 bp, Artificial Sequence
  Description of Artificial Sequence: Synthetic primer
taatactttttgtctttttgtccctcagtgtgactgtaag

SEQ ID NO: 11420 - DNA, 40 bp, Artificial Sequence
  Description of Artificial Sequence: Synthetic primer
cttaaaattataaaaacttaagagacgattggaggagatg

SEQ ID NO: 11421 - DNA, 40 bp, Artificial Sequence
  Description of Artificial Sequence: Synthetic primer
ccaacttttctagtaaatactattaactcattaataaaac

SEQ ID NO: 11422 - DNA, 40 bp, Artificial Sequence
  Description of Artificial Sequence: Synthetic primer
tgtgacaagccgaggcggtgagccgggcaggaggaaggag

SEQ ID NO: 11423 - DNA, 40 bp, Artificial Sequence
  Description of Artificial Sequence: Synthetic primer
gatggtgatggtgtggtggcggcagcgtggtttctgtatc

SEQ ID NO: 11424 - DNA, 40 bp, Artificial Sequence
  Description of Artificial Sequence: Synthetic primer
gatgccttgctcttcaacttccccaactcccacgataccc

SEQ ID NO: 11425 - DNA, 40 bp, Artificial Sequence
  Description of Artificial Sequence: Synthetic primer
gttattgaaatgcagccactagagtgtgtgtgtctctttc

SEQ ID NO: 11426 - DNA, 40 bp, Artificial Sequence
  Description of Artificial Sequence: Synthetic primer
ggcctggcactgccactgacgagctgtggggtcccttctc

SEQ ID NO: 11427 - DNA, 40 bp, Artificial Sequence
  Description of Artificial Sequence: Synthetic primer
gttgttctcatggccggtggccggttctcaccccttttgc

SEQ ID NO: 11428 - DNA, 40 bp, Artificial Sequence
  Description of Artificial Sequence: Synthetic primer
catggtagtaacaaaacccattttgacactgaacaaaaac

SEQ ID NO: 11429 - DNA, 40 bp, Artificial Sequence
  Description of Artificial Sequence: Synthetic primer
ttgaaatttaaaactgtttaccttgccctgctcccacttg

SEQ ID NO: 11430 - DNA, 40 bp, Artificial Sequence
  Description of Artificial Sequence: Synthetic primer
cttttgaaatgggaaataaatgttacaaaggagagaaagg

SEQ ID NO: 11431 - DNA, 40 bp, Artificial Sequence
  Description of Artificial Sequence: Synthetic primer
gatccagcatgtgaatattctctatccatgtctgtcttcc

SEQ ID NO: 11432 - DNA, 40 bp, Artificial Sequence
  Description of Artificial Sequence: Synthetic primer
tgatttgatgcctaacttcaattacataaagtatgtttac

SEQ ID NO: 11433 - DNA, 40 bp, Artificial Sequence
  Description of Artificial Sequence: Synthetic primer
attttgctgagggctacaaaggcctactgagaaaagtatt

SEQ ID NO: 11434 - DNA, 40 bp, Artificial Sequence
  Description of Artificial Sequence: Synthetic primer
caaccaagaggtgaaaagaaattccttgggacacagcatc

SEQ ID NO: 11435 - DNA, 40 bp, Artificial Sequence
  Description of Artificial Sequence: Synthetic primer
ggtgctgggagaagattagaacttagagtgagatcctgac

SEQ ID NO: 11436 - DNA, 40 bp, Artificial Sequence
  Description of Artificial Sequence: Synthetic primer
ggtcacgtatggagtttaaatttctcctcttgaattgtgc

SEQ ID NO: 11437 - DNA, 40 bp, Artificial Sequence
  Description of Artificial Sequence: Synthetic primer
actcatgggaaaatgttccatgagcatgtggactaagacc

SEQ ID NO: 11438 - DNA, 40 bp, Artificial Sequence
  Description of Artificial Sequence: Synthetic primer
aggttttcatattgtttagaaatttcaagaactttttttc

SEQ ID NO: 11439 - DNA, 40 bp, Artificial Sequence
  Description of Artificial Sequence: Synthetic primer
aataatctgatgcattttttctcttatcctttcaatataa

SEQ ID NO: 11440 - DNA, 40 bp, Artificial Sequence
  Description of Artificial Sequence: Synthetic primer
aaatctccaaggcattccttttgccctataccagagactg

SEQ ID NO: 11441 - DNA, 40 bp, Artificial Sequence
  Description of Artificial Sequence: Synthetic primer
taacctgaccattcttttgaaaccagagtccttaacaagc

SEQ ID NO: 11442 - DNA, 40 bp, Artificial Sequence
  Description of Artificial Sequence: Synthetic primer
caggttagcttagaactattgctgtatttgaacgtaatgg

SEQ ID NO: 11443 - DNA, 40 bp, Artificial Sequence
  Description of Artificial Sequence: Synthetic primer
tgacaaaaaagagatttacctgatcactttgtcgagcaag

SEQ ID NO: 11444 - DNA, 40 bp, Artificial Sequence
  Description of Artificial Sequence: Synthetic primer
ggtctttctgctgctggactcagcgatcttgctttgtttc

SEQ ID NO: 11445 - DNA, 40 bp, Artificial Sequence
  Description of Artificial Sequence: Synthetic primer
ttgcctactgtgcagggccactgtgaacatggcaacttac

SEQ ID NO: 11446 - DNA, 40 bp, Artificial Sequence
  Description of Artificial Sequence: Synthetic primer
cagcccctctcacctgtgctacctcacttgtgccctcttc

SEQ ID NO: 11447 - DNA, 40 bp, Artificial Sequence
  Description of Artificial Sequence: Synthetic primer
gtcccagcaccggccctgggttactcaccagcttctggaa

SEQ ID NO: 11448 - DNA, 40 bp, Artificial Sequence
  Description of Artificial Sequence: Synthetic primer
ctggtacgtaagtaaattgcaaaatcaaaatatttgtctg

SEQ ID NO: 11449 - DNA, 40 bp, Artificial Sequence
  Description of Artificial Sequence: Synthetic primer
ctctgtcccagtcagaaaaggagagaggaaattagcagag

SEQ ID NO: 11450 - DNA, 40 bp, Artificial Sequence
  Description of Artificial Sequence: Synthetic primer
ctaggggcagcagcacctccagcatgtccagtcttatgtc

SEQ ID NO: 11451 - DNA, 40 bp, Artificial Sequence
  Description of Artificial Sequence: Synthetic primer
aagggtggctggtgttctcccaggtatgacaggggccctg

SEQ ID NO: 11452 - DNA, 40 bp, Artificial Sequence
  Description of Artificial Sequence: Synthetic primer
accttgactgaccacgcctttcttccctcccctcgaaatg

SEQ ID NO: 11453 - DNA, 40 bp, Artificial Sequence
  Description of Artificial Sequence: Synthetic primer
tttctgcacaaaagccccgcctccctggggctgcgggcag

SEQ ID NO: 11454 - DNA, 40 bp, Artificial Sequence
  Description of Artificial Sequence: Synthetic primer
catgttttctttttcttctttttttgttctttccattacg

SEQ ID NO: 11455 - DNA, 40 bp, Artificial Sequence
  Description of Artificial Sequence: Synthetic primer
taatctatatttaaatgaagtttaaataaaaatgggaaac

SEQ ID NO: 11456 - DNA, 40 bp, Artificial Sequence
  Description of Artificial Sequence: Synthetic primer
tagcccagggccacagattcttctcaggcagatgctaaac

SEQ ID NO: 11457 - DNA, 40 bp, Artificial Sequence
  Description of Artificial Sequence: Synthetic primer
tttttgttacatgtggtttaggagagattctgaaccttcc

SEQ ID NO: 11458 - DNA, 40 bp, Artificial Sequence
  Description of Artificial Sequence: Synthetic primer
gaaattttcaggtttgggtcagtatcagcaggaaaataac

SEQ ID NO: 11459 - DNA, 40 bp, Artificial Sequence
  Description of Artificial Sequence: Synthetic primer
ggaaaaaacaacaacaacatatgtgggatgggatttgttg

SEQ ID NO: 11460 - DNA, 40 bp, Artificial Sequence
  Description of Artificial Sequence: Synthetic primer
agcttcagattgctagactccaccctgtctctccacttcc

SEQ ID NO: 11461 - DNA, 40 bp, Artificial Sequence
  Description of Artificial Sequence: Synthetic primer
ttttccttgtatttttttcctgttgatatgccattgtctg

SEQ ID NO: 11462 - DNA, 40 bp, Artificial Sequence
  Description of Artificial Sequence: Synthetic primer
actgtgggtgtggacaacctgactccctcccctccatacc

SEQ ID NO: 11463 - DNA, 40 bp, Artificial Sequence
  Description of Artificial Sequence: Synthetic primer
caactgaggcgggactcggcccctgccctatggcactcac

SEQ ID NO: 11464 - DNA, 40 bp, Artificial Sequence
  Description of Artificial Sequence: Synthetic primer
cggcccggccgctcaccgtcgtagtagtagcagacttttt

SEQ ID NO: 11465 - DNA, 40 bp, Artificial Sequence
  Description of Artificial Sequence: Synthetic primer
gtggcggcggtggccggggagcccatggcgtacagtcaag

SEQ ID NO: 11466 - DNA, 40 bp, Artificial Sequence
  Description of Artificial Sequence: Synthetic primer
tgcaccggccctggatgatgaggcgctcttgatgtgattc

SEQ ID NO: 11467 - DNA, 40 bp, Artificial Sequence
  Description of Artificial Sequence: Synthetic primer
cacttaggcattcaacaccagtgactgacccatcagagac

SEQ ID NO: 11468 - DNA, 40 bp, Artificial Sequence
  Description of Artificial Sequence: Synthetic primer
cggccccagccctgagccgagagcgcagcccccacccttc

SEQ ID NO: 11469 - DNA, 40 bp, Artificial Sequence
  Description of Artificial Sequence: Synthetic primer
tgcagcgcgttcctcagcaccttctgatttctccccacag

SEQ ID NO: 11470 - DNA, 40 bp, Artificial Sequence
  Description of Artificial Sequence: Synthetic primer
gtgagttgctttcccaaagcatcacaaggtgacctttgtg

SEQ ID NO: 11471 - DNA, 40 bp, Artificial Sequence
  Description of Artificial Sequence: Synthetic primer
tagcggtgaaagcccagcatagtcacggggagccagctag

SEQ ID NO: 11472 - DNA, 40 bp, Artificial Sequence
  Description of Artificial Sequence: Synthetic primer
aagcaatctatttaatacctttttggtagaaataaaatca

SEQ ID NO: 11473 - DNA, 40 bp, Artificial Sequence
  Description of Artificial Sequence: Synthetic primer
accacacttcaccaagttgcctacaagtcaatgaaactgc

SEQ ID NO: 11474 - DNA, 40 bp, Artificial Sequence
  Description of Artificial Sequence: Synthetic primer
tgccgggccctgttcaccccatttgttctactcatgctac

SEQ ID NO: 11475 - DNA, 40 bp, Artificial Sequence
  Description of Artificial Sequence: Synthetic primer
aaaaattccactgaagggccctcctgaagacagggtggcc

SEQ ID NO: 11476 - DNA, 40 bp, Artificial Sequence
  Description of Artificial Sequence: Synthetic primer
tttttttttgagaaaggggaatttcatcccaaataaaagg

SEQ ID NO: 11477 - DNA, 40 bp, Artificial Sequence
  Description of Artificial Sequence: Synthetic primer
agcccctcggaggaaaagttcccgcagtggccgcgggcgg

SEQ ID NO: 11478 - DNA, 40 bp, Artificial Sequence
  Description of Artificial Sequence: Synthetic primer
aagttttggttcttcagtgcagaacaaatgatctgttttc

SEQ ID NO: 11479 - DNA, 40 bp, Artificial Sequence
  Description of Artificial Sequence: Synthetic primer
ccattctcagcatgtttcttccccttgtgagtccattacc

SEQ ID NO: 11480 - DNA, 40 bp, Artificial Sequence
  Description of Artificial Sequence: Synthetic primer
tctttgggttgacttctctggtgacagtattgacttgtgc

SEQ ID NO: 11481 - DNA, 40 bp, Artificial Sequence
  Description of Artificial Sequence: Synthetic primer
ctgagaaataatccaattacctgttaatcaaggcaaactc

SEQ ID NO: 11482 - DNA, 40 bp, Artificial Sequence
  Description of Artificial Sequence: Synthetic primer
ccctggcttggggtcccgcagaggcctcagggctgtgtgc

SEQ ID NO: 11483 - DNA, 40 bp, Artificial Sequence
  Description of Artificial Sequence: Synthetic primer
cctccacctcgtacccctacccctcaagtgcccccagtac

SEQ ID NO: 11484 - DNA, 40 bp, Artificial Sequence
  Description of Artificial Sequence: Synthetic primer
taaaaggaaggaagagacagagaaagaaaggaggcaggac

SEQ ID NO: 11485 - DNA, 40 bp, Artificial Sequence
  Description of Artificial Sequence: Synthetic primer
gctggaagactttgctactgttagctggggtttcgctgac

SEQ ID NO: 11486 - DNA, 40 bp, Artificial Sequence
  Description of Artificial Sequence: Synthetic primer
cccagccgccgggtactcctcgccatgtcctgggactgcc

SEQ ID NO: 11487 - DNA, 40 bp, Artificial Sequence
  Description of Artificial Sequence: Synthetic primer
ccgcggggagtccagcgagtccacgggcgacagcgtgacc

SEQ ID NO: 11488 - DNA, 40 bp, Artificial Sequence
  Description of Artificial Sequence: Synthetic primer
cgccgggaccccagctgctcaacccagggacccccgtctc

SEQ ID NO: 11489 - DNA, 40 bp, Artificial Sequence
  Description of Artificial Sequence: Synthetic primer
ccaactagtcccatttatatcaggattgcctaaatattgc

SEQ ID NO: 11490 - DNA, 40 bp, Artificial Sequence
  Description of Artificial Sequence: Synthetic primer
cccgatttctgaggcctgcctctgccctcctccccagcac

SEQ ID NO: 11491 - DNA, 40 bp, Artificial Sequence
  Description of Artificial Sequence: Synthetic primer
acagcaaggctttctctttggccatcctgtgtcccctgag

SEQ ID NO: 11492 - DNA, 40 bp, Artificial Sequence
  Description of Artificial Sequence: Synthetic primer
acaggccgcgctccccagccctgccggtccccatccttac

SEQ ID NO: 11493 - DNA, 40 bp, Artificial Sequence
  Description of Artificial Sequence: Synthetic primer
ggccgcccagggcccgttgcccgaggccagcaagggagac

SEQ ID NO: 11494 - DNA, 40 bp, Artificial Sequence
  Description of Artificial Sequence: Synthetic primer
gtgaacacaatcctcctcttggcttcactctcaggatctg

SEQ ID NO: 11495 - DNA, 40 bp, Artificial Sequence
  Description of Artificial Sequence: Synthetic primer
ctgccaaaaagtaattttgtaagaagaaaatcatcagcag

SEQ ID NO: 11496 - DNA, 40 bp, Artificial Sequence
  Description of Artificial Sequence: Synthetic primer
gttacaactatgtctaggatttgactttgtttctttttgc

SEQ ID NO: 11497 - DNA, 40 bp, Artificial Sequence
  Description of Artificial Sequence: Synthetic primer
ccggggtccctgtgggcctgatttgcctctgttcttcctc

SEQ ID NO: 11498 - DNA, 40 bp, Artificial Sequence
  Description of Artificial Sequence: Synthetic primer
gactgagccctctgtggctggagaggccccagctgcaccc

SEQ ID NO: 11499 - DNA, 40 bp, Artificial Sequence
  Description of Artificial Sequence: Synthetic primer
agaaaaacctttcgtgagattggagaggaaaatatgtctg

SEQ ID NO: 11500 - DNA, 40 bp, Artificial Sequence
  Description of Artificial Sequence: Synthetic primer
gagcatgcaatagtaaaaatgcacgtgtaaacccttgagg

SEQ ID NO: 11501 - DNA, 40 bp, Artificial Sequence
  Description of Artificial Sequence: Synthetic primer
ttattctgtgactcagagaaatcagcattgcttttggcta

SEQ ID NO: 11502 - DNA, 40 bp, Artificial Sequence
  Description of Artificial Sequence: Synthetic primer
tagaaaagcatcacctagatcttccatccaggcacaactc

SEQ ID NO: 11503 - DNA, 40 bp, Artificial Sequence
  Description of Artificial Sequence: Synthetic primer
ccatgctgccttttccatgaaggtgtctgcttaaattatc

SEQ ID NO: 11504 - DNA, 40 bp, Artificial Sequence
  Description of Artificial Sequence: Synthetic primer
tcacttcctttcccattttgatctatgccagccacacctg

SEQ ID NO: 11505 - DNA, 40 bp, Artificial Sequence
  Description of Artificial Sequence: Synthetic primer
atctttcttctgccttttgcaacaagaagttactgtgctc

SEQ ID NO: 11506 - DNA, 40 bp, Artificial Sequence
  Description of Artificial Sequence: Synthetic primer
atcatctctcaccctgaaatcaaccctcacctaactcagc

SEQ ID NO: 11507 - DNA, 40 bp, Artificial Sequence
  Description of Artificial Sequence: Synthetic primer
tatgcagcccctcagcctggctgaagactccctgcagaac

SEQ ID NO: 11508 - DNA, 40 bp, Artificial Sequence
  Description of Artificial Sequence: Synthetic primer
gaccaccctaagggactcctcccttcctgtcctgtctttc

SEQ ID NO: 11509 - DNA, 40 bp, Artificial Sequence
  Description of Artificial Sequence: Synthetic primer
gtttcagaaacctacttgaaatgtaaatagcacatttatt

SEQ ID NO: 11510 - DNA, 40 bp, Artificial Sequence
  Description of Artificial Sequence: Synthetic primer
aaatgagaattttatttgatggcttacctctttaacagtg

SEQ ID NO: 11511 - DNA, 40 bp, Artificial Sequence
  Description of Artificial Sequence: Synthetic primer
tgccattccagcattttcatctttcttcatcatctcattg

SEQ ID NO: 11512 - DNA, 40 bp, Artificial Sequence
  Description of Artificial Sequence: Synthetic primer
cttagttagcaagattaactgatcttaaaccacagaagtc

SEQ ID NO: 11513 - DNA, 40 bp, Artificial Sequence
  Description of Artificial Sequence: Synthetic primer
aatttctactttttcctactgtggttgcttccaacctagc

SEQ ID NO: 11514 - DNA, 40 bp, Artificial Sequence
  Description of Artificial Sequence: Synthetic primer
aggaagtaaattaaattgttctttctttctttataattta

SEQ ID NO: 11515 - DNA, 40 bp, Artificial Sequence
  Description of Artificial Sequence: Synthetic primer
cagcatctgcacctgggtgtggggaagggagagggtgctg

SEQ ID NO: 11516 - DNA, 40 bp, Artificial Sequence
  Description of Artificial Sequence: Synthetic primer
cctgccctcccacccagccttggcgcatcactaacagagg

SEQ ID NO: 11517 - DNA, 40 bp, Artificial Sequence
  Description of Artificial Sequence: Synthetic primer
acagtgcctcgcgagccagtcctatatctctagcccatcc

SEQ ID NO: 11518 - DNA, 40 bp, Artificial Sequence
  Description of Artificial Sequence: Synthetic primer
cttggagggtgtgtgcccatagtgtggcttctgtgttttg

SEQ ID NO: 11519 - DNA, 40 bp, Artificial Sequence
  Description of Artificial Sequence: Synthetic primer
tgatagattttattttattaaatgtatgtttctttctgtc

SEQ ID NO: 11520 - DNA, 40 bp, Artificial Sequence
  Description of Artificial Sequence: Synthetic primer
aaaataaagagctgccattacttttaaaaaattaaattcc

SEQ ID NO: 11521 - DNA, 40 bp, Artificial Sequence
  Description of Artificial Sequence: Synthetic primer
agacgagccttcatggcactgaactggagtattgttttgc

SEQ ID NO: 11522 - DNA, 40 bp, Artificial Sequence
  Description of Artificial Sequence: Synthetic primer
ctcctggccacccttcctcaatcatgtcacaccagcacag

SEQ ID NO: 11523 - DNA, 40 bp, Artificial Sequence
  Description of Artificial Sequence: Synthetic primer
taaaataaactgtacttgtttattcatgcttaattattct

SEQ ID NO: 11524 - DNA, 40 bp, Artificial Sequence
  Description of Artificial Sequence: Synthetic primer
tggcatcttttatatgtttttggtgaactaacagaagtac

SEQ ID NO: 11525 - DNA, 40 bp, Artificial Sequence
  Description of Artificial Sequence: Synthetic primer
tcagggctattttcattacagttgcctttcaattattatc

SEQ ID NO: 11526 - DNA, 40 bp, Artificial Sequence
  Description of Artificial Sequence: Synthetic primer
ccagttgtgtttttttcttgtttttgattgttttttaatc

SEQ ID NO: 11527 - DNA, 40 bp, Artificial Sequence
  Description of Artificial Sequence: Synthetic primer
atggatttataacttaagacaatgccctggatggaaaatg

SEQ ID NO: 11528 - DNA, 40 bp, Artificial Sequence
  Description of Artificial Sequence: Synthetic primer
tttccagtaatggtccaatatttcttgtcctttttgtttc

SEQ ID NO: 11529 - DNA, 40 bp, Artificial Sequence
  Description of Artificial Sequence: Synthetic primer
ggaacaactaatgaatgcttatctattattatctttgttc

SEQ ID NO: 11530 - DNA, 40 bp, Artificial Sequence
  Description of Artificial Sequence: Synthetic primer
cctgctcatcagctgctcaagaatggaaaacacagcttac

SEQ ID NO: 11531 - DNA, 40 bp, Artificial Sequence
  Description of Artificial Sequence: Synthetic primer
tgccgggcagctgtggaccgtctgccccgtgcccccacag

SEQ ID NO: 11532 - DNA, 40 bp, Artificial Sequence
  Description of Artificial Sequence: Synthetic primer
tccaatacctgcctcagccctgaagtagttgtccctgctc

SEQ ID NO: 11533 - DNA, 40 bp, Artificial Sequence
  Description of Artificial Sequence: Synthetic primer
cggtcccgccccacgacagagcagccgtgcccccgtgggc

SEQ ID NO: 11534 - DNA, 40 bp, Artificial Sequence
  Description of Artificial Sequence: Synthetic primer
atcggtgtacgtctgcccagcacccgcctgagcctctccc

SEQ ID NO: 11535 - DNA, 40 bp, Artificial Sequence
  Description of Artificial Sequence: Synthetic primer
catcctccactccctataccctctccccagggacctctac

SEQ ID NO: 11536 - DNA, 40 bp, Artificial Sequence
  Description of Artificial Sequence: Synthetic primer
ccagggctccgccccaaactcacctctgacttctctctgc

SEQ ID NO: 11537 - DNA, 40 bp, Artificial Sequence
  Description of Artificial Sequence: Synthetic primer
caggcagctaaaactgagctcaatgcccacaaagtccaag

SEQ ID NO: 11538 - DNA, 40 bp, Artificial Sequence
  Description of Artificial Sequence: Synthetic primer
tgctctctcccctctaacactgtgctcatgtggtttgctg

SEQ ID NO: 11539 - DNA, 40 bp, Artificial Sequence
  Description of Artificial Sequence: Synthetic primer
aaacaagactgaagagagaatgaagtcaccaggctgtctc

SEQ ID NO: 11540 - DNA, 40 bp, Artificial Sequence
  Description of Artificial Sequence: Synthetic primer
attagttatttgtcctgttgctagctaaagtttccttttc

SEQ ID NO: 11541 - DNA, 40 bp, Artificial Sequence
  Description of Artificial Sequence: Synthetic primer
cgccgcccgcgcgccctccccagccatgtcgtccatcctg

SEQ ID NO: 11542 - DNA, 40 bp, Artificial Sequence
  Description of Artificial Sequence: Synthetic primer
tagtatgtcataataagaacaatgaaagttgtattaaaag

SEQ ID NO: 11543 - DNA, 40 bp, Artificial Sequence
  Description of Artificial Sequence: Synthetic primer
cacttgatacttagtttgctttaattcttgtgtttttgtc

SEQ ID NO: 11544 - DNA, 40 bp, Artificial Sequence
  Description of Artificial Sequence: Synthetic primer
acacatgcctgtcattgacacctagtggacctatgattgc

SEQ ID NO: 11545 - DNA, 40 bp, Artificial Sequence
  Description of Artificial Sequence: Synthetic primer
cttagatggaagagaaagaagcatccaagccaagtctccc

SEQ ID NO: 11546 - DNA, 40 bp, Artificial Sequence
  Description of Artificial Sequence: Synthetic primer
gcccacagtgggagaggacaccttggctggtaaggtctga

SEQ ID NO: 11547 - DNA, 40 bp, Artificial Sequence
  Description of Artificial Sequence: Synthetic primer
atgacagcacaggtaattttaatgtaataataagtgcacg

SEQ ID NO: 11548 - DNA, 40 bp, Artificial Sequence
  Description of Artificial Sequence: Synthetic primer
ggcgcgacctggcggcggcggtcacgggccccgtgcctcc

SEQ ID NO: 11549 - DNA, 40 bp, Artificial Sequence
  Description of Artificial Sequence: Synthetic primer
ggccgccaccgcctgcaccttccccggccccgtggtcctg

SEQ ID NO: 11550 - DNA, 40 bp, Artificial Sequence
  Description of Artificial Sequence: Synthetic primer
tagttaattgttcctgcattttcagaatacaaacttgtcc

SEQ ID NO: 11551 - DNA, 40 bp, Artificial Sequence
  Description of Artificial Sequence: Synthetic primer
ttgtgatgaggcaaaaatcactttttttttctcacttggg

SEQ ID NO: 11552 - DNA, 40 bp, Artificial Sequence
  Description of Artificial Sequence: Synthetic primer
tctgtaataattttgcattcttttcctaatattactttac

SEQ ID NO: 11553 - DNA, 40 bp, Artificial Sequence
  Description of Artificial Sequence: Synthetic primer
aacaatttgaaaagggaaaaattaacaaactagaaaatat

SEQ ID NO: 11554 - DNA, 40 bp, Artificial Sequence
  Description of Artificial Sequence: Synthetic primer
agctattcttaactaaaaatgatcccatctcaccctgatg

SEQ ID NO: 11555 - DNA, 40 bp, Artificial Sequence
  Description of Artificial Sequence: Synthetic primer
caagttagagcctttagccggtcacatgtgctttctgtcc

SEQ ID NO: 11556 - DNA, 40 bp, Artificial Sequence
  Description of Artificial Sequence: Synthetic primer
gatataaccgggcccgtcaggcactaggaaaagggaagag

SEQ ID NO: 11557 - DNA, 40 bp, Artificial Sequence
  Description of Artificial Sequence: Synthetic primer
ggcggacgactgggcgccctcgagccagcttcgtgcatcc

SEQ ID NO: 11558 - DNA, 40 bp, Artificial Sequence
  Description of Artificial Sequence: Synthetic primer
tttccagaatgttgttaagtcttagtcattagggagatac

SEQ ID NO: 11559 - DNA, 40 bp, Artificial Sequence
  Description of Artificial Sequence: Synthetic primer
ttgtaattcaacattcatcgttgtgtaaattaaacttctc

SEQ ID NO: 11560 - DNA, 40 bp, Artificial Sequence
  Description of Artificial Sequence: Synthetic primer
gatccttctttactaattctttttctttcattttgtcttc

SEQ ID NO: 11561 - DNA, 40 bp, Artificial Sequence
  Description of Artificial Sequence: Synthetic primer
ggatgttaccccggtgtcaacaagcttctaagagatactt

SEQ ID NO: 11562 - DNA, 40 bp, Artificial Sequence
  Description of Artificial Sequence: Synthetic primer
aagtgattatccaggtgtttgatcacgttaattccctatc

SEQ ID NO: 11563 - DNA, 40 bp, Artificial Sequence
  Description of Artificial Sequence: Synthetic primer
catgtttttaatatttaagggcctcctaaaagtagactgg

SEQ ID NO: 11564 - DNA, 40 bp, Artificial Sequence
  Description of Artificial Sequence: Synthetic primer
cagttttatagtataaagattacacagtatattattgatg

SEQ ID NO: 11565 - DNA, 40 bp, Artificial Sequence
  Description of Artificial Sequence: Synthetic primer
agtgaatcttagatattgtaaataattttgactcattttg

SEQ ID NO: 11566 - DNA, 40 bp, Artificial Sequence
  Description of Artificial Sequence: Synthetic primer
tcagctgctctaggggagctgagtgaatgggaaggaagtc

SEQ ID NO: 11567 - DNA, 40 bp, Artificial Sequence
  Description of Artificial Sequence: Synthetic primer
ttactttgtagtagtaagtcacaggcaccagatacatagc

SEQ ID NO: 11568 - DNA, 40 bp, Artificial Sequence
  Description of Artificial Sequence: Synthetic primer
aataattttatgtgtttaattattgcattctgatcatttg

SEQ ID NO: 11569 - DNA, 40 bp, Artificial Sequence
  Description of Artificial Sequence: Synthetic primer
ctcgtaagctttagtttttcatagttcaaattcattattc

SEQ ID NO: 11570 - DNA, 40 bp, Artificial Sequence
  Description of Artificial Sequence: Synthetic primer
aatgcaatgaaacataattacactgtggaaatttaagaac

SEQ ID NO: 11571 - DNA, 40 bp, Artificial Sequence
  Description of Artificial Sequence: Synthetic primer
tactttttaataatgatactcttttgacaatttcttttac

SEQ ID NO: 11572 - DNA, 40 bp, Artificial Sequence
  Description of Artificial Sequence: Synthetic primer
agtgctaggtgcctggacatgacagatactttgacgtgga

SEQ ID NO: 11573 - DNA, 40 bp, Artificial Sequence
  Description of Artificial Sequence: Synthetic primer
ataaaaattaacatggctttctgtttagctttattttatg

SEQ ID NO: 11574 - DNA, 40 bp, Artificial Sequence
  Description of Artificial Sequence: Synthetic primer
tgtgatacactccaccaataagatcacttttaattatttg

SEQ ID NO: 11575 - DNA, 40 bp, Artificial Sequence
  Description of Artificial Sequence: Synthetic primer
gcatgagccactgcgcccggcctcctttcaaagactattc

SEQ ID NO: 11576 - DNA, 40 bp, Artificial Sequence
  Description of Artificial Sequence: Synthetic primer
gagttagggaatagggtggaaaggattggagggcatcttc

SEQ ID NO: 11577 - DNA, 40 bp, Artificial Sequence
  Description of Artificial Sequence: Synthetic primer
ggctgaggtcttatttgactcttcacctgaattgaccttc

SEQ ID NO: 11578 - DNA, 40 bp, Artificial Sequence
  Description of Artificial Sequence: Synthetic primer
accactagaatagcaagcaaggaatgccttcaaaaagttg

SEQ ID NO: 11579 - DNA, 40 bp, Artificial Sequence
  Description of Artificial Sequence: Synthetic primer
attgttgggaagccctgactaagaatgggaaggagtcacc

SEQ ID NO: 11580 - DNA, 40 bp, Artificial Sequence
  Description of Artificial Sequence: Synthetic primer
aaattgctttatagttggcctcattctgagatggtatttc

SEQ ID NO: 11581 - DNA, 40 bp, Artificial Sequence
  Description of Artificial Sequence: Synthetic primer
cgggagctccatgtgggagcaataaatttcatgtaacaga

SEQ ID NO: 11582 - DNA, 40 bp, Artificial Sequence
  Description of Artificial Sequence: Synthetic primer
tctcaggagtcactacttcattcctgctcttagtgtctgg

SEQ ID NO: 11583 - DNA, 40 bp, Artificial Sequence
  Description of Artificial Sequence: Synthetic primer
tgacagaatctgaatgttttggaagtttaactgaagtctc

SEQ ID NO: 11584 - DNA, 40 bp, Artificial Sequence
  Description of Artificial Sequence: Synthetic primer
ctgatcccatttggaagcagctcgttcccgatatccactc

SEQ ID NO: 11585 - DNA, 40 bp, Artificial Sequence
  Description of Artificial Sequence: Synthetic primer
aaaataaacattgatttggcttttcccatttattattctg

SEQ ID NO: 11586 - DNA, 40 bp, Artificial Sequence
  Description of Artificial Sequence: Synthetic primer
tctccagctgctgccttgcctccagggatggccccttttc

SEQ ID NO: 11587 - DNA, 40 bp, Artificial Sequence
  Description of Artificial Sequence: Synthetic primer
aggcagatacagccagcacccaccagagtcccatagagac

SEQ ID NO: 11588 - DNA, 40 bp, Artificial Sequence
  Description of Artificial Sequence: Synthetic primer
ctagtttttgccagttttttaaaataacctaagggatttg

SEQ ID NO: 11589 - DNA, 40 bp, Artificial Sequence
  Description of Artificial Sequence: Synthetic primer
tttattaacatttctagtattctaagaataaaaagcattg

SEQ ID NO: 11590 - DNA, 40 bp, Artificial Sequence
  Description of Artificial Sequence: Synthetic primer
gacgctatcagcggcgacggggaggcgggaaagggactgg

SEQ ID NO: 11591 - DNA, 40 bp, Artificial Sequence
  Description of Artificial Sequence: Synthetic primer
ccctcccagccccagctcatctctccgcaggatcaaagag

SEQ ID NO: 11592 - DNA, 40 bp, Artificial Sequence
  Description of Artificial Sequence: Synthetic primer
tcaatgaaaaagaacgaagctggtttccaaagctgatatg

SEQ ID NO: 11593 - DNA, 40 bp, Artificial Sequence
  Description of Artificial Sequence: Synthetic primer
gacagcaggacctctggttcccctgccctgggcccatcag

SEQ ID NO: 11594 - DNA, 40 bp, Artificial Sequence
  Description of Artificial Sequence: Synthetic primer
ctcctcccacaggatctgctttaatccagcgcctctcctc

SEQ ID NO: 11595 - DNA, 40 bp, Artificial Sequence
  Description of Artificial Sequence: Synthetic primer
tttagctctgtccagggaactgggagtgaggagcctgtcc

SEQ ID NO: 11596 - DNA, 40 bp, Artificial Sequence
  Description of Artificial Sequence: Synthetic primer
gttttggaccattctggttcatactctgtattttcttttc

SEQ ID NO: 11597 - DNA, 40 bp, Artificial Sequence
  Description of Artificial Sequence: Synthetic primer
tatgccatagcattcggcactgacctgctttgcccacttc

SEQ ID NO: 11598 - DNA, 40 bp, Artificial Sequence
  Description of Artificial Sequence: Synthetic primer
tgctctacagcagctcagccagcctgtcaccttcagtaag

SEQ ID NO: 11599 - DNA, 40 bp, Artificial Sequence
  Description of Artificial Sequence: Synthetic primer
tctgcccagaattcccgccggaacgtgatgcttcgcaatg

SEQ ID NO: 11600 - DNA, 40 bp, Artificial Sequence
  Description of Artificial Sequence: Synthetic primer
ttcatggtgcctgccatatcagtcagccgtggcagttcca

SEQ ID NO: 11601 - DNA, 40 bp, Artificial Sequence
  Description of Artificial Sequence: Synthetic primer
tggtggagcaagttctgattgaccaaacttccctggttag

SEQ ID NO: 11602 - DNA, 40 bp, Artificial Sequence
  Description of Artificial Sequence: Synthetic primer
gctctgccttccttcccctcagcccaccgggaaccacaac

SEQ ID NO: 11603 - DNA, 40 bp, Artificial Sequence
  Description of Artificial Sequence: Synthetic primer
tgctcggatgctgctcacatgaggtgacagctgggccccc

SEQ ID NO: 11604 - DNA, 40 bp, Artificial Sequence
  Description of Artificial Sequence: Synthetic primer
tctggcttcggtcctcagccctattctgggaaggctccag

SEQ ID NO: 11605 - DNA, 40 bp, Artificial Sequence
  Description of Artificial Sequence: Synthetic primer
gcaatgagtcttcatttgctgtttactcctcttctctttc

SEQ ID NO: 11606 - DNA, 40 bp, Artificial Sequence
  Description of Artificial Sequence: Synthetic primer
tgagagcctcttaaagaccctgtcccagttaagtgaaatc

SEQ ID NO: 11607 - DNA, 40 bp, Artificial Sequence
  Description of Artificial Sequence: Synthetic primer
tgtttctgggagggaaaaaaaatcccttggcaataagaag

SEQ ID NO: 11608 - DNA, 40 bp, Artificial Sequence
  Description of Artificial Sequence: Synthetic primer
ctctgaattgaggaggagagggcacctgaactacagtgag

SEQ ID NO: 11609 - DNA, 40 bp, Artificial Sequence
  Description of Artificial Sequence: Synthetic primer
actgagcagtttctgtttgtaacgtagtggaaagaggatg

SEQ ID NO: 11610 - DNA, 40 bp, Artificial Sequence
  Description of Artificial Sequence: Synthetic primer
aaagtaatttaactttttgcaaatttatttttggttttgc

SEQ ID NO: 11611 - DNA, 40 bp, Artificial Sequence
  Description of Artificial Sequence: Synthetic primer
ccagggcataaaaatcaatctattcaagacagacaacagc

SEQ ID NO: 11612 - DNA, 40 bp, Artificial Sequence
  Description of Artificial Sequence: Synthetic primer
tgaccgtcagggaaaactagattcaagtacccgatgtgtg

SEQ ID NO: 11613 - DNA, 40 bp, Artificial Sequence
  Description of Artificial Sequence: Synthetic primer
gaataatatataggctttcagattctctaagtatcttttt

SEQ ID NO: 11614 - DNA, 40 bp, Artificial Sequence
  Description of Artificial Sequence: Synthetic primer
gccagggacccagggcaggggccaaaggccatagtagaac

SEQ ID NO: 11615 - DNA, 40 bp, Artificial Sequence
  Description of Artificial Sequence: Synthetic primer
ggggtggggtgcatgcagtccagcagcccacgtgatcctg

SEQ ID NO: 11616 - DNA, 40 bp, Artificial Sequence
  Description of Artificial Sequence: Synthetic primer
agttaaaatattttctctgcatgattctttttcttttccc

SEQ ID NO: 11617 - DNA, 40 bp, Artificial Sequence
  Description of Artificial Sequence: Synthetic primer
tactatttgttccccaaaaatgtttatttctcaaacttac

SEQ ID NO: 11618 - DNA, 40 bp, Artificial Sequence
  Description of Artificial Sequence: Synthetic primer
gctaatcccatgccatcaggaagcccctgaggccaaccag

SEQ ID NO: 11619 - DNA, 40 bp, Artificial Sequence
  Description of Artificial Sequence: Synthetic primer
cctcaaacttcatttcctcttctaaataacatgctcaacc

SEQ ID NO: 11620 - DNA, 40 bp, Artificial Sequence
  Description of Artificial Sequence: Synthetic primer
ccccgcgctgtgcccactgtggcccgcgttgcaccctcag

SEQ ID NO: 11621 - DNA, 40 bp, Artificial Sequence
  Description of Artificial Sequence: Synthetic primer
tgcagcccaggggcgggagacatccgcaaccgccaacacg

SEQ ID NO: 11622 - DNA, 40 bp, Artificial Sequence
  Description of Artificial Sequence: Synthetic primer
aaacttattatataaaaacagaggtacataatttcagagg

SEQ ID NO: 11623 - DNA, 40 bp, Artificial Sequence
  Description of Artificial Sequence: Synthetic primer
acaagtgcctataatttcttttatccaatgatgttgttcc

SEQ ID NO: 11624 - DNA, 40 bp, Artificial Sequence
  Description of Artificial Sequence: Synthetic primer
cccatgacaccatcgttccccaagcctggctgtgctcctc

SEQ ID NO: 11625 - DNA, 40 bp, Artificial Sequence
  Description of Artificial Sequence: Synthetic primer
gcatacgccccatcatcaccttttgccttcctctcttttg

SEQ ID NO: 11626 - DNA, 40 bp, Artificial Sequence
  Description of Artificial Sequence: Synthetic primer
cctccaccttgttatggcctgtctgttttgtgagtcaaac

SEQ ID NO: 11627 - DNA, 40 bp, Artificial Sequence
  Description of Artificial Sequence: Synthetic primer
agtttcctataagggagttccagttgcacaaacataaatc

SEQ ID NO: 11628 - DNA, 40 bp, Artificial Sequence
  Description of Artificial Sequence: Synthetic primer
tttaaaatgtagaacaagtgtgcagaatactggccgtcaa

SEQ ID NO: 11629 - DNA, 40 bp, Artificial Sequence
  Description of Artificial Sequence: Synthetic primer
aaaaaagtatcaaaacaaaaattatgtaaaaagcaaactc

SEQ ID NO: 11630 - DNA, 40 bp, Artificial Sequence
  Description of Artificial Sequence: Synthetic primer
ctggcctgctctctctctgcctccacctgcaggaagctct

SEQ ID NO: 11631 - DNA, 40 bp, Artificial Sequence
  Description of Artificial Sequence: Synthetic primer
gaaactcctcatgtggcatttcctgcttgcctcccacttg

SEQ ID NO: 11632 - DNA, 40 bp, Artificial Sequence
  Description of Artificial Sequence: Synthetic primer
cacttgggaatcagtgcttttggcacttttcttattttgc

SEQ ID NO: 11633 - DNA, 40 bp, Artificial Sequence
  Description of Artificial Sequence: Synthetic primer
cacacaggtagccagcaaatcctgcaaaccattttctttt

SEQ ID NO: 11634 - DNA, 40 bp, Artificial Sequence
  Description of Artificial Sequence: Synthetic primer
tgctctatgtcctgttcctcttactaacaactctggtctg

SEQ ID NO: 11635 - DNA, 40 bp, Artificial Sequence
  Description of Artificial Sequence: Synthetic primer
accagattatggacgcgtctctctctttcggcccaactgg

SEQ ID NO: 11636 - DNA, 40 bp, Artificial Sequence
  Description of Artificial Sequence: Synthetic primer
tcactgtggttttttattgatgttatgattttttcttttt

SEQ ID NO: 11637 - DNA, 40 bp, Artificial Sequence
  Description of Artificial Sequence: Synthetic primer
ataaaagctattaattcgactttctttaaggcaaccattc

SEQ ID NO: 11638 - DNA, 40 bp, Artificial Sequence
  Description of Artificial Sequence: Synthetic primer
actgaccaatttggaagcctgatcattaccatatcttctc

SEQ ID NO: 11639 - DNA, 40 bp, Artificial Sequence
  Description of Artificial Sequence: Synthetic primer
tttaattcttctccacttcaccccgtcaccaccactttcc

SEQ ID NO: 11640 - DNA, 40 bp, Artificial Sequence
  Description of Artificial Sequence: Synthetic primer
atggtctcattttaaaagcaacaaaccccaaatcaaactg

SEQ ID NO: 11641 - DNA, 40 bp, Artificial Sequence
  Description of Artificial Sequence: Synthetic primer
aatttactattgtatatttaaagtgggcttaattaaaatc

SEQ ID NO: 11642 - DNA, 40 bp, Artificial Sequence
  Description of Artificial Sequence: Synthetic primer
agtggcaacttcattaaatctactgtaaagcagtaaagca

SEQ ID NO: 11643 - DNA, 40 bp, Artificial Sequence
  Description of Artificial Sequence: Synthetic primer
tccttccctttctgtggcactgcagcgacctcctgttttc

SEQ ID NO: 11644 - DNA, 40 bp, Artificial Sequence
  Description of Artificial Sequence: Synthetic primer
gtggcacaagcaatgttggtgagggaggtggtggatatgc

SEQ ID NO: 11645 - DNA, 40 bp, Artificial Sequence
  Description of Artificial Sequence: Synthetic primer
gccgtgatatgaagccactgggttgcttctccttgggcac

SEQ ID NO: 11646 - DNA, 40 bp, Artificial Sequence
  Description of Artificial Sequence: Synthetic primer
caagctgtaacattcattcaatctttccattgtattccag

SEQ ID NO: 11647 - DNA, 40 bp, Artificial Sequence
  Description of Artificial Sequence: Synthetic primer
gggagaacagcacatgatcccacttcagctaagagcactg

SEQ ID NO: 11648 - DNA, 40 bp, Artificial Sequence
  Description of Artificial Sequence: Synthetic primer
gccagcctcctcgccagtctggtgcccggtgccccctcac

SEQ ID NO: 11649 - DNA, 40 bp, Artificial Sequence
  Description of Artificial Sequence: Synthetic primer
gcttgtagaagctatgacttgcagtttttaaaccttttcc

SEQ ID NO: 11650 - DNA, 40 bp, Artificial Sequence
  Description of Artificial Sequence: Synthetic primer
catccaagtctgtcagctactttcagaaaaacaccctcag

SEQ ID NO: 11651 - DNA, 40 bp, Artificial Sequence
  Description of Artificial Sequence: Synthetic primer
ataataatacaaaaagtagggcaaacagaatgaggaaatc

SEQ ID NO: 11652 - DNA, 40 bp, Artificial Sequence
  Description of Artificial Sequence: Synthetic primer
ttatttccatatatagtgttaattctaaatatattttcac

SEQ ID NO: 11653 - DNA, 40 bp, Artificial Sequence
  Description of Artificial Sequence: Synthetic primer
atagttgacacattaattctcctacattttaaatttcttg

SEQ ID NO: 11654 - DNA, 40 bp, Artificial Sequence
  Description of Artificial Sequence: Synthetic primer
acatgaacaaaatgatcttgaacccatcataaggacagcc

SEQ ID NO: 11655 - DNA, 40 bp, Artificial Sequence
  Description of Artificial Sequence: Synthetic primer
ctgaacagaccccagggcctctgccaatcatgactccttc

SEQ ID NO: 11656 - DNA, 40 bp, Artificial Sequence
  Description of Artificial Sequence: Synthetic primer
acctctgactgatttgaaatgaacagaggccaccctatcc

SEQ ID NO: 11657 - DNA, 40 bp, Artificial Sequence
  Description of Artificial Sequence: Synthetic primer
ccaggcatggccagggctcattggactctaccctgacacc

SEQ ID NO: 11658 - DNA, 40 bp, Artificial Sequence
  Description of Artificial Sequence: Synthetic primer
ccttccctgaccccaacaacctgttccaactccagtagag

SEQ ID NO: 11659 - DNA, 40 bp, Artificial Sequence
  Description of Artificial Sequence: Synthetic primer
gtgtcatcttttcctttttaaaattgtctttgtgtgtttc

SEQ ID NO: 11660 - DNA, 40 bp, Artificial Sequence
  Description of Artificial Sequence: Synthetic primer
tgaaacagccaagtttttcaaagaagcacatatgtgtgtg

SEQ ID NO: 11661 - DNA, 40 bp, Artificial Sequence
  Description of Artificial Sequence: Synthetic primer
gccagggtcccaggggcagggcgggcaccaccgccagacg

SEQ ID NO: 11662 - DNA, 40 bp, Artificial Sequence
  Description of Artificial Sequence: Synthetic primer
gcccctctgagtgaggcccctgcaggcctgcctgagccgg

SEQ ID NO: 11663 - DNA, 40 bp, Artificial Sequence
  Description of Artificial Sequence: Synthetic primer
gcagtttccttgagtttttaaaaaaacctgaaatcactac

SEQ ID NO: 11664 - DNA, 40 bp, Artificial Sequence
  Description of Artificial Sequence: Synthetic primer
tatcgctactctctgattatatgcttgcttggaataaata

SEQ ID NO: 11665 - DNA, 40 bp, Artificial Sequence
  Description of Artificial Sequence: Synthetic primer
ctattttaaatatattcctcttatgtgttcgctttccttg

SEQ ID NO: 11666 - DNA, 40 bp, Artificial Sequence
  Description of Artificial Sequence: Synthetic primer
taaatcaataactgctaaagctaaaacggtgaagcaaaac

SEQ ID NO: 11667 - DNA, 40 bp, Artificial Sequence
  Description of Artificial Sequence: Synthetic primer
atttttctacagtgatatatgttgatattcatgtttcttc

SEQ ID NO: 11668 - DNA, 40 bp, Artificial Sequence
  Description of Artificial Sequence: Synthetic primer
cttttcaaagtagtaaacgactgaaaaatgtaagaaaggc

SEQ ID NO: 11669 - DNA, 40 bp, Artificial Sequence
  Description of Artificial Sequence: Synthetic primer
agcccgtgttgagctatttcggagtttcctggcagggaag

SEQ ID NO: 11670 - DNA, 40 bp, Artificial Sequence
  Description of Artificial Sequence: Synthetic primer
gctcacgtgtgtctttctttctccccttgtccttccttgg

SEQ ID NO: 11671 - DNA, 40 bp, Artificial Sequence
  Description of Artificial Sequence: Synthetic primer
ggtttttttggtgatatattttcacctttccctcccactg

SEQ ID NO: 11672 - DNA, 40 bp, Artificial Sequence
  Description of Artificial Sequence: Synthetic primer
atttgtatactgtcatgaaccagaggacatgagttcaatg

SEQ ID NO: 11673 - DNA, 40 bp, Artificial Sequence
  Description of Artificial Sequence: Synthetic primer
cctgtgttgtcgcctctccctctcgctgcttcacttcacg

SEQ ID NO: 11674 - DNA, 40 bp, Artificial Sequence
  Description of Artificial Sequence: Synthetic primer
ccccagagctcaacatgacgccctggccccttgccttctc

SEQ ID NO: 11675 - DNA, 40 bp, Artificial Sequence
  Description of Artificial Sequence: Synthetic primer
acacagggcagtgaccttggcaactgggccccgccctcac

SEQ ID NO: 11676 - DNA, 40 bp, Artificial Sequence
  Description of Artificial Sequence: Synthetic primer
gtactgatggctgctggatttttgtttctgtccctgtatg

SEQ ID NO: 11677 - DNA, 40 bp, Artificial Sequence
  Description of Artificial Sequence: Synthetic primer
tgtagcctctggcagggaagggaagagcagtggggttggg

SEQ ID NO: 11678 - DNA, 40 bp, Artificial Sequence
  Description of Artificial Sequence: Synthetic primer
accatgctgctgaagggtcagccttctcttttgtgctttc

SEQ ID NO: 11679 - DNA, 40 bp, Artificial Sequence
  Description of Artificial Sequence: Synthetic primer
cacatgtagaagagcgcacgtcaagaaggcaggaccatac

SEQ ID NO: 11680 - DNA, 40 bp, Artificial Sequence
  Description of Artificial Sequence: Synthetic primer
gagcccactgggccactgggcaacttagtggtgtcgttgc

SEQ ID NO: 11681 - DNA, 40 bp, Artificial Sequence
  Description of Artificial Sequence: Synthetic primer
aaaaaagtcgtcctcttgttccagcccagggacactgggg

SEQ ID NO: 11682 - DNA, 40 bp, Artificial Sequence
  Description of Artificial Sequence: Synthetic primer
acatatttactggtggtttgtcttgaaaagatacaaatgc

SEQ ID NO: 11683 - DNA, 40 bp, Artificial Sequence
  Description of Artificial Sequence: Synthetic primer
tttaaatgaggtggacaaaactgagagcttagtcttaaaa

SEQ ID NO: 11684 - DNA, 40 bp, Artificial Sequence
  Description of Artificial Sequence: Synthetic primer
ttttgtttctttttaacaccacgtcctctcgtttccttac

SEQ ID NO: 11685 - DNA, 40 bp, Artificial Sequence
  Description of Artificial Sequence: Synthetic primer
cgacatggcaaaccaccgggcaggggactcgctctttgtt

SEQ ID NO: 11686 - DNA, 40 bp, Artificial Sequence
  Description of Artificial Sequence: Synthetic primer
cgtgctccctgggcctgtgagtggggccgccccctgagct

SEQ ID NO: 11687 - DNA, 40 bp, Artificial Sequence
  Description of Artificial Sequence: Synthetic primer
cccgccccaccctggcccctgccccgcgcacgcacccgtg

SEQ ID NO: 11688 - DNA, 40 bp, Artificial Sequence
  Description of Artificial Sequence: Synthetic primer
aggggtctcagccagtgtaggagggagaagtgggtgacag

SEQ ID NO: 11689 - DNA, 40 bp, Artificial Sequence
  Description of Artificial Sequence: Synthetic primer
tttaaattcttccctggaggcagaacactaaatcctttgg

SEQ ID NO: 11690 - DNA, 40 bp, Artificial Sequence
  Description of Artificial Sequence: Synthetic primer
tagcaaatgtactgatttgttaactgtttttctgttgttg

SEQ ID NO: 11691 - DNA, 40 bp, Artificial Sequence
  Description of Artificial Sequence: Synthetic primer
aaagctttctgttttagattaaaaatcaatagtctctgac

SEQ ID NO: 11692 - DNA, 40 bp, Artificial Sequence
  Description of Artificial Sequence: Synthetic primer
ctctcctgtggggaggagctggggtaggacgggcgtgagc

SEQ ID NO: 11693 - DNA, 40 bp, Artificial Sequence
  Description of Artificial Sequence: Synthetic primer
ggatggcccttgtcccatccatgtgctctcaggaaccttc

SEQ ID NO: 11694 - DNA, 40 bp, Artificial Sequence
  Description of Artificial Sequence: Synthetic primer
tagtcctttccctccacgtacagcagcaccactcaacttc

SEQ ID NO: 11695 - DNA, 40 bp, Artificial Sequence
  Description of Artificial Sequence: Synthetic primer
gaatgtgtatttgctttgcaaactcctatcccccacctcc

SEQ ID NO: 11696 - DNA, 40 bp, Artificial Sequence
  Description of Artificial Sequence: Synthetic primer
agccaagctgtgaaggccttttaacagaccaccttccttc

SEQ ID NO: 11697 - DNA, 40 bp, Artificial Sequence
  Description of Artificial Sequence: Synthetic primer
ggatgaacccaccagctgctaatcagttaagaataagagc

SEQ ID NO: 11698 - DNA, 40 bp, Artificial Sequence
  Description of Artificial Sequence: Synthetic primer
atacaaaaaagaaactcctacgtggtgtgtgtctgaagtc

SEQ ID NO: 11699 - DNA, 40 bp, Artificial Sequence
  Description of Artificial Sequence: Synthetic primer
atttccaactaaaaaggcaaatgtaatctaccaggctttg

SEQ ID NO: 11700 - DNA, 40 bp, Artificial Sequence
  Description of Artificial Sequence: Synthetic primer
ctaccagactgaggttagaagcattttctttggcagcaag

SEQ ID NO: 11701 - DNA, 40 bp, Artificial Sequence
  Description of Artificial Sequence: Synthetic primer
ttttagctacacaagtctgcaggtaacttcagcaactaac

SEQ ID NO: 11702 - DNA, 40 bp, Artificial Sequence
  Description of Artificial Sequence: Synthetic primer
cctttcctttttctcagcatcatattaaccccctgagtat

SEQ ID NO: 11703 - DNA, 40 bp, Artificial Sequence
  Description of Artificial Sequence: Synthetic primer
attgattttcaaataatgtggtaagtgaacggaataaatg

SEQ ID NO: 11704 - DNA, 40 bp, Artificial Sequence
  Description of Artificial Sequence: Synthetic primer
atgcgtatataaagaaagaaaactccaaactttttgatcc

SEQ ID NO: 11705 - DNA, 40 bp, Artificial Sequence
  Description of Artificial Sequence: Synthetic primer
aaaggttatctaactgttctcccatgcttgagatggtctc

SEQ ID NO: 11706 - DNA, 40 bp, Artificial Sequence
  Description of Artificial Sequence: Synthetic primer
tcctgccctaacgaacttcctgctgtttccaagggaggac

SEQ ID NO: 11707 - DNA, 40 bp, Artificial Sequence
  Description of Artificial Sequence: Synthetic primer
atctcagacatcacaaaatttggcagctcttctttcttcc

SEQ ID NO: 11708 - DNA, 40 bp, Artificial Sequence
  Description of Artificial Sequence: Synthetic primer
aaagtcaggatgttttcaaacttcgcagacaaatttcagg

SEQ ID NO: 11709 - DNA, 40 bp, Artificial Sequence
  Description of Artificial Sequence: Synthetic primer
ttcgaggccagagtcctttagccctactcaggttaaaatg

SEQ ID NO: 11710 - DNA, 40 bp, Artificial Sequence
  Description of Artificial Sequence: Synthetic primer
agctctgattgctggacttctctttgggctcctgtcttac

SEQ ID NO: 11711 - DNA, 40 bp, Artificial Sequence
  Description of Artificial Sequence: Synthetic primer
tctatgcccacctgcttcaggtctctccccgcaaagagtc

SEQ ID NO: 11712 - DNA, 40 bp, Artificial Sequence
  Description of Artificial Sequence: Synthetic primer
aggcaacaagcacaagaagcctgcttatggctaaagtggc

SEQ ID NO: 11713 - DNA, 40 bp, Artificial Sequence
  Description of Artificial Sequence: Synthetic primer
tactggttttaatgaattactaagctggctgcctctcatg

SEQ ID NO: 11714 - DNA, 40 bp, Artificial Sequence
  Description of Artificial Sequence: Synthetic primer
tccaaatctggctcactcaggcacctggcagccccactcc

SEQ ID NO: 11715 - DNA, 40 bp, Artificial Sequence
  Description of Artificial Sequence: Synthetic primer
ggggctcggaggcacccctgcctgctcactgctttgcttc

SEQ ID NO: 11716 - DNA, 40 bp, Artificial Sequence
  Description of Artificial Sequence: Synthetic primer
cctgtggacctacttttatattgtacatttgctcattttg

SEQ ID NO: 11717 - DNA, 40 bp, Artificial Sequence
  Description of Artificial Sequence: Synthetic primer
tattttaaaaacattgttagaggcaaactcaagagaaatg

SEQ ID NO: 11718 - DNA, 40 bp, Artificial Sequence
  Description of Artificial Sequence: Synthetic primer
acacacacacacacacgcctctaaattattatttgcacag

SEQ ID NO: 11719 - DNA, 40 bp, Artificial Sequence
  Description of Artificial Sequence: Synthetic primer
agaacactactgaatgcaatttttgtttccttttctttag

SEQ ID NO: 11720 - DNA, 40 bp, Artificial Sequence
  Description of Artificial Sequence: Synthetic primer
gaaatctcacctcggaaaagctaatcatccccaactcagc

SEQ ID NO: 11721 - DNA, 40 bp, Artificial Sequence
  Description of Artificial Sequence: Synthetic primer
gttgaggctggcccaggagctcaccacttcctcctctccc

SEQ ID NO: 11722 - DNA, 40 bp, Artificial Sequence
  Description of Artificial Sequence: Synthetic primer
ggtctagggagggccccatggcaggaagacgcagggaagc

SEQ ID NO: 11723 - DNA, 40 bp, Artificial Sequence
  Description of Artificial Sequence: Synthetic primer
ggcagccagggcctccaccgaggggcctggcctgtgtacc

SEQ ID NO: 11724 - DNA, 40 bp, Artificial Sequence
  Description of Artificial Sequence: Synthetic primer
caatttccctcaaagagataagaattcaagttagtgctac

SEQ ID NO: 11725 - DNA, 40 bp, Artificial Sequence
  Description of Artificial Sequence: Synthetic primer
ctcatctgcttctggcagcatgtttataagctttactctg

SEQ ID NO: 11726 - DNA, 40 bp, Artificial Sequence
  Description of Artificial Sequence: Synthetic primer
tttctaaatcacagtacagcaatttattttttttccttac

SEQ ID NO: 11727 - DNA, 40 bp, Artificial Sequence
  Description of Artificial Sequence: Synthetic primer
aacagtaagagtcttgccttacttaaaatgagaacattac

SEQ ID NO: 11728 - DNA, 40 bp, Artificial Sequence
  Description of Artificial Sequence: Synthetic primer
ggatgccaaaggagacaggctggctttcaggtgcccacag

SEQ ID NO: 11729 - DNA, 40 bp, Artificial Sequence
  Description of Artificial Sequence: Synthetic primer
gattgtctaaccagagtatctctacctgcttaaaatctaa

SEQ ID NO: 11730 - DNA, 40 bp, Artificial Sequence
  Description of Artificial Sequence: Synthetic primer
aatacttgtcactaatttttgttagttcttatctaatgtc

SEQ ID NO: 11731 - DNA, 40 bp, Artificial Sequence
  Description of Artificial Sequence: Synthetic primer
tttttttttcctaagaaaacaaaataggttgattttgatg

SEQ ID NO: 11732 - DNA, 40 bp, Artificial Sequence
  Description of Artificial Sequence: Synthetic primer
ctgtttcctctacaggccgaagatcaagctcgcgactctc

SEQ ID NO: 11733 - DNA, 40 bp, Artificial Sequence
  Description of Artificial Sequence: Synthetic primer
agacaaagtccctgagccctgaaaaagggagagcagagac

SEQ ID NO: 11734 - DNA, 40 bp, Artificial Sequence
  Description of Artificial Sequence: Synthetic primer
tggttatttagtcaaagaggaaagcaaaactgagattgac

SEQ ID NO: 11735 - DNA, 40 bp, Artificial Sequence
  Description of Artificial Sequence: Synthetic primer
taaagtatttccttgcaatacttacaatgaaatattttcc

SEQ ID NO: 11736 - DNA, 40 bp, Artificial Sequence
  Description of Artificial Sequence: Synthetic primer
gaagtcactcgttacacattgttatcagctgagattatcc

SEQ ID NO: 11737 - DNA, 40 bp, Artificial Sequence
  Description of Artificial Sequence: Synthetic primer
aaattttgacttgttgagattcccacacatttctctttgc

SEQ ID NO: 11738 - DNA, 40 bp, Artificial Sequence
  Description of Artificial Sequence: Synthetic primer
cattttcaatctctcgaaagattctttaaaattttgacac

SEQ ID NO: 11739 - DNA, 40 bp, Artificial Sequence
  Description of Artificial Sequence: Synthetic primer
ccacaaacattcagccctttataatttgtcaacccaactc

SEQ ID NO: 11740 - DNA, 40 bp, Artificial Sequence
  Description of Artificial Sequence: Synthetic primer
taatataaaacagtaattttgtttgtttattttgccttta

SEQ ID NO: 11741 - DNA, 40 bp, Artificial Sequence
  Description of Artificial Sequence: Synthetic primer
gattttttaatgtaaatatataaatgatggtgcctgatac

SEQ ID NO: 11742 - DNA, 40 bp, Artificial Sequence
  Description of Artificial Sequence: Synthetic primer
tttaaagtacacttttaaaacaagactaaacactaaaatc

SEQ ID NO: 11743 - DNA, 40 bp, Artificial Sequence
  Description of Artificial Sequence: Synthetic primer
ttaaagtattttaaatgtgccatcttacttatttttctag

SEQ ID NO: 11744 - DNA, 40 bp, Artificial Sequence
  Description of Artificial Sequence: Synthetic primer
gttgtcctgtcccattttaactctctccttgcacactaac

SEQ ID NO: 11745 - DNA, 40 bp, Artificial Sequence
  Description of Artificial Sequence: Synthetic primer
cacaagagacagacaactagcaactgttaaagatcaaaac

SEQ ID NO: 11746 - DNA, 40 bp, Artificial Sequence
  Description of Artificial Sequence: Synthetic primer
aaagaaagaaaagacagactttaatagaaaagaaaatgtc

SEQ ID NO: 11747 - DNA, 40 bp, Artificial Sequence
  Description of Artificial Sequence: Synthetic primer
tatcttacattaacacatgtattctttctttccttgcatg

SEQ ID NO: 11748 - DNA, 40 bp, Artificial Sequence
  Description of Artificial Sequence: Synthetic primer
tcctggcgagggtgtcactgacaagtccccttgtttgtgc

SEQ ID NO: 11749 - DNA, 40 bp, Artificial Sequence
  Description of Artificial Sequence: Synthetic primer
acttttaattaattgtgcttaaggctttaattaaatttgg

SEQ ID NO: 11750 - DNA, 40 bp, Artificial Sequence
  Description of Artificial Sequence: Synthetic primer
caccgactgaagcccaccccactctacaaacactctgcac

SEQ ID NO: 11751 - DNA, 40 bp, Artificial Sequence
  Description of Artificial Sequence: Synthetic primer
atttgaagcatgtttcaatactctttatttctctccctag

SEQ ID NO: 11752 - DNA, 40 bp, Artificial Sequence
  Description of Artificial Sequence: Synthetic primer
acatttgaatatttgaatgtttacctatttttcatgtatc

SEQ ID NO: 11753 - DNA, 40 bp, Artificial Sequence
  Description of Artificial Sequence: Synthetic primer
tttacatcttccaacaactagaaaaatgataaatactacc

SEQ ID NO: 11754 - DNA, 40 bp, Artificial Sequence
  Description of Artificial Sequence: Synthetic primer
aaaaaaatctacttgtaattcaaaatgaacagtaaaaatg

SEQ ID NO: 11755 - DNA, 40 bp, Artificial Sequence
  Description of Artificial Sequence: Synthetic primer
aagaaagaatcagttaacaagtaagtagggaggagagaag

SEQ ID NO: 11756 - DNA, 40 bp, Artificial Sequence
  Description of Artificial Sequence: Synthetic primer
tggggacctgtatatctatacttcttattctgagtctctc

SEQ ID NO: 11757 - DNA, 40 bp, Artificial Sequence
  Description of Artificial Sequence: Synthetic primer
aataaaggaggtaggctgtacttttcccaaaaggccatac

SEQ ID NO: 11758 - DNA, 40 bp, Artificial Sequence
  Description of Artificial Sequence: Synthetic primer
gccctgatatggcaaaggaaccagctttcccgtcggtgtg

SEQ ID NO: 11759 - DNA, 40 bp, Artificial Sequence
  Description of Artificial Sequence: Synthetic primer
gcatgtctcgctcatgctgtgccctctgctctgctttatc

SEQ ID NO: 11760 - DNA, 40 bp, Artificial Sequence
  Description of Artificial Sequence: Synthetic primer
acacacatacttgcgcacacacctcctgaactctgaactc

SEQ ID NO: 11761 - DNA, 40 bp, Artificial Sequence
  Description of Artificial Sequence: Synthetic primer
ggggctgggtgtggggcaggcacctgtgtctgacattccc

SEQ ID NO: 11762 - DNA, 40 bp, Artificial Sequence
  Description of Artificial Sequence: Synthetic primer
tatgtgaacctccactgttacagtgttaacattttccttc

SEQ ID NO: 11763 - DNA, 40 bp, Artificial Sequence
  Description of Artificial Sequence: Synthetic primer
atatttctacccaactcacagaagaatcaaactttagaag

SEQ ID NO: 11764 - DNA, 40 bp, Artificial Sequence
  Description of Artificial Sequence: Synthetic primer
tggttctttagttttctctagaatgaatgattaacagttg

SEQ ID NO: 11765 - DNA, 40 bp, Artificial Sequence
  Description of Artificial Sequence: Synthetic primer
gtttttcattctagtctattactatttttctctcccatag

SEQ ID NO: 11766 - DNA, 40 bp, Artificial Sequence
  Description of Artificial Sequence: Synthetic primer
tgcgggagatgggagtccgggacgcggacaggacgggcac

SEQ ID NO: 11767 - DNA, 40 bp, Artificial Sequence
  Description of Artificial Sequence: Synthetic primer
ccgggccccgctgaccgccatgctgaccttcttcctcgtg

SEQ ID NO: 11768 - DNA, 40 bp, Artificial Sequence
  Description of Artificial Sequence: Synthetic primer
catatttaactactaaatcaatatatttattaatttgtcc

SEQ ID NO: 11769 - DNA, 40 bp, Artificial Sequence
  Description of Artificial Sequence: Synthetic primer
gtatcaaaagaaagaaatatatggtaagtttcaagaatac

SEQ ID NO: 11770 - DNA, 40 bp, Artificial Sequence
  Description of Artificial Sequence: Synthetic primer
tatggcagtcaaaccttctctcttatgtatatataatagc

SEQ ID NO: 11771 - DNA, 40 bp, Artificial Sequence
  Description of Artificial Sequence: Synthetic primer
acagattataattgatacttaataaactcagtgatttgcc

SEQ ID NO: 11772 - DNA, 40 bp, Artificial Sequence
  Description of Artificial Sequence: Synthetic primer
gcctctgggtgtaagtgggaactccgggtggccgcagaag

SEQ ID NO: 11773 - DNA, 40 bp, Artificial Sequence
  Description of Artificial Sequence: Synthetic primer
gggtgggcagggccacactggagcgggagagctgatgacc

SEQ ID NO: 11774 - DNA, 40 bp, Artificial Sequence
  Description of Artificial Sequence: Synthetic primer
ttaaaatcaaaatacaccccagcccggcccgagcccctca

SEQ ID NO: 11775 - DNA, 40 bp, Artificial Sequence
  Description of Artificial Sequence: Synthetic primer
gatgttccttggggtcgcctcccactaaccttccttctcc

SEQ ID NO: 11776 - DNA, 40 bp, Artificial Sequence
  Description of Artificial Sequence: Synthetic primer
tgtagcatatgcacttgaaggattctaccatttctacttc

SEQ ID NO: 11777 - DNA, 40 bp, Artificial Sequence
  Description of Artificial Sequence: Synthetic primer
caggagagctactcagttaattgataaagtagaggcaacg

SEQ ID NO: 11778 - DNA, 40 bp, Artificial Sequence
  Description of Artificial Sequence: Synthetic primer
aaaagaaaagaagaagaagaagaagaagaaaacaaatggt

SEQ ID NO: 11779 - DNA, 40 bp, Artificial Sequence
  Description of Artificial Sequence: Synthetic primer
attataattcatacatttttctctaactgcaaacataatg

SEQ ID NO: 11780 - DNA, 40 bp, Artificial Sequence
  Description of Artificial Sequence: Synthetic primer
catgcataatgtaaccatgatgctgtactatgggaaaatc

SEQ ID NO: 11781 - DNA, 40 bp, Artificial Sequence
  Description of Artificial Sequence: Synthetic primer
tagataacaaatgaaaagaaaatttctgtgtttttcgttg

SEQ ID NO: 11782 - DNA, 40 bp, Artificial Sequence
  Description of Artificial Sequence: Synthetic primer
tcactccctagcctcctgatggggctgaagcccaggatgc

SEQ ID NO: 11783 - DNA, 40 bp, Artificial Sequence
  Description of Artificial Sequence: Synthetic primer
gagcttcctttgggtagtaagtgtttgcctgtcttttcac

SEQ ID NO: 11784 - DNA, 40 bp, Artificial Sequence
  Description of Artificial Sequence: Synthetic primer
ccaggaggcctgcagcccctgtactagtggacccctccag

SEQ ID NO: 11785 - DNA, 40 bp, Artificial Sequence
  Description of Artificial Sequence: Synthetic primer
ccctggggccaccagctaatagaaccctatcctggtctcc

SEQ ID NO: 11786 - DNA, 40 bp, Artificial Sequence
  Description of Artificial Sequence: Synthetic primer
agtgtggagaaggagagcgccggaggggcagaggggcaac

SEQ ID NO: 11787 - DNA, 40 bp, Artificial Sequence
  Description of Artificial Sequence: Synthetic primer
aggctccaggtgccaggcaaggctacagaggaccccctac

SEQ ID NO: 11788 - DNA, 40 bp, Artificial Sequence
  Description of Artificial Sequence: Synthetic primer
agtgtgtcagtcagatttggtaataagaaaaattttaagg

SEQ ID NO: 11789 - DNA, 40 bp, Artificial Sequence
  Description of Artificial Sequence: Synthetic primer
gttgcttaacaagtgtttgtattttctcccctatttcttc

SEQ ID NO: 11790 - DNA, 40 bp, Artificial Sequence
  Description of Artificial Sequence: Synthetic primer
aacccttagtttctgagacgctatccagcagtttcttcac

SEQ ID NO: 11791 - DNA, 40 bp, Artificial Sequence
  Description of Artificial Sequence: Synthetic primer
aaatgaaacctcatatttgcttagcagcttctaagtctag

SEQ ID NO: 11792 - DNA, 40 bp, Artificial Sequence
  Description of Artificial Sequence: Synthetic primer
gctgctttttcttgtatctggttgctgtcatttttatgag

SEQ ID NO: 11793 - DNA, 40 bp, Artificial Sequence
  Description of Artificial Sequence: Synthetic primer
acttctctaattctcaaacaatgaaatttcttccacaggc

SEQ ID NO: 11794 - DNA, 40 bp, Artificial Sequence
  Description of Artificial Sequence: Synthetic primer
taagtaatatgatagtcatttacattttaattaaatgtgc

SEQ ID NO: 11795 - DNA, 40 bp, Artificial Sequence
  Description of Artificial Sequence: Synthetic primer
gatatacagatgactgcagtagtatttggcaattgtttgg

SEQ ID NO: 11796 - DNA, 40 bp, Artificial Sequence
  Description of Artificial Sequence: Synthetic primer
tgcatgccacaggtcagcctggcgcacaccctgccactaa

SEQ ID NO: 11797 - DNA, 40 bp, Artificial Sequence
  Description of Artificial Sequence: Synthetic primer
gggaaggtgagggcaggtgggtgggctggggcctgacctc

SEQ ID NO: 11798 - DNA, 40 bp, Artificial Sequence
  Description of Artificial Sequence: Synthetic primer
atctctccgaggccgacaccgaggccaggggcccggagca

SEQ ID NO: 11799 - DNA, 40 bp, Artificial Sequence
  Description of Artificial Sequence: Synthetic primer
gtcgcggcggaggcagaggaagagggagcgggagctctgc

SEQ ID NO: 11800 - DNA, 40 bp, Artificial Sequence
  Description of Artificial Sequence: Synthetic primer
ctcccgtaaaaatagtgagacttgagtaatgtttgatgtc

SEQ ID NO: 11801 - DNA, 40 bp, Artificial Sequence
  Description of Artificial Sequence: Synthetic primer
attctaggtatcccagaaaagttaaagtcaaatctgaaac

SEQ ID NO: 11802 - DNA, 40 bp, Artificial Sequence
  Description of Artificial Sequence: Synthetic primer
ggtctagttctgtgcaggagttgtaatatttgctcttctc

SEQ ID NO: 11803 - DNA, 40 bp, Artificial Sequence
  Description of Artificial Sequence: Synthetic primer
ttttctgaacgggatccagaggtggccccagaagtggaag

SEQ ID NO: 11804 - DNA, 40 bp, Artificial Sequence
  Description of Artificial Sequence: Synthetic primer
tttttaattcctgagcatcaccatttttagattacatttg

SEQ ID NO: 11805 - DNA, 40 bp, Artificial Sequence
  Description of Artificial Sequence: Synthetic primer
gaaatatgaagagctgatgcattcctggttgttttctttc

SEQ ID NO: 11806 - DNA, 40 bp, Artificial Sequence
  Description of Artificial Sequence: Synthetic primer
tgcagtgccagggactgaggagagcaggtgcagggagggg

SEQ ID NO: 11807 - DNA, 40 bp, Artificial Sequence
  Description of Artificial Sequence: Synthetic primer
ggacctgggccaggagagggcccaacctctgaccccttgc

SEQ ID NO: 11808 - DNA, 40 bp, Artificial Sequence
  Description of Artificial Sequence: Synthetic primer
gggctgctggcctgtccactgacggggcgctgtcccccac

SEQ ID NO: 11809 - DNA, 40 bp, Artificial Sequence
  Description of Artificial Sequence: Synthetic primer
tgctgggagccccgccgcagcccaggtgcaaagccaccac

SEQ ID NO: 11810 - DNA, 40 bp, Artificial Sequence
  Description of Artificial Sequence: Synthetic primer
gccacccctgggctccaggtgtcctgcgggaggtgaccac

SEQ ID NO: 11811 - DNA, 40 bp, Artificial Sequence
  Description of Artificial Sequence: Synthetic primer
tgcccagccctgcccactagcctggcccaccggccctcac

SEQ ID NO: 11812 - DNA, 40 bp, Artificial Sequence
  Description of Artificial Sequence: Synthetic primer
tgttgtgtacctttaataattcctttctctgcttcttttc

SEQ ID NO: 11813 - DNA, 40 bp, Artificial Sequence
  Description of Artificial Sequence: Synthetic primer
ttgataatttctcccattttgccttttagcattaagtgag

SEQ ID NO: 11814 - DNA, 40 bp, Artificial Sequence
  Description of Artificial Sequence: Synthetic primer
tactcaggcttgggtgggaggccaggcatttttcactagg

SEQ ID NO: 11815 - DNA, 40 bp, Artificial Sequence
  Description of Artificial Sequence: Synthetic primer
gactgcagcacttctttgtccactcttccccagggcagcc

SEQ ID NO: 11816 - DNA, 40 bp, Artificial Sequence
  Description of Artificial Sequence: Synthetic primer
ccccattcctgtttcgtttgcacagaggggttttctggtg

SEQ ID NO: 11817 - DNA, 40 bp, Artificial Sequence
  Description of Artificial Sequence: Synthetic primer
tttccctctagcctagcaaagacacaggtagctcactcac

SEQ ID NO: 11818 - DNA, 40 bp, Artificial Sequence
  Description of Artificial Sequence: Synthetic primer
catcaactgagggcttccaggggcctctgggtgtcagagc

SEQ ID NO: 11819 - DNA, 40 bp, Artificial Sequence
  Description of Artificial Sequence: Synthetic primer
agccggggctggggcctcctacaggaccatcagtttctcc

SEQ ID NO: 11820 - DNA, 40 bp, Artificial Sequence
  Description of Artificial Sequence: Synthetic primer
ctcttctattttaacctcattaatcctttctgatttgttc

SEQ ID NO: 11821 - DNA, 40 bp, Artificial Sequence
  Description of Artificial Sequence: Synthetic primer
ctctgatctagcttaagaattaggttccaatcatacacat

SEQ ID NO: 11822 - DNA, 40 bp, Artificial Sequence
  Description of Artificial Sequence: Synthetic primer
cattcaaatggttctcacatgagagtaactagcatctttc

SEQ ID NO: 11823 - DNA, 40 bp, Artificial Sequence
  Description of Artificial Sequence: Synthetic primer
aaaaaaaatcaaaatgtgcaaagtggcagtgactgtccag

SEQ ID NO: 11824 - DNA, 40 bp, Artificial Sequence
  Description of Artificial Sequence: Synthetic primer
aagagcgaggcgtccccacgtccgctcaagagtgtcatcc

SEQ ID NO: 11825 - DNA, 40 bp, Artificial Sequence
  Description of Artificial Sequence: Synthetic primer
tggtttctgcgacgctcactgtcctccgagtcagagtttc

SEQ ID NO: 11826 - DNA, 40 bp, Artificial Sequence
  Description of Artificial Sequence: Synthetic primer
tgatgactttttcaaaaatgcaatactgaatgttattctg

SEQ ID NO: 11827 - DNA, 40 bp, Artificial Sequence
  Description of Artificial Sequence: Synthetic primer
ttatattatgctataaaaatgttatcagagtgcaaaatag

SEQ ID NO: 11828 - DNA, 40 bp, Artificial Sequence
  Description of Artificial Sequence: Synthetic primer
ttactttcttaccccaagtatagataaactcacaataagg

SEQ ID NO: 11829 - DNA, 40 bp, Artificial Sequence
  Description of Artificial Sequence: Synthetic primer
tgtagataaattcaacactattgttaggaacaattttgtg

SEQ ID NO: 11830 - DNA, 40 bp, Artificial Sequence
  Description of Artificial Sequence: Synthetic primer
acttaaattacaacaattttggcctgtggactctattttt

SEQ ID NO: 11831 - DNA, 40 bp, Artificial Sequence
  Description of Artificial Sequence: Synthetic primer
tcctgcttcctctaatcatatctgctcaaatactgagacc

SEQ ID NO: 11832 - DNA, 40 bp, Artificial Sequence
  Description of Artificial Sequence: Synthetic primer
tctccagtgtagccacccaccaaagcctcatcctgaacac

SEQ ID NO: 11833 - DNA, 40 bp, Artificial Sequence
  Description of Artificial Sequence: Synthetic primer
acatcacataaactgtagaaaagtcactccaagactcagc

SEQ ID NO: 11834 - DNA, 40 bp, Artificial Sequence
  Description of Artificial Sequence: Synthetic primer
ttgtagtggggcctgccgggtcaggcctcttgggaggagg

SEQ ID NO: 11835 - DNA, 40 bp, Artificial Sequence
  Description of Artificial Sequence: Synthetic primer
ggcccaaggggcgcatcctagacctcacttctgtctgctg

SEQ ID NO: 11836 - DNA, 40 bp, Artificial Sequence
  Description of Artificial Sequence: Synthetic primer
gatattgatctgccttcttccccaccctgcccccatctcc

SEQ ID NO: 11837 - DNA, 40 bp, Artificial Sequence
  Description of Artificial Sequence: Synthetic primer
ctcgtccctccctgtgatggcctagacaggacagcatggg

SEQ ID NO: 11838 - DNA, 40 bp, Artificial Sequence
  Description of Artificial Sequence: Synthetic primer
gtttcattacaattaaaatagatatgtaaagtttctcagg

SEQ ID NO: 11839 - DNA, 40 bp, Artificial Sequence
  Description of Artificial Sequence: Synthetic primer
ttctgatagtctagccaaggtccaagaagtagcaagctgg

SEQ ID NO: 11840 - DNA, 40 bp, Artificial Sequence
  Description of Artificial Sequence: Synthetic primer
gcatgttcttcatcttcctcttgttcttcttggtttcctg

SEQ ID NO: 11841 - DNA, 40 bp, Artificial Sequence
  Description of Artificial Sequence: Synthetic primer
atgattcccagcaaggacagttggaagaaaacaataatag

SEQ ID NO: 11842 - DNA, 40 bp, Artificial Sequence
  Description of Artificial Sequence: Synthetic primer
gtgggttagaagctgaccttggtattcatgtatatatttc

SEQ ID NO: 11843 - DNA, 40 bp, Artificial Sequence
  Description of Artificial Sequence: Synthetic primer
aattaataaactagagatcacagacatactcctgtctcac

SEQ ID NO: 11844 - DNA, 40 bp, Artificial Sequence
  Description of Artificial Sequence: Synthetic primer
tgattatcactcctaacacctaatctgatttaatgtaata

SEQ ID NO: 11845 - DNA, 40 bp, Artificial Sequence
  Description of Artificial Sequence: Synthetic primer
gagattaaaaacgccaacagcatcggaggccttgactgac

SEQ ID NO: 11846 - DNA, 40 bp, Artificial Sequence
  Description of Artificial Sequence: Synthetic primer
cccctcctgagtaacagttgttctttcccacagaaagcag

SEQ ID NO: 11847 - DNA, 40 bp, Artificial Sequence
  Description of Artificial Sequence: Synthetic primer
tctggactcctattgtcctggagagagtgggcttagacgc

SEQ ID NO: 11848 - DNA, 40 bp, Artificial Sequence
  Description of Artificial Sequence: Synthetic primer
accagcccagcccagcccagcccagttgggcccggagttc

SEQ ID NO: 11849 - DNA, 40 bp, Artificial Sequence
  Description of Artificial Sequence: Synthetic primer
ccctagaagtcaaaggtcatgtggtccttgactctgccaa

SEQ ID NO: 11850 - DNA, 40 bp, Artificial Sequence
  Description of Artificial Sequence: Synthetic primer
ggcagttcttgagtgctcacaaggaggcagagttctccag

SEQ ID NO: 11851 - DNA, 40 bp, Artificial Sequence
  Description of Artificial Sequence: Synthetic primer
gtcaaatgctctaataaaatgaacagacgccaatcaagag

SEQ ID NO: 11852 - DNA, 40 bp, Artificial Sequence
  Description of Artificial Sequence: Synthetic primer
tttccgtttttgcattaagtgacttgtctaaggttctttt

SEQ ID NO: 11853 - DNA, 40 bp, Artificial Sequence
  Description of Artificial Sequence: Synthetic primer
gcaccgaggtccggcacagccgccccgaacgacacacaag

SEQ ID NO: 11854 - DNA, 40 bp, Artificial Sequence
  Description of Artificial Sequence: Synthetic primer
agacaaaatatcagtgtgaattacagcaaacccctattcc

SEQ ID NO: 11855 - DNA, 40 bp, Artificial Sequence
  Description of Artificial Sequence: Synthetic primer
aaacacaacctggaagacaaactacaagagcaattttacc

SEQ ID NO: 11856 - DNA, 40 bp, Artificial Sequence
  Description of Artificial Sequence: Synthetic primer
tgtcccagaaaactcttatatttggctttatgtttgacac

SEQ ID NO: 11857 - DNA, 40 bp, Artificial Sequence
  Description of Artificial Sequence: Synthetic primer
aaaagaaaatcctttaactgacttcatcttaaccttttag

SEQ ID NO: 11858 - DNA, 40 bp, Artificial Sequence
  Description of Artificial Sequence: Synthetic primer
gttatttgagctagaaccagtgccaggcaacagctcttac

SEQ ID NO: 11859 - DNA, 40 bp, Artificial Sequence
  Description of Artificial Sequence: Synthetic primer
gaataaacaggtactgtaagaatccggaataaatagactc

SEQ ID NO: 11860 - DNA, 40 bp, Artificial Sequence
  Description of Artificial Sequence: Synthetic primer
taaaaattatttccttctaactgagacgtttaccctcttg

SEQ ID NO: 11861 - DNA, 40 bp, Artificial Sequence
  Description of Artificial Sequence: Synthetic primer
ggaggagaggagagagagaggcagagagaaagcagcagtc

SEQ ID NO: 11862 - DNA, 40 bp, Artificial Sequence
  Description of Artificial Sequence: Synthetic primer
cggctggaaactcttctacaactacgccctggtcatcttc

SEQ ID NO: 11863 - DNA, 40 bp, Artificial Sequence
  Description of Artificial Sequence: Synthetic primer
gagtaatgttcctcaggttgtaaagcccaatatccttgag

SEQ ID NO: 11864 - DNA, 40 bp, Artificial Sequence
  Description of Artificial Sequence: Synthetic primer
gctagtgtttcatcctttgtattatttctaagactatttt

SEQ ID NO: 11865 - DNA, 40 bp, Artificial Sequence
  Description of Artificial Sequence: Synthetic primer
ttaggtagccgatctgcagtcaaatataccaccactaaaa

SEQ ID NO: 11866 - DNA, 40 bp, Artificial Sequence
  Description of Artificial Sequence: Synthetic primer
taggctatttttaaaaggaaaatacatactagttatcttc

SEQ ID NO: 11867 - DNA, 40 bp, Artificial Sequence
  Description of Artificial Sequence: Synthetic primer
aattccctcccaacccctctatacttaatatggtaatttc

SEQ ID NO: 11868 - DNA, 40 bp, Artificial Sequence
  Description of Artificial Sequence: Synthetic primer
taggtctgttctctttttgtaatattttcttccttctctc

SEQ ID NO: 11869 - DNA, 40 bp, Artificial Sequence
  Description of Artificial Sequence: Synthetic primer
aactgcatggtgtataggaatgaaatttgatcaaggagag

SEQ ID NO: 11870 - DNA, 40 bp, Artificial Sequence
  Description of Artificial Sequence: Synthetic primer
tcttttcctgctacctgccctcttctgtgaagctgacatc

SEQ ID NO: 11871 - DNA, 40 bp, Artificial Sequence
  Description of Artificial Sequence: Synthetic primer
gagaacatcaccaggactaaggcagccccagctggtggcc

SEQ ID NO: 11872 - DNA, 40 bp, Artificial Sequence
  Description of Artificial Sequence: Synthetic primer
cctcccctcagttgtgacaaaagccaccaccttccttcag

SEQ ID NO: 11873 - DNA, 40 bp, Artificial Sequence
  Description of Artificial Sequence: Synthetic primer
tccttaaaggcagggccgatttcactggcacgttcatctg

SEQ ID NO: 11874 - DNA, 40 bp, Artificial Sequence
  Description of Artificial Sequence: Synthetic primer
tatgggaccggagccctctccctgcccgccccctcccgcc

SEQ ID NO: 11875 - DNA, 40 bp, Artificial Sequence
  Description of Artificial Sequence: Synthetic primer
gtgtctgggacctggcaagtcctgagtccttgcaaatccc

SEQ ID NO: 11876 - DNA, 40 bp, Artificial Sequence
  Description of Artificial Sequence: Synthetic primer
gatgtccaggcacctggatgctgccctgccctctccaacc

SEQ ID NO: 11877 - DNA, 40 bp, Artificial Sequence
  Description of Artificial Sequence: Synthetic primer
aactcaggagtggggcccaggatgagaggcgctgcttacc

SEQ ID NO: 11878 - DNA, 40 bp, Artificial Sequence
  Description of Artificial Sequence: Synthetic primer
tttgatttctaaagatacatgcctttgctaagctttcttc

SEQ ID NO: 11879 - DNA, 40 bp, Artificial Sequence
  Description of Artificial Sequence: Synthetic primer
aagaaaagtgtaatagaagtaaaagaagatctatgaaggg

SEQ ID NO: 11880 - DNA, 40 bp, Artificial Sequence
  Description of Artificial Sequence: Synthetic primer
tgggttctcatgaacagagtcccctcaccaactcccagag

SEQ ID NO: 11881 - DNA, 40 bp, Artificial Sequence
  Description of Artificial Sequence: Synthetic primer
tccacggccagggccttgagcattaacccctcctgttccc

SEQ ID NO: 11882 - DNA, 40 bp, Artificial Sequence
  Description of Artificial Sequence: Synthetic primer
gaaatttttagaactgaaaaatacagtatctgtgctagag

SEQ ID NO: 11883 - DNA, 40 bp, Artificial Sequence
  Description of Artificial Sequence: Synthetic primer
ccattcaagtgaacaggttttaatgaaagatgggtctgtc

SEQ ID NO: 11884 - DNA, 40 bp, Artificial Sequence
  Description of Artificial Sequence: Synthetic primer
ttaacgccggatcgcagttggaaaccaccagctttttgtc

SEQ ID NO: 11885 - DNA, 40 bp, Artificial Sequence
  Description of Artificial Sequence: Synthetic primer
taaaccctaagaccattcaatactaaaaaatgtctctttc

SEQ ID NO: 11886 - DNA, 40 bp, Artificial Sequence
  Description of Artificial Sequence: Synthetic primer
acaagaattgcagtaacgtgttgtggtttgttcattttcc

SEQ ID NO: 11887 - DNA, 40 bp, Artificial Sequence
  Description of Artificial Sequence: Synthetic primer
aggaaaccaccatttcaaaaacagcatggttaggtttggg

SEQ ID NO: 11888 - DNA, 40 bp, Artificial Sequence
  Description of Artificial Sequence: Synthetic primer
ggcagcagtgcacgtggaggagacgtctcccatgaggcca

SEQ ID NO: 11889 - DNA, 40 bp, Artificial Sequence
  Description of Artificial Sequence: Synthetic primer
gaatgtgtccctgcccagtgctgtcacagagggctgcaag

SEQ ID NO: 11890 - DNA, 40 bp, Artificial Sequence
  Description of Artificial Sequence: Synthetic primer
aaagcataaaaatcctttgtgtgtgttctaatattggttg

SEQ ID NO: 11891 - DNA, 40 bp, Artificial Sequence
  Description of Artificial Sequence: Synthetic primer
tacattaacaactgcacacagctgccagaacacgaaactc

SEQ ID NO: 11892 - DNA, 40 bp, Artificial Sequence
  Description of Artificial Sequence: Synthetic primer
cgatgacacaagtgtgcttacagtactctcctcctctctc

SEQ ID NO: 11893 - DNA, 40 bp, Artificial Sequence
  Description of Artificial Sequence: Synthetic primer
aaggcatgctatccacaggtgattgactagttgtcttttc

SEQ ID NO: 11894 - DNA, 40 bp, Artificial Sequence
  Description of Artificial Sequence: Synthetic primer
ccacaactttaaaagaataaaaaattaaaaggagcccttc

SEQ ID NO: 11895 - DNA, 40 bp, Artificial Sequence
  Description of Artificial Sequence: Synthetic primer
aaatgaagaagaaaataattaattttttcctccctgttgg

SEQ ID NO: 11896 - DNA, 40 bp, Artificial Sequence
  Description of Artificial Sequence: Synthetic primer
agggcagagctactgggcctggggctggttccagaattac

SEQ ID NO: 11897 - DNA, 40 bp, Artificial Sequence
  Description of Artificial Sequence: Synthetic primer
tccctccatgatcttcgcatagagcacagtaccccttcac

SEQ ID NO: 11898 - DNA, 40 bp, Artificial Sequence
  Description of Artificial Sequence: Synthetic primer
tgcgcgagcaccctaaaaggcggaaatattcaagcagcag

SEQ ID NO: 11899 - DNA, 40 bp, Artificial Sequence
  Description of Artificial Sequence: Synthetic primer
gacgcattcttacccctttgtgggcctcatttttgttgtg

SEQ ID NO: 11900 - DNA, 40 bp, Artificial Sequence
  Description of Artificial Sequence: Synthetic primer
ctggaaatgctcagtgctttcatgaagcgaacaggaagac

SEQ ID NO: 11901 - DNA, 40 bp, Artificial Sequence
  Description of Artificial Sequence: Synthetic primer
aacaatatattagaaacaatcatgacaaaacccatattag

SEQ ID NO: 11902 - DNA, 40 bp, Artificial Sequence
  Description of Artificial Sequence: Synthetic primer
tcaacctatgaattgtttctcctactaccctctttgattt

SEQ ID NO: 11903 - DNA, 40 bp, Artificial Sequence
  Description of Artificial Sequence: Synthetic primer
attgaaatattttagctaaactttatatggtctttatttc

SEQ ID NO: 11904 - DNA, 40 bp, Artificial Sequence
  Description of Artificial Sequence: Synthetic primer
taagagagtaaacaatctggtttgtaaaacctgtaaatcc

SEQ ID NO: 11905 - DNA, 40 bp, Artificial Sequence
  Description of Artificial Sequence: Synthetic primer
tgtgattttcattgaccatcacatgctaatagtgtatttt

SEQ ID NO: 11906 - DNA, 40 bp, Artificial Sequence
  Description of Artificial Sequence: Synthetic primer
atgtggcaccagataaatatgtgcacaaaggagatactag

SEQ ID NO: 11907 - DNA, 40 bp, Artificial Sequence
  Description of Artificial Sequence: Synthetic primer
ctgagtctatggcaggtaggctcctagtcgccagtatgtc

SEQ ID NO: 11908 - DNA, 40 bp, Artificial Sequence
  Description of Artificial Sequence: Synthetic primer
ccacctcccaccccacccacccctctgggtggcactgtac

SEQ ID NO: 11909 - DNA, 40 bp, Artificial Sequence
  Description of Artificial Sequence: Synthetic primer
ctatcccttacaccaagaaaactgggttggtttccatttg

SEQ ID NO: 11910 - DNA, 40 bp, Artificial Sequence
  Description of Artificial Sequence: Synthetic primer
catgttctctgtaagtttatgacttccttctgattttgtg

SEQ ID NO: 11911 - DNA, 40 bp, Artificial Sequence
  Description of Artificial Sequence: Synthetic primer
gggcttgtggttccttcagctcaggggcttttcactttgc

SEQ ID NO: 11912 - DNA, 40 bp, Artificial Sequence
  Description of Artificial Sequence: Synthetic primer
atcacagcctccttctgcgagctccttcccaccgccactc

SEQ ID NO: 11913 - DNA, 40 bp, Artificial Sequence
  Description of Artificial Sequence: Synthetic primer
atggttagtggtttaacataaacattttgcttgcattctg

SEQ ID NO: 11914 - DNA, 40 bp, Artificial Sequence
  Description of Artificial Sequence: Synthetic primer
caataacccctattgtggagtgcttctttcacttttcaag

SEQ ID NO: 11915 - DNA, 40 bp, Artificial Sequence
  Description of Artificial Sequence: Synthetic primer
aatcagaggggagatttctggaaagtcagccataattaac

SEQ ID NO: 11916 - DNA, 40 bp, Artificial Sequence
  Description of Artificial Sequence: Synthetic primer
agattattatagaagacaagatgccaaacgcttcatggtc

SEQ ID NO: 11917 - DNA, 40 bp, Artificial Sequence
  Description of Artificial Sequence: Synthetic primer
aaaatggggatggagacaaggacccagggctaggggactg

SEQ ID NO: 11918 - DNA, 40 bp, Artificial Sequence
  Description of Artificial Sequence: Synthetic primer
ggtcggggcacaaggctgaaccctgactccttcccttccc

SEQ ID NO: 11919 - DNA, 40 bp, Artificial Sequence
  Description of Artificial Sequence: Synthetic primer
cactgccccgcagccccagtgacaggaggagaccataacc

SEQ ID NO: 11920 - DNA, 40 bp, Artificial Sequence
  Description of Artificial Sequence: Synthetic primer
tccagcgtcttccatccttcctaccaccttctccacagcc

SEQ ID NO: 11921 - DNA, 40 bp, Artificial Sequence
  Description of Artificial Sequence: Synthetic primer
gcttgtagaaagaatccatacacctccgatccagctacgc

SEQ ID NO: 11922 - DNA, 40 bp, Artificial Sequence
  Description of Artificial Sequence: Synthetic primer
gtggtagactctgtgtcctggatttcagcaggcttctccc

SEQ ID NO: 11923 - DNA, 40 bp, Artificial Sequence
  Description of Artificial Sequence: Synthetic primer
gagtgataaaccaaacccatgcaaaaggaccccatatagc

SEQ ID NO: 11924 - DNA, 40 bp, Artificial Sequence
  Description of Artificial Sequence: Synthetic primer
cagtagtcctactttgacactttgaatgctctttccttcc

SEQ ID NO: 11925 - DNA, 40 bp, Artificial Sequence
  Description of Artificial Sequence: Synthetic primer
aattatctaagcaggctatttgataatggagaaaaatgtg

SEQ ID NO: 11926 - DNA, 40 bp, Artificial Sequence
  Description of Artificial Sequence: Synthetic primer
tgtaagaacttaataggttgagatgtcatatttaatgtaa

SEQ ID NO: 11927 - DNA, 40 bp, Artificial Sequence
  Description of Artificial Sequence: Synthetic primer
tctctcctcaccctcctctcccgctgcctcggctggctca

SEQ ID NO: 11928 - DNA, 40 bp, Artificial Sequence
  Description of Artificial Sequence: Synthetic primer
ttccctgccttggggaagaaggctggggcctggcatggtg

SEQ ID NO: 11929 - DNA, 40 bp, Artificial Sequence
  Description of Artificial Sequence: Synthetic primer
tgctgctggacagccccgttcccagaacaaagacctactc

SEQ ID NO: 11930 - DNA, 40 bp, Artificial Sequence
  Description of Artificial Sequence: Synthetic primer
tgtctaagaatgctgagttgactgcggtgatttggttccc

SEQ ID NO: 11931 - DNA, 40 bp, Artificial Sequence
  Description of Artificial Sequence: Synthetic primer
taccccgcctgaaataaaacatagtgaagcgtaaatcttg

SEQ ID NO: 11932 - DNA, 40 bp, Artificial Sequence
  Description of Artificial Sequence: Synthetic primer
accccgacggccaccgcttcggagccagcacgcggggtac

SEQ ID NO: 11933 - DNA, 40 bp, Artificial Sequence
  Description of Artificial Sequence: Synthetic primer
tttcattcctctgtaaatggtgttgttttcacttatttat

SEQ ID NO: 11934 - DNA, 40 bp, Artificial Sequence
  Description of Artificial Sequence: Synthetic primer
ttactactgcattacgttttttaaatctcaaaaatactca

SEQ ID NO: 11935 - DNA, 40 bp, Artificial Sequence
  Description of Artificial Sequence: Synthetic primer
aagttcccatatgtaagattcctttgtcttcttttctaac

SEQ ID NO: 11936 - DNA, 40 bp, Artificial Sequence
  Description of Artificial Sequence: Synthetic primer
aaaagctatttggctcattggaagaaaccaaacatctcac

SEQ ID NO: 11937 - DNA, 40 bp, Artificial Sequence
  Description of Artificial Sequence: Synthetic primer
gccttcccaagcaccctccgaaggggcgcagcctctgctt

SEQ ID NO: 11938 - DNA, 40 bp, Artificial Sequence
  Description of Artificial Sequence: Synthetic primer
agcctccagcgtcggtccccaggcagcatggtgaggtctg

SEQ ID NO: 11939 - DNA, 40 bp, Artificial Sequence
  Description of Artificial Sequence: Synthetic primer
cccatggctgcggccggggagccaccgttgaggccgtgag

SEQ ID NO: 11940 - DNA, 40 bp, Artificial Sequence
  Description of Artificial Sequence: Synthetic primer
atcctggccggcagcgtatggcgccccactccgggaggac

SEQ ID NO: 11941 - DNA, 40 bp, Artificial Sequence
  Description of Artificial Sequence: Synthetic primer
gagcactgggctagcccatctcctaacactggctctgagg

SEQ ID NO: 11942 - DNA, 40 bp, Artificial Sequence
  Description of Artificial Sequence: Synthetic primer
gctgctccctttccctgactccatcttgccctgccctacc

SEQ ID NO: 11943 - DNA, 40 bp, Artificial Sequence
  Description of Artificial Sequence: Synthetic primer
accctagactgattttgcctcttctttcctccatccctac

SEQ ID NO: 11944 - DNA, 40 bp, Artificial Sequence
  Description of Artificial Sequence: Synthetic primer
ctttactttgggccacccctcccacctcaacttccctgtc

SEQ ID NO: 11945 - DNA, 40 bp, Artificial Sequence
  Description of Artificial Sequence: Synthetic primer
attttacctcattattttcaggaatgaacttaacatatac

SEQ ID NO: 11946 - DNA, 40 bp, Artificial Sequence
  Description of Artificial Sequence: Synthetic primer
ttaaacatgaaaaggaagagaaagaaagacttttagaatg

SEQ ID NO: 11947 - DNA, 40 bp, Artificial Sequence
  Description of Artificial Sequence: Synthetic primer
aaggagcagattgaccaattggtgcacctcttttccaacc

SEQ ID NO: 11948 - DNA, 40 bp, Artificial Sequence
  Description of Artificial Sequence: Synthetic primer
gctgcctgccctccctgcaggtgccctgtacacggaaacg

SEQ ID NO: 11949 - DNA, 40 bp, Artificial Sequence
  Description of Artificial Sequence: Synthetic primer
gtatacagtcggtgctcaggatgcatttgttttcctgtcc

SEQ ID NO: 11950 - DNA, 40 bp, Artificial Sequence
  Description of Artificial Sequence: Synthetic primer
cacctggagaccccgctcaccctgtgacacctccttggtc

SEQ ID NO: 11951 - DNA, 40 bp, Artificial Sequence
  Description of Artificial Sequence: Synthetic primer
cattatgactcctaccattaaatatattgttatatctctc

SEQ ID NO: 11952 - DNA, 40 bp, Artificial Sequence
  Description of Artificial Sequence: Synthetic primer
tcttctccctggctgtaaaaattgctaagtacagtaaccc

SEQ ID NO: 11953 - DNA, 40 bp, Artificial Sequence
  Description of Artificial Sequence: Synthetic primer
tctgtgggcccagcacggggaaccctgccctccccctgcg

SEQ ID NO: 11954 - DNA, 40 bp, Artificial Sequence
  Description of Artificial Sequence: Synthetic primer
cagggacagcctcgctccagcatccccggcctccactctg

SEQ ID NO: 11955 - DNA, 40 bp, Artificial Sequence
  Description of Artificial Sequence: Synthetic primer
actgcacatacttataattcggagaataatcatgctgtaa

SEQ ID NO: 11956 - DNA, 40 bp, Artificial Sequence
  Description of Artificial Sequence: Synthetic primer
tattccttaaaacaggtaaaattagctattacccccaaac

SEQ ID NO: 11957 - DNA, 40 bp, Artificial Sequence
  Description of Artificial Sequence: Synthetic primer
aaatggtgatgggtcagttgaaagccaaactacagcatac

SEQ ID NO: 11958 - DNA, 40 bp, Artificial Sequence
  Description of Artificial Sequence: Synthetic primer
tattgcctcggcaaacaaaccagtgtcttctcttcattac

SEQ ID NO: 11959 - DNA, 40 bp, Artificial Sequence
  Description of Artificial Sequence: Synthetic primer
aataaaaaataaataaataaaataaaagcaaactatctcc

SEQ ID NO: 11960 - DNA, 40 bp, Artificial Sequence
  Description of Artificial Sequence: Synthetic primer
acagaaatttttggccctaattcatatataactcatcatc

SEQ ID NO: 11961 - DNA, 40 bp, Artificial Sequence
  Description of Artificial Sequence: Synthetic primer
ttaatatcactattttttaatcatttatttttactttcct

SEQ ID NO: 11962 - DNA, 40 bp, Artificial Sequence
  Description of Artificial Sequence: Synthetic primer
tgaggagggtgtagggagggtaggaagatacaagtaatac

SEQ ID NO: 11963 - DNA, 40 bp, Artificial Sequence
  Description of Artificial Sequence: Synthetic primer
caaacctgtgatctgaaaagatagctgatttcccctcaac

SEQ ID NO: 11964 - DNA, 40 bp, Artificial Sequence
  Description of Artificial Sequence: Synthetic primer
cttagaaacatcacactaactcatggaaatactgatctcc

SEQ ID NO: 11965 - DNA, 40 bp, Artificial Sequence
  Description of Artificial Sequence: Synthetic primer
gagagagatagacataccaattaagtttttctttttcttt

SEQ ID NO: 11966 - DNA, 40 bp, Artificial Sequence
  Description of Artificial Sequence: Synthetic primer
ggattaaaagatttcttcagccttgagccaataaaaagag

SEQ ID NO: 11967 - DNA, 40 bp, Artificial Sequence
  Description of Artificial Sequence: Synthetic primer
acataatttccttaacataatttcaattacctgatgcttg

SEQ ID NO: 11968 - DNA, 40 bp, Artificial Sequence
  Description of Artificial Sequence: Synthetic primer
aatatttacctcaaaatgaaaaatagaaaatataatgctc

SEQ ID NO: 11969 - DNA, 40 bp, Artificial Sequence
  Description of Artificial Sequence: Synthetic primer
tgcatataaatcttgcatttaactttttaaatattttgtc

SEQ ID NO: 11970 - DNA, 40 bp, Artificial Sequence
  Description of Artificial Sequence: Synthetic primer
aaaatacatgtatacacagccaatgattaagtgttaaata

SEQ ID NO: 11971 - DNA, 40 bp, Artificial Sequence
  Description of Artificial Sequence: Synthetic primer
tggtccaaccccacattagaactaagcatcccagctcttg

SEQ ID NO: 11972 - DNA, 40 bp, Artificial Sequence
  Description of Artificial Sequence: Synthetic primer
aatctgttctgccctctcctaacattttcgttgtatcttc

SEQ ID NO: 11973 - DNA, 40 bp, Artificial Sequence
  Description of Artificial Sequence: Synthetic primer
ccacggcctcttcaacaaggtggttaagtgactcctcctc

SEQ ID NO: 11974 - DNA, 40 bp, Artificial Sequence
  Description of Artificial Sequence: Synthetic primer
cttggggaagggaagggaggggaagagtgaggcctggaag

SEQ ID NO: 11975 - DNA, 40 bp, Artificial Sequence
  Description of Artificial Sequence: Synthetic primer
ttcaaagtacacttctctaagcctgtttttctctcttttc

SEQ ID NO: 11976 - DNA, 40 bp, Artificial Sequence
  Description of Artificial Sequence: Synthetic primer
ccgcactcacatgtgcaccacagggaggaactggggaagc

SEQ ID NO: 11977 - DNA, 40 bp, Artificial Sequence
  Description of Artificial Sequence: Synthetic primer
tgggcctgactccagctgccccgctctcccagccccactc

SEQ ID NO: 11978 - DNA, 40 bp, Artificial Sequence
  Description of Artificial Sequence: Synthetic primer
cggacctgggcctggtactcagcattcctccccatccttg

SEQ ID NO: 11979 - DNA, 40 bp, Artificial Sequence
  Description of Artificial Sequence: Synthetic primer
ccaggcctgctgaggaggctatgtgttagggcagaaggtg

SEQ ID NO: 11980 - DNA, 40 bp, Artificial Sequence
  Description of Artificial Sequence: Synthetic primer
ggtcacctccttgccccacactggaaatctcaagcttatc

SEQ ID NO: 11981 - DNA, 40 bp, Artificial Sequence
  Description of Artificial Sequence: Synthetic primer
aaactagatacccctctggaagctctttccaccccttctc

SEQ ID NO: 11982 - DNA, 40 bp, Artificial Sequence
  Description of Artificial Sequence: Synthetic primer
acaccaaacaaaaacatgtatgccagctgttagagattcc

SEQ ID NO: 11983 - DNA, 40 bp, Artificial Sequence
  Description of Artificial Sequence: Synthetic primer
acacattcattttgttacctttgaatttgatttccatcac

SEQ ID NO: 11984 - DNA, 40 bp, Artificial Sequence
  Description of Artificial Sequence: Synthetic primer
cacacagaggtgcttttctcactaattctgtcttattttg

SEQ ID NO: 11985 - DNA, 40 bp, Artificial Sequence
  Description of Artificial Sequence: Synthetic primer
agaaaatctaaaggtagaaattttaaaattcatttaacaa

SEQ ID NO: 11986 - DNA, 40 bp, Artificial Sequence
  Description of Artificial Sequence: Synthetic primer
tacattagatttttccaatcaaaggatacttttgacctac

SEQ ID NO: 11987 - DNA, 40 bp, Artificial Sequence
  Description of Artificial Sequence: Synthetic primer
gccccacctgattgcatgccagtcctcatgttgccccttg

SEQ ID NO: 11988 - DNA, 40 bp, Artificial Sequence
  Description of Artificial Sequence: Synthetic primer
ggttgcactttcatcccagggttctctcctctcctcacag

SEQ ID NO: 11989 - DNA, 40 bp, Artificial Sequence
  Description of Artificial Sequence: Synthetic primer
tccctgggcgccttcaggtggctccagccctttgctcttg

SEQ ID NO: 11990 - DNA, 40 bp, Artificial Sequence
  Description of Artificial Sequence: Synthetic primer
gacagtgaagggcccaagggttccagcccgcttgggtgtg

SEQ ID NO: 11991 - DNA, 40 bp, Artificial Sequence
  Description of Artificial Sequence: Synthetic primer
taagttaaattgtacagttgagttgatttagttttctgtg

SEQ ID NO: 11992 - DNA, 40 bp, Artificial Sequence
  Description of Artificial Sequence: Synthetic primer
ttattttcttatttataaaattacttcatgcatgtctcac

SEQ ID NO: 11993 - DNA, 40 bp, Artificial Sequence
  Description of Artificial Sequence: Synthetic primer
taataatattctggatatggaaattagtggggttgaagtg

SEQ ID NO: 11994 - DNA, 40 bp, Artificial Sequence
  Description of Artificial Sequence: Synthetic primer
ttttatgctgtctttcttctctccgtatttaaatctccag

SEQ ID NO: 11995 - DNA, 40 bp, Artificial Sequence
  Description of Artificial Sequence: Synthetic primer
gtgaccctcaaccaggtgctccacgggttctaagaaaaag

SEQ ID NO: 11996 - DNA, 40 bp, Artificial Sequence
  Description of Artificial Sequence: Synthetic primer
ggccatggtttttgatccctccattctgaccggatctctg

SEQ ID NO: 11997 - DNA, 40 bp, Artificial Sequence
  Description of Artificial Sequence: Synthetic primer
gtcaataaatgaagggttttatataaagttaatttctttg

SEQ ID NO: 11998 - DNA, 40 bp, Artificial Sequence
  Description of Artificial Sequence: Synthetic primer
aatagagcctttatttatgtgtttaaaaaccatctcattg

SEQ ID NO: 11999 - DNA, 40 bp, Artificial Sequence
  Description of Artificial Sequence: Synthetic primer
gatctttcattcgttaaaataaaatcgacagagtatcacc

SEQ ID NO: 12000 - DNA, 40 bp, Artificial Sequence
  Description of Artificial Sequence: Synthetic primer
ggcttcccctacctacgctcaagaaccactttgccatttc

SEQ ID NO: 12001 - DNA, 40 bp, Artificial Sequence
  Description of Artificial Sequence: Synthetic primer
gctgtgttgagtgtctaggctactggtgacttcctttctc

SEQ ID NO: 12002 - DNA, 40 bp, Artificial Sequence
  Description of Artificial Sequence: Synthetic primer
gaaggatgggtggggtaggagctcaggcagggccagaagc

SEQ ID NO: 12003 - DNA, 40 bp, Artificial Sequence
  Description of Artificial Sequence: Synthetic primer
ttgggtaagaaaataaagtcgttgtgggcggctggggaac

SEQ ID NO: 12004 - DNA, 40 bp, Artificial Sequence
  Description of Artificial Sequence: Synthetic primer
cccaccctggctctgaccactctgctctctctggcaggtc

SEQ ID NO: 12005 - DNA, 40 bp, Artificial Sequence
  Description of Artificial Sequence: Synthetic primer
cggagtgggaggggctgggccagcagggcagggcccactg

SEQ ID NO: 12006 - DNA, 40 bp, Artificial Sequence
  Description of Artificial Sequence: Synthetic primer
cctggcacctgggctgctccgcgcccacgccccctccctg

SEQ ID NO: 12007 - DNA, 40 bp, Artificial Sequence
  Description of Artificial Sequence: Synthetic primer
ccttccctgggaatggagggtggagcaggcagaggagcac

SEQ ID NO: 12008 - DNA, 40 bp, Artificial Sequence
  Description of Artificial Sequence: Synthetic primer
cagttcagtctcccaaccccgcctctccctgctgccaacc

SEQ ID NO: 12009 - DNA, 40 bp, Artificial Sequence
  Description of Artificial Sequence: Synthetic primer
ccctgcctctgtgcacccaggacaccctcacaccttcctc

SEQ ID NO: 12010 - DNA, 40 bp, Artificial Sequence
  Description of Artificial Sequence: Synthetic primer
cccctctttctagctccctgctcccctgggctcagcccta

SEQ ID NO: 12011 - DNA, 40 bp, Artificial Sequence
  Description of Artificial Sequence: Synthetic primer
ctcaagtggcctcagggacagcccttgaccatgccatttg

SEQ ID NO: 12012 - DNA, 40 bp, Artificial Sequence
  Description of Artificial Sequence: Synthetic primer
tcttggaaaggagagggaacctatccctgggcctgaaacc

SEQ ID NO: 12013 - DNA, 40 bp, Artificial Sequence
  Description of Artificial Sequence: Synthetic primer
acctgtgtagtacaaatatctatcatggctaaatgctgac

SEQ ID NO: 12014 - DNA, 40 bp, Artificial Sequence
  Description of Artificial Sequence: Synthetic primer
taatgactgtgttcttaaggtaacttctaaaaatgaacag

SEQ ID NO: 12015 - DNA, 40 bp, Artificial Sequence
  Description of Artificial Sequence: Synthetic primer
ggtccctgtgtcctggaggggtttgttgacccacgactgg

SEQ ID NO: 12016 - DNA, 40 bp, Artificial Sequence
  Description of Artificial Sequence: Synthetic primer
ctgttttgcctcaacgtggcccttggggacagccacctgg

SEQ ID NO: 12017 - DNA, 40 bp, Artificial Sequence
  Description of Artificial Sequence: Synthetic primer
aaataacttctttctctggaaaagagtaattcacacaagc

SEQ ID NO: 12018 - DNA, 40 bp, Artificial Sequence
  Description of Artificial Sequence: Synthetic primer
aaattttaaaaattgaaatgacacttggagtaacaattgc

SEQ ID NO: 12019 - DNA, 40 bp, Artificial Sequence
  Description of Artificial Sequence: Synthetic primer
ttccatgacatgttctcaagaaacaattcacattatctac

SEQ ID NO: 12020 - DNA, 40 bp, Artificial Sequence
  Description of Artificial Sequence: Synthetic primer
gtatattattccaaacatatgtttcaaaatttgtcatttg

SEQ ID NO: 12021 - DNA, 40 bp, Artificial Sequence
  Description of Artificial Sequence: Synthetic primer
attaaatgttacgcagtgctaaccaagttctttcttttgc

SEQ ID NO: 12022 - DNA, 40 bp, Artificial Sequence
  Description of Artificial Sequence: Synthetic primer
gctatttattaggttgcaaaccacaaaagtatactccatg

SEQ ID NO: 12023 - DNA, 40 bp, Artificial Sequence
  Description of Artificial Sequence: Synthetic primer
gggcggggcggggctcggagggaagagggtggccctggag

SEQ ID NO: 12024 - DNA, 40 bp, Artificial Sequence
  Description of Artificial Sequence: Synthetic primer
cgcgcgcgcagctcacccttgcccaggtgcgtgttgatgc

SEQ ID NO: 12025 - DNA, 40 bp, Artificial Sequence
  Description of Artificial Sequence: Synthetic primer
ggtctcgatcctcatcccgcttagccgccccgccccaacc

SEQ ID NO: 12026 - DNA, 40 bp, Artificial Sequence
  Description of Artificial Sequence: Synthetic primer
ttgcaggccgccagtgtcgacatgctgctggaggaggttc

SEQ ID NO: 12027 - DNA, 40 bp, Artificial Sequence
  Description of Artificial Sequence: Synthetic primer
taaccttttgagagccttgcacttgagaatgacaataaag

SEQ ID NO: 12028 - DNA, 40 bp, Artificial Sequence
  Description of Artificial Sequence: Synthetic primer
tttccatctttcagtgctattgcagcatcctttatcattc

SEQ ID NO: 12029 - DNA, 40 bp, Artificial Sequence
  Description of Artificial Sequence: Synthetic primer
caggctagcaaaacgtaggctcttgagatgcgaaaaatgc

SEQ ID NO: 12030 - DNA, 40 bp, Artificial Sequence
  Description of Artificial Sequence: Synthetic primer
aatgtggccaagactgtgaacatctcacccagtaacatcg

SEQ ID NO: 12031 - DNA, 40 bp, Artificial Sequence
  Description of Artificial Sequence: Synthetic primer
agaatctttacaatgtgtggtatggtaacattataattac

SEQ ID NO: 12032 - DNA, 40 bp, Artificial Sequence
  Description of Artificial Sequence: Synthetic primer
ataaagttccccagagtatacttcataagcatgtaatttg

SEQ ID NO: 12033 - DNA, 40 bp, Artificial Sequence
  Description of Artificial Sequence: Synthetic primer
agaggtctgattcacatacgaattcacattcccaagacac

SEQ ID NO: 12034 - DNA, 40 bp, Artificial Sequence
  Description of Artificial Sequence: Synthetic primer
tgacggtcttgtaagggtaactgccttctgctgttttgtc

SEQ ID NO: 12035 - DNA, 40 bp, Artificial Sequence
  Description of Artificial Sequence: Synthetic primer
attaaaatagccattttgagaggacacgtttttgattctt

SEQ ID NO: 12036 - DNA, 40 bp, Artificial Sequence
  Description of Artificial Sequence: Synthetic primer
cagttcagtatttctaagttgcataatgcctttactgacc

SEQ ID NO: 12037 - DNA, 40 bp, Artificial Sequence
  Description of Artificial Sequence: Synthetic primer
agggaatgtagccttcacagtactagctggtttttaattg

SEQ ID NO: 12038 - DNA, 40 bp, Artificial Sequence
  Description of Artificial Sequence: Synthetic primer
aggctcagctggctgagaaacccaggctgaaggaagaagg

SEQ ID NO: 12039 - DNA, 40 bp, Artificial Sequence
  Description of Artificial Sequence: Synthetic primer
tcactgttattaactgtgtttgtgtattatgttttatttt

SEQ ID NO: 12040 - DNA, 40 bp, Artificial Sequence
  Description of Artificial Sequence: Synthetic primer
ccctaagacaggtaatagagaaaatgtttccttgtgatag

SEQ ID NO: 12041 - DNA, 40 bp, Artificial Sequence
  Description of Artificial Sequence: Synthetic primer
gacaaggtgagcatctctggaaaccctggtccctccaagc

SEQ ID NO: 12042 - DNA, 40 bp, Artificial Sequence
  Description of Artificial Sequence: Synthetic primer
gcccctgccttcctccctgctggggcatccccggcctgtg

SEQ ID NO: 12043 - DNA, 40 bp, Artificial Sequence
  Description of Artificial Sequence: Synthetic primer
ctggcttttaaagggaaaggccttcatttcttcgtttatc

SEQ ID NO: 12044 - DNA, 40 bp, Artificial Sequence
  Description of Artificial Sequence: Synthetic primer
tttttttaaacactatctatggtaatactcaaaaacttac

SEQ ID NO: 12045 - DNA, 40 bp, Artificial Sequence
  Description of Artificial Sequence: Synthetic primer
ctggtgaatgcacgctgatgggaaaagcctccgccaggtc

SEQ ID NO: 12046 - DNA, 40 bp, Artificial Sequence
  Description of Artificial Sequence: Synthetic primer
ggaacctgtgctcactggagttttccttcctctcctgacc

SEQ ID NO: 12047 - DNA, 40 bp, Artificial Sequence
  Description of Artificial Sequence: Synthetic primer
ggcctgggcgatcccgtggaagtcgaacttgtaggcgtag

SEQ ID NO: 12048 - DNA, 40 bp, Artificial Sequence
  Description of Artificial Sequence: Synthetic primer
gtccatgggaagcgctacgcctacaagttcgacttccacg

SEQ ID NO: 12049 - DNA, 40 bp, Artificial Sequence
  Description of Artificial Sequence: Synthetic primer
gttcacctggtgatattttatcatttcctcctctttgctg

SEQ ID NO: 12050 - DNA, 40 bp, Artificial Sequence
  Description of Artificial Sequence: Synthetic primer
tcaaatcatcaaaccactcagccacagaaagtgtcataac

SEQ ID NO: 12051 - DNA, 40 bp, Artificial Sequence
  Description of Artificial Sequence: Synthetic primer
tcagcagcatttacaaaagtcagttatgtctctacactgg

SEQ ID NO: 12052 - DNA, 40 bp, Artificial Sequence
  Description of Artificial Sequence: Synthetic primer
gtgttattaacatgtgttctgtgatgggccttttctgtag

SEQ ID NO: 12053 - DNA, 40 bp, Artificial Sequence
  Description of Artificial Sequence: Synthetic primer
caacagctggagggcaggtggactgaggctggggagcccc

SEQ ID NO: 12054 - DNA, 40 bp, Artificial Sequence
  Description of Artificial Sequence: Synthetic primer
gaggcctgtaagatcccaggggatgtaatcattggagagg

SEQ ID NO: 12055 - DNA, 40 bp, Artificial Sequence
  Description of Artificial Sequence: Synthetic primer
cccattgtgactttccagctcatccctaaaggcagtattg

SEQ ID NO: 12056 - DNA, 40 bp, Artificial Sequence
  Description of Artificial Sequence: Synthetic primer
cctgttgattccctagaatctcctcacacgtatgtttccg

SEQ ID NO: 12057 - DNA, 40 bp, Artificial Sequence
  Description of Artificial Sequence: Synthetic primer
agacatggttcatataaataaataaatatgatcattagac

SEQ ID NO: 12058 - DNA, 40 bp, Artificial Sequence
  Description of Artificial Sequence: Synthetic primer
ttattttgtgaagtttgacattggttgtatctctgtcttc

SEQ ID NO: 12059 - DNA, 40 bp, Artificial Sequence
  Description of Artificial Sequence: Synthetic primer
aagtcattccaggatgaaatcagccctttgaatgtgtatc

SEQ ID NO: 12060 - DNA, 40 bp, Artificial Sequence
  Description of Artificial Sequence: Synthetic primer
cctgttggttctcttgttctaatatttgcaattctctttc

SEQ ID NO: 12061 - DNA, 40 bp, Artificial Sequence
  Description of Artificial Sequence: Synthetic primer
cacctcccttcagttgctactcacatttggtgtgcctgtc

SEQ ID NO: 12062 - DNA, 40 bp, Artificial Sequence
  Description of Artificial Sequence: Synthetic primer
tgcctccttctcctggttccttccttgactcgtctgtgcc

SEQ ID NO: 12063 - DNA, 40 bp, Artificial Sequence
  Description of Artificial Sequence: Synthetic primer
atgagaaggtctgtgctgggcttctcacataggggctttt

SEQ ID NO: 12064 - DNA, 40 bp, Artificial Sequence
  Description of Artificial Sequence: Synthetic primer
caacctgtccccaaatgtgagatacttactcaaccagagc

SEQ ID NO: 12065 - DNA, 40 bp, Artificial Sequence
  Description of Artificial Sequence: Synthetic primer
catcttcttgaaaacattatctcaagttaatactgaatgg

SEQ ID NO: 12066 - DNA, 40 bp, Artificial Sequence
  Description of Artificial Sequence: Synthetic primer
tgacatttctggaaatgtagcagaaaagaagaattcaagt

SEQ ID NO: 12067 - DNA, 40 bp, Artificial Sequence
  Description of Artificial Sequence: Synthetic primer
ggggagtagtaaatgatgcctggtgtattttgctctttcc

SEQ ID NO: 12068 - DNA, 40 bp, Artificial Sequence
  Description of Artificial Sequence: Synthetic primer
aagaccaagtaaatctcactattctcgccatgcgtgttcg

SEQ ID NO: 12069 - DNA, 40 bp, Artificial Sequence
  Description of Artificial Sequence: Synthetic primer
cccagagcccaccccaaacacatgcagtggggcctgctac

SEQ ID NO: 12070 - DNA, 40 bp, Artificial Sequence
  Description of Artificial Sequence: Synthetic primer
caaaggaagaagaatttaggttgtcaactgccatgtgttc

SEQ ID NO: 12071 - DNA, 40 bp, Artificial Sequence
  Description of Artificial Sequence: Synthetic primer
gggttccaggagagcgcaggtctgcagggcccagtggcct

SEQ ID NO: 12072 - DNA, 40 bp, Artificial Sequence
  Description of Artificial Sequence: Synthetic primer
cctggacccaaactacatgtcttaggctgctctcttactg

SEQ ID NO: 12073 - DNA, 40 bp, Artificial Sequence
  Description of Artificial Sequence: Synthetic primer
ggaggccgtcggggagggcccaggagagttgcggggattg

SEQ ID NO: 12074 - DNA, 40 bp, Artificial Sequence
  Description of Artificial Sequence: Synthetic primer
gtgggctggaggcaccggacggcgggtgcgaggccccccg

SEQ ID NO: 12075 - DNA, 40 bp, Artificial Sequence
  Description of Artificial Sequence: Synthetic primer
agttgcagtgggtggcatcgccctgctttcattctaagac

SEQ ID NO: 12076 - DNA, 40 bp, Artificial Sequence
  Description of Artificial Sequence: Synthetic primer
ctcaaaagttttgttgaaattaccttggttctggtgacag

SEQ ID NO: 12077 - DNA, 40 bp, Artificial Sequence
  Description of Artificial Sequence: Synthetic primer
tataacaatacctaaagtcatattttctcataataactaa

SEQ ID NO: 12078 - DNA, 40 bp, Artificial Sequence
  Description of Artificial Sequence: Synthetic primer
tttgttacttctagacagctaatcacatggctgtactcac

SEQ ID NO: 12079 - DNA, 40 bp, Artificial Sequence
  Description of Artificial Sequence: Synthetic primer
ctttactaagaatgatgatggtgataacattattttgcag

SEQ ID NO: 12080 - DNA, 40 bp, Artificial Sequence
  Description of Artificial Sequence: Synthetic primer
acatatgttgttaatatgcttaagtaagaattttttctcc

SEQ ID NO: 12081 - DNA, 40 bp, Artificial Sequence
  Description of Artificial Sequence: Synthetic primer
ggtggcagtgttcctatttcagccccactctgcttccccc

SEQ ID NO: 12082 - DNA, 40 bp, Artificial Sequence
  Description of Artificial Sequence: Synthetic primer
ctctgaataaccaagagaaggtttcaatgacggtgaaggc

SEQ ID NO: 12083 - DNA, 40 bp, Artificial Sequence
  Description of Artificial Sequence: Synthetic primer
ctgtccccactcttcaggcctggctgccggtccccatgcc

SEQ ID NO: 12084 - DNA, 40 bp, Artificial Sequence
  Description of Artificial Sequence: Synthetic primer
ctccttggcccagtggagggagggcagttgtaaccctgtg

SEQ ID NO: 12085 - DNA, 40 bp, Artificial Sequence
  Description of Artificial Sequence: Synthetic primer
aggagacatttttctagaggctaggatgctgagaactgac

SEQ ID NO: 12086 - DNA, 40 bp, Artificial Sequence
  Description of Artificial Sequence: Synthetic primer
tagcttgggaatgtgggtactgctaaacctatatccttcc

SEQ ID NO: 12087 - DNA, 40 bp, Artificial Sequence
  Description of Artificial Sequence: Synthetic primer
taatgtagttgggattgcgaacaactttttctttttcatc

SEQ ID NO: 12088 - DNA, 40 bp, Artificial Sequence
  Description of Artificial Sequence: Synthetic primer
caagctggtgcttttctttcttttaatctaaaactctctg

SEQ ID NO: 12089 - DNA, 40 bp, Artificial Sequence
  Description of Artificial Sequence: Synthetic primer
ttcctcaccggagccgggctccccatgcctcgctctgccc

SEQ ID NO: 12090 - DNA, 40 bp, Artificial Sequence
  Description of Artificial Sequence: Synthetic primer
cgagacaggggccacccagcccaggatccaagccgagaag

SEQ ID NO: 12091 - DNA, 40 bp, Artificial Sequence
  Description of Artificial Sequence: Synthetic primer
gatgggactttggagacctggggtcttcccaggaactttg

SEQ ID NO: 12092 - DNA, 40 bp, Artificial Sequence
  Description of Artificial Sequence: Synthetic primer
ggcaggaagagcaacaggaacttgggttcccgggtgacgg

SEQ ID NO: 12093 - DNA, 40 bp, Artificial Sequence
  Description of Artificial Sequence: Synthetic primer
ataacatgttttaatttctttctttattgaattgatctcg

SEQ ID NO: 12094 - DNA, 40 bp, Artificial Sequence
  Description of Artificial Sequence: Synthetic primer
aaacacaagagcatgccaccatactcctctctctactttg

SEQ ID NO: 12095 - DNA, 40 bp, Artificial Sequence
  Description of Artificial Sequence: Synthetic primer
taggttgacgtaaactcaaatgttaaaaacaaaaattatc

SEQ ID NO: 12096 - DNA, 40 bp, Artificial Sequence
  Description of Artificial Sequence: Synthetic primer
taatatgttaaattaggtattgtatactcttgtccttcag

SEQ ID NO: 12097 - DNA, 40 bp, Artificial Sequence
  Description of Artificial Sequence: Synthetic primer
attggggacatactgtttaacattaagaagtcatttaatc

SEQ ID NO: 12098 - DNA, 40 bp, Artificial Sequence
  Description of Artificial Sequence: Synthetic primer
ttgattttgaaaatccattaacactattttcctctttttt

SEQ ID NO: 12099 - DNA, 40 bp, Artificial Sequence
  Description of Artificial Sequence: Synthetic primer
tcccatcctgccaaagtttgtgattccacatttctcttcc

SEQ ID NO: 12100 - DNA, 40 bp, Artificial Sequence
  Description of Artificial Sequence: Synthetic primer
tcattagagcactctggagagagaacaaataaatggttac

SEQ ID NO: 12101 - DNA, 40 bp, Artificial Sequence
  Description of Artificial Sequence: Synthetic primer
tggactaatccatgcctccgtctgtgtctctatgattttc

SEQ ID NO: 12102 - DNA, 40 bp, Artificial Sequence
  Description of Artificial Sequence: Synthetic primer
gcacggcccgaggaggagaaccaggtgtccgagcactcac

SEQ ID NO: 12103 - DNA, 40 bp, Artificial Sequence
  Description of Artificial Sequence: Synthetic primer
ggagagaggccacgccttgtctcccctccgcccatctgac

SEQ ID NO: 12104 - DNA, 40 bp, Artificial Sequence
  Description of Artificial Sequence: Synthetic primer
tgctggcccagcccctcccactccgtcctgcccgtggtac

SEQ ID NO: 12105 - DNA, 40 bp, Artificial Sequence
  Description of Artificial Sequence: Synthetic primer
aaagacactaatccattcagaaagtaaaagtaatgtcttg

SEQ ID NO: 12106 - DNA, 40 bp, Artificial Sequence
  Description of Artificial Sequence: Synthetic primer
ttagctacaagttatggactgaatagcatctctctgtgcc

SEQ ID NO: 12107 - DNA, 40 bp, Artificial Sequence
  Description of Artificial Sequence: Synthetic primer
ttatgtttaccaaaaatgtttgagtgagtcttctctttgt

SEQ ID NO: 12108 - DNA, 40 bp, Artificial Sequence
  Description of Artificial Sequence: Synthetic primer
aaaacctttggaagtgtaagttttacaatgtactaagtac

SEQ ID NO: 12109 - DNA, 40 bp, Artificial Sequence
  Description of Artificial Sequence: Synthetic primer
attggctgttaaacgtggaaactttttaacatgctttgtc

SEQ ID NO: 12110 - DNA, 40 bp, Artificial Sequence
  Description of Artificial Sequence: Synthetic primer
aaaaatattctatgtatatttttcctctccatatggacac

SEQ ID NO: 12111 - DNA, 40 bp, Artificial Sequence
  Description of Artificial Sequence: Synthetic primer
tcccttgatgaacctgatttgtaatgcctgtcgcctcttc

SEQ ID NO: 12112 - DNA, 40 bp, Artificial Sequence
  Description of Artificial Sequence: Synthetic primer
tgcccctgcacgtctctcccaccgggtctgcctagtccag

SEQ ID NO: 12113 - DNA, 40 bp, Artificial Sequence
  Description of Artificial Sequence: Synthetic primer
cccatttttcattcacttcaccccagcccgtctttccttc

SEQ ID NO: 12114 - DNA, 40 bp, Artificial Sequence
  Description of Artificial Sequence: Synthetic primer
gctcccaagaactgggctcttccttgcctcttctcatcac

SEQ ID NO: 12115 - DNA, 40 bp, Artificial Sequence
  Description of Artificial Sequence: Synthetic primer
ggaatttattggtgattcagttattttccccattctactc

SEQ ID NO: 12116 - DNA, 40 bp, Artificial Sequence
  Description of Artificial Sequence: Synthetic primer
aatctgatccacaatgtttaaaactgtattgttattgttc

SEQ ID NO: 12117 - DNA, 40 bp, Artificial Sequence
  Description of Artificial Sequence: Synthetic primer
tgtcgcctaagtggttccgggttggtggatgaccttgagc

SEQ ID NO: 12118 - DNA, 40 bp, Artificial Sequence
  Description of Artificial Sequence: Synthetic primer
tccatccccttccctggctggaggctacgctaagcacctc

SEQ ID NO: 12119 - DNA, 40 bp, Artificial Sequence
  Description of Artificial Sequence: Synthetic primer
acaatttaacaaataaacgcgaagctaagcctaagaaaaa

SEQ ID NO: 12120 - DNA, 40 bp, Artificial Sequence
  Description of Artificial Sequence: Synthetic primer
atggtgtgtagtcatttaccttggtcctgataactaatag

SEQ ID NO: 12121 - DNA, 40 bp, Artificial Sequence
  Description of Artificial Sequence: Synthetic primer
atttactgtgtcttttaaatttgactgtaaacactgcttg

SEQ ID NO: 12122 - DNA, 40 bp, Artificial Sequence
  Description of Artificial Sequence: Synthetic primer
tcttaaagcaacaaggctcctgttagagaggcttactcac

SEQ ID NO: 12123 - DNA, 40 bp, Artificial Sequence
  Description of Artificial Sequence: Synthetic primer
tgcttagtaatgtagcatgtcccttctagcaaaacagtgg

SEQ ID NO: 12124 - DNA, 40 bp, Artificial Sequence
  Description of Artificial Sequence: Synthetic primer
taaaatcactgaaatcacctaagtcacaagaaaggcagtc

SEQ ID NO: 12125 - DNA, 40 bp, Artificial Sequence
  Description of Artificial Sequence: Synthetic primer
tgaagaatgactttttctttaccacatctgtgactgttgc

SEQ ID NO: 12126 - DNA, 40 bp, Artificial Sequence
  Description of Artificial Sequence: Synthetic primer
tcaggatcttagagaattaatgcaatttttaaatatgttg

SEQ ID NO: 12127 - DNA, 40 bp, Artificial Sequence
  Description of Artificial Sequence: Synthetic primer
atgtgggaagtcttatgagtagaaatctgtcattcaagtg

SEQ ID NO: 12128 - DNA, 40 bp, Artificial Sequence
  Description of Artificial Sequence: Synthetic primer
tataagatacctttaaagagtttgctttccctgatgtttc

SEQ ID NO: 12129 - DNA, 40 bp, Artificial Sequence
  Description of Artificial Sequence: Synthetic primer
gaacccagttggatctgagtgtcccagtaaggcagatgtc

SEQ ID NO: 12130 - DNA, 40 bp, Artificial Sequence
  Description of Artificial Sequence: Synthetic primer
tgttttttgcttgacacatttagaattggttgtcaggatt

SEQ ID NO: 12131 - DNA, 40 bp, Artificial Sequence
  Description of Artificial Sequence: Synthetic primer
cacccaagaacaaaatttgactttgaaaatggaaaccaag

SEQ ID NO: 12132 - DNA, 40 bp, Artificial Sequence
  Description of Artificial Sequence: Synthetic primer
ttgaggactttatagtggatgacgtggatgttgcatttgc

SEQ ID NO: 12133 - DNA, 40 bp, Artificial Sequence
  Description of Artificial Sequence: Synthetic primer
ggtttatgtttttgaatatatatagaggttgaaaaaaaac

SEQ ID NO: 12134 - DNA, 40 bp, Artificial Sequence
  Description of Artificial Sequence: Synthetic primer
tccctagctctgaaggttataggtcaatggaagaaggtac

SEQ ID NO: 12135 - DNA, 40 bp, Artificial Sequence
  Description of Artificial Sequence: Synthetic primer
agtattcaacgagtttctgaaattgcattttgttttcttg

SEQ ID NO: 12136 - DNA, 40 bp, Artificial Sequence
  Description of Artificial Sequence: Synthetic primer
aaaaaaaaactcacgcgacagtaatctgttaagccattta

SEQ ID NO: 12137 - DNA, 40 bp, Artificial Sequence
  Description of Artificial Sequence: Synthetic primer
ctcggtgagcacaagctctttgcaccgacaaggaaaagtc

SEQ ID NO: 12138 - DNA, 40 bp, Artificial Sequence
  Description of Artificial Sequence: Synthetic primer
agatttttcactatttgttgcagtgaaaagataaaactgg

SEQ ID NO: 12139 - DNA, 40 bp, Artificial Sequence
  Description of Artificial Sequence: Synthetic primer
ccagactgaagatggcaggggaatcagggacaatctctgg

SEQ ID NO: 12140 - DNA, 40 bp, Artificial Sequence
  Description of Artificial Sequence: Synthetic primer
tggagtggggtgatctctgagttgggattttatttggagg

SEQ ID NO: 12141 - DNA, 40 bp, Artificial Sequence
  Description of Artificial Sequence: Synthetic primer
gcaatgtggctttaagtagaattgactgttttcgtttgtg

SEQ ID NO: 12142 - DNA, 40 bp, Artificial Sequence
  Description of Artificial Sequence: Synthetic primer
taaaagataaaacataaaccttcaacgcattactaaaaaa

SEQ ID NO: 12143 - DNA, 40 bp, Artificial Sequence
  Description of Artificial Sequence: Synthetic primer
ctgtttttttgtccagtagttgtagataatggtttctttc

SEQ ID NO: 12144 - DNA, 40 bp, Artificial Sequence
  Description of Artificial Sequence: Synthetic primer
gcaaggtccatttcttacctgatattactttcattctcag

SEQ ID NO: 12145 - DNA, 40 bp, Artificial Sequence
  Description of Artificial Sequence: Synthetic primer
ctcaagaatgagaacagactggggtgaaacgaaccactac

SEQ ID NO: 12146 - DNA, 40 bp, Artificial Sequence
  Description of Artificial Sequence: Synthetic primer
ggaggcttttgcatctggcgggagttaatctgatgtcttc

SEQ ID NO: 12147 - DNA, 40 bp, Artificial Sequence
  Description of Artificial Sequence: Synthetic primer
cggggtcagctccagcacttgccctcgtgtggtcctgagc

SEQ ID NO: 12148 - DNA, 40 bp, Artificial Sequence
  Description of Artificial Sequence: Synthetic primer
cgacaccacccctggtccctggctctgccccacccggtac

SEQ ID NO: 12149 - DNA, 40 bp, Artificial Sequence
  Description of Artificial Sequence: Synthetic primer
atgtatttgttgtagatgagttgaacctctgttttgattt

SEQ ID NO: 12150 - DNA, 40 bp, Artificial Sequence
  Description of Artificial Sequence: Synthetic primer
gttgctaaaaattatatttctgccttgcttttcattattg

SEQ ID NO: 12151 - DNA, 40 bp, Artificial Sequence
  Description of Artificial Sequence: Synthetic primer
atgataaaagcattaaaacaaggaaagcaaagtggaaaac

SEQ ID NO: 12152 - DNA, 40 bp, Artificial Sequence
  Description of Artificial Sequence: Synthetic primer
acaaacctcttccatcaaatgttcacagaaaaagtgacag

SEQ ID NO: 12153 - DNA, 40 bp, Artificial Sequence
  Description of Artificial Sequence: Synthetic primer
ggctggggtcagagttgagatgggatagtcacgaagtctg

SEQ ID NO: 12154 - DNA, 40 bp, Artificial Sequence
  Description of Artificial Sequence: Synthetic primer
ggccgaccctaaggggtgggcaagaggacttcctgccttc

SEQ ID NO: 12155 - DNA, 40 bp, Artificial Sequence
  Description of Artificial Sequence: Synthetic primer
gtgcctgtgtacagcactctctacaatgagaaactgatac

SEQ ID NO: 12156 - DNA, 40 bp, Artificial Sequence
  Description of Artificial Sequence: Synthetic primer
cgaagctacagaaaatcaaaactctgtgtcagtatttctc

SEQ ID NO: 12157 - DNA, 40 bp, Artificial Sequence
  Description of Artificial Sequence: Synthetic primer
tgagtttattcttgtaatggccttcagtgatcaaaatctc

SEQ ID NO: 12158 - DNA, 40 bp, Artificial Sequence
  Description of Artificial Sequence: Synthetic primer
cccgaggccacgctagccgtgccgacgtacctgccatacc

SEQ ID NO: 12159 - DNA, 40 bp, Artificial Sequence
  Description of Artificial Sequence: Synthetic primer
gttcactagatgggatcctagtttggagtctgatctctgg

SEQ ID NO: 12160 - DNA, 40 bp, Artificial Sequence
  Description of Artificial Sequence: Synthetic primer
tatgtataggtagaagaacaaagtgaagtaacagcacagg

SEQ ID NO: 12161 - DNA, 40 bp, Artificial Sequence
  Description of Artificial Sequence: Synthetic primer
tgctgagtgacactcaagtaactggtggtttttcctgtgc

SEQ ID NO: 12162 - DNA, 40 bp, Artificial Sequence
  Description of Artificial Sequence: Synthetic primer
tctcttttgttgttatagcattgctcatgctctctcttgg

SEQ ID NO: 12163 - DNA, 40 bp, Artificial Sequence
  Description of Artificial Sequence: Synthetic primer
atttgtttaaactatgacagcattatttcttgttcccttg

SEQ ID NO: 12164 - DNA, 40 bp, Artificial Sequence
  Description of Artificial Sequence: Synthetic primer
cacacatgcatgtaccgaaatgcttagtatctgcttgatc

SEQ ID NO: 12165 - DNA, 40 bp, Artificial Sequence
  Description of Artificial Sequence: Synthetic primer
cccgcttcgttcccaggtgcccgggcagccttcggctctc

SEQ ID NO: 12166 - DNA, 40 bp, Artificial Sequence
  Description of Artificial Sequence: Synthetic primer
agttaattcccagctgacggggccctgcctgatttctcag

SEQ ID NO: 12167 - DNA, 40 bp, Artificial Sequence
  Description of Artificial Sequence: Synthetic primer
tgggcgggccagggcagcccctcactgccattgcctgctc

SEQ ID NO: 12168 - DNA, 40 bp, Artificial Sequence
  Description of Artificial Sequence: Synthetic primer
cgggcagggacatcatttggtttcctggtgctgtcagtcc

SEQ ID NO: 12169 - DNA, 40 bp, Artificial Sequence
  Description of Artificial Sequence: Synthetic primer
agaagagccactaccagccccgggtcccatgcctctgctg

SEQ ID NO: 12170 - DNA, 40 bp, Artificial Sequence
  Description of Artificial Sequence: Synthetic primer
ggactgagtgactgaccctggggtgttggattccatctgg

SEQ ID NO: 12171 - DNA, 40 bp, Artificial Sequence
  Description of Artificial Sequence: Synthetic primer
agggtaaaactctaatcattgctccttgtttccctttttc

SEQ ID NO: 12172 - DNA, 40 bp, Artificial Sequence
  Description of Artificial Sequence: Synthetic primer
atttcaaaatatttgcatgaggtgaataaagaggacaccc

SEQ ID NO: 12173 - DNA, 40 bp, Artificial Sequence
  Description of Artificial Sequence: Synthetic primer
gggtgggcatgggaactcaagtgtgggcctgagccctgtg

SEQ ID NO: 12174 - DNA, 40 bp, Artificial Sequence
  Description of Artificial Sequence: Synthetic primer
aggcccatgctgagctccacacccacagtccccgtttccc

SEQ ID NO: 12175 - DNA, 40 bp, Artificial Sequence
  Description of Artificial Sequence: Synthetic primer
cccgactgcctggcagatgtggccgatgcccccacagacc

SEQ ID NO: 12176 - DNA, 40 bp, Artificial Sequence
  Description of Artificial Sequence: Synthetic primer
gcagagcaagaccagcagtagcaggcactgtggggcggcc

SEQ ID NO: 12177 - DNA, 40 bp, Artificial Sequence
  Description of Artificial Sequence: Synthetic primer
aactgctatttttgaatatttcttctttctgtctcacttg

SEQ ID NO: 12178 - DNA, 40 bp, Artificial Sequence
  Description of Artificial Sequence: Synthetic primer
ctaggctcagataatagatatttgcccaagatcacaaagc

SEQ ID NO: 12179 - DNA, 40 bp, Artificial Sequence
  Description of Artificial Sequence: Synthetic primer
tcccagttaaccaaggcataagctgcaaggcaaaagaagg

SEQ ID NO: 12180 - DNA, 40 bp, Artificial Sequence
  Description of Artificial Sequence: Synthetic primer
ctatggcccattagactgtctttcacagataatacttttg

SEQ ID NO: 12181 - DNA, 40 bp, Artificial Sequence
  Description of Artificial Sequence: Synthetic primer
gtgccactgctgacacccagtggaccaagggctggggctc

SEQ ID NO: 12182 - DNA, 40 bp, Artificial Sequence
  Description of Artificial Sequence: Synthetic primer
caggtgcctggtcctgacctctctccccttcatcctccag

SEQ ID NO: 12183 - DNA, 40 bp, Artificial Sequence
  Description of Artificial Sequence: Synthetic primer
ctcacaaaccgtgcaaattcaatttgaaatgttcatctgg

SEQ ID NO: 12184 - DNA, 40 bp, Artificial Sequence
  Description of Artificial Sequence: Synthetic primer
tattttgatctgcctttaacaaatgttttctcattatttc

SEQ ID NO: 12185 - DNA, 40 bp, Artificial Sequence
  Description of Artificial Sequence: Synthetic primer
tggctgctggccgggtcacgtgctggccacatctgtctgc

SEQ ID NO: 12186 - DNA, 40 bp, Artificial Sequence
  Description of Artificial Sequence: Synthetic primer
tgggtcgtttcttccctctgtctgtggaggtgactcctgc

SEQ ID NO: 12187 - DNA, 40 bp, Artificial Sequence
  Description of Artificial Sequence: Synthetic primer
gggtccctgagcctgtccccagtcctgccacgcctatgac

SEQ ID NO: 12188 - DNA, 40 bp, Artificial Sequence
  Description of Artificial Sequence: Synthetic primer
agacattgttttaaaattgctagtttgttgcattcctttc

SEQ ID NO: 12189 - DNA, 40 bp, Artificial Sequence
  Description of Artificial Sequence: Synthetic primer
gcggcggcggcggcggggcctggagccggatctaagatgg

SEQ ID NO: 12190 - DNA, 40 bp, Artificial Sequence
  Description of Artificial Sequence: Synthetic primer
tcgtgagcagccccggccctgcgcctgccccggggccccg

SEQ ID NO: 12191 - DNA, 40 bp, Artificial Sequence
  Description of Artificial Sequence: Synthetic primer
gaaagtcctctgtatgagccaataaaaagaacttcatcac

SEQ ID NO: 12192 - DNA, 40 bp, Artificial Sequence
  Description of Artificial Sequence: Synthetic primer
caattttctctagctgcctgatgtcaactgcttagtaatc

SEQ ID NO: 12193 - DNA, 40 bp, Artificial Sequence
  Description of Artificial Sequence: Synthetic primer
agaggtgggtagaactttttcattaacaatggacttgatg

SEQ ID NO: 12194 - DNA, 40 bp, Artificial Sequence
  Description of Artificial Sequence: Synthetic primer
tgccttttacgtgaggactcacagatgtgaatataaactg

SEQ ID NO: 12195 - DNA, 40 bp, Artificial Sequence
  Description of Artificial Sequence: Synthetic primer
atgtctttccttctgctagaaagtcattgttgctgttatc

SEQ ID NO: 12196 - DNA, 40 bp, Artificial Sequence
  Description of Artificial Sequence: Synthetic primer
ccacctcttcaaagtcatcatgcctccctcatctagacac

SEQ ID NO: 12197 - DNA, 40 bp, Artificial Sequence
  Description of Artificial Sequence: Synthetic primer
taactttatacaaaaccaatgactcctgtaataataaaac

SEQ ID NO: 12198 - DNA, 40 bp, Artificial Sequence
  Description of Artificial Sequence: Synthetic primer
aaatgacaagaataagcaatttctgagaattttggatatg

SEQ ID NO: 12199 - DNA, 40 bp, Artificial Sequence
  Description of Artificial Sequence: Synthetic primer
cctgttatacccagttgagcttgtttgtttcttcacagac

SEQ ID NO: 12200 - DNA, 40 bp, Artificial Sequence
  Description of Artificial Sequence: Synthetic primer
gtttgaatgaagaagcaaattcaaaacagtaaacatttcc

SEQ ID NO: 12201 - DNA, 40 bp, Artificial Sequence
  Description of Artificial Sequence: Synthetic primer
gcagcccagtgcagtggctgatggcttcccgccctctttc

SEQ ID NO: 12202 - DNA, 40 bp, Artificial Sequence
  Description of Artificial Sequence: Synthetic primer
cccaccgctcacccttcagctgctccagcacctccgtctg

SEQ ID NO: 12203 - DNA, 40 bp, Artificial Sequence
  Description of Artificial Sequence: Synthetic primer
tctctgcttccatttacctcctcccaagatgtaagcacac

SEQ ID NO: 12204 - DNA, 40 bp, Artificial Sequence
  Description of Artificial Sequence: Synthetic primer
taaaaatgtgattttactatgggttttactccttttcttc

SEQ ID NO: 12205 - DNA, 40 bp, Artificial Sequence
  Description of Artificial Sequence: Synthetic primer
atggcctcccaggggtcttgccctgaccaggttctgtttc

SEQ ID NO: 12206 - DNA, 40 bp, Artificial Sequence
  Description of Artificial Sequence: Synthetic primer
gggcccagggaaaaccccacctccccactccaaaccaaac

SEQ ID NO: 12207 - DNA, 40 bp, Artificial Sequence
  Description of Artificial Sequence: Synthetic primer
gtgggctcagcacccacacaactgcacaagcccacctttc

SEQ ID NO: 12208 - DNA, 40 bp, Artificial Sequence
  Description of Artificial Sequence: Synthetic primer
ctgggaagccctccctgcctccctccagacggtcactcac

SEQ ID NO: 12209 - DNA, 40 bp, Artificial Sequence
  Description of Artificial Sequence: Synthetic primer
ttaaaaaagggagctgtccttaaaattctccaagtaatag

SEQ ID NO: 12210 - DNA, 40 bp, Artificial Sequence
  Description of Artificial Sequence: Synthetic primer
cagtcacagacctgcataattatttgtgtagtatttctcc

SEQ ID NO: 12211 - DNA, 40 bp, Artificial Sequence
  Description of Artificial Sequence: Synthetic primer
tgagattccccagaggccccaagaccttggccccaggaac

SEQ ID NO: 12212 - DNA, 40 bp, Artificial Sequence
  Description of Artificial Sequence: Synthetic primer
cctgccctctccctgtctttgggactgtggttcttcctcc

SEQ ID NO: 12213 - DNA, 40 bp, Artificial Sequence
  Description of Artificial Sequence: Synthetic primer
gcccgttagaaaaagggacttgaaagtttaggaagcaatg

SEQ ID NO: 12214 - DNA, 40 bp, Artificial Sequence
  Description of Artificial Sequence: Synthetic primer
cataaactagaaattaaatatatcagtatagtggtcttct

SEQ ID NO: 12215 - DNA, 40 bp, Artificial Sequence
  Description of Artificial Sequence: Synthetic primer
acacctcccctcttggaacccacagaaaccagccccactg

SEQ ID NO: 12216 - DNA, 40 bp, Artificial Sequence
  Description of Artificial Sequence: Synthetic primer
gcagttgctgctgcctcgcttatcgtgacctctgttgctc

SEQ ID NO: 12217 - DNA, 40 bp, Artificial Sequence
  Description of Artificial Sequence: Synthetic primer
agctgcatctccaagaaactgaccctgagcttgtcttctc

SEQ ID NO: 12218 - DNA, 40 bp, Artificial Sequence
  Description of Artificial Sequence: Synthetic primer
aaatgtcagtgcttaacacttttctcccacttcatttttg

SEQ ID NO: 12219 - DNA, 40 bp, Artificial Sequence
  Description of Artificial Sequence: Synthetic primer
ttggccaccaggatcttggcatgtcaaccctgtgttcttc

SEQ ID NO: 12220 - DNA, 40 bp, Artificial Sequence
  Description of Artificial Sequence: Synthetic primer
agttacaacctcagacaagaaatcccaccaaatcacaagg

SEQ ID NO: 12221 - DNA, 40 bp, Artificial Sequence
  Description of Artificial Sequence: Synthetic primer
ggatgggttgagtatggatgctcccttctctgtctctaac

SEQ ID NO: 12222 - DNA, 40 bp, Artificial Sequence
  Description of Artificial Sequence: Synthetic primer
cacctggccctcctgccacacgtacaccatggggactcac

SEQ ID NO: 12223 - DNA, 40 bp, Artificial Sequence
  Description of Artificial Sequence: Synthetic primer
ttcgagagagaggagagaagacgcgactgtggaagaagag

SEQ ID NO: 12224 - DNA, 40 bp, Artificial Sequence
  Description of Artificial Sequence: Synthetic primer
ctggaaaattccagcttggaagagggcagtctgctctgcc

SEQ ID NO: 12225 - DNA, 40 bp, Artificial Sequence
  Description of Artificial Sequence: Synthetic primer
ggttttccagcactctgacatatggccatttctgttttcc

SEQ ID NO: 12226 - DNA, 40 bp, Artificial Sequence
  Description of Artificial Sequence: Synthetic primer
gtccttcccctctgcattataagcagtgccaaaaataatc

SEQ ID NO: 12227 - DNA, 40 bp, Artificial Sequence
  Description of Artificial Sequence: Synthetic primer
ctcttctgatacataaccccacggggttctcttgctggag

SEQ ID NO: 12228 - DNA, 40 bp, Artificial Sequence
  Description of Artificial Sequence: Synthetic primer
tgtggaacctcctcccttgaggacctcctgatcctctgtc

SEQ ID NO: 12229 - DNA, 40 bp, Artificial Sequence
  Description of Artificial Sequence: Synthetic primer
gggcttgagttcaggtccggacaggcctggggagggcaag

SEQ ID NO: 12230 - DNA, 40 bp, Artificial Sequence
  Description of Artificial Sequence: Synthetic primer
tgcaatggtcctggggccagccagagggcacagtggtgac

SEQ ID NO: 12231 - DNA, 40 bp, Artificial Sequence
  Description of Artificial Sequence: Synthetic primer
atttaatttcgaaaatgtgttgaagccagtggatgcagag

SEQ ID NO: 12232 - DNA, 40 bp, Artificial Sequence
  Description of Artificial Sequence: Synthetic primer
cttcatccattggaaaattttgttcatttctaatgttttg

SEQ ID NO: 12233 - DNA, 40 bp, Artificial Sequence
  Description of Artificial Sequence: Synthetic primer
tcagatatgctgtataagattctgagataccagaggtcac

SEQ ID NO: 12234 - DNA, 40 bp, Artificial Sequence
  Description of Artificial Sequence: Synthetic primer
cgagttaatttttttaaactaatgtttaatttcctttttc

SEQ ID NO: 12235 - DNA, 40 bp, Artificial Sequence
  Description of Artificial Sequence: Synthetic primer
gcagaaatggctagaggaagacagtattacaaattttgac

SEQ ID NO: 12236 - DNA, 40 bp, Artificial Sequence
  Description of Artificial Sequence: Synthetic primer
ttcatattctccacttacaaactcatatttgacctaacag

SEQ ID NO: 12237 - DNA, 40 bp, Artificial Sequence
  Description of Artificial Sequence: Synthetic primer
gtacttaattgatgaatatccaataaatataacccttggt

SEQ ID NO: 12238 - DNA, 40 bp, Artificial Sequence
  Description of Artificial Sequence: Synthetic primer
aaatacagttttcactgaggctctaaaagactggcattat

SEQ ID NO: 12239 - DNA, 40 bp, Artificial Sequence
  Description of Artificial Sequence: Synthetic primer
ggggtggggaaattggagcaggtgtgtctctccacctaaa

SEQ ID NO: 12240 - DNA, 40 bp, Artificial Sequence
  Description of Artificial Sequence: Synthetic primer
accttggtctgattaatattttccagaaactagaggttag

SEQ ID NO: 12241 - DNA, 40 bp, Artificial Sequence
  Description of Artificial Sequence: Synthetic primer
tcttcctgtcaggaattcccctatgaaagccagagcacat

SEQ ID NO: 12242 - DNA, 40 bp, Artificial Sequence
  Description of Artificial Sequence: Synthetic primer
aagctgaggcctgagttggttttcatggacagtagatgtc

SEQ ID NO: 12243 - DNA, 40 bp, Artificial Sequence
  Description of Artificial Sequence: Synthetic primer
tgcccctctagccagtcccaccagccctcccccacgcaga

SEQ ID NO: 12244 - DNA, 40 bp, Artificial Sequence
  Description of Artificial Sequence: Synthetic primer
tatttattggtgtttatttattctttaaccttccactccc

SEQ ID NO: 12245 - DNA, 40 bp, Artificial Sequence
  Description of Artificial Sequence: Synthetic primer
gttcacaactggaaatgagtccttcctgctgtccctgcac

SEQ ID NO: 12246 - DNA, 40 bp, Artificial Sequence
  Description of Artificial Sequence: Synthetic primer
tcacgctgatgtcggcggacaggaggggcttgcaaaatac

SEQ ID NO: 12247 - DNA, 40 bp, Artificial Sequence
  Description of Artificial Sequence: Synthetic primer
ggtgccccggaagggaaaagccagaggcaggtgtgaggtc

SEQ ID NO: 12248 - DNA, 40 bp, Artificial Sequence
  Description of Artificial Sequence: Synthetic primer
gcagggttggcgtctctctgacattgttttctctccttgc

SEQ ID NO: 12249 - DNA, 40 bp, Artificial Sequence
  Description of Artificial Sequence: Synthetic primer
tagatagtacgtttgtatttgaactatttggaagctgacc

SEQ ID NO: 12250 - DNA, 40 bp, Artificial Sequence
  Description of Artificial Sequence: Synthetic primer
aacagcaagatatttatcatttaactcatgtacaagtaag

SEQ ID NO: 12251 - DNA, 40 bp, Artificial Sequence
  Description of Artificial Sequence: Synthetic primer
ctatatttggaaaattattctaagaagaaaatgaagtaac

SEQ ID NO: 12252 - DNA, 40 bp, Artificial Sequence
  Description of Artificial Sequence: Synthetic primer
gccttaaaaacatttctccaatgtttatttttttaaaaca

SEQ ID NO: 12253 - DNA, 40 bp, Artificial Sequence
  Description of Artificial Sequence: Synthetic primer
gtgtataataaaatgagaagttctatatgggtttcattac

SEQ ID NO: 12254 - DNA, 40 bp, Artificial Sequence
  Description of Artificial Sequence: Synthetic primer
tagtggtatacaggggaccccacagtgtacaaagccacag

SEQ ID NO: 12255 - DNA, 40 bp, Artificial Sequence
  Description of Artificial Sequence: Synthetic primer
acgggccggcctctcccgtgcctagtgggtcccttcttac

SEQ ID NO: 12256 - DNA, 40 bp, Artificial Sequence
  Description of Artificial Sequence: Synthetic primer
caagcaatccccagaaaacattaacttattagatttatac

SEQ ID NO: 12257 - DNA, 40 bp, Artificial Sequence
  Description of Artificial Sequence: Synthetic primer
tttaactgaaatgtggaataaacatatttgtaaattttac

SEQ ID NO: 12258 - DNA, 40 bp, Artificial Sequence
  Description of Artificial Sequence: Synthetic primer
ctcggccactggctggggtggtagagacagcaaggctcag

SEQ ID NO: 12259 - DNA, 40 bp, Artificial Sequence
  Description of Artificial Sequence: Synthetic primer
cggagctcctccagtcttccctgtgacccctgactcctgc

SEQ ID NO: 12260 - DNA, 40 bp, Artificial Sequence
  Description of Artificial Sequence: Synthetic primer
atagttagcactcagtagatatttggtgtatggtgttcat

SEQ ID NO: 12261 - DNA, 40 bp, Artificial Sequence
  Description of Artificial Sequence: Synthetic primer
ccagctaagactggcctgtacagaaggtaagggagtcaac

SEQ ID NO: 12262 - DNA, 40 bp, Artificial Sequence
  Description of Artificial Sequence: Synthetic primer
gagtaagactgtgtcttatgctttcctttatccctctgta

SEQ ID NO: 12263 - DNA, 40 bp, Artificial Sequence
  Description of Artificial Sequence: Synthetic primer
cgggcagtggcacttgtgggtgccggctgcctccccttcc

SEQ ID NO: 12264 - DNA, 40 bp, Artificial Sequence
  Description of Artificial Sequence: Synthetic primer
catggagctgaagaccgagccctttgatgacttcctgttc

SEQ ID NO: 12265 - DNA, 40 bp, Artificial Sequence
  Description of Artificial Sequence: Synthetic primer
cggagcgggctgtctcagagccactgggcctggatgatgc

SEQ ID NO: 12266 - DNA, 40 bp, Artificial Sequence
  Description of Artificial Sequence: Synthetic primer
aaaaaaatcctgcttctttacaggttattggaaggatgtg

SEQ ID NO: 12267 - DNA, 40 bp, Artificial Sequence
  Description of Artificial Sequence: Synthetic primer
gatcaggtgaagtaaaatggagaaaggaactggtaaacac

SEQ ID NO: 12268 - DNA, 40 bp, Artificial Sequence
  Description of Artificial Sequence: Synthetic primer
ctgaattgataatacgttttccacctttcttttcacttac

SEQ ID NO: 12269 - DNA, 40 bp, Artificial Sequence
  Description of Artificial Sequence: Synthetic primer
aattggttttgaagagttcaggcattaggcatcaataggg

SEQ ID NO: 12270 - DNA, 40 bp, Artificial Sequence
  Description of Artificial Sequence: Synthetic primer
aagaagaataattctgtcttccctcttgaatttctcttcc

SEQ ID NO: 12271 - DNA, 40 bp, Artificial Sequence
  Description of Artificial Sequence: Synthetic primer
actttatgaaaactattgtttgtctacataactgaagagc

SEQ ID NO: 12272 - DNA, 40 bp, Artificial Sequence
  Description of Artificial Sequence: Synthetic primer
tttttgtttatttgcataaatctaatagttcttttcttac

SEQ ID NO: 12273 - DNA, 40 bp, Artificial Sequence
  Description of Artificial Sequence: Synthetic primer
gaatatcacacttctaaaaggtacgtatgtttaatccaaa

SEQ ID NO: 12274 - DNA, 40 bp, Artificial Sequence
  Description of Artificial Sequence: Synthetic primer
ttgctttcaaatatgaaaataacggtcaaaattctagaag

SEQ ID NO: 12275 - DNA, 40 bp, Artificial Sequence
  Description of Artificial Sequence: Synthetic primer
atgcctgtcagaatttggcctctgagcttaattgaatgtg

SEQ ID NO: 12276 - DNA, 40 bp, Artificial Sequence
  Description of Artificial Sequence: Synthetic primer
taacttgcttatttagcaaactttttctttggattctttg

SEQ ID NO: 12277 - DNA, 40 bp, Artificial Sequence
  Description of Artificial Sequence: Synthetic primer
atgtgcatgtgtgtgcttaattaaatgaaaaataaaatcg

SEQ ID NO: 12278 - DNA, 40 bp, Artificial Sequence
  Description of Artificial Sequence: Synthetic primer
tagggttgatacctccaggcctgacttccttctctacctg

SEQ ID NO: 12279 - DNA, 40 bp, Artificial Sequence
  Description of Artificial Sequence: Synthetic primer
tgtgcatgctggtctgtgctcaccctgccaccccaccacc

SEQ ID NO: 12280 - DNA, 40 bp, Artificial Sequence
  Description of Artificial Sequence: Synthetic primer
tgaactactgatgagaaatgctccagagtgggtactgacc

SEQ ID NO: 12281 - DNA, 40 bp, Artificial Sequence
  Description of Artificial Sequence: Synthetic primer
tctagcctttaatattctggctaactgtctgatcattttc

SEQ ID NO: 12282 - DNA, 40 bp, Artificial Sequence
  Description of Artificial Sequence: Synthetic primer
atagccctgtcacagataatattatattaaatttcactcc

SEQ ID NO: 12283 - DNA, 40 bp, Artificial Sequence
  Description of Artificial Sequence: Synthetic primer
taaaattattaggttgaactaaaacgacaatacaatgacc

SEQ ID NO: 12284 - DNA, 40 bp, Artificial Sequence
  Description of Artificial Sequence: Synthetic primer
actaattaggtttcttgttttattttagcgaagaatagcc

SEQ ID NO: 12285 - DNA, 40 bp, Artificial Sequence
  Description of Artificial Sequence: Synthetic primer
tcttttctcagaataactacctatttttatacccacaaac

SEQ ID NO: 12286 - DNA, 40 bp, Artificial Sequence
  Description of Artificial Sequence: Synthetic primer
accaagcccaccccaccccaggagggcaagaccccatttg

SEQ ID NO: 12287 - DNA, 40 bp, Artificial Sequence
  Description of Artificial Sequence: Synthetic primer
cagctctgcctaggagctcagcagacagcagggcctgagc

SEQ ID NO: 12288 - DNA, 40 bp, Artificial Sequence
  Description of Artificial Sequence: Synthetic primer
gaaataaagaatgacataaaaactttaagattgtgaataa

SEQ ID NO: 12289 - DNA, 40 bp, Artificial Sequence
  Description of Artificial Sequence: Synthetic primer
aatgtcagcctctactagtcgtacagttctctcttatttg

SEQ ID NO: 12290 - DNA, 40 bp, Artificial Sequence
  Description of Artificial Sequence: Synthetic primer
acattcaaaactcgaataatacccttgatacttgtagacc

SEQ ID NO: 12291 - DNA, 40 bp, Artificial Sequence
  Description of Artificial Sequence: Synthetic primer
tcaaaagaagatcttatgcaacaactccaaatacagaaag

SEQ ID NO: 12292 - DNA, 40 bp, Artificial Sequence
  Description of Artificial Sequence: Synthetic primer
tctttttattattcccgttacaactaacgtgagttatgtc

SEQ ID NO: 12293 - DNA, 40 bp, Artificial Sequence
  Description of Artificial Sequence: Synthetic primer
ggggataggggtggaaatccaggctaagatgatgtgtgca

SEQ ID NO: 12294 - DNA, 40 bp, Artificial Sequence
  Description of Artificial Sequence: Synthetic primer
gcctggccatggcctgacgactcgtgctatttttcctcac

SEQ ID NO: 12295 - DNA, 40 bp, Artificial Sequence
  Description of Artificial Sequence: Synthetic primer
tggtgcacctgggatccctgggagccccgcctcatccccg

SEQ ID NO: 12296 - DNA, 40 bp, Artificial Sequence
  Description of Artificial Sequence: Synthetic primer
cccacgctacagaaaaagttctgcctctactccctctcag

SEQ ID NO: 12297 - DNA, 40 bp, Artificial Sequence
  Description of Artificial Sequence: Synthetic primer
tctggagtgggaatccccttcttctgctgatctcctatgc

SEQ ID NO: 12298 - DNA, 40 bp, Artificial Sequence
  Description of Artificial Sequence: Synthetic primer
taagaataactatacttaacatattttagcaataccaaat

SEQ ID NO: 12299 - DNA, 40 bp, Artificial Sequence
  Description of Artificial Sequence: Synthetic primer
tcaaatcagctcttagaatattattagtattttaatctcc

SEQ ID NO: 12300 - DNA, 40 bp, Artificial Sequence
  Description of Artificial Sequence: Synthetic primer
agacggaaatccggggacagcatccaacagcacgtgaaga

SEQ ID NO: 12301 - DNA, 40 bp, Artificial Sequence
  Description of Artificial Sequence: Synthetic primer
gggctggaggcggcggccaggtggagcgcagcgccccggg

SEQ ID NO: 12302 - DNA, 40 bp, Artificial Sequence
  Description of Artificial Sequence: Synthetic primer
ggagggggcgcgaagggacggtccgagatttgggggaacg

SEQ ID NO: 12303 - DNA, 40 bp, Artificial Sequence
  Description of Artificial Sequence: Synthetic primer
cttgagctctcaatattcctaatcaaaggtgcagtttcag

SEQ ID NO: 12304 - DNA, 40 bp, Artificial Sequence
  Description of Artificial Sequence: Synthetic primer
ggaaccgaagcacgaaagccccagacagggccagggtggt

SEQ ID NO: 12305 - DNA, 40 bp, Artificial Sequence
  Description of Artificial Sequence: Synthetic primer
cttaaaatgttggtaatgaaaaccatggacctccaagtca

SEQ ID NO: 12306 - DNA, 40 bp, Artificial Sequence
  Description of Artificial Sequence: Synthetic primer
tggcgttgccgaaagcctccagaatcgggtttgcttgtag

SEQ ID NO: 12307 - DNA, 40 bp, Artificial Sequence
  Description of Artificial Sequence: Synthetic primer
ttgtgacctcaggtcccccgattctctcaggttcgtctgc

SEQ ID NO: 12308 - DNA, 40 bp, Artificial Sequence
  Description of Artificial Sequence: Synthetic primer
ctcaggcacaaagcccctgtgcccaccttcgcttctcttg

SEQ ID NO: 12309 - DNA, 40 bp, Artificial Sequence
  Description of Artificial Sequence: Synthetic primer
taccgcctttgacctttgggaacaggccgaggccctcacg

SEQ ID NO: 12310 - DNA, 40 bp, Artificial Sequence
  Description of Artificial Sequence: Synthetic primer
gatgaccccttcttctcgtgagttacgggagccaggagtc

SEQ ID NO: 12311 - DNA, 40 bp, Artificial Sequence
  Description of Artificial Sequence: Synthetic primer
aaattacaagataaaacttgaaatgttagaaaaagaaaag

SEQ ID NO: 12312 - DNA, 40 bp, Artificial Sequence
  Description of Artificial Sequence: Synthetic primer
gatgctgtcacctttgccctccaacacccgaggcctgtcc

SEQ ID NO: 12313 - DNA, 40 bp, Artificial Sequence
  Description of Artificial Sequence: Synthetic primer
agtggaccaccacgaagtgaggttccccatcctttacaga

SEQ ID NO: 12314 - DNA, 40 bp, Artificial Sequence
  Description of Artificial Sequence: Synthetic primer
attttacaactacagaaattaactggccagcaaggtgaag

SEQ ID NO: 12315 - DNA, 40 bp, Artificial Sequence
  Description of Artificial Sequence: Synthetic primer
tccaagggctgaaggacttataatcatgattcccctttag

SEQ ID NO: 12316 - DNA, 40 bp, Artificial Sequence
  Description of Artificial Sequence: Synthetic primer
ctgccagacagctccatgatgaagctcgcaaatggtccag

SEQ ID NO: 12317 - DNA, 40 bp, Artificial Sequence
  Description of Artificial Sequence: Synthetic primer
catgacgacgtgctgtacccagtctggctcagcaaggagg

SEQ ID NO: 12318 - DNA, 40 bp, Artificial Sequence
  Description of Artificial Sequence: Synthetic primer
cttccaaaggtatttcagggtagttgccatatacacactc

SEQ ID NO: 12319 - DNA, 40 bp, Artificial Sequence
  Description of Artificial Sequence: Synthetic primer
ttgtacaaatccttgtaaataccccacaccctcccctctg

SEQ ID NO: 12320 - DNA, 40 bp, Artificial Sequence
  Description of Artificial Sequence: Synthetic primer
ccttaaagctctcacaatttataggctcatctttatttgg

SEQ ID NO: 12321 - DNA, 40 bp, Artificial Sequence
  Description of Artificial Sequence: Synthetic primer
gctcacaaaaatatacatgtcttaaaacggaaatctaagg

SEQ ID NO: 12322 - DNA, 40 bp, Artificial Sequence
  Description of Artificial Sequence: Synthetic primer
cctcctcatcattgtcaaacttggggaactcttccatgac

SEQ ID NO: 12323 - DNA, 40 bp, Artificial Sequence
  Description of Artificial Sequence: Synthetic primer
acctggataatgaaagactccttccctttcctgtctcatc

SEQ ID NO: 12324 - DNA, 40 bp, Artificial Sequence
  Description of Artificial Sequence: Synthetic primer
cgcctggccgatctgatcgagcgggaccggacctacctgg

SEQ ID NO: 12325 - DNA, 40 bp, Artificial Sequence
  Description of Artificial Sequence: Synthetic primer
ggcctacagctttgtacttacattgtgccaaaggctgagg

SEQ ID NO: 12326 - DNA, 40 bp, Artificial Sequence
  Description of Artificial Sequence: Synthetic primer
acacaagaaggagaaggaccgggaaaagtccaagcatagc

SEQ ID NO: 12327 - DNA, 40 bp, Artificial Sequence
  Description of Artificial Sequence: Synthetic primer
gtccaccatgtccgggtcgctgttgagcccgctgctgatg

SEQ ID NO: 12328 - DNA, 40 bp, Artificial Sequence
  Description of Artificial Sequence: Synthetic primer
acagggacatatgttgcctcagactggagctcgaagataa

SEQ ID NO: 12329 - DNA, 40 bp, Artificial Sequence
  Description of Artificial Sequence: Synthetic primer
ggaaactctcgggagatctcacataaagtgaattctgtgg

SEQ ID NO: 12330 - DNA, 40 bp, Artificial Sequence
  Description of Artificial Sequence: Synthetic primer
tgttgacccgaatcagcatctcccgcagcttcacaaagtc

SEQ ID NO: 12331 - DNA, 40 bp, Artificial Sequence
  Description of Artificial Sequence: Synthetic primer
atcattaaggtcattactctcaaccacctaggcaatgaag

SEQ ID NO: 12332 - DNA, 40 bp, Artificial Sequence
  Description of Artificial Sequence: Synthetic primer
caggtggctcaggtcactgctcaaagggatttggtgacag

SEQ ID NO: 12333 - DNA, 40 bp, Artificial Sequence
  Description of Artificial Sequence: Synthetic primer
caagactcaatatgaagaacttaaagcacaacaggataag

SEQ ID NO: 12334 - DNA, 40 bp, Artificial Sequence
  Description of Artificial Sequence: Synthetic primer
gctcggcaacatcgtcttcaagaaggagcggaacactgac

SEQ ID NO: 12335 - DNA, 40 bp, Artificial Sequence
  Description of Artificial Sequence: Synthetic primer
tttttcaaaacatacaagcaacagcaaaagccctaacttc

SEQ ID NO: 12336 - DNA, 40 bp, Artificial Sequence
  Description of Artificial Sequence: Synthetic primer
agaatactctattcttactgaatgattgaaatctgtcttg

SEQ ID NO: 12337 - DNA, 40 bp, Artificial Sequence
  Description of Artificial Sequence: Synthetic primer
gctcccatgatgaatgactttccagaagaaggaggaaatg

SEQ ID NO: 12338 - DNA, 40 bp, Artificial Sequence
  Description of Artificial Sequence: Synthetic primer
tctggaggttgtggccatgatccgtggaagttgccaaagg

SEQ ID NO: 12339 - DNA, 40 bp, Artificial Sequence
  Description of Artificial Sequence: Synthetic primer
ttccataaccaccactgtgtagttgcagaaagccctagat

SEQ ID NO: 12340 - DNA, 40 bp, Artificial Sequence
  Description of Artificial Sequence: Synthetic primer
cctaggaactcgttccttttggcctcatatgtctcctgta

SEQ ID NO: 12341 - DNA, 40 bp, Artificial Sequence
  Description of Artificial Sequence: Synthetic primer
cagtgaatttgaatggaatccgtgataccgaagttgaaag

SEQ ID NO: 12342 - DNA, 40 bp, Artificial Sequence
  Description of Artificial Sequence: Synthetic primer
agcattgccactattttgaaagaccaaagttatttacagg

SEQ ID NO: 12343 - DNA, 40 bp, Artificial Sequence
  Description of Artificial Sequence: Synthetic primer
actagtcacagtgttgctgcaacatagagctgacattaac

SEQ ID NO: 12344 - DNA, 40 bp, Artificial Sequence
  Description of Artificial Sequence: Synthetic primer
ttgctcacttgaagaagtgtgattccagcaccgtttctac

SEQ ID NO: 12345 - DNA, 40 bp, Artificial Sequence
  Description of Artificial Sequence: Synthetic primer
atacatactgatagtttttcatatgtttcatttccatgtg

SEQ ID NO: 12346 - DNA, 40 bp, Artificial Sequence
  Description of Artificial Sequence: Synthetic primer
attctataaaaatgaacactaatggaagatttatctaagc

SEQ ID NO: 12347 - DNA, 40 bp, Artificial Sequence
  Description of Artificial Sequence: Synthetic primer
gcacaggggctggaggcagcagtcagggtccatgcagtcc

SEQ ID NO: 12348 - DNA, 40 bp, Artificial Sequence
  Description of Artificial Sequence: Synthetic primer
tctttatacttctccaggtccacatcttgatacagaaacc

SEQ ID NO: 12349 - DNA, 40 bp, Artificial Sequence
  Description of Artificial Sequence: Synthetic primer
taagacccactgcttagcaacaaagaagctggatctctgg

SEQ ID NO: 12350 - DNA, 40 bp, Artificial Sequence
  Description of Artificial Sequence: Synthetic primer
caatgcgcaaaacaggaatctggcattgatttgttcacac

SEQ ID NO: 12351 - DNA, 40 bp, Artificial Sequence
  Description of Artificial Sequence: Synthetic primer
gagccctgagcactcgagcccgagcgtgcggctgctgccc

SEQ ID NO: 12352 - DNA, 40 bp, Artificial Sequence
  Description of Artificial Sequence: Synthetic primer
gacaatggcgctcagatttatgaactggtggcacagacag

SEQ ID NO: 12353 - DNA, 40 bp, Artificial Sequence
  Description of Artificial Sequence: Synthetic primer
acaatcaggagaagggcacaatacaacagaaaccaccttc

SEQ ID NO: 12354 - DNA, 40 bp, Artificial Sequence
  Description of Artificial Sequence: Synthetic primer
gaaactgctttggtcataaaaacataaagaaaacgtacag

SEQ ID NO: 12355 - DNA, 40 bp, Artificial Sequence
  Description of Artificial Sequence: Synthetic primer
atgtcagcagtattggctgagtccattagctctccagttg

SEQ ID NO: 12356 - DNA, 40 bp, Artificial Sequence
  Description of Artificial Sequence: Synthetic primer
tgtgagcaagactcggcacatttctgggttcttgtcttgg

SEQ ID NO: 12357 - DNA, 40 bp, Artificial Sequence
  Description of Artificial Sequence: Synthetic primer
gacagcctaccatgtgtcaccaattctgaaagattttcct

SEQ ID NO: 12358 - DNA, 40 bp, Artificial Sequence
  Description of Artificial Sequence: Synthetic primer
agtagaccaccaatcacgggctttaaataaagacattttc

SEQ ID NO: 12359 - DNA, 40 bp, Artificial Sequence
  Description of Artificial Sequence: Synthetic primer
ggcaaacttgattcccttttcttgaaacgaagatcccatc

SEQ ID NO: 12360 - DNA, 40 bp, Artificial Sequence
  Description of Artificial Sequence: Synthetic primer
ggcacaatatcatggattttgccatgccctatttcatcca

SEQ ID NO: 12361 - DNA, 40 bp, Artificial Sequence
  Description of Artificial Sequence: Synthetic primer
gctccaccagggcccccgacggcactcgtttaaccacatc

SEQ ID NO: 12362 - DNA, 40 bp, Artificial Sequence
  Description of Artificial Sequence: Synthetic primer
atttctagcctaaaagctgaattagaaagaataaaagtgg

SEQ ID NO: 12363 - DNA, 40 bp, Artificial Sequence
  Description of Artificial Sequence: Synthetic primer
gaccctgaggctcaaagtcagatgctactggccgctgaag

SEQ ID NO: 12364 - DNA, 40 bp, Artificial Sequence
  Description of Artificial Sequence: Synthetic primer
acgcgcgagactgacaggcctccccctccctctggccttc

SEQ ID NO: 12365 - DNA, 40 bp, Artificial Sequence
  Description of Artificial Sequence: Synthetic primer
agagaagaaggtggtcagcaaatcgaaagcgcctcatctc

SEQ ID NO: 12366 - DNA, 40 bp, Artificial Sequence
  Description of Artificial Sequence: Synthetic primer
tcctttgagagaataaaataaaaatatgtgtgtattgagc

SEQ ID NO: 12367 - DNA, 40 bp, Artificial Sequence
  Description of Artificial Sequence: Synthetic primer
tcttcaatatacctggatttactaacttttcatcatttgc

SEQ ID NO: 12368 - DNA, 40 bp, Artificial Sequence
  Description of Artificial Sequence: Synthetic primer
tcccatacagtgcttctaccagatccgcagcccttttgag

SEQ ID NO: 12369 - DNA, 40 bp, Artificial Sequence
  Description of Artificial Sequence: Synthetic primer
ggaattgaagatgaaactgctgaaaatggtgtaccaaaac

SEQ ID NO: 12370 - DNA, 40 bp, Artificial Sequence
  Description of Artificial Sequence: Synthetic primer
gttaagacattctatactgttctacgtcaaccatttctac

SEQ ID NO: 12371 - DNA, 40 bp, Artificial Sequence
  Description of Artificial Sequence: Synthetic primer
gcttttttcattgttccactggacgctcatcagagggaag

SEQ ID NO: 12372 - DNA, 40 bp, Artificial Sequence
  Description of Artificial Sequence: Synthetic primer
gactgtggcccgcacgaccccagcctggcgccccctcctc

SEQ ID NO: 12373 - DNA, 40 bp, Artificial Sequence
  Description of Artificial Sequence: Synthetic primer
tgccccccgggaaaaccaactacctctgagaagattcacg

SEQ ID NO: 12374 - DNA, 40 bp, Artificial Sequence
  Description of Artificial Sequence: Synthetic primer
cgagaacctgcggcggcgatttcgggagaatctcatctac

SEQ ID NO: 12375 - DNA, 40 bp, Artificial Sequence
  Description of Artificial Sequence: Synthetic primer
atctgtggcagcttccacatcagcttcactgctattgtca

SEQ ID NO: 12376 - DNA, 40 bp, Artificial Sequence
  Description of Artificial Sequence: Synthetic primer
tatccatactctttatccctccagcgatgtgtaaaaccag

SEQ ID NO: 12377 - DNA, 40 bp, Artificial Sequence
  Description of Artificial Sequence: Synthetic primer
tggggatcctatgttagttcccctggatacattgttttat

SEQ ID NO: 12378 - DNA, 40 bp, Artificial Sequence
  Description of Artificial Sequence: Synthetic primer
ttgcgcccatctgtgtgggcatcgtcttcctgggtttcac

SEQ ID NO: 12379 - DNA, 40 bp, Artificial Sequence
  Description of Artificial Sequence: Synthetic primer
tgctctgtccgagggacagttctattcacccccagaatcc

SEQ ID NO: 12380 - DNA, 40 bp, Artificial Sequence
  Description of Artificial Sequence: Synthetic primer
cctgctggcgagaaaggatcccctggtgctgatggtcctg

SEQ ID NO: 12381 - DNA, 40 bp, Artificial Sequence
  Description of Artificial Sequence: Synthetic primer
ggaaacacagcttattagatcttccagcaacaactcatgc

SEQ ID NO: 12382 - DNA, 40 bp, Artificial Sequence
  Description of Artificial Sequence: Synthetic primer
ttttttaaccttaaaaagtagccagatagtaacaagactg

SEQ ID NO: 12383 - DNA, 40 bp, Artificial Sequence
  Description of Artificial Sequence: Synthetic primer
tttggagcagaaggaaaaagagaacagtatgttgagagag

SEQ ID NO: 12384 - DNA, 40 bp, Artificial Sequence
  Description of Artificial Sequence: Synthetic primer
ttgtcagactccatagtcagggtactgaagccaatgtttg

SEQ ID NO: 12385 - DNA, 40 bp, Artificial Sequence
  Description of Artificial Sequence: Synthetic primer
cgtgcggtgccgctggagcgccaggaccgccctttgtagc

SEQ ID NO: 12386 - DNA, 40 bp, Artificial Sequence
  Description of Artificial Sequence: Synthetic primer
tatacatgcttctggaggcctgcttaggtggggagctctg

SEQ ID NO: 12387 - DNA, 40 bp, Artificial Sequence
  Description of Artificial Sequence: Synthetic primer
ggaaacagacaagcaacccaaactgaaccccctcaaaagc

SEQ ID NO: 12388 - DNA, 40 bp, Artificial Sequence
  Description of Artificial Sequence: Synthetic primer
tttcatctgacattggttcccatgttccacattacccaag

SEQ ID NO: 12389 - DNA, 40 bp, Artificial Sequence
  Description of Artificial Sequence: Synthetic primer
ccccctcatcatggtctttgaatacatgaagcatggagac

SEQ ID NO: 12390 - DNA, 40 bp, Artificial Sequence
  Description of Artificial Sequence: Synthetic primer
gaatactgccctgagttgtttatagtaggagaggggactg

SEQ ID NO: 12391 - DNA, 40 bp, Artificial Sequence
  Description of Artificial Sequence: Synthetic primer
tgctgtcctctgccatttggtgacgtatttgagcttgttg

SEQ ID NO: 12392 - DNA, 40 bp, Artificial Sequence
  Description of Artificial Sequence: Synthetic primer
cctgacaaacagcaagtgcagttctgcctccgtgttctcc

SEQ ID NO: 12393 - DNA, 40 bp, Artificial Sequence
  Description of Artificial Sequence: Synthetic primer
cccctggtgtgcggctcagccgtgggctggtctgggctgc

SEQ ID NO: 12394 - DNA, 40 bp, Artificial Sequence
  Description of Artificial Sequence: Synthetic primer
cagggacccggggtctcctggaccttgacagagcagctaa

SEQ ID NO: 12395 - DNA, 40 bp, Artificial Sequence
  Description of Artificial Sequence: Synthetic primer
ttatgaaaaatgttgaaatttacattcaaagcctcatttg

SEQ ID NO: 12396 - DNA, 40 bp, Artificial Sequence
  Description of Artificial Sequence: Synthetic primer
ccaagcacattgcggaagaggctgaccgcaaatacgagga

SEQ ID NO: 12397 - DNA, 40 bp, Artificial Sequence
  Description of Artificial Sequence: Synthetic primer
ggctgccgcctgtcgcacaacgtgaacctgcagcagaagc

SEQ ID NO: 12398 - DNA, 40 bp, Artificial Sequence
  Description of Artificial Sequence: Synthetic primer
caacatgccagagaggcctcccaagtggccaatgaaaaag

SEQ ID NO: 12399 - DNA, 40 bp, Artificial Sequence
  Description of Artificial Sequence: Synthetic primer
aaaagcacagatgctgtttcggctgctgactctgcgaatg

SEQ ID NO: 12400 - DNA, 40 bp, Artificial Sequence
  Description of Artificial Sequence: Synthetic primer
ataaaaatcacatttttctcaggcaacagtagcagttcag

SEQ ID NO: 12401 - DNA, 40 bp, Artificial Sequence
  Description of Artificial Sequence: Synthetic primer
ggtacatgaccccttcattggttgtgcagatttcctcgtg

SEQ ID NO: 12402 - DNA, 40 bp, Artificial Sequence
  Description of Artificial Sequence: Synthetic primer
cactcgtgaccatgcaataccctgcaacataaacattttc

SEQ ID NO: 12403 - DNA, 40 bp, Artificial Sequence
  Description of Artificial Sequence: Synthetic primer
tacaaaaccggtttttacaaagatccaagcagtttggtcc

SEQ ID NO: 12404 - DNA, 40 bp, Artificial Sequence
  Description of Artificial Sequence: Synthetic primer
ctaatatcatttgcagtttagcataacccaggaagtgacc

SEQ ID NO: 12405 - DNA, 40 bp, Artificial Sequence
  Description of Artificial Sequence: Synthetic primer
agccccctgagctcagccctctgcctggagggctccagac

SEQ ID NO: 12406 - DNA, 40 bp, Artificial Sequence
  Description of Artificial Sequence: Synthetic primer
tctcctcggtgtccgaggacctggggctggtgcattttcg

SEQ ID NO: 12407 - DNA, 40 bp, Artificial Sequence
  Description of Artificial Sequence: Synthetic primer
cttataaagatttaattaaagtaagaatgaaataaagttt

SEQ ID NO: 12408 - DNA, 40 bp, Artificial Sequence
  Description of Artificial Sequence: Synthetic primer
tctataaacagaactgtctgcctcatacacctgcagtaag

SEQ ID NO: 12409 - DNA, 40 bp, Artificial Sequence
  Description of Artificial Sequence: Synthetic primer
cgaggcagtgctggggatccactagaggcctgtgcacctc

SEQ ID NO: 12410 - DNA, 40 bp, Artificial Sequence
  Description of Artificial Sequence: Synthetic primer
acacacagactatcagactctagatatgtggcctgcttac

SEQ ID NO: 12411 - DNA, 40 bp, Artificial Sequence
  Description of Artificial Sequence: Synthetic primer
tgccaagtctccccctgccccgtcctgtccacctgagtgc

SEQ ID NO: 12412 - DNA, 40 bp, Artificial Sequence
  Description of Artificial Sequence: Synthetic primer
gagctctgtatatgcaaacctgtttttatgccatcgcttc

SEQ ID NO: 12413 - DNA, 40 bp, Artificial Sequence
  Description of Artificial Sequence: Synthetic primer
gcaaagcctcgccttccatgccgagcgtcctcttggctct

SEQ ID NO: 12414 - DNA, 40 bp, Artificial Sequence
  Description of Artificial Sequence: Synthetic primer
gggcatggggcagccgccagcccaaacaggcgtgtcacag

SEQ ID NO: 12415 - DNA, 40 bp, Artificial Sequence
  Description of Artificial Sequence: Synthetic primer
gagccaggggcctgagagcttcggcccgcagcgaccgggg

SEQ ID NO: 12416 - DNA, 40 bp, Artificial Sequence
  Description of Artificial Sequence: Synthetic primer
gccttgccccatggctgtgggctttgtcacatggtccttc

SEQ ID NO: 12417 - DNA, 40 bp, Artificial Sequence
  Description of Artificial Sequence: Synthetic primer
ccgaaatcatgagcatgttaatgttagctggtgctttgtg

SEQ ID NO: 12418 - DNA, 40 bp, Artificial Sequence
  Description of Artificial Sequence: Synthetic primer
acagaggtaggtgcaggtggggagaagctgggaggagaag

SEQ ID NO: 12419 - DNA, 40 bp, Artificial Sequence
  Description of Artificial Sequence: Synthetic primer
gaagcttagtgaggtcctgttcagtgggaggcagcagagg

SEQ ID NO: 12420 - DNA, 40 bp, Artificial Sequence
  Description of Artificial Sequence: Synthetic primer
caccagcgtttgctcttctgcaaagatcccaatcacattc

SEQ ID NO: 12421 - DNA, 40 bp, Artificial Sequence
  Description of Artificial Sequence: Synthetic primer
tcagtctcagaggaaatcccatttaatgttagattgtttg

SEQ ID NO: 12422 - DNA, 40 bp, Artificial Sequence
  Description of Artificial Sequence: Synthetic primer
aagaatggagtccactttcttttcctaacctcaccatatc

SEQ ID NO: 12423 - DNA, 40 bp, Artificial Sequence
  Description of Artificial Sequence: Synthetic primer
tcaattttgtggccaaagcgaacagcctggagcccgaacc

SEQ ID NO: 12424 - DNA, 40 bp, Artificial Sequence
  Description of Artificial Sequence: Synthetic primer
tcagccggcggcgccatccgagcagagcagctgggggaga

SEQ ID NO: 12425 - DNA, 40 bp, Artificial Sequence
  Description of Artificial Sequence: Synthetic primer
aacgttctggttctgcggatcggcctctgacccaggatgg

SEQ ID NO: 12426 - DNA, 40 bp, Artificial Sequence
  Description of Artificial Sequence: Synthetic primer
tgccacaacctcctgcctgagcaggacaagatgctggtgg

SEQ ID NO: 12427 - DNA, 40 bp, Artificial Sequence
  Description of Artificial Sequence: Synthetic primer
aaaaataaaataactggcaaatatatcattgagccaaatc

SEQ ID NO: 12428 - DNA, 40 bp, Artificial Sequence
  Description of Artificial Sequence: Synthetic primer
ggaggagagtgctgcttcaggaggagcagcctatacaaag

SEQ ID NO: 12429 - DNA, 40 bp, Artificial Sequence
  Description of Artificial Sequence: Synthetic primer
gttgcccagacaatctaggttataattaaatgttaactcc

SEQ ID NO: 12430 - DNA, 40 bp, Artificial Sequence
  Description of Artificial Sequence: Synthetic primer
caaatgataggttccagaacacttgagggaaggagagacg

SEQ ID NO: 12431 - DNA, 40 bp, Artificial Sequence
  Description of Artificial Sequence: Synthetic primer
ttgacaatgtagaattgtatttcttaaaaagtgtgtaacc

SEQ ID NO: 12432 - DNA, 40 bp, Artificial Sequence
  Description of Artificial Sequence: Synthetic primer
tggtgctggtggagctccagaaggaggagggacagaaatg

SEQ ID NO: 12433 - DNA, 40 bp, Artificial Sequence
  Description of Artificial Sequence: Synthetic primer
tatatggtgaaccataaggattggggttgttcatcattcc

SEQ ID NO: 12434 - DNA, 40 bp, Artificial Sequence
  Description of Artificial Sequence: Synthetic primer
tgttgaccaccttgctcaggcgtttcataaactcgatgtc

SEQ ID NO: 12435 - DNA, 40 bp, Artificial Sequence
  Description of Artificial Sequence: Synthetic primer
aggtcgtcgcagatcctggtcagctcctcgttctctttag

SEQ ID NO: 12436 - DNA, 40 bp, Artificial Sequence
  Description of Artificial Sequence: Synthetic primer
tgttaaggcagacccagtatgaaatggggattattatagc

SEQ ID NO: 12437 - DNA, 40 bp, Artificial Sequence
  Description of Artificial Sequence: Synthetic primer
ccagtcgagggccttggcgcgccccggcaggtcgccgtcc

SEQ ID NO: 12438 - DNA, 40 bp, Artificial Sequence
  Description of Artificial Sequence: Synthetic primer
tacttaattcatggcaatagaggtaaagcagaagacgttc

SEQ ID NO: 12439 - DNA, 40 bp, Artificial Sequence
  Description of Artificial Sequence: Synthetic primer
ctgcatgcgcaaccctatgcgtgacgccatggtggctgcc

SEQ ID NO: 12440 - DNA, 40 bp, Artificial Sequence
  Description of Artificial Sequence: Synthetic primer
cacaaggaggagttaggacttaggaatagactgagtagac

SEQ ID NO: 12441 - DNA, 40 bp, Artificial Sequence
  Description of Artificial Sequence: Synthetic primer
ccaggagatcctttggggccagcagggccaggagaaccac

SEQ ID NO: 12442 - DNA, 40 bp, Artificial Sequence
  Description of Artificial Sequence: Synthetic primer
ctctgaaaacaatgctgagaatgagagcggcggagacaag

SEQ ID NO: 12443 - DNA, 40 bp, Artificial Sequence
  Description of Artificial Sequence: Synthetic primer
tgtttttgtttgctatgacagagaaagatgagtcaaggag

SEQ ID NO: 12444 - DNA, 40 bp, Artificial Sequence
  Description of Artificial Sequence: Synthetic primer
gattttgaaaatttgcatcagagagatgacaagcatgtgg

SEQ ID NO: 12445 - DNA, 40 bp, Artificial Sequence
  Description of Artificial Sequence: Synthetic primer
gctcgagccttacagggcaccagtgagaagcatgctgtgg

SEQ ID NO: 12446 - DNA, 40 bp, Artificial Sequence
  Description of Artificial Sequence: Synthetic primer
taagtgaatgtgaagagtaccaactacaacaattctacag

SEQ ID NO: 12447 - DNA, 40 bp, Artificial Sequence
  Description of Artificial Sequence: Synthetic primer
agttgtttcttttgaattcacttttaatagcaggatttgg

SEQ ID NO: 12448 - DNA, 40 bp, Artificial Sequence
  Description of Artificial Sequence: Synthetic primer
ggtgagactctacgactgctttagggacttttgggatctg

SEQ ID NO: 12449 - DNA, 40 bp, Artificial Sequence
  Description of Artificial Sequence: Synthetic primer
gttgtggaagcgttatttcagagggattcacttgttcgac

SEQ ID NO: 12450 - DNA, 40 bp, Artificial Sequence
  Description of Artificial Sequence: Synthetic primer
atctgcccagttgcacttactacatgcccgagttctccac

SEQ ID NO: 12451 - DNA, 40 bp, Artificial Sequence
  Description of Artificial Sequence: Synthetic primer
aagttagtagacacaacctttctagtgccttttagtcatc

SEQ ID NO: 12452 - DNA, 40 bp, Artificial Sequence
  Description of Artificial Sequence: Synthetic primer
aaggcaggtactgtcagtgagatcgccatagtgcaacttc

SEQ ID NO: 12453 - DNA, 40 bp, Artificial Sequence
  Description of Artificial Sequence: Synthetic primer
gaagagatttgtgacccagaagcgaatggagcacttttac

SEQ ID NO: 12454 - DNA, 40 bp, Artificial Sequence
  Description of Artificial Sequence: Synthetic primer
cgacagccctgtcctcgcccgcacagcccgctgcactttc

SEQ ID NO: 12455 - DNA, 40 bp, Artificial Sequence
  Description of Artificial Sequence: Synthetic primer
cccaccgtcaatccgtccactggagaggtcatctgtcagg

SEQ ID NO: 12456 - DNA, 40 bp, Artificial Sequence
  Description of Artificial Sequence: Synthetic primer
tatgaagattaagggtagtattttctaaggaagtggaaag

SEQ ID NO: 12457 - DNA, 40 bp, Artificial Sequence
  Description of Artificial Sequence: Synthetic primer
ctggaataacctgtattttgggtagtgttccttctggtag

SEQ ID NO: 12458 - DNA, 40 bp, Artificial Sequence
  Description of Artificial Sequence: Synthetic primer
attattttctgttatcaaagcacatgactaaaatgaaatc

SEQ ID NO: 12459 - DNA, 40 bp, Artificial Sequence
  Description of Artificial Sequence: Synthetic primer
ttcttgataaggtagcttcaaagagaagtatttattatgg

SEQ ID NO: 12460 - DNA, 40 bp, Artificial Sequence
  Description of Artificial Sequence: Synthetic primer
tattaaagatattgagatataaaatagttacaaaataagc

SEQ ID NO: 12461 - DNA, 40 bp, Artificial Sequence
  Description of Artificial Sequence: Synthetic primer
tggctgagaaagccagatgtggactcccagaatgcaatgg

SEQ ID NO: 12462 - DNA, 40 bp, Artificial Sequence
  Description of Artificial Sequence: Synthetic primer
tatttattctgaagaatctaaaagataacagattatttgc

SEQ ID NO: 12463 - DNA, 40 bp, Artificial Sequence
  Description of Artificial Sequence: Synthetic primer
ttccccactgcaattaggacactctccaaccttaaagaac

SEQ ID NO: 12464 - DNA, 40 bp, Artificial Sequence
  Description of Artificial Sequence: Synthetic primer
tttgtctcagttactcctctcttcagggatcttcttcatc

SEQ ID NO: 12465 - DNA, 40 bp, Artificial Sequence
  Description of Artificial Sequence: Synthetic primer
cttcatgtcacttgttttgctgccctaaatggcttcttgc

SEQ ID NO: 12466 - DNA, 40 bp, Artificial Sequence
  Description of Artificial Sequence: Synthetic primer
gagagccacgcattggagtaccctggctcccagccccttc

SEQ ID NO: 12467 - DNA, 40 bp, Artificial Sequence
  Description of Artificial Sequence: Synthetic primer
tccagtccaggtctcgaaagaaactgtgctgcttcacctc

SEQ ID NO: 12468 - DNA, 40 bp, Artificial Sequence
  Description of Artificial Sequence: Synthetic primer
taagtcattgacagaagagaaaaccatgaagtcattcagc

SEQ ID NO: 12469 - DNA, 40 bp, Artificial Sequence
  Description of Artificial Sequence: Synthetic primer
tcggcgtagacgctgctgttctcatcgcgtaccacgaagg

SEQ ID NO: 12470 - DNA, 40 bp, Artificial Sequence
  Description of Artificial Sequence: Synthetic primer
gccagcagcgctgctccttaatgtcataggctcaactatc

SEQ ID NO: 12471 - DNA, 40 bp, Artificial Sequence
  Description of Artificial Sequence: Synthetic primer
attggcctcgtttttcagtattttcacagccacggttttc

SEQ ID NO: 12472 - DNA, 40 bp, Artificial Sequence
  Description of Artificial Sequence: Synthetic primer
tattttgcacaatttgacatacagccaagtttagcatttc

SEQ ID NO: 12473 - DNA, 40 bp, Artificial Sequence
  Description of Artificial Sequence: Synthetic primer
tcaacatctggcatcttctttaatagtgttagaaaactgg

SEQ ID NO: 12474 - DNA, 40 bp, Artificial Sequence
  Description of Artificial Sequence: Synthetic primer
aaagacccctccttggtgtttgtaagagcattggatcttc

SEQ ID NO: 12475 - DNA, 40 bp, Artificial Sequence
  Description of Artificial Sequence: Synthetic primer
gagtaattgggttttccatgcagttccgattcgcacagac

SEQ ID NO: 12476 - DNA, 40 bp, Artificial Sequence
  Description of Artificial Sequence: Synthetic primer
aaagtcattcacacgattctctagaaaggtgccaagtctg

SEQ ID NO: 12477 - DNA, 40 bp, Artificial Sequence
  Description of Artificial Sequence: Synthetic primer
gcatggttttcttgaagagttcattactcctattgtaaag

SEQ ID NO: 12478 - DNA, 40 bp, Artificial Sequence
  Description of Artificial Sequence: Synthetic primer
gcacgccaggaacaccagcccctccaacaccagggaggac

SEQ ID NO: 12479 - DNA, 40 bp, Artificial Sequence
  Description of Artificial Sequence: Synthetic primer
ccaaactgctccaggtaatccacctccgcgcccgtgccta

SEQ ID NO: 12480 - DNA, 40 bp, Artificial Sequence
  Description of Artificial Sequence: Synthetic primer
catttagttcagatgtgatactgacgccagataagctacc

SEQ ID NO: 12481 - DNA, 40 bp, Artificial Sequence
  Description of Artificial Sequence: Synthetic primer
ctggggccttaattccttgcatagtctctcttgtcaagtc

SEQ ID NO: 12482 - DNA, 40 bp, Artificial Sequence
  Description of Artificial Sequence: Synthetic primer
ctctattttgaattatgttaaaatttgtgtgcattttatg

SEQ ID NO: 12483 - DNA, 40 bp, Artificial Sequence
  Description of Artificial Sequence: Synthetic primer
ccggaactcttctgagacccgggtgttcctgtccccctac

SEQ ID NO: 12484 - DNA, 40 bp, Artificial Sequence
  Description of Artificial Sequence: Synthetic primer
gcaggcggcggaggacgcactggcagttatcaatcagcag

SEQ ID NO: 12485 - DNA, 40 bp, Artificial Sequence
  Description of Artificial Sequence: Synthetic primer
tcttcagttttgggcactgtggaaggagatggttgagcag

SEQ ID NO: 12486 - DNA, 40 bp, Artificial Sequence
  Description of Artificial Sequence: Synthetic primer
tttttctgtaggtaaactcttattttcatatgctgactcc

SEQ ID NO: 12487 - DNA, 40 bp, Artificial Sequence
  Description of Artificial Sequence: Synthetic primer
ggttggagagtgtcctaattgcagtggggaattcatcaag

SEQ ID NO: 12488 - DNA, 40 bp, Artificial Sequence
  Description of Artificial Sequence: Synthetic primer
tggcaattccggccttctggcaaccaaaagcaatgaaaac

SEQ ID NO: 12489 - DNA, 40 bp, Artificial Sequence
  Description of Artificial Sequence: Synthetic primer
cgaggtactcttcagggacacaggtctagtacaagagaac

SEQ ID NO: 12490 - DNA, 40 bp, Artificial Sequence
  Description of Artificial Sequence: Synthetic primer
agtccccacaggtggagtgcacgttgcaggcggcgacctt

SEQ ID NO: 12491 - DNA, 40 bp, Artificial Sequence
  Description of Artificial Sequence: Synthetic primer
caaacacgggggttactggccgacttgagcacgatgaagc

SEQ ID NO: 12492 - DNA, 40 bp, Artificial Sequence
  Description of Artificial Sequence: Synthetic primer
ccaccactagcaccctgccatggttaaaaaatctctatat

SEQ ID NO: 12493 - DNA, 40 bp, Artificial Sequence
  Description of Artificial Sequence: Synthetic primer
accatcacagccatctccaccccgttggaaaaggaggaac

SEQ ID NO: 12494 - DNA, 40 bp, Artificial Sequence
  Description of Artificial Sequence: Synthetic primer
taccgtcgtcctcctccacctcctgcggggccttttgctg

SEQ ID NO: 12495 - DNA, 40 bp, Artificial Sequence
  Description of Artificial Sequence: Synthetic primer
tgacattattgaaggcaaggacctccactgtaaattctcc

SEQ ID NO: 12496 - DNA, 40 bp, Artificial Sequence
  Description of Artificial Sequence: Synthetic primer
aatacagatgtgataggggtagggaccactaaatagcttc

SEQ ID NO: 12497 - DNA, 40 bp, Artificial Sequence
  Description of Artificial Sequence: Synthetic primer
aggagtacggagaattctataagagcttgaccaatgactg

SEQ ID NO: 12498 - DNA, 40 bp, Artificial Sequence
  Description of Artificial Sequence: Synthetic primer
tcttgatttttgagtttcatcatcttgcattaaattgttc

SEQ ID NO: 12499 - DNA, 40 bp, Artificial Sequence
  Description of Artificial Sequence: Synthetic primer
tgatggactgatccagggctggaataccactaatcccaac

SEQ ID NO: 12500 - DNA, 40 bp, Artificial Sequence
  Description of Artificial Sequence: Synthetic primer
ttacatggatcctcattactgccaatcttttgtagatgtc

SEQ ID NO: 12501 - DNA, 40 bp, Artificial Sequence
  Description of Artificial Sequence: Synthetic primer
tgtcatcgccaaggcggacacactcaccctggaggagagg

SEQ ID NO: 12502 - DNA, 40 bp, Artificial Sequence
  Description of Artificial Sequence: Synthetic primer
agattaaggacctgcaaatagccatagatagcctggattc

SEQ ID NO: 12503 - DNA, 40 bp, Artificial Sequence
  Description of Artificial Sequence: Synthetic primer
ttggccggtacgctgctgctcgccaggcctgacacgtcca

SEQ ID NO: 12504 - DNA, 40 bp, Artificial Sequence
  Description of Artificial Sequence: Synthetic primer
agtttgtccacaaagctgtcctgcaagtggggcaaatcag

SEQ ID NO: 12505 - DNA, 40 bp, Artificial Sequence
  Description of Artificial Sequence: Synthetic primer
tccatctttcttgagcagcatgttgggcccttagggagac

SEQ ID NO: 12506 - DNA, 40 bp, Artificial Sequence
  Description of Artificial Sequence: Synthetic primer
ctgttacaaaagagagcaaaacctaactgtcagcatagac

SEQ ID NO: 12507 - DNA, 40 bp, Artificial Sequence
  Description of Artificial Sequence: Synthetic primer
ccacaggaaccagctccctacgcttcccccacgccctgtc

SEQ ID NO: 12508 - DNA, 40 bp, Artificial Sequence
  Description of Artificial Sequence: Synthetic primer
aatcccgacccgactctgtgcctggcagtctaagggcttc

SEQ ID NO: 12509 - DNA, 40 bp, Artificial Sequence
  Description of Artificial Sequence: Synthetic primer
accaccaacaggacacaggcaaaagcagcaagtccaactg

SEQ ID NO: 12510 - DNA, 40 bp, Artificial Sequence
  Description of Artificial Sequence: Synthetic primer
gaaattaatgctggtgttttatctgttccatttagcatag

SEQ ID NO: 12511 - DNA, 40 bp, Artificial Sequence
  Description of Artificial Sequence: Synthetic primer
tcttctttcgaaagaataggatgaacccatgctcaaaacc

SEQ ID NO: 12512 - DNA, 40 bp, Artificial Sequence
  Description of Artificial Sequence: Synthetic primer
gcgcgggcgcgtctgggatacgggcccgggaggcgccgcc

SEQ ID NO: 12513 - DNA, 40 bp, Artificial Sequence
  Description of Artificial Sequence: Synthetic primer
ctggaaaatactgaaatacagttaagactcaatacacaag

SEQ ID NO: 12514 - DNA, 40 bp, Artificial Sequence
  Description of Artificial Sequence: Synthetic primer
tgtctacaaactattatcctttttctccgttactaaaatg

SEQ ID NO: 12515 - DNA, 40 bp, Artificial Sequence
  Description of Artificial Sequence: Synthetic primer
ctcgatccgctcctttgatgatctccaacgcctgctgcac

SEQ ID NO: 12516 - DNA, 40 bp, Artificial Sequence
  Description of Artificial Sequence: Synthetic primer
tgctatgtctgtttcttctttaacttgggaagctccttgc

SEQ ID NO: 12517 - DNA, 40 bp, Artificial Sequence
  Description of Artificial Sequence: Synthetic primer
agccctgacccacttcagatggtaacaccacttctcactg

SEQ ID NO: 12518 - DNA, 40 bp, Artificial Sequence
  Description of Artificial Sequence: Synthetic primer
tggactggatcacctgactccagctagattgcctctcctg

SEQ ID NO: 12519 - DNA, 40 bp, Artificial Sequence
  Description of Artificial Sequence: Synthetic primer
cccttcagcttcctctggatcgaggggctcttctttgacg

SEQ ID NO: 12520 - DNA, 40 bp, Artificial Sequence
  Description of Artificial Sequence: Synthetic primer
catctggggtatagaattagtatataaacccacagtgtta

SEQ ID NO: 12521 - DNA, 40 bp, Artificial Sequence
  Description of Artificial Sequence: Synthetic primer
tttgcctctgctaagaggctctgctggctacccatgtact

SEQ ID NO: 12522 - DNA, 40 bp, Artificial Sequence
  Description of Artificial Sequence: Synthetic primer
tcttcactttctttgcactaggtttaccagatgatgtagg

SEQ ID NO: 12523 - DNA, 40 bp, Artificial Sequence
  Description of Artificial Sequence: Synthetic primer
gtcaagtgaataacttggcctgaaatattcatggttgcac

SEQ ID NO: 12524 - DNA, 40 bp, Artificial Sequence
  Description of Artificial Sequence: Synthetic primer
taatactgtttcaaaagcaactgtaagaggcagcatgaaa

SEQ ID NO: 12525 - DNA, 40 bp, Artificial Sequence
  Description of Artificial Sequence: Synthetic primer
tcattaaccaaatggaatttttaatataagttctgagtgc

SEQ ID NO: 12526 - DNA, 40 bp, Artificial Sequence
  Description of Artificial Sequence: Synthetic primer
gcaggagggccatatgtgccatccattggccgcttgtaat

SEQ ID NO: 12527 - DNA, 40 bp, Artificial Sequence
  Description of Artificial Sequence: Synthetic primer
cactgctgctgatacctgcatcatctttgattcagactgg

SEQ ID NO: 12528 - DNA, 40 bp, Artificial Sequence
  Description of Artificial Sequence: Synthetic primer
aaacgttttgaatcacatgacgcattgtcaggctgggaaa

SEQ ID NO: 12529 - DNA, 40 bp, Artificial Sequence
  Description of Artificial Sequence: Synthetic primer
ctttctgcatttgcccatatagtgctctttagccagtatc

SEQ ID NO: 12530 - DNA, 40 bp, Artificial Sequence
  Description of Artificial Sequence: Synthetic primer
ccaccgccacgacagtcgcccccgcggggatcccggcgac

SEQ ID NO: 12531 - DNA, 40 bp, Artificial Sequence
  Description of Artificial Sequence: Synthetic primer
agagcctcccaagtcatcttatcaactcaactcccttttt

SEQ ID NO: 12532 - DNA, 40 bp, Artificial Sequence
  Description of Artificial Sequence: Synthetic primer
ccgcccgccccccatgcggcccgtgcggccggtggtccag

SEQ ID NO: 12533 - DNA, 40 bp, Artificial Sequence
  Description of Artificial Sequence: Synthetic primer
tctcagagacaagtttagaactctcatttgcaggatatgg

SEQ ID NO: 12534 - DNA, 40 bp, Artificial Sequence
  Description of Artificial Sequence: Synthetic primer
tcttccctagcagccggttgaagcggagaccaagccactg

SEQ ID NO: 12535 - DNA, 40 bp, Artificial Sequence
  Description of Artificial Sequence: Synthetic primer
atgccaagaggaaaatttatctgcaatgaatgtcgcacag

SEQ ID NO: 12536 - DNA, 40 bp, Artificial Sequence
  Description of Artificial Sequence: Synthetic primer
cactatccgtggactggtatagtctttcacggaaacaagg

SEQ ID NO: 12537 - DNA, 40 bp, Artificial Sequence
  Description of Artificial Sequence: Synthetic primer
tccgacatgtcgctgctcctggtcttcagcttctccacac

SEQ ID NO: 12538 - DNA, 40 bp, Artificial Sequence
  Description of Artificial Sequence: Synthetic primer
cagtaacacttaactgaaggcggtaaagctttggcttatc

SEQ ID NO: 12539 - DNA, 40 bp, Artificial Sequence
  Description of Artificial Sequence: Synthetic primer
taagccggacaccttcccggctgaccgttcattccttcag

SEQ ID NO: 12540 - DNA, 40 bp, Artificial Sequence
  Description of Artificial Sequence: Synthetic primer
caacaccgtcagaccgggagaccagggcagctcttcacag

SEQ ID NO: 12541 - DNA, 40 bp, Artificial Sequence
  Description of Artificial Sequence: Synthetic primer
cataaatagctgcggaaggatagccacggactccaggtag

SEQ ID NO: 12542 - DNA, 40 bp, Artificial Sequence
  Description of Artificial Sequence: Synthetic primer
ttatctccatttgctatggacaaaaaggcagttcctggtg

SEQ ID NO: 12543 - DNA, 40 bp, Artificial Sequence
  Description of Artificial Sequence: Synthetic primer
tgtacatagagataaggaaaaacaaacaagatgctatatg

SEQ ID NO: 12544 - DNA, 40 bp, Artificial Sequence
  Description of Artificial Sequence: Synthetic primer
agccatcatgtcggaccccgcggtcaacgcgcagctggat

SEQ ID NO: 12545 - DNA, 40 bp, Artificial Sequence
  Description of Artificial Sequence: Synthetic primer
tataatggaacaatatttgcatatggacaaacatcctctg

SEQ ID NO: 12546 - DNA, 40 bp, Artificial Sequence
  Description of Artificial Sequence: Synthetic primer
tactaaaaaagccttcactggtttggatgcattggagcat

SEQ ID NO: 12547 - DNA, 40 bp, Artificial Sequence
  Description of Artificial Sequence: Synthetic primer
aggccccctccgacataaatggatgggcgcaggggaacat

SEQ ID NO: 12548 - DNA, 40 bp, Artificial Sequence
  Description of Artificial Sequence: Synthetic primer
atcgccttcagccctgtctggtgcatccttggcagaaagt

SEQ ID NO: 12549 - DNA, 40 bp, Artificial Sequence
  Description of Artificial Sequence: Synthetic primer
gaggctgtgaggaataattggctccaaaagcactaccatc

SEQ ID NO: 12550 - DNA, 40 bp, Artificial Sequence
  Description of Artificial Sequence: Synthetic primer
ggctacccaccacagcagcagcagcggatgcagcatcaca

SEQ ID NO: 12551 - DNA, 40 bp, Artificial Sequence
  Description of Artificial Sequence: Synthetic primer
gctgaaggggatgctaaaggagataaaaccaaggttaagt

SEQ ID NO: 12552 - DNA, 40 bp, Artificial Sequence
  Description of Artificial Sequence: Synthetic primer
gatggtgaggacaacccacaggtcggcaatggccaggttc

SEQ ID NO: 12553 - DNA, 40 bp, Artificial Sequence
  Description of Artificial Sequence: Synthetic primer
cccggggccacggagaatacatccttctggggaacacgtc

SEQ ID NO: 12554 - DNA, 40 bp, Artificial Sequence
  Description of Artificial Sequence: Synthetic primer
cccaatatgtcacctgtgcttcatctttggactatatctc

SEQ ID NO: 12555 - DNA, 40 bp, Artificial Sequence
  Description of Artificial Sequence: Synthetic primer
catcaaaaccattgaagaaaattcttttgggagccaaacc

SEQ ID NO: 12556 - DNA, 40 bp, Artificial Sequence
  Description of Artificial Sequence: Synthetic primer
cgctcctgactggggaggcttcactttgaattctaccttc

SEQ ID NO: 12557 - DNA, 40 bp, Artificial Sequence
  Description of Artificial Sequence: Synthetic primer
caccatcgtccatgtgggagacaagaagcccccggagtcg

SEQ ID NO: 12558 - DNA, 40 bp, Artificial Sequence
  Description of Artificial Sequence: Synthetic primer
tctgcaatttcagccagttgacgcagcagtctggagaagg

SEQ ID NO: 12559 - DNA, 40 bp, Artificial Sequence
  Description of Artificial Sequence: Synthetic primer
gcctcgaggctgagcgggcctcccgggctgagcgggacag

SEQ ID NO: 12560 - DNA, 40 bp, Artificial Sequence
  Description of Artificial Sequence: Synthetic primer
tctctctctttggcgtttgaagggagcgcggtgactgtcc

SEQ ID NO: 12561 - DNA, 40 bp, Artificial Sequence
  Description of Artificial Sequence: Synthetic primer
acgtggccgctccaactcacgtccctgcgtgatgcagtcg

SEQ ID NO: 12562 - DNA, 40 bp, Artificial Sequence
  Description of Artificial Sequence: Synthetic primer
tagaggaggaggagtgagaaataaaccgacttctaatatc

SEQ ID NO: 12563 - DNA, 40 bp, Artificial Sequence
  Description of Artificial Sequence: Synthetic primer
attctagaatccggggttgtcctgtcctgtgagtgtgacc

SEQ ID NO: 12564 - DNA, 40 bp, Artificial Sequence
  Description of Artificial Sequence: Synthetic primer
atgatcttctcccctgcctggcgttttttctttgaagttg

SEQ ID NO: 12565 - DNA, 40 bp, Artificial Sequence
  Description of Artificial Sequence: Synthetic primer
tggtttatggccagatactggcgatccaagcacatccttg

SEQ ID NO: 12566 - DNA, 40 bp, Artificial Sequence
  Description of Artificial Sequence: Synthetic primer
tggttcttattaaatataatttatgtggcatgaaatgttg

SEQ ID NO: 12567 - DNA, 40 bp, Artificial Sequence
  Description of Artificial Sequence: Synthetic primer
tacaaaatggaacagatttcaaaaggacgtaatactccac

SEQ ID NO: 12568 - DNA, 40 bp, Artificial Sequence
  Description of Artificial Sequence: Synthetic primer
taattcattcatcgaaagcattggtattacagaaagttta

SEQ ID NO: 12569 - DNA, 40 bp, Artificial Sequence
  Description of Artificial Sequence: Synthetic primer
gaggctcttctccatcaatgagtgcaagatcttctaaacc

SEQ ID NO: 12570 - DNA, 40 bp, Artificial Sequence
  Description of Artificial Sequence: Synthetic primer
cgcagaccttgatctccattagggccaaggccgtatgctc

SEQ ID NO: 12571 - DNA, 40 bp, Artificial Sequence
  Description of Artificial Sequence: Synthetic primer
ttttaaaagaatgcacatttacatacaaaagaaacatctg

SEQ ID NO: 12572 - DNA, 40 bp, Artificial Sequence
  Description of Artificial Sequence: Synthetic primer
ccgggccgacatgagtggggaccacctccacaacgattcc

SEQ ID NO: 12573 - DNA, 40 bp, Artificial Sequence
  Description of Artificial Sequence: Synthetic primer
ttatggaaggcactgcttccgataattatattctattaaa

SEQ ID NO: 12574 - DNA, 40 bp, Artificial Sequence
  Description of Artificial Sequence: Synthetic primer
aaaaattgctacatatggcacataacacatttttacatac

SEQ ID NO: 12575 - DNA, 40 bp, Artificial Sequence
  Description of Artificial Sequence: Synthetic primer
aacacttctggaatacctaggctgttctttaaccagcttc

SEQ ID NO: 12576 - DNA, 40 bp, Artificial Sequence
  Description of Artificial Sequence: Synthetic primer
tggggcagatgcctaatttcgcacaatgcatgcccacctg

SEQ ID NO: 12577 - DNA, 40 bp, Artificial Sequence
  Description of Artificial Sequence: Synthetic primer
cggctttctgcagctccgacatggcctgccgcttcacctc

SEQ ID NO: 12578 - DNA, 40 bp, Artificial Sequence
  Description of Artificial Sequence: Synthetic primer
tcagatgtatcctctacagggcagggtgtcatcgacaagg

SEQ ID NO: 12579 - DNA, 40 bp, Artificial Sequence
  Description of Artificial Sequence: Synthetic primer
ggaccccctcaccagggaaggggagcttgacagacggaag

SEQ ID NO: 12580 - DNA, 40 bp, Artificial Sequence
  Description of Artificial Sequence: Synthetic primer
aagctgtttcctatatgagggctcttactgctgttcaagg

SEQ ID NO: 12581 - DNA, 40 bp, Artificial Sequence
  Description of Artificial Sequence: Synthetic primer
ttggaatccatcagtgttctatttagtcatcttctccttc

SEQ ID NO: 12582 - DNA, 40 bp, Artificial Sequence
  Description of Artificial Sequence: Synthetic primer
ttcaaagagattgcctgcaagggaaataaaaatgactaag

SEQ ID NO: 12583 - DNA, 40 bp, Artificial Sequence
  Description of Artificial Sequence: Synthetic primer
gagctttgtatgaaattaagtcaaagtgtggagctccttt

SEQ ID NO: 12584 - DNA, 40 bp, Artificial Sequence
  Description of Artificial Sequence: Synthetic primer
cgccttcccacctagctctcctctctttgcagagccatac

SEQ ID NO: 12585 - DNA, 40 bp, Artificial Sequence
  Description of Artificial Sequence: Synthetic primer
ggccccgaaccgcgccccaggccggcaggcggggaaggag

SEQ ID NO: 12586 - DNA, 40 bp, Artificial Sequence
  Description of Artificial Sequence: Synthetic primer
aaatataagaatgcaggctgctgcctactgccaccaccag

SEQ ID NO: 12587 - DNA, 40 bp, Artificial Sequence
  Description of Artificial Sequence: Synthetic primer
tggcccactgctggcctcgctgtcagccttctggctcagg

SEQ ID NO: 12588 - DNA, 40 bp, Artificial Sequence
  Description of Artificial Sequence: Synthetic primer
atcctcaggagtcagtgaagaagctgctgaaaaccccaag

SEQ ID NO: 12589 - DNA, 40 bp, Artificial Sequence
  Description of Artificial Sequence: Synthetic primer
ttgcttcccttagcctttgttctagaaaataaacttgtgc

SEQ ID NO: 12590 - DNA, 40 bp, Artificial Sequence
  Description of Artificial Sequence: Synthetic primer
acgggcgatggcgaaggcgacgtccggtgccgcggggctg

SEQ ID NO: 12591 - DNA, 40 bp, Artificial Sequence
  Description of Artificial Sequence: Synthetic primer
gtcccaggctcccggagtccccacagagccaagcataagg

SEQ ID NO: 12592 - DNA, 40 bp, Artificial Sequence
  Description of Artificial Sequence: Synthetic primer
tggtatcactaagaaggtccaatttaccttgtaataattc

SEQ ID NO: 12593 - DNA, 40 bp, Artificial Sequence
  Description of Artificial Sequence: Synthetic primer
tcagatttgaaactaagacttgtcttctcagcagttcttc

SEQ ID NO: 12594 - DNA, 40 bp, Artificial Sequence
  Description of Artificial Sequence: Synthetic primer
atgaaacaacataccctgctttcaatattttctccaaatg

SEQ ID NO: 12595 - DNA, 40 bp, Artificial Sequence
  Description of Artificial Sequence: Synthetic primer
ctcacagactaggttgtaatttgttttgttgttttgattc

SEQ ID NO: 12596 - DNA, 40 bp, Artificial Sequence
  Description of Artificial Sequence: Synthetic primer
cgggctaatgaccgagaatacaatgagaaattccagtatg

SEQ ID NO: 12597 - DNA, 40 bp, Artificial Sequence
  Description of Artificial Sequence: Synthetic primer
ttagacttaggaaaaaaggcagagtaacattacttaaaaa

SEQ ID NO: 12598 - DNA, 40 bp, Artificial Sequence
  Description of Artificial Sequence: Synthetic primer
aggaattcctgcaatcagtgcaatgagcctagaccagagg

SEQ ID NO: 12599 - DNA, 40 bp, Artificial Sequence
  Description of Artificial Sequence: Synthetic primer
tggtaattgctttgtggcttagtaaactactctgtggatg

SEQ ID NO: 12600 - DNA, 40 bp, Artificial Sequence
  Description of Artificial Sequence: Synthetic primer
attttcaaaggatgttccttgaagagattttactggtacg

SEQ ID NO: 12601 - DNA, 40 bp, Artificial Sequence
  Description of Artificial Sequence: Synthetic primer
gacagtccagaatgtctcagcaagtgtcaacttttattag

SEQ ID NO: 12602 - DNA, 40 bp, Artificial Sequence
  Description of Artificial Sequence: Synthetic primer
cggccctgcccggcgccctgctctgctcagtttcagatgc

SEQ ID NO: 12603 - DNA, 40 bp, Artificial Sequence
  Description of Artificial Sequence: Synthetic primer
ccgacggcacccgagggggtgggggaagttcctttttctc

SEQ ID NO: 12604 - DNA, 40 bp, Artificial Sequence
  Description of Artificial Sequence: Synthetic primer
ttttttattcacaaactaaatccaccaggaaattataaag

SEQ ID NO: 12605 - DNA, 40 bp, Artificial Sequence
  Description of Artificial Sequence: Synthetic primer
ccttgtggctgttaagagcagagaggagcctggaagaacg

SEQ ID NO: 12606 - DNA, 40 bp, Artificial Sequence
  Description of Artificial Sequence: Synthetic primer
tccatgatgtctggtgaatgatttctttaattccaaatcc

SEQ ID NO: 12607 - DNA, 40 bp, Artificial Sequence
  Description of Artificial Sequence: Synthetic primer
gttctggggacccagaccccacagtgtccttgtcatctcc

SEQ ID NO: 12608 - DNA, 40 bp, Artificial Sequence
  Description of Artificial Sequence: Synthetic primer
tgtttagttccaaatctgacacagtataattagtagaacc

SEQ ID NO: 12609 - DNA, 40 bp, Artificial Sequence
  Description of Artificial Sequence: Synthetic primer
tgggacttcttgatctccctgtagtcgtcttcgttgtcac

SEQ ID NO: 12610 - DNA, 40 bp, Artificial Sequence
  Description of Artificial Sequence: Synthetic primer
ataagaaggctcctagtaaaaggccgcccatttcagattc

SEQ ID NO: 12611 - DNA, 40 bp, Artificial Sequence
  Description of Artificial Sequence: Synthetic primer
tttttttcttcccttttctccaccgccttgagagcgagta

SEQ ID NO: 12612 - DNA, 40 bp, Artificial Sequence
  Description of Artificial Sequence: Synthetic primer
ctgccctgggagttgagggtctgggagggcagcacgtaac

SEQ ID NO: 12613 - DNA, 40 bp, Artificial Sequence
  Description of Artificial Sequence: Synthetic primer
cttgctctatggcactttccagatcttttgggattttgtg

SEQ ID NO: 12614 - DNA, 40 bp, Artificial Sequence
  Description of Artificial Sequence: Synthetic primer
cagcctgtgttgaagcagaggaggcggctcacaatgaaag

SEQ ID NO: 12615 - DNA, 40 bp, Artificial Sequence
  Description of Artificial Sequence: Synthetic primer
atggcacccgatggctgaggcagagttcagagccaagttc

SEQ ID NO: 12616 - DNA, 40 bp, Artificial Sequence
  Description of Artificial Sequence: Synthetic primer
tgcccttgaggtgtccaattgatagtatagcttgcctctg

SEQ ID NO: 12617 - DNA, 40 bp, Artificial Sequence
  Description of Artificial Sequence: Synthetic primer
ccaccgcaatgctctccaggaggcccatcaggggcaccac

SEQ ID NO: 12618 - DNA, 40 bp, Artificial Sequence
  Description of Artificial Sequence: Synthetic primer
ctaaactagatgacaaaacgtccttagtttctttatggtc

SEQ ID NO: 12619 - DNA, 40 bp, Artificial Sequence
  Description of Artificial Sequence: Synthetic primer
aagaaactggacttaatgtgttcttattggatatgtgtag

SEQ ID NO: 12620 - DNA, 40 bp, Artificial Sequence
  Description of Artificial Sequence: Synthetic primer
ggaggccatgagcgaccgggtccgcaaagccacacagcag

SEQ ID NO: 12621 - DNA, 40 bp, Artificial Sequence
  Description of Artificial Sequence: Synthetic primer
taagcatttatgacttttacaaaatcaccaaagctatcac

SEQ ID NO: 12622 - DNA, 40 bp, Artificial Sequence
  Description of Artificial Sequence: Synthetic primer
tgagaatccttgggattaaagttttggttacaaattgttc

SEQ ID NO: 12623 - DNA, 40 bp, Artificial Sequence
  Description of Artificial Sequence: Synthetic primer
tctctgtttgctaaaatgtacgtggatattggatatgtag

SEQ ID NO: 12624 - DNA, 40 bp, Artificial Sequence
  Description of Artificial Sequence: Synthetic primer
gatgttaacgacaaagtagaaaattcattagaaccagcag

SEQ ID NO: 12625 - DNA, 40 bp, Artificial Sequence
  Description of Artificial Sequence: Synthetic primer
aaaaagaattcaacgagccgaccgtgattccctctactac

SEQ ID NO: 12626 - DNA, 40 bp, Artificial Sequence
  Description of Artificial Sequence: Synthetic primer
cttcattcgtttagcttcttgcataaaataatcggcactg

SEQ ID NO: 12627 - DNA, 40 bp, Artificial Sequence
  Description of Artificial Sequence: Synthetic primer
ctgacaatgaatcagatgaagaagttgctgggaagaaaag

SEQ ID NO: 12628 - DNA, 40 bp, Artificial Sequence
  Description of Artificial Sequence: Synthetic primer
ctgcttccagcaagtctcgatgtgctgctgtgctttacgg

SEQ ID NO: 12629 - DNA, 40 bp, Artificial Sequence
  Description of Artificial Sequence: Synthetic primer
aagccacactacagggagattgtctgggtaaaagttggac

SEQ ID NO: 12630 - DNA, 40 bp, Artificial Sequence
  Description of Artificial Sequence: Synthetic primer
tttgagtaatactccccatgcatcagaagaatcttcaatg

SEQ ID NO: 12631 - DNA, 40 bp, Artificial Sequence
  Description of Artificial Sequence: Synthetic primer
aaatctttcctctttcatataaataagaagtggaaattgc

SEQ ID NO: 12632 - DNA, 40 bp, Artificial Sequence
  Description of Artificial Sequence: Synthetic primer
aagacttcaagttctaagcctctgttcagattttaattgc

SEQ ID NO: 12633 - DNA, 40 bp, Artificial Sequence
  Description of Artificial Sequence: Synthetic primer
ggtggacctgagcacctccaccgactggaaggaggcgaaa

SEQ ID NO: 12634 - DNA, 40 bp, Artificial Sequence
  Description of Artificial Sequence: Synthetic primer
caggccggggcgggtaaacagggagtcgtggcctgagtcg

SEQ ID NO: 12635 - DNA, 40 bp, Artificial Sequence
  Description of Artificial Sequence: Synthetic primer
ttgacatattttctttgcccactttaaataaaaactctgg

SEQ ID NO: 12636 - DNA, 40 bp, Artificial Sequence
  Description of Artificial Sequence: Synthetic primer
ctgtcacagtgtagtatgaataacagtttcaccccagctc

SEQ ID NO: 12637 - DNA, 40 bp, Artificial Sequence
  Description of Artificial Sequence: Synthetic primer
gggcctcggcaatgtcggccgctctcttcagaatgatttc

SEQ ID NO: 12638 - DNA, 40 bp, Artificial Sequence
  Description of Artificial Sequence: Synthetic primer
tccagcctgaagttgtcagagtacccaaatgttgaagagc

SEQ ID NO: 12639 - DNA, 40 bp, Artificial Sequence
  Description of Artificial Sequence: Synthetic primer
ctcagccagactcttcagccaaatgccccaactttcagtc

SEQ ID NO: 12640 - DNA, 40 bp, Artificial Sequence
  Description of Artificial Sequence: Synthetic primer
gaaatccttgatggtatgaaggagagggtgctgggtaatg

SEQ ID NO: 12641 - DNA, 40 bp, Artificial Sequence
  Description of Artificial Sequence: Synthetic primer
tttgtcacatcttcaggtgctggatttttcttaccacaac

SEQ ID NO: 12642 - DNA, 40 bp, Artificial Sequence
  Description of Artificial Sequence: Synthetic primer
gcagcagcatgcagaccagccccaggacggcgtcacctac

SEQ ID NO: 12643 - DNA, 40 bp, Artificial Sequence
  Description of Artificial Sequence: Synthetic primer
tgattatctagactaaaaggagactttgagatagaataat

SEQ ID NO: 12644 - DNA, 40 bp, Artificial Sequence
  Description of Artificial Sequence: Synthetic primer
ggaatctaggcacacagtagtacacagcggtacccaagac

SEQ ID NO: 12645 - DNA, 40 bp, Artificial Sequence
  Description of Artificial Sequence: Synthetic primer
actgtatcagaaaaaccaagggaagaaccagtactaaaag

SEQ ID NO: 12646 - DNA, 40 bp, Artificial Sequence
  Description of Artificial Sequence: Synthetic primer
attggtggctgttagattgaaataacatcaccattagctc

SEQ ID NO: 12647 - DNA, 40 bp, Artificial Sequence
  Description of Artificial Sequence: Synthetic primer
ctccctccctccctccgcttttctgttgttgctgctgtgg

SEQ ID NO: 12648 - DNA, 40 bp, Artificial Sequence
  Description of Artificial Sequence: Synthetic primer
accccagcgcaccctccagagactgcccacatgagtgtcc

SEQ ID NO: 12649 - DNA, 40 bp, Artificial Sequence
  Description of Artificial Sequence: Synthetic primer
tagggagtcagttgaaattctattctgatcttattctgtg

SEQ ID NO: 12650 - DNA, 40 bp, Artificial Sequence
  Description of Artificial Sequence: Synthetic primer
gcttgtccagaaccatcaggacccatgtaaggtagaggag

SEQ ID NO: 12651 - DNA, 40 bp, Artificial Sequence
  Description of Artificial Sequence: Synthetic primer
catacactatggcgaagacgtaggtaccaatccacagcac

SEQ ID NO: 12652 - DNA, 40 bp, Artificial Sequence
  Description of Artificial Sequence: Synthetic primer
ctgcatctgacccaccttgattttcatgctagaaagtttg

SEQ ID NO: 12653 - DNA, 40 bp, Artificial Sequence
  Description of Artificial Sequence: Synthetic primer
actgtctatgagcgcctggctcatgcctccattatgaaac

SEQ ID NO: 12654 - DNA, 40 bp, Artificial Sequence
  Description of Artificial Sequence: Synthetic primer
cttttattttacacagaaacactgcctttttatttatatg

SEQ ID NO: 12655 - DNA, 40 bp, Artificial Sequence
  Description of Artificial Sequence: Synthetic primer
gggctcctggtgccgaaggttcccctggacgagacggttc

SEQ ID NO: 12656 - DNA, 40 bp, Artificial Sequence
  Description of Artificial Sequence: Synthetic primer
agtggcagtggctgtcattgttggagtggtgacaagtatc

SEQ ID NO: 12657 - DNA, 40 bp, Artificial Sequence
  Description of Artificial Sequence: Synthetic primer
aagtttctcagttgtgcctgtttcatgggggacagtttgg

SEQ ID NO: 12658 - DNA, 40 bp, Artificial Sequence
  Description of Artificial Sequence: Synthetic primer
cattctccatatacctttcaacctaataagtaactgtgag

SEQ ID NO: 12659 - DNA, 40 bp, Artificial Sequence
  Description of Artificial Sequence: Synthetic primer
atatttgcactgatgaaaattcaaattcccaaagtcaatc

SEQ ID NO: 12660 - DNA, 40 bp, Artificial Sequence
  Description of Artificial Sequence: Synthetic primer
cgcaggtcagcagcccactgcccctgataaaagcaaagag

SEQ ID NO: 12661 - DNA, 40 bp, Artificial Sequence
  Description of Artificial Sequence: Synthetic primer
aggcatctatgtgatccaggcgcccaaaggtggccaaaag

SEQ ID NO: 12662 - DNA, 40 bp, Artificial Sequence
  Description of Artificial Sequence: Synthetic primer
taaggacccgtgagaagagtttgtagcagacaagatagag

SEQ ID NO: 12663 - DNA, 40 bp, Artificial Sequence
  Description of Artificial Sequence: Synthetic primer
cggactgcacggaaacagagtgctcagaaaagagttttac

SEQ ID NO: 12664 - DNA, 40 bp, Artificial Sequence
  Description of Artificial Sequence: Synthetic primer
cgttggtgtagttgatgcacagctgctcgaaggagttcac

SEQ ID NO: 12665 - DNA, 40 bp, Artificial Sequence
  Description of Artificial Sequence: Synthetic primer
gtgccctcgcgtgccaggcccgcggcggccgaaatccgcg

SEQ ID NO: 12666 - DNA, 40 bp, Artificial Sequence
  Description of Artificial Sequence: Synthetic primer
cgtgacagaagggacaaggtcagttcccacctcaacatcg

SEQ ID NO: 12667 - DNA, 40 bp, Artificial Sequence
  Description of Artificial Sequence: Synthetic primer
cagcagcttcccgggccttctgcttccgagcagctctttc

SEQ ID NO: 12668 - DNA, 40 bp, Artificial Sequence
  Description of Artificial Sequence: Synthetic primer
ccgtggtttccctggcgcagatggtgttgctggtcccaag

SEQ ID NO: 12669 - DNA, 40 bp, Artificial Sequence
  Description of Artificial Sequence: Synthetic primer
cctcagagtgtacccaggctcttcatcagcactcggcttg

SEQ ID NO: 12670 - DNA, 40 bp, Artificial Sequence
  Description of Artificial Sequence: Synthetic primer
cttgaagtccaatccaccaacttgcaccatactttgatag

SEQ ID NO: 12671 - DNA, 40 bp, Artificial Sequence
  Description of Artificial Sequence: Synthetic primer
atgcggcttccgggtgcgatgccagctctggccctcaaag

SEQ ID NO: 12672 - DNA, 40 bp, Artificial Sequence
  Description of Artificial Sequence: Synthetic primer
agttcagagatctccttttctaactcttcacaacgtattc

SEQ ID NO: 12673 - DNA, 40 bp, Artificial Sequence
  Description of Artificial Sequence: Synthetic primer
ggaagcacactgagaaagcggaagatgtatgaggaattcc

SEQ ID NO: 12674 - DNA, 40 bp, Artificial Sequence
  Description of Artificial Sequence: Synthetic primer
gttggagatctttccaccatctggttccccacctggactg

SEQ ID NO: 12675 - DNA, 40 bp, Artificial Sequence
  Description of Artificial Sequence: Synthetic primer
ttgtagaattcctacacaggcaaaatagcatgatctgagc

SEQ ID NO: 12676 - DNA, 40 bp, Artificial Sequence
  Description of Artificial Sequence: Synthetic primer
aattctcaagtggttgcgggaaatattgatctgcaggaat

SEQ ID NO: 12677 - DNA, 40 bp, Artificial Sequence
  Description of Artificial Sequence: Synthetic primer
ctcttccccactccccaccttcaattcctgggccccaaac

SEQ ID NO: 12678 - DNA, 40 bp, Artificial Sequence
  Description of Artificial Sequence: Synthetic primer
ttgtataaaaagtttcacaggtcaataaacttagaggaaa

SEQ ID NO: 12679 - DNA, 40 bp, Artificial Sequence
  Description of Artificial Sequence: Synthetic primer
cagcagtgccatgtgccttcactgtgtcccaggaaatctg

SEQ ID NO: 12680 - DNA, 40 bp, Artificial Sequence
  Description of Artificial Sequence: Synthetic primer
tactggcagagtgggagcaccattagtttgctgtgaaatc

SEQ ID NO: 12681 - DNA, 40 bp, Artificial Sequence
  Description of Artificial Sequence: Synthetic primer
cgtggggtcattgtctgcctcctgtattctcgtgttgatg

SEQ ID NO: 12682 - DNA, 40 bp, Artificial Sequence
  Description of Artificial Sequence: Synthetic primer
tgcccccatctggctccccacctcggctgaactggatctc

SEQ ID NO: 12683 - DNA, 40 bp, Artificial Sequence
  Description of Artificial Sequence: Synthetic primer
cacttactcacaagggctgaccatgatggccctgctctgc

SEQ ID NO: 12684 - DNA, 40 bp, Artificial Sequence
  Description of Artificial Sequence: Synthetic primer
taactcactgcatttgaaaatacatgtcaaattctttctg

SEQ ID NO: 12685 - DNA, 40 bp, Artificial Sequence
  Description of Artificial Sequence: Synthetic primer
tgtttcctgttaagccgcctgcccccagtgcaaatctctg

SEQ ID NO: 12686 - DNA, 40 bp, Artificial Sequence
  Description of Artificial Sequence: Synthetic primer
ggggccagccctggtggcagcaggcctggctccagctgag

SEQ ID NO: 12687 - DNA, 40 bp, Artificial Sequence
  Description of Artificial Sequence: Synthetic primer
gtaatccagtcttcactgtagcctgaggaactgtttcaac

SEQ ID NO: 12688 - DNA, 40 bp, Artificial Sequence
  Description of Artificial Sequence: Synthetic primer
cctgaaaataaactgaaaattcctataggagccaaaattc

SEQ ID NO: 12689 - DNA, 40 bp, Artificial Sequence
  Description of Artificial Sequence: Synthetic primer
ttggttctttacttggtatattctcaggagtttttggttg

SEQ ID NO: 12690 - DNA, 40 bp, Artificial Sequence
  Description of Artificial Sequence: Synthetic primer
aggttctttgcgcccgccattctctcccccaacctcttcc

SEQ ID NO: 12691 - DNA, 40 bp, Artificial Sequence
  Description of Artificial Sequence: Synthetic primer
cttttcatcatgccacattatctgatccagtcctcacatt

SEQ ID NO: 12692 - DNA, 40 bp, Artificial Sequence
  Description of Artificial Sequence: Synthetic primer
aagccacaaaattactattgataccaacaaatctccagtc

SEQ ID NO: 12693 - DNA, 40 bp, Artificial Sequence
  Description of Artificial Sequence: Synthetic primer
ccaattagggggtaaggccccctctcaggagccatcatcg

SEQ ID NO: 12694 - DNA, 40 bp, Artificial Sequence
  Description of Artificial Sequence: Synthetic primer
ccgagaggcgaagagatgcaagcgccgtgcagcacccttt

SEQ ID NO: 12695 - DNA, 40 bp, Artificial Sequence
  Description of Artificial Sequence: Synthetic primer
ttgtcaagagtacaagactgtaattaatcacaattgtttc

SEQ ID NO: 12696 - DNA, 40 bp, Artificial Sequence
  Description of Artificial Sequence: Synthetic primer
tttcttctaatgcagcctctacaatagtttaaaaacaaaa

SEQ ID NO: 12697 - DNA, 40 bp, Artificial Sequence
  Description of Artificial Sequence: Synthetic primer
ataccaaattattatcaggcggtcttgggggaacctctgg

SEQ ID NO: 12698 - DNA, 40 bp, Artificial Sequence
  Description of Artificial Sequence: Synthetic primer
actatgatgatgaagaaacagactctgatgaagacattcg

SEQ ID NO: 12699 - DNA, 40 bp, Artificial Sequence
  Description of Artificial Sequence: Synthetic primer
cattttgtcagcctataatagcaccatgtaatggatttgc

SEQ ID NO: 12700 - DNA, 40 bp, Artificial Sequence
  Description of Artificial Sequence: Synthetic primer
tatgaaggcagatgccagcaaaaagttgctgaagaagaag

SEQ ID NO: 12701 - DNA, 40 bp, Artificial Sequence
  Description of Artificial Sequence: Synthetic primer
aaatggagacaacatcaacaagtcaccagaaggaatgatg

SEQ ID NO: 12702 - DNA, 40 bp, Artificial Sequence
  Description of Artificial Sequence: Synthetic primer
acggttttaagagcttccatttctagatccagctctgatg

SEQ ID NO: 12703 - DNA, 40 bp, Artificial Sequence
  Description of Artificial Sequence: Synthetic primer
ccttcggagttgcctgctgactgtttccaggcgcatcatc

SEQ ID NO: 12704 - DNA, 40 bp, Artificial Sequence
  Description of Artificial Sequence: Synthetic primer
tttcaatcattttttctgtttcaatagcattgtcaagcac

SEQ ID NO: 12705 - DNA, 40 bp, Artificial Sequence
  Description of Artificial Sequence: Synthetic primer
ccaataggaccagtaggaccggcagcaccactctcacctg

SEQ ID NO: 12706 - DNA, 40 bp, Artificial Sequence
  Description of Artificial Sequence: Synthetic primer
gataagagacaaacttgtacacaaacttctgaccattcac

SEQ ID NO: 12707 - DNA, 40 bp, Artificial Sequence
  Description of Artificial Sequence: Synthetic primer
acagtttctcctaactttctgctttagcgtaattgctcag

SEQ ID NO: 12708 - DNA, 40 bp, Artificial Sequence
  Description of Artificial Sequence: Synthetic primer
gaacccgtaacaactgttgcgggtttaggggctgtggtag

SEQ ID NO: 12709 - DNA, 40 bp, Artificial Sequence
  Description of Artificial Sequence: Synthetic primer
tatgccgttcagaagattgaattgaaaccttaaaaactat

SEQ ID NO: 12710 - DNA, 40 bp, Artificial Sequence
  Description of Artificial Sequence: Synthetic primer
ttgactttcctccaaagttataagaaagcaaaaaatatat

SEQ ID NO: 12711 - DNA, 40 bp, Artificial Sequence
  Description of Artificial Sequence: Synthetic primer
ttagaactttctggatttcagctttggaaagttccttctg

SEQ ID NO: 12712 - DNA, 40 bp, Artificial Sequence
  Description of Artificial Sequence: Synthetic primer
gctgccagtgactaacagccgcttttctgtctggttccat

SEQ ID NO: 12713 - DNA, 40 bp, Artificial Sequence
  Description of Artificial Sequence: Synthetic primer
actagattttgaatataagcggctaaaagaaaaagttgac

SEQ ID NO: 12714 - DNA, 40 bp, Artificial Sequence
  Description of Artificial Sequence: Synthetic primer
acaccgggcccagggcaccctcgcgggcggacccaaccag

SEQ ID NO: 12715 - DNA, 40 bp, Artificial Sequence
  Description of Artificial Sequence: Synthetic primer
gattaaccatatcccctcccctttccttccaatttatatg

SEQ ID NO: 12716 - DNA, 40 bp, Artificial Sequence
  Description of Artificial Sequence: Synthetic primer
acagctgtggcggtgaccgtggacaagaggacagccattg

SEQ ID NO: 12717 - DNA, 40 bp, Artificial Sequence
  Description of Artificial Sequence: Synthetic primer
ttttcctctataagtatttctatttctttttcccacacag

SEQ ID NO: 12718 - DNA, 40 bp, Artificial Sequence
  Description of Artificial Sequence: Synthetic primer
cctgacctacagcgagatcctggccgtcgggcgccctcgg

SEQ ID NO: 12719 - DNA, 40 bp, Artificial Sequence
  Description of Artificial Sequence: Synthetic primer
cctcccctgaccggagcgccaacacctcccccgagagcag

SEQ ID NO: 12720 - DNA, 40 bp, Artificial Sequence
  Description of Artificial Sequence: Synthetic primer
agtcaccttcataagctccagtggggaaagacataaaaag

SEQ ID NO: 12721 - DNA, 40 bp, Artificial Sequence
  Description of Artificial Sequence: Synthetic primer
attcctccgtgtccttcgtgtctcaggtccttgggaaagc

SEQ ID NO: 12722 - DNA, 40 bp, Artificial Sequence
  Description of Artificial Sequence: Synthetic primer
gtaagcagcgtggtgctggcccagagctggaaaaccaatg

SEQ ID NO: 12723 - DNA, 40 bp, Artificial Sequence
  Description of Artificial Sequence: Synthetic primer
tgcaggaggtggcctcgtccttcagctcttcatactggtc

SEQ ID NO: 12724 - DNA, 40 bp, Artificial Sequence
  Description of Artificial Sequence: Synthetic primer
cgccgcaccagctaccccaacccctgtagcagcagcactt

SEQ ID NO: 12725 - DNA, 40 bp, Artificial Sequence
  Description of Artificial Sequence: Synthetic primer
tttgatttgggaggagatattcatagtgggacagcattac

SEQ ID NO: 12726 - DNA, 40 bp, Artificial Sequence
  Description of Artificial Sequence: Synthetic primer
tcctagggtgattcttcttttgcaagaggagctgaccagg

SEQ ID NO: 12727 - DNA, 40 bp, Artificial Sequence
  Description of Artificial Sequence: Synthetic primer
cctggtggagctgggagaaaggcagaaagcctttctgacg

SEQ ID NO: 12728 - DNA, 40 bp, Artificial Sequence
  Description of Artificial Sequence: Synthetic primer
cagaaaagatggcagctcacctcctctgttggagaagcag

SEQ ID NO: 12729 - DNA, 40 bp, Artificial Sequence
  Description of Artificial Sequence: Synthetic primer
ctggaaaaatctagggtggtgatgaggaacccaggagagc

SEQ ID NO: 12730 - DNA, 40 bp, Artificial Sequence
  Description of Artificial Sequence: Synthetic primer
gtctttgtagctaataatcccacattttactctgagatgc

SEQ ID NO: 12731 - DNA, 40 bp, Artificial Sequence
  Description of Artificial Sequence: Synthetic primer
gaccaaagaagaaatgtgggcaatatgcaaccaactgctc

SEQ ID NO: 12732 - DNA, 40 bp, Artificial Sequence
  Description of Artificial Sequence: Synthetic primer
aagaaaaaactggagagtcagtgcagtccagagaattgtc

SEQ ID NO: 12733 - DNA, 40 bp, Artificial Sequence
  Description of Artificial Sequence: Synthetic primer
tatggggtcgcctgggactacaagtacctgactctgaaag

SEQ ID NO: 12734 - DNA, 40 bp, Artificial Sequence
  Description of Artificial Sequence: Synthetic primer
gtcttttactggtggcctcatgaagaaaaacttactaaac

SEQ ID NO: 12735 - DNA, 40 bp, Artificial Sequence
  Description of Artificial Sequence: Synthetic primer
tcctagtggagttttataaattaaaaggtcaaaactgaag

SEQ ID NO: 12736 - DNA, 40 bp, Artificial Sequence
  Description of Artificial Sequence: Synthetic primer
ttgtccgaagaggtggccccaactatcaggagggcttacg

SEQ ID NO: 12737 - DNA, 40 bp, Artificial Sequence
  Description of Artificial Sequence: Synthetic primer
accaaaatgaacaacaaggcagatgggacacccaagacag

SEQ ID NO: 12738 - DNA, 40 bp, Artificial Sequence
  Description of Artificial Sequence: Synthetic primer
agcggtggccgtcggggtggcgctcttcctccgctctttg

SEQ ID NO: 12739 - DNA, 40 bp, Artificial Sequence
  Description of Artificial Sequence: Synthetic primer
ccgagagcgccttctggtcaccaggtgggagggggaggag

SEQ ID NO: 12740 - DNA, 40 bp, Artificial Sequence
  Description of Artificial Sequence: Synthetic primer
tcagaaaagctattgctttggtacatgacttagtctaacc

SEQ ID NO: 12741 - DNA, 40 bp, Artificial Sequence
  Description of Artificial Sequence: Synthetic primer
aatacctactttttattcagagtgaagctaccaattacac

SEQ ID NO: 12742 - DNA, 40 bp, Artificial Sequence
  Description of Artificial Sequence: Synthetic primer
atttcacaaatcacacccccatcaactctagacaaaggtc

SEQ ID NO: 12743 - DNA, 40 bp, Artificial Sequence
  Description of Artificial Sequence: Synthetic primer
ccagctcagtcttctggttttcatccttcagggtctgtgg

SEQ ID NO: 12744 - DNA, 40 bp, Artificial Sequence
  Description of Artificial Sequence: Synthetic primer
gacttcagcaaacaacatgagacatctgactgctgaaaac

SEQ ID NO: 12745 - DNA, 40 bp, Artificial Sequence
  Description of Artificial Sequence: Synthetic primer
tgctgctttgccccggagaaacactgaggggatccagacg

SEQ ID NO: 12746 - DNA, 40 bp, Artificial Sequence
  Description of Artificial Sequence: Synthetic primer
taggtaggatctggttcttggatttccttttgctttccag

SEQ ID NO: 12747 - DNA, 40 bp, Artificial Sequence
  Description of Artificial Sequence: Synthetic primer
acagatccttcctggctttctgtttcacttgatcatttag

SEQ ID NO: 12748 - DNA, 40 bp, Artificial Sequence
  Description of Artificial Sequence: Synthetic primer
ggaggtggctcctgcgccgggtatcggggcgcgtggtatc

SEQ ID NO: 12749 - DNA, 40 bp, Artificial Sequence
  Description of Artificial Sequence: Synthetic primer
ccgggggcccgaggaggtgaaccggctcacggagagcacc

SEQ ID NO: 12750 - DNA, 40 bp, Artificial Sequence
  Description of Artificial Sequence: Synthetic primer
aatatactgtagtgtacagaagcttgaattaaccatgcac

SEQ ID NO: 12751 - DNA, 40 bp, Artificial Sequence
  Description of Artificial Sequence: Synthetic primer
tataggatctgtgttcattagtggattttgacagcaagtg

SEQ ID NO: 12752 - DNA, 40 bp, Artificial Sequence
  Description of Artificial Sequence: Synthetic primer
aatctggggccatcgaggtcctggcaccccgccgcaaaaa

SEQ ID NO: 12753 - DNA, 40 bp, Artificial Sequence
  Description of Artificial Sequence: Synthetic primer
atttaagtttgtatttaatttctgacggggcatttcacac

SEQ ID NO: 12754 - DNA, 40 bp, Artificial Sequence
  Description of Artificial Sequence: Synthetic primer
tacagttgatagtttcaactccctaaaataatgccaacaa

SEQ ID NO: 12755 - DNA, 40 bp, Artificial Sequence
  Description of Artificial Sequence: Synthetic primer
tattgcttatgtcatttcttaagcagttatgctcttaatg

SEQ ID NO: 12756 - DNA, 40 bp, Artificial Sequence
  Description of Artificial Sequence: Synthetic primer
gagaacagcctgctgggcagcagaagcatttggatctgtc

SEQ ID NO: 12757 - DNA, 40 bp, Artificial Sequence
  Description of Artificial Sequence: Synthetic primer
atctgaatgagatctccatagtttgttatgccgctgtttg

SEQ ID NO: 12758 - DNA, 40 bp, Artificial Sequence
  Description of Artificial Sequence: Synthetic primer
aagaaagccattttggaagatatggtgaggttaggaaaag

SEQ ID NO: 12759 - DNA, 40 bp, Artificial Sequence
  Description of Artificial Sequence: Synthetic primer
ctgggggcagtgcctcatcaccctcaggccacacaatctc

SEQ ID NO: 12760 - DNA, 40 bp, Artificial Sequence
  Description of Artificial Sequence: Synthetic primer
atggtgaatgtcccgtagttaatggcttctggcgctgtcc

SEQ ID NO: 12761 - DNA, 40 bp, Artificial Sequence
  Description of Artificial Sequence: Synthetic primer
aggtgactggaatcgcctgacgtactttcatgttggtctc

SEQ ID NO: 12762 - DNA, 40 bp, Artificial Sequence
  Description of Artificial Sequence: Synthetic primer
aaattcacagagaatggggatttaaggttagcagagaaac

SEQ ID NO: 12763 - DNA, 40 bp, Artificial Sequence
  Description of Artificial Sequence: Synthetic primer
ttcgtatggggactccgagggctcgtctcccgggctgtcc

SEQ ID NO: 12764 - DNA, 40 bp, Artificial Sequence
  Description of Artificial Sequence: Synthetic primer
ctatcactccttgactacttgatgagatgtctgatttctg

SEQ ID NO: 12765 - DNA, 40 bp, Artificial Sequence
  Description of Artificial Sequence: Synthetic primer
tcctcctccagcgcctcctccgcctcccccgctgctgtgc

SEQ ID NO: 12766 - DNA, 40 bp, Artificial Sequence
  Description of Artificial Sequence: Synthetic primer
cagatgctggttgctggggcaaccagtattgctcgtcggg

SEQ ID NO: 12767 - DNA, 40 bp, Artificial Sequence
  Description of Artificial Sequence: Synthetic primer
cctgcccagctgagctgcccaacatcaaacgggagatctc

SEQ ID NO: 12768 - DNA, 40 bp, Artificial Sequence
  Description of Artificial Sequence: Synthetic primer
ggccatcaaatcaaagagaggcaggcaggcatcagttaag

SEQ ID NO: 12769 - DNA, 40 bp, Artificial Sequence
  Description of Artificial Sequence: Synthetic primer
tatgacggtgtacttactgccttgtagcaaaataaagatg

SEQ ID NO: 12770 - DNA, 40 bp, Artificial Sequence
  Description of Artificial Sequence: Synthetic primer
gcaagggagaagactcctacaacccgaatactgcccagac

SEQ ID NO: 12771 - DNA, 40 bp, Artificial Sequence
  Description of Artificial Sequence: Synthetic primer
aggctgaagaagatcccgacatggaaggagatggcgaaag

SEQ ID NO: 12772 - DNA, 40 bp, Artificial Sequence
  Description of Artificial Sequence: Synthetic primer
agtccccaccattacgttcattaacaaattgcattaaaca

SEQ ID NO: 12773 - DNA, 40 bp, Artificial Sequence
  Description of Artificial Sequence: Synthetic primer
cgggaaacgctctgacatacattcccaagggagcattcac

SEQ ID NO: 12774 - DNA, 40 bp, Artificial Sequence
  Description of Artificial Sequence: Synthetic primer
cattgagctgcttgtcctttttatacctgggctcctccac

SEQ ID NO: 12775 - DNA, 40 bp, Artificial Sequence
  Description of Artificial Sequence: Synthetic primer
ttcttatgaccttggaatggcccctgattcctccatgagc

SEQ ID NO: 12776 - DNA, 40 bp, Artificial Sequence
  Description of Artificial Sequence: Synthetic primer
caacatttttgaatacattaaaagaagtaaccaactgaac

SEQ ID NO: 12777 - DNA, 40 bp, Artificial Sequence
  Description of Artificial Sequence: Synthetic primer
agcctgcctcgttggtgacccactctgcacggcgatcctc

SEQ ID NO: 12778 - DNA, 40 bp, Artificial Sequence
  Description of Artificial Sequence: Synthetic primer
tccgccctgctctctggtccagcgctctcattctttgaac

SEQ ID NO: 12779 - DNA, 40 bp, Artificial Sequence
  Description of Artificial Sequence: Synthetic primer
tcaggtcttctagtggcaaaggacactttaatgatgttgc

SEQ ID NO: 12780 - DNA, 40 bp, Artificial Sequence
  Description of Artificial Sequence: Synthetic primer
tggatctcagagatgaggattggaacaccatgttctttcc

SEQ ID NO: 12781 - DNA, 40 bp, Artificial Sequence
  Description of Artificial Sequence: Synthetic primer
agttcccacccccaccccgacaagagcaaagagttctgag

SEQ ID NO: 12782 - DNA, 40 bp, Artificial Sequence
  Description of Artificial Sequence: Synthetic primer
gagtcagtttttcccgagggaaggcaggaagattttcaat

SEQ ID NO: 12783 - DNA, 40 bp, Artificial Sequence
  Description of Artificial Sequence: Synthetic primer
attttcgatagagacgttttccggagggattccatcatag

SEQ ID NO: 12784 - DNA, 40 bp, Artificial Sequence
  Description of Artificial Sequence: Synthetic primer
aacctctcttccaagcactgattgatggcttcagggaagg

SEQ ID NO: 12785 - DNA, 40 bp, Artificial Sequence
  Description of Artificial Sequence: Synthetic primer
tcttcctcttccgcacttgtgtgccgcctctggctatgtc

SEQ ID NO: 12786 - DNA, 40 bp, Artificial Sequence
  Description of Artificial Sequence: Synthetic primer
aaggacactcatcacagccagggcagctgtggaatgttgc

SEQ ID NO: 12787 - DNA, 40 bp, Artificial Sequence
  Description of Artificial Sequence: Synthetic primer
ataaaggagattgtgaagaaacattctcagtttattggat

SEQ ID NO: 12788 - DNA, 40 bp, Artificial Sequence
  Description of Artificial Sequence: Synthetic primer
ccctgaatttgctagaagttttcttgtgtctggaggtttc

SEQ ID NO: 12789 - DNA, 40 bp, Artificial Sequence
  Description of Artificial Sequence: Synthetic primer
tttcacttgaagcagaatttgatacaatgagatgcaacat

SEQ ID NO: 12790 - DNA, 40 bp, Artificial Sequence
  Description of Artificial Sequence: Synthetic primer
ggagatcaggccaaacatcaagcatgttgggaggggcaca

SEQ ID NO: 12791 - DNA, 40 bp, Artificial Sequence
  Description of Artificial Sequence: Synthetic primer
tctggcagccaccaacgcagctataagcaaatactacatc

SEQ ID NO: 12792 - DNA, 40 bp, Artificial Sequence
  Description of Artificial Sequence: Synthetic primer
acgccgtaggtggaaaggcgaaccctgagtggaggatgtt

SEQ ID NO: 12793 - DNA, 40 bp, Artificial Sequence
  Description of Artificial Sequence: Synthetic primer
gcaagaagctactaacttcccactgagaccttttgtcatc

SEQ ID NO: 12794 - DNA, 40 bp, Artificial Sequence
  Description of Artificial Sequence: Synthetic primer
aattagtgctggaattttggtgttcatcctccttctccta

SEQ ID NO: 12795 - DNA, 40 bp, Artificial Sequence
  Description of Artificial Sequence: Synthetic primer
agctgctcaatgaggaacacaactgcatcatggagaatcc

SEQ ID NO: 12796 - DNA, 40 bp, Artificial Sequence
  Description of Artificial Sequence: Synthetic primer
gaggtttccaccagaaggcggatgtggagaagggccactg

SEQ ID NO: 12797 - DNA, 40 bp, Artificial Sequence
  Description of Artificial Sequence: Synthetic primer
gatgatctcctgctccaagttcttacggatgcctgtgttg

SEQ ID NO: 12798 - DNA, 40 bp, Artificial Sequence
  Description of Artificial Sequence: Synthetic primer
atccagctgattgaggcccatccacacctccactgtttta

SEQ ID NO: 12799 - DNA, 40 bp, Artificial Sequence
  Description of Artificial Sequence: Synthetic primer
tggtgtagatatgatcaaaaagggattcaattgccatcca

SEQ ID NO: 12800 - DNA, 40 bp, Artificial Sequence
  Description of Artificial Sequence: Synthetic primer
gatgaggaaccatttgtgctgccccctgctggggagatgg

SEQ ID NO: 12801 - DNA, 40 bp, Artificial Sequence
  Description of Artificial Sequence: Synthetic primer
catcataacattagccagacgatgcccttcggccacaagc

SEQ ID NO: 12802 - DNA, 40 bp, Artificial Sequence
  Description of Artificial Sequence: Synthetic primer
tttgaaattggcccctatgggaataatttaaagcccatcc

SEQ ID NO: 12803 - DNA, 40 bp, Artificial Sequence
  Description of Artificial Sequence: Synthetic primer
gagatcctggcggcgaatgccatccccaaaggcttcatgg

SEQ ID NO: 12804 - DNA, 40 bp, Artificial Sequence
  Description of Artificial Sequence: Synthetic primer
acacacatcgatgttttccatccagtcatcttccgggtgt

SEQ ID NO: 12805 - DNA, 40 bp, Artificial Sequence
  Description of Artificial Sequence: Synthetic primer
gaatggagggactccttgtcagacagtgacagcatcatag

SEQ ID NO: 12806 - DNA, 40 bp, Artificial Sequence
  Description of Artificial Sequence: Synthetic primer
gatgattcgcagtttctggttctatggaaagacattagcc

SEQ ID NO: 12807 - DNA, 40 bp, Artificial Sequence
  Description of Artificial Sequence: Synthetic primer
agcagggcacaatggggaacagcctgacatggagcaatgg

SEQ ID NO: 12808 - DNA, 40 bp, Artificial Sequence
  Description of Artificial Sequence: Synthetic primer
gaaggccaaacacagcatcgacggcatcctgggcgacaaa

SEQ ID NO: 12809 - DNA, 40 bp, Artificial Sequence
  Description of Artificial Sequence: Synthetic primer
agctgaaggcacgccgcttcctgatattgagtggatgata

SEQ ID NO: 12810 - DNA, 40 bp, Artificial Sequence
  Description of Artificial Sequence: Synthetic primer
cttctgagatgccaactcttttgaggaaggagtaattttg

SEQ ID NO: 12811 - DNA, 40 bp, Artificial Sequence
  Description of Artificial Sequence: Synthetic primer
tagtaagacacgctcgttaacaaaaactgaaattaaatag

SEQ ID NO: 12812 - DNA, 40 bp, Artificial Sequence
  Description of Artificial Sequence: Synthetic primer
ggtcatctgcttctgtgaccacgggacggtgctggctgag

SEQ ID NO: 12813 - DNA, 40 bp, Artificial Sequence
  Description of Artificial Sequence: Synthetic primer
tcctacacatatggagacgcaggccggagcaacggcacac

SEQ ID NO: 12814 - DNA, 40 bp, Artificial Sequence
  Description of Artificial Sequence: Synthetic primer
gccaaagccattgaaaagaatgtgctgttttcacatcttg

SEQ ID NO: 12815 - DNA, 40 bp, Artificial Sequence
  Description of Artificial Sequence: Synthetic primer
gtgttcttttggggtagtgtctgggatccagtacgagttg

SEQ ID NO: 12816 - DNA, 40 bp, Artificial Sequence
  Description of Artificial Sequence: Synthetic primer
tgacaccatcggggtccattccctctgggccgccatgttc

SEQ ID NO: 12817 - DNA, 40 bp, Artificial Sequence
  Description of Artificial Sequence: Synthetic primer
cctcattttcatcagtcacaccagaaggcagtagttcagg

SEQ ID NO: 12818 - DNA, 40 bp, Artificial Sequence
  Description of Artificial Sequence: Synthetic primer
tgccttactttcatgtgcaatgagaattacttaagaattg

SEQ ID NO: 12819 - DNA, 40 bp, Artificial Sequence
  Description of Artificial Sequence: Synthetic primer
tatgaaacccagatgtcaccaaatggacattaatagttgc

SEQ ID NO: 12820 - DNA, 40 bp, Artificial Sequence
  Description of Artificial Sequence: Synthetic primer
ttaaccaaagccagcctggcatactttgaagatcgtcatg

SEQ ID NO: 12821 - DNA, 40 bp, Artificial Sequence
  Description of Artificial Sequence: Synthetic primer
tcctgtttctgggacggggacttcagcttggaggaagcag

SEQ ID NO: 12822 - DNA, 40 bp, Artificial Sequence
  Description of Artificial Sequence: Synthetic primer
agaaagtaccaggcactaggtcggcgctgccgggagatcg

SEQ ID NO: 12823 - DNA, 40 bp, Artificial Sequence
  Description of Artificial Sequence: Synthetic primer
atgagttccttctgagtccttgcccgggctgactgttcac

SEQ ID NO: 12824 - DNA, 40 bp, Artificial Sequence
  Description of Artificial Sequence: Synthetic primer
gtctcttctttaaatctttcactctttttaaatggtcgag

SEQ ID NO: 12825 - DNA, 40 bp, Artificial Sequence
  Description of Artificial Sequence: Synthetic primer
ttcttgtgcttctgcttaaggcgttctttgtcctttcgac

SEQ ID NO: 12826 - DNA, 40 bp, Artificial Sequence
  Description of Artificial Sequence: Synthetic primer
tgccatgttttcggtctcctttatcgcaggagagactgtg

SEQ ID NO: 12827 - DNA, 40 bp, Artificial Sequence
  Description of Artificial Sequence: Synthetic primer
ggtagttagggtgaacattccatttgtagatggtgaagag

SEQ ID NO: 12828 - DNA, 40 bp, Artificial Sequence
  Description of Artificial Sequence: Synthetic primer
cagtcgtgttacagaagcattgtctgctaacttcaaccac

SEQ ID NO: 12829 - DNA, 40 bp, Artificial Sequence
  Description of Artificial Sequence: Synthetic primer
cctcctccaccacctcttgatgaagaggctttcaaagtac

SEQ ID NO: 12830 - DNA, 40 bp, Artificial Sequence
  Description of Artificial Sequence: Synthetic primer
catgtacataatgtgctaggacaagtatacaagagaagac

SEQ ID NO: 12831 - DNA, 40 bp, Artificial Sequence
  Description of Artificial Sequence: Synthetic primer
ttgctcatgtagaacatgaagaaaccttatccagccgaag

SEQ ID NO: 12832 - DNA, 40 bp, Artificial Sequence
  Description of Artificial Sequence: Synthetic primer
ggctgggcactatctcttcagaactgctgctctgggtctc

SEQ ID NO: 12833 - DNA, 40 bp, Artificial Sequence
  Description of Artificial Sequence: Synthetic primer
atccgggagagccagcggcagccagggacctacactttgg

SEQ ID NO: 12834 - DNA, 40 bp, Artificial Sequence
  Description of Artificial Sequence: Synthetic primer
tttaggacggaagaaatgaacactatcgaggtaagatatg

SEQ ID NO: 12835 - DNA, 40 bp, Artificial Sequence
  Description of Artificial Sequence: Synthetic primer
tgtggcatcagtcaagactttaagccctggaaaattaaag

SEQ ID NO: 12836 - DNA, 40 bp, Artificial Sequence
  Description of Artificial Sequence: Synthetic primer
ctaaataatccgtcattcctagaggtacaaaggctacatc

SEQ ID NO: 12837 - DNA, 40 bp, Artificial Sequence
  Description of Artificial Sequence: Synthetic primer
tgcaaataatttttaaagaaaagcctataattacatcatc

SEQ ID NO: 12838 - DNA, 40 bp, Artificial Sequence
  Description of Artificial Sequence: Synthetic primer
gattgccattgagactgacagagtcttcccgatgagttcc

SEQ ID NO: 12839 - DNA, 40 bp, Artificial Sequence
  Description of Artificial Sequence: Synthetic primer
ggcttcacaccattccccattgtgattatagcctaagacc

SEQ ID NO: 12840 - DNA, 40 bp, Artificial Sequence
  Description of Artificial Sequence: Synthetic primer
cggcgccgactccacagagtcccgtggggctggggctgtg

SEQ ID NO: 12841 - DNA, 40 bp, Artificial Sequence
  Description of Artificial Sequence: Synthetic primer
gagatgcagaggtgtttcatgctagactaaatctgttttc

SEQ ID NO: 12842 - DNA, 40 bp, Artificial Sequence
  Description of Artificial Sequence: Synthetic primer
atgtgggaaagccttcagatctgcctcaaaccttcagatg

SEQ ID NO: 12843 - DNA, 40 bp, Artificial Sequence
  Description of Artificial Sequence: Synthetic primer
catttcttacaaaattaagtggcattaaacagagaaatag

SEQ ID NO: 12844 - DNA, 40 bp, Artificial Sequence
  Description of Artificial Sequence: Synthetic primer
cctgggctatgcaacaaaatacacagctcgatctaagtgc

SEQ ID NO: 12845 - DNA, 40 bp, Artificial Sequence
  Description of Artificial Sequence: Synthetic primer
cccaggtgctggtttacttccaaaaatactattcccactg

SEQ ID NO: 12846 - DNA, 40 bp, Artificial Sequence
  Description of Artificial Sequence: Synthetic primer
aacaccccaggccaggttggtcataggctgtgattttagc

SEQ ID NO: 12847 - DNA, 40 bp, Artificial Sequence
  Description of Artificial Sequence: Synthetic primer
gggctgacgcagagcaggggcagaaactccagaaaattag

SEQ ID NO: 12848 - DNA, 40 bp, Artificial Sequence
  Description of Artificial Sequence: Synthetic primer
atatgagggagacaaatgagttgatagtttgaattatagg

SEQ ID NO: 12849 - DNA, 40 bp, Artificial Sequence
  Description of Artificial Sequence: Synthetic primer
agaacatgctaaagaaccaggattgaaatcagctggagtg

SEQ ID NO: 12850 - DNA, 40 bp, Artificial Sequence
  Description of Artificial Sequence: Synthetic primer
caggcgtggaggccagtggggccggggaggcccgggccag

SEQ ID NO: 12851 - DNA, 40 bp, Artificial Sequence
  Description of Artificial Sequence: Synthetic primer
aatctgggtgttccagcacaggcccagtcttgtactcagc

SEQ ID NO: 12852 - DNA, 40 bp, Artificial Sequence
  Description of Artificial Sequence: Synthetic primer
acttgattttatcttctcccatcattaaggaattcatgtc

SEQ ID NO: 12853 - DNA, 40 bp, Artificial Sequence
  Description of Artificial Sequence: Synthetic primer
ccgaaacagtgtaccaacgaattcaccaaccaggggtttc

SEQ ID NO: 12854 - DNA, 40 bp, Artificial Sequence
  Description of Artificial Sequence: Synthetic primer
aggagcgggtggccccgcgctgcgcccgccctcgcctcac

SEQ ID NO: 12855 - DNA, 40 bp, Artificial Sequence
  Description of Artificial Sequence: Synthetic primer
agaacacttaaatgtaccattatttattgaattagctgtg

SEQ ID NO: 12856 - DNA, 40 bp, Artificial Sequence
  Description of Artificial Sequence: Synthetic primer
cggcccctttagactctttagactgacatggtggagaatg

SEQ ID NO: 12857 - DNA, 40 bp, Artificial Sequence
  Description of Artificial Sequence: Synthetic primer
gccgccgcgtctctctagcgctccgagctgcgtccccatc

SEQ ID NO: 12858 - DNA, 40 bp, Artificial Sequence
  Description of Artificial Sequence: Synthetic primer
cagcatatttgagtcatttccttcgtacccacagtgcttc

SEQ ID NO: 12859 - DNA, 40 bp, Artificial Sequence
  Description of Artificial Sequence: Synthetic primer
tatccaaagaatactccctggtagcaactctgtgaagcag

SEQ ID NO: 12860 - DNA, 40 bp, Artificial Sequence
  Description of Artificial Sequence: Synthetic primer
actatgagctcacagacagggcttcgcacaaactcaaatc

SEQ ID NO: 12861 - DNA, 40 bp, Artificial Sequence
  Description of Artificial Sequence: Synthetic primer
agttgggacaaataaaggattctcatgggaaggggaggac

SEQ ID NO: 12862 - DNA, 40 bp, Artificial Sequence
  Description of Artificial Sequence: Synthetic primer
ggccctgtgtaccccgggccttatcggcaggcaagtgagg

SEQ ID NO: 12863 - DNA, 40 bp, Artificial Sequence
  Description of Artificial Sequence: Synthetic primer
ttcttgaatctgagaaagttcgaattcgggaaatgagtag

SEQ ID NO: 12864 - DNA, 40 bp, Artificial Sequence
  Description of Artificial Sequence: Synthetic primer
tccgcgccgagggcaacagccgcttcacctacagcgtcac

SEQ ID NO: 12865 - DNA, 40 bp, Artificial Sequence
  Description of Artificial Sequence: Synthetic primer
gctggaaaacctggtcgtcctggtgagcgtgggcctcctg

SEQ ID NO: 12866 - DNA, 40 bp, Artificial Sequence
  Description of Artificial Sequence: Synthetic primer
cagcgtgaagatctcccagagcaggaccccaaaggaccag

SEQ ID NO: 12867 - DNA, 40 bp, Artificial Sequence
  Description of Artificial Sequence: Synthetic primer
agctgctactggaagtcaacgagaacggcaagaggaggac

SEQ ID NO: 12868 - DNA, 40 bp, Artificial Sequence
  Description of Artificial Sequence: Synthetic primer
gcaaccaagagagccccaaagccactggagtctttaccac

SEQ ID NO: 12869 - DNA, 40 bp, Artificial Sequence
  Description of Artificial Sequence: Synthetic primer
agtcattctcacgaatctggaactggtcccgcaggtattc

SEQ ID NO: 12870 - DNA, 40 bp, Artificial Sequence
  Description of Artificial Sequence: Synthetic primer
gcggctcagcttgtcgtaattcatggctggccggttcttc

SEQ ID NO: 12871 - DNA, 40 bp, Artificial Sequence
  Description of Artificial Sequence: Synthetic primer
cagccaggtcccacttgagcttccctaggaccagcacctc

SEQ ID NO: 12872 - DNA, 40 bp, Artificial Sequence
  Description of Artificial Sequence: Synthetic primer
tattaaaataatacacatctgaacctctaacagagcaaac

SEQ ID NO: 12873 - DNA, 40 bp, Artificial Sequence
  Description of Artificial Sequence: Synthetic primer
attttgttcctgcttggctaaatttctcaacaccacagtc

SEQ ID NO: 12874 - DNA, 40 bp, Artificial Sequence
  Description of Artificial Sequence: Synthetic primer
atatatctcggatctactctcctctgaactagactttgtc

SEQ ID NO: 12875 - DNA, 40 bp, Artificial Sequence
  Description of Artificial Sequence: Synthetic primer
gggaggggctgggcggcctgaccctgcgtgagaagacctg

SEQ ID NO: 12876 - DNA, 40 bp, Artificial Sequence
  Description of Artificial Sequence: Synthetic primer
taaaagtttaatcttttcacccatttgataaatacacaag

SEQ ID NO: 12877 - DNA, 40 bp, Artificial Sequence
  Description of Artificial Sequence: Synthetic primer
cgtgctaactttttctgtaaatctgaaataaaaggtgctg

SEQ ID NO: 12878 - DNA, 40 bp, Artificial Sequence
  Description of Artificial Sequence: Synthetic primer
caggacagtggaacagcttgttcagatttaagcatcttgc

SEQ ID NO: 12879 - DNA, 40 bp, Artificial Sequence
  Description of Artificial Sequence: Synthetic primer
gtcactttactggtttctaatttgctttcttcactttctc

SEQ ID NO: 12880 - DNA, 40 bp, Artificial Sequence
  Description of Artificial Sequence: Synthetic primer
gtaccaagccccaggacccctatggaggagggggccagtc

SEQ ID NO: 12881 - DNA, 40 bp, Artificial Sequence
  Description of Artificial Sequence: Synthetic primer
ttggtagaaatgcaatcaccagtaaagaggtacgaaaaag

SEQ ID NO: 12882 - DNA, 40 bp, Artificial Sequence
  Description of Artificial Sequence: Synthetic primer
aagacgagaactatttatatgacaccaactatggtagcac

SEQ ID NO: 12883 - DNA, 40 bp, Artificial Sequence
  Description of Artificial Sequence: Synthetic primer
agggccgggcgcagagtgccatgggcggcctctcttatac

SEQ ID NO: 12884 - DNA, 40 bp, Artificial Sequence
  Description of Artificial Sequence: Synthetic primer
ttggcatttgttgggtttggccaaggtctaccaccacctg

SEQ ID NO: 12885 - DNA, 40 bp, Artificial Sequence
  Description of Artificial Sequence: Synthetic primer
ctgcttaagattcccacttaaagctgcataaattgctctc

SEQ ID NO: 12886 - DNA, 40 bp, Artificial Sequence
  Description of Artificial Sequence: Synthetic primer
acgggacattcaccacatcgactactataaaaagacaacc

SEQ ID NO: 12887 - DNA, 40 bp, Artificial Sequence
  Description of Artificial Sequence: Synthetic primer
tttccatatgtattagggttcaggaactatgatgctaatg

SEQ ID NO: 12888 - DNA, 40 bp, Artificial Sequence
  Description of Artificial Sequence: Synthetic primer
tctagctgtgccttcaatccactgatctctctgtatagtc

SEQ ID NO: 12889 - DNA, 40 bp, Artificial Sequence
  Description of Artificial Sequence: Synthetic primer
gtgacattaagaaaacatgctaagactggccagaaaaatg

SEQ ID NO: 12890 - DNA, 40 bp, Artificial Sequence
  Description of Artificial Sequence: Synthetic primer
aattttcttgaataaagtgttactaatgaattcttcttcc

SEQ ID NO: 12891 - DNA, 40 bp, Artificial Sequence
  Description of Artificial Sequence: Synthetic primer
tttcttaaataaagaagcctgggacacagtagatagacac

SEQ ID NO: 12892 - DNA, 40 bp, Artificial Sequence
  Description of Artificial Sequence: Synthetic primer
agtcaaaactcccatgaagtccagtaaaacggatctccag

SEQ ID NO: 12893 - DNA, 40 bp, Artificial Sequence
  Description of Artificial Sequence: Synthetic primer
ggtggtgcttctgctggacgcgtttatacctgcaagactg

SEQ ID NO: 12894 - DNA, 40 bp, Artificial Sequence
  Description of Artificial Sequence: Synthetic primer
ctacaacatactgtcatactgctgggttttcatgggtagg

SEQ ID NO: 12895 - DNA, 40 bp, Artificial Sequence
  Description of Artificial Sequence: Synthetic primer
ttccagagagttcttggtcgttggatccttggcatctttg

SEQ ID NO: 12896 - DNA, 40 bp, Artificial Sequence
  Description of Artificial Sequence: Synthetic primer
gtgggggggcacccactttggagtggagggcagagagagc

SEQ ID NO: 12897 - DNA, 40 bp, Artificial Sequence
  Description of Artificial Sequence: Synthetic primer
accgcacttcttgaacaaaacctgcatactttagatagtc

SEQ ID NO: 12898 - DNA, 40 bp, Artificial Sequence
  Description of Artificial Sequence: Synthetic primer
tagcagacataattgtgtgcgtcaagagaaatttgtaatc

SEQ ID NO: 12899 - DNA, 40 bp, Artificial Sequence
  Description of Artificial Sequence: Synthetic primer
tcttctataatggcagtcttctcctttagacttagtgcag

SEQ ID NO: 12900 - DNA, 40 bp, Artificial Sequence
  Description of Artificial Sequence: Synthetic primer
aagttggttcaacacagatttgcaacttggattcagagac

SEQ ID NO: 12901 - DNA, 40 bp, Artificial Sequence
  Description of Artificial Sequence: Synthetic primer
gcccccagccccagccctcccattggtggaggcccttttg

SEQ ID NO: 12902 - DNA, 40 bp, Artificial Sequence
  Description of Artificial Sequence: Synthetic primer
ggctgtggctgtggggcagagtgagcctggcagggtggag

SEQ ID NO: 12903 - DNA, 40 bp, Artificial Sequence
  Description of Artificial Sequence: Synthetic primer
caaggtccccggcctctgggtgcaccacacatctgtcatc

SEQ ID NO: 12904 - DNA, 40 bp, Artificial Sequence
  Description of Artificial Sequence: Synthetic primer
gagcgaggccagacttcctgcttgcttcctaggttccttc

SEQ ID NO: 12905 - DNA, 40 bp, Artificial Sequence
  Description of Artificial Sequence: Synthetic primer
ttcagttcatgaagacaaaaaccgagttccctatgtaaag

SEQ ID NO: 12906 - DNA, 40 bp, Artificial Sequence
  Description of Artificial Sequence: Synthetic primer
cacagctaatggaaaaacacgaggactcgggtaatggttc

SEQ ID NO: 12907 - DNA, 40 bp, Artificial Sequence
  Description of Artificial Sequence: Synthetic primer
ccactacgccaagccctcgcccttcttcatggaccccatc

SEQ ID NO: 12908 - DNA, 40 bp, Artificial Sequence
  Description of Artificial Sequence: Synthetic primer
ggatattcttttttatatttatggctttatgccatttatc

SEQ ID NO: 12909 - DNA, 40 bp, Artificial Sequence
  Description of Artificial Sequence: Synthetic primer
aaaaatattttctattcctgtttgcatgtgggttggtttc

SEQ ID NO: 12910 - DNA, 40 bp, Artificial Sequence
  Description of Artificial Sequence: Synthetic primer
attccaaagtgcatcagaactgtcattcccttctaatatc

SEQ ID NO: 12911 - DNA, 40 bp, Artificial Sequence
  Description of Artificial Sequence: Synthetic primer
ccagaaaagactatgctacaagaaccaaaattgaagtaag

SEQ ID NO: 12912 - DNA, 40 bp, Artificial Sequence
  Description of Artificial Sequence: Synthetic primer
ctattcccattctggaaagggagaggtatcagctcttagg

SEQ ID NO: 12913 - DNA, 40 bp, Artificial Sequence
  Description of Artificial Sequence: Synthetic primer
cgtcagtattttctaattggccatcattcacagagcttac

SEQ ID NO: 12914 - DNA, 40 bp, Artificial Sequence
  Description of Artificial Sequence: Synthetic primer
gaacaaaagctgagtggaaaactttatctggttgatttag

SEQ ID NO: 12915 - DNA, 40 bp, Artificial Sequence
  Description of Artificial Sequence: Synthetic primer
gccgctacgctccggaaggcggcgccgggaccgggtgagg

SEQ ID NO: 12916 - DNA, 40 bp, Artificial Sequence
  Description of Artificial Sequence: Synthetic primer
tatacaaactgtgtatattatgtatggggtgtcagaaatg

SEQ ID NO: 12917 - DNA, 40 bp, Artificial Sequence
  Description of Artificial Sequence: Synthetic primer
atctgtcaaagctgggaccaaggaactttgggttttaatc

SEQ ID NO: 12918 - DNA, 40 bp, Artificial Sequence
  Description of Artificial Sequence: Synthetic primer
cagtgatctgcagctttcttcaccttctccctttctgttg

SEQ ID NO: 12919 - DNA, 40 bp, Artificial Sequence
  Description of Artificial Sequence: Synthetic primer
aggtgctggacattgatcttcatgctcagatccattttgg

SEQ ID NO: 12920 - DNA, 40 bp, Artificial Sequence
  Description of Artificial Sequence: Synthetic primer
acgcatgagttcttccgcctcctttccctgtgtcatactg

SEQ ID NO: 12921 - DNA, 40 bp, Artificial Sequence
  Description of Artificial Sequence: Synthetic primer
ggtcagacgagaggagctgatctcaattggaggggtggtg

SEQ ID NO: 12922 - DNA, 40 bp, Artificial Sequence
  Description of Artificial Sequence: Synthetic primer
tgagctagctcctctttcgacttggctgcctgtttcttcc

SEQ ID NO: 12923 - DNA, 40 bp, Artificial Sequence
  Description of Artificial Sequence: Synthetic primer
gacaggcactgcaagtggctgccaggctgggatgctgagg

SEQ ID NO: 12924 - DNA, 40 bp, Artificial Sequence
  Description of Artificial Sequence: Synthetic primer
ttttcaacttggatcattaggcttacgtactacttgtttc

SEQ ID NO: 12925 - DNA, 40 bp, Artificial Sequence
  Description of Artificial Sequence: Synthetic primer
ggtgcattttactgttttgtattttcatttttggaggtag

SEQ ID NO: 12926 - DNA, 40 bp, Artificial Sequence
  Description of Artificial Sequence: Synthetic primer
tgtgacaacagcagagggtacaccagggacaacagaccag

SEQ ID NO: 12927 - DNA, 40 bp, Artificial Sequence
  Description of Artificial Sequence: Synthetic primer
aaatgcctcctgttcagttcaaacttctgggaacattaag

SEQ ID NO: 12928 - DNA, 40 bp, Artificial Sequence
  Description of Artificial Sequence: Synthetic primer
ttggcagccgtccagtcagtttaggggagggaggtatttg

SEQ ID NO: 12929 - DNA, 40 bp, Artificial Sequence
  Description of Artificial Sequence: Synthetic primer
agagagcctgggactgaacggtgacttcagtgttctcaac

SEQ ID NO: 12930 - DNA, 40 bp, Artificial Sequence
  Description of Artificial Sequence: Synthetic primer
cagggtgaccggccccatgagcagatccaggtcgttgaag

SEQ ID NO: 12931 - DNA, 40 bp, Artificial Sequence
  Description of Artificial Sequence: Synthetic primer
cgcggagcaggcggaggcggataagaaagccgctgaggac

SEQ ID NO: 12932 - DNA, 40 bp, Artificial Sequence
  Description of Artificial Sequence: Synthetic primer
gctggagtagtccagggtgtccttccacgagtgcatgagg

SEQ ID NO: 12933 - DNA, 40 bp, Artificial Sequence
  Description of Artificial Sequence: Synthetic primer
ccgaacctcgcccccgccccacagcgcgcccagcgtctcc

SEQ ID NO: 12934 - DNA, 40 bp, Artificial Sequence
  Description of Artificial Sequence: Synthetic primer
acattatgaaagaattctctacccatatgagcttttccag

SEQ ID NO: 12935 - DNA, 40 bp, Artificial Sequence
  Description of Artificial Sequence: Synthetic primer
gcattggagactgagcaaaaggaaatgtgaaacgaataac

SEQ ID NO: 12936 - DNA, 40 bp, Artificial Sequence
  Description of Artificial Sequence: Synthetic primer
atcatgatagtttagcaataaaacagttggaagcaacatc

SEQ ID NO: 12937 - DNA, 40 bp, Artificial Sequence
  Description of Artificial Sequence: Synthetic primer
cttgaacaagaatttaatcaaaagagagcaaaatttaagg

SEQ ID NO: 12938 - DNA, 40 bp, Artificial Sequence
  Description of Artificial Sequence: Synthetic primer
ccggcgccgcgccggggttgctatggagcttagacaatac

SEQ ID NO: 12939 - DNA, 40 bp, Artificial Sequence
  Description of Artificial Sequence: Synthetic primer
cacaatagcaagacccccaagaaatacttgatctaaactg

SEQ ID NO: 12940 - DNA, 40 bp, Artificial Sequence
  Description of Artificial Sequence: Synthetic primer
ttattatgatttccaatcaaagtatttattgttccttcag

SEQ ID NO: 12941 - DNA, 40 bp, Artificial Sequence
  Description of Artificial Sequence: Synthetic primer
tgattgtcaaccccgcacctgccgccaccagcccaccttg

SEQ ID NO: 12942 - DNA, 40 bp, Artificial Sequence
  Description of Artificial Sequence: Synthetic primer
ggaactccatctgcccagtgctaacatggttcaaagagag

SEQ ID NO: 12943 - DNA, 40 bp, Artificial Sequence
  Description of Artificial Sequence: Synthetic primer
ggctgtttacatgcctatacgacaatggagtggaaaagag

SEQ ID NO: 12944 - DNA, 40 bp, Artificial Sequence
  Description of Artificial Sequence: Synthetic primer
cagctatataggggccaaacaagtgaggtttgactccatc

SEQ ID NO: 12945 - DNA, 40 bp, Artificial Sequence
  Description of Artificial Sequence: Synthetic primer
ccgggtcctgtgcaggatagtagccaccactgtaataatc

SEQ ID NO: 12946 - DNA, 40 bp, Artificial Sequence
  Description of Artificial Sequence: Synthetic primer
tttgatagttctgacctttcctttgcaattcagtgcagta

SEQ ID NO: 12947 - DNA, 40 bp, Artificial Sequence
  Description of Artificial Sequence: Synthetic primer
ttttaaatctcagaggtagcagtaaacttttcagtattgc

SEQ ID NO: 12948 - DNA, 40 bp, Artificial Sequence
  Description of Artificial Sequence: Synthetic primer
aaaaaaagtaacagattttctttacatcttggcaccttgt

SEQ ID NO: 12949 - DNA, 40 bp, Artificial Sequence
  Description of Artificial Sequence: Synthetic primer
ggccgggaaccggcgaagagacagactgtgcagcgactac

SEQ ID NO: 12950 - DNA, 40 bp, Artificial Sequence
  Description of Artificial Sequence: Synthetic primer
ccccctgtgttgtgggtggcggggatcagggctgtagtgt

SEQ ID NO: 12951 - DNA, 40 bp, Artificial Sequence
  Description of Artificial Sequence: Synthetic primer
tgtggattatattacatgataacctacctggggaacagtc

SEQ ID NO: 12952 - DNA, 40 bp, Artificial Sequence
  Description of Artificial Sequence: Synthetic primer
tgccctcggggtcaaaggtccggaagtcaaactcagctac

SEQ ID NO: 12953 - DNA, 40 bp, Artificial Sequence
  Description of Artificial Sequence: Synthetic primer
ctcaagtcggagcaggaggagtacgaggcagagggcatcg

SEQ ID NO: 12954 - DNA, 40 bp, Artificial Sequence
  Description of Artificial Sequence: Synthetic primer
tcggcggctgcctcggtggacaggaagcagaaggtgcttg

SEQ ID NO: 12955 - DNA, 40 bp, Artificial Sequence
  Description of Artificial Sequence: Synthetic primer
catgttgatgttgcaaaatgctgtataaagctgaaacctg

SEQ ID NO: 12956 - DNA, 40 bp, Artificial Sequence
  Description of Artificial Sequence: Synthetic primer
tccgggaggagaggcggccgagggagggactggaggaatc

SEQ ID NO: 12957 - DNA, 40 bp, Artificial Sequence
  Description of Artificial Sequence: Synthetic primer
tataaattgtttggtgtaatttcagtcctctttcatggag

SEQ ID NO: 12958 - DNA, 40 bp, Artificial Sequence
  Description of Artificial Sequence: Synthetic primer
cagaacctgtggttattccaagagattctttgcttaggag

SEQ ID NO: 12959 - DNA, 40 bp, Artificial Sequence
  Description of Artificial Sequence: Synthetic primer
caaggggcaggtcgccactgtcatcaagaagaccatcaac

SEQ ID NO: 12960 - DNA, 40 bp, Artificial Sequence
  Description of Artificial Sequence: Synthetic primer
gaatgaaaaggaaactgttgcttggcttcaccagtatgtg

SEQ ID NO: 12961 - DNA, 40 bp, Artificial Sequence
  Description of Artificial Sequence: Synthetic primer
tgcccaccatcttcccgcctttggccacactgcattcatc

SEQ ID NO: 12962 - DNA, 40 bp, Artificial Sequence
  Description of Artificial Sequence: Synthetic primer
ctgacaaaagaagttcaagacttaaaagctaagcaaaatg

SEQ ID NO: 12963 - DNA, 40 bp, Artificial Sequence
  Description of Artificial Sequence: Synthetic primer
agatgaggatatttgctgtctttatattcatgacctactg

SEQ ID NO: 12964 - DNA, 40 bp, Artificial Sequence
  Description of Artificial Sequence: Synthetic primer
tgtggtataacctattgttttcccattctaataacttctc

SEQ ID NO: 12965 - DNA, 40 bp, Artificial Sequence
  Description of Artificial Sequence: Synthetic primer
gctcggcggagtcggcgcggctccgcgatccggcttactc

SEQ ID NO: 12966 - DNA, 40 bp, Artificial Sequence
  Description of Artificial Sequence: Synthetic primer
gtcatgcagccgcggtagaacgcggtgactggcgctgaag

SEQ ID NO: 12967 - DNA, 40 bp, Artificial Sequence
  Description of Artificial Sequence: Synthetic primer
agctcctgaagctcctgagtctgcttctagcggggcacag

SEQ ID NO: 12968 - DNA, 40 bp, Artificial Sequence
  Description of Artificial Sequence: Synthetic primer
tctccaagtccacctgccacgaccctgagctgccaagaag

SEQ ID NO: 12969 - DNA, 40 bp, Artificial Sequence
  Description of Artificial Sequence: Synthetic primer
tctcactgaaaagtgagagttacgcattgcagccatgaag

SEQ ID NO: 12970 - DNA, 40 bp, Artificial Sequence
  Description of Artificial Sequence: Synthetic primer
cagcatactgcacgtgggggatcatgcagaatttgtgaag

SEQ ID NO: 12971 - DNA, 40 bp, Artificial Sequence
  Description of Artificial Sequence: Synthetic primer
acccacttaagcacgcacgcgcgcacgcacggtctcagga

SEQ ID NO: 12972 - DNA, 40 bp, Artificial Sequence
  Description of Artificial Sequence: Synthetic primer
gttctttattttatagttagcaaatgaaattagaaactgc

SEQ ID NO: 12973 - DNA, 40 bp, Artificial Sequence
  Description of Artificial Sequence: Synthetic primer
ctcaataagcgtatacaacagtgggctggcagaaaccttg

SEQ ID NO: 12974 - DNA, 40 bp, Artificial Sequence
  Description of Artificial Sequence: Synthetic primer
agtggccctgacggaggggaggaagtgagtatgagcgtag

SEQ ID NO: 12975 - DNA, 40 bp, Artificial Sequence
  Description of Artificial Sequence: Synthetic primer
agcacaaagaattgattcatgttcatcaatacctgctgag

SEQ ID NO: 12976 - DNA, 40 bp, Artificial Sequence
  Description of Artificial Sequence: Synthetic primer
gaggccgcgaggccttcgctggagtttcgccgccgcagtc

SEQ ID NO: 12977 - DNA, 40 bp, Artificial Sequence
  Description of Artificial Sequence: Synthetic primer
taattttttctaccactgggccttctgcatcaacagattc

SEQ ID NO: 12978 - DNA, 40 bp, Artificial Sequence
  Description of Artificial Sequence: Synthetic primer
ggaggccagcccgggtgcccaggaaggccatgtccaccac

SEQ ID NO: 12979 - DNA, 40 bp, Artificial Sequence
  Description of Artificial Sequence: Synthetic primer
aattttttcttatcaaatcttcttttaggcagctaggaaa

SEQ ID NO: 12980 - DNA, 40 bp, Artificial Sequence
  Description of Artificial Sequence: Synthetic primer
taagttggcctcataactttggggcaagatgtgaccctac

SEQ ID NO: 12981 - DNA, 40 bp, Artificial Sequence
  Description of Artificial Sequence: Synthetic primer
acagccagttaatgtggaaacaaggtcgacaactactcag

SEQ ID NO: 12982 - DNA, 40 bp, Artificial Sequence
  Description of Artificial Sequence: Synthetic primer
acagcatgggagtcagggggtcttcagcctcagagacaag

SEQ ID NO: 12983 - DNA, 40 bp, Artificial Sequence
  Description of Artificial Sequence: Synthetic primer
tttcaatgagctggtcctgaactcctgccaatgcacttac

SEQ ID NO: 12984 - DNA, 40 bp, Artificial Sequence
  Description of Artificial Sequence: Synthetic primer
atgaatatgaacgggaagaaaccaggcaagtttatatgga

SEQ ID NO: 12985 - DNA, 40 bp, Artificial Sequence
  Description of Artificial Sequence: Synthetic primer
agtagtttactattaactaggaagactggtgtatgaggag

SEQ ID NO: 12986 - DNA, 40 bp, Artificial Sequence
  Description of Artificial Sequence: Synthetic primer
aatttttaagcaaaagaagccacaaaaatggcagcattgg

SEQ ID NO: 12987 - DNA, 40 bp, Artificial Sequence
  Description of Artificial Sequence: Synthetic primer
gtgccttctctgctgtgtggagctgcttttggacgtttag

SEQ ID NO: 12988 - DNA, 40 bp, Artificial Sequence
  Description of Artificial Sequence: Synthetic primer
caggcacaggagaggccccttgtggtggagaggagaaagc

SEQ ID NO: 12989 - DNA, 40 bp, Artificial Sequence
  Description of Artificial Sequence: Synthetic primer
ctgggtccctctgctgaccgggagctgctgaccttcttgg

SEQ ID NO: 12990 - DNA, 40 bp, Artificial Sequence
  Description of Artificial Sequence: Synthetic primer
tccacaggacgaatgcatattcaacacactgccttattac

SEQ ID NO: 12991 - DNA, 40 bp, Artificial Sequence
  Description of Artificial Sequence: Synthetic primer
ctctttctgtcgcgggtcagaaattgtccctagatgaatg

SEQ ID NO: 12992 - DNA, 40 bp, Artificial Sequence
  Description of Artificial Sequence: Synthetic primer
atactcctcctgctccgggccgtcatacacagatttgctc

SEQ ID NO: 12993 - DNA, 40 bp, Artificial Sequence
  Description of Artificial Sequence: Synthetic primer
gggcaagtgccgatgtttcctcattttgaatttgtctaag

SEQ ID NO: 12994 - DNA, 40 bp, Artificial Sequence
  Description of Artificial Sequence: Synthetic primer
cctggctgccatgaacgatcaccaccactggcagggacag

SEQ ID NO: 12995 - DNA, 40 bp, Artificial Sequence
  Description of Artificial Sequence: Synthetic primer
ttaacaaaatttttgcataaaacctgggaagtgatagaaa

SEQ ID NO: 12996 - DNA, 40 bp, Artificial Sequence
  Description of Artificial Sequence: Synthetic primer
ccagtctgttgaagaggccctcaaaaagcttggaattcag

SEQ ID NO: 12997 - DNA, 40 bp, Artificial Sequence
  Description of Artificial Sequence: Synthetic primer
aggagggaggcagggcaggtggctacttcacacacagtgc

SEQ ID NO: 12998 - DNA, 40 bp, Artificial Sequence
  Description of Artificial Sequence: Synthetic primer
gggtgagtcgcaaatagtttgctcagaagtaggcagagtc

SEQ ID NO: 12999 - DNA, 40 bp, Artificial Sequence
  Description of Artificial Sequence: Synthetic primer
caccacactgagtgatgtctggtcttatggcattctgctc

SEQ ID NO: 13000 - DNA, 40 bp, Artificial Sequence
  Description of Artificial Sequence: Synthetic primer
attctgtttcactgaggccatctatccgatttcaaggaag

SEQ ID NO: 13001 - DNA, 40 bp, Artificial Sequence
  Description of Artificial Sequence: Synthetic primer
ccaacctggattcactggagcaagatgtactgagaatgtg

SEQ ID NO: 13002 - DNA, 40 bp, Artificial Sequence
  Description of Artificial Sequence: Synthetic primer
aattgtcagaactatcatcatgagactggtatcctgatac

SEQ ID NO: 13003 - DNA, 40 bp, Artificial Sequence
  Description of Artificial Sequence: Synthetic primer
ttctttttgggtactctgttcaaagctggagggtcattcc

SEQ ID NO: 13004 - DNA, 40 bp, Artificial Sequence
  Description of Artificial Sequence: Synthetic primer
tccgaggtgacagtggcccgggctggcaacgcccttggtg

SEQ ID NO: 13005 - DNA, 40 bp, Artificial Sequence
  Description of Artificial Sequence: Synthetic primer
aattattttaattaggttaactatgtacaatattttaagc

SEQ ID NO: 13006 - DNA, 40 bp, Artificial Sequence
  Description of Artificial Sequence: Synthetic primer
gacccagccatgcagactccacctttacaacagcctcacc

SEQ ID NO: 13007 - DNA, 40 bp, Artificial Sequence
  Description of Artificial Sequence: Synthetic primer
cacagatcacaactatattttcttactagtgtcctaaaag

SEQ ID NO: 13008 - DNA, 40 bp, Artificial Sequence
  Description of Artificial Sequence: Synthetic primer
acatgagtgtgacgtggttagccagaccaggagctcaacc

SEQ ID NO: 13009 - DNA, 40 bp, Artificial Sequence
  Description of Artificial Sequence: Synthetic primer
ggcacacagggtgctggacttccctcctcagtggatttca

SEQ ID NO: 13010 - DNA, 40 bp, Artificial Sequence
  Description of Artificial Sequence: Synthetic primer
tgtgctctgaacaggacgaactggatttcctcatggaagc

SEQ ID NO: 13011 - DNA, 40 bp, Artificial Sequence
  Description of Artificial Sequence: Synthetic primer
tttattactatttggggtgggaatcaccaactttttgtgc

SEQ ID NO: 13012 - DNA, 40 bp, Artificial Sequence
  Description of Artificial Sequence: Synthetic primer
ttatttttaaagaaaaataaacaaacatacttcattctgc

SEQ ID NO: 13013 - DNA, 40 bp, Artificial Sequence
  Description of Artificial Sequence: Synthetic primer
ggcttggtgatcacatatctccttcaggtatgaataatcc

SEQ ID NO: 13014 - DNA, 40 bp, Artificial Sequence
  Description of Artificial Sequence: Synthetic primer
ccctcatagacgtctacacacacctgtgtcacagtttatg

SEQ ID NO: 13015 - DNA, 40 bp, Artificial Sequence
  Description of Artificial Sequence: Synthetic primer
cttctcagatgagaacaactactcattgagccgggagctg

SEQ ID NO: 13016 - DNA, 40 bp, Artificial Sequence
  Description of Artificial Sequence: Synthetic primer
ttggttattctgccataacagattatgtattaacttgtag

SEQ ID NO: 13017 - DNA, 40 bp, Artificial Sequence
  Description of Artificial Sequence: Synthetic primer
ttggtgaccatggtggcggcaggacgggacaggggagctg

SEQ ID NO: 13018 - DNA, 40 bp, Artificial Sequence
  Description of Artificial Sequence: Synthetic primer
gacgttagaaaaggtttttgaggaacttcaagctactgac

SEQ ID NO: 13019 - DNA, 40 bp, Artificial Sequence
  Description of Artificial Sequence: Synthetic primer
gggtctgcaggtcgcggcgcggcgcggggacccgggacgc

SEQ ID NO: 13020 - DNA, 40 bp, Artificial Sequence
  Description of Artificial Sequence: Synthetic primer
ggccccccacggagatggggcttgggcggctttagatgag

SEQ ID NO: 13021 - DNA, 40 bp, Artificial Sequence
  Description of Artificial Sequence: Synthetic primer
gcatgcaatgacccttgaaggaaaataaacagtcctggtg

SEQ ID NO: 13022 - DNA, 40 bp, Artificial Sequence
  Description of Artificial Sequence: Synthetic primer
gaaatcgccactgatttgaaagaacaccatttcctcccaa

SEQ ID NO: 13023 - DNA, 40 bp, Artificial Sequence
  Description of Artificial Sequence: Synthetic primer
tttcttatcattgaaagagatgttcctgatttcactccag

SEQ ID NO: 13024 - DNA, 40 bp, Artificial Sequence
  Description of Artificial Sequence: Synthetic primer
gctggccctgagtcgggacagggctgtgtgggcttcagtc

SEQ ID NO: 13025 - DNA, 40 bp, Artificial Sequence
  Description of Artificial Sequence: Synthetic primer
cagtgccctgagggccttcgagagctaccgcgccagacag

SEQ ID NO: 13026 - DNA, 40 bp, Artificial Sequence
  Description of Artificial Sequence: Synthetic primer
atctgaaactttaaaccgcttcaggagggccacaaacttc

SEQ ID NO: 13027 - DNA, 40 bp, Artificial Sequence
  Description of Artificial Sequence: Synthetic primer
aggcttgccgcagtcctcgatggccggcacgttcaggtag

SEQ ID NO: 13028 - DNA, 40 bp, Artificial Sequence
  Description of Artificial Sequence: Synthetic primer
tcaacatcattggctttagaatagcttgaagtttttgcac

SEQ ID NO: 13029 - DNA, 40 bp, Artificial Sequence
  Description of Artificial Sequence: Synthetic primer
acaccagaatcccacttttctaaatccacctgttgttctg

SEQ ID NO: 13030 - DNA, 40 bp, Artificial Sequence
  Description of Artificial Sequence: Synthetic primer
cgtggagatcgagaggacagcgtttgtggggttcgtggag

SEQ ID NO: 13031 - DNA, 40 bp, Artificial Sequence
  Description of Artificial Sequence: Synthetic primer
ggcaggctgcccgagagttgctccttcctcttccaaacac

SEQ ID NO: 13032 - DNA, 40 bp, Artificial Sequence
  Description of Artificial Sequence: Synthetic primer
tgctcaagcacgggcaagaaattaactttttgtaaagcag

SEQ ID NO: 13033 - DNA, 40 bp, Artificial Sequence
  Description of Artificial Sequence: Synthetic primer
ccttttttcctaggtcgacatatttgacatatccacatgc

SEQ ID NO: 13034 - DNA, 40 bp, Artificial Sequence
  Description of Artificial Sequence: Synthetic primer
ggctttaaagtcagtaagacatggtatatcagcaaatcac

SEQ ID NO: 13035 - DNA, 40 bp, Artificial Sequence
  Description of Artificial Sequence: Synthetic primer
agggggcaaaagagaagaggggaggagtattcagcatgac

SEQ ID NO: 13036 - DNA, 40 bp, Artificial Sequence
  Description of Artificial Sequence: Synthetic primer
ctctgcatcttcctcctcttccaaggccatgagtcgcttc

SEQ ID NO: 13037 - DNA, 40 bp, Artificial Sequence
  Description of Artificial Sequence: Synthetic primer
cgttaagatatattcaagagaagaaaagttgttcattcag

SEQ ID NO: 13038 - DNA, 40 bp, Artificial Sequence
  Description of Artificial Sequence: Synthetic primer
agtacttttgtattttgatatggacagtttattcatttgc

SEQ ID NO: 13039 - DNA, 40 bp, Artificial Sequence
  Description of Artificial Sequence: Synthetic primer
ttttctacctttaaatgttttagtaccctgcacctggtag

SEQ ID NO: 13040 - DNA, 40 bp, Artificial Sequence
  Description of Artificial Sequence: Synthetic primer
ccactgcaacccgggaagcctggttgttcatttctggttc

SEQ ID NO: 13041 - DNA, 40 bp, Artificial Sequence
  Description of Artificial Sequence: Synthetic primer
tgtgcacctggaaagcctggaaggtgacggggaggaagag

SEQ ID NO: 13042 - DNA, 40 bp, Artificial Sequence
  Description of Artificial Sequence: Synthetic primer
gggggtggacacctcgttctcagctggaggactcctggat

SEQ ID NO: 13043 - DNA, 40 bp, Artificial Sequence
  Description of Artificial Sequence: Synthetic primer
tgcgggcgtacacttttgcagactgagagtggagtacctg

SEQ ID NO: 13044 - DNA, 40 bp, Artificial Sequence
  Description of Artificial Sequence: Synthetic primer
ggctgaaattggttctgtgggagatgttgactctatttgc

SEQ ID NO: 13045 - DNA, 40 bp, Artificial Sequence
  Description of Artificial Sequence: Synthetic primer
ggatccgcctcccgagtggcgcggccggaaggagggtatc

SEQ ID NO: 13046 - DNA, 40 bp, Artificial Sequence
  Description of Artificial Sequence: Synthetic primer
ttgggaggagtggcgtgggggagggggtcagatctaaatg

SEQ ID NO: 13047 - DNA, 40 bp, Artificial Sequence
  Description of Artificial Sequence: Synthetic primer
tcacctgtggctccagcaggaccaggggcacctacagcac

SEQ ID NO: 13048 - DNA, 40 bp, Artificial Sequence
  Description of Artificial Sequence: Synthetic primer
tggctgagggcctcaaacctgctgccccctcagcccgaaa

SEQ ID NO: 13049 - DNA, 40 bp, Artificial Sequence
  Description of Artificial Sequence: Synthetic primer
gacggtggacaagaagatggtggagaagtgctggaagctc

SEQ ID NO: 13050 - DNA, 40 bp, Artificial Sequence
  Description of Artificial Sequence: Synthetic primer
ttttcactggtcttagactttttctctttctttttcacag

SEQ ID NO: 13051 - DNA, 40 bp, Artificial Sequence
  Description of Artificial Sequence: Synthetic primer
gtactaactaaaatatgctttgtacttttatttactttgc

SEQ ID NO: 13052 - DNA, 40 bp, Artificial Sequence
  Description of Artificial Sequence: Synthetic primer
ctcttggctcaaggactcatactacactttcttggtagag

SEQ ID NO: 13053 - DNA, 40 bp, Artificial Sequence
  Description of Artificial Sequence: Synthetic primer
gccaaagtagctaacatcatagcagaagtagccaaaaatg

SEQ ID NO: 13054 - DNA, 40 bp, Artificial Sequence
  Description of Artificial Sequence: Synthetic primer
tgcagccttgcagtccttgtacccattgttctcttctgtg

SEQ ID NO: 13055 - DNA, 40 bp, Artificial Sequence
  Description of Artificial Sequence: Synthetic primer
ttcatgtctgtaaattaggacaagacagacctattaaaac

SEQ ID NO: 13056 - DNA, 40 bp, Artificial Sequence
  Description of Artificial Sequence: Synthetic primer
acttcctgtgggacaagcgcacgggcctcgccgccagaac

SEQ ID NO: 13057 - DNA, 40 bp, Artificial Sequence
  Description of Artificial Sequence: Synthetic primer
agggcttccctccagtacagtctcccccacagcaggttcc

SEQ ID NO: 13058 - DNA, 40 bp, Artificial Sequence
  Description of Artificial Sequence: Synthetic primer
gaccaacaatccccagttcgatgaagtgttttattttgag

SEQ ID NO: 13059 - DNA, 40 bp, Artificial Sequence
  Description of Artificial Sequence: Synthetic primer
cctgaaggccaggggtgctactgttcctagttaaatcctg

SEQ ID NO: 13060 - DNA, 40 bp, Artificial Sequence
  Description of Artificial Sequence: Synthetic primer
atcaggtgcagaggataactcggaggctgcagcaggaacg

SEQ ID NO: 13061 - DNA, 40 bp, Artificial Sequence
  Description of Artificial Sequence: Synthetic primer
acttctaatggattggggtccatagatgacatcgaaacag

SEQ ID NO: 13062 - DNA, 40 bp, Artificial Sequence
  Description of Artificial Sequence: Synthetic primer
tagcttttttgcttcttgtaaataatggtctgctgaataa

SEQ ID NO: 13063 - DNA, 40 bp, Artificial Sequence
  Description of Artificial Sequence: Synthetic primer
gccgctggggtcaggtgggaggtgggagacccaggacgtg

SEQ ID NO: 13064 - DNA, 40 bp, Artificial Sequence
  Description of Artificial Sequence: Synthetic primer
gctgtttctgcttatttcatctgttctatgcttcctcgtg

SEQ ID NO: 13065 - DNA, 40 bp, Artificial Sequence
  Description of Artificial Sequence: Synthetic primer
ggcccccatgataatggggatggcagcccgaacagtgagc

SEQ ID NO: 13066 - DNA, 40 bp, Artificial Sequence
  Description of Artificial Sequence: Synthetic primer
ccccttctcccagctggtgctgcttctcgagagactgttg

SEQ ID NO: 13067 - DNA, 40 bp, Artificial Sequence
  Description of Artificial Sequence: Synthetic primer
gcacaggttggagaactgcgtgtaggacttgtggcagacc

SEQ ID NO: 13068 - DNA, 40 bp, Artificial Sequence
  Description of Artificial Sequence: Synthetic primer
aggctactgtccaggcggcacttcacgcccgccatcatgc

SEQ ID NO: 13069 - DNA, 40 bp, Artificial Sequence
  Description of Artificial Sequence: Synthetic primer
tgaaggaaagaccagttcttccctcatcagaaagttttac

SEQ ID NO: 13070 - DNA, 40 bp, Artificial Sequence
  Description of Artificial Sequence: Synthetic primer
tggggggacttgaggttccccgagggcgagcccagcattg

SEQ ID NO: 13071 - DNA, 40 bp, Artificial Sequence
  Description of Artificial Sequence: Synthetic primer
gctcgagatcttcaataatggctctcttcttctgtagttc

SEQ ID NO: 13072 - DNA, 40 bp, Artificial Sequence
  Description of Artificial Sequence: Synthetic primer
tttcgcggccccgaggcagcgaggcaagggggagatcact

SEQ ID NO: 13073 - DNA, 40 bp, Artificial Sequence
  Description of Artificial Sequence: Synthetic primer
gcgggacttgagggacagtgaccccgaggaggacgaggac

SEQ ID NO: 13074 - DNA, 40 bp, Artificial Sequence
  Description of Artificial Sequence: Synthetic primer
tttctgactggcacatctcgtgaagtttcatagaaacaag

SEQ ID NO: 13075 - DNA, 40 bp, Artificial Sequence
  Description of Artificial Sequence: Synthetic primer
acatattttaataagaaataaattcaataaagaatgataa

SEQ ID NO: 13076 - DNA, 40 bp, Artificial Sequence
  Description of Artificial Sequence: Synthetic primer
tatcgacaaaacccagctgaatcccagcagcctgcagaag

SEQ ID NO: 13077 - DNA, 40 bp, Artificial Sequence
  Description of Artificial Sequence: Synthetic primer
gcatgattcttatgagttcttctgaggcactttgactgtg

SEQ ID NO: 13078 - DNA, 40 bp, Artificial Sequence
  Description of Artificial Sequence: Synthetic primer
atgactctcattcacagtcttcagccattccaagttcctg

SEQ ID NO: 13079 - DNA, 40 bp, Artificial Sequence
  Description of Artificial Sequence: Synthetic primer
tgcaaagaggaagccagcactaaggggactttctctgaag

SEQ ID NO: 13080 - DNA, 40 bp, Artificial Sequence
  Description of Artificial Sequence: Synthetic primer
ggaagttctacaagtaaattcacactaaatgaacaaaacg

SEQ ID NO: 13081 - DNA, 40 bp, Artificial Sequence
  Description of Artificial Sequence: Synthetic primer
ggaagactcgtgtttatgtctgttggtgaaactgagtgtg

SEQ ID NO: 13082 - DNA, 40 bp, Artificial Sequence
  Description of Artificial Sequence: Synthetic primer
tgatccaactggtgttgatggatttgacggaaaactactg

SEQ ID NO: 13083 - DNA, 40 bp, Artificial Sequence
  Description of Artificial Sequence: Synthetic primer
ttgtcttcatcaaagacagaacttttcattttcactgtag

SEQ ID NO: 13084 - DNA, 40 bp, Artificial Sequence
  Description of Artificial Sequence: Synthetic primer
ctcatcaggaggtcctaagctgttccttccaaatcatgtc

SEQ ID NO: 13085 - DNA, 40 bp, Artificial Sequence
  Description of Artificial Sequence: Synthetic primer
ccacttcaacaaactcttcattttctgaccgacgttgtag

SEQ ID NO: 13086 - DNA, 40 bp, Artificial Sequence
  Description of Artificial Sequence: Synthetic primer
ccagtcagcgatgtttctcaggccacccaagcagtttctg

SEQ ID NO: 13087 - DNA, 40 bp, Artificial Sequence
  Description of Artificial Sequence: Synthetic primer
ccaggctgacagctggaggcagggaagggtggcttctacc

SEQ ID NO: 13088 - DNA, 40 bp, Artificial Sequence
  Description of Artificial Sequence: Synthetic primer
aaatgggatttgtaaaagtttactactaataatggctttc

SEQ ID NO: 13089 - DNA, 40 bp, Artificial Sequence
  Description of Artificial Sequence: Synthetic primer
gtttttataaatcacttgtacatagtacatatgggaatag

SEQ ID NO: 13090 - DNA, 40 bp, Artificial Sequence
  Description of Artificial Sequence: Synthetic primer
cttctactgttgtgggtggacagagaagctcatctaattg

SEQ ID NO: 13091 - DNA, 40 bp, Artificial Sequence
  Description of Artificial Sequence: Synthetic primer
gggacggcggggcagctcctctacagcaacttgcagcatc

SEQ ID NO: 13092 - DNA, 40 bp, Artificial Sequence
  Description of Artificial Sequence: Synthetic primer
ggtgctcctaagggaccacaaatacgtgatttggagagag

SEQ ID NO: 13093 - DNA, 40 bp, Artificial Sequence
  Description of Artificial Sequence: Synthetic primer
ggcttgttaacttataattacactaagcatctctcctatg

SEQ ID NO: 13094 - DNA, 40 bp, Artificial Sequence
  Description of Artificial Sequence: Synthetic primer
ggtattcctggccctgttggtgctgccggtgctactggtg

SEQ ID NO: 13095 - DNA, 40 bp, Artificial Sequence
  Description of Artificial Sequence: Synthetic primer
cccaaatctactgaactgcatctccatctgggcaactaag

SEQ ID NO: 13096 - DNA, 40 bp, Artificial Sequence
  Description of Artificial Sequence: Synthetic primer
agcagagctacctgttgctgagctggagaagtaccctctg

SEQ ID NO: 13097 - DNA, 40 bp, Artificial Sequence
  Description of Artificial Sequence: Synthetic primer
cgtcccaaatggtggagttcggagagagctgcgatgtgaa

SEQ ID NO: 13098 - DNA, 40 bp, Artificial Sequence
  Description of Artificial Sequence: Synthetic primer
acatatctgatcatctctttcatgcagttgccaatattca

SEQ ID NO: 13099 - DNA, 40 bp, Artificial Sequence
  Description of Artificial Sequence: Synthetic primer
ccaggattcttaggttgatctatctgtgggttatgacttc

SEQ ID NO: 13100 - DNA, 40 bp, Artificial Sequence
  Description of Artificial Sequence: Synthetic primer
ctgtagctacagcaagaagtcccactttgactttgaggag

SEQ ID NO: 13101 - DNA, 40 bp, Artificial Sequence
  Description of Artificial Sequence: Synthetic primer
agcagccaacaccggcggcggcggcggcctcggcaagcac

SEQ ID NO: 13102 - DNA, 40 bp, Artificial Sequence
  Description of Artificial Sequence: Synthetic primer
tgtaaatgaaagcatgtttgagtttccaaatgctgctatg

SEQ ID NO: 13103 - DNA, 40 bp, Artificial Sequence
  Description of Artificial Sequence: Synthetic primer
tacaatataaaccataaaagatatatttggtaataaaaac

SEQ ID NO: 13104 - DNA, 40 bp, Artificial Sequence
  Description of Artificial Sequence: Synthetic primer
tttgcttaagtcagagatggaagggggaaagagcaaagga

SEQ ID NO: 13105 - DNA, 40 bp, Artificial Sequence
  Description of Artificial Sequence: Synthetic primer
tgtttattgtagtggagtaatgggtttgcagtgataagtc

SEQ ID NO: 13106 - DNA, 40 bp, Artificial Sequence
  Description of Artificial Sequence: Synthetic primer
aagtaagaaatcaagtggaaacccctggattttcagtttc

SEQ ID NO: 13107 - DNA, 40 bp, Artificial Sequence
  Description of Artificial Sequence: Synthetic primer
tgtagaagctggccattacgtagttttggcagcgatcacc

SEQ ID NO: 13108 - DNA, 40 bp, Artificial Sequence
  Description of Artificial Sequence: Synthetic primer
tctgccctctgaaggcggggtttgctcctcgtcaagactg

SEQ ID NO: 13109 - DNA, 40 bp, Artificial Sequence
  Description of Artificial Sequence: Synthetic primer
attactggttgcatcaagaacccatagggtgtacaaaagg

SEQ ID NO: 13110 - DNA, 40 bp, Artificial Sequence
  Description of Artificial Sequence: Synthetic primer
agtttaaacagaaagcaggagtaatgtgccgattctgaag

SEQ ID NO: 13111 - DNA, 40 bp, Artificial Sequence
  Description of Artificial Sequence: Synthetic primer
tgtatagtcttcagcacttggaccctcagggagcccagga

SEQ ID NO: 13112 - DNA, 40 bp, Artificial Sequence
  Description of Artificial Sequence: Synthetic primer
ttggctacttgaagaccaaagccaataagatcttttacag

SEQ ID NO: 13113 - DNA, 40 bp, Artificial Sequence
  Description of Artificial Sequence: Synthetic primer
ataaccgtttggcttgggtaaaagtgaaaaagctgacttc

SEQ ID NO: 13114 - DNA, 40 bp, Artificial Sequence
  Description of Artificial Sequence: Synthetic primer
ttgctgcagcttctcattgacgaagttgatgcaaaactgc

SEQ ID NO: 13115 - DNA, 40 bp, Artificial Sequence
  Description of Artificial Sequence: Synthetic primer
cagggctgactccctctcaggtggaaggcagggcggtctc

SEQ ID NO: 13116 - DNA, 40 bp, Artificial Sequence
  Description of Artificial Sequence: Synthetic primer
ctgggatacagtgctgccttagaaaggcacaaaacatttg

SEQ ID NO: 13117 - DNA, 40 bp, Artificial Sequence
  Description of Artificial Sequence: Synthetic primer
gttttcaggtgatttttccattgtcgctccctcccacctc

SEQ ID NO: 13118 - DNA, 40 bp, Artificial Sequence
  Description of Artificial Sequence: Synthetic primer
gtacattatgtcagccattactttcataacatgaaatatg

SEQ ID NO: 13119 - DNA, 40 bp, Artificial Sequence
  Description of Artificial Sequence: Synthetic primer
agagagaacatttgaatccttttcagggatttgtgtaggg

SEQ ID NO: 13120 - DNA, 40 bp, Artificial Sequence
  Description of Artificial Sequence: Synthetic primer
atctgaatcagtatgactttcccagctcagacgaagaacc

SEQ ID NO: 13121 - DNA, 40 bp, Artificial Sequence
  Description of Artificial Sequence: Synthetic primer
atgcttctgcctattgctgatactgtctttgcatacatga

SEQ ID NO: 13122 - DNA, 40 bp, Artificial Sequence
  Description of Artificial Sequence: Synthetic primer
cgacagtcctagctaaacttcgccaactccgctgcctttg

SEQ ID NO: 13123 - DNA, 40 bp, Artificial Sequence
  Description of Artificial Sequence: Synthetic primer
ccaagaggaagttaaaagggggcttcagaactttcactcc

SEQ ID NO: 13124 - DNA, 40 bp, Artificial Sequence
  Description of Artificial Sequence: Synthetic primer
cacaagcagagtgctgaaggtgctatctgtctgctctagt

SEQ ID NO: 13125 - DNA, 40 bp, Artificial Sequence
  Description of Artificial Sequence: Synthetic primer
aacacacttcccaagagactgactcatctggaatttcacc

SEQ ID NO: 13126 - DNA, 40 bp, Artificial Sequence
  Description of Artificial Sequence: Synthetic primer
agaagaggaggaagcaggaacaagtggttgtccagcagtg

SEQ ID NO: 13127 - DNA, 40 bp, Artificial Sequence
  Description of Artificial Sequence: Synthetic primer
gtccagatggttttgcaccattagaagaaaccatggaatg

SEQ ID NO: 13128 - DNA, 40 bp, Artificial Sequence
  Description of Artificial Sequence: Synthetic primer
gcagaagtatcctcaacagtaaaatttggtgcaacaatgg

SEQ ID NO: 13129 - DNA, 40 bp, Artificial Sequence
  Description of Artificial Sequence: Synthetic primer
ctgaaaaatatgggggcgcattcggtggtgttggatcttc

SEQ ID NO: 13130 - DNA, 40 bp, Artificial Sequence
  Description of Artificial Sequence: Synthetic primer
tgtgggtctaaaagtatatattaaaattatttgggaagtc

SEQ ID NO: 13131 - DNA, 40 bp, Artificial Sequence
  Description of Artificial Sequence: Synthetic primer
aatgcactggaattagatgacagcgacttggcaatattta

SEQ ID NO: 13132 - DNA, 40 bp, Artificial Sequence
  Description of Artificial Sequence: Synthetic primer
aaccttggagggaaagatgtctgcatagcgggcctggaag

SEQ ID NO: 13133 - DNA, 40 bp, Artificial Sequence
  Description of Artificial Sequence: Synthetic primer
ctgtatgctggacggcattcctgcttatcaataaacctgt

SEQ ID NO: 13134 - DNA, 40 bp, Artificial Sequence
  Description of Artificial Sequence: Synthetic primer
ttatgaaaatttttgtaaaaaataaaagatttttcatttc

SEQ ID NO: 13135 - DNA, 40 bp, Artificial Sequence
  Description of Artificial Sequence: Synthetic primer
attttggccccagcattcttaatttcaaagctttattctg

SEQ ID NO: 13136 - DNA, 40 bp, Artificial Sequence
  Description of Artificial Sequence: Synthetic primer
ttaaatacctgaactagttaaaattccacctaagaatagt

SEQ ID NO: 13137 - DNA, 40 bp, Artificial Sequence
  Description of Artificial Sequence: Synthetic primer
ggggaaggggctgccagaaggggtgccttgggtggagaac

SEQ ID NO: 13138 - DNA, 40 bp, Artificial Sequence
  Description of Artificial Sequence: Synthetic primer
ggaaaagaaaagtgtttagtcctattcgatctgaaccaag

SEQ ID NO: 13139 - DNA, 40 bp, Artificial Sequence
  Description of Artificial Sequence: Synthetic primer
tgagtaggaggatttgttctcgacagtgtgccagttcttg

SEQ ID NO: 13140 - DNA, 40 bp, Artificial Sequence
  Description of Artificial Sequence: Synthetic primer
cttggccccaggatcaagagcaactgggagcttgactgtg

SEQ ID NO: 13141 - DNA, 40 bp, Artificial Sequence
  Description of Artificial Sequence: Synthetic primer
ccagctcctctaaaagcaccctctctctctctgaaaccag

SEQ ID NO: 13142 - DNA, 40 bp, Artificial Sequence
  Description of Artificial Sequence: Synthetic primer
gaacttcttatagatgtcaagaccttctttgcattggttc

SEQ ID NO: 13143 - DNA, 40 bp, Artificial Sequence
  Description of Artificial Sequence: Synthetic primer
tagatttttctggaagaactagatttactggaagacttgg

SEQ ID NO: 13144 - DNA, 40 bp, Artificial Sequence
  Description of Artificial Sequence: Synthetic primer
ctctgcagggggctctgccgtggctggaacgagggacgtg

SEQ ID NO: 13145 - DNA, 40 bp, Artificial Sequence
  Description of Artificial Sequence: Synthetic primer
tctgcacattcttggctgcaaactgggcaacgaatgactc

SEQ ID NO: 13146 - DNA, 40 bp, Artificial Sequence
  Description of Artificial Sequence: Synthetic primer
aggtcaccggggtggaccaggaaggactccacttccacag

SEQ ID NO: 13147 - DNA, 40 bp, Artificial Sequence
  Description of Artificial Sequence: Synthetic primer
gtttccatgaatccagggcctaacatgggacagccgcaac

SEQ ID NO: 13148 - DNA, 40 bp, Artificial Sequence
  Description of Artificial Sequence: Synthetic primer
gttggctcagtactgtgctatccttgcatttgctcagtgt

SEQ ID NO: 13149 - DNA, 40 bp, Artificial Sequence
  Description of Artificial Sequence: Synthetic primer
ccccagcgtccgaggcagtgccatggctcgggcactgggc

SEQ ID NO: 13150 - DNA, 40 bp, Artificial Sequence
  Description of Artificial Sequence: Synthetic primer
gttgatggtcatcaatttcctgacttcggttctgttttag

SEQ ID NO: 13151 - DNA, 40 bp, Artificial Sequence
  Description of Artificial Sequence: Synthetic primer
ctgttcgacatggcccaattcgagcggctagaatcttgcc

SEQ ID NO: 13152 - DNA, 40 bp, Artificial Sequence
  Description of Artificial Sequence: Synthetic primer
tgtggacactcttgctattttctttatacttaatttgcag

SEQ ID NO: 13153 - DNA, 40 bp, Artificial Sequence
  Description of Artificial Sequence: Synthetic primer
agattttcaaaatggcggttcgggaaggagagcgggaatg

SEQ ID NO: 13154 - DNA, 40 bp, Artificial Sequence
  Description of Artificial Sequence: Synthetic primer
ggccaacaaccagaaggtctacatgccccgggaggggaag

SEQ ID NO: 13155 - DNA, 40 bp, Artificial Sequence
  Description of Artificial Sequence: Synthetic primer
cattgaggatcactggagttattccatcaactacttgcac

SEQ ID NO: 13156 - DNA, 40 bp, Artificial Sequence
  Description of Artificial Sequence: Synthetic primer
acacggatttcttcttctatcacattgttctctccaatgc

SEQ ID NO: 13157 - DNA, 40 bp, Artificial Sequence
  Description of Artificial Sequence: Synthetic primer
gggagaagacagcagaggggttgccgaggtgaggggttgc

SEQ ID NO: 13158 - DNA, 40 bp, Artificial Sequence
  Description of Artificial Sequence: Synthetic primer
ccatgtagaataccctgccttcttgaagcagttccaccac

SEQ ID NO: 13159 - DNA, 40 bp, Artificial Sequence
  Description of Artificial Sequence: Synthetic primer
ggagggggaccgtttggagctagggaggacgtcttccacc

SEQ ID NO: 13160 - DNA, 40 bp, Artificial Sequence
  Description of Artificial Sequence: Synthetic primer
tgttatagacttgcagcgtgccgagttccatcgggttttt

SEQ ID NO: 13161 - DNA, 40 bp, Artificial Sequence
  Description of Artificial Sequence: Synthetic primer
tccaagagaaagaaacagaagctaaaattgctgaaaagac

SEQ ID NO: 13162 - DNA, 40 bp, Artificial Sequence
  Description of Artificial Sequence: Synthetic primer
tggcgtcttccaggccactgctgctgctgtcgttttccac

SEQ ID NO: 13163 - DNA, 40 bp, Artificial Sequence
  Description of Artificial Sequence: Synthetic primer
agagtgaccaataataatgaggtcagagaatgccacagac

SEQ ID NO: 13164 - DNA, 40 bp, Artificial Sequence
  Description of Artificial Sequence: Synthetic primer
gctggggagctccctgctgttcgggacctaaagaaactgg

SEQ ID NO: 13165 - DNA, 40 bp, Artificial Sequence
  Description of Artificial Sequence: Synthetic primer
actgaaggctaattttcattttctcccagctggtttctgc

SEQ ID NO: 13166 - DNA, 40 bp, Artificial Sequence
  Description of Artificial Sequence: Synthetic primer
atcaaggagcgccaagagctagagcagactcagaatgagc

SEQ ID NO: 13167 - DNA, 40 bp, Artificial Sequence
  Description of Artificial Sequence: Synthetic primer
atattttttggtgggacagttacccacactagcagctgac

SEQ ID NO: 13168 - DNA, 40 bp, Artificial Sequence
  Description of Artificial Sequence: Synthetic primer
gaactgtgaattgtgctctgttgtagggggcaggggaagc

SEQ ID NO: 13169 - DNA, 40 bp, Artificial Sequence
  Description of Artificial Sequence: Synthetic primer
tgattgacggcagccacttcctaccacgcctcagcggaac

SEQ ID NO: 13170 - DNA, 40 bp, Artificial Sequence
  Description of Artificial Sequence: Synthetic primer
caccataatccctccctaaaacccacagaagactaacctg

SEQ ID NO: 13171 - DNA, 40 bp, Artificial Sequence
  Description of Artificial Sequence: Synthetic primer
tgagggtcaccccctccccccagctggcccgggagggggc

SEQ ID NO: 13172 - DNA, 40 bp, Artificial Sequence
  Description of Artificial Sequence: Synthetic primer
gggcttggctgcactccgcatgcttgacttcgtgggtctg

SEQ ID NO: 13173 - DNA, 40 bp, Artificial Sequence
  Description of Artificial Sequence: Synthetic primer
accctctgcccagggagtccttgcgtcccatgaggtcttc

SEQ ID NO: 13174 - DNA, 40 bp, Artificial Sequence
  Description of Artificial Sequence: Synthetic primer
aatcctgggggttatgtggcgtatagtaaggctgcaacag

SEQ ID NO: 13175 - DNA, 40 bp, Artificial Sequence
  Description of Artificial Sequence: Synthetic primer
gctttacatcgtctactctggaacaatcaggagaaaattg

SEQ ID NO: 13176 - DNA, 40 bp, Artificial Sequence
  Description of Artificial Sequence: Synthetic primer
tctttttctgaagctactttcttaaaaaataaataaaatg

SEQ ID NO: 13177 - DNA, 40 bp, Artificial Sequence
  Description of Artificial Sequence: Synthetic primer
tcaggagggcttggacctgacagcaaagtcccttctctcg

SEQ ID NO: 13178 - DNA, 40 bp, Artificial Sequence
  Description of Artificial Sequence: Synthetic primer
tcctctggggaaagtggcagaggggagggtgcacctggtc

SEQ ID NO: 13179 - DNA, 40 bp, Artificial Sequence
  Description of Artificial Sequence: Synthetic primer
gtctgcatgaattttatatggcaagggcttccttctcttc

SEQ ID NO: 13180 - DNA, 40 bp, Artificial Sequence
  Description of Artificial Sequence: Synthetic primer
aaggaagggtggctttgcatttcttgtgttctgtagactg

SEQ ID NO: 13181 - DNA, 40 bp, Artificial Sequence
  Description of Artificial Sequence: Synthetic primer
tgaccaataaatagattgattctcccatctcacagcctca

SEQ ID NO: 13182 - DNA, 40 bp, Artificial Sequence
  Description of Artificial Sequence: Synthetic primer
gccagtagggcagaaacccgagccggtgcagtacacacac

SEQ ID NO: 13183 - DNA, 40 bp, Artificial Sequence
  Description of Artificial Sequence: Synthetic primer
atcaaaatagagcaaaaaaccgatatggaaacattatagc

SEQ ID NO: 13184 - DNA, 40 bp, Artificial Sequence
  Description of Artificial Sequence: Synthetic primer
ccacagagacttataggagtgttcagtgtatagtttctta

SEQ ID NO: 13185 - DNA, 40 bp, Artificial Sequence
  Description of Artificial Sequence: Synthetic primer
agcattctcgttcttctgggcgtggctgcgctccaggttc

SEQ ID NO: 13186 - DNA, 40 bp, Artificial Sequence
  Description of Artificial Sequence: Synthetic primer
caaacggggttaccgcatggcccagcctgcccatgcctcc

SEQ ID NO: 13187 - DNA, 40 bp, Artificial Sequence
  Description of Artificial Sequence: Synthetic primer
cgcagctgcggcttggccccggtctggcttccccggcgcg

SEQ ID NO: 13188 - DNA, 40 bp, Artificial Sequence
  Description of Artificial Sequence: Synthetic primer
ttccgagacagtgtgcagacactcctgagctgtcagcccc

SEQ ID NO: 13189 - DNA, 40 bp, Artificial Sequence
  Description of Artificial Sequence: Synthetic primer
tgagaaagcttgctcatcatacttgctgcttcaaagaaag

SEQ ID NO: 13190 - DNA, 40 bp, Artificial Sequence
  Description of Artificial Sequence: Synthetic primer
gaacttgaggacagagtgtggtggctgtggctcatgtttg

SEQ ID NO: 13191 - DNA, 40 bp, Artificial Sequence
  Description of Artificial Sequence: Synthetic primer
ccaacctgcatctcaggctgcttctagttcatcagcatcg

SEQ ID NO: 13192 - DNA, 40 bp, Artificial Sequence
  Description of Artificial Sequence: Synthetic primer
tttcagaagcggggacatcagtggtactgagcaatagagc

SEQ ID NO: 13193 - DNA, 40 bp, Artificial Sequence
  Description of Artificial Sequence: Synthetic primer
aaagatgagaggggctcagttttacgcaacactaaattct

SEQ ID NO: 13194 - DNA, 40 bp, Artificial Sequence
  Description of Artificial Sequence: Synthetic primer
gatgttttcaagaggaggagaaactgggagggagatacac

SEQ ID NO: 13195 - DNA, 40 bp, Artificial Sequence
  Description of Artificial Sequence: Synthetic primer
cgaggagcgggaggaggacgggaccccggcgcccccaccc

SEQ ID NO: 13196 - DNA, 40 bp, Artificial Sequence
  Description of Artificial Sequence: Synthetic primer
gctatcccacccaagatgtttaaactgccccaactgcaac

SEQ ID NO: 13197 - DNA, 40 bp, Artificial Sequence
  Description of Artificial Sequence: Synthetic primer
cacatgtctcaatccagtagttatggcaaccttcattcac

SEQ ID NO: 13198 - DNA, 40 bp, Artificial Sequence
  Description of Artificial Sequence: Synthetic primer
acgactttgccttatggaaggcctctaagcccggagaacc

SEQ ID NO: 13199 - DNA, 40 bp, Artificial Sequence
  Description of Artificial Sequence: Synthetic primer
ctccgcaaactcatatgcccggtccaggtttccaatgtgc

SEQ ID NO: 13200 - DNA, 40 bp, Artificial Sequence
  Description of Artificial Sequence: Synthetic primer
caccactttctgctattcaagcacctggcaaagtggaacc

SEQ ID NO: 13201 - DNA, 40 bp, Artificial Sequence
  Description of Artificial Sequence: Synthetic primer
gtttggctggaggcagaccctgtggctctgaccagacttc

SEQ ID NO: 13202 - DNA, 40 bp, Artificial Sequence
  Description of Artificial Sequence: Synthetic primer
gctcacagccctgccatcacaggtgccacacactcacatc

SEQ ID NO: 13203 - DNA, 40 bp, Artificial Sequence
  Description of Artificial Sequence: Synthetic primer
ctggtctgaggctgtggtttacacgcaggcacaggtaggc

SEQ ID NO: 13204 - DNA, 40 bp, Artificial Sequence
  Description of Artificial Sequence: Synthetic primer
cctttttgtttctaaacatgaaaacagcataagtccactg

SEQ ID NO: 13205 - DNA, 40 bp, Artificial Sequence
  Description of Artificial Sequence: Synthetic primer
ctcgaagagaaaacacactggaacattgccctttgtaggc

SEQ ID NO: 13206 - DNA, 40 bp, Artificial Sequence
  Description of Artificial Sequence: Synthetic primer
gcctcccggccactgggtgcggccccccaggcggagcacc

SEQ ID NO: 13207 - DNA, 40 bp, Artificial Sequence
  Description of Artificial Sequence: Synthetic primer
cacccttacttccgcctgctacgccctgaaataccggaac

SEQ ID NO: 13208 - DNA, 40 bp, Artificial Sequence
  Description of Artificial Sequence: Synthetic primer
agccaagctctcggctcccacgtcgcagatgcagttattg

SEQ ID NO: 13209 - DNA, 40 bp, Artificial Sequence
  Description of Artificial Sequence: Synthetic primer
cttgcaagtaagatggacagccggacacacgcccgagtca

SEQ ID NO: 13210 - DNA, 40 bp, Artificial Sequence
  Description of Artificial Sequence: Synthetic primer
cagattgcatttatggacttttcacacactcattttgagg

SEQ ID NO: 13211 - DNA, 40 bp, Artificial Sequence
  Description of Artificial Sequence: Synthetic primer
gaaagcagcaagaatattcccctggcaaacctgcagatac

SEQ ID NO: 13212 - DNA, 40 bp, Artificial Sequence
  Description of Artificial Sequence: Synthetic primer
aacgggaaacttagaccaagttctcccctgagaaatcttg

SEQ ID NO: 13213 - DNA, 40 bp, Artificial Sequence
  Description of Artificial Sequence: Synthetic primer
ccaccgcaggctggtcatggccttgacattctcagggaag

SEQ ID NO: 13214 - DNA, 40 bp, Artificial Sequence
  Description of Artificial Sequence: Synthetic primer
gtggctgggggccagtgacaggagccacccagccaccttc

SEQ ID NO: 13215 - DNA, 40 bp, Artificial Sequence
  Description of Artificial Sequence: Synthetic primer
gacgggctgagaggatgaacatcttttaactgccgctgga

SEQ ID NO: 13216 - DNA, 40 bp, Artificial Sequence
  Description of Artificial Sequence: Synthetic primer
tggggggcagtgctgtccagtggaggggagggctttcacg

SEQ ID NO: 13217 - DNA, 40 bp, Artificial Sequence
  Description of Artificial Sequence: Synthetic primer
ctccttatccggctactcactcacttggctctgcttctgg

SEQ ID NO: 13218 - DNA, 40 bp, Artificial Sequence
  Description of Artificial Sequence: Synthetic primer
ataaatctgtactgataactaaaggctacagagatttcat

SEQ ID NO: 13219 - DNA, 40 bp, Artificial Sequence
  Description of Artificial Sequence: Synthetic primer
gccttatatcaagtgtgctgaatgtgggccacctcctttt

SEQ ID NO: 13220 - DNA, 40 bp, Artificial Sequence
  Description of Artificial Sequence: Synthetic primer
tacaagcctatccaaatgaggagtgtgtactcttgcatcg

SEQ ID NO: 13221 - DNA, 40 bp, Artificial Sequence
  Description of Artificial Sequence: Synthetic primer
ggcactatgggctggcagaaggctgggcacccaccctctg

SEQ ID NO: 13222 - DNA, 40 bp, Artificial Sequence
  Description of Artificial Sequence: Synthetic primer
agtgaaaaaggattccagcaaatcagctttgtaaatagta

SEQ ID NO: 13223 - DNA, 40 bp, Artificial Sequence
  Description of Artificial Sequence: Synthetic primer
cttctcagtgaccacagccaacgggacgatctccttcacc

SEQ ID NO: 13224 - DNA, 40 bp, Artificial Sequence
  Description of Artificial Sequence: Synthetic primer
aacaaattaaaattaaacctaatggtacttctggctgagg

SEQ ID NO: 13225 - DNA, 40 bp, Artificial Sequence
  Description of Artificial Sequence: Synthetic primer
tatgttcaatatttactacctttctcttctattctctatc

SEQ ID NO: 13226 - DNA, 40 bp, Artificial Sequence
  Description of Artificial Sequence: Synthetic primer
cagtagtgcttgccagcagtggctccgccggcaagctgac

SEQ ID NO: 13227 - DNA, 40 bp, Artificial Sequence
  Description of Artificial Sequence: Synthetic primer
ttgagttgataaacatattgcatgtaaattatgtcacttt

SEQ ID NO: 13228 - DNA, 40 bp, Artificial Sequence
  Description of Artificial Sequence: Synthetic primer
gagatagggggtagttctccctactgcccaggctggaatc

SEQ ID NO: 13229 - DNA, 40 bp, Artificial Sequence
  Description of Artificial Sequence: Synthetic primer
gactgtggcgctggaggggacatcgaggaggggccatttc

SEQ ID NO: 13230 - DNA, 40 bp, Artificial Sequence
  Description of Artificial Sequence: Synthetic primer
acttcatctccgtggaggggggcagcagcaccatctatgg

SEQ ID NO: 13231 - DNA, 40 bp, Artificial Sequence
  Description of Artificial Sequence: Synthetic primer
agagatcgctaaccagccgtccgagccgcccgaggtggag

SEQ ID NO: 13232 - DNA, 40 bp, Artificial Sequence
  Description of Artificial Sequence: Synthetic primer
aaagaaaccactttgtatattttgtaataccacctctgtg

SEQ ID NO: 13233 - DNA, 40 bp, Artificial Sequence
  Description of Artificial Sequence: Synthetic primer
caacaaacaaaagacatgaagctttacaatgagaaacaag

SEQ ID NO: 13234 - DNA, 40 bp, Artificial Sequence
  Description of Artificial Sequence: Synthetic primer
aagggaagctgatcatgggcattggtcaccgagtgaagtc

SEQ ID NO: 13235 - DNA, 40 bp, Artificial Sequence
  Description of Artificial Sequence: Synthetic primer
aagtgggctgacctttaaccacccagggtggtttgatacg

SEQ ID NO: 13236 - DNA, 40 bp, Artificial Sequence
  Description of Artificial Sequence: Synthetic primer
tttcgccttaatctgaggcagagacacagcagaacctgag

SEQ ID NO: 13237 - DNA, 40 bp, Artificial Sequence
  Description of Artificial Sequence: Synthetic primer
ctggtgtagtactccagcttgccgtgcagcgcgatggtca

SEQ ID NO: 13238 - DNA, 40 bp, Artificial Sequence
  Description of Artificial Sequence: Synthetic primer
agacgatccggcggaggagcggggcggcgcgtggggccta

SEQ ID NO: 13239 - DNA, 40 bp, Artificial Sequence
  Description of Artificial Sequence: Synthetic primer
accctgctgtcccagaaccagggaggcaagaccttcattg

SEQ ID NO: 13240 - DNA, 40 bp, Artificial Sequence
  Description of Artificial Sequence: Synthetic primer
aaatggaagtagatagtgaagatgaaaaggatcctgaatg

SEQ ID NO: 13241 - DNA, 40 bp, Artificial Sequence
  Description of Artificial Sequence: Synthetic primer
cagttgtctaagtgatatagtatacaaaaataacatcttg

SEQ ID NO: 13242 - DNA, 40 bp, Artificial Sequence
  Description of Artificial Sequence: Synthetic primer
tagattttcacagatttgctctgtcctattctatgacatc

SEQ ID NO: 13243 - DNA, 40 bp, Artificial Sequence
  Description of Artificial Sequence: Synthetic primer
tgaacatttgaaatccattttgataaacctgctgttaatg

SEQ ID NO: 13244 - DNA, 40 bp, Artificial Sequence
  Description of Artificial Sequence: Synthetic primer
ggtctcatttctctttcgaacagccttcatttgttcattc

SEQ ID NO: 13245 - DNA, 40 bp, Artificial Sequence
  Description of Artificial Sequence: Synthetic primer
ataaatggcttaatttccaagaacttatttcatttttttg

SEQ ID NO: 13246 - DNA, 40 bp, Artificial Sequence
  Description of Artificial Sequence: Synthetic primer
agtccctgggacacgcagggcctggagccgagcgggacag

SEQ ID NO: 13247 - DNA, 40 bp, Artificial Sequence
  Description of Artificial Sequence: Synthetic primer
cctgccgaggaccctcaccggctacgtgcctgaggacatc

SEQ ID NO: 13248 - DNA, 40 bp, Artificial Sequence
  Description of Artificial Sequence: Synthetic primer
aggaaaaatatgataaaatgcgcaatgatgtttctgtcaa

SEQ ID NO: 13249 - DNA, 40 bp, Artificial Sequence
  Description of Artificial Sequence: Synthetic primer
ctccaacacagagatcccctggctgtcgaccgttgccttc

SEQ ID NO: 13250 - DNA, 40 bp, Artificial Sequence
  Description of Artificial Sequence: Synthetic primer
agccattctctggcagcggccgggcgtggggcggcgtcct

SEQ ID NO: 13251 - DNA, 40 bp, Artificial Sequence
  Description of Artificial Sequence: Synthetic primer
tcctgcggccgtcctgcccacgtgggccacgtctctgggc

SEQ ID NO: 13252 - DNA, 40 bp, Artificial Sequence
  Description of Artificial Sequence: Synthetic primer
tctgctgtttgctgcatgctgcatgagacccagggtcctg

SEQ ID NO: 13253 - DNA, 40 bp, Artificial Sequence
  Description of Artificial Sequence: Synthetic primer
agtacctcctgtttcccatgggttctgatccagaaatgtg

SEQ ID NO: 13254 - DNA, 40 bp, Artificial Sequence
  Description of Artificial Sequence: Synthetic primer
cattgcccaccagggggctggtgcacctgctgacctcagg

SEQ ID NO: 13255 - DNA, 40 bp, Artificial Sequence
  Description of Artificial Sequence: Synthetic primer
ggtagaaggtgccattcagctcacagccgcacccagaatc

SEQ ID NO: 13256 - DNA, 40 bp, Artificial Sequence
  Description of Artificial Sequence: Synthetic primer
caccttctttcccttccttccccttggcacaggagctgac

SEQ ID NO: 13257 - DNA, 40 bp, Artificial Sequence
  Description of Artificial Sequence: Synthetic primer
atttaatctggcagaacagcacctcggcctcactaaactg

SEQ ID NO: 13258 - DNA, 40 bp, Artificial Sequence
  Description of Artificial Sequence: Synthetic primer
ggatctgaaatctgtgcttcagagggaacagaggaaagtg

SEQ ID NO: 13259 - DNA, 40 bp, Artificial Sequence
  Description of Artificial Sequence: Synthetic primer
attccgcagtccccccgttccctggaggtcctgtggaatg

SEQ ID NO: 13260 - DNA, 40 bp, Artificial Sequence
  Description of Artificial Sequence: Synthetic primer
tttctaaacagatctttaatggactatttaaaccgaattt

SEQ ID NO: 13261 - DNA, 40 bp, Artificial Sequence
  Description of Artificial Sequence: Synthetic primer
ttcagcaaatattgggcccttcctggagaagagaggctgt

SEQ ID NO: 13262 - DNA, 40 bp, Artificial Sequence
  Description of Artificial Sequence: Synthetic primer
gtttcaatattaattaaataatagttatttcccatagatc

SEQ ID NO: 13263 - DNA, 40 bp, Artificial Sequence
  Description of Artificial Sequence: Synthetic primer
actatgcaattaaagcctgcttttggaaaatgtaagacac

SEQ ID NO: 13264 - DNA, 40 bp, Artificial Sequence
  Description of Artificial Sequence: Synthetic primer
atgttccccaagtaggtagccagcgctgcagaaaccaaac

SEQ ID NO: 13265 - DNA, 40 bp, Artificial Sequence
  Description of Artificial Sequence: Synthetic primer
tcagatctcaaaggactatggtgtatacctagaggactca

SEQ ID NO: 13266 - DNA, 40 bp, Artificial Sequence
  Description of Artificial Sequence: Synthetic primer
cggcactgggctctctggaggtgtatatgaaattcgttcc

SEQ ID NO: 13267 - DNA, 40 bp, Artificial Sequence
  Description of Artificial Sequence: Synthetic primer
agccaccaaaggctcaaggaaacccaatataaagaaggag

SEQ ID NO: 13268 - DNA, 40 bp, Artificial Sequence
  Description of Artificial Sequence: Synthetic primer
cgtccaagtccaaggccattattaaaatcaagaagagttc

SEQ ID NO: 13269 - DNA, 40 bp, Artificial Sequence
  Description of Artificial Sequence: Synthetic primer
gcaccctcgggcagcaacgggtccgcgcccaggctcaaag

SEQ ID NO: 13270 - DNA, 40 bp, Artificial Sequence
  Description of Artificial Sequence: Synthetic primer
taataagatccaggattctcccaggggtagcaatcaccac

SEQ ID NO: 13271 - DNA, 40 bp, Artificial Sequence
  Description of Artificial Sequence: Synthetic primer
ggtcctgggtagccagggtctcccttctgtccaactatcc

SEQ ID NO: 13272 - DNA, 40 bp, Artificial Sequence
  Description of Artificial Sequence: Synthetic primer
ttgtgggatcgcaccagtgcattgatatctgtcccatcag

SEQ ID NO: 13273 - DNA, 40 bp, Artificial Sequence
  Description of Artificial Sequence: Synthetic primer
ttctaacttgaatcccacacccccaagtgcaaatgagacc

SEQ ID NO: 13274 - DNA, 40 bp, Artificial Sequence
  Description of Artificial Sequence: Synthetic primer
tagttgttgtaatatttaatccagtagcataacttatatc

SEQ ID NO: 13275 - DNA, 40 bp, Artificial Sequence
  Description of Artificial Sequence: Synthetic primer
cctgttgccggggccccatcggttggacaacctggagcag

SEQ ID NO: 13276 - DNA, 40 bp, Artificial Sequence
  Description of Artificial Sequence: Synthetic primer
gaggccagaggggtgagtgaggttctttgacaagatgtcc

SEQ ID NO: 13277 - DNA, 40 bp, Artificial Sequence
  Description of Artificial Sequence: Synthetic primer
atattttttatttgtattttcaagactttaaacatttatg

SEQ ID NO: 13278 - DNA, 40 bp, Artificial Sequence
  Description of Artificial Sequence: Synthetic primer
cagtagcatcaccctctagcttgggaggggtcttcattac

SEQ ID NO: 13279 - DNA, 40 bp, Artificial Sequence
  Description of Artificial Sequence: Synthetic primer
tgttctcatgaaattgctgctagcacagcccagcttgtgg

SEQ ID NO: 13280 - DNA, 40 bp, Artificial Sequence
  Description of Artificial Sequence: Synthetic primer
aagagaggtcggtacttaaaataaccctgaaaaataacac

SEQ ID NO: 13281 - DNA, 40 bp, Artificial Sequence
  Description of Artificial Sequence: Synthetic primer
tattcccagcagagtgcaggtcgatgaaggcctggctgag

SEQ ID NO: 13282 - DNA, 40 bp, Artificial Sequence
  Description of Artificial Sequence: Synthetic primer
gattaaaaaataaaataatcaaaatgtttcctctttctaa

SEQ ID NO: 13283 - DNA, 40 bp, Artificial Sequence
  Description of Artificial Sequence: Synthetic primer
ccagggtggtttgctttctctgtgccagtagtgggcatgt

SEQ ID NO: 13284 - DNA, 40 bp, Artificial Sequence
  Description of Artificial Sequence: Synthetic primer
ctttgaaagtgccccaaacccacgggacctgaaaattgtg

SEQ ID NO: 13285 - DNA, 40 bp, Artificial Sequence
  Description of Artificial Sequence: Synthetic primer
caacttctcctccgccatgccccgcaacgagcccgccatc

SEQ ID NO: 13286 - DNA, 40 bp, Artificial Sequence
  Description of Artificial Sequence: Synthetic primer
aagtgatgttatttctcgacgatatccttcaacattatct

SEQ ID NO: 13287 - DNA, 40 bp, Artificial Sequence
  Description of Artificial Sequence: Synthetic primer
attgtacaacatacaggaaataaaagtgtaactttaccag

SEQ ID NO: 13288 - DNA, 40 bp, Artificial Sequence
  Description of Artificial Sequence: Synthetic primer
cagaatcctccaccgataaggagccaaagaaattgacaag

SEQ ID NO: 13289 - DNA, 40 bp, Artificial Sequence
  Description of Artificial Sequence: Synthetic primer
aaccccctgaaattgtgcacccatagccacctacacattc

SEQ ID NO: 13290 - DNA, 40 bp, Artificial Sequence
  Description of Artificial Sequence: Synthetic primer
gatttgatcgcaaggcagctatgagggagacttggctgag

SEQ ID NO: 13291 - DNA, 40 bp, Artificial Sequence
  Description of Artificial Sequence: Synthetic primer
ctccatgagtgccacggggggtgggtcccatgagccatgg

SEQ ID NO: 13292 - DNA, 40 bp, Artificial Sequence
  Description of Artificial Sequence: Synthetic primer
tgcaaagtacattaaatgacattcttagaatccctttccc

SEQ ID NO: 13293 - DNA, 40 bp, Artificial Sequence
  Description of Artificial Sequence: Synthetic primer
tgcaggagtacaggtcgcaagtgctgagcgtgggccttgg

SEQ ID NO: 13294 - DNA, 40 bp, Artificial Sequence
  Description of Artificial Sequence: Synthetic primer
ctggagcagccaggacacctcccgtcaccgctggggacag

SEQ ID NO: 13295 - DNA, 40 bp, Artificial Sequence
  Description of Artificial Sequence: Synthetic primer
cggtctgctgaatccatgagtgatggagttggctctttcc

SEQ ID NO: 13296 - DNA, 40 bp, Artificial Sequence
  Description of Artificial Sequence: Synthetic primer
aatggtcggggttctgtcgtcaaagggctcgatgatgatg

SEQ ID NO: 13297 - DNA, 40 bp, Artificial Sequence
  Description of Artificial Sequence: Synthetic primer
tcgggccaggccacgggggtggggtcaggagggatgaacc

SEQ ID NO: 13298 - DNA, 40 bp, Artificial Sequence
  Description of Artificial Sequence: Synthetic primer
gggtcaggtggtctgtctggtggatggtgggacgctgcaa

SEQ ID NO: 13299 - DNA, 40 bp, Artificial Sequence
  Description of Artificial Sequence: Synthetic primer
cctccagcttctccactgccaggatgttctcgatgggaat

SEQ ID NO: 13300 - DNA, 40 bp, Artificial Sequence
  Description of Artificial Sequence: Synthetic primer
cgccgctctgcgagacatggatgctgggggcgcagcccat

SEQ ID NO: 13301 - DNA, 40 bp, Artificial Sequence
  Description of Artificial Sequence: Synthetic primer
caggcctctactgcaaccagctctcatccactgaccttct

SEQ ID NO: 13302 - DNA, 40 bp, Artificial Sequence
  Description of Artificial Sequence: Synthetic primer
caaaggatactgtaacactttacaatgttcatcccatgat

SEQ ID NO: 13303 - DNA, 40 bp, Artificial Sequence
  Description of Artificial Sequence: Synthetic primer
gctgtccgggctggctgccccatccagggagctgccgcag

SEQ ID NO: 13304 - DNA, 40 bp, Artificial Sequence
  Description of Artificial Sequence: Synthetic primer
ccagaagctccgccggcgaccagactcctgccacgccttc

SEQ ID NO: 13305 - DNA, 40 bp, Artificial Sequence
  Description of Artificial Sequence: Synthetic primer
agattattttgcagaggatgatggggagatggtacccaga

SEQ ID NO: 13306 - DNA, 40 bp, Artificial Sequence
  Description of Artificial Sequence: Synthetic primer
atggagcacacaaattcttgcaaacattgtagaggttttt

SEQ ID NO: 13307 - DNA, 40 bp, Artificial Sequence
  Description of Artificial Sequence: Synthetic primer
cctgatccagtgcatcctggagtaccagagcaagggcaag

SEQ ID NO: 13308 - DNA, 40 bp, Artificial Sequence
  Description of Artificial Sequence: Synthetic primer
tgacctccagccactcaccctccgtgattgtcagctcatc

SEQ ID NO: 13309 - DNA, 40 bp, Artificial Sequence
  Description of Artificial Sequence: Synthetic primer
tgataggcaacggggcagcggacacaccgcatcattttac

SEQ ID NO: 13310 - DNA, 40 bp, Artificial Sequence
  Description of Artificial Sequence: Synthetic primer
gaactgtgataactcagataaggatggtaactgcagaaat

SEQ ID NO: 13311 - DNA, 40 bp, Artificial Sequence
  Description of Artificial Sequence: Synthetic primer
cccagagattggttccgggggaatcagaggcagcagctca

SEQ ID NO: 13312 - DNA, 40 bp, Artificial Sequence
  Description of Artificial Sequence: Synthetic primer
gattgacatttctattagacatccttaacctaagtgtttt

SEQ ID NO: 13313 - DNA, 40 bp, Artificial Sequence
  Description of Artificial Sequence: Synthetic primer
atgctgatcggaagagtaggatgactgatgactctattta

SEQ ID NO: 13314 - DNA, 40 bp, Artificial Sequence
  Description of Artificial Sequence: Synthetic primer
atcctgggcaaaggcagaaagaatgggtatcttagttttt

SEQ ID NO: 13315 - DNA, 40 bp, Artificial Sequence
  Description of Artificial Sequence: Synthetic primer
gggctgggtagccgtcatcctcacagctgcagggccaggt

SEQ ID NO: 13316 - DNA, 40 bp, Artificial Sequence
  Description of Artificial Sequence: Synthetic primer
aaaatgaaatagaataaagtgacctactcttgcctcatcc

SEQ ID NO: 13317 - DNA, 40 bp, Artificial Sequence
  Description of Artificial Sequence: Synthetic primer
gcaggattttcaccagactgcattatggatgatgccatca

SEQ ID NO: 13318 - DNA, 40 bp, Artificial Sequence
  Description of Artificial Sequence: Synthetic primer
accttggacaaggccaaactgtcctccaagactccttaat

SEQ ID NO: 13319 - DNA, 40 bp, Artificial Sequence
  Description of Artificial Sequence: Synthetic primer
ggcgacccccgtccctcggcctccccttcccatcccacct

SEQ ID NO: 13320 - DNA, 40 bp, Artificial Sequence
  Description of Artificial Sequence: Synthetic primer
agataagtccttctgtccatcgagagttcttggcataaaa

SEQ ID NO: 13321 - DNA, 40 bp, Artificial Sequence
  Description of Artificial Sequence: Synthetic primer
agctcgttcacctgtcggttcttctcccgaagtgggttgg

SEQ ID NO: 13322 - DNA, 40 bp, Artificial Sequence
  Description of Artificial Sequence: Synthetic primer
agtcactcttccccactgttgggaggcagcctccaggggc

SEQ ID NO: 13323 - DNA, 40 bp, Artificial Sequence
  Description of Artificial Sequence: Synthetic primer
ctaaccagctcctgaattgcagcatgttaatgattatttc

SEQ ID NO: 13324 - DNA, 40 bp, Artificial Sequence
  Description of Artificial Sequence: Synthetic primer
gtgggagagtaatgctctgaacctcccaatgtgatgaagc

SEQ ID NO: 13325 - DNA, 40 bp, Artificial Sequence
  Description of Artificial Sequence: Synthetic primer
cacagggtgggcctcggcccctcccacacccaaagctgag

SEQ ID NO: 13326 - DNA, 40 bp, Artificial Sequence
  Description of Artificial Sequence: Synthetic primer
attgaacattccagatacctatcattactcgatgctgttg

SEQ ID NO: 13327 - DNA, 40 bp, Artificial Sequence
  Description of Artificial Sequence: Synthetic primer
ccgagtcctgggactgctctcgctccggctgccactctcc

SEQ ID NO: 13328 - DNA, 40 bp, Artificial Sequence
  Description of Artificial Sequence: Synthetic primer
gagttttttctaagtgacgtgactagaagttgaaatctac

SEQ ID NO: 13329 - DNA, 40 bp, Artificial Sequence
  Description of Artificial Sequence: Synthetic primer
gcttgcgctcgccgactctgctccacactctcatgcttat

SEQ ID NO: 13330 - DNA, 40 bp, Artificial Sequence
  Description of Artificial Sequence: Synthetic primer
gccagctgaagggtgtggctgtgcaactggagaaggagtg

SEQ ID NO: 13331 - DNA, 40 bp, Artificial Sequence
  Description of Artificial Sequence: Synthetic primer
ttgggttgcgctcgacgaggaaatgcaactttggggtcaa

SEQ ID NO: 13332 - DNA, 40 bp, Artificial Sequence
  Description of Artificial Sequence: Synthetic primer
ctttaatttcctgttctactcgtttgttagtctcatttac

SEQ ID NO: 13333 - DNA, 40 bp, Artificial Sequence
  Description of Artificial Sequence: Synthetic primer
tctccttctccctttctatcttctgttcagggttcaaatc

SEQ ID NO: 13334 - DNA, 40 bp, Artificial Sequence
  Description of Artificial Sequence: Synthetic primer
aatgactacagccctctctacctggccaaacacagaaaag

SEQ ID NO: 13335 - DNA, 40 bp, Artificial Sequence
  Description of Artificial Sequence: Synthetic primer
agagatttctgcagtgaagattgctgtaaaaaatttcagg

SEQ ID NO: 13336 - DNA, 40 bp, Artificial Sequence
  Description of Artificial Sequence: Synthetic primer
cccagtgttgtcctgtagagggtcataccggcacatctcc

SEQ ID NO: 13337 - DNA, 40 bp, Artificial Sequence
  Description of Artificial Sequence: Synthetic primer
caatctcaccagacacctgaggacgcacactggggagcag

SEQ ID NO: 13338 - DNA, 40 bp, Artificial Sequence
  Description of Artificial Sequence: Synthetic primer
gcaacaaatttgaatctgaattcccttcttcattaactgg

SEQ ID NO: 13339 - DNA, 40 bp, Artificial Sequence
  Description of Artificial Sequence: Synthetic primer
aaacttaaaatacttgctgttttgattaaaaagaaaatag

SEQ ID NO: 13340 - DNA, 40 bp, Artificial Sequence
  Description of Artificial Sequence: Synthetic primer
acagtattacaaatattcaacaacaactttaaacaagaag

SEQ ID NO: 13341 - DNA, 40 bp, Artificial Sequence
  Description of Artificial Sequence: Synthetic primer
cgctgggcgtgcccgcctcgccctgctggggccgagggag

SEQ ID NO: 13342 - DNA, 40 bp, Artificial Sequence
  Description of Artificial Sequence: Synthetic primer
ataagctgggtcttaagtcagacttctagcagtagtattc

SEQ ID NO: 13343 - DNA, 40 bp, Artificial Sequence
  Description of Artificial Sequence: Synthetic primer
ttttaaattcctgaaatgggagagagggaagggagtttag

SEQ ID NO: 13344 - DNA, 40 bp, Artificial Sequence
  Description of Artificial Sequence: Synthetic primer
gttctacaggaagatgctgagaaactgcggaaagaattgc

SEQ ID NO: 13345 - DNA, 40 bp, Artificial Sequence
  Description of Artificial Sequence: Synthetic primer
tgggatcgctctaattgactgtgataaagattgagttttc

SEQ ID NO: 13346 - DNA, 40 bp, Artificial Sequence
  Description of Artificial Sequence: Synthetic primer
taaacattatcgctaagtgtacttgtgcagtattaacagc

SEQ ID NO: 13347 - DNA, 40 bp, Artificial Sequence
  Description of Artificial Sequence: Synthetic primer
ttttataaatacataaataaaagaaaaatatgcatttttc

SEQ ID NO: 13348 - DNA, 40 bp, Artificial Sequence
  Description of Artificial Sequence: Synthetic primer
caggatcaaagcgatctactgtcaatgttacaccttcttc

SEQ ID NO: 13349 - DNA, 40 bp, Artificial Sequence
  Description of Artificial Sequence: Synthetic primer
tttaatattaaaaattaccatattatgaaattgctgatag

SEQ ID NO: 13350 - DNA, 40 bp, Artificial Sequence
  Description of Artificial Sequence: Synthetic primer
cggattgaatgacacagtactctcttgccggttcccttgg

SEQ ID NO: 13351 - DNA, 40 bp, Artificial Sequence
  Description of Artificial Sequence: Synthetic primer
ctgtcaggtggcagctcacacccagactcactggccacac

SEQ ID NO: 13352 - DNA, 40 bp, Artificial Sequence
  Description of Artificial Sequence: Synthetic primer
catggggcccgctggccccacatgtggtgaacagccaatg

SEQ ID NO: 13353 - DNA, 40 bp, Artificial Sequence
  Description of Artificial Sequence: Synthetic primer
agcctggcagccctggtgaaaatggagctcctggtcagat

SEQ ID NO: 13354 - DNA, 40 bp, Artificial Sequence
  Description of Artificial Sequence: Synthetic primer
acagaactacagcggttactccagttatggacaaagtcag

SEQ ID NO: 13355 - DNA, 40 bp, Artificial Sequence
  Description of Artificial Sequence: Synthetic primer
gaccaaaataataaaattagagatgtatgcttggctgttg

SEQ ID NO: 13356 - DNA, 40 bp, Artificial Sequence
  Description of Artificial Sequence: Synthetic primer
ctatcccagagtcctgacacagaagctctttcctgttttc

SEQ ID NO: 13357 - DNA, 40 bp, Artificial Sequence
  Description of Artificial Sequence: Synthetic primer
gggcgatggccaaaggcttagtccaacacccaccgcgggc

SEQ ID NO: 13358 - DNA, 40 bp, Artificial Sequence
  Description of Artificial Sequence: Synthetic primer
aagagaatgaaaagtacagagaaaatattttttaaaaatc

SEQ ID NO: 13359 - DNA, 40 bp, Artificial Sequence
  Description of Artificial Sequence: Synthetic primer
tcttagagaggccctacagtagttcaggaagacagtttac

SEQ ID NO: 13360 - DNA, 40 bp, Artificial Sequence
  Description of Artificial Sequence: Synthetic primer
ctcccgtggactggagaccgatgagcggaaacggctctac

SEQ ID NO: 13361 - DNA, 40 bp, Artificial Sequence
  Description of Artificial Sequence: Synthetic primer
ttctatctccatagattggctttatcaaagaatgtatttc

SEQ ID NO: 13362 - DNA, 40 bp, Artificial Sequence
  Description of Artificial Sequence: Synthetic primer
tccaaaaactggaacatgttccacaggcccttctgactgc

SEQ ID NO: 13363 - DNA, 40 bp, Artificial Sequence
  Description of Artificial Sequence: Synthetic primer
gccgcaaaaatttgttcactcggtcttccaagtggtttcc

SEQ ID NO: 13364 - DNA, 40 bp, Artificial Sequence
  Description of Artificial Sequence: Synthetic primer
ggtggccttgacaaatgtcggtttatctgatcttgtggag

SEQ ID NO: 13365 - DNA, 40 bp, Artificial Sequence
  Description of Artificial Sequence: Synthetic primer
cacagaagccatcttcaaagttgcagtaaaaacccacagg

SEQ ID NO: 13366 - DNA, 40 bp, Artificial Sequence
  Description of Artificial Sequence: Synthetic primer
tttaaaatttaatcaatgttgaaaggccaccatgctaggg

SEQ ID NO: 13367 - DNA, 40 bp, Artificial Sequence
  Description of Artificial Sequence: Synthetic primer
cggatagtgactctagtaactcctgtaacctgccgaagac

SEQ ID NO: 13368 - DNA, 40 bp, Artificial Sequence
  Description of Artificial Sequence: Synthetic primer
gtatactgtggagaggacttccaaatgtggttacctcagc

SEQ ID NO: 13369 - DNA, 40 bp, Artificial Sequence
  Description of Artificial Sequence: Synthetic primer
aaaacctcaaaatagttctcttcaaaagaagagagattcc

SEQ ID NO: 13370 - DNA, 40 bp, Artificial Sequence
  Description of Artificial Sequence: Synthetic primer
tggcagaaagtacagtgtaatagatgaggaaaatttcaag

SEQ ID NO: 13371 - DNA, 40 bp, Artificial Sequence
  Description of Artificial Sequence: Synthetic primer
ggtatgtgattctgactagaagcagaagagaaaagtaatg

SEQ ID NO: 13372 - DNA, 40 bp, Artificial Sequence
  Description of Artificial Sequence: Synthetic primer
agggaacaaaatgccacaccctgatgttcagccatctatc

SEQ ID NO: 13373 - DNA, 40 bp, Artificial Sequence
  Description of Artificial Sequence: Synthetic primer
ccaggccaggtgcaggggaaggagcccgtttcccccaaag

SEQ ID NO: 13374 - DNA, 40 bp, Artificial Sequence
  Description of Artificial Sequence: Synthetic primer
ccacaaatgatagaagtaaaatactattgtcagtagcaag

SEQ ID NO: 13375 - DNA, 40 bp, Artificial Sequence
  Description of Artificial Sequence: Synthetic primer
cttgcagaagaccgcagtgggataaatctcaaagatctcg

SEQ ID NO: 13376 - DNA, 40 bp, Artificial Sequence
  Description of Artificial Sequence: Synthetic primer
tccaaaattacagaaaaaatttaaagcatgcatttaattc

SEQ ID NO: 13377 - DNA, 40 bp, Artificial Sequence
  Description of Artificial Sequence: Synthetic primer
tgatggtgtctctcctccttctgtctttatggaaattatg

SEQ ID NO: 13378 - DNA, 40 bp, Artificial Sequence
  Description of Artificial Sequence: Synthetic primer
gcaggtaggtattagtgtttgaaaaagctggtctttgagc

SEQ ID NO: 13379 - DNA, 40 bp, Artificial Sequence
  Description of Artificial Sequence: Synthetic primer
gcaacgagttgttctcttgtgccttttggcgattttggtg

SEQ ID NO: 13380 - DNA, 40 bp, Artificial Sequence
  Description of Artificial Sequence: Synthetic primer
aagagggtctgcgtgtggtcgtccaggactgtttttggag

SEQ ID NO: 13381 - DNA, 40 bp, Artificial Sequence
  Description of Artificial Sequence: Synthetic primer
ctgtcaatcacaggccgccctctgcattcctcagatcgag

SEQ ID NO: 13382 - DNA, 40 bp, Artificial Sequence
  Description of Artificial Sequence: Synthetic primer
agaggcagcactgcctccgaataatgcagacacatccttc

SEQ ID NO: 13383 - DNA, 40 bp, Artificial Sequence
  Description of Artificial Sequence: Synthetic primer
ccatcttctgaactgcagcattttcttgttttacagtttc

SEQ ID NO: 13384 - DNA, 40 bp, Artificial Sequence
  Description of Artificial Sequence: Synthetic primer
taaatggttgcagttttgtgatgagaacaggaaagcctac

SEQ ID NO: 13385 - DNA, 40 bp, Artificial Sequence
  Description of Artificial Sequence: Synthetic primer
aagtcctcaggctaccactatggggtcagcgcctgtgagg

SEQ ID NO: 13386 - DNA, 40 bp, Artificial Sequence
  Description of Artificial Sequence: Synthetic primer
cagtaactattaatatctagttctcagagcatttggaaag

SEQ ID NO: 13387 - DNA, 40 bp, Artificial Sequence
  Description of Artificial Sequence: Synthetic primer
ctggcctataatacaacctcccacaccgaccaatcctcac

SEQ ID NO: 13388 - DNA, 40 bp, Artificial Sequence
  Description of Artificial Sequence: Synthetic primer
ttctggctgtttttctgaggtgaatgacttgttacagagc

SEQ ID NO: 13389 - DNA, 40 bp, Artificial Sequence
  Description of Artificial Sequence: Synthetic primer
gaagatttagtttccatttttctttataataaaatatttg

SEQ ID NO: 13390 - DNA, 40 bp, Artificial Sequence
  Description of Artificial Sequence: Synthetic primer
tggaacattgtcactgttttcactgtcatgcagggagccc

SEQ ID NO: 13391 - DNA, 40 bp, Artificial Sequence
  Description of Artificial Sequence: Synthetic primer
gtcagttctcatttcttggagcagacccttgacaagaagc

SEQ ID NO: 13392 - DNA, 40 bp, Artificial Sequence
  Description of Artificial Sequence: Synthetic primer
ccttgtctttaacttcatttgcaaatttattagtgactcc

SEQ ID NO: 13393 - DNA, 40 bp, Artificial Sequence
  Description of Artificial Sequence: Synthetic primer
ggacagtggtggttccaacacccctgagcaagacgatctc

SEQ ID NO: 13394 - DNA, 40 bp, Artificial Sequence
  Description of Artificial Sequence: Synthetic primer
cctttgaatttgatattaattcagatagttcagaaactac

SEQ ID NO: 13395 - DNA, 40 bp, Artificial Sequence
  Description of Artificial Sequence: Synthetic primer
gattattaaggaacactgtcagttttatgaacatatgctc

SEQ ID NO: 13396 - DNA, 40 bp, Artificial Sequence
  Description of Artificial Sequence: Synthetic primer
aagtggatttcttatgggtcaggtggtggagacatttgtg

SEQ ID NO: 13397 - DNA, 40 bp, Artificial Sequence
  Description of Artificial Sequence: Synthetic primer
tttttagaagttaggccagtcacatctccagcttcttttg

SEQ ID NO: 13398 - DNA, 40 bp, Artificial Sequence
  Description of Artificial Sequence: Synthetic primer
ctggctttccaatatctctacaaaatgtgcatatccagtc

SEQ ID NO: 13399 - DNA, 40 bp, Artificial Sequence
  Description of Artificial Sequence: Synthetic primer
acggatactcagaatggccttgaacaggtcatccagaaac

SEQ ID NO: 13400 - DNA, 40 bp, Artificial Sequence
  Description of Artificial Sequence: Synthetic primer
aacaacacttaacgctgcttcactagttgttttccaaatg

SEQ ID NO: 13401 - DNA, 40 bp, Artificial Sequence
  Description of Artificial Sequence: Synthetic primer
atggctgggtgtatgacacgcccggctcttccatcgtcac

SEQ ID NO: 13402 - DNA, 40 bp, Artificial Sequence
  Description of Artificial Sequence: Synthetic primer
caaagtagatgagctgtaccggattgtcatctccctccag

SEQ ID NO: 13403 - DNA, 40 bp, Artificial Sequence
  Description of Artificial Sequence: Synthetic primer
gctgccttctggaagccaagggaagccctcagccagcaac

SEQ ID NO: 13404 - DNA, 40 bp, Artificial Sequence
  Description of Artificial Sequence: Synthetic primer
ccaaaccaccacccgacacgcagccgacgggatccccccc

SEQ ID NO: 13405 - DNA, 40 bp, Artificial Sequence
  Description of Artificial Sequence: Synthetic primer
caggagatatgagaacctgaaaggtgttctggaagggttc

SEQ ID NO: 13406 - DNA, 40 bp, Artificial Sequence
  Description of Artificial Sequence: Synthetic primer
ttttcattgctgacatttttgtcgtttaagacctgcagac

SEQ ID NO: 13407 - DNA, 40 bp, Artificial Sequence
  Description of Artificial Sequence: Synthetic primer
gtggagcctccaattgcagtggattcctcggggatagacc

SEQ ID NO: 13408 - DNA, 40 bp, Artificial Sequence
  Description of Artificial Sequence: Synthetic primer
acttttcatatatttaagacagaattcacacaggtaaagc

SEQ ID NO: 13409 - DNA, 40 bp, Artificial Sequence
  Description of Artificial Sequence: Synthetic primer
agaaaccagtcccttggacagtctgcaccttctcttactg

SEQ ID NO: 13410 - DNA, 40 bp, Artificial Sequence
  Description of Artificial Sequence: Synthetic primer
tctgctttccataatggccagcaaaagtttagatgcattg

SEQ ID NO: 13411 - DNA, 40 bp, Artificial Sequence
  Description of Artificial Sequence: Synthetic primer
ccgtctataaagaaacattcttggggaagggtttcaagag

SEQ ID NO: 13412 - DNA, 40 bp, Artificial Sequence
  Description of Artificial Sequence: Synthetic primer
gagatcagctacatcaagatggctcatcagctaaatcacg

SEQ ID NO: 13413 - DNA, 40 bp, Artificial Sequence
  Description of Artificial Sequence: Synthetic primer
cctgagatagcggggatcctgaactggactgaataaaacg

SEQ ID NO: 13414 - DNA, 40 bp, Artificial Sequence
  Description of Artificial Sequence: Synthetic primer
cattgttgtagctgttgctctgatctcccagcatggacag

SEQ ID NO: 13415 - DNA, 40 bp, Artificial Sequence
  Description of Artificial Sequence: Synthetic primer
agctcatggctgtgtaactgcagtctcaggcaaggctctg

SEQ ID NO: 13416 - DNA, 40 bp, Artificial Sequence
  Description of Artificial Sequence: Synthetic primer
ccaaccaggctctgctggagaacatcgccctgtacctcac

SEQ ID NO: 13417 - DNA, 40 bp, Artificial Sequence
  Description of Artificial Sequence: Synthetic primer
gctgtgttttggtgttttcatgtttacttgttttatattg

SEQ ID NO: 13418 - DNA, 40 bp, Artificial Sequence
  Description of Artificial Sequence: Synthetic primer
aagtgttttcaatacaattttttccgtataaaaatactgg

SEQ ID NO: 13419 - DNA, 40 bp, Artificial Sequence
  Description of Artificial Sequence: Synthetic primer
aaaaagagatccacaaagaaggaagtgtttaatatacttc

SEQ ID NO: 13420 - DNA, 40 bp, Artificial Sequence
  Description of Artificial Sequence: Synthetic primer
ttttctttaagttttatttaacttttcttttggacttttg

SEQ ID NO: 13421 - DNA, 40 bp, Artificial Sequence
  Description of Artificial Sequence: Synthetic primer
gaatgccactgaaacattctagtagcctggagaagttgac

SEQ ID NO: 13422 - DNA, 40 bp, Artificial Sequence
  Description of Artificial Sequence: Synthetic primer
cggccgctgcccttctccgcaccctgggattatcctctgc

SEQ ID NO: 13423 - DNA, 40 bp, Artificial Sequence
  Description of Artificial Sequence: Synthetic primer
accttctgatcttggaaaaacagcgtcttccttctttatc

SEQ ID NO: 13424 - DNA, 40 bp, Artificial Sequence
  Description of Artificial Sequence: Synthetic primer
aactaaattgaggtgcttccttaattctgtgactttattc

SEQ ID NO: 13425 - DNA, 40 bp, Artificial Sequence
  Description of Artificial Sequence: Synthetic primer
tattttaagtagtaaacttcagtttctcatgcaacttttg

SEQ ID NO: 13426 - DNA, 40 bp, Artificial Sequence
  Description of Artificial Sequence: Synthetic primer
ctgttcacttccctctttgttgtggtgacaggtctttttg

SEQ ID NO: 13427 - DNA, 40 bp, Artificial Sequence
  Description of Artificial Sequence: Synthetic primer
agcggcggcggctgccggacgatgggagcgtgagcaggac

SEQ ID NO: 13428 - DNA, 40 bp, Artificial Sequence
  Description of Artificial Sequence: Synthetic primer
gcagcagtctcctgtcagccagtctatgcaaaccctctcg

SEQ ID NO: 13429 - DNA, 40 bp, Artificial Sequence
  Description of Artificial Sequence: Synthetic primer
aacgacgcgctgctttcatgccctttcttgttctaccttc

SEQ ID NO: 13430 - DNA, 40 bp, Artificial Sequence
  Description of Artificial Sequence: Synthetic primer
ttatttttttccattgatttttatacatccagaataacac

SEQ ID NO: 13431 - DNA, 40 bp, Artificial Sequence
  Description of Artificial Sequence: Synthetic primer
gaaagatgtccagctgcccgtagttctttcggcggcactg

SEQ ID NO: 13432 - DNA, 40 bp, Artificial Sequence
  Description of Artificial Sequence: Synthetic primer
ggaggaagccgaggttttaactgcgagagtaaacctgaag

SEQ ID NO: 13433 - DNA, 40 bp, Artificial Sequence
  Description of Artificial Sequence: Synthetic primer
ggtcatggtttttagtgttatagcaggtgatacacaagtc

SEQ ID NO: 13434 - DNA, 40 bp, Artificial Sequence
  Description of Artificial Sequence: Synthetic primer
gggctcttgcccatggcactgaggctggccatgttagcac

SEQ ID NO: 13435 - DNA, 40 bp, Artificial Sequence
  Description of Artificial Sequence: Synthetic primer
gtgtttttttccagagaaagctgattgttaccagcaagac

SEQ ID NO: 13436 - DNA, 40 bp, Artificial Sequence
  Description of Artificial Sequence: Synthetic primer
gatttcagagaatatgaatatgatctcaaatgggagtttc

SEQ ID NO: 13437 - DNA, 40 bp, Artificial Sequence
  Description of Artificial Sequence: Synthetic primer
tctagctcagagcttgccagagattccctatgtccactgc

SEQ ID NO: 13438 - DNA, 40 bp, Artificial Sequence
  Description of Artificial Sequence: Synthetic primer
tttaaagcattatttgatagcttcttatcatctcctttgg

SEQ ID NO: 13439 - DNA, 40 bp, Artificial Sequence
  Description of Artificial Sequence: Synthetic primer
gggctgtgttacagccactgcaggtttcactcgctttacg

SEQ ID NO: 13440 - DNA, 40 bp, Artificial Sequence
  Description of Artificial Sequence: Synthetic primer
ctgtggaattggaatggattttgaaggagacggactggtg

SEQ ID NO: 13441 - DNA, 40 bp, Artificial Sequence
  Description of Artificial Sequence: Synthetic primer
tgtggcaactggacgttccccaaggacatggggttaaatg

SEQ ID NO: 13442 - DNA, 40 bp, Artificial Sequence
  Description of Artificial Sequence: Synthetic primer
tcatgaagccacagctggaataattggagtaaacagaaag

SEQ ID NO: 13443 - DNA, 40 bp, Artificial Sequence
  Description of Artificial Sequence: Synthetic primer
ggctttggaaagtctgcaaactcaaaagtttaccaccaag

SEQ ID NO: 13444 - DNA, 40 bp, Artificial Sequence
  Description of Artificial Sequence: Synthetic primer
ccgcaagtcgccacctaccacagagccatcaaaatcacag

SEQ ID NO: 13445 - DNA, 40 bp, Artificial Sequence
  Description of Artificial Sequence: Synthetic primer
tcagttagtgtcccgagaatggtcataaatgtgcatgaag

SEQ ID NO: 13446 - DNA, 40 bp, Artificial Sequence
  Description of Artificial Sequence: Synthetic primer
cctgttcgcctgtctcacccttgtcaccacgggggccttg

SEQ ID NO: 13447 - DNA, 40 bp, Artificial Sequence
  Description of Artificial Sequence: Synthetic primer
gatccctgatgacaagtatcggtccctgcgccgctcaatg

SEQ ID NO: 13448 - DNA, 40 bp, Artificial Sequence
  Description of Artificial Sequence: Synthetic primer
agtttctgaaatgattctccagaatttctcctcataaaaa

SEQ ID NO: 13449 - DNA, 40 bp, Artificial Sequence
  Description of Artificial Sequence: Synthetic primer
atgcttgcatgtaggccagatataagtctgtagaatgctc

SEQ ID NO: 13450 - DNA, 40 bp, Artificial Sequence
  Description of Artificial Sequence: Synthetic primer
aggaatccagagataaagttaatcaattagaggaaaagac

SEQ ID NO: 13451 - DNA, 40 bp, Artificial Sequence
  Description of Artificial Sequence: Synthetic primer
gtctcccaaaaggtataagctccgagatgactttgagaag

SEQ ID NO: 13452 - DNA, 40 bp, Artificial Sequence
  Description of Artificial Sequence: Synthetic primer
ctcactggcctccctggcacagagaagctgaatgaaaaag

SEQ ID NO: 13453 - DNA, 40 bp, Artificial Sequence
  Description of Artificial Sequence: Synthetic primer
gattgaatggggttttgagacatcttctctgataccttag

SEQ ID NO: 13454 - DNA, 40 bp, Artificial Sequence
  Description of Artificial Sequence: Synthetic primer
ggaaattcttacagctactttacaatcataggttaacagc

SEQ ID NO: 13455 - DNA, 40 bp, Artificial Sequence
  Description of Artificial Sequence: Synthetic primer
gatgctgtttctcaattgattgttttaagttttcactctg

SEQ ID NO: 13456 - DNA, 40 bp, Artificial Sequence
  Description of Artificial Sequence: Synthetic primer
ttattaacatatataattttaatgcctttggaacacactt

SEQ ID NO: 13457 - DNA, 40 bp, Artificial Sequence
  Description of Artificial Sequence: Synthetic primer
ccctgtcctgaaagccacagacaatatggtcccaaataac

SEQ ID NO: 13458 - DNA, 40 bp, Artificial Sequence
  Description of Artificial Sequence: Synthetic primer
ttttttcatctcgattggtgaaggggaaggtggcttatcc

SEQ ID NO: 13459 - DNA, 40 bp, Artificial Sequence
  Description of Artificial Sequence: Synthetic primer
taggtggcacctctggtgaggcctgtcagagtggcactgg

SEQ ID NO: 13460 - DNA, 40 bp, Artificial Sequence
  Description of Artificial Sequence: Synthetic primer
ccctgctgggcccaccacctgtccgtccctgtcccctttc

SEQ ID NO: 13461 - DNA, 40 bp, Artificial Sequence
  Description of Artificial Sequence: Synthetic primer
cgtgactgctcggaggggtgggcggcaaatgcaggtggtc

SEQ ID NO: 13462 - DNA, 40 bp, Artificial Sequence
  Description of Artificial Sequence: Synthetic primer
aagcagtgctgattttgacaagaaatgagatttttatatt

SEQ ID NO: 13463 - DNA, 40 bp, Artificial Sequence
  Description of Artificial Sequence: Synthetic primer
agcacctgaccaaaaagatgctgtatgacatggaaaatcc

SEQ ID NO: 13464 - DNA, 40 bp, Artificial Sequence
  Description of Artificial Sequence: Synthetic primer
ggtttgaggaagagatgagatctgtgctccagttaaagtc

SEQ ID NO: 13465 - DNA, 40 bp, Artificial Sequence
  Description of Artificial Sequence: Synthetic primer
ggtcaggggacatagtgtcattgtttggaaactgcagacc

SEQ ID NO: 13466 - DNA, 40 bp, Artificial Sequence
  Description of Artificial Sequence: Synthetic primer
atagcaacttacctttgggctagatgttttcagattatgc

SEQ ID NO: 13467 - DNA, 40 bp, Artificial Sequence
  Description of Artificial Sequence: Synthetic primer
tattttttaaggaaaaatagaaaagtagcttgtgaatagc

SEQ ID NO: 13468 - DNA, 40 bp, Artificial Sequence
  Description of Artificial Sequence: Synthetic primer
gctgatagaggaactagccaggtgggggcctttccctttg

SEQ ID NO: 13469 - DNA, 40 bp, Artificial Sequence
  Description of Artificial Sequence: Synthetic primer
gagaggaaagtgccaagaagactgggaaatcaaagaagag

SEQ ID NO: 13470 - DNA, 40 bp, Artificial Sequence
  Description of Artificial Sequence: Synthetic primer
tgagcctttccatatcgaatgctacgttatcagtacatgg

SEQ ID NO: 13471 - DNA, 40 bp, Artificial Sequence
  Description of Artificial Sequence: Synthetic primer
tataaatcatgatgctagccagcaaagatgtgaaaatatc

SEQ ID NO: 13472 - DNA, 40 bp, Artificial Sequence
  Description of Artificial Sequence: Synthetic primer
attcttcttcatctataagctcacccacatactcattcac

SEQ ID NO: 13473 - DNA, 40 bp, Artificial Sequence
  Description of Artificial Sequence: Synthetic primer
tctgagcccgggacagaactgcagaccaccgagcaacagg

SEQ ID NO: 13474 - DNA, 40 bp, Artificial Sequence
  Description of Artificial Sequence: Synthetic primer
tgtctcttctcacgccaagctaatttttctaatgattctg

SEQ ID NO: 13475 - DNA, 40 bp, Artificial Sequence
  Description of Artificial Sequence: Synthetic primer
gcctggtcctactgattctttcacacctgaaatacctgtg

SEQ ID NO: 13476 - DNA, 40 bp, Artificial Sequence
  Description of Artificial Sequence: Synthetic primer
gccggctctgggagccgagagggcaacaggatcggctctg

SEQ ID NO: 13477 - DNA, 40 bp, Artificial Sequence
  Description of Artificial Sequence: Synthetic primer
actgcggtcttctgcaagattcctgaagcaactatcactc

SEQ ID NO: 13478 - DNA, 40 bp, Artificial Sequence
  Description of Artificial Sequence: Synthetic primer
cttcttaactgttttgtacctcagattgtttttagatgtc

SEQ ID NO: 13479 - DNA, 40 bp, Artificial Sequence
  Description of Artificial Sequence: Synthetic primer
tggagaagttcgaggagtccaaggaggtggcagaaaccag

SEQ ID NO: 13480 - DNA, 40 bp, Artificial Sequence
  Description of Artificial Sequence: Synthetic primer
cgtcaatcccagcagcgggagaggttcaggatgaaactgg

SEQ ID NO: 13481 - DNA, 40 bp, Artificial Sequence
  Description of Artificial Sequence: Synthetic primer
cccctcggaagccgggccgggcgagcggcgccaggaactc

SEQ ID NO: 13482 - DNA, 40 bp, Artificial Sequence
  Description of Artificial Sequence: Synthetic primer
gagtcttgttagttgcagtctcttttgaatactttccttg

SEQ ID NO: 13483 - DNA, 40 bp, Artificial Sequence
  Description of Artificial Sequence: Synthetic primer
catgccgcgtggctgggccgcccccttgctcctgctgctg

SEQ ID NO: 13484 - DNA, 40 bp, Artificial Sequence
  Description of Artificial Sequence: Synthetic primer
tccttttgacctataagaaggaaaagtcttggagaaatag

SEQ ID NO: 13485 - DNA, 40 bp, Artificial Sequence
  Description of Artificial Sequence: Synthetic primer
gagtgaggcctcctcagagaagcggcagtcacactcattg

SEQ ID NO: 13486 - DNA, 40 bp, Artificial Sequence
  Description of Artificial Sequence: Synthetic primer
aaatgacagtttctgtcattacttagattccgatctttcc

SEQ ID NO: 13487 - DNA, 40 bp, Artificial Sequence
  Description of Artificial Sequence: Synthetic primer
ctccgctctggggaaacggccccggccagcgggatcatgg

SEQ ID NO: 13488 - DNA, 40 bp, Artificial Sequence
  Description of Artificial Sequence: Synthetic primer
tttcttttattaaatccaatccagaactgcctttcttctg

SEQ ID NO: 13489 - DNA, 40 bp, Artificial Sequence
  Description of Artificial Sequence: Synthetic primer
gacttggcagaatatgcgcccaatctcagaggcagtggtg

SEQ ID NO: 13490 - DNA, 40 bp, Artificial Sequence
  Description of Artificial Sequence: Synthetic primer
gtgagttttccttacttgtttccgtctctacaatatccag

SEQ ID NO: 13491 - DNA, 40 bp, Artificial Sequence
  Description of Artificial Sequence: Synthetic primer
gagaaaagtgacaacgtttggtttactttagtatattagg

SEQ ID NO: 13492 - DNA, 40 bp, Artificial Sequence
  Description of Artificial Sequence: Synthetic primer
cgctcgcgcgcccgcgcggccaggatattacatggcaacc

SEQ ID NO: 13493 - DNA, 40 bp, Artificial Sequence
  Description of Artificial Sequence: Synthetic primer
ataaccaggatattatctaatggtgaattgtagaattttg

SEQ ID NO: 13494 - DNA, 40 bp, Artificial Sequence
  Description of Artificial Sequence: Synthetic primer
aggaccagaggctccagagggaccttgttcaccaggagag

SEQ ID NO: 13495 - DNA, 40 bp, Artificial Sequence
  Description of Artificial Sequence: Synthetic primer
atcaatgttatatttcacacacaaatttagaaaaatcaag

SEQ ID NO: 13496 - DNA, 40 bp, Artificial Sequence
  Description of Artificial Sequence: Synthetic primer
aatcaaggtgactaagaaaatcagttgtgtaaataaaatc

SEQ ID NO: 13497 - DNA, 40 bp, Artificial Sequence
  Description of Artificial Sequence: Synthetic primer
cctctccagctgccgggcattgggtgggggacgtcttgtg

SEQ ID NO: 13498 - DNA, 40 bp, Artificial Sequence
  Description of Artificial Sequence: Synthetic primer
actccaagggctccggcggcggcgactcccgcaaagacag

SEQ ID NO: 13499 - DNA, 40 bp, Artificial Sequence
  Description of Artificial Sequence: Synthetic primer
tgccagatgcaaggaggtacgctgttaagtattacagatg

SEQ ID NO: 13500 - DNA, 40 bp, Artificial Sequence
  Description of Artificial Sequence: Synthetic primer
gtccacattgagggcaatgtaggggtcgagaaggaaagtc

SEQ ID NO: 13501 - DNA, 40 bp, Artificial Sequence
  Description of Artificial Sequence: Synthetic primer
tacattcaatctgacatgggtatgaaatttgcctgtcaac

SEQ ID NO: 13502 - DNA, 40 bp, Artificial Sequence
  Description of Artificial Sequence: Synthetic primer
accacagtgcacggctggaccttggagcctttgccatctg

SEQ ID NO: 13503 - DNA, 40 bp, Artificial Sequence
  Description of Artificial Sequence: Synthetic primer
atttgcatgttaaatgcgtctgacctgttggtaacttttc

SEQ ID NO: 13504 - DNA, 40 bp, Artificial Sequence
  Description of Artificial Sequence: Synthetic primer
ctcaagaagaaatggcccttttagaagctgtgatggactg

SEQ ID NO: 13505 - DNA, 40 bp, Artificial Sequence
  Description of Artificial Sequence: Synthetic primer
gcagcaccgtgagcgagcgccgcgtcttctccaccatgtc

SEQ ID NO: 13506 - DNA, 40 bp, Artificial Sequence
  Description of Artificial Sequence: Synthetic primer
atgttgtggtagctcaaattgacccaaagaagttgaaaag

SEQ ID NO: 13507 - DNA, 40 bp, Artificial Sequence
  Description of Artificial Sequence: Synthetic primer
ctgcagcagcgccgaggccgagactcagacctgctacacc

SEQ ID NO: 13508 - DNA, 40 bp, Artificial Sequence
  Description of Artificial Sequence: Synthetic primer
cgtggacacgccgggattcggggacgctgtcaacaacacc

SEQ ID NO: 13509 - DNA, 40 bp, Artificial Sequence
  Description of Artificial Sequence: Synthetic primer
caagggtggccgagactgtccagtaccatcactgctctgc

SEQ ID NO: 13510 - DNA, 40 bp, Artificial Sequence
  Description of Artificial Sequence: Synthetic primer
aaccttatttaagtgctccttttccatttcatggactttc

SEQ ID NO: 13511 - DNA, 40 bp, Artificial Sequence
  Description of Artificial Sequence: Synthetic primer
atgcggcctttcaatgattttgtgaaaagcaactttgatg

SEQ ID NO: 13512 - DNA, 40 bp, Artificial Sequence
  Description of Artificial Sequence: Synthetic primer
gccatataccaccgaggagcgaaggaaattggtaatagcc

SEQ ID NO: 13513 - DNA, 40 bp, Artificial Sequence
  Description of Artificial Sequence: Synthetic primer
ggttttttagcatgaatttcacagcatctatcttcacaag

SEQ ID NO: 13514 - DNA, 40 bp, Artificial Sequence
  Description of Artificial Sequence: Synthetic primer
aaggagcaagagaacagtgagctccatgcaaaacttaaac

SEQ ID NO: 13515 - DNA, 40 bp, Artificial Sequence
  Description of Artificial Sequence: Synthetic primer
cagttgtgaaatggaaaatgaggtacttaaagtgctttcc

SEQ ID NO: 13516 - DNA, 40 bp, Artificial Sequence
  Description of Artificial Sequence: Synthetic primer
ttgcagcttgaaaaagaaatgtttttgctgttaaaataag

SEQ ID NO: 13517 - DNA, 40 bp, Artificial Sequence
  Description of Artificial Sequence: Synthetic primer
aaataaagctttagctgtggcccagttgtggcatggactg

SEQ ID NO: 13518 - DNA, 40 bp, Artificial Sequence
  Description of Artificial Sequence: Synthetic primer
acagtgcccaggtaactctgatgtagcaggactaaagctg

SEQ ID NO: 13519 - DNA, 40 bp, Artificial Sequence
  Description of Artificial Sequence: Synthetic primer
tgggattttcctaatggacgtaaccctatttcttttctcc

SEQ ID NO: 13520 - DNA, 40 bp, Artificial Sequence
  Description of Artificial Sequence: Synthetic primer
ggcggtgcgcggccggcggcacttccccaggaggttcgac

SEQ ID NO: 13521 - DNA, 40 bp, Artificial Sequence
  Description of Artificial Sequence: Synthetic primer
ctcagaagactccagccaaagtggtgtacgtgttttctac

SEQ ID NO: 13522 - DNA, 40 bp, Artificial Sequence
  Description of Artificial Sequence: Synthetic primer
ccagaactgttccgttcctttttactgcctttgctacaag

SEQ ID NO: 13523 - DNA, 40 bp, Artificial Sequence
  Description of Artificial Sequence: Synthetic primer
gctacatcaatgagctgtgttctcagaaggtctttgtctc

SEQ ID NO: 13524 - DNA, 40 bp, Artificial Sequence
  Description of Artificial Sequence: Synthetic primer
cgctgtccagcaataccttgaggcccgggagtaccaggag

SEQ ID NO: 13525 - DNA, 40 bp, Artificial Sequence
  Description of Artificial Sequence: Synthetic primer
agaaatcacaagccgtcccgatccttctctaggtctcgta

SEQ ID NO: 13526 - DNA, 40 bp, Artificial Sequence
  Description of Artificial Sequence: Synthetic primer
tctgtttctttttaaatacaggtttgtagggtggtatttt

SEQ ID NO: 13527 - DNA, 40 bp, Artificial Sequence
  Description of Artificial Sequence: Synthetic primer
aacacccgtaccttacccaactctactgctgcttccagac

SEQ ID NO: 13528 - DNA, 40 bp, Artificial Sequence
  Description of Artificial Sequence: Synthetic primer
cattcagtccagtcctgagtagttttccttttcccaactc

SEQ ID NO: 13529 - DNA, 40 bp, Artificial Sequence
  Description of Artificial Sequence: Synthetic primer
ctgctaggcaaagcaccaacagtgaactactcaaatatcg

SEQ ID NO: 13530 - DNA, 40 bp, Artificial Sequence
  Description of Artificial Sequence: Synthetic primer
cttttcagtcgggcgctgagtggtttttcggatcatgtct

SEQ ID NO: 13531 - DNA, 40 bp, Artificial Sequence
  Description of Artificial Sequence: Synthetic primer
tttttagggtcacagtgattatttcaggttctttcctcag

SEQ ID NO: 13532 - DNA, 40 bp, Artificial Sequence
  Description of Artificial Sequence: Synthetic primer
gctgcccctggagatggatgatgcggagacggggctgctc

SEQ ID NO: 13533 - DNA, 40 bp, Artificial Sequence
  Description of Artificial Sequence: Synthetic primer
tccccgtcgttctcgggctcgaagtcgtacagcgccttgc

SEQ ID NO: 13534 - DNA, 40 bp, Artificial Sequence
  Description of Artificial Sequence: Synthetic primer
gggagggggcgagttctccgggagggggtgtctcagatcg

SEQ ID NO: 13535 - DNA, 40 bp, Artificial Sequence
  Description of Artificial Sequence: Synthetic primer
ctttggttatatggtcaatgttgttttccctgcagtaatc

SEQ ID NO: 13536 - DNA, 40 bp, Artificial Sequence
  Description of Artificial Sequence: Synthetic primer
gtacatctataaagacacatatgattaccactcaaaagag

SEQ ID NO: 13537 - DNA, 40 bp, Artificial Sequence
  Description of Artificial Sequence: Synthetic primer
atcaacagaggctatagaggctaaggctgcccttaaacag

SEQ ID NO: 13538 - DNA, 40 bp, Artificial Sequence
  Description of Artificial Sequence: Synthetic primer
gtggtgaccgccacaggagtgatggtagagaaggaagatg

SEQ ID NO: 13539 - DNA, 40 bp, Artificial Sequence
  Description of Artificial Sequence: Synthetic primer
acaagcttttaacacatttttgacctaggagccctgttgc

SEQ ID NO: 13540 - DNA, 40 bp, Artificial Sequence
  Description of Artificial Sequence: Synthetic primer
cactatggattagtcttctgaagtgaaggaaatatagatg

SEQ ID NO: 13541 - DNA, 40 bp, Artificial Sequence
  Description of Artificial Sequence: Synthetic primer
tggctcacttcacgtgataatgaactcattgaactacagc

SEQ ID NO: 13542 - DNA, 40 bp, Artificial Sequence
  Description of Artificial Sequence: Synthetic primer
caagtggcggattctcacagatggaggatctggccactgc

SEQ ID NO: 13543 - DNA, 40 bp, Artificial Sequence
  Description of Artificial Sequence: Synthetic primer
agccaagttctcttcttttcccaccagagagcatggtcag

SEQ ID NO: 13544 - DNA, 40 bp, Artificial Sequence
  Description of Artificial Sequence: Synthetic primer
tagcaggtgtagaaagaatatgtccttattttagacgaac

SEQ ID NO: 13545 - DNA, 40 bp, Artificial Sequence
  Description of Artificial Sequence: Synthetic primer
gccccaatagcctcacggcacagtactcttgggcagtaac

SEQ ID NO: 13546 - DNA, 40 bp, Artificial Sequence
  Description of Artificial Sequence: Synthetic primer
cattaagtcagattaaaccatttgaatgatagtagagatg

SEQ ID NO: 13547 - DNA, 40 bp, Artificial Sequence
  Description of Artificial Sequence: Synthetic primer
gcgagggggcggagcttcgggttaggtcccggcgaggttc

SEQ ID NO: 13548 - DNA, 40 bp, Artificial Sequence
  Description of Artificial Sequence: Synthetic primer
cctcagtttaatccttctagtttcccacaatataaaactg

SEQ ID NO: 13549 - DNA, 40 bp, Artificial Sequence
  Description of Artificial Sequence: Synthetic primer
gtggttatagctgaaaagctggccttggaacagcaagtag

SEQ ID NO: 13550 - DNA, 40 bp, Artificial Sequence
  Description of Artificial Sequence: Synthetic primer
aatcatttggcattcacatgtggctgttaatatgtgcttg

SEQ ID NO: 13551 - DNA, 40 bp, Artificial Sequence
  Description of Artificial Sequence: Synthetic primer
cccctacccagaggacaatggccagaggaaaaacattgag

SEQ ID NO: 13552 - DNA, 40 bp, Artificial Sequence
  Description of Artificial Sequence: Synthetic primer
cccccctccttttccttccatatatatttgttttgttttg

SEQ ID NO: 13553 - DNA, 40 bp, Artificial Sequence
  Description of Artificial Sequence: Synthetic primer
ccaaaaatgtctattcttgacggagagtctaaagcagttc

SEQ ID NO: 13554 - DNA, 40 bp, Artificial Sequence
  Description of Artificial Sequence: Synthetic primer
aatttaattggagatacttagtaatagatgaagctcacag

SEQ ID NO: 13555 - DNA, 40 bp, Artificial Sequence
  Description of Artificial Sequence: Synthetic primer
gcgaaatggacgaaagaagagctcatcgggcagctgaaac

SEQ ID NO: 13556 - DNA, 40 bp, Artificial Sequence
  Description of Artificial Sequence: Synthetic primer
catataagtgtcaacaacctaaaaataagaaagccttcag

SEQ ID NO: 13557 - DNA, 40 bp, Artificial Sequence
  Description of Artificial Sequence: Synthetic primer
aaaaacccacaaaagtttatttgagaacaagagtgaaagc

SEQ ID NO: 13558 - DNA, 40 bp, Artificial Sequence
  Description of Artificial Sequence: Synthetic primer
cactcattgcaagacccattccatggtgtttaccattcac

SEQ ID NO: 13559 - DNA, 40 bp, Artificial Sequence
  Description of Artificial Sequence: Synthetic primer
cccggtgcccgcaactcctgatcccaacccgcgagaggag

SEQ ID NO: 13560 - DNA, 40 bp, Artificial Sequence
  Description of Artificial Sequence: Synthetic primer
gttccccatcactgtcttcactgctgcttagttttaagtc

SEQ ID NO: 13561 - DNA, 40 bp, Artificial Sequence
  Description of Artificial Sequence: Synthetic primer
actggggagtagggccaggtgttggccgtgggtgaagtcc

SEQ ID NO: 13562 - DNA, 40 bp, Artificial Sequence
  Description of Artificial Sequence: Synthetic primer
gctgaatactcagccagaacagaccaatgcaggggaggtg

SEQ ID NO: 13563 - DNA, 40 bp, Artificial Sequence
  Description of Artificial Sequence: Synthetic primer
ccagccccctgtggctgaggctacaccccggagccaggag

SEQ ID NO: 13564 - DNA, 40 bp, Artificial Sequence
  Description of Artificial Sequence: Synthetic primer
tattttcagatagtagttcatacttgagtgaagtgtcttg

SEQ ID NO: 13565 - DNA, 40 bp, Artificial Sequence
  Description of Artificial Sequence: Synthetic primer
taactctgagccatcttcgccctgttgtcatagcacttac

SEQ ID NO: 13566 - DNA, 40 bp, Artificial Sequence
  Description of Artificial Sequence: Synthetic primer
cagcagccaccatatacaggagctcagactcaagcaggtc

SEQ ID NO: 13567 - DNA, 40 bp, Artificial Sequence
  Description of Artificial Sequence: Synthetic primer
tgctgtggaatccacccaccagcagcaacattctcctcag

SEQ ID NO: 13568 - DNA, 40 bp, Artificial Sequence
  Description of Artificial Sequence: Synthetic primer
gggagacactgactgggctccgggggtaggcgcagtggac

SEQ ID NO: 13569 - DNA, 40 bp, Artificial Sequence
  Description of Artificial Sequence: Synthetic primer
catggtgccaccacctgcctcagagccccacctgagcctg

SEQ ID NO: 13570 - DNA, 40 bp, Artificial Sequence
  Description of Artificial Sequence: Synthetic primer
gcacggaggctgtcatagcccgagccgcatggagaagacc

SEQ ID NO: 13571 - DNA, 40 bp, Artificial Sequence
  Description of Artificial Sequence: Synthetic primer
ccacttgcagtttgggtttttggcataagtgatgtaatgg

SEQ ID NO: 13572 - DNA, 40 bp, Artificial Sequence
  Description of Artificial Sequence: Synthetic primer
tggccccgccggggcagcgggggagctgcctgcagaagag

SEQ ID NO: 13573 - DNA, 40 bp, Artificial Sequence
  Description of Artificial Sequence: Synthetic primer
tgggtatccatggtgacaagagtcaacaagagcgtgactg

SEQ ID NO: 13574 - DNA, 40 bp, Artificial Sequence
  Description of Artificial Sequence: Synthetic primer
gccccaaaggaaagcagctggcagtgggaaaacagaatgg

SEQ ID NO: 13575 - DNA, 40 bp, Artificial Sequence
  Description of Artificial Sequence: Synthetic primer
cttggaataattcccatgccttctggatcatgaagtttac

SEQ ID NO: 13576 - DNA, 40 bp, Artificial Sequence
  Description of Artificial Sequence: Synthetic primer
actggaacaggaggaagaagagagaaaacgagaggaaaac

SEQ ID NO: 13577 - DNA, 40 bp, Artificial Sequence
  Description of Artificial Sequence: Synthetic primer
gccgaggaatgaccttctgtaacctctggaaaccataatc

SEQ ID NO: 13578 - DNA, 40 bp, Artificial Sequence
  Description of Artificial Sequence: Synthetic primer
atccacaaggccattatggaaggcatatcttctgtgtttg

SEQ ID NO: 13579 - DNA, 40 bp, Artificial Sequence
  Description of Artificial Sequence: Synthetic primer
tcatgtgacttttactgctcattttgttaaaaattctgtc

SEQ ID NO: 13580 - DNA, 40 bp, Artificial Sequence
  Description of Artificial Sequence: Synthetic primer
ccctccgaggccgacgccattgtggagttattgttctcag

SEQ ID NO: 13581 - DNA, 40 bp, Artificial Sequence
  Description of Artificial Sequence: Synthetic primer
cgaattgagcatctgtataagaatccccaggctcacattg

SEQ ID NO: 13582 - DNA, 40 bp, Artificial Sequence
  Description of Artificial Sequence: Synthetic primer
acctggtttattatgcagaagttaatgacaggaaaaacag

SEQ ID NO: 13583 - DNA, 40 bp, Artificial Sequence
  Description of Artificial Sequence: Synthetic primer
tgggggtggatgccctgggtctcaacatctatgagcagaa

SEQ ID NO: 13584 - DNA, 40 bp, Artificial Sequence
  Description of Artificial Sequence: Synthetic primer
ctctgctcagtaacggcactgcggctggcgtggcagatca

SEQ ID NO: 13585 - DNA, 40 bp, Artificial Sequence
  Description of Artificial Sequence: Synthetic primer
gaacaaagcgaatcggaggaggcaggaacgacagtaaaag

SEQ ID NO: 13586 - DNA, 40 bp, Artificial Sequence
  Description of Artificial Sequence: Synthetic primer
gatgatgaaagttgttcaagtttatgcagacacacaagag

SEQ ID NO: 13587 - DNA, 40 bp, Artificial Sequence
  Description of Artificial Sequence: Synthetic primer
ggtctgcgttctctttctccagcgtctgcttattcttgtc

SEQ ID NO: 13588 - DNA, 40 bp, Artificial Sequence
  Description of Artificial Sequence: Synthetic primer
tgtagccctgcagcagctccgtgagccccggcgggatctg

SEQ ID NO: 13589 - DNA, 40 bp, Artificial Sequence
  Description of Artificial Sequence: Synthetic primer
cgggcctcatttatgaggagacccgcggtgttcttaaggt

SEQ ID NO: 13590 - DNA, 40 bp, Artificial Sequence
  Description of Artificial Sequence: Synthetic primer
caattagacattttccccactcacatctcttagtttttag

SEQ ID NO: 13591 - DNA, 40 bp, Artificial Sequence
  Description of Artificial Sequence: Synthetic primer
ttgaatatgtgaactctgttatccgtcgatacactgaacc

SEQ ID NO: 13592 - DNA, 40 bp, Artificial Sequence
  Description of Artificial Sequence: Synthetic primer
gagcgaggcttgtagcccttgcggtcgtatttcacaacag

SEQ ID NO: 13593 - DNA, 40 bp, Artificial Sequence
  Description of Artificial Sequence: Synthetic primer
ctgcctcactcctctttcttcggccacttaatccgtactc

SEQ ID NO: 13594 - DNA, 40 bp, Artificial Sequence
  Description of Artificial Sequence: Synthetic primer
tttccacaccatgttctttatgcacaactcccgcagaagc

SEQ ID NO: 13595 - DNA, 40 bp, Artificial Sequence
  Description of Artificial Sequence: Synthetic primer
tggtgttgacaacatgaactgtgctggttacactgacctg

SEQ ID NO: 13596 - DNA, 40 bp, Artificial Sequence
  Description of Artificial Sequence: Synthetic primer
aggcgctcggagcaggcctagccaagctgtaggggagctg

SEQ ID NO: 13597 - DNA, 40 bp, Artificial Sequence
  Description of Artificial Sequence: Synthetic primer
gctggacggcggcggcgacgcttggtgatgatggtgatgg

SEQ ID NO: 13598 - DNA, 40 bp, Artificial Sequence
  Description of Artificial Sequence: Synthetic primer
gagtacaactcagctggcctgctcatcaaggcctacaacc

SEQ ID NO: 13599 - DNA, 40 bp, Artificial Sequence
  Description of Artificial Sequence: Synthetic primer
ctgtattagctaggaaaggtttgtaaatggtgtcagtgag

SEQ ID NO: 13600 - DNA, 40 bp, Artificial Sequence
  Description of Artificial Sequence: Synthetic primer
gccagaagatgaagcgggttgtgcagcataccaagggttg

SEQ ID NO: 13601 - DNA, 40 bp, Artificial Sequence
  Description of Artificial Sequence: Synthetic primer
agttctaggataaaacagagttgcacacaagaaattaagg

SEQ ID NO: 13602 - DNA, 40 bp, Artificial Sequence
  Description of Artificial Sequence: Synthetic primer
accccgcctcctcttcatcactgttatttttgtctttagc

SEQ ID NO: 13603 - DNA, 40 bp, Artificial Sequence
  Description of Artificial Sequence: Synthetic primer
aggatttaccaaactggagtaatgagaatgttgatgacag

SEQ ID NO: 13604 - DNA, 40 bp, Artificial Sequence
  Description of Artificial Sequence: Synthetic primer
gggcgtggagcccgtgctgccaaacttcaccaccccactg

SEQ ID NO: 13605 - DNA, 40 bp, Artificial Sequence
  Description of Artificial Sequence: Synthetic primer
accatgccacatgcaacaagaggagggtcgcttgttttgg

SEQ ID NO: 13606 - DNA, 40 bp, Artificial Sequence
  Description of Artificial Sequence: Synthetic primer
ataatccttggtgccactgttgatacccaactgtgtgata

SEQ ID NO: 13607 - DNA, 40 bp, Artificial Sequence
  Description of Artificial Sequence: Synthetic primer
attggcttggcttactttccccctgaaatcctctctcctg

SEQ ID NO: 13608 - DNA, 40 bp, Artificial Sequence
  Description of Artificial Sequence: Synthetic primer
agtagaagaccaggagaaactgaaaactgaattaaggaag

SEQ ID NO: 13609 - DNA, 40 bp, Artificial Sequence
  Description of Artificial Sequence: Synthetic primer
catcagtgaaggagcaatccacaaagccaattccattacc

SEQ ID NO: 13610 - DNA, 40 bp, Artificial Sequence
  Description of Artificial Sequence: Synthetic primer
catcaaggaccctaatggccactgggactttggcttcctg

SEQ ID NO: 13611 - DNA, 40 bp, Artificial Sequence
  Description of Artificial Sequence: Synthetic primer
cggggatcggcatgggctcatcgccctcatctggagtatc

SEQ ID NO: 13612 - DNA, 40 bp, Artificial Sequence
  Description of Artificial Sequence: Synthetic primer
atgggacgtgcatgtgcacagtgatttggcaaaggaccta

SEQ ID NO: 13613 - DNA, 40 bp, Artificial Sequence
  Description of Artificial Sequence: Synthetic primer
cacctccccgcggctcagtttgaggacacttgtgcggaac

SEQ ID NO: 13614 - DNA, 40 bp, Artificial Sequence
  Description of Artificial Sequence: Synthetic primer
acagaagaaaatttggatttcaaagcgattattgatggag

SEQ ID NO: 13615 - DNA, 40 bp, Artificial Sequence
  Description of Artificial Sequence: Synthetic primer
gctccacttagagaaatgagctgtgatctgtgtagttttg

SEQ ID NO: 13616 - DNA, 40 bp, Artificial Sequence
  Description of Artificial Sequence: Synthetic primer
tgaaaattgacgctcattcttcttcctattgttccctgac

SEQ ID NO: 13617 - DNA, 40 bp, Artificial Sequence
  Description of Artificial Sequence: Synthetic primer
gccctggccaaggggctctatgcccgcctcttcgacttcc

SEQ ID NO: 13618 - DNA, 40 bp, Artificial Sequence
  Description of Artificial Sequence: Synthetic primer
ctgctctcatagactgctcctccaaggggaagcagtgtgg

SEQ ID NO: 13619 - DNA, 40 bp, Artificial Sequence
  Description of Artificial Sequence: Synthetic primer
gggcatgatgaagccagcgtaccccgactcctctactttg

SEQ ID NO: 13620 - DNA, 40 bp, Artificial Sequence
  Description of Artificial Sequence: Synthetic primer
ggacaactcgaggcagcatcaccccagtctttttcttttg

SEQ ID NO: 13621 - DNA, 40 bp, Artificial Sequence
  Description of Artificial Sequence: Synthetic primer
caaaaatgatttgaaaaccatcttacttttgaacctcctg

SEQ ID NO: 13622 - DNA, 40 bp, Artificial Sequence
  Description of Artificial Sequence: Synthetic primer
attccaaaaccaagaggcagacccaaaatggtaaaacagc

SEQ ID NO: 13623 - DNA, 40 bp, Artificial Sequence
  Description of Artificial Sequence: Synthetic primer
ctggctttaggctcttgctaccattgtcccggggctggag

SEQ ID NO: 13624 - DNA, 40 bp, Artificial Sequence
  Description of Artificial Sequence: Synthetic primer
aggtcttctggcagggcatacactcttgctccaatttttc

SEQ ID NO: 13625 - DNA, 40 bp, Artificial Sequence
  Description of Artificial Sequence: Synthetic primer
ggggacttgcgagacttcgtgaggagccacctggggaacc

SEQ ID NO: 13626 - DNA, 40 bp, Artificial Sequence
  Description of Artificial Sequence: Synthetic primer
ttggtatataattgtttgatatttggggagggttttggag

SEQ ID NO: 13627 - DNA, 40 bp, Artificial Sequence
  Description of Artificial Sequence: Synthetic primer
agccacaccaccaccagaatactttttcaaggagtagatg

SEQ ID NO: 13628 - DNA, 40 bp, Artificial Sequence
  Description of Artificial Sequence: Synthetic primer
actgttcacttctcagtggaactggtcccttgtggctagg

SEQ ID NO: 13629 - DNA, 40 bp, Artificial Sequence
  Description of Artificial Sequence: Synthetic primer
gtggcctgaggcccagagggtctggtctggtgagctcctg

SEQ ID NO: 13630 - DNA, 40 bp, Artificial Sequence
  Description of Artificial Sequence: Synthetic primer
ggagattgttttgggctattacatgttggatatttctttc

SEQ ID NO: 13631 - DNA, 40 bp, Artificial Sequence
  Description of Artificial Sequence: Synthetic primer
caccggccagggccaggtctgggtgaagcaagtcatgcag

SEQ ID NO: 13632 - DNA, 40 bp, Artificial Sequence
  Description of Artificial Sequence: Synthetic primer
tctcttttttgagcttccaactcggaatatccccactgtc

SEQ ID NO: 13633 - DNA, 40 bp, Artificial Sequence
  Description of Artificial Sequence: Synthetic primer
ggtttggtgctcctcctaactgtgcagaagccaaatcacc

SEQ ID NO: 13634 - DNA, 40 bp, Artificial Sequence
  Description of Artificial Sequence: Synthetic primer
aggtaaacaggagcacgaggatgccaggtgcaagcacagc

SEQ ID NO: 13635 - DNA, 40 bp, Artificial Sequence
  Description of Artificial Sequence: Synthetic primer
gtcactgcataacgacatttcagcaatgcaacagcagctc

SEQ ID NO: 13636 - DNA, 40 bp, Artificial Sequence
  Description of Artificial Sequence: Synthetic primer
ggcggtcaccagtggcctgccgggggacacagctctcctg

SEQ ID NO: 13637 - DNA, 40 bp, Artificial Sequence
  Description of Artificial Sequence: Synthetic primer
tgatgcctttgggtcctgttgttccatttagcccaggttc

SEQ ID NO: 13638 - DNA, 40 bp, Artificial Sequence
  Description of Artificial Sequence: Synthetic primer
cctgggaccaaactaccccaccaaacccacaaagaagaag

SEQ ID NO: 13639 - DNA, 40 bp, Artificial Sequence
  Description of Artificial Sequence: Synthetic primer
attctggtctctagaaccatcaaaccccagaatcacatcc

SEQ ID NO: 13640 - DNA, 40 bp, Artificial Sequence
  Description of Artificial Sequence: Synthetic primer
ggagtgggagcacaccagcaactttgaccggatgatcttt

SEQ ID NO: 13641 - DNA, 40 bp, Artificial Sequence
  Description of Artificial Sequence: Synthetic primer
tattcatcattccttagaatttgggtctctttcatcttcg

SEQ ID NO: 13642 - DNA, 40 bp, Artificial Sequence
  Description of Artificial Sequence: Synthetic primer
ggccacggctatgtacctgcagatggagcatgttgtggac

SEQ ID NO: 13643 - DNA, 40 bp, Artificial Sequence
  Description of Artificial Sequence: Synthetic primer
ccgccgaggagtcacccttgaggaactgatggtgatattc

SEQ ID NO: 13644 - DNA, 40 bp, Artificial Sequence
  Description of Artificial Sequence: Synthetic primer
ggcccgcacgctcagcgagtccatgccacagccctggaag

SEQ ID NO: 13645 - DNA, 40 bp, Artificial Sequence
  Description of Artificial Sequence: Synthetic primer
aaggggagagattaaaagaagctaccaagatcaacctctc

SEQ ID NO: 13646 - DNA, 40 bp, Artificial Sequence
  Description of Artificial Sequence: Synthetic primer
ccccccaatatctatagaacaggattcagagcagtatttg

SEQ ID NO: 13647 - DNA, 40 bp, Artificial Sequence
  Description of Artificial Sequence: Synthetic primer
cagcaaagagccgctcccgggctgggaagaccgacaccag

SEQ ID NO: 13648 - DNA, 40 bp, Artificial Sequence
  Description of Artificial Sequence: Synthetic primer
ggtgagcgcactctccatggtcacccgaaccccgtcactg

SEQ ID NO: 13649 - DNA, 40 bp, Artificial Sequence
  Description of Artificial Sequence: Synthetic primer
atttctaccctcatctggaggaacatttaatatctctgtc

SEQ ID NO: 13650 - DNA, 40 bp, Artificial Sequence
  Description of Artificial Sequence: Synthetic primer
cccgccctgccgcctgcgagaagctgccgccctcctgctg

SEQ ID NO: 13651 - DNA, 40 bp, Artificial Sequence
  Description of Artificial Sequence: Synthetic primer
ctgtcgatgttccggtctcctacccctaaactcacaatgc

SEQ ID NO: 13652 - DNA, 40 bp, Artificial Sequence
  Description of Artificial Sequence: Synthetic primer
caactgaaggccacgtcctacagactgccttcgggtcatc

SEQ ID NO: 13653 - DNA, 40 bp, Artificial Sequence
  Description of Artificial Sequence: Synthetic primer
acaacatcttctgctccaaccccaaccaccgcacccctac

SEQ ID NO: 13654 - DNA, 40 bp, Artificial Sequence
  Description of Artificial Sequence: Synthetic primer
tggggaagcagccctggtagccgtcctccacggcgcacac

SEQ ID NO: 13655 - DNA, 40 bp, Artificial Sequence
  Description of Artificial Sequence: Synthetic primer
tccaccaggtcccccagctcctcctgcttgatgtccagtc

SEQ ID NO: 13656 - DNA, 40 bp, Artificial Sequence
  Description of Artificial Sequence: Synthetic primer
tttcggtgggagggctgaaggaaacgttcacattttagag

SEQ ID NO: 13657 - DNA, 40 bp, Artificial Sequence
  Description of Artificial Sequence: Synthetic primer
atgctgcctggcttgctggcacctctcaggaccctctctg

SEQ ID NO: 13658 - DNA, 40 bp, Artificial Sequence
  Description of Artificial Sequence: Synthetic primer
gtctggaagatccccagacacatgctaacaggatctacag

SEQ ID NO: 13659 - DNA, 40 bp, Artificial Sequence
  Description of Artificial Sequence: Synthetic primer
agcctgggcagtctccccaaggcatgcggcccatgagcaa

SEQ ID NO: 13660 - DNA, 40 bp, Artificial Sequence
  Description of Artificial Sequence: Synthetic primer
ggcgacagcgcgcggcaggcggcgagctcgggggccgcag

SEQ ID NO: 13661 - DNA, 40 bp, Artificial Sequence
  Description of Artificial Sequence: Synthetic primer
ggggaatttaagatgccaaagcagctcattcacatacagc

SEQ ID NO: 13662 - DNA, 40 bp, Artificial Sequence
  Description of Artificial Sequence: Synthetic primer
aaaataatttgatacaatgatttggtcttgctggaatcag

SEQ ID NO: 13663 - DNA, 40 bp, Artificial Sequence
  Description of Artificial Sequence: Synthetic primer
cagcccgagtgcctgtccccgcgctgcaccggccgctttc

SEQ ID NO: 13664 - DNA, 40 bp, Artificial Sequence
  Description of Artificial Sequence: Synthetic primer
gagcagcatattgtatgggacgtatgaattctgactgttg

SEQ ID NO: 13665 - DNA, 40 bp, Artificial Sequence
  Description of Artificial Sequence: Synthetic primer
ttccccaaaatatggcatctgcttgaaagggttgactgag

SEQ ID NO: 13666 - DNA, 40 bp, Artificial Sequence
  Description of Artificial Sequence: Synthetic primer
ggcctcactgccattccccaggcgctggcctatgctgaag

SEQ ID NO: 13667 - DNA, 40 bp, Artificial Sequence
  Description of Artificial Sequence: Synthetic primer
ccagtgaagcaatgcggtctgtcacctccatgctacttgc

SEQ ID NO: 13668 - DNA, 40 bp, Artificial Sequence
  Description of Artificial Sequence: Synthetic primer
gaggccttgctgcaggcctcccgggaccagaaaaagactc

SEQ ID NO: 13669 - DNA, 40 bp, Artificial Sequence
  Description of Artificial Sequence: Synthetic primer
gcggcacggagccgggcagctcgaaggcgctcttgctgtt

SEQ ID NO: 13670 - DNA, 40 bp, Artificial Sequence
  Description of Artificial Sequence: Synthetic primer
aaacgaaatcgtgaggatggggaaaagacatttgttgcac

SEQ ID NO: 13671 - DNA, 40 bp, Artificial Sequence
  Description of Artificial Sequence: Synthetic primer
ataagagatggaggtggagcgcctggtggaggaggaaaac

SEQ ID NO: 13672 - DNA, 40 bp, Artificial Sequence
  Description of Artificial Sequence: Synthetic primer
agctgtcggacaaatcccccaccccctcggctggctcgtc

SEQ ID NO: 13673 - DNA, 40 bp, Artificial Sequence
  Description of Artificial Sequence: Synthetic primer
tttccaatggggtctatataaacagttttctttcattgtg

SEQ ID NO: 13674 - DNA, 40 bp, Artificial Sequence
  Description of Artificial Sequence: Synthetic primer
aggggtgatggccggctggttgtgggcactggcggtcaag

SEQ ID NO: 13675 - DNA, 40 bp, Artificial Sequence
  Description of Artificial Sequence: Synthetic primer
ggaagatccactctgtgaagcattcaagtcatctgggttc

SEQ ID NO: 13676 - DNA, 40 bp, Artificial Sequence
  Description of Artificial Sequence: Synthetic primer
ccttcagctgcatgtgattttgtgataaagttcaggtaac

SEQ ID NO: 13677 - DNA, 40 bp, Artificial Sequence
  Description of Artificial Sequence: Synthetic primer
aaattttctctaaagcttgggccattagcactatgtcatc

SEQ ID NO: 13678 - DNA, 40 bp, Artificial Sequence
  Description of Artificial Sequence: Synthetic primer
tgatcgagtgttgaataatgatataaaaactgaatagagg

SEQ ID NO: 13679 - DNA, 40 bp, Artificial Sequence
  Description of Artificial Sequence: Synthetic primer
tgggccaacaatgaaaataaattgctggctgcacttgacc

SEQ ID NO: 13680 - DNA, 40 bp, Artificial Sequence
  Description of Artificial Sequence: Synthetic primer
gagacctggttccttgacttcaaagtcctaccccaggaag

SEQ ID NO: 13681 - DNA, 40 bp, Artificial Sequence
  Description of Artificial Sequence: Synthetic primer
gtcagcatagtccaggcaggacagcatctttaaatcagag

SEQ ID NO: 13682 - DNA, 40 bp, Artificial Sequence
  Description of Artificial Sequence: Synthetic primer
gctgcctgacccccataggaggaaagggccgaggctgagg

SEQ ID NO: 13683 - DNA, 40 bp, Artificial Sequence
  Description of Artificial Sequence: Synthetic primer
tgagtccctaagctctcagggctaccactatacttgattc

SEQ ID NO: 13684 - DNA, 40 bp, Artificial Sequence
  Description of Artificial Sequence: Synthetic primer
agtcctggagtcaacggtgctcctggtgaagctggtcgtg

SEQ ID NO: 13685 - DNA, 40 bp, Artificial Sequence
  Description of Artificial Sequence: Synthetic primer
tctctcctcttcgtccaaaaggggcgcttaagagatgctg

SEQ ID NO: 13686 - DNA, 40 bp, Artificial Sequence
  Description of Artificial Sequence: Synthetic primer
tcacgaaatgaggtagctattttcctgtgttttgctgaag

SEQ ID NO: 13687 - DNA, 40 bp, Artificial Sequence
  Description of Artificial Sequence: Synthetic primer
tgtttaatatattcacatataaaatatctgatgttgatac

SEQ ID NO: 13688 - DNA, 40 bp, Artificial Sequence
  Description of Artificial Sequence: Synthetic primer
aactctaaatctaaatgtttctacatatgtatgagtgcac

SEQ ID NO: 13689 - DNA, 40 bp, Artificial Sequence
  Description of Artificial Sequence: Synthetic primer
tgaacttgtcccagaggtcaatgtccagagagacacgttg

SEQ ID NO: 13690 - DNA, 40 bp, Artificial Sequence
  Description of Artificial Sequence: Synthetic primer
aaatatatcaagtttgtgaaagaaaggacagagattgaac

SEQ ID NO: 13691 - DNA, 40 bp, Artificial Sequence
  Description of Artificial Sequence: Synthetic primer
caccgcggtcagtgcggggcaagccccagacccggccggc

SEQ ID NO: 13692 - DNA, 40 bp, Artificial Sequence
  Description of Artificial Sequence: Synthetic primer
gccggcgcgcactcacacacacgcgcgctcgcccccgaag

SEQ ID NO: 13693 - DNA, 40 bp, Artificial Sequence
  Description of Artificial Sequence: Synthetic primer
agataagctggcatggcagtgagaagcatcttttgctgag

SEQ ID NO: 13694 - DNA, 40 bp, Artificial Sequence
  Description of Artificial Sequence: Synthetic primer
ccagtcatcaggaagacacttacggagccctagactttac

SEQ ID NO: 13695 - DNA, 40 bp, Artificial Sequence
  Description of Artificial Sequence: Synthetic primer
gcttagtttgctctctctgaaatacctctagctgctccac

SEQ ID NO: 13696 - DNA, 40 bp, Artificial Sequence
  Description of Artificial Sequence: Synthetic primer
aaaaaggctcagccacatgttggtttaaattcccatatgc

SEQ ID NO: 13697 - DNA, 40 bp, Artificial Sequence
  Description of Artificial Sequence: Synthetic primer
ggtgccctgggcccggtgtctctcctccttctgaagtttg

SEQ ID NO: 13698 - DNA, 40 bp, Artificial Sequence
  Description of Artificial Sequence: Synthetic primer
tggctgcatttctgacaaacatttacaacacaatggatag

SEQ ID NO: 13699 - DNA, 40 bp, Artificial Sequence
  Description of Artificial Sequence: Synthetic primer
gaagccccatttgacaggtgggccagcagtgttttatcag

SEQ ID NO: 13700 - DNA, 40 bp, Artificial Sequence
  Description of Artificial Sequence: Synthetic primer
agaatgacgccccactttggggactaaaattgtgctattg

SEQ ID NO: 13701 - DNA, 40 bp, Artificial Sequence
  Description of Artificial Sequence: Synthetic primer
gattcaagaagtttcttagttggttttctttgacgtttac

SEQ ID NO: 13702 - DNA, 40 bp, Artificial Sequence
  Description of Artificial Sequence: Synthetic primer
tcaggtacctgacaatgatgagcagtttgtaccagactat

SEQ ID NO: 13703 - DNA, 40 bp, Artificial Sequence
  Description of Artificial Sequence: Synthetic primer
ttcccattgttctatcatctctaggaccggaactaccttc

SEQ ID NO: 13704 - DNA, 40 bp, Artificial Sequence
  Description of Artificial Sequence: Synthetic primer
cgcgcaggccttcatcgacgcctgctccatctctgacctg

SEQ ID NO: 13705 - DNA, 40 bp, Artificial Sequence
  Description of Artificial Sequence: Synthetic primer
atcattgccgtagctactacaaacaatctgtatatatttc

SEQ ID NO: 13706 - DNA, 40 bp, Artificial Sequence
  Description of Artificial Sequence: Synthetic primer
acgctgtctggagtgttggaggaaataaactctgctagtc

SEQ ID NO: 13707 - DNA, 40 bp, Artificial Sequence
  Description of Artificial Sequence: Synthetic primer
aaactttgtgctgtttggttcattgtatgcattgatggag

SEQ ID NO: 13708 - DNA, 40 bp, Artificial Sequence
  Description of Artificial Sequence: Synthetic primer
ccgggcagtcctccatgggaggggccttcacagccatatc

SEQ ID NO: 13709 - DNA, 40 bp, Artificial Sequence
  Description of Artificial Sequence: Synthetic primer
gctgtgcaggtactcgcagcggtgcttctcctggctgtag

SEQ ID NO: 13710 - DNA, 40 bp, Artificial Sequence
  Description of Artificial Sequence: Synthetic primer
atccagctgtgcactcagtttggccataaccttcataaac

SEQ ID NO: 13711 - DNA, 40 bp, Artificial Sequence
  Description of Artificial Sequence: Synthetic primer
ttccatattttcatctatggatatagttttgggtcttttg

SEQ ID NO: 13712 - DNA, 40 bp, Artificial Sequence
  Description of Artificial Sequence: Synthetic primer
ccactttttctttaagatctaaattaggcatctgcacacc

SEQ ID NO: 13713 - DNA, 40 bp, Artificial Sequence
  Description of Artificial Sequence: Synthetic primer
cttgggcaattcctcaggggagtcaaagattctcaccttc

SEQ ID NO: 13714 - DNA, 40 bp, Artificial Sequence
  Description of Artificial Sequence: Synthetic primer
agatgggccccagctaggtggctgagggggccatgtcctg

SEQ ID NO: 13715 - DNA, 40 bp, Artificial Sequence
  Description of Artificial Sequence: Synthetic primer
tttaagttcactttttttgttctaggggaaatgaatgtgc

SEQ ID NO: 13716 - DNA, 40 bp, Artificial Sequence
  Description of Artificial Sequence: Synthetic primer
ttggccagaatcaaagttacttaggggctgattctctaac

SEQ ID NO: 13717 - DNA, 40 bp, Artificial Sequence
  Description of Artificial Sequence: Synthetic primer
gggaccgcctcggaggcagaagagccgcgaggagccagcg

SEQ ID NO: 13718 - DNA, 40 bp, Artificial Sequence
  Description of Artificial Sequence: Synthetic primer
gtattcatcatgattgcatcttctgaatggtcttctccag

SEQ ID NO: 13719 - DNA, 40 bp, Artificial Sequence
  Description of Artificial Sequence: Synthetic primer
cgagggcaccacgctttccatgaccaggctccactgctga

SEQ ID NO: 13720 - DNA, 40 bp, Artificial Sequence
  Description of Artificial Sequence: Synthetic primer
gaggagtacagggaaaagatatatttgactctaaagatgc

SEQ ID NO: 13721 - DNA, 40 bp, Artificial Sequence
  Description of Artificial Sequence: Synthetic primer
ttatattctagaatgttaactgtggtatttcagaagacag

SEQ ID NO: 13722 - DNA, 40 bp, Artificial Sequence
  Description of Artificial Sequence: Synthetic primer
gatgaactccctgggtgttaaccctcgagtcaatcatttg

SEQ ID NO: 13723 - DNA, 40 bp, Artificial Sequence
  Description of Artificial Sequence: Synthetic primer
tggcggcctcaactgcaggaaggtcaaacccaaagttgtc

SEQ ID NO: 13724 - DNA, 40 bp, Artificial Sequence
  Description of Artificial Sequence: Synthetic primer
agcggtgaagaagaatactcttgatgtccgagcatgtgtg

SEQ ID NO: 13725 - DNA, 40 bp, Artificial Sequence
  Description of Artificial Sequence: Synthetic primer
ctgtcagaaagcaactgatagacgtaatcccaaagcagtc

SEQ ID NO: 13726 - DNA, 40 bp, Artificial Sequence
  Description of Artificial Sequence: Synthetic primer
gtgatgatgacatcagcacgactgataccctcattcaagg

SEQ ID NO: 13727 - DNA, 40 bp, Artificial Sequence
  Description of Artificial Sequence: Synthetic primer
ctaaatatatccgtaggaatggagagggaccggatctcag

SEQ ID NO: 13728 - DNA, 40 bp, Artificial Sequence
  Description of Artificial Sequence: Synthetic primer
gctgcagcaaagaccattttgatgaggctgtagtagtcac

SEQ ID NO: 13729 - DNA, 40 bp, Artificial Sequence
  Description of Artificial Sequence: Synthetic primer
gcaggggcctcctccgcttccggcccgcgtacgtgcactc

SEQ ID NO: 13730 - DNA, 40 bp, Artificial Sequence
  Description of Artificial Sequence: Synthetic primer
ggcagcatacttaaatttttattttgaaaagtctaaaagg

SEQ ID NO: 13731 - DNA, 40 bp, Artificial Sequence
  Description of Artificial Sequence: Synthetic primer
atctgggttatactttgcagcaattaggcaattcatttgg

SEQ ID NO: 13732 - DNA, 40 bp, Artificial Sequence
  Description of Artificial Sequence: Synthetic primer
gtcctggaattgcgggctgctctgagcctcacttcctgtg

SEQ ID NO: 13733 - DNA, 40 bp, Artificial Sequence
  Description of Artificial Sequence: Synthetic primer
ctttctagagcagtaaatctcataaattcacttaccaagc

SEQ ID NO: 13734 - DNA, 40 bp, Artificial Sequence
  Description of Artificial Sequence: Synthetic primer
cggacgctgagtgcagggcggagctgccggagtacatttg

SEQ ID NO: 13735 - DNA, 40 bp, Artificial Sequence
  Description of Artificial Sequence: Synthetic primer
ttggtccagggccaagtccaactccttttccatcatactg

SEQ ID NO: 13736 - DNA, 40 bp, Artificial Sequence
  Description of Artificial Sequence: Synthetic primer
ccaggcggaggaggagacgcggagccgaagtgccattgtc

SEQ ID NO: 13737 - DNA, 40 bp, Artificial Sequence
  Description of Artificial Sequence: Synthetic primer
taacacatcacaggtcaagttgaagtcattctctgtttag

SEQ ID NO: 13738 - DNA, 40 bp, Artificial Sequence
  Description of Artificial Sequence: Synthetic primer
atggagcataccaacagcaacgagagtgacagcagtccag

SEQ ID NO: 13739 - DNA, 40 bp, Artificial Sequence
  Description of Artificial Sequence: Synthetic primer
ggcctgattcaggtggccagcagggagcagctcttgtacc

SEQ ID NO: 13740 - DNA, 40 bp, Artificial Sequence
  Description of Artificial Sequence: Synthetic primer
gttacgtagagcaacttctagagcatacatggagactttc

SEQ ID NO: 13741 - DNA, 40 bp, Artificial Sequence
  Description of Artificial Sequence: Synthetic primer
ggaggaacggatcacaggtgaaaacaccttccgaccaaag

SEQ ID NO: 13742 - DNA, 40 bp, Artificial Sequence
  Description of Artificial Sequence: Synthetic primer
gctctcagtaaataaacaggctgtctgaaaagtgtctttc

SEQ ID NO: 13743 - DNA, 40 bp, Artificial Sequence
  Description of Artificial Sequence: Synthetic primer
aaccctgggaacgatggtcccccaggtcgcgatggtcaac

SEQ ID NO: 13744 - DNA, 40 bp, Artificial Sequence
  Description of Artificial Sequence: Synthetic primer
ataccttggctgtcaagccctccatgagatcctgaagatg

SEQ ID NO: 13745 - DNA, 40 bp, Artificial Sequence
  Description of Artificial Sequence: Synthetic primer
gtagatctcaaattatattttactttaaataccaaaggtc

SEQ ID NO: 13746 - DNA, 40 bp, Artificial Sequence
  Description of Artificial Sequence: Synthetic primer
tgtcattagtgacaaagatttgcaacattagagaaaagag

SEQ ID NO: 13747 - DNA, 40 bp, Artificial Sequence
  Description of Artificial Sequence: Synthetic primer
ccagctgtgggtggtcccccttatctttctaagcatttcc

SEQ ID NO: 13748 - DNA, 40 bp, Artificial Sequence
  Description of Artificial Sequence: Synthetic primer
actctatttttaggaccgtcgaataaagtgccaagtgctg

SEQ ID NO: 13749 - DNA, 40 bp, Artificial Sequence
  Description of Artificial Sequence: Synthetic primer
agagaagactggcacaattccaactagagtcaacccatgc

SEQ ID NO: 13750 - DNA, 40 bp, Artificial Sequence
  Description of Artificial Sequence: Synthetic primer
ttggtggagctgctgaaaaatttaaccaagtaccctactg

SEQ ID NO: 13751 - DNA, 40 bp, Artificial Sequence
  Description of Artificial Sequence: Synthetic primer
tctccaagaggagcacactttggggagatgtcctggtttc

SEQ ID NO: 13752 - DNA, 40 bp, Artificial Sequence
  Description of Artificial Sequence: Synthetic primer
aaatataaatttttgtgagatttcaaagattaagattatt

SEQ ID NO: 13753 - DNA, 40 bp, Artificial Sequence
  Description of Artificial Sequence: Synthetic primer
cgtgatgatgaatcacgtctacaaggagaggttcccgaag

SEQ ID NO: 13754 - DNA, 40 bp, Artificial Sequence
  Description of Artificial Sequence: Synthetic primer
tatatccaaagacgtggttgatgaaaacaacatgaataag

SEQ ID NO: 13755 - DNA, 40 bp, Artificial Sequence
  Description of Artificial Sequence: Synthetic primer
ggacctgcagggccgggacgagcagagcgaggagaagaag

SEQ ID NO: 13756 - DNA, 40 bp, Artificial Sequence
  Description of Artificial Sequence: Synthetic primer
gtagcgttttgccctgcattcacctctacatcccctagac

SEQ ID NO: 13757 - DNA, 40 bp, Artificial Sequence
  Description of Artificial Sequence: Synthetic primer
aaaatacttagactagatgctgatccataaacattcactg

SEQ ID NO: 13758 - DNA, 40 bp, Artificial Sequence
  Description of Artificial Sequence: Synthetic primer
cgtggaaggctcgacgctgcgagaagccctgacacacagg

SEQ ID NO: 13759 - DNA, 40 bp, Artificial Sequence
  Description of Artificial Sequence: Synthetic primer
tttttttctcctttggaggaagggaatgaaacatttatgg

SEQ ID NO: 13760 - DNA, 40 bp, Artificial Sequence
  Description of Artificial Sequence: Synthetic primer
gagaaaaaaataggttagtatgcagaatgtgattttgtcc

SEQ ID NO: 13761 - DNA, 40 bp, Artificial Sequence
  Description of Artificial Sequence: Synthetic primer
acaaagagatctttctgagagagctcatttcaaattcatc

SEQ ID NO: 13762 - DNA, 40 bp, Artificial Sequence
  Description of Artificial Sequence: Synthetic primer
gaagaagtgaattctcatgttactataggatttagagttg

SEQ ID NO: 13763 - DNA, 40 bp, Artificial Sequence
  Description of Artificial Sequence: Synthetic primer
cagtggagacactggcattggaacttcctgttctgatagc

SEQ ID NO: 13764 - DNA, 40 bp, Artificial Sequence
  Description of Artificial Sequence: Synthetic primer
tttatgactacactgtcaagcttctcttcaaactccactc

SEQ ID NO: 13765 - DNA, 40 bp, Artificial Sequence
  Description of Artificial Sequence: Synthetic primer
tctacagtgcactgtggcgatgggctgaccctgcctgcac

SEQ ID NO: 13766 - DNA, 40 bp, Artificial Sequence
  Description of Artificial Sequence: Synthetic primer
ttttgatatctgaaatatttttaaataagttgtccatagg

SEQ ID NO: 13767 - DNA, 40 bp, Artificial Sequence
  Description of Artificial Sequence: Synthetic primer
tctctacaaccaggcccagtccaaatggtttgaagagatg

SEQ ID NO: 13768 - DNA, 40 bp, Artificial Sequence
  Description of Artificial Sequence: Synthetic primer
accacagccagcaggtgaatcccggggacagccctatgtc

SEQ ID NO: 13769 - DNA, 40 bp, Artificial Sequence
  Description of Artificial Sequence: Synthetic primer
gaaacagtatcttttcatgctaccgacctccaaatgttag

SEQ ID NO: 13770 - DNA, 40 bp, Artificial Sequence
  Description of Artificial Sequence: Synthetic primer
cagtcctcttctaagaggaagtctaaagatgaagaagaag

SEQ ID NO: 13771 - DNA, 40 bp, Artificial Sequence
  Description of Artificial Sequence: Synthetic primer
cctggttccgggccgtggagcggctcagcgagactgagag

SEQ ID NO: 13772 - DNA, 40 bp, Artificial Sequence
  Description of Artificial Sequence: Synthetic primer
gtcggatagagcagattcagtgttacagtgctaaagatcg

SEQ ID NO: 13773 - DNA, 40 bp, Artificial Sequence
  Description of Artificial Sequence: Synthetic primer
gcgtctcatgtctggatcacccttttaaacataggataac

SEQ ID NO: 13774 - DNA, 40 bp, Artificial Sequence
  Description of Artificial Sequence: Synthetic primer
gacattgtggctttgccagtggtactggtagacacctttg

SEQ ID NO: 13775 - DNA, 40 bp, Artificial Sequence
  Description of Artificial Sequence: Synthetic primer
aacttaaaatgcgtatcgaagttttagaaaaagagaagtc

SEQ ID NO: 13776 - DNA, 40 bp, Artificial Sequence
  Description of Artificial Sequence: Synthetic primer
gcaagatgccttgttgcttggcgtgtcgccagctccgttg

SEQ ID NO: 13777 - DNA, 40 bp, Artificial Sequence
  Description of Artificial Sequence: Synthetic primer
ctgccaccagactttctggcaaggtgagcgcaaggaggag

SEQ ID NO: 13778 - DNA, 40 bp, Artificial Sequence
  Description of Artificial Sequence: Synthetic primer
cgcgcacccgctgttgctgccccagaacggccacgggaac

SEQ ID NO: 13779 - DNA, 40 bp, Artificial Sequence
  Description of Artificial Sequence: Synthetic primer
ttatagagctcaaagccttcactctttggtcggggtttac

SEQ ID NO: 13780 - DNA, 40 bp, Artificial Sequence
  Description of Artificial Sequence: Synthetic primer
tgggaaataaacgcatgcccagaggagccactcctattcc

SEQ ID NO: 13781 - DNA, 40 bp, Artificial Sequence
  Description of Artificial Sequence: Synthetic primer
gcctctgtaatatatctaactcctgcatgtgaatcagctc

SEQ ID NO: 13782 - DNA, 40 bp, Artificial Sequence
  Description of Artificial Sequence: Synthetic primer
ttaaaggctttcacttatattaatctggataaagcggttc

SEQ ID NO: 13783 - DNA, 40 bp, Artificial Sequence
  Description of Artificial Sequence: Synthetic primer
ccagaaatttaccacaaaagcaaaatttttaaaactgcat

SEQ ID NO: 13784 - DNA, 40 bp, Artificial Sequence
  Description of Artificial Sequence: Synthetic primer
cctccgacccctcactttgtgcctttagtaaacactgtgc

SEQ ID NO: 13785 - DNA, 40 bp, Artificial Sequence
  Description of Artificial Sequence: Synthetic primer
cgcagggtattggagcacctgttgtaacccgcatgacttg

SEQ ID NO: 13786 - DNA, 40 bp, Artificial Sequence
  Description of Artificial Sequence: Synthetic primer
cctctccccaggaaaataagttgagataaaggagaactgg

SEQ ID NO: 13787 - DNA, 40 bp, Artificial Sequence
  Description of Artificial Sequence: Synthetic primer
ctgggtccggaagggccaactgcctcgggctcttgatgtg

SEQ ID NO: 13788 - DNA, 40 bp, Artificial Sequence
  Description of Artificial Sequence: Synthetic primer
ggtttttaatgaccacaacaagcaagcatgcagcttactg

SEQ ID NO: 13789 - DNA, 40 bp, Artificial Sequence
  Description of Artificial Sequence: Synthetic primer
ggtcaaataccaaccagtcaattacatcaatttttaaacg

SEQ ID NO: 13790 - DNA, 40 bp, Artificial Sequence
  Description of Artificial Sequence: Synthetic primer
ttaagttgtgattgtctttcttctgccgctccttggccag

SEQ ID NO: 13791 - DNA, 40 bp, Artificial Sequence
  Description of Artificial Sequence: Synthetic primer
atcacagtcgtagttgacataaatatccacaacacactgg

SEQ ID NO: 13792 - DNA, 40 bp, Artificial Sequence
  Description of Artificial Sequence: Synthetic primer
cccgactactcagccgccaaccccattaaagtgacacatc

SEQ ID NO: 13793 - DNA, 40 bp, Artificial Sequence
  Description of Artificial Sequence: Synthetic primer
aaacctcctccccgacccgccggggccctgctaccgcttc

SEQ ID NO: 13794 - DNA, 40 bp, Artificial Sequence
  Description of Artificial Sequence: Synthetic primer
ctgaaaatggtgtctggagtgaagtgttctcatattgtgg

SEQ ID NO: 13795 - DNA, 40 bp, Artificial Sequence
  Description of Artificial Sequence: Synthetic primer
ggcctccagacagtggggatattccgagttggaagctcaa

SEQ ID NO: 13796 - DNA, 40 bp, Artificial Sequence
  Description of Artificial Sequence: Synthetic primer
gcaggcaggttgttgggtttcgaggccaacggggccaacg

SEQ ID NO: 13797 - DNA, 40 bp, Artificial Sequence
  Description of Artificial Sequence: Synthetic primer
aaaaaagtgcagaatatcactcacctttcccctacttttg

SEQ ID NO: 13798 - DNA, 40 bp, Artificial Sequence
  Description of Artificial Sequence: Synthetic primer
ctgccgcttgcgcagaggacccggggaggggtcccgagag

SEQ ID NO: 13799 - DNA, 40 bp, Artificial Sequence
  Description of Artificial Sequence: Synthetic primer
gcttgtgggaagcgaggtgctggcagagttcaaggctctc

SEQ ID NO: 13800 - DNA, 40 bp, Artificial Sequence
  Description of Artificial Sequence: Synthetic primer
cttcagaatctcttcaacacaatggacttcattggagtag

SEQ ID NO: 13801 - DNA, 40 bp, Artificial Sequence
  Description of Artificial Sequence: Synthetic primer
aatactgcacatcaatactgcagggctggcgaggccacct

SEQ ID NO: 13802 - DNA, 40 bp, Artificial Sequence
  Description of Artificial Sequence: Synthetic primer
accgatcctgatgtcgtggactatttactcagaagaaagg

SEQ ID NO: 13803 - DNA, 40 bp, Artificial Sequence
  Description of Artificial Sequence: Synthetic primer
gatttcctctccctttctttataagtattttggttttgac

SEQ ID NO: 13804 - DNA, 40 bp, Artificial Sequence
  Description of Artificial Sequence: Synthetic primer
ctgtagcagtctcttctttttaaatgcatgatctatttgc

SEQ ID NO: 13805 - DNA, 40 bp, Artificial Sequence
  Description of Artificial Sequence: Synthetic primer
tttcactttttttcttctaggtctccaggtcccggagggg

SEQ ID NO: 13806 - DNA, 40 bp, Artificial Sequence
  Description of Artificial Sequence: Synthetic primer
caggattctgcttaggcatttgtggctggctctctttatc

SEQ ID NO: 13807 - DNA, 40 bp, Artificial Sequence
  Description of Artificial Sequence: Synthetic primer
tattcatatttaaatgtcaacaaaacacatctagacttta

SEQ ID NO: 13808 - DNA, 40 bp, Artificial Sequence
  Description of Artificial Sequence: Synthetic primer
cctgctgtaactggggctttctgcctcccaaaacaaactg

SEQ ID NO: 13809 - DNA, 40 bp, Artificial Sequence
  Description of Artificial Sequence: Synthetic primer
ttcttcaagttctacttctttgttatttgtaagcttagtc

SEQ ID NO: 13810 - DNA, 40 bp, Artificial Sequence
  Description of Artificial Sequence: Synthetic primer
tgtttagaacgctaataaaatttatgcagttataaaaatg

SEQ ID NO: 13811 - DNA, 40 bp, Artificial Sequence
  Description of Artificial Sequence: Synthetic primer
cgattgcggctttggcatctgcttccttctccatgtgaac

SEQ ID NO: 13812 - DNA, 40 bp, Artificial Sequence
  Description of Artificial Sequence: Synthetic primer
ctggtgcccttgccccggcgaagacttccttgcctccatc

SEQ ID NO: 13813 - DNA, 40 bp, Artificial Sequence
  Description of Artificial Sequence: Synthetic primer
aggtgctgtaaacattatattctcctctgctatgagactg

SEQ ID NO: 13814 - DNA, 40 bp, Artificial Sequence
  Description of Artificial Sequence: Synthetic primer
ctcccgagccgagcacgaaggtttcagaggaagccgagtc

SEQ ID NO: 13815 - DNA, 40 bp, Artificial Sequence
  Description of Artificial Sequence: Synthetic primer
gccggcctgtgaaacctccaaagaaggacgtgcccgactc

SEQ ID NO: 13816 - DNA, 40 bp, Artificial Sequence
  Description of Artificial Sequence: Synthetic primer
ctggcagcaatgattcatgaaccgagcatagtttcctttg

SEQ ID NO: 13817 - DNA, 40 bp, Artificial Sequence
  Description of Artificial Sequence: Synthetic primer
aggaaagaggtggtatcagaaacttcctgttgatttgcag

SEQ ID NO: 13818 - DNA, 40 bp, Artificial Sequence
  Description of Artificial Sequence: Synthetic primer
gttcctggagaccttggcgcccctggcccctctggagcaa

SEQ ID NO: 13819 - DNA, 40 bp, Artificial Sequence
  Description of Artificial Sequence: Synthetic primer
gatccacggagctgatcccaaagttggtgggccagaatgg

SEQ ID NO: 13820 - DNA, 40 bp, Artificial Sequence
  Description of Artificial Sequence: Synthetic primer
atgtagaaaatagagctggattcttctttactaaattctg

SEQ ID NO: 13821 - DNA, 40 bp, Artificial Sequence
  Description of Artificial Sequence: Synthetic primer
gatcattcagagtaatttgtcttaggattcctttgtcatc

SEQ ID NO: 13822 - DNA, 40 bp, Artificial Sequence
  Description of Artificial Sequence: Synthetic primer
cgcctccctgcggaaactcgcggcttcccgggagccggag

SEQ ID NO: 13823 - DNA, 40 bp, Artificial Sequence
  Description of Artificial Sequence: Synthetic primer
tttaaatttcagtgcataggagatgcagaaacagatgatg

SEQ ID NO: 13824 - DNA, 40 bp, Artificial Sequence
  Description of Artificial Sequence: Synthetic primer
tggaagatgtcatctgctcctccatctttccacaggatgc

SEQ ID NO: 13825 - DNA, 40 bp, Artificial Sequence
  Description of Artificial Sequence: Synthetic primer
tgaaaacagccaccttttttcaggggaagcattcagcaac

SEQ ID NO: 13826 - DNA, 40 bp, Artificial Sequence
  Description of Artificial Sequence: Synthetic primer
attatgctaaatctctctggtaattaactaaataaaaatg

SEQ ID NO: 13827 - DNA, 40 bp, Artificial Sequence
  Description of Artificial Sequence: Synthetic primer
gatcggcctcgcctcgcagatttgccaagtatccgcttcc

SEQ ID NO: 13828 - DNA, 40 bp, Artificial Sequence
  Description of Artificial Sequence: Synthetic primer
cacgtaggatcgtccaacctgggccttcttctgatttcac

SEQ ID NO: 13829 - DNA, 40 bp, Artificial Sequence
  Description of Artificial Sequence: Synthetic primer
tgggggttctgccataactggattttctttgtgtttgcac

SEQ ID NO: 13830 - DNA, 40 bp, Artificial Sequence
  Description of Artificial Sequence: Synthetic primer
acaattatttgggacgcacatactggtgaagccaagcaac

SEQ ID NO: 13831 - DNA, 40 bp, Artificial Sequence
  Description of Artificial Sequence: Synthetic primer
gggagcgggcccggcggtggccgcggaaggcggccggaag

SEQ ID NO: 13832 - DNA, 40 bp, Artificial Sequence
  Description of Artificial Sequence: Synthetic primer
catctctctctccctctccgttgccttttactgtcgttcc

SEQ ID NO: 13833 - DNA, 40 bp, Artificial Sequence
  Description of Artificial Sequence: Synthetic primer
ctgtcactatcaggaaggactaaaagactctgatttggag

SEQ ID NO: 13834 - DNA, 40 bp, Artificial Sequence
  Description of Artificial Sequence: Synthetic primer
gtcagaagctaaactgtcgtaagacccatgtcgagtaatg

SEQ ID NO: 13835 - DNA, 40 bp, Artificial Sequence
  Description of Artificial Sequence: Synthetic primer
atgcagattcctaaacacataagcattgaagatattacag

SEQ ID NO: 13836 - DNA, 40 bp, Artificial Sequence
  Description of Artificial Sequence: Synthetic primer
tccttcctgcctctggctcacatgtttgagagagtaatcc

SEQ ID NO: 13837 - DNA, 40 bp, Artificial Sequence
  Description of Artificial Sequence: Synthetic primer
tgctggagcagggccttgtcgaagcagctcttgtgtctaa

SEQ ID NO: 13838 - DNA, 40 bp, Artificial Sequence
  Description of Artificial Sequence: Synthetic primer
tcttcgtcaccttcgacctgctcttcatctccctgctctg

SEQ ID NO: 13839 - DNA, 40 bp, Artificial Sequence
  Description of Artificial Sequence: Synthetic primer
ctgcaggatcacctcctggtacacgagctccgcaggacag

SEQ ID NO: 13840 - DNA, 40 bp, Artificial Sequence
  Description of Artificial Sequence: Synthetic primer
ctgtcgtgccagaggcggatcttcctcagcaggcccagtt

SEQ ID NO: 13841 - DNA, 40 bp, Artificial Sequence
  Description of Artificial Sequence: Synthetic primer
ttatgttgagtccaggcaatgcagacattctcattcaaac

SEQ ID NO: 13842 - DNA, 40 bp, Artificial Sequence
  Description of Artificial Sequence: Synthetic primer
acacgtgtgtgcgcgtgcgtgcgtgtgtcgggggcagcat

SEQ ID NO: 13843 - DNA, 40 bp, Artificial Sequence
  Description of Artificial Sequence: Synthetic primer
ttgagggaacacaaatttatgggcttcctgatgatgattc

SEQ ID NO: 13844 - DNA, 40 bp, Artificial Sequence
  Description of Artificial Sequence: Synthetic primer
gaaacgacttactggtgccaaaacactgcctcctgatttc

SEQ ID NO: 13845 - DNA, 40 bp, Artificial Sequence
  Description of Artificial Sequence: Synthetic primer
atttggacagctttggtttgggaggcgttggtgtctctgc

SEQ ID NO: 13846 - DNA, 40 bp, Artificial Sequence
  Description of Artificial Sequence: Synthetic primer
gagctgggctttggggtggctccagggttccagacctttg

SEQ ID NO: 13847 - DNA, 40 bp, Artificial Sequence
  Description of Artificial Sequence: Synthetic primer
tcaggtgatttattgggagatttaggaggttgtgataagc

SEQ ID NO: 13848 - DNA, 40 bp, Artificial Sequence
  Description of Artificial Sequence: Synthetic primer
tactgcctggcggccggcggcggcgtcttccgcaccttcg

SEQ ID NO: 13849 - DNA, 40 bp, Artificial Sequence
  Description of Artificial Sequence: Synthetic primer
gatggtgtcattccctcaacgacttagaatatctgtatgc

SEQ ID NO: 13850 - DNA, 40 bp, Artificial Sequence
  Description of Artificial Sequence: Synthetic primer
agagttgggacttcaacatctttgaattggaagccattac

SEQ ID NO: 13851 - DNA, 40 bp, Artificial Sequence
  Description of Artificial Sequence: Synthetic primer
tggtaaggccatcaatgagccctttggttttcttgttgaa

SEQ ID NO: 13852 - DNA, 40 bp, Artificial Sequence
  Description of Artificial Sequence: Synthetic primer
ggaaggaatctggaactgaagaccgttttattaagagtcc

SEQ ID NO: 13853 - DNA, 40 bp, Artificial Sequence
  Description of Artificial Sequence: Synthetic primer
gagaagtaaaatcaatctcccaatcccttggaagaaacag

SEQ ID NO: 13854 - DNA, 40 bp, Artificial Sequence
  Description of Artificial Sequence: Synthetic primer
tgctactttcctttagaccttattttcttttctgccaagc

SEQ ID NO: 13855 - DNA, 40 bp, Artificial Sequence
  Description of Artificial Sequence: Synthetic primer
tgttggggggacgtgtgaaaactttgcatcctgcagtcca

SEQ ID NO: 13856 - DNA, 40 bp, Artificial Sequence
  Description of Artificial Sequence: Synthetic primer
gactgagtttattcagctcccaaaaacccttctctaggtg

SEQ ID NO: 13857 - DNA, 40 bp, Artificial Sequence
  Description of Artificial Sequence: Synthetic primer
aattaatgagataattcgtgtgttacaactcacctcttgg

SEQ ID NO: 13858 - DNA, 40 bp, Artificial Sequence
  Description of Artificial Sequence: Synthetic primer
attatattcaaagagatgggggaatctcgtggccgtctcc

SEQ ID NO: 13859 - DNA, 40 bp, Artificial Sequence
  Description of Artificial Sequence: Synthetic primer
tctgaccgcacagttgtattaatgagctgcactgcctctg

SEQ ID NO: 13860 - DNA, 40 bp, Artificial Sequence
  Description of Artificial Sequence: Synthetic primer
attgtgggtcctcttattctcatctcgggcctgggacagc

SEQ ID NO: 13861 - DNA, 40 bp, Artificial Sequence
  Description of Artificial Sequence: Synthetic primer
tatctaggtgcttcttggaaatgcagacaatgccttcaac

SEQ ID NO: 13862 - DNA, 40 bp, Artificial Sequence
  Description of Artificial Sequence: Synthetic primer
ccttattgtcagcctcttcctttcaatatggtatacaagg

SEQ ID NO: 13863 - DNA, 40 bp, Artificial Sequence
  Description of Artificial Sequence: Synthetic primer
tgagattacctcatttagggctcaggcagactcacctcac

SEQ ID NO: 13864 - DNA, 40 bp, Artificial Sequence
  Description of Artificial Sequence: Synthetic primer
aggctatggccagagcagctattcttcttatggccagagc

SEQ ID NO: 13865 - DNA, 40 bp, Artificial Sequence
  Description of Artificial Sequence: Synthetic primer
gcgagggccccctgaaaggcatccagatctggaaggtgcc

SEQ ID NO: 13866 - DNA, 40 bp, Artificial Sequence
  Description of Artificial Sequence: Synthetic primer
aataaagtaattttttaaaaaaacccttaaatcagaatgg

SEQ ID NO: 13867 - DNA, 40 bp, Artificial Sequence
  Description of Artificial Sequence: Synthetic primer
gcagccgctgcacgtctcactggctttccgcccgcagttc

SEQ ID NO: 13868 - DNA, 40 bp, Artificial Sequence
  Description of Artificial Sequence: Synthetic primer
ctttttgagaagccatctgaagaagaagagcattgtattt

SEQ ID NO: 13869 - DNA, 40 bp, Artificial Sequence
  Description of Artificial Sequence: Synthetic primer
atggtagaaataaataaaaaaggaaaagctctactgcatc

SEQ ID NO: 13870 - DNA, 40 bp, Artificial Sequence
  Description of Artificial Sequence: Synthetic primer
gctggaggcaaggacattggcacaggttctttctccagtg

SEQ ID NO: 13871 - DNA, 40 bp, Artificial Sequence
  Description of Artificial Sequence: Synthetic primer
ggcttcccgcggacgtcctgagggagtctcatttgcaccg

SEQ ID NO: 13872 - DNA, 40 bp, Artificial Sequence
  Description of Artificial Sequence: Synthetic primer
tgatttcttattacctattgttaaataaactgtgtgagac

SEQ ID NO: 13873 - DNA, 40 bp, Artificial Sequence
  Description of Artificial Sequence: Synthetic primer
tatattttttccaccatcacttttacccaatttgtatttt

SEQ ID NO: 13874 - DNA, 40 bp, Artificial Sequence
  Description of Artificial Sequence: Synthetic primer
caaacttcatctgcaggtcaaaggtgctgggcccatgtgt

SEQ ID NO: 13875 - DNA, 40 bp, Artificial Sequence
  Description of Artificial Sequence: Synthetic primer
aaaaaaacatacacaacatgtaaattattgcacaagagaa

SEQ ID NO: 13876 - DNA, 40 bp, Artificial Sequence
  Description of Artificial Sequence: Synthetic primer
caatgagatcacctacgggctccccatcatggtcacactg

SEQ ID NO: 13877 - DNA, 40 bp, Artificial Sequence
  Description of Artificial Sequence: Synthetic primer
caagcttagttcagttagattagagaggacagcaaagacg

SEQ ID NO: 13878 - DNA, 40 bp, Artificial Sequence
  Description of Artificial Sequence: Synthetic primer
gaggaggagactcttcgcaggctgggcttggaacggaacc

SEQ ID NO: 13879 - DNA, 40 bp, Artificial Sequence
  Description of Artificial Sequence: Synthetic primer
gtcggtaagcagggggccggcggcccgatgaatgcagccg

SEQ ID NO: 13880 - DNA, 40 bp, Artificial Sequence
  Description of Artificial Sequence: Synthetic primer
gtgttatataaaaatccgacagctgaactaggttgctctt

SEQ ID NO: 13881 - DNA, 40 bp, Artificial Sequence
  Description of Artificial Sequence: Synthetic primer
aaaggacatttccacaaagaacacaaacgattcccaaaag

SEQ ID NO: 13882 - DNA, 40 bp, Artificial Sequence
  Description of Artificial Sequence: Synthetic primer
caagaaggcccagtttgtgatgacccagaagcttctgttc

SEQ ID NO: 13883 - DNA, 40 bp, Artificial Sequence
  Description of Artificial Sequence: Synthetic primer
agggatggcctccagctgcaggaagtacagcagcacctgg

SEQ ID NO: 13884 - DNA, 40 bp, Artificial Sequence
  Description of Artificial Sequence: Synthetic primer
acatcacgaacctccaccacccttactaaaaaccaacaac

SEQ ID NO: 13885 - DNA, 40 bp, Artificial Sequence
  Description of Artificial Sequence: Synthetic primer
acgagtgcgagcggacatgctgggcacccccagccagtcg

SEQ ID NO: 13886 - DNA, 40 bp, Artificial Sequence
  Description of Artificial Sequence: Synthetic primer
ttcggttttcatacgggattttgccttcactgaaaacttc

SEQ ID NO: 13887 - DNA, 40 bp, Artificial Sequence
  Description of Artificial Sequence: Synthetic primer
atcaacgagaccccactgcccattgatctctatcgctatg

SEQ ID NO: 13888 - DNA, 40 bp, Artificial Sequence
  Description of Artificial Sequence: Synthetic primer
aggagctggcagccctctttgcgccctacggcacggtcat

SEQ ID NO: 13889 - DNA, 40 bp, Artificial Sequence
  Description of Artificial Sequence: Synthetic primer
gcagcctgcacctgcagctcttcttcctgcacagccatca

SEQ ID NO: 13890 - DNA, 40 bp, Artificial Sequence
  Description of Artificial Sequence: Synthetic primer
tgagcagttctgtctggacgggctgctgagcgctgacctg

SEQ ID NO: 13891 - DNA, 40 bp, Artificial Sequence
  Description of Artificial Sequence: Synthetic primer
gatatgtttaataacccagccacggctgccccgaattcac

SEQ ID NO: 13892 - DNA, 40 bp, Artificial Sequence
  Description of Artificial Sequence: Synthetic primer
aaacagaagaaagtatgggtggaggtgaaggtaatcacag

SEQ ID NO: 13893 - DNA, 40 bp, Artificial Sequence
  Description of Artificial Sequence: Synthetic primer
aagaagtactggcagcagatggaggcgcatgcggggaagg

SEQ ID NO: 13894 - DNA, 40 bp, Artificial Sequence
  Description of Artificial Sequence: Synthetic primer
tggtcaattacaatctgtgcaccacctgcttggtcaactg

SEQ ID NO: 13895 - DNA, 40 bp, Artificial Sequence
  Description of Artificial Sequence: Synthetic primer
tgagattgcactgctgcagtccaggctgaagacagagggc

SEQ ID NO: 13896 - DNA, 40 bp, Artificial Sequence
  Description of Artificial Sequence: Synthetic primer
cctgatgttctagaagctatcaggagtgtgaccgaactac

SEQ ID NO: 13897 - DNA, 40 bp, Artificial Sequence
  Description of Artificial Sequence: Synthetic primer
tttgcctatttgcttagtcggtactggggttcttttaagc

SEQ ID NO: 13898 - DNA, 40 bp, Artificial Sequence
  Description of Artificial Sequence: Synthetic primer
tgtctacctctcatgggtgtatcatccagttcggctttgg

SEQ ID NO: 13899 - DNA, 40 bp, Artificial Sequence
  Description of Artificial Sequence: Synthetic primer
agatagagtcattgctgtaggatctaaggctgtttgcttc

SEQ ID NO: 13900 - DNA, 40 bp, Artificial Sequence
  Description of Artificial Sequence: Synthetic primer
gagacgagccctcagtggctgccatggtctaccctttcac

SEQ ID NO: 13901 - DNA, 40 bp, Artificial Sequence
  Description of Artificial Sequence: Synthetic primer
gcactgaatgaagggctttcaggtcttcctcaaagtcaag

SEQ ID NO: 13902 - DNA, 40 bp, Artificial Sequence
  Description of Artificial Sequence: Synthetic primer
tagaagtcgtagagtgccaactccgtcaacgtccgcagtg

SEQ ID NO: 13903 - DNA, 40 bp, Artificial Sequence
  Description of Artificial Sequence: Synthetic primer
agtggctgctttgctttctcttccttgttcatcacaaatg

SEQ ID NO: 13904 - DNA, 40 bp, Artificial Sequence
  Description of Artificial Sequence: Synthetic primer
agtgcaaagattatttttcttacaccatcaatatccaaag

SEQ ID NO: 13905 - DNA, 40 bp, Artificial Sequence
  Description of Artificial Sequence: Synthetic primer
gatgagaagatcattaacatcgtcttggacctctttggag

SEQ ID NO: 13906 - DNA, 40 bp, Artificial Sequence
  Description of Artificial Sequence: Synthetic primer
aatttagttctggcctcagccaggactattcacatatttg

SEQ ID NO: 13907 - DNA, 40 bp, Artificial Sequence
  Description of Artificial Sequence: Synthetic primer
taatatctttgggacacctgaagaaaatcaagcttcttgg

SEQ ID NO: 13908 - DNA, 40 bp, Artificial Sequence
  Description of Artificial Sequence: Synthetic primer
cgaaagaacccggtgtgccgggagatggctgtggtactgc

SEQ ID NO: 13909 - DNA, 40 bp, Artificial Sequence
  Description of Artificial Sequence: Synthetic primer
ttttccttgatgaatatcttctacaatggaccgaggagac

SEQ ID NO: 13910 - DNA, 40 bp, Artificial Sequence
  Description of Artificial Sequence: Synthetic primer
ggcatgttaagttacagtttgcacaagttcatctcatttg

SEQ ID NO: 13911 - DNA, 40 bp, Artificial Sequence
  Description of Artificial Sequence: Synthetic primer
tgggtaaatgctttttcactgttaataaatatatatcctg

SEQ ID NO: 13912 - DNA, 40 bp, Artificial Sequence
  Description of Artificial Sequence: Synthetic primer
gctggttttcttattattcttctttttagcatttttgctg

SEQ ID NO: 13913 - DNA, 40 bp, Artificial Sequence
  Description of Artificial Sequence: Synthetic primer
gaatttggggagtcaaaatgggacagcaatatctgtgagc

SEQ ID NO: 13914 - DNA, 40 bp, Artificial Sequence
  Description of Artificial Sequence: Synthetic primer
ggtccagggtgaacacgctggcctcgtcctcaggtgtcag

SEQ ID NO: 13915 - DNA, 40 bp, Artificial Sequence
  Description of Artificial Sequence: Synthetic primer
tgcagggggaattacctttggaaggagctatatagaaaaa

SEQ ID NO: 13916 - DNA, 40 bp, Artificial Sequence
  Description of Artificial Sequence: Synthetic primer
ccagagtgcagaagcatctcaccgaaatcccgggtcacag

SEQ ID NO: 13917 - DNA, 40 bp, Artificial Sequence
  Description of Artificial Sequence: Synthetic primer
gaccattcaaaggaaactggaattttattgctgctcaaac

SEQ ID NO: 13918 - DNA, 40 bp, Artificial Sequence
  Description of Artificial Sequence: Synthetic primer
tctttttctcttttgcccacaatttaagcaagtagatgtg

SEQ ID NO: 13919 - DNA, 40 bp, Artificial Sequence
  Description of Artificial Sequence: Synthetic primer
cgggctccggaggccatgccggcgttggcgcgcgacggcg

SEQ ID NO: 13920 - DNA, 40 bp, Artificial Sequence
  Description of Artificial Sequence: Synthetic primer
cccaggatattatctaacgtttctaacaggggtgttaatg

SEQ ID NO: 13921 - DNA, 40 bp, Artificial Sequence
  Description of Artificial Sequence: Synthetic primer
agtcctgtgaagattcattcttcttgctctttctcagcag

SEQ ID NO: 13922 - DNA, 40 bp, Artificial Sequence
  Description of Artificial Sequence: Synthetic primer
tggctatgtccacgatgccttggcacagttctgcatagag

SEQ ID NO: 13923 - DNA, 40 bp, Artificial Sequence
  Description of Artificial Sequence: Synthetic primer
gctcggctgcagacttggccaaatggacgggactattaag

SEQ ID NO: 13924 - DNA, 40 bp, Artificial Sequence
  Description of Artificial Sequence: Synthetic primer
acacgagttggtcagcatctgcagctccacggatgtcagg

SEQ ID NO: 13925 - DNA, 40 bp, Artificial Sequence
  Description of Artificial Sequence: Synthetic primer
atgactggtcacgcgggactgaacaccgcacaggcaggag

SEQ ID NO: 13926 - DNA, 40 bp, Artificial Sequence
  Description of Artificial Sequence: Synthetic primer
agcagtgtgccaggcccgcagtcctaccccattgtgacag

SEQ ID NO: 13927 - DNA, 40 bp, Artificial Sequence
  Description of Artificial Sequence: Synthetic primer
gaggaaagaactggaaatcctgaacattgggttgttttgg

SEQ ID NO: 13928 - DNA, 40 bp, Artificial Sequence
  Description of Artificial Sequence: Synthetic primer
agaggtcctgggggtggttttgaaccatcagagcttggac

SEQ ID NO: 13929 - DNA, 40 bp, Artificial Sequence
  Description of Artificial Sequence: Synthetic primer
tttcaagggccagtgttaattctgtcaaattgatgtttcc

SEQ ID NO: 13930 - DNA, 40 bp, Artificial Sequence
  Description of Artificial Sequence: Synthetic primer
gtacaaactttagagaaatgacaaaccttccaggaaaagg

SEQ ID NO: 13931 - DNA, 40 bp, Artificial Sequence
  Description of Artificial Sequence: Synthetic primer
ctatatccgaggactgcctccccacaccaccgaccaggac

SEQ ID NO: 13932 - DNA, 40 bp, Artificial Sequence
  Description of Artificial Sequence: Synthetic primer
ttttaggagacttggagtctcaaccttaaaattgctcaac

SEQ ID NO: 13933 - DNA, 40 bp, Artificial Sequence
  Description of Artificial Sequence: Synthetic primer
atttccaaagcattaaagatctaaatggattatcttttcc

SEQ ID NO: 13934 - DNA, 40 bp, Artificial Sequence
  Description of Artificial Sequence: Synthetic primer
gatttttccccctcatactggattgtgatgctctgatatg

SEQ ID NO: 13935 - DNA, 40 bp, Artificial Sequence
  Description of Artificial Sequence: Synthetic primer
actttgaaaagtcaggagctaagctgctcggagctcagtg

SEQ ID NO: 13936 - DNA, 40 bp, Artificial Sequence
  Description of Artificial Sequence: Synthetic primer
aactgtgagtttacagaccagtccaggtgagtaatgaagc

SEQ ID NO: 13937 - DNA, 40 bp, Artificial Sequence
  Description of Artificial Sequence: Synthetic primer
ctcctcttcctctgagtcgtaggaggcagatgcctgcttg

SEQ ID NO: 13938 - DNA, 40 bp, Artificial Sequence
  Description of Artificial Sequence: Synthetic primer
gagggggggtagaagtgctgacagtcatgtccctgagtgc

SEQ ID NO: 13939 - DNA, 40 bp, Artificial Sequence
  Description of Artificial Sequence: Synthetic primer
tcacaataattacacttgtgggttttctcaggagaatgag

SEQ ID NO: 13940 - DNA, 40 bp, Artificial Sequence
  Description of Artificial Sequence: Synthetic primer
cgtatgaagcaatgtataatattcagtcccaggcgccatc

SEQ ID NO: 13941 - DNA, 40 bp, Artificial Sequence
  Description of Artificial Sequence: Synthetic primer
caatgttcagtgaacgtcgatgggactgagtgctgtggag

SEQ ID NO: 13942 - DNA, 40 bp, Artificial Sequence
  Description of Artificial Sequence: Synthetic primer
cttcttcccagatgtgggttttgaccagcagtccatgagg

SEQ ID NO: 13943 - DNA, 40 bp, Artificial Sequence
  Description of Artificial Sequence: Synthetic primer
cattcaaatccatgaggagaaaaaactacgggaggaaatc

SEQ ID NO: 13944 - DNA, 40 bp, Artificial Sequence
  Description of Artificial Sequence: Synthetic primer
tcaagctgtattcacctttgtttatgacacgatacaactc

SEQ ID NO: 13945 - DNA, 40 bp, Artificial Sequence
  Description of Artificial Sequence: Synthetic primer
cgggcatttgatcgagcttcctggactttatctgtcaatg

SEQ ID NO: 13946 - DNA, 40 bp, Artificial Sequence
  Description of Artificial Sequence: Synthetic primer
cgggaagaatctgagcaaattgtcctgataggatcaaaga

SEQ ID NO: 13947 - DNA, 40 bp, Artificial Sequence
  Description of Artificial Sequence: Synthetic primer
ttgttttcttaactataattatacaattcattaaataaaa

SEQ ID NO: 13948 - DNA, 40 bp, Artificial Sequence
  Description of Artificial Sequence: Synthetic primer
gtcattggtggcaggggcatagagtggtcagtctgaaagg

SEQ ID NO: 13949 - DNA, 40 bp, Artificial Sequence
  Description of Artificial Sequence: Synthetic primer
tctgttgtttcttaaccttcccagccttcccacagttgtc

SEQ ID NO: 13950 - DNA, 40 bp, Artificial Sequence
  Description of Artificial Sequence: Synthetic primer
actgacactgagccgggccagagggagaggagccgagcgc

SEQ ID NO: 13951 - DNA, 40 bp, Artificial Sequence
  Description of Artificial Sequence: Synthetic primer
ctggcttccattccatatcaggtacaggatttgatgttat

SEQ ID NO: 13952 - DNA, 40 bp, Artificial Sequence
  Description of Artificial Sequence: Synthetic primer
ttgcttctgggcagaatatctgttcatagggcacaccttg

SEQ ID NO: 13953 - DNA, 40 bp, Artificial Sequence
  Description of Artificial Sequence: Synthetic primer
tgaattctcctttgtcctgtttctcctgtttcatttctcc

SEQ ID NO: 13954 - DNA, 40 bp, Artificial Sequence
  Description of Artificial Sequence: Synthetic primer
tggcctcagcccgccccgcctcgctgccactcgcccgttc

SEQ ID NO: 13955 - DNA, 40 bp, Artificial Sequence
  Description of Artificial Sequence: Synthetic primer
gaagatgacgacgtttaacgcgggccgctcggcctggaag

SEQ ID NO: 13956 - DNA, 40 bp, Artificial Sequence
  Description of Artificial Sequence: Synthetic primer
agttctttatctaaaccaaaaacttgctcctgagatttgg

SEQ ID NO: 13957 - DNA, 40 bp, Artificial Sequence
  Description of Artificial Sequence: Synthetic primer
gtggctcgagcagccttgggaagaggcaaggagcttctga

SEQ ID NO: 13958 - DNA, 40 bp, Artificial Sequence
  Description of Artificial Sequence: Synthetic primer
catttagactcctgctcgcctccgtgcagttgggggaaag

SEQ ID NO: 13959 - DNA, 40 bp, Artificial Sequence
  Description of Artificial Sequence: Synthetic primer
tccacagcttgttctaagatctggtgcttcttcaacatgg

SEQ ID NO: 13960 - DNA, 40 bp, Artificial Sequence
  Description of Artificial Sequence: Synthetic primer
gagttcttccacagtgttctggagtggggttcccgtcagc

SEQ ID NO: 13961 - DNA, 40 bp, Artificial Sequence
  Description of Artificial Sequence: Synthetic primer
accactcgttcaaggcccaccaggatcaaggcacggactc

SEQ ID NO: 13962 - DNA, 40 bp, Artificial Sequence
  Description of Artificial Sequence: Synthetic primer
gccaccgccaaggtttgcactcagggaggggctgatggag

SEQ ID NO: 13963 - DNA, 40 bp, Artificial Sequence
  Description of Artificial Sequence: Synthetic primer
acaggtgcaacttgatcatcttctactgccaaagcatctg

SEQ ID NO: 13964 - DNA, 40 bp, Artificial Sequence
  Description of Artificial Sequence: Synthetic primer
gagtcattatcttcagttcagacatgagagcttgtttttc

SEQ ID NO: 13965 - DNA, 40 bp, Artificial Sequence
  Description of Artificial Sequence: Synthetic primer
cactgttctgtggtctcgtaacagaagctccgcaatgtcg

SEQ ID NO: 13966 - DNA, 40 bp, Artificial Sequence
  Description of Artificial Sequence: Synthetic primer
ttgagcatgcgtccagttcttccaactgcttgggtctttg

SEQ ID NO: 13967 - DNA, 40 bp, Artificial Sequence
  Description of Artificial Sequence: Synthetic primer
agagcaatgaagacagcaaagacaaccatgaagccagcac

SEQ ID NO: 13968 - DNA, 40 bp, Artificial Sequence
  Description of Artificial Sequence: Synthetic primer
gggtgtcaggatactcagatactttctgagccaggcctcc

SEQ ID NO: 13969 - DNA, 40 bp, Artificial Sequence
  Description of Artificial Sequence: Synthetic primer
actcgcaaactgactgcagggtccgcacctccatacatgc

SEQ ID NO: 13970 - DNA, 40 bp, Artificial Sequence
  Description of Artificial Sequence: Synthetic primer
gctgtaaattgattcgaactttctgaggtggaggctgttg

SEQ ID NO: 13971 - DNA, 40 bp, Artificial Sequence
  Description of Artificial Sequence: Synthetic primer
cactctgtgcaggagatttctgcctcccacgcccactttc

SEQ ID NO: 13972 - DNA, 40 bp, Artificial Sequence
  Description of Artificial Sequence: Synthetic primer
tcaaaaacggggcatgtaaaacataacttacaaaatggtg

SEQ ID NO: 13973 - DNA, 40 bp, Artificial Sequence
  Description of Artificial Sequence: Synthetic primer
ggaacacaaggagttacctatcactttcacttataattcc

SEQ ID NO: 13974 - DNA, 40 bp, Artificial Sequence
  Description of Artificial Sequence: Synthetic primer
cacgtagtttcctgggaaaaggccctcctggccgtgaagc

SEQ ID NO: 13975 - DNA, 40 bp, Artificial Sequence
  Description of Artificial Sequence: Synthetic primer
cagacatctcataaatactgagtggctcgtctctctctac

SEQ ID NO: 13976 - DNA, 40 bp, Artificial Sequence
  Description of Artificial Sequence: Synthetic primer
ttaaacctgttcaaatgaatgcccccgatgaagatgagac

SEQ ID NO: 13977 - DNA, 40 bp, Artificial Sequence
  Description of Artificial Sequence: Synthetic primer
agaaaaggagaggagcaagaagaaggtaaaacaggatctc

SEQ ID NO: 13978 - DNA, 40 bp, Artificial Sequence
  Description of Artificial Sequence: Synthetic primer
tatttcaacaccaattttgaaaaaaacaatgaacttcatc

SEQ ID NO: 13979 - DNA, 40 bp, Artificial Sequence
  Description of Artificial Sequence: Synthetic primer
ttcacatatattggggacaggaaaaactatttgttccatg

SEQ ID NO: 13980 - DNA, 40 bp, Artificial Sequence
  Description of Artificial Sequence: Synthetic primer
gggagagtctcctccctcctgtgtccctcgtcctccttac

SEQ ID NO: 13981 - DNA, 40 bp, Artificial Sequence
  Description of Artificial Sequence: Synthetic primer
ccccttttgtcctatcattccctagaacaagccacctgtc

SEQ ID NO: 13982 - DNA, 40 bp, Artificial Sequence
  Description of Artificial Sequence: Synthetic primer
tatattatactcactcatcacggccatctttgttgtaacc

SEQ ID NO: 13983 - DNA, 40 bp, Artificial Sequence
  Description of Artificial Sequence: Synthetic primer
ttatccaatcttcaatcaacaaggctttatttacactcct

SEQ ID NO: 13984 - DNA, 40 bp, Artificial Sequence
  Description of Artificial Sequence: Synthetic primer
tgataaattctggttcaaggtatgctatccatgaaataat

SEQ ID NO: 13985 - DNA, 40 bp, Artificial Sequence
  Description of Artificial Sequence: Synthetic primer
aatccattggatttttaattattttgtaataatcaggcac

SEQ ID NO: 13986 - DNA, 40 bp, Artificial Sequence
  Description of Artificial Sequence: Synthetic primer
acctgtgaagagctggctgaaaaagacgacatcaagtacc

SEQ ID NO: 13987 - DNA, 40 bp, Artificial Sequence
  Description of Artificial Sequence: Synthetic primer
aattcactttctagatgcaggttggttgagagaggtggtg

SEQ ID NO: 13988 - DNA, 40 bp, Artificial Sequence
  Description of Artificial Sequence: Synthetic primer
gtgaggaaggaagttccatgcaggctggtgctctgtggtc

SEQ ID NO: 13989 - DNA, 40 bp, Artificial Sequence
  Description of Artificial Sequence: Synthetic primer
ctccgcctcagtcacaggcaatgccctgatcccacaaagc

SEQ ID NO: 13990 - DNA, 40 bp, Artificial Sequence
  Description of Artificial Sequence: Synthetic primer
ttcagtctctgctcttccttcatcaaccaccttccccaag

SEQ ID NO: 13991 - DNA, 40 bp, Artificial Sequence
  Description of Artificial Sequence: Synthetic primer
cctgctgtcttgtccattcgagaaatcttcaggtttgatg

SEQ ID NO: 13992 - DNA, 40 bp, Artificial Sequence
  Description of Artificial Sequence: Synthetic primer
cgcctgccacaacagttttgccagtcaccaaactcagaaa

SEQ ID NO: 13993 - DNA, 40 bp, Artificial Sequence
  Description of Artificial Sequence: Synthetic primer
atcgaagaattggttccgcagacgtgcccacaggccacac

SEQ ID NO: 13994 - DNA, 40 bp, Artificial Sequence
  Description of Artificial Sequence: Synthetic primer
gtaaatgtccttgggagttcactggagttttcatattacc

SEQ ID NO: 13995 - DNA, 40 bp, Artificial Sequence
  Description of Artificial Sequence: Synthetic primer
tacagctctcaatagattattttatagttatagttgaata

SEQ ID NO: 13996 - DNA, 40 bp, Artificial Sequence
  Description of Artificial Sequence: Synthetic primer
caaaaacaacaaccccatcagcaactcccaggacatcaag

SEQ ID NO: 13997 - DNA, 40 bp, Artificial Sequence
  Description of Artificial Sequence: Synthetic primer
gaaggctgcctgaggagagtggaggacgtcatctggatag

SEQ ID NO: 13998 - DNA, 40 bp, Artificial Sequence
  Description of Artificial Sequence: Synthetic primer
tttgtacgcactgtgctgctccctaaatctgggggtgtgg

SEQ ID NO: 13999 - DNA, 40 bp, Artificial Sequence
  Description of Artificial Sequence: Synthetic primer
aaactagattgctttgaaaacatgactcaataaaagtttc

SEQ ID NO: 14000 - DNA, 40 bp, Artificial Sequence
  Description of Artificial Sequence: Synthetic primer
tactatcacctataccctgtttctagtgagtgctgaatac

SEQ ID NO: 14001 - DNA, 40 bp, Artificial Sequence
  Description of Artificial Sequence: Synthetic primer
ttcctaggctccagcccaaggccagcaggactaaggaatc

SEQ ID NO: 14002 - DNA, 40 bp, Artificial Sequence
  Description of Artificial Sequence: Synthetic primer
gtggaaaagatgctaagattctctgctccaatccaaacac

SEQ ID NO: 14003 - DNA, 40 bp, Artificial Sequence
  Description of Artificial Sequence: Synthetic primer
taacttaaggacctttgggtctacaagtatatgtgaaaaa

SEQ ID NO: 14004 - DNA, 40 bp, Artificial Sequence
  Description of Artificial Sequence: Synthetic primer
gttcgagtctgtcctggccttggtggcctattaccaaatg

SEQ ID NO: 14005 - DNA, 40 bp, Artificial Sequence
  Description of Artificial Sequence: Synthetic primer
cgggagcaactggaacaccggctgacctctactgctcgtg

SEQ ID NO: 14006 - DNA, 40 bp, Artificial Sequence
  Description of Artificial Sequence: Synthetic primer
cacatttcggattactaaagcagatgctgcggaattttgg

SEQ ID NO: 14007 - DNA, 40 bp, Artificial Sequence
  Description of Artificial Sequence: Synthetic primer
gaatcactgcagagcatattttgatgggttacttcaatac

SEQ ID NO: 14008 - DNA, 40 bp, Artificial Sequence
  Description of Artificial Sequence: Synthetic primer
ggaactgcaagatagtctaaatgctgaaagggagaaagtc

SEQ ID NO: 14009 - DNA, 40 bp, Artificial Sequence
  Description of Artificial Sequence: Synthetic primer
aaaccataaacatttgcaccacttgtggcttttgaatatc

SEQ ID NO: 14010 - DNA, 40 bp, Artificial Sequence
  Description of Artificial Sequence: Synthetic primer
ccagaccaagccccagccgcggacccacaactgcctctgc

SEQ ID NO: 14011 - DNA, 40 bp, Artificial Sequence
  Description of Artificial Sequence: Synthetic primer
ctgttttaccattttgggtctgcctcttggttttggaatc

SEQ ID NO: 14012 - DNA, 40 bp, Artificial Sequence
  Description of Artificial Sequence: Synthetic primer
ctccgcagcgacatcaccaagctggaggtggacgccatcg

SEQ ID NO: 14013 - DNA, 40 bp, Artificial Sequence
  Description of Artificial Sequence: Synthetic primer
aagccctcaagtcacaaagtaaatggttcaagcaatggag

SEQ ID NO: 14014 - DNA, 40 bp, Artificial Sequence
  Description of Artificial Sequence: Synthetic primer
ttagaagcgacttttgttctcttctgcgtaggcgttggtg

SEQ ID NO: 14015 - DNA, 40 bp, Artificial Sequence
  Description of Artificial Sequence: Synthetic primer
ctcattttatatttgcaaaataaatttctaatatttattg

SEQ ID NO: 14016 - DNA, 40 bp, Artificial Sequence
  Description of Artificial Sequence: Synthetic primer
tggagaactagcaggccttacggtggccaatgaagcagac

SEQ ID NO: 14017 - DNA, 40 bp, Artificial Sequence
  Description of Artificial Sequence: Synthetic primer
gccaagacaagaacccagaaatgtgccgagtcttgctcac

SEQ ID NO: 14018 - DNA, 40 bp, Artificial Sequence
  Description of Artificial Sequence: Synthetic primer
tcacaaccccattcgttaaatcttccacggtctggcatgg

SEQ ID NO: 14019 - DNA, 40 bp, Artificial Sequence
  Description of Artificial Sequence: Synthetic primer
gttgctcatcttccaagatattgaggtaacagggtttcac

SEQ ID NO: 14020 - DNA, 40 bp, Artificial Sequence
  Description of Artificial Sequence: Synthetic primer
gaaagttctgcagacctgggaacagcaagaaaatgtgcag

SEQ ID NO: 14021 - DNA, 40 bp, Artificial Sequence
  Description of Artificial Sequence: Synthetic primer
gtttaaggactgagtgcgcatctggcccaacttcctctcc

SEQ ID NO: 14022 - DNA, 40 bp, Artificial Sequence
  Description of Artificial Sequence: Synthetic primer
gggcttggggacacgcggctggactggccagaggagaagt

SEQ ID NO: 14023 - DNA, 40 bp, Artificial Sequence
  Description of Artificial Sequence: Synthetic primer
tatttggtgatgaaccccagggtacagagaaagatccaag

SEQ ID NO: 14024 - DNA, 40 bp, Artificial Sequence
  Description of Artificial Sequence: Synthetic primer
gagatttgatccgagtccgggtgtatctgaacttctcttg

SEQ ID NO: 14025 - DNA, 40 bp, Artificial Sequence
  Description of Artificial Sequence: Synthetic primer
aagtgattctaaactaagatgtgtaataaaaatcaatcag

SEQ ID NO: 14026 - DNA, 40 bp, Artificial Sequence
  Description of Artificial Sequence: Synthetic primer
cataaatctgttaatgtctgatcaagctcctgccctgttc

SEQ ID NO: 14027 - DNA, 40 bp, Artificial Sequence
  Description of Artificial Sequence: Synthetic primer
taaactttgatcatatgacctattagatccccgtttgctc

SEQ ID NO: 14028 - DNA, 40 bp, Artificial Sequence
  Description of Artificial Sequence: Synthetic primer
gaagtgaaccgcggcgacaagtacatcgccaagtttcagg

SEQ ID NO: 14029 - DNA, 40 bp, Artificial Sequence
  Description of Artificial Sequence: Synthetic primer
gccgggactcaccagcggcagcgacaccccgcagcaggac

SEQ ID NO: 14030 - DNA, 40 bp, Artificial Sequence
  Description of Artificial Sequence: Synthetic primer
tggtcccacgtcttccacttcactgttgctcctcttcttc

SEQ ID NO: 14031 - DNA, 40 bp, Artificial Sequence
  Description of Artificial Sequence: Synthetic primer
gcttctccgttccttcgaccctgagcattcagacaaagtg

SEQ ID NO: 14032 - DNA, 40 bp, Artificial Sequence
  Description of Artificial Sequence: Synthetic primer
acccttactcagatgctgaacgtcattttcacccgcatgg

SEQ ID NO: 14033 - DNA, 40 bp, Artificial Sequence
  Description of Artificial Sequence: Synthetic primer
aattttttatttcagttctgatgttaaaattaaaaactag

SEQ ID NO: 14034 - DNA, 40 bp, Artificial Sequence
  Description of Artificial Sequence: Synthetic primer
agcatagcatggcgtaagctattttttaagcaataaatgg

SEQ ID NO: 14035 - DNA, 40 bp, Artificial Sequence
  Description of Artificial Sequence: Synthetic primer
gttcgtttagagacgttagagagtgataaaatgccagttc

SEQ ID NO: 14036 - DNA, 40 bp, Artificial Sequence
  Description of Artificial Sequence: Synthetic primer
gttccaaacttcggggcaccaaagggctcttccgaggttg

SEQ ID NO: 14037 - DNA, 40 bp, Artificial Sequence
  Description of Artificial Sequence: Synthetic primer
cctttcctcctcccaacgtggactcctgcccggcgaagtg

SEQ ID NO: 14038 - DNA, 40 bp, Artificial Sequence
  Description of Artificial Sequence: Synthetic primer
gaagaggaggaagtgagacggggaagggaggagcaccttg

SEQ ID NO: 14039 - DNA, 40 bp, Artificial Sequence
  Description of Artificial Sequence: Synthetic primer
aagaccagaaaatcattctccgatcttgtatcttcaactc

SEQ ID NO: 14040 - DNA, 40 bp, Artificial Sequence
  Description of Artificial Sequence: Synthetic primer
gagagtactgtgtcattcaatccgtatgagccagaacttg

SEQ ID NO: 14041 - DNA, 40 bp, Artificial Sequence
  Description of Artificial Sequence: Synthetic primer
gtggcgtatgtcctggtttgcatgctgggcctttttgtcc

SEQ ID NO: 14042 - DNA, 40 bp, Artificial Sequence
  Description of Artificial Sequence: Synthetic primer
gagagccaaaaagaaaagctgcaaaagggatgagaacatt

SEQ ID NO: 14043 - DNA, 40 bp, Artificial Sequence
  Description of Artificial Sequence: Synthetic primer
agtataacatgtcgatgttcgatgctgatacttctacaac

SEQ ID NO: 14044 - DNA, 40 bp, Artificial Sequence
  Description of Artificial Sequence: Synthetic primer
gagtcaggacagaaaagcttccataattgaactagattac

SEQ ID NO: 14045 - DNA, 40 bp, Artificial Sequence
  Description of Artificial Sequence: Synthetic primer
agtttttctatctggctactaagcctttgtttggtttctg

SEQ ID NO: 14046 - DNA, 40 bp, Artificial Sequence
  Description of Artificial Sequence: Synthetic primer
taaagattggcttcttccgcacaatctcgatctttctcac

SEQ ID NO: 14047 - DNA, 40 bp, Artificial Sequence
  Description of Artificial Sequence: Synthetic primer
agtccacttcctgctgaagatgataatgctatccgagaac

SEQ ID NO: 14048 - DNA, 40 bp, Artificial Sequence
  Description of Artificial Sequence: Synthetic primer
ggagtttcttcttgcgcttctgctcccgcaacagccacac

SEQ ID NO: 14049 - DNA, 40 bp, Artificial Sequence
  Description of Artificial Sequence: Synthetic primer
gggctcacgagcgagcgacagctgcagaccttcagccaga

SEQ ID NO: 14050 - DNA, 40 bp, Artificial Sequence
  Description of Artificial Sequence: Synthetic primer
ggggtttgtgtccgagcccctgcggtcaaggagtgtggag

SEQ ID NO: 14051 - DNA, 40 bp, Artificial Sequence
  Description of Artificial Sequence: Synthetic primer
actggagaatttaggcactcatgggacaatggacctgaac

SEQ ID NO: 14052 - DNA, 40 bp, Artificial Sequence
  Description of Artificial Sequence: Synthetic primer
ccaaaggcagacagtacgggctcccttcgccaaactcttc

SEQ ID NO: 14053 - DNA, 40 bp, Artificial Sequence
  Description of Artificial Sequence: Synthetic primer
aagaaggaagtaaaaatctatgtgggcctcagcaaaatgc

SEQ ID NO: 14054 - DNA, 40 bp, Artificial Sequence
  Description of Artificial Sequence: Synthetic primer
gaagaaactcagatttaacctgttatttctatgaaaatgg

SEQ ID NO: 14055 - DNA, 40 bp, Artificial Sequence
  Description of Artificial Sequence: Synthetic primer
acggaggacgacgcagacacacaggcagggccttctgagg

SEQ ID NO: 14056 - DNA, 40 bp, Artificial Sequence
  Description of Artificial Sequence: Synthetic primer
cgttggagttcccaaacctggggttcctcagactcctgtg

SEQ ID NO: 14057 - DNA, 40 bp, Artificial Sequence
  Description of Artificial Sequence: Synthetic primer
tccagaatatctttccaccatcagccactctgcatctttc

SEQ ID NO: 14058 - DNA, 40 bp, Artificial Sequence
  Description of Artificial Sequence: Synthetic primer
gttcagtcccgttgcaaccgaaactgatcgctgtaaactg

SEQ ID NO: 14059 - DNA, 40 bp, Artificial Sequence
  Description of Artificial Sequence: Synthetic primer
attgctcctctcaaaataaagtatatataggagcttaaaa

SEQ ID NO: 14060 - DNA, 40 bp, Artificial Sequence
  Description of Artificial Sequence: Synthetic primer
tcaaaacggagcggagaggctggggcctcaggaccaaaag

SEQ ID NO: 14061 - DNA, 40 bp, Artificial Sequence
  Description of Artificial Sequence: Synthetic primer
ggagcaccaagaagaccctgaggacctggagtgccaggag

SEQ ID NO: 14062 - DNA, 40 bp, Artificial Sequence
  Description of Artificial Sequence: Synthetic primer
cagaaacttggcaacgattctacattcagtgagggaggac

SEQ ID NO: 14063 - DNA, 40 bp, Artificial Sequence
  Description of Artificial Sequence: Synthetic primer
tggcagattctctcttcagagggcctttgcttttgctttt

SEQ ID NO: 14064 - DNA, 40 bp, Artificial Sequence
  Description of Artificial Sequence: Synthetic primer
ggtaacaacctaaaagtttttcaaatctatgaaaaaaatc

SEQ ID NO: 14065 - DNA, 40 bp, Artificial Sequence
  Description of Artificial Sequence: Synthetic primer
aatctggttcagagtcaatatcagagccttcatctgattg

SEQ ID NO: 14066 - DNA, 40 bp, Artificial Sequence
  Description of Artificial Sequence: Synthetic primer
tgactgggcccccaataaatcccgtctttgggtctctctg

SEQ ID NO: 14067 - DNA, 40 bp, Artificial Sequence
  Description of Artificial Sequence: Synthetic primer
ctgaagctggtggccactttcagacaaatacttcaaggag

SEQ ID NO: 14068 - DNA, 40 bp, Artificial Sequence
  Description of Artificial Sequence: Synthetic primer
ttctgcccccatagcctggccctgctgcatagtagccttc

SEQ ID NO: 14069 - DNA, 40 bp, Artificial Sequence
  Description of Artificial Sequence: Synthetic primer
gcatttgtacagtaattggtgtgacagtgttctttgtgtg

SEQ ID NO: 14070 - DNA, 40 bp, Artificial Sequence
  Description of Artificial Sequence: Synthetic primer
tgaagctggtgggctgcaaatccaagaaggggctgtcctc

SEQ ID NO: 14071 - DNA, 40 bp, Artificial Sequence
  Description of Artificial Sequence: Synthetic primer
tcctctttactaggatcttctgccccacctctcaatgaac

SEQ ID NO: 14072 - DNA, 40 bp, Artificial Sequence
  Description of Artificial Sequence: Synthetic primer
tagactgtttgcagcatacaatgaaggaattattaatttg

SEQ ID NO: 14073 - DNA, 40 bp, Artificial Sequence
  Description of Artificial Sequence: Synthetic primer
cttgaatttctccgaatgtcaaggttccctcccactctat

SEQ ID NO: 14074 - DNA, 40 bp, Artificial Sequence
  Description of Artificial Sequence: Synthetic primer
tttgcaagtcttcctcttagttatcaaatgctctcctctg

SEQ ID NO: 14075 - DNA, 40 bp, Artificial Sequence
  Description of Artificial Sequence: Synthetic primer
acattcataatgcatatcattatgtctatgttccataacg

SEQ ID NO: 14076 - DNA, 40 bp, Artificial Sequence
  Description of Artificial Sequence: Synthetic primer
tgtggattttctcttgcaaatctggaggtgtgatccaagg

SEQ ID NO: 14077 - DNA, 40 bp, Artificial Sequence
  Description of Artificial Sequence: Synthetic primer
cttgtagcaggttgtcttgaatgtcttcaatgggcttcac

SEQ ID NO: 14078 - DNA, 40 bp, Artificial Sequence
  Description of Artificial Sequence: Synthetic primer
gcgctacagtctatgtatctcatggttattttccactcac

SEQ ID NO: 14079 - DNA, 40 bp, Artificial Sequence
  Description of Artificial Sequence: Synthetic primer
ctgggccccaccacggccacgccaggcaaagcgccagcag

SEQ ID NO: 14080 - DNA, 40 bp, Artificial Sequence
  Description of Artificial Sequence: Synthetic primer
aggaaattcgtggcccggaagaaatacgttcaaatgagag

SEQ ID NO: 14081 - DNA, 40 bp, Artificial Sequence
  Description of Artificial Sequence: Synthetic primer
ccccaatataagacatgttggaaatatgagaaaggacttc

SEQ ID NO: 14082 - DNA, 40 bp, Artificial Sequence
  Description of Artificial Sequence: Synthetic primer
agatgggttctgggtctccacagttgccagacttttctcc

SEQ ID NO: 14083 - DNA, 40 bp, Artificial Sequence
  Description of Artificial Sequence: Synthetic primer
taaacagtgccaacaatagtctgaatagttcaagctattc

SEQ ID NO: 14084 - DNA, 40 bp, Artificial Sequence
  Description of Artificial Sequence: Synthetic primer
cctggctttgtgcactcagatggcaccatcagccatcatg

SEQ ID NO: 14085 - DNA, 40 bp, Artificial Sequence
  Description of Artificial Sequence: Synthetic primer
gaagcataaggtcttgctgcggaggctcctggccaccttc

SEQ ID NO: 14086 - DNA, 40 bp, Artificial Sequence
  Description of Artificial Sequence: Synthetic primer
atcggacacctaccaggtggacggcacggacgacagaagc

SEQ ID NO: 14087 - DNA, 40 bp, Artificial Sequence
  Description of Artificial Sequence: Synthetic primer
tgtgtgggatgactcagacaccgacagccgcttccgtaat

SEQ ID NO: 14088 - DNA, 40 bp, Artificial Sequence
  Description of Artificial Sequence: Synthetic primer
acgcagaggagcggatctccctttggcaggcgaggcacgc

SEQ ID NO: 14089 - DNA, 40 bp, Artificial Sequence
  Description of Artificial Sequence: Synthetic primer
ggacatcggggcagctgacctcgcccacgcccagcagcag

SEQ ID NO: 14090 - DNA, 40 bp, Artificial Sequence
  Description of Artificial Sequence: Synthetic primer
tgctccgacttttgccaagatgacctggcagatgatgaca

SEQ ID NO: 14091 - DNA, 40 bp, Artificial Sequence
  Description of Artificial Sequence: Synthetic primer
agttgagctgctgtagaatggaatgtcttcttcaccatag

SEQ ID NO: 14092 - DNA, 40 bp, Artificial Sequence
  Description of Artificial Sequence: Synthetic primer
attgaacaatgatcttttgcagggcatgtgtgtttgtatg

SEQ ID NO: 14093 - DNA, 40 bp, Artificial Sequence
  Description of Artificial Sequence: Synthetic primer
ttactgtccctctctggagggtcctttaatggggactgtg

SEQ ID NO: 14094 - DNA, 40 bp, Artificial Sequence
  Description of Artificial Sequence: Synthetic primer
tgaaagattgtctcaaaatccccgcaaatgccgtccaatg

SEQ ID NO: 14095 - DNA, 40 bp, Artificial Sequence
  Description of Artificial Sequence: Synthetic primer
gttgtaaaataatttgactaaataaatggttccttctctc

SEQ ID NO: 14096 - DNA, 40 bp, Artificial Sequence
  Description of Artificial Sequence: Synthetic primer
accccttctttttcctgcttttcaggtccattactttgag

SEQ ID NO: 14097 - DNA, 40 bp, Artificial Sequence
  Description of Artificial Sequence: Synthetic primer
atcgaatcagaaagaggggcaacaggaaatcaagcacttc

SEQ ID NO: 14098 - DNA, 40 bp, Artificial Sequence
  Description of Artificial Sequence: Synthetic primer
agtggaatgcagcctgtaacttccaccattcctgccgtgt

SEQ ID NO: 14099 - DNA, 40 bp, Artificial Sequence
  Description of Artificial Sequence: Synthetic primer
cagatccttgtaggccagcaccagggtcctcagcccttcc

SEQ ID NO: 14100 - DNA, 40 bp, Artificial Sequence
  Description of Artificial Sequence: Synthetic primer
attttttgctggggataaaaaagaagcacacaaactaaag

SEQ ID NO: 14101 - DNA, 40 bp, Artificial Sequence
  Description of Artificial Sequence: Synthetic primer
gaaatgaaaagccaacgcagagtgtatcatctcctgaagc

SEQ ID NO: 14102 - DNA, 40 bp, Artificial Sequence; identical to SEQ ID NO: 10742
  Description of Artificial Sequence: Synthetic primer

SEQ ID NO: 14103 - DNA, 40 bp, Artificial Sequence
  Description of Artificial Sequence: Synthetic primer
tgtgacagccttgggtctactaataataggagtggtgaac

SEQ ID NO: 14104 - DNA, 40 bp, Artificial Sequence
  Description of Artificial Sequence: Synthetic primer
acgagtgcaagcaccacgtggagacgcgctggcactgcac

SEQ ID NO: 14105 - DNA, 40 bp, Artificial Sequence
  Description of Artificial Sequence: Synthetic primer
ggcctcgcgtccgcccattcagcggagacctgcggagagg

SEQ ID NO: 14106 - DNA, 40 bp, Artificial Sequence
  Description of Artificial Sequence: Synthetic primer
gaagaattagctggaaattctgagacactaaaagaacctg

SEQ ID NO: 14107 - DNA, 40 bp, Artificial Sequence
  Description of Artificial Sequence: Synthetic primer
ctccaagttcccgtggcccttggccgtggccctgaccatc

SEQ ID NO: 14108 - DNA, 40 bp, Artificial Sequence
  Description of Artificial Sequence: Synthetic primer
ggtttgctaattctgcccactttggtgcaggaagctgatg

SEQ ID NO: 14109 - DNA, 40 bp, Artificial Sequence
  Description of Artificial Sequence: Synthetic primer
gcgctgctctacagcctcagccagccgctggcctctctcg

SEQ ID NO: 14110 - DNA, 40 bp, Artificial Sequence
  Description of Artificial Sequence: Synthetic primer
tttttttgataaaaagataataaaacctggtactttctaa

SEQ ID NO: 14111 - DNA, 40 bp, Artificial Sequence
  Description of Artificial Sequence: Synthetic primer
agtgcttccagatgtggtctcccgtgtggggcccagcaat

SEQ ID NO: 14112 - DNA, 40 bp, Artificial Sequence
  Description of Artificial Sequence: Synthetic primer
ctttccttgcatattctggaatcccagcagtttctttctg

SEQ ID NO: 14113 - DNA, 40 bp, Artificial Sequence
  Description of Artificial Sequence: Synthetic primer
ggcaagccctatagaccttgggggacggagatcggagctt

SEQ ID NO: 14114 - DNA, 40 bp, Artificial Sequence
  Description of Artificial Sequence: Synthetic primer
gatgctgacaaaccggttggcagaggaggcgcctgtcgtt

SEQ ID NO: 14115 - DNA, 40 bp, Artificial Sequence
  Description of Artificial Sequence: Synthetic primer
caagctgttccactgtcctgcacccccacggcatgggtca

SEQ ID NO: 14116 - DNA, 40 bp, Artificial Sequence
  Description of Artificial Sequence: Synthetic primer
aagactggaagtccaaagagatgaaagtccggcagagagc

SEQ ID NO: 14117 - DNA, 40 bp, Artificial Sequence
  Description of Artificial Sequence: Synthetic primer
ctgtccttgtccagggccttgtcatagcaggcacccaagc

SEQ ID NO: 14118 - DNA, 40 bp, Artificial Sequence
  Description of Artificial Sequence: Synthetic primer
tttttaatgaaacaactctacaatattgctggcagatagg

SEQ ID NO: 14119 - DNA, 40 bp, Artificial Sequence
  Description of Artificial Sequence: Synthetic primer
tagaaaacacttcctcctctcctgagtctgtgaagtcctc

SEQ ID NO: 14120 - DNA, 40 bp, Artificial Sequence
  Description of Artificial Sequence: Synthetic primer
tggggaaccagcattcctcgtccagcagggccagcacacc

SEQ ID NO: 14121 - DNA, 40 bp, Artificial Sequence
  Description of Artificial Sequence: Synthetic primer
ttcccccttcttttttgggtcttcatttttttccccattg

SEQ ID NO: 14122 - DNA, 40 bp, Artificial Sequence
  Description of Artificial Sequence: Synthetic primer
tcatgagatcattagcctgtgaatgtgtccatgttttgac

SEQ ID NO: 14123 - DNA, 40 bp, Artificial Sequence
  Description of Artificial Sequence: Synthetic primer
gatcttaattcccatctctatacttctcctttggacatgg

SEQ ID NO: 14124 - DNA, 40 bp, Artificial Sequence
  Description of Artificial Sequence: Synthetic primer
tttcaagttgcttcttaacagacaaaagttcagctttgag

SEQ ID NO: 14125 - DNA, 40 bp, Artificial Sequence
  Description of Artificial Sequence: Synthetic primer
aacttgagaggctccatatcgagagactgaactactcttc

SEQ ID NO: 14126 - DNA, 40 bp, Artificial Sequence
  Description of Artificial Sequence: Synthetic primer
actgtttcctgatatctggggacaagtaaaaagcattttc

SEQ ID NO: 14127 - DNA, 40 bp, Artificial Sequence
  Description of Artificial Sequence: Synthetic primer
aaatcttgtgtacacagcacaaatcaaagaggtcattttt

SEQ ID NO: 14128 - DNA, 40 bp, Artificial Sequence
  Description of Artificial Sequence: Synthetic primer
ccaggacgatgcctacgatcatcagggctcgcactgcctg

SEQ ID NO: 14129 - DNA, 40 bp, Artificial Sequence
  Description of Artificial Sequence: Synthetic primer
gacaccctctctggtccaccagcccagactcaccccacta

SEQ ID NO: 14130 - DNA, 40 bp, Artificial Sequence
  Description of Artificial Sequence: Synthetic primer
ttgtttccattagagcaggtgctcacagcattctgattgg

SEQ ID NO: 14131 - DNA, 40 bp, Artificial Sequence
  Description of Artificial Sequence: Synthetic primer
aagagcccttctacctggctctatctcactggctgcattc

SEQ ID NO: 14132 - DNA, 40 bp, Artificial Sequence
  Description of Artificial Sequence: Synthetic primer
caacttgagtttttaaaaaacctagttagtcctacattcc

SEQ ID NO: 14133 - DNA, 40 bp, Artificial Sequence
  Description of Artificial Sequence: Synthetic primer
ttgctgccgccgtgactggttttctgtccccaagaacgtg

SEQ ID NO: 14134 - DNA, 40 bp, Artificial Sequence
  Description of Artificial Sequence: Synthetic primer
aagcgtgtcttcgataccaagtgtcttccttgtgtggaac

SEQ ID NO: 14135 - DNA, 40 bp, Artificial Sequence
  Description of Artificial Sequence: Synthetic primer
agaatttgaaagccaatgataatacctgattaggactgaa

SEQ ID NO: 14136 - DNA, 40 bp, Artificial Sequence
  Description of Artificial Sequence: Synthetic primer
taattctttcactgcatccctttgggaagcctggcccttg

SEQ ID NO: 14137 - DNA, 40 bp, Artificial Sequence
  Description of Artificial Sequence: Synthetic primer
caagaaatgttgccctggttcacctgatattgacaaactg

SEQ ID NO: 14138 - DNA, 40 bp, Artificial Sequence
  Description of Artificial Sequence: Synthetic primer
tgcactcagacctgtgtaatatatgctcctggaaaccatc

SEQ ID NO: 14139 - DNA, 40 bp, Artificial Sequence
  Description of Artificial Sequence: Synthetic primer
tgctgtagttttggttttgttggtgtcttcactgtatatg

SEQ ID NO: 14140 - DNA, 40 bp, Artificial Sequence
  Description of Artificial Sequence: Synthetic primer
tggggacctgacaggccacagtgacttccatctcttcaaa

SEQ ID NO: 14141 - DNA, 40 bp, Artificial Sequence
  Description of Artificial Sequence: Synthetic primer
tgtagttgtcagccaaatgttgcatcagggctggcagatg

SEQ ID NO: 14142 - DNA, 40 bp, Artificial Sequence
  Description of Artificial Sequence: Synthetic primer
ttcttgtttctgtctaaatgactcacgcatcaactctgtc

SEQ ID NO: 14143 - DNA, 40 bp, Artificial Sequence
  Description of Artificial Sequence: Synthetic primer
ccaccgagcgaggtgatagaggcggcggcccaggcgtctg

SEQ ID NO: 14144 - DNA, 40 bp, Artificial Sequence
  Description of Artificial Sequence: Synthetic primer
tcagtattcctcgtacaacgactcctggaggttccccaac

SEQ ID NO: 14145 - DNA, 40 bp, Artificial Sequence
  Description of Artificial Sequence: Synthetic primer
ttggtgcattaattctgaaagcctcagatgataaataatg

SEQ ID NO: 14146 - DNA, 40 bp, Artificial Sequence
  Description of Artificial Sequence: Synthetic primer
atttcagccagctcctcccatcacagatgacagctccaag

SEQ ID NO: 14147 - DNA, 40 bp, Artificial Sequence
  Description of Artificial Sequence: Synthetic primer
gttcttttgtaccaagacagaaactacagatggggattgg

SEQ ID NO: 14148 - DNA, 40 bp, Artificial Sequence
  Description of Artificial Sequence: Synthetic primer
tgcgcgcgtaggcgtgctcggagcagtcctgcactgcgcc

SEQ ID NO: 14149 - DNA, 40 bp, Artificial Sequence
  Description of Artificial Sequence: Synthetic primer
atcctccttggcctgcatctcctcctcctgccgtgtcacc

SEQ ID NO: 14150 - DNA, 40 bp, Artificial Sequence
  Description of Artificial Sequence: Synthetic primer
gaaagttagagcagcttaggaaagtcccgaaaataccaag

SEQ ID NO: 14151 - DNA, 40 bp, Artificial Sequence
  Description of Artificial Sequence: Synthetic primer
ctgccggggagtggtcactgctgcaggatgactgggcccc

SEQ ID NO: 14152 - DNA, 40 bp, Artificial Sequence
  Description of Artificial Sequence: Synthetic primer
gtataatccgaagagcaagatttagtccagaatatggaag

SEQ ID NO: 14153 - DNA, 40 bp, Artificial Sequence
  Description of Artificial Sequence: Synthetic primer
aggaatataagtagttgcatgaataaggggttcatctacg

SEQ ID NO: 14154 - DNA, 40 bp, Artificial Sequence
  Description of Artificial Sequence: Synthetic primer
aacttctgactggggctacatgactcctcctgaagaaata

SEQ ID NO: 14155 - DNA, 40 bp, Artificial Sequence
  Description of Artificial Sequence: Synthetic primer
gtgcttcaccagatgcacatccttacagatctgctggaaa

SEQ ID NO: 14156 - DNA, 40 bp, Artificial Sequence
  Description of Artificial Sequence: Synthetic primer
agcttcttcaaggaggtgcccactgtaggcaggatattcc

SEQ ID NO: 14157 - DNA, 40 bp, Artificial Sequence
  Description of Artificial Sequence: Synthetic primer
ggcacaccggagtgaaggcggagggtgcaaatggcaggtg

SEQ ID NO: 14158 - DNA, 40 bp, Artificial Sequence
  Description of Artificial Sequence: Synthetic primer
atggagggcagcgcggggaactggcgcgggtcgctgaacg

SEQ ID NO: 14159 - DNA, 40 bp, Artificial Sequence
  Description of Artificial Sequence: Synthetic primer
agaaaggagatttgacatatcctcttctcttgctggttta

SEQ ID NO: 14160 - DNA, 40 bp, Artificial Sequence
  Description of Artificial Sequence: Synthetic primer
ctcttgatcttattgtagaaagtagaatccaccatcatgc

SEQ ID NO: 14161 - DNA, 40 bp, Artificial Sequence
  Description of Artificial Sequence: Synthetic primer
taccttatttcaaacaaatgtgatgaaagggaggaaatac

SEQ ID NO: 14162 - DNA, 40 bp, Artificial Sequence
  Description of Artificial Sequence: Synthetic primer
ccagtcccatgtccactgtctatttattgcattcccttgc

SEQ ID NO: 14163 - DNA, 40 bp, Artificial Sequence
  Description of Artificial Sequence: Synthetic primer
ggaataaatcatagtacataataatagaagatttaataag

SEQ ID NO: 14164 - DNA, 40 bp, Artificial Sequence
  Description of Artificial Sequence: Synthetic primer
gtgcttcttccttatacacttcatagcaaaagcaacattc

SEQ ID NO: 14165 - DNA, 40 bp, Artificial Sequence
  Description of Artificial Sequence: Synthetic primer
tagtcgctgcttgatcgcttgcccttctggcgccggttac

SEQ ID NO: 14166 - DNA, 40 bp, Artificial Sequence
  Description of Artificial Sequence: Synthetic primer
aggcatcgcatcttgtttagatatgctggtcctgaagatg

SEQ ID NO: 14167 - DNA, 40 bp, Artificial Sequence
  Description of Artificial Sequence: Synthetic primer
gcagtaaatcagggtagggtacctgctccacgatcacagc

SEQ ID NO: 14168 - DNA, 40 bp, Artificial Sequence
  Description of Artificial Sequence: Synthetic primer
tagccactatccatggacttctgggtcctcttcaggtttg

SEQ ID NO: 14169 - DNA, 40 bp, Artificial Sequence
  Description of Artificial Sequence: Synthetic primer
tctgcccccttctctcctcccagggcctccctctcaatcc

SEQ ID NO: 14170 - DNA, 40 bp, Artificial Sequence
  Description of Artificial Sequence: Synthetic primer
tcactgctttcttcttgagtcaaagactgcactgcctgta

SEQ ID NO: 14171 - DNA, 40 bp, Artificial Sequence
  Description of Artificial Sequence: Synthetic primer
ttggcagcctcaacagcaaaggcagcctcggaaaagacac

SEQ ID NO: 14172 - DNA, 40 bp, Artificial Sequence
  Description of Artificial Sequence: Synthetic primer
tcatcagaataaaagtggtccttttccgatccacagcttc

SEQ ID NO: 14173 - DNA, 40 bp, Artificial Sequence
  Description of Artificial Sequence: Synthetic primer
tggcaaagggttttctctgtaggtcttgtgtcagtttgag

SEQ ID NO: 14174 - DNA, 40 bp, Artificial Sequence
  Description of Artificial Sequence: Synthetic primer
tcaataaggaagtgcataagtctggctacctggccggaga

SEQ ID NO: 14175 - DNA, 40 bp, Artificial Sequence
  Description of Artificial Sequence: Synthetic primer
atcctgcgggaccacccgggcttcggcgagggccgcctgc

SEQ ID NO: 14176 - DNA, 40 bp, Artificial Sequence
  Description of Artificial Sequence: Synthetic primer
gctttccagaaagggtactgttgcaggcaggacagatagc

SEQ ID NO: 14177 - DNA, 40 bp, Artificial Sequence
  Description of Artificial Sequence: Synthetic primer
tttccctgcttgatgttgcaaagcccttggcaaccagggg

SEQ ID NO: 14178 - DNA, 40 bp, Artificial Sequence
  Description of Artificial Sequence: Synthetic primer
cacaaagcaaaaggctgattcccttaagctgtcttgtttc

SEQ ID NO: 14179 - DNA, 40 bp, Artificial Sequence
  Description of Artificial Sequence: Synthetic primer
aaattctgctgctgtaatcacctctgttagctcttccata

SEQ ID NO: 14180 - DNA, 40 bp, Artificial Sequence
  Description of Artificial Sequence: Synthetic primer
tttctctcaaactccctgcgctccgaatctcccagtgtcc

SEQ ID NO: 14181 - DNA, 40 bp, Artificial Sequence
  Description of Artificial Sequence: Synthetic primer
cagcttgatctccacctggctagtctgggtccccacccac

SEQ ID NO: 14182 - DNA, 40 bp, Artificial Sequence
  Description of Artificial Sequence: Synthetic primer
tgggccggctgttcacaggctctccgggcggggtgatgtc

SEQ ID NO: 14183 - DNA, 40 bp, Artificial Sequence
  Description of Artificial Sequence: Synthetic primer
atatttcacattatgagaaatatacgatcaaagataagag

SEQ ID NO: 14184 - DNA, 40 bp, Artificial Sequence
  Description of Artificial Sequence: Synthetic primer
gctgtggctccctcagccagctgtgaggtcccacggcctc

SEQ ID NO: 14185 - DNA, 40 bp, Artificial Sequence
  Description of Artificial Sequence: Synthetic primer
ttgcaatgttgtgtaaaccactggtgattgttggtgaaag

SEQ ID NO: 14186 - DNA, 40 bp, Artificial Sequence
  Description of Artificial Sequence: Synthetic primer
ttttatttgtttttaccttagaaatcaattatatacagtc

SEQ ID NO: 14187 - DNA, 40 bp, Artificial Sequence
  Description of Artificial Sequence: Synthetic primer
tagcactgggcactgagccaggagtcggggtgggagtctg

SEQ ID NO: 14188 - DNA, 40 bp, Artificial Sequence
  Description of Artificial Sequence: Synthetic primer
gtcagccactactttatgacgtctgaggcacacccctttc

SEQ ID NO: 14189 - DNA, 40 bp, Artificial Sequence
  Description of Artificial Sequence: Synthetic primer
tctgactctaaaatatggaaaataaaatatttacagaaag

SEQ ID NO: 14190 - DNA, 40 bp, Artificial Sequence
  Description of Artificial Sequence: Synthetic primer
gctgcagtccagactggccaccctcaagatagagaatgag

SEQ ID NO: 14191 - DNA, 40 bp, Artificial Sequence
  Description of Artificial Sequence: Synthetic primer
acccgcagcagaaagctcaccacactcgtctgccccgtga

SEQ ID NO: 14192 - DNA, 40 bp, Artificial Sequence
  Description of Artificial Sequence: Synthetic primer
ttcttctgggccgtgctgcgctctgtggccagctcgttgc

SEQ ID NO: 14193 - DNA, 40 bp, Artificial Sequence
  Description of Artificial Sequence: Synthetic primer
catgtcagttccttctggcttcaggccctcaattatttcc

SEQ ID NO: 14194 - DNA, 40 bp, Artificial Sequence
  Description of Artificial Sequence: Synthetic primer
ccctggtgtctcccccaagaccccaaataaagcaatacac

SEQ ID NO: 14195 - DNA, 40 bp, Artificial Sequence
  Description of Artificial Sequence: Synthetic primer
ttgaactccgagaggaggtggaccagaacttttggaacta

SEQ ID NO: 14196 - DNA, 40 bp, Artificial Sequence
  Description of Artificial Sequence: Synthetic primer
cagaactgctttcactatcgctgccatcacttaagctaac

SEQ ID NO: 14197 - DNA, 40 bp, Artificial Sequence
  Description of Artificial Sequence: Synthetic primer
tggccgcagggtgatatacaagtatggcaaactgtcaaag

SEQ ID NO: 14198 - DNA, 40 bp, Artificial Sequence
  Description of Artificial Sequence: Synthetic primer
caccactgtcactcgagcgtggtttttggctgcagctctc

SEQ ID NO: 14199 - DNA, 40 bp, Artificial Sequence
  Description of Artificial Sequence: Synthetic primer
agtagtaggatcaccttcttataataggatcaccttcttg

SEQ ID NO: 14200 - DNA, 40 bp, Artificial Sequence
  Description of Artificial Sequence: Synthetic primer
catttctcagcagaaatatccaatctggagtgtatccaac

SEQ ID NO: 14201 - DNA, 40 bp, Artificial Sequence
  Description of Artificial Sequence: Synthetic primer
aataaggacaagcctgtcattcctgctgctgccctagctg

SEQ ID NO: 14202 - DNA, 40 bp, Artificial Sequence
  Description of Artificial Sequence: Synthetic primer
gttgtttaagcacttcagccagagggcagaggttttacag

SEQ ID NO: 14203 - DNA, 40 bp, Artificial Sequence
  Description of Artificial Sequence: Synthetic primer
gaaaaatatttctgagcactcattagccctatatggaaac

SEQ ID NO: 14204 - DNA, 40 bp, Artificial Sequence
  Description of Artificial Sequence: Synthetic primer
cttgctctgctccataaagatccatcagtcaccctcaaac

SEQ ID NO: 14205 - DNA, 40 bp, Artificial Sequence
  Description of Artificial Sequence: Synthetic primer
ggtggacatgacccccatctatgggctaaccatgaagcat

SEQ ID NO: 14206 - DNA, 40 bp, Artificial Sequence
  Description of Artificial Sequence: Synthetic primer
attcagaattgcccggattctctccaaggagtcagcttgc

SEQ ID NO: 14207 - DNA, 40 bp, Artificial Sequence
  Description of Artificial Sequence: Synthetic primer
aggatgcagaaggagatcactgccctggcacccagcacaa

SEQ ID NO: 14208 - DNA, 40 bp, Artificial Sequence
  Description of Artificial Sequence: Synthetic primer
gcacttggacgccagtgagtttcctcggaagatggtgttg

SEQ ID NO: 14209 - DNA, 40 bp, Artificial Sequence
  Description of Artificial Sequence: Synthetic primer
tgataacttgaggtgtcatcatagccactgacacgggaac

SEQ ID NO: 14210 - DNA, 40 bp, Artificial Sequence
  Description of Artificial Sequence: Synthetic primer
ggaagacttcataaagcaaagcagcgaagattcgagtcac

SEQ ID NO: 14211 - DNA, 40 bp, Artificial Sequence
  Description of Artificial Sequence: Synthetic primer
agaaacaaaacatactaaccagcaaaatccccaaatcatc

SEQ ID NO: 14212 - DNA, 40 bp, Artificial Sequence
  Description of Artificial Sequence: Synthetic primer
gaagaggaagagagtttctcatcagaacaggaaggcagtg

SEQ ID NO: 14213 - DNA, 40 bp, Artificial Sequence
  Description of Artificial Sequence: Synthetic primer
taattaacttgtattgtagggtaaccattgtccttaaatg

SEQ ID NO: 14214 - DNA, 40 bp, Artificial Sequence
  Description of Artificial Sequence: Synthetic primer
gcggcggaggggctggcggagagtcacagagggcaaatag

SEQ ID NO: 14215 - DNA, 40 bp, Artificial Sequence
  Description of Artificial Sequence: Synthetic primer
cgactcgcagcctgggttttatggctgggcaggctcgaat

SEQ ID NO: 14216 - DNA, 40 bp, Artificial Sequence
  Description of Artificial Sequence: Synthetic primer
acagacacgattacatagcctctgcccaagcgcgtctcag

SEQ ID NO: 14217 - DNA, 40 bp, Artificial Sequence
  Description of Artificial Sequence: Synthetic primer
ccaccagtcacctgctctgctgtgtgtccgtggttgttgg

SEQ ID NO: 14218 - DNA, 40 bp, Artificial Sequence
  Description of Artificial Sequence: Synthetic primer
ccttcaagaatattttgagttgattgatcatcattttgag

SEQ ID NO: 14219 - DNA, 40 bp, Artificial Sequence
  Description of Artificial Sequence: Synthetic primer
ctggagcaccaggctgcaggtggcctcctggccctgctgg

SEQ ID NO: 14220 - DNA, 40 bp, Artificial Sequence
  Description of Artificial Sequence: Synthetic primer
aattctaagccagactgctggagatcaccctgttctagtg

SEQ ID NO: 14221 - DNA, 40 bp, Artificial Sequence
  Description of Artificial Sequence: Synthetic primer
gatctctgtgcagggcggtggtgggaatacatgccaagtg

SEQ ID NO: 14222 - DNA, 40 bp, Artificial Sequence
  Description of Artificial Sequence: Synthetic primer
ttaaaatttgtttcaactcctcctgcaaataaaataaatg

SEQ ID NO: 14223 - DNA, 40 bp, Artificial Sequence
  Description of Artificial Sequence: Synthetic primer
taaggtgacaaaggccttgagctgcttctgtacttcacac

SEQ ID NO: 14224 - DNA, 40 bp, Artificial Sequence
  Description of Artificial Sequence: Synthetic primer
cctcttcttacaatctagtgcctctccatcttcagtcttg

SEQ ID NO: 14225 - DNA, 40 bp, Artificial Sequence
  Description of Artificial Sequence: Synthetic primer
attcagaatcaaagcaatgatgatatcaatcccattagac

SEQ ID NO: 14226 - DNA, 40 bp, Artificial Sequence
  Description of Artificial Sequence: Synthetic primer
gggactgttgtaatttctcatatggtgctggaaatggttg

SEQ ID NO: 14227 - DNA, 40 bp, Artificial Sequence
  Description of Artificial Sequence: Synthetic primer
acactgacactgccttgacaactttggaggaggcccttgc

SEQ ID NO: 14228 - DNA, 40 bp, Artificial Sequence
  Description of Artificial Sequence: Synthetic primer
ttcatcatcttcttccacaatagggccaccttgtgcattc

SEQ ID NO: 14229 - DNA, 40 bp, Artificial Sequence
  Description of Artificial Sequence: Synthetic primer
tggtggaggcggaggggctttgggatctgctgaagagcta

SEQ ID NO: 14230 - DNA, 40 bp, Artificial Sequence
  Description of Artificial Sequence: Synthetic primer
caaatgacagttcaagcccagccacagattgccacattag

SEQ ID NO: 14231 - DNA, 40 bp, Artificial Sequence
  Description of Artificial Sequence: Synthetic primer
cagctgtttaatttttcatttctacaactacgttttaatc

SEQ ID NO: 14232 - DNA, 40 bp, Artificial Sequence
  Description of Artificial Sequence: Synthetic primer
cgacttcatctgttcctcttaactacggtgtttcccttac

SEQ ID NO: 14233 - DNA, 40 bp, Artificial Sequence
  Description of Artificial Sequence: Synthetic primer
ggaccaaaggacgcagcccacggcgttgcacagctcaatg

SEQ ID NO: 14234 - DNA, 40 bp, Artificial Sequence
  Description of Artificial Sequence: Synthetic primer
ttcgtcctcggggagaagagaccccaagagtgttgagcag

SEQ ID NO: 14235 - DNA, 40 bp, Artificial Sequence
  Description of Artificial Sequence: Synthetic primer
ggacagtgatggccgaccagactgggaagtagctgcagag

SEQ ID NO: 14236 - DNA, 40 bp, Artificial Sequence
  Description of Artificial Sequence: Synthetic primer
ccaagggtactttgcgtcctttgccaaagcctacgaaacg

SEQ ID NO: 14237 - DNA, 40 bp, Artificial Sequence
  Description of Artificial Sequence: Synthetic primer
tggtagggcagggtagcaccaacagatttcccagcccttg

SEQ ID NO: 14238 - DNA, 40 bp, Artificial Sequence
  Description of Artificial Sequence: Synthetic primer
gttgaagaaaaggaaactagtgtttcaaaggaagataccg

SEQ ID NO: 14239 - DNA, 40 bp, Artificial Sequence
  Description of Artificial Sequence: Synthetic primer
aggccagctggccggatcccgccgtctgtcatggcggccc

SEQ ID NO: 14240 - DNA, 40 bp, Artificial Sequence
  Description of Artificial Sequence: Synthetic primer
ttggaacttcgttgcttgcttgcctgtgcgcgcgtgcgcg

SEQ ID NO: 14241 - DNA, 40 bp, Artificial Sequence
  Description of Artificial Sequence: Synthetic primer
aaaactgtcaggtgtctgaagaagatgggaggggagaacc

SEQ ID NO: 14242 - DNA, 40 bp, Artificial Sequence
  Description of Artificial Sequence: Synthetic primer
ttcatgaggagacttggtaatggatcacacgctcattgtc

SEQ ID NO: 14243 - DNA, 40 bp, Artificial Sequence
  Description of Artificial Sequence: Synthetic primer
aactgtaattaagtgtacaaaaagaactgcagatgattag

SEQ ID NO: 14244 - DNA, 40 bp, Artificial Sequence
  Description of Artificial Sequence: Synthetic primer
gagattatacgcctcacggaagttcaccacaatccaatag

SEQ ID NO: 14245 - DNA, 40 bp, Artificial Sequence
  Description of Artificial Sequence: Synthetic primer
tacttacacaactatggcatcgtgcaccgtgacctcaagc

SEQ ID NO: 14246 - DNA, 40 bp, Artificial Sequence
  Description of Artificial Sequence: Synthetic primer
ggggctcagcggcccccagctcgggttcttcccgtccttg

SEQ ID NO: 14247 - DNA, 40 bp, Artificial Sequence
  Description of Artificial Sequence: Synthetic primer
acaagtgcatacaacaagactgcaccaaggcctttgtttc

SEQ ID NO: 14248 - DNA, 40 bp, Artificial Sequence
  Description of Artificial Sequence: Synthetic primer
caacatcaaccaggtgaccctggggcggcggtccatcacc

SEQ ID NO: 14249 - DNA, 40 bp, Artificial Sequence
  Description of Artificial Sequence: Synthetic primer
aattcagcagacatactgtggctcactgactttcccaagg

SEQ ID NO: 14250 - DNA, 40 bp, Artificial Sequence
  Description of Artificial Sequence: Synthetic primer
ctgggcaaatcttttgaggacagaggtcaaagtaaactgc

SEQ ID NO: 14251 - DNA, 40 bp, Artificial Sequence
  Description of Artificial Sequence: Synthetic primer
gtaccgaggcacccagccaggcgcggcccgccgggctcac

SEQ ID NO: 14252 - DNA, 40 bp, Artificial Sequence
  Description of Artificial Sequence: Synthetic primer
aagctgaccacaggcagttacttctgagggcatcttggtc

SEQ ID NO: 14253 - DNA, 40 bp, Artificial Sequence
  Description of Artificial Sequence: Synthetic primer
taatgtttcatgtacccaagaagagaaattgtttgaagag

SEQ ID NO: 14254 - DNA, 40 bp, Artificial Sequence
  Description of Artificial Sequence: Synthetic primer
tcagatgacgaagagcacagatggcaggctcagtgatgtc

SEQ ID NO: 14255 - DNA, 40 bp, Artificial Sequence
  Description of Artificial Sequence: Synthetic primer
tcttgagcagtccagctgggatcaaggacaggaaaatctg

SEQ ID NO: 14256 - DNA, 40 bp, Artificial Sequence
  Description of Artificial Sequence: Synthetic primer
aacagcaaacagaattggacatggtaccaggaagagatgg

SEQ ID NO: 14257 - DNA, 40 bp, Artificial Sequence
  Description of Artificial Sequence: Synthetic primer
aaaaccaaattaagggagatcatgatgcagaaggatttgg

SEQ ID NO: 14258 - DNA, 40 bp, Artificial Sequence
  Description of Artificial Sequence: Synthetic primer
gattgcacccaccctgtagaagatggaatcatggatgctg

SEQ ID NO: 14259 - DNA, 40 bp, Artificial Sequence
  Description of Artificial Sequence: Synthetic primer
gggtccagcagcgggccgggtgcgatgcagccgggcgccg

SEQ ID NO: 14260 - DNA, 40 bp, Artificial Sequence
  Description of Artificial Sequence: Synthetic primer
aaatcattagagctccaaatgctgaggtgtagattgacag

SEQ ID NO: 14261 - DNA, 40 bp, Artificial Sequence
  Description of Artificial Sequence: Synthetic primer
caaaaataactctgagtttgatattcaagtatattttaaa

SEQ ID NO: 14262 - DNA, 40 bp, Artificial Sequence
  Description of Artificial Sequence: Synthetic primer
agaaagaaacaaaaacatctttcaatctcccgacaaaagc

SEQ ID NO: 14263 - DNA, 40 bp, Artificial Sequence
  Description of Artificial Sequence: Synthetic primer
tggacccatatgctcaaaggccttttgttcccaagacaca

SEQ ID NO: 14264 - DNA, 40 bp, Artificial Sequence
  Description of Artificial Sequence: Synthetic primer
gacagccccaaggccgggtgtgtgtgttccgccggagagg

SEQ ID NO: 14265 - DNA, 40 bp, Artificial Sequence
  Description of Artificial Sequence: Synthetic primer
agccttgaaatttttaaatccccaagacatgcacctacac

SEQ ID NO: 14266 - DNA, 40 bp, Artificial Sequence
  Description of Artificial Sequence: Synthetic primer
tgtcgctccactcgcgccactcccaattccttctaacttg

SEQ ID NO: 14267 - DNA, 40 bp, Artificial Sequence
  Description of Artificial Sequence: Synthetic primer
tttcctggattttaaacttttgttaaattgtgaaattatg

SEQ ID NO: 14268 - DNA, 40 bp, Artificial Sequence
  Description of Artificial Sequence: Synthetic primer
agagggtagaaaaatctgcccttcatttaaaaattgaatg

SEQ ID NO: 14269 - DNA, 40 bp, Artificial Sequence
  Description of Artificial Sequence: Synthetic primer
gtcccagcaactattgcagtaggcagtgatctgggagagg

SEQ ID NO: 14270 - DNA, 40 bp, Artificial Sequence
  Description of Artificial Sequence: Synthetic primer
ttcagagactactttgtcactcactgaccatgtctggttc

SEQ ID NO: 14271 - DNA, 40 bp, Artificial Sequence
  Description of Artificial Sequence: Synthetic primer
ggccacatcggcagggtcggagccctggccgccatactcg

SEQ ID NO: 14272 - DNA, 40 bp, Artificial Sequence
  Description of Artificial Sequence: Synthetic primer
atccaaaccacatatattttttacttttcaacttaaagag

SEQ ID NO: 14273 - DNA, 40 bp, Artificial Sequence
  Description of Artificial Sequence: Synthetic primer
atgaaaggtttctattcaatgaagaaatcggagtgggaag

SEQ ID NO: 14274 - DNA, 40 bp, Artificial Sequence
  Description of Artificial Sequence: Synthetic primer
acttggcatctggagtgacccaagggatgcagtatcaaag

SEQ ID NO: 14275 - DNA, 40 bp, Artificial Sequence
  Description of Artificial Sequence: Synthetic primer
gctgctgtgcgactcagtgaagtgggtgccctcgctgaag

SEQ ID NO: 14276 - DNA, 40 bp, Artificial Sequence
  Description of Artificial Sequence: Synthetic primer
gttggtacatcacaaacatcggacaatgcaacaaaatcac

SEQ ID NO: 14277 - DNA, 40 bp, Artificial Sequence
  Description of Artificial Sequence: Synthetic primer
gaattacaagaatcccaaactcaccaggatgctcacattt

SEQ ID NO: 14278 - DNA, 40 bp, Artificial Sequence
  Description of Artificial Sequence: Synthetic primer
acagtacataccctgggacacgtaagagtgaggccatcca

SEQ ID NO: 14279 - DNA, 40 bp, Artificial Sequence
  Description of Artificial Sequence: Synthetic primer
ggtgggggccaggtcaatgttgaggacgatgtggggattc

SEQ ID NO: 14280 - DNA, 40 bp, Artificial Sequence
  Description of Artificial Sequence: Synthetic primer
ggctgctgagctagactaaggaatgcatccaccgtcatca

SEQ ID NO: 14281 - DNA, 40 bp, Artificial Sequence
  Description of Artificial Sequence: Synthetic primer
ggaggtgggggagggccgctctgattcatccctccaggac

SEQ ID NO: 14282 - DNA, 40 bp, Artificial Sequence
  Description of Artificial Sequence: Synthetic primer
gggcgaagtaggagaaattggactggatggtctggatggt

SEQ ID NO: 14283 - DNA, 40 bp, Artificial Sequence
  Description of Artificial Sequence: Synthetic primer
agtgtgtagtcctgttgatgggatgtttccccgagttctt

SEQ ID NO: 14284 - DNA, 40 bp, Artificial Sequence
  Description of Artificial Sequence: Synthetic primer
aaatgtggttggttccatcctcctgccaatgagatttaca

SEQ ID NO: 14285 - DNA, 40 bp, Artificial Sequence
  Description of Artificial Sequence: Synthetic primer
atgccgcattggttactcttcaccacagactttagcagat

SEQ ID NO: 14286 - DNA, 40 bp, Artificial Sequence
  Description of Artificial Sequence: Synthetic primer
tccagctcactctcttcctgactatctcctccactgtctg

SEQ ID NO: 14287 - DNA, 40 bp, Artificial Sequence
  Description of Artificial Sequence: Synthetic primer
tattggggttcattcagcagacaaactccaagctgcttca

SEQ ID NO: 14288 - DNA, 40 bp, Artificial Sequence
  Description of Artificial Sequence: Synthetic primer
gtttttaggtgagtctgaaagctgtctagggatgtgtact

SEQ ID NO: 14289 - DNA, 40 bp, Artificial Sequence
  Description of Artificial Sequence: Synthetic primer
gggaggacctggaagccaggatcaacgccgagaacgaggt

SEQ ID NO: 14290 - DNA, 40 bp, Artificial Sequence
  Description of Artificial Sequence: Synthetic primer
atgatgagcagagctctgcggataaagagagacttgccag

SEQ ID NO: 14291 - DNA, 40 bp, Artificial Sequence
  Description of Artificial Sequence: Synthetic primer
acggtgcgcccggggcccctgagcccatcccgctcctagc

SEQ ID NO: 14292 - DNA, 40 bp, Artificial Sequence
  Description of Artificial Sequence: Synthetic primer
attactaatagcagtcaatttaaacaccaggaagcaatgg

SEQ ID NO: 14293 - DNA, 40 bp, Artificial Sequence
  Description of Artificial Sequence: Synthetic primer
tggccggcgtagtccagaccatcctatactgtgacttctt

SEQ ID NO: 14294 - DNA, 40 bp, Artificial Sequence
  Description of Artificial Sequence: Synthetic primer
gagcttcttccgctctaagtcctacttgaacaaacacatc

SEQ ID NO: 14295 - DNA, 40 bp, Artificial Sequence
  Description of Artificial Sequence: Synthetic primer
gctcatggatggacgggggcaggctgttcagcaggcaggt

SEQ ID NO: 14296 - DNA, 40 bp, Artificial Sequence
  Description of Artificial Sequence: Synthetic primer
agctgagagtttatgctgaaatggatttatagaatatttg

SEQ ID NO: 14297 - DNA, 40 bp, Artificial Sequence
  Description of Artificial Sequence: Synthetic primer
tgtgtacttgactgccctagacagtggtgactcttaggtt

SEQ ID NO: 14298 - DNA, 40 bp, Artificial Sequence
  Description of Artificial Sequence: Synthetic primer
tgtgcttcccagcttcactggttaatttgacctgaaccta

SEQ ID NO: 14299 - DNA, 40 bp, Artificial Sequence
  Description of Artificial Sequence: Synthetic primer
atccaagtggcacagtggtggccataggaacgcactcagg

SEQ ID NO: 14300 - DNA, 40 bp, Artificial Sequence
  Description of Artificial Sequence: Synthetic primer
aactgtcatactcttgctcatggagaataaaaatgtcatc

SEQ ID NO: 14301 - DNA, 40 bp, Artificial Sequence
  Description of Artificial Sequence: Synthetic primer
tcccacggatgacgatacagcccctgcttcagcctcttct

SEQ ID NO: 14302 - DNA, 40 bp, Artificial Sequence
  Description of Artificial Sequence: Synthetic primer
atcttgaggggtagggaggggctgagtgggatgcgggtag

SEQ ID NO: 14303 - DNA, 40 bp, Artificial Sequence
  Description of Artificial Sequence: Synthetic primer
gggaggtggaagcaggccgggtggccttccccctcaggat

SEQ ID NO: 14304 - DNA, 40 bp, Artificial Sequence
  Description of Artificial Sequence: Synthetic primer
gaaacataagtatctcgagcatttgtctcatcctttctgt

SEQ ID NO: 14305 - DNA, 40 bp, Artificial Sequence
  Description of Artificial Sequence: Synthetic primer
tccgtgtggcctagcagagggcctcgtaaaacagaaggat

SEQ ID NO: 14306 - DNA, 40 bp, Artificial Sequence
  Description of Artificial Sequence: Synthetic primer
gacctcatctcatttgcctggcagatctcacaggggatgc

SEQ ID NO: 14307 - DNA, 40 bp, Artificial Sequence
  Description of Artificial Sequence: Synthetic primer
atagttgtaatcttcttctggatgacagactcatcacaat

SEQ ID NO: 14308 - DNA, 40 bp, Artificial Sequence
  Description of Artificial Sequence: Synthetic primer
gcaacttgtgattggcggtgaccggatattcagttgcaca

SEQ ID NO: 14309 - DNA, 40 bp, Artificial Sequence
  Description of Artificial Sequence: Synthetic primer
accagttccctgagtgtgactcggacgaggatgaggactt

SEQ ID NO: 14310 - DNA, 40 bp, Artificial Sequence
  Description of Artificial Sequence: Synthetic primer
cttgcgcttcagtgggaggtcaggttccgactccacatcc

SEQ ID NO: 14311 - DNA, 40 bp, Artificial Sequence
  Description of Artificial Sequence: Synthetic primer
agctcagccagctagaggccatgatccgcttcctcaccag

SEQ ID NO: 14312 - DNA, 40 bp, Artificial Sequence
  Description of Artificial Sequence: Synthetic primer
ctgggaagctgccctgccccccactggggccattgtgagg

SEQ ID NO: 14313 - DNA, 40 bp, Artificial Sequence
  Description of Artificial Sequence: Synthetic primer
ggggtgaggactcagatgccaggaggatgtcctcattttt

SEQ ID NO: 14314 - DNA, 40 bp, Artificial Sequence
  Description of Artificial Sequence: Synthetic primer
gttctccacagcctgatggaagcccgttggaaccatgagc

SEQ ID NO: 14315 - DNA, 40 bp, Artificial Sequence
  Description of Artificial Sequence: Synthetic primer
ctcaacaagcagttccgcacggagatggaggaccttatga

SEQ ID NO: 14316 - DNA, 40 bp, Artificial Sequence
  Description of Artificial Sequence: Synthetic primer
ctggcagcagccagtccagcgggtggcccaacgatgtgga

SEQ ID NO: 14317 - DNA, 40 bp, Artificial Sequence
  Description of Artificial Sequence: Synthetic primer
tggtggaaaatggatgcaagtgattctaagtttgtggatt

SEQ ID NO: 14318 - DNA, 40 bp, Artificial Sequence
  Description of Artificial Sequence: Synthetic primer
ccatgaaataataattcagcttatttttaactgtgtggat

SEQ ID NO: 14319 - DNA, 40 bp, Artificial Sequence
  Description of Artificial Sequence: Synthetic primer
tgctaaaattcagattttcagaggatgagaaatagctggt

SEQ ID NO: 14320 - DNA, 40 bp, Artificial Sequence
  Description of Artificial Sequence: Synthetic primer
aggtgccctcggcctgagtcgggatggagctgcctgctgt

SEQ ID NO: 14321 - DNA, 40 bp, Artificial Sequence
  Description of Artificial Sequence: Synthetic primer
ttcatggctgctggagaaataaccccctctcatgtaggat

SEQ ID NO: 14322 - DNA, 40 bp, Artificial Sequence
  Description of Artificial Sequence: Synthetic primer
gaatggggggcccgatataggaactggggcctcggggatg

SEQ ID NO: 14323 - DNA, 40 bp, Artificial Sequence
  Description of Artificial Sequence: Synthetic primer
gagttcttttcccaggagctcacctttgtggtagcccatc

SEQ ID NO: 14324 - DNA, 40 bp, Artificial Sequence
  Description of Artificial Sequence: Synthetic primer
ccaggcaaggcactcggccaatccgcatctcagccctctc

SEQ ID NO: 14325 - DNA, 40 bp, Artificial Sequence
  Description of Artificial Sequence: Synthetic primer
gtatcctagaagttcaaggtattttccacgagaatcatcc

SEQ ID NO: 14326 - DNA, 40 bp, Artificial Sequence
  Description of Artificial Sequence: Synthetic primer
acctgggctccggccagcgcccaacagcgtggatgtcgat

SEQ ID NO: 14327 - DNA, 40 bp, Artificial Sequence
  Description of Artificial Sequence: Synthetic primer
cccagaaggccggggcggggtcagggggaggaaggcagtt

SEQ ID NO: 14328 - DNA, 40 bp, Artificial Sequence
  Description of Artificial Sequence: Synthetic primer
tggggggacctccaaaacatttgctggggatggacctcct

SEQ ID NO: 14329 - DNA, 40 bp, Artificial Sequence
  Description of Artificial Sequence: Synthetic primer
ctgtgcctatgtaataggctccaagcatcgactcccatcc

SEQ ID NO: 14330 - DNA, 40 bp, Artificial Sequence
  Description of Artificial Sequence: Synthetic primer
atctcaaagcacaatgtggatttggggaccaaaggtcagg

SEQ ID NO: 14331 - DNA, 40 bp, Artificial Sequence
  Description of Artificial Sequence: Synthetic primer
aacctgtggcgcaaatctatgtccatggggacagcttaaa

SEQ ID NO: 14332 - DNA, 40 bp, Artificial Sequence
  Description of Artificial Sequence: Synthetic primer
tgtggatttctatgttatgccagtggttaatgtggatggt

SEQ ID NO: 14333 - DNA, 40 bp, Artificial Sequence
  Description of Artificial Sequence: Synthetic primer
tgtccagctcatcctctgtccctttcagcttcttctgcat

SEQ ID NO: 14334 - DNA, 40 bp, Artificial Sequence
  Description of Artificial Sequence: Synthetic primer
gagcatgggctcagctcatcctccctctggccccttctcc

SEQ ID NO: 14335 - DNA, 40 bp, Artificial Sequence
  Description of Artificial Sequence: Synthetic primer
ctccaaagtgcagtcttttattttctcagttgcatcctaa

SEQ ID NO: 14336 - DNA, 40 bp, Artificial Sequence
  Description of Artificial Sequence: Synthetic primer
tcctgcagcaggccgtgcaggtcatcctggggctggagca

SEQ ID NO: 14337 - DNA, 40 bp, Artificial Sequence
  Description of Artificial Sequence: Synthetic primer
ttagtaaagaatatgttctagaaagtggaggtaactggat

SEQ ID NO: 14338 - DNA, 40 bp, Artificial Sequence
  Description of Artificial Sequence: Synthetic primer
aggggcagccgggatgcgctggtctcgggagccctggagt

SEQ ID NO: 14339 - DNA, 40 bp, Artificial Sequence
  Description of Artificial Sequence: Synthetic primer
ctgagtgcaaaggctctctgtcaaagccattttctttggt

SEQ ID NO: 14340 - DNA, 40 bp, Artificial Sequence
  Description of Artificial Sequence: Synthetic primer
ggtagtgcttttggagccaattattcctcacagcctctgg

SEQ ID NO: 14341 - DNA, 40 bp, Artificial Sequence
  Description of Artificial Sequence: Synthetic primer
agtgcgaccatcttttccagcagggccagaaggaccagca

SEQ ID NO: 14342 - DNA, 40 bp, Artificial Sequence
  Description of Artificial Sequence: Synthetic primer
agtcccatacagagagcacatggtcgttggagtcatccac

SEQ ID NO: 14343 - DNA, 40 bp, Artificial Sequence
  Description of Artificial Sequence: Synthetic primer
gcaggcgcctccggatgtgccgagcccagcctgccctggt

SEQ ID NO: 14344 - DNA, 40 bp, Artificial Sequence
  Description of Artificial Sequence: Synthetic primer
ctctccaggaagctgtcggcggcatcctcttggaggatga

SEQ ID NO: 14345 - DNA, 40 bp, Artificial Sequence
  Description of Artificial Sequence: Synthetic primer
cccgccgttggggccctgccctgaggacatgaagggatca

SEQ ID NO: 14346 - DNA, 40 bp, Artificial Sequence
  Description of Artificial Sequence: Synthetic primer
agcatttttcctactgccttttttgtgtgtgtgcttcatg

SEQ ID NO: 14347 - DNA, 40 bp, Artificial Sequence
  Description of Artificial Sequence: Synthetic primer
ggcccgggcttgcggcgcgcgtcggggctgagggctgctg

SEQ ID NO: 14348 - DNA, 40 bp, Artificial Sequence
  Description of Artificial Sequence: Synthetic primer
atttaaaaaagtactgaaagaccttaaaaaggaaaaaaag

SEQ ID NO: 14349 - DNA, 40 bp, Artificial Sequence
  Description of Artificial Sequence: Synthetic primer
gccctgtgctcagcagattaaatgagtgtgaaatcaagac

SEQ ID NO: 14350 - DNA, 40 bp, Artificial Sequence
  Description of Artificial Sequence: Synthetic primer
gggcacctgccaggaccgcgacaacgcctacctctgcttc

SEQ ID NO: 14351 - DNA, 40 bp, Artificial Sequence
  Description of Artificial Sequence: Synthetic primer
ggaaaccctggtgctgatggacagcctggtgctaaaggtg

SEQ ID NO: 14352 - DNA, 40 bp, Artificial Sequence
  Description of Artificial Sequence: Synthetic primer
gttcatcacttttccaaaagcacctgatcctagtaccttc

SEQ ID NO: 14353 - DNA, 40 bp, Artificial Sequence
  Description of Artificial Sequence: Synthetic primer
cacctgcttccactggcacagtgctgagcaaacccccatc

SEQ ID NO: 14354 - DNA, 40 bp, Artificial Sequence
  Description of Artificial Sequence: Synthetic primer
acaggaccttaaggagaaggaagatactattaaacagagg

SEQ ID NO: 14355 - DNA, 40 bp, Artificial Sequence
  Description of Artificial Sequence: Synthetic primer
cacagctcttgtgataaacccactcgttttagtttcttgc

SEQ ID NO: 14356 - DNA, 40 bp, Artificial Sequence
  Description of Artificial Sequence: Synthetic primer
ctgtcggaatccgaggcaatctcctttctccctccaaagc

SEQ ID NO: 14357 - DNA, 40 bp, Artificial Sequence
  Description of Artificial Sequence: Synthetic primer
caagttcctgcttcaagctctctagaacttccagctgttc

SEQ ID NO: 14358 - DNA, 40 bp, Artificial Sequence
  Description of Artificial Sequence: Synthetic primer
tcccctcatccgattccgttgtatcagtcactgacagtta

SEQ ID NO: 14359 - DNA, 40 bp, Artificial Sequence
  Description of Artificial Sequence: Synthetic primer
cactgagctgggatacagtcagatcttgtgtgaggtcatc

SEQ ID NO: 14360 - DNA, 40 bp, Artificial Sequence
  Description of Artificial Sequence: Synthetic primer
ttatttttttcatttggtatttctctcttgctatataaag

SEQ ID NO: 14361 - DNA, 40 bp, Artificial Sequence
  Description of Artificial Sequence: Synthetic primer
ctcttaagaataaatgccagccccaattactgccctgagc

SEQ ID NO: 14362 - DNA, 40 bp, Artificial Sequence
  Description of Artificial Sequence: Synthetic primer
ttccagagggactgctcacaggcagcaaaaagagcctatg

SEQ ID NO: 14363 - DNA, 40 bp, Artificial Sequence
  Description of Artificial Sequence: Synthetic primer
atcaacaagtcactttctgctcttggaaatgttatttctg

SEQ ID NO: 14364 - DNA, 40 bp, Artificial Sequence
  Description of Artificial Sequence: Synthetic primer
tgccttgcagcagagacacgttctgggagagagggttagg

SEQ ID NO: 14365 - DNA, 40 bp, Artificial Sequence
  Description of Artificial Sequence: Synthetic primer
cattttctgctttttcttttttgtagttctcaaaaatttc

SEQ ID NO: 14366 - DNA, 40 bp, Artificial Sequence
  Description of Artificial Sequence: Synthetic primer
ggctgcccgcagcccgctcgcggcgccgcgctcactcgac

SEQ ID NO: 14367 - DNA, 40 bp, Artificial Sequence
  Description of Artificial Sequence: Synthetic primer
aaaatgaaacccgataaaatcaggaacatgatataggaag

SEQ ID NO: 14368 - DNA, 40 bp, Artificial Sequence
  Description of Artificial Sequence: Synthetic primer
gctgtcattttgtgattttttataattacaaggaatttgg

SEQ ID NO: 14369 - DNA, 40 bp, Artificial Sequence
  Description of Artificial Sequence: Synthetic primer
tatatttttacaaactttctgttatagactctgatttttc

SEQ ID NO: 14370 - DNA, 40 bp, Artificial Sequence
  Description of Artificial Sequence: Synthetic primer
catgggaatacaaaaggtttgagattcctgtaaatgtgac

SEQ ID NO: 14371 - DNA, 40 bp, Artificial Sequence
  Description of Artificial Sequence: Synthetic primer
agaacttgaagtgcgaattctggtgcaagctcggccaggc

SEQ ID NO: 14372 - DNA, 40 bp, Artificial Sequence
  Description of Artificial Sequence: Synthetic primer
gctgcagatttaaaagcatttaaataatctttcacattgg

SEQ ID NO: 14373 - DNA, 40 bp, Artificial Sequence
  Description of Artificial Sequence: Synthetic primer
gcagcaggactctgagtgtacacatgggtgtggggtgaag

SEQ ID NO: 14374 - DNA, 40 bp, Artificial Sequence
  Description of Artificial Sequence: Synthetic primer
cagctggctgaaatgcttcctggagtccttcaacagtttg

SEQ ID NO: 14375 - DNA, 40 bp, Artificial Sequence
  Description of Artificial Sequence: Synthetic primer
ggctatcagaagtaaaaccaccttggaagttaaaacaaac

SEQ ID NO: 14376 - DNA, 40 bp, Artificial Sequence
  Description of Artificial Sequence: Synthetic primer
gaaagaggaagtttttggacacagatctggctcacgattc

SEQ ID NO: 14377 - DNA, 40 bp, Artificial Sequence
  Description of Artificial Sequence: Synthetic primer
ttaagcagcaagtttagtttggcgacaaaattgtaacatc

SEQ ID NO: 14378 - DNA, 40 bp, Artificial Sequence
  Description of Artificial Sequence: Synthetic primer
cccacaaacatgtttttaaaataaaatatctttttttgcc

SEQ ID NO: 14379 - DNA, 40 bp, Artificial Sequence
  Description of Artificial Sequence: Synthetic primer
cgaccctgcccaggccatggccggcaacgtgaagaagagc

SEQ ID NO: 14380 - DNA, 40 bp, Artificial Sequence
  Description of Artificial Sequence: Synthetic primer
atcatggacatcaaatttcagaacattgtcattgagatcc

SEQ ID NO: 14381 - DNA, 40 bp, Artificial Sequence
  Description of Artificial Sequence: Synthetic primer
ggctggaatcccaggagaactgctgggacgttcccaggtg

SEQ ID NO: 14382 - DNA, 40 bp, Artificial Sequence
  Description of Artificial Sequence: Synthetic primer
ttctgccatagccattgcagctgctcacggaggagtagcc

SEQ ID NO: 14383 - DNA, 40 bp, Artificial Sequence
  Description of Artificial Sequence: Synthetic primer
ttgccatttccttttgtatgcagctgttctcctgtttttg

SEQ ID NO: 14384 - DNA, 40 bp, Artificial Sequence
  Description of Artificial Sequence: Synthetic primer
ccacagttccattctgttttcccactgccagctgctttcc

SEQ ID NO: 14385 - DNA, 40 bp, Artificial Sequence
  Description of Artificial Sequence: Synthetic primer
agtggcgccttaggcgtcggtaatgatttacacattgacg

SEQ ID NO: 14386 - DNA, 40 bp, Artificial Sequence
  Description of Artificial Sequence: Synthetic primer
tgattacaagtacttttaagaattttgaaaataaaggaac

SEQ ID NO: 14387 - DNA, 40 bp, Artificial Sequence
  Description of Artificial Sequence: Synthetic primer
acactcttgcttagtatattaagagactcatacatttttg

SEQ ID NO: 14388 - DNA, 40 bp, Artificial Sequence
  Description of Artificial Sequence: Synthetic primer
tggtgcggttctccgagatggagaggttccggttgagaac

SEQ ID NO: 14389 - DNA, 40 bp, Artificial Sequence
  Description of Artificial Sequence: Synthetic primer
acacttgcttgccaactgccaagccatacttattaagttc

SEQ ID NO: 14390 - DNA, 40 bp, Artificial Sequence
  Description of Artificial Sequence: Synthetic primer
cttcagcgagccacgtctcctggaagtgacttagatcctg

SEQ ID NO: 14391 - DNA, 40 bp, Artificial Sequence
  Description of Artificial Sequence: Synthetic primer
gtcccttcattccagggaggccagctgttccgggcaatcc

SEQ ID NO: 14392 - DNA, 40 bp, Artificial Sequence
  Description of Artificial Sequence: Synthetic primer
gagcaattccaggccttcaggaatgaggtggctgttctgc

SEQ ID NO: 14393 - DNA, 40 bp, Artificial Sequence
  Description of Artificial Sequence: Synthetic primer
tttgctttaagaaaaaaggaggcaaggtagggagagcgcc

SEQ ID NO: 14394 - DNA, 40 bp, Artificial Sequence
  Description of Artificial Sequence: Synthetic primer
ctcccggctgttggtgaacacgcgccgggccaccttctgg

SEQ ID NO: 14395 - DNA, 40 bp, Artificial Sequence
  Description of Artificial Sequence: Synthetic primer
aattacaggctcctcgactcctcaacttttctaatataac

SEQ ID NO: 14396 - DNA, 40 bp, Artificial Sequence
  Description of Artificial Sequence: Synthetic primer
aggcaaataatttaattaatcgccatgaataaatattctc

SEQ ID NO: 14397 - DNA, 40 bp, Artificial Sequence
  Description of Artificial Sequence: Synthetic primer
attcctctggttatgatagtcgttctgcacgtgcatttcc

SEQ ID NO: 14398 - DNA, 40 bp, Artificial Sequence
  Description of Artificial Sequence: Synthetic primer
ccgattccatggagtttggattcctgcccaatccagtagc

SEQ ID NO: 14399 - DNA, 40 bp, Artificial Sequence
  Description of Artificial Sequence: Synthetic primer
tgagaagaatttttatcaagagcaccctgatttggctagg

SEQ ID NO: 14400 - DNA, 40 bp, Artificial Sequence
  Description of Artificial Sequence: Synthetic primer
gtaaacagtgtacatgtttaatgccatttcttacggtttg

SEQ ID NO: 14401 - DNA, 40 bp, Artificial Sequence
  Description of Artificial Sequence: Synthetic primer
aaaggtcagcttcccgcaggctggcctcaggcggagtctg

SEQ ID NO: 14402 - DNA, 40 bp, Artificial Sequence
  Description of Artificial Sequence: Synthetic primer
gagggttaaaagttgttttaataactgtgcgacctagtcc

SEQ ID NO: 14403 - DNA, 40 bp, Artificial Sequence
  Description of Artificial Sequence: Synthetic primer
cattcactgaatgccttcttgctgccaattaaaactgtag

SEQ ID NO: 14404 - DNA, 40 bp, Artificial Sequence
  Description of Artificial Sequence: Synthetic primer
cactgcttcacagctacactgcaaagtgttaaaaatcctc

SEQ ID NO: 14405 - DNA, 40 bp, Artificial Sequence
  Description of Artificial Sequence: Synthetic primer
tttaaaacaagaagtgatgtctttacataagcaacttcag

SEQ ID NO: 14406 - DNA, 40 bp, Artificial Sequence
  Description of Artificial Sequence: Synthetic primer
cttactgttgaacaataagtaaatccacaggctcctgttg

SEQ ID NO: 14407 - DNA, 40 bp, Artificial Sequence
  Description of Artificial Sequence: Synthetic primer
ccaatcctgagtactgatatgataaacatactgtgaagac

SEQ ID NO: 14408 - DNA, 40 bp, Artificial Sequence
  Description of Artificial Sequence: Synthetic primer
cggactcgcagcaactgggatacgccagccacagtggcat

SEQ ID NO: 14409 - DNA, 40 bp, Artificial Sequence
  Description of Artificial Sequence: Synthetic primer
gagagaaaatagaaaagtcttggctgtggggattggaagc

SEQ ID NO: 14410 - DNA, 40 bp, Artificial Sequence
  Description of Artificial Sequence: Synthetic primer
atcatcaaaagccatgtggtatgaggaagtaataaatatc

SEQ ID NO: 14411 - DNA, 40 bp, Artificial Sequence
  Description of Artificial Sequence: Synthetic primer
tcagggcctcgtcctggccgtgagctctgatggccacaag

SEQ ID NO: 14412 - DNA, 40 bp, Artificial Sequence
  Description of Artificial Sequence: Synthetic primer
agtgcggtgcacagttttcgaaggaggatgccctggagac

SEQ ID NO: 14413 - DNA, 40 bp, Artificial Sequence
  Description of Artificial Sequence: Synthetic primer
agttttcaacattagtgtggataatacatgttcattattc

SEQ ID NO: 14414 - DNA, 40 bp, Artificial Sequence
  Description of Artificial Sequence: Synthetic primer
gcctctggaccatagtgggccaggcgggtagggctcaggg

SEQ ID NO: 14415 - DNA, 40 bp, Artificial Sequence
  Description of Artificial Sequence: Synthetic primer
tgatggaaacagaacctgtgactcgatgccaccgtcgaac

SEQ ID NO: 14416 - DNA, 40 bp, Artificial Sequence
  Description of Artificial Sequence: Synthetic primer
gagctgctgggccccggcagccgtgaacttgttgtactgg

SEQ ID NO: 14417 - DNA, 40 bp, Artificial Sequence
  Description of Artificial Sequence: Synthetic primer
ccttcaaagaatctaactcattccagagaccacttatttc

SEQ ID NO: 14418 - DNA, 40 bp, Artificial Sequence
  Description of Artificial Sequence: Synthetic primer
gctggataactggaaaagaggagacagtcctactgaaaag

SEQ ID NO: 14419 - DNA, 40 bp, Artificial Sequence
  Description of Artificial Sequence: Synthetic primer
ccttagcaccagtgtctcctttgctgccaggagcaccagg

SEQ ID NO: 14420 - DNA, 40 bp, Artificial Sequence
  Description of Artificial Sequence: Synthetic primer
gttcctcggccagttaacaagaagatggtgtgaggtgttc

SEQ ID NO: 14421 - DNA, 40 bp, Artificial Sequence
  Description of Artificial Sequence: Synthetic primer
agttccattccacattcttcacactccatcataaatcatc

SEQ ID NO: 14422 - DNA, 40 bp, Artificial Sequence
  Description of Artificial Sequence: Synthetic primer
cccatacctgaggactatagatatgtgtaattccagacag

SEQ ID NO: 14423 - DNA, 40 bp, Artificial Sequence
  Description of Artificial Sequence: Synthetic primer
ctacaaacagcatacaggcatgattcatttgattgtcagc

SEQ ID NO: 14424 - DNA, 40 bp, Artificial Sequence
  Description of Artificial Sequence: Synthetic primer
agagcttttccagagcttctgccattaagactatgtcatc

SEQ ID NO: 14425 - DNA, 40 bp, Artificial Sequence
  Description of Artificial Sequence: Synthetic primer
ccgccctgcctgttcgctgcccgagtatggagctgctgtg

SEQ ID NO: 14426 - DNA, 40 bp, Artificial Sequence
  Description of Artificial Sequence: Synthetic primer
aactcattgaactgctggagaaaattgtccttgataactc

SEQ ID NO: 14427 - DNA, 40 bp, Artificial Sequence
  Description of Artificial Sequence: Synthetic primer
tatttatagttttaagattaagaataatagttacaatagg

SEQ ID NO: 14428 - DNA, 40 bp, Artificial Sequence
  Description of Artificial Sequence: Synthetic primer
gacataagcaggaccttggctgcatgaagttttaacatgg

SEQ ID NO: 14429 - DNA, 40 bp, Artificial Sequence
  Description of Artificial Sequence: Synthetic primer
ttaactttatcacattatttgcatgttacctcctataaac

SEQ ID NO: 14430 - DNA, 40 bp, Artificial Sequence
  Description of Artificial Sequence: Synthetic primer
aaaacatgacttgcttaatactatcacaaagcacttagcc

SEQ ID NO: 14431 - DNA, 40 bp, Artificial Sequence
  Description of Artificial Sequence: Synthetic primer
aggggctgccctcgcatgctgtttctccttcaagggtagg

SEQ ID NO: 14432 - DNA, 40 bp, Artificial Sequence
  Description of Artificial Sequence: Synthetic primer
taccgctcaaattggcagaattaccggcaagcatacagtc

SEQ ID NO: 14433 - DNA, 40 bp, Artificial Sequence
  Description of Artificial Sequence: Synthetic primer
agagcactgaccccagtttttaccacaatctttttgtatc

SEQ ID NO: 14434 - DNA, 40 bp, Artificial Sequence
  Description of Artificial Sequence: Synthetic primer
cgttattcttccgatacatactggcaatgcagaacttgag

SEQ ID NO: 14435 - DNA, 40 bp, Artificial Sequence
  Description of Artificial Sequence: Synthetic primer
tggacttcctgtcattttcacaatcttggggctgatgaag

SEQ ID NO: 14436 - DNA, 40 bp, Artificial Sequence
  Description of Artificial Sequence: Synthetic primer
ccgcgaggtggcggtgctgaggcacctggagaccttcgag

SEQ ID NO: 14437 - DNA, 40 bp, Artificial Sequence
  Description of Artificial Sequence: Synthetic primer
agtcgggactgggcctggacaccgtgtctgctccttcggg

SEQ ID NO: 14438 - DNA, 40 bp, Artificial Sequence
  Description of Artificial Sequence: Synthetic primer
caccgccgacttcagcaccagctccttgacctgtgcatcc

SEQ ID NO: 14439 - DNA, 40 bp, Artificial Sequence
  Description of Artificial Sequence: Synthetic primer
gctctattctaatacagtatcaagagagacaaactcttcc

SEQ ID NO: 14440 - DNA, 40 bp, Artificial Sequence
  Description of Artificial Sequence: Synthetic primer
ggagaaaaggcatcactttcactgtgagtagtgttgactc

SEQ ID NO: 14441 - DNA, 40 bp, Artificial Sequence
  Description of Artificial Sequence: Synthetic primer
tacaccgatggtattctggacgaggatcaagttttacatc

SEQ ID NO: 14442 - DNA, 40 bp, Artificial Sequence
  Description of Artificial Sequence: Synthetic primer
gttcatctttatcgggaactcacctgtgatgaagttctac

SEQ ID NO: 14443 - DNA, 40 bp, Artificial Sequence
  Description of Artificial Sequence: Synthetic primer
ctgcaggctgcagggctgtgctggaggagccagctctagc

SEQ ID NO: 14444 - DNA, 40 bp, Artificial Sequence
  Description of Artificial Sequence: Synthetic primer
agcaggtgtgctggcagatggacttccaacatgtagatag

SEQ ID NO: 14445 - DNA, 40 bp, Artificial Sequence
  Description of Artificial Sequence: Synthetic primer
gttctcatctgagaagatctctgacagcttctgaaagatc

SEQ ID NO: 14446 - DNA, 40 bp, Artificial Sequence
  Description of Artificial Sequence: Synthetic primer
gtcccatcagtttgaacagttgtctggatccattttgtgg

SEQ ID NO: 14447 - DNA, 40 bp, Artificial Sequence
  Description of Artificial Sequence: Synthetic primer
tagcaactatgaaacagaaataggacactcagttacaaac

SEQ ID NO: 14448 - DNA, 40 bp, Artificial Sequence
  Description of Artificial Sequence: Synthetic primer
gaaacttacctgagaaccataggactgtggcaaacaaaac

SEQ ID NO: 14449 - DNA, 40 bp, Artificial Sequence
  Description of Artificial Sequence: Synthetic primer
atggtttctgcagatccactccttcacagctataccaaac

SEQ ID NO: 14450 - DNA, 40 bp, Artificial Sequence
  Description of Artificial Sequence: Synthetic primer
acttgcagtggcatgagattcaacatcgatgggactcagc

SEQ ID NO: 14451 - DNA, 40 bp, Artificial Sequence
  Description of Artificial Sequence: Synthetic primer
ttaggtaagaagttttaaaaagccagtttgggtaaaatac

SEQ ID NO: 14452 - DNA, 40 bp, Artificial Sequence
  Description of Artificial Sequence: Synthetic primer
cctctgaatggcattgatagatggttcagaagagaaactc

SEQ ID NO: 14453 - DNA, 40 bp, Artificial Sequence
  Description of Artificial Sequence: Synthetic primer
tctttgaatatttcgttgactatatgtacattgagttatc

SEQ ID NO: 14454 - DNA, 40 bp, Artificial Sequence
  Description of Artificial Sequence: Synthetic primer
aattatgtaaatcaggctgtcaaggaggcagaaaacaagc

SEQ ID NO: 14455 - DNA, 40 bp, Artificial Sequence
  Description of Artificial Sequence: Synthetic primer
ggaggacttataatttcagctgtgttttgactctcttttg

SEQ ID NO: 14456 - DNA, 40 bp, Artificial Sequence
  Description of Artificial Sequence: Synthetic primer
tacaccatcagcatctactccatatagacaactaaaaagg

SEQ ID NO: 14457 - DNA, 40 bp, Artificial Sequence
  Description of Artificial Sequence: Synthetic primer
cttcccaagccaggcgatggtgcttgagaattattataag

SEQ ID NO: 14458 - DNA, 40 bp, Artificial Sequence
  Description of Artificial Sequence: Synthetic primer
ttagtcaaaagggttttattgctaaatgtttggtgtaaag

SEQ ID NO: 14459 - DNA, 40 bp, Artificial Sequence
  Description of Artificial Sequence: Synthetic primer
atcagagtagaaaaatctgttgcctgatatacataacacc

SEQ ID NO: 14460 - DNA, 40 bp, Artificial Sequence
  Description of Artificial Sequence: Synthetic primer
ttggttataaattatgatctacctaccaatcgtgaaaact

SEQ ID NO: 14461 - DNA, 40 bp, Artificial Sequence
  Description of Artificial Sequence: Synthetic primer
aactaggcaacttgatgaagatcttctggtattagatgag

SEQ ID NO: 14462 - DNA, 40 bp, Artificial Sequence
  Description of Artificial Sequence: Synthetic primer
tttttcctagttgatcaacatctgaacttccacgaaaaag

SEQ ID NO: 14463 - DNA, 40 bp, Artificial Sequence
  Description of Artificial Sequence: Synthetic primer
cgtgcccttcctccaacccaggtgggctaccaaataaatg

SEQ ID NO: 14464 - DNA, 40 bp, Artificial Sequence
  Description of Artificial Sequence: Synthetic primer
ttttccatttgcgatttggtatggagaagagaggaaatag

SEQ ID NO: 14465 - DNA, 40 bp, Artificial Sequence
  Description of Artificial Sequence: Synthetic primer
tctcacagcctgggtgtgcacatttgtatggtctatcacc

SEQ ID NO: 14466 - DNA, 40 bp, Artificial Sequence
  Description of Artificial Sequence: Synthetic primer
gctgcagcaaaaactgttactgtgtttattatatttgtag

SEQ ID NO: 14467 - DNA, 40 bp, Artificial Sequence
  Description of Artificial Sequence: Synthetic primer
agtaggagttggagataagcatgtcttgtcaattattttg

SEQ ID NO: 14468 - DNA, 40 bp, Artificial Sequence
  Description of Artificial Sequence: Synthetic primer
gtgtccgcggccactcgcccacgcgcgctcgccacgagac

SEQ ID NO: 14469 - DNA, 40 bp, Artificial Sequence
  Description of Artificial Sequence: Synthetic primer
cggcgacgctggcgacgctttcgcccctgaggtagtttgg

SEQ ID NO: 14470 - DNA, 40 bp, Artificial Sequence
  Description of Artificial Sequence: Synthetic primer
aggtcaattaagactactgaagaaggcacataaactttgg

SEQ ID NO: 14471 - DNA, 40 bp, Artificial Sequence
  Description of Artificial Sequence: Synthetic primer
ggggttgaaaaccctataaaggcgtcgatcggccggacag

SEQ ID NO: 14472 - DNA, 40 bp, Artificial Sequence
  Description of Artificial Sequence: Synthetic primer
gggcagcagcagcccgagccagtggccggcatagtagagg

SEQ ID NO: 14473 - DNA, 40 bp, Artificial Sequence
  Description of Artificial Sequence: Synthetic primer
attactcagaagatcactagtttggcttgcgaaattcatg

SEQ ID NO: 14474 - DNA, 40 bp, Artificial Sequence
  Description of Artificial Sequence: Synthetic primer
cacggagtagtggctgaagctcgggcactgcactgtggac

SEQ ID NO: 14475 - DNA, 40 bp, Artificial Sequence
  Description of Artificial Sequence: Synthetic primer
ttgtgtttcttgttccattcgttgtactatatcagtttcg

SEQ ID NO: 14476 - DNA, 40 bp, Artificial Sequence
  Description of Artificial Sequence: Synthetic primer
gcaaagggcttttgcttttccattttctctgttacggttg

SEQ ID NO: 14477 - DNA, 40 bp, Artificial Sequence
  Description of Artificial Sequence: Synthetic primer
tcataatatgttttgtatccagctaaggtgtgtgtctatc

SEQ ID NO: 14478 - DNA, 40 bp, Artificial Sequence
  Description of Artificial Sequence: Synthetic primer
agaaggggtgtttattcttccaacacatttcacttttctg

SEQ ID NO: 14479 - DNA, 40 bp, Artificial Sequence
  Description of Artificial Sequence: Synthetic primer
gaccttctgcatccagaaggatgttgtccagtttcaaatc

SEQ ID NO: 14480 - DNA, 40 bp, Artificial Sequence
  Description of Artificial Sequence: Synthetic primer
ctctgtgcaccgtaaaaaattctacttccgggaggggagg

SEQ ID NO: 14481 - DNA, 40 bp, Artificial Sequence
  Description of Artificial Sequence: Synthetic primer
attgaggatctaggtacttgcctttaactctacagcatac

SEQ ID NO: 14482 - DNA, 40 bp, Artificial Sequence
  Description of Artificial Sequence: Synthetic primer
actaagttcaagaaagacaaagagatcattgctgaatatg

SEQ ID NO: 14483 - DNA, 40 bp, Artificial Sequence
  Description of Artificial Sequence: Synthetic primer
caacaaaacacaaaaaataaacatttgttccagggcaacc

SEQ ID NO: 14484 - DNA, 40 bp, Artificial Sequence
  Description of Artificial Sequence: Synthetic primer
gtggcgttgcttgttgtggtggaaatctctctgataatac

SEQ ID NO: 14485 - DNA, 40 bp, Artificial Sequence
  Description of Artificial Sequence: Synthetic primer
tccaattattctcaggatacatagaaacctctcacaatgc

SEQ ID NO: 14486 - DNA, 40 bp, Artificial Sequence
  Description of Artificial Sequence: Synthetic primer
cctgaagcagcagatttgatagactggcaaagatgaatag

SEQ ID NO: 14487 - DNA, 40 bp, Artificial Sequence
  Description of Artificial Sequence: Synthetic primer
tctccagcgtgggcagtaactgatcaaactggtcaaggtc

SEQ ID NO: 14488 - DNA, 40 bp, Artificial Sequence
  Description of Artificial Sequence: Synthetic primer
aggggctatagaatttggggctctgactgatcaaaacctg

SEQ ID NO: 14489 - DNA, 40 bp, Artificial Sequence
  Description of Artificial Sequence: Synthetic primer
gctggcaccttcctggagcctccagccagtcctgtcctcc

SEQ ID NO: 14490 - DNA, 40 bp, Artificial Sequence
  Description of Artificial Sequence: Synthetic primer
attctcagcttgcacacgaagttcctcaaaagctgttatc

SEQ ID NO: 14491 - DNA, 40 bp, Artificial Sequence
  Description of Artificial Sequence: Synthetic primer
attcttccttggtcactgagccctgcaggggtgcttcagt

SEQ ID NO: 14492 - DNA, 40 bp, Artificial Sequence
  Description of Artificial Sequence: Synthetic primer
ctcgaagttcaaactcagcaggaatggggatatcatcagg

SEQ ID NO: 14493 - DNA, 40 bp, Artificial Sequence
  Description of Artificial Sequence: Synthetic primer
agtgggtgctcgtgctggagaggtcatttcgtattatttc

SEQ ID NO: 14494 - DNA, 40 bp, Artificial Sequence
  Description of Artificial Sequence: Synthetic primer
ggatttaatatagagcaaatgtttagttttatcatctgta

SEQ ID NO: 14495 - DNA, 40 bp, Artificial Sequence
  Description of Artificial Sequence: Synthetic primer
ggctgcagccaggaatttgactcccaagagcagctggtgc

SEQ ID NO: 14496 - DNA, 40 bp, Artificial Sequence
  Description of Artificial Sequence: Synthetic primer
tacatgtattgataattgtttctgtagatatcaggaaatg

SEQ ID NO: 14497 - DNA, 40 bp, Artificial Sequence
  Description of Artificial Sequence: Synthetic primer
aacacttgttacctaatgaacaaggaggatgtgcatttcg

SEQ ID NO: 14498 - DNA, 40 bp, Artificial Sequence
  Description of Artificial Sequence: Synthetic primer
ttctcaatgagggaaaaacaattttattacctgcttaatg

SEQ ID NO: 14499 - DNA, 40 bp, Artificial Sequence
  Description of Artificial Sequence: Synthetic primer
cgaaaaagatgtaagtacattttaaaaatgtttttaaaag

SEQ ID NO: 14500 - DNA, 40 bp, Artificial Sequence
  Description of Artificial Sequence: Synthetic primer
aaatgaaaacattctttcaattctgagcaatagaaagcac

SEQ ID NO: 14501 - DNA, 40 bp, Artificial Sequence
  Description of Artificial Sequence: Synthetic primer
gccctggcagcgcgccacagcccgcgaagccaacgagtgc

SEQ ID NO: 14502 - DNA, 40 bp, Artificial Sequence
  Description of Artificial Sequence: Synthetic primer
catacacggcatcccgtgggtgttccctttgattgtatgc

SEQ ID NO: 14503 - DNA, 40 bp, Artificial Sequence
  Description of Artificial Sequence: Synthetic primer
tcaattaattttggaaatttcaaagctaaaagatttacag

SEQ ID NO: 14504 - DNA, 40 bp, Artificial Sequence
  Description of Artificial Sequence: Synthetic primer
cccaaagcctgaaggcttcctcccgccaccctttccgccc

SEQ ID NO: 14505 - DNA, 40 bp, Artificial Sequence
  Description of Artificial Sequence: Synthetic primer
tctgccttgaggaattatgtcaacactcatacttcatctc

SEQ ID NO: 14506 - DNA, 40 bp, Artificial Sequence
  Description of Artificial Sequence: Synthetic primer
ccacgctcttgtcagcatctcgatctttggacagctcctc

SEQ ID NO: 14507 - DNA, 40 bp, Artificial Sequence
  Description of Artificial Sequence: Synthetic primer
tagatgacttgctgtcttgtggaacttctagacttattgg

SEQ ID NO: 14508 - DNA, 40 bp, Artificial Sequence
  Description of Artificial Sequence: Synthetic primer
aaacccgtcccagagcctctccagggcagatcatttggtg

SEQ ID NO: 14509 - DNA, 40 bp, Artificial Sequence
  Description of Artificial Sequence: Synthetic primer
cttggaggctccttgttcagaagtatcctttctccctgtc

SEQ ID NO: 14510 - DNA, 40 bp, Artificial Sequence
  Description of Artificial Sequence: Synthetic primer
cactcatctagtaattgattggttttcacaaagggtaggg

SEQ ID NO: 14511 - DNA, 40 bp, Artificial Sequence
  Description of Artificial Sequence: Synthetic primer
aaaaaaatgccttaactataaaaagcggagaaatggaaac

SEQ ID NO: 14512 - DNA, 40 bp, Artificial Sequence
  Description of Artificial Sequence: Synthetic primer
tttaaagggaattaatctttttatgatgtattaatctgtg

SEQ ID NO: 14513 - DNA, 40 bp, Artificial Sequence
  Description of Artificial Sequence: Synthetic primer
tcttgtggcttgtcctcagacattcggaacaaaacagcag

SEQ ID NO: 14514 - DNA, 40 bp, Artificial Sequence
  Description of Artificial Sequence: Synthetic primer
tccagttttgttaactctctttgggaatttctttttcagc

SEQ ID NO: 14515 - DNA, 40 bp, Artificial Sequence
  Description of Artificial Sequence: Synthetic primer
ctctaatgcagtccttctacctggtgtttacttttgttac

SEQ ID NO: 14516 - DNA, 40 bp, Artificial Sequence
  Description of Artificial Sequence: Synthetic primer
atgaaaatgcggttagagaggtgctattcaagtgattctg

SEQ ID NO: 14517 - DNA, 40 bp, Artificial Sequence
  Description of Artificial Sequence: Synthetic primer
tgttttccattcatttcagaagagctacattgtgtcactg

SEQ ID NO: 14518 - DNA, 40 bp, Artificial Sequence
  Description of Artificial Sequence: Synthetic primer
tgtcaccccactgtgcgcgccccagcggccccggcccaga

SEQ ID NO: 14519 - DNA, 40 bp, Artificial Sequence
  Description of Artificial Sequence: Synthetic primer
aaaggagaaaatccattggtctattattcctctttttctg

SEQ ID NO: 14520 - DNA, 40 bp, Artificial Sequence
  Description of Artificial Sequence: Synthetic primer
gctgaagatgtcacttcttttgttacttctttatagttcc

SEQ ID NO: 14521 - DNA, 40 bp, Artificial Sequence
  Description of Artificial Sequence: Synthetic primer
aagagggaccctggagcaccttagacaaactacccagcac

SEQ ID NO: 14522 - DNA, 40 bp, Artificial Sequence
  Description of Artificial Sequence: Synthetic primer
tgccttgacgatacagctaattcagaatcattttgtggac

SEQ ID NO: 14523 - DNA, 40 bp, Artificial Sequence
  Description of Artificial Sequence: Synthetic primer
tcattaactgaataactccaaagtcattaacatgaccaag

SEQ ID NO: 14524 - DNA, 40 bp, Artificial Sequence
  Description of Artificial Sequence: Synthetic primer
tgggtagaacaatccaaggggcagcctgggtatgagaatc

SEQ ID NO: 14525 - DNA, 40 bp, Artificial Sequence
  Description of Artificial Sequence: Synthetic primer
ggggctgagtccgggccacgctggggaagccagctggtga

SEQ ID NO: 14526 - DNA, 40 bp, Artificial Sequence
  Description of Artificial Sequence: Synthetic primer
aggtgatgctttccaagcctcctgagctaacttgaaggac

SEQ ID NO: 14527 - DNA, 40 bp, Artificial Sequence
  Description of Artificial Sequence: Synthetic primer
acagagcctcgcctttgccgatccgccgcccgtccacacc

SEQ ID NO: 14528 - DNA, 40 bp, Artificial Sequence
  Description of Artificial Sequence: Synthetic primer
gacttgaattcaaacctctcacagagtacactagacatac

SEQ ID NO: 14529 - DNA, 40 bp, Artificial Sequence
  Description of Artificial Sequence: Synthetic primer
atctcgctccctcccaggactctgaccccagcattctcag

SEQ ID NO: 14530 - DNA, 40 bp, Artificial Sequence
  Description of Artificial Sequence: Synthetic primer
gttataaaatgcagaataattcaagtaaaaataagaccac

SEQ ID NO: 14531 - DNA, 40 bp, Artificial Sequence
  Description of Artificial Sequence: Synthetic primer
tgtctttttaaaagggtcgttaccagagatttacccatcg

SEQ ID NO: 14532 - DNA, 40 bp, Artificial Sequence
  Description of Artificial Sequence: Synthetic primer
attataattctgttgaaaacgaccaggccctgagatactg

SEQ ID NO: 14533 - DNA, 40 bp, Artificial Sequence
  Description of Artificial Sequence: Synthetic primer
tttgaattgtagccacggacagtagtgacatgaatctttc

SEQ ID NO: 14534 - DNA, 40 bp, Artificial Sequence
  Description of Artificial Sequence: Synthetic primer
cgacgcgcccggccgggacccagctgcccgtatgaccgcg

SEQ ID NO: 14535 - DNA, 40 bp, Artificial Sequence
  Description of Artificial Sequence: Synthetic primer
ggccctgtgtgcaggttccgatgttattagatgttacaag

SEQ ID NO: 14536 - DNA, 40 bp, Artificial Sequence
  Description of Artificial Sequence: Synthetic primer
cagggtgttgatgacaggcccagcgtgcaggtggatcacg

SEQ ID NO: 14537 - DNA, 40 bp, Artificial Sequence
  Description of Artificial Sequence: Synthetic primer
aactgctctgaaaagaagatatttttcaacctgaacttgc

SEQ ID NO: 14538 - DNA, 40 bp, Artificial Sequence
  Description of Artificial Sequence: Synthetic primer
gtcccataaaccatcgcaatattaaaacaccacagaatgg

SEQ ID NO: 14539 - DNA, 40 bp, Artificial Sequence
  Description of Artificial Sequence: Synthetic primer
catgtccacgatgtgcatctgctgctgcttctccagcttc

SEQ ID NO: 14540 - DNA, 40 bp, Artificial Sequence
  Description of Artificial Sequence: Synthetic primer
gccctggcaccggtcaagggtccggcgggtgaggttgacg

SEQ ID NO: 14541 - DNA, 40 bp, Artificial Sequence
  Description of Artificial Sequence: Synthetic primer
tgaaaatccccagtactttggcatcaccaacagtcagctc

SEQ ID NO: 14542 - DNA, 40 bp, Artificial Sequence
  Description of Artificial Sequence: Synthetic primer
gttgactcctcagagctgcttctcgatgtgaacgaaaacg

SEQ ID NO: 14543 - DNA, 40 bp, Artificial Sequence
  Description of Artificial Sequence: Synthetic primer
gcccagagcaaggaagtgttatcattccagccacctccac

SEQ ID NO: 14544 - DNA, 40 bp, Artificial Sequence
  Description of Artificial Sequence: Synthetic primer
ctcatggacccgggctccctgccgcccctcgactctgaag

SEQ ID NO: 14545 - DNA, 40 bp, Artificial Sequence
  Description of Artificial Sequence: Synthetic primer
atgatgaagatgatcgggaagcataagaatatcatcaacc

SEQ ID NO: 14546 - DNA, 40 bp, Artificial Sequence
  Description of Artificial Sequence: Synthetic primer
ctgaggtctttgaacaagaaattgacccagtgatgcaaag

SEQ ID NO: 14547 - DNA, 40 bp, Artificial Sequence
  Description of Artificial Sequence: Synthetic primer
ccatgaagaatccccaccacaataccaaacatcttacctg

SEQ ID NO: 14548 - DNA, 40 bp, Artificial Sequence
  Description of Artificial Sequence: Synthetic primer
ggagatcttcacctatggaaagcagccatggttccaactc

SEQ ID NO: 14549 - DNA, 40 bp, Artificial Sequence
  Description of Artificial Sequence: Synthetic primer
aagtagaaataaatgtcagtactgtcggtttcagaaatgc

SEQ ID NO: 14550 - DNA, 40 bp, Artificial Sequence
  Description of Artificial Sequence: Synthetic primer
gatgggcgttgtgtggttatcgctctcgtaccctgtgctg

SEQ ID NO: 14551 - DNA, 40 bp, Artificial Sequence
  Description of Artificial Sequence: Synthetic primer
ggtggccctgcaggatttgttctgatccgttgattaacac

SEQ ID NO: 14552 - DNA, 40 bp, Artificial Sequence
  Description of Artificial Sequence: Synthetic primer
cctcgagcaggagcccccggtgccttatcgcccagctacg

SEQ ID NO: 14553 - DNA, 40 bp, Artificial Sequence
  Description of Artificial Sequence: Synthetic primer
gccctcctttgctgaaatccaccaagcctttgaaacaatg

SEQ ID NO: 14554 - DNA, 40 bp, Artificial Sequence
  Description of Artificial Sequence: Synthetic primer
gcctgagaaatcagccaccacgttcccatgggtgagcatc

SEQ ID NO: 14555 - DNA, 40 bp, Artificial Sequence
  Description of Artificial Sequence: Synthetic primer
cggaagaaagatgcatcagatctgtgtccttcaccatgag

SEQ ID NO: 14556 - DNA, 40 bp, Artificial Sequence
  Description of Artificial Sequence: Synthetic primer
atttgcggagttgttctagttcagtaagggcactctcaag

SEQ ID NO: 14557 - DNA, 40 bp, Artificial Sequence
  Description of Artificial Sequence: Synthetic primer
taggctgggggcggcaaggcggccgcggctgagtgaggag

SEQ ID NO: 14558 - DNA, 40 bp, Artificial Sequence
  Description of Artificial Sequence: Synthetic primer
tcagccaccagcacccccatagggcccccagacaccacac

SEQ ID NO: 14559 - DNA, 40 bp, Artificial Sequence
  Description of Artificial Sequence: Synthetic primer
ctgggccccgtcttcaaatctaacctaaccgccacagtag

SEQ ID NO: 14560 - DNA, 40 bp, Artificial Sequence
  Description of Artificial Sequence: Synthetic primer
tttgtctgaggagcatctcagagaagtgagagtaaatctg

SEQ ID NO: 14561 - DNA, 40 bp, Artificial Sequence
  Description of Artificial Sequence: Synthetic primer
ggtgccgaggctctcctcaccagccacccagggagtcacc

SEQ ID NO: 14562 - DNA, 40 bp, Artificial Sequence
  Description of Artificial Sequence: Synthetic primer
agtttcctacctgcagatccaggggctgctgttgcctttg

SEQ ID NO: 14563 - DNA, 40 bp, Artificial Sequence
  Description of Artificial Sequence: Synthetic primer
gaaggatatgtaccaagcagttatctggtggaaaaatctc

SEQ ID NO: 14564 - DNA, 40 bp, Artificial Sequence
  Description of Artificial Sequence: Synthetic primer
aggaagaactttaaattcatccttcagagaagctcgagaa

SEQ ID NO: 14565 - DNA, 40 bp, Artificial Sequence
  Description of Artificial Sequence: Synthetic primer
gccctgtgttaggagtccccataaacatgtactgtaattc

SEQ ID NO: 14566 - DNA, 40 bp, Artificial Sequence
  Description of Artificial Sequence: Synthetic primer
ttccctctcctgtttcttgttcttatgcatatctctgagg

SEQ ID NO: 14567 - DNA, 40 bp, Artificial Sequence
  Description of Artificial Sequence: Synthetic primer
caagacgtcccccacccaatgcccggcagctggagaggtc

SEQ ID NO: 14568 - DNA, 40 bp, Artificial Sequence
  Description of Artificial Sequence: Synthetic primer
gggggcgtgaaggggttgcggggtgagggtggggataagg

SEQ ID NO: 14569 - DNA, 40 bp, Artificial Sequence
  Description of Artificial Sequence: Synthetic primer
gcagaacttgccagttataaagaaaaggctgaaaaacttc

SEQ ID NO: 14570 - DNA, 40 bp, Artificial Sequence
  Description of Artificial Sequence: Synthetic primer
gccaagaggtgcgagtacccaagactcccagagttgttcc

SEQ ID NO: 14571 - DNA, 40 bp, Artificial Sequence
  Description of Artificial Sequence: Synthetic primer
ttgatttttcgatattcctgcaaaatctgccctcgagtag

SEQ ID NO: 14572 - DNA, 40 bp, Artificial Sequence
  Description of Artificial Sequence: Synthetic primer
gctgctgccgctgctccacctcccagccgggaccagacgt

SEQ ID NO: 14573 - DNA, 40 bp, Artificial Sequence
  Description of Artificial Sequence: Synthetic primer
taatgaaggtcaaagtgcccttctgctccttcttgttctg

SEQ ID NO: 14574 - DNA, 40 bp, Artificial Sequence
  Description of Artificial Sequence: Synthetic primer
ttaatgcctgcagtcattgtctgagaactgcccgagagtc

SEQ ID NO: 14575 - DNA, 40 bp, Artificial Sequence
  Description of Artificial Sequence: Synthetic primer
caccaggaagaagaaaaagagatacaaatgcaccagaaag

SEQ ID NO: 14576 - DNA, 40 bp, Artificial Sequence
  Description of Artificial Sequence: Synthetic primer
caagccagagaagcagggtcaagagtggtgaagatttttg

SEQ ID NO: 14577 - DNA, 40 bp, Artificial Sequence
  Description of Artificial Sequence: Synthetic primer
catggtgatcaaggtgctcctggctccgtgggtcctgctg

SEQ ID NO: 14578 - DNA, 40 bp, Artificial Sequence
  Description of Artificial Sequence: Synthetic primer
cagcctccgagttatcctctgcacctgatggagcctgttc

SEQ ID NO: 14579 - DNA, 40 bp, Artificial Sequence
  Description of Artificial Sequence: Synthetic primer
cgaggcgcaggggctggaggtggtgctgggggtaggtgac

SEQ ID NO: 14580 - DNA, 40 bp, Artificial Sequence
  Description of Artificial Sequence: Synthetic primer
gatattccaacgtgcaagtggctggaccagtggacagaac

SEQ ID NO: 14581 - DNA, 40 bp, Artificial Sequence
  Description of Artificial Sequence: Synthetic primer
atgtttttctgcaacagccaaaatagaatggaatagaatg

SEQ ID NO: 14582 - DNA, 40 bp, Artificial Sequence
  Description of Artificial Sequence: Synthetic primer
gtgccggcggcaggacttcaacccctgtgaatatgatctg

SEQ ID NO: 14583 - DNA, 40 bp, Artificial Sequence
  Description of Artificial Sequence: Synthetic primer
ggcctcttaactgtaacaatgttcatggttgtgatgtttt

SEQ ID NO: 14584 - DNA, 40 bp, Artificial Sequence
  Description of Artificial Sequence: Synthetic primer
ccatgagattcccacttctgggtcagttcatattccattc

SEQ ID NO: 14585 - DNA, 40 bp, Artificial Sequence
  Description of Artificial Sequence: Synthetic primer
tcttgttgacagtaagatatttgttgctttttatatgcag

SEQ ID NO: 14586 - DNA, 40 bp, Artificial Sequence
  Description of Artificial Sequence: Synthetic primer
tgatgtcaagggctgccaccttgttggctacttttctaag

SEQ ID NO: 14587 - DNA, 40 bp, Artificial Sequence
  Description of Artificial Sequence: Synthetic primer
ctggaagtagtagtaatgggtcttcgattaatatgtctgg

SEQ ID NO: 14588 - DNA, 40 bp, Artificial Sequence
  Description of Artificial Sequence: Synthetic primer
gatagtatctgctggtcatgcacaacctcagaatgctgtc

SEQ ID NO: 14589 - DNA, 40 bp, Artificial Sequence
  Description of Artificial Sequence: Synthetic primer
gcccatctgcatctgcatagggtattggggcgtttgattc

SEQ ID NO: 14590 - DNA, 40 bp, Artificial Sequence
  Description of Artificial Sequence: Synthetic primer
acatttctgaaaatgaagatccagaattacaagattatag

SEQ ID NO: 14591 - DNA, 40 bp, Artificial Sequence
  Description of Artificial Sequence: Synthetic primer
gttaagaaagctataaatatggtttagaaagagtcctttg

SEQ ID NO: 14592 - DNA, 40 bp, Artificial Sequence
  Description of Artificial Sequence: Synthetic primer
gtagcgccgccgacgactgcagccagcagcgtggaggagc

SEQ ID NO: 14593 - DNA, 40 bp, Artificial Sequence
  Description of Artificial Sequence: Synthetic primer
acctgaaacttacaaatttaacattatcaaagaaggaatg

SEQ ID NO: 14594 - DNA, 40 bp, Artificial Sequence
  Description of Artificial Sequence: Synthetic primer
gcagagctacctgtcgcctcagggccggcggtactatgtc

SEQ ID NO: 14595 - DNA, 40 bp, Artificial Sequence
  Description of Artificial Sequence: Synthetic primer
ttacacctggagaagccactgtctttacaaagggatagag

SEQ ID NO: 14596 - DNA, 40 bp, Artificial Sequence
  Description of Artificial Sequence: Synthetic primer
tactaatattaaagatgacaaattattacctgtccaatac

SEQ ID NO: 14597 - DNA, 40 bp, Artificial Sequence
  Description of Artificial Sequence: Synthetic primer
aagcagtaatgccaagggacttactgcctcagagaacagc

SEQ ID NO: 14598 - DNA, 40 bp, Artificial Sequence
  Description of Artificial Sequence: Synthetic primer
cagcagtcgctccagcagaaattgtcttttgtcattgttc

SEQ ID NO: 14599 - DNA, 40 bp, Artificial Sequence
  Description of Artificial Sequence: Synthetic primer
ttcactggcttctatttcccaataatagcttgaatctctc

SEQ ID NO: 14600 - DNA, 40 bp, Artificial Sequence
  Description of Artificial Sequence: Synthetic primer
gcgccagccgtgtcactcagggggcggggccatgcaaatg

SEQ ID NO: 14601 - DNA, 40 bp, Artificial Sequence
  Description of Artificial Sequence: Synthetic primer
gtgggtggcagccaaggggttcttgatgagcaaggcagtg

SEQ ID NO: 14602 - DNA, 40 bp, Artificial Sequence
  Description of Artificial Sequence: Synthetic primer
tttggaggggtttatgctcaatccatgttctatttcagtg

SEQ ID NO: 14603 - DNA, 40 bp, Artificial Sequence
  Description of Artificial Sequence: Synthetic primer
aaggctttgggccagagtacgatgcagggccagacaccat

SEQ ID NO: 14604 - DNA, 40 bp, Artificial Sequence
  Description of Artificial Sequence: Synthetic primer
ggctgtgctaataatgctcattgtgctcttcagggttttg

SEQ ID NO: 14605 - DNA, 40 bp, Artificial Sequence
  Description of Artificial Sequence: Synthetic primer
ccaccaccaacctcttcaccaagctgacctccaaactgac

SEQ ID NO: 14606 - DNA, 40 bp, Artificial Sequence
  Description of Artificial Sequence: Synthetic primer
cccgatcaaaatgtaatggtgtcaaaatcaccggcatctg

SEQ ID NO: 14607 - DNA, 40 bp, Artificial Sequence
  Description of Artificial Sequence: Synthetic primer
tcctcttatgtccgagtctgccctttggctttgcacactc

SEQ ID NO: 14608 - DNA, 40 bp, Artificial Sequence
  Description of Artificial Sequence: Synthetic primer
caccaccctcaccatcgccgaccagatcaccctcctcaag

SEQ ID NO: 14609 - DNA, 40 bp, Artificial Sequence
  Description of Artificial Sequence: Synthetic primer
ggcacgggaggaagcgccccgaggagggtcagcggaacac

SEQ ID NO: 14610 - DNA, 40 bp, Artificial Sequence
  Description of Artificial Sequence: Synthetic primer
ggctccgcgtctctttcacaagatcagatttcgggctgtc

SEQ ID NO: 14611 - DNA, 40 bp, Artificial Sequence
  Description of Artificial Sequence: Synthetic primer
tttgactacctcgtgtcgcatggccgcatgaaggagaagg

SEQ ID NO: 14612 - DNA, 40 bp, Artificial Sequence
  Description of Artificial Sequence: Synthetic primer
atatgttttcctgagcagttaaataacaataaatatgacg

SEQ ID NO: 14613 - DNA, 40 bp, Artificial Sequence
  Description of Artificial Sequence: Synthetic primer
cacctcattctaaagaccacatttgaggatcttattcagc

SEQ ID NO: 14614 - DNA, 40 bp, Artificial Sequence
  Description of Artificial Sequence: Synthetic primer
tcttcctggcttaaagggacacaatggattgcaaggtctg

SEQ ID NO: 14615 - DNA, 40 bp, Artificial Sequence
  Description of Artificial Sequence: Synthetic primer
cttcaggctcttcaccgccaccttcgtgtgcccgttgtag

SEQ ID NO: 14616 - DNA, 40 bp, Artificial Sequence
  Description of Artificial Sequence: Synthetic primer
cctcccagtaacttcaggtgtttaataaagatgtgttgac

SEQ ID NO: 14617 - DNA, 40 bp, Artificial Sequence
  Description of Artificial Sequence: Synthetic primer
cggacgtggaggtggggccctggcggacctatgacttctg

SEQ ID NO: 14618 - DNA, 40 bp, Artificial Sequence
  Description of Artificial Sequence: Synthetic primer
ccagccttgccaggagggccagctggaccacgagcacctg

SEQ ID NO: 14619 - DNA, 40 bp, Artificial Sequence
  Description of Artificial Sequence: Synthetic primer
ttcgagcccctgagctccaagcagatcaagaccatctcag

SEQ ID NO: 14620 - DNA, 40 bp, Artificial Sequence
  Description of Artificial Sequence: Synthetic primer
cagtatttctcgggaaatcctctgctgtaacctgcagacc

SEQ ID NO: 14621 - DNA, 40 bp, Artificial Sequence
  Description of Artificial Sequence: Synthetic primer
cagtggtagctgatcaaagaaccataacatttacatcatc

SEQ ID NO: 14622 - DNA, 40 bp, Artificial Sequence
  Description of Artificial Sequence: Synthetic primer
ttcttcagtagaagccagaatcttgagttgcccagttagg

SEQ ID NO: 14623 - DNA, 40 bp, Artificial Sequence
  Description of Artificial Sequence: Synthetic primer
tctcaaccattctgtttgtgtatacatgtgtgtatttctc

SEQ ID NO: 14624 - DNA, 40 bp, Artificial Sequence
  Description of Artificial Sequence: Synthetic primer
cttgcttctttaaaaagacactgaggcgcatcttggatac

SEQ ID NO: 14625 - DNA, 40 bp, Artificial Sequence
  Description of Artificial Sequence: Synthetic primer
ctcgggagatgacgaagacggggaggacgaggctgaggac

SEQ ID NO: 14626 - DNA, 40 bp, Artificial Sequence
  Description of Artificial Sequence: Synthetic primer
gtgaatcctgttgttgcaggtgttcctggacactgaatgg

SEQ ID NO: 14627 - DNA, 40 bp, Artificial Sequence
  Description of Artificial Sequence: Synthetic primer
aattaaaaagagccttactttctttacataccacatggac

SEQ ID NO: 14628 - DNA, 40 bp, Artificial Sequence
  Description of Artificial Sequence: Synthetic primer
gaatggaagacagtatatctgtatattaatttttgtttag

SEQ ID NO: 14629 - DNA, 40 bp, Artificial Sequence
  Description of Artificial Sequence: Synthetic primer
ttctccttaacctgtattgatactgacttgaattattttc

SEQ ID NO: 14630 - DNA, 40 bp, Artificial Sequence
  Description of Artificial Sequence: Synthetic primer
tgcgcgatgcgagtagtcaagtcgtactccgccatcttgc

SEQ ID NO: 14631 - DNA, 40 bp, Artificial Sequence
  Description of Artificial Sequence: Synthetic primer
tgctgcattgcaacactttttgaggggagggagggaggtg

SEQ ID NO: 14632 - DNA, 40 bp, Artificial Sequence
  Description of Artificial Sequence: Synthetic primer
tctttcttctttgtcacgttcaagttatctgacatctacc

SEQ ID NO: 14633 - DNA, 40 bp, Artificial Sequence
  Description of Artificial Sequence: Synthetic primer
tattaatgtacagtcactgctagtgttcaaaataaaaatg

SEQ ID NO: 14634 - DNA, 40 bp, Artificial Sequence
  Description of Artificial Sequence: Synthetic primer
ctggcctcatctatgaggagacccgcggagtgttgaaggt

SEQ ID NO: 14635 - DNA, 40 bp, Artificial Sequence
  Description of Artificial Sequence: Synthetic primer
tggcacacttgtacccacaggtgaggggcaggacctgaag

SEQ ID NO: 14636 - DNA, 40 bp, Artificial Sequence
  Description of Artificial Sequence: Synthetic primer
ccagtctttaagaaacctgggttaaagacaccagcacttc

SEQ ID NO: 14637 - DNA, 40 bp, Artificial Sequence
  Description of Artificial Sequence: Synthetic primer
gaggcgcggcgggcgtctgtccgggcggcgcgggccttgg

SEQ ID NO: 14638 - DNA, 40 bp, Artificial Sequence
  Description of Artificial Sequence: Synthetic primer
ggggggccctggcttgggccgtgggcttcgtgagctccat

SEQ ID NO: 14639 - DNA, 40 bp, Artificial Sequence
  Description of Artificial Sequence: Synthetic primer
cattaagtatgtcttgctcatcaatgaaaatgttagtatc

SEQ ID NO: 14640 - DNA, 40 bp, Artificial Sequence
  Description of Artificial Sequence: Synthetic primer
ataatactttcactaatactaaataaaatttggggaacac

SEQ ID NO: 14641 - DNA, 40 bp, Artificial Sequence
  Description of Artificial Sequence: Synthetic primer
tcagaaggcttctgactggcacgggtggtttaggttctgt

SEQ ID NO: 14642 - DNA, 40 bp, Artificial Sequence
  Description of Artificial Sequence: Synthetic primer
catgtggcttccaataagtatcttaggaacttatttcctt

SEQ ID NO: 14643 - DNA, 40 bp, Artificial Sequence
  Description of Artificial Sequence: Synthetic primer
tccacttcccccaagactgaccattcatgccccacctcag

SEQ ID NO: 14644 - DNA, 40 bp, Artificial Sequence
  Description of Artificial Sequence: Synthetic primer
tgcctcggcgctaggccttcttgcacttgcccttcttctc

SEQ ID NO: 14645 - DNA, 40 bp, Artificial Sequence
  Description of Artificial Sequence: Synthetic primer
tcttcatttcagtgttaatcagctaaacagaagttgttgc

SEQ ID NO: 14646 - DNA, 40 bp, Artificial Sequence
  Description of Artificial Sequence: Synthetic primer
accaaaggaaacaaaatagaccagccactctgaagcaatc

SEQ ID NO: 14647 - DNA, 40 bp, Artificial Sequence
  Description of Artificial Sequence: Synthetic primer
tctgttcctgcttcatcgtcgcaattctatgctctaaaag

SEQ ID NO: 14648 - DNA, 40 bp, Artificial Sequence
  Description of Artificial Sequence: Synthetic primer
ctaggtctcctcattttctgtggtttagggggaagacagg

SEQ ID NO: 14649 - DNA, 40 bp, Artificial Sequence
  Description of Artificial Sequence: Synthetic primer
ggtagcgatggtagcggatccactctggagggctatacac

SEQ ID NO: 14650 - DNA, 40 bp, Artificial Sequence
  Description of Artificial Sequence: Synthetic primer
atttcaaatcactgtacatttacttttgtgaaaacactgc

SEQ ID NO: 14651 - DNA, 40 bp, Artificial Sequence
  Description of Artificial Sequence: Synthetic primer
ctgaagaagaggtcagagaaaatggtctattccttaaatg

SEQ ID NO: 14652 - DNA, 40 bp, Artificial Sequence
  Description of Artificial Sequence: Synthetic primer
ccccagaggttttctctttcagtcgctatagcagcaagtc

SEQ ID NO: 14653 - DNA, 40 bp, Artificial Sequence
  Description of Artificial Sequence: Synthetic primer
agatgtgcagtaaaggagtctccacttcctctgggttagg

SEQ ID NO: 14654 - DNA, 40 bp, Artificial Sequence
  Description of Artificial Sequence: Synthetic primer
cagaaagccacactgacaaagaaaaattgcaaatacacag

SEQ ID NO: 14655 - DNA, 40 bp, Artificial Sequence
  Description of Artificial Sequence: Synthetic primer
actcctttatggcccactccagccattgcctcacatgctc

SEQ ID NO: 14656 - DNA, 40 bp, Artificial Sequence
  Description of Artificial Sequence: Synthetic primer
atggacacagccctcgccctccgccccggcttttctctgc

SEQ ID NO: 14657 - DNA, 40 bp, Artificial Sequence
  Description of Artificial Sequence: Synthetic primer
gttaaatatttaaatgcctgtgtctctgtgatggcaacag

SEQ ID NO: 14658 - DNA, 40 bp, Artificial Sequence
  Description of Artificial Sequence: Synthetic primer
ttgaaagctcaaattcagcagttccattcccagatagcag

SEQ ID NO: 14659 - DNA, 40 bp, Artificial Sequence
  Description of Artificial Sequence: Synthetic primer
ctgtacaccttgaatgacaatgctcggagctcccctgtgg

SEQ ID NO: 14660 - DNA, 40 bp, Artificial Sequence
  Description of Artificial Sequence: Synthetic primer
ttcaacaccctaaccttgggtaacagcatttggaattatc

SEQ ID NO: 14661 - DNA, 40 bp, Artificial Sequence
  Description of Artificial Sequence: Synthetic primer
tcctactgtatcatgatcatcataggagtggagaacatgc

SEQ ID NO: 14662 - DNA, 40 bp, Artificial Sequence
  Description of Artificial Sequence: Synthetic primer
tgtggccacgccttgactactgtacacatcaagcagattc

SEQ ID NO: 14663 - DNA, 40 bp, Artificial Sequence
  Description of Artificial Sequence: Synthetic primer
tttgatcttgtggaagagtatgaaaacatctgtggtagtc

SEQ ID NO: 14664 - DNA, 40 bp, Artificial Sequence
  Description of Artificial Sequence: Synthetic primer
tgtcaactccagagtgcagaagttgctgagtgtcctgatg

SEQ ID NO: 14665 - DNA, 40 bp, Artificial Sequence
  Description of Artificial Sequence: Synthetic primer
atggtgcctcacaaataactgaatttcctgatttaactgg

SEQ ID NO: 14666 - DNA, 40 bp, Artificial Sequence
  Description of Artificial Sequence: Synthetic primer
ggctcatggaacttgccttgatgaaagataatctgttgtg

SEQ ID NO: 14667 - DNA, 40 bp, Artificial Sequence
  Description of Artificial Sequence: Synthetic primer
atttaatttaatgtgtttctgcgttatactagagttttgc

SEQ ID NO: 14668 - DNA, 40 bp, Artificial Sequence
  Description of Artificial Sequence: Synthetic primer
taaaagtaacttgaaataatatagtataagaatcctattg

SEQ ID NO: 14669 - DNA, 40 bp, Artificial Sequence
  Description of Artificial Sequence: Synthetic primer
tgtatgtggaatcagagggaaaacgctcataattaacctg

SEQ ID NO: 14670 - DNA, 40 bp, Artificial Sequence
  Description of Artificial Sequence: Synthetic primer
ctcctaatcttacccttctggtcgggattggataagacac

SEQ ID NO: 14671 - DNA, 40 bp, Artificial Sequence
  Description of Artificial Sequence: Synthetic primer
gcaccaaggaccagccacaggggtcccacttttggaaatc

SEQ ID NO: 14672 - DNA, 40 bp, Artificial Sequence
  Description of Artificial Sequence: Synthetic primer
tggggggaagtgggcacggagagtagctgacttgcaggag

SEQ ID NO: 14673 - DNA, 40 bp, Artificial Sequence
  Description of Artificial Sequence: Synthetic primer
agaccagcaatgtaactttattttgtacatttttgaattg

SEQ ID NO: 14674 - DNA, 40 bp, Artificial Sequence
  Description of Artificial Sequence: Synthetic primer
gcagtaagtgcattggcaggagttcaggaccagctcattg

SEQ ID NO: 14675 - DNA, 40 bp, Artificial Sequence
  Description of Artificial Sequence: Synthetic primer
aagaagttgagtttccatgcagaaataacctctacagaac

SEQ ID NO: 14676 - DNA, 40 bp, Artificial Sequence
  Description of Artificial Sequence: Synthetic primer
agatcagctaaataaatcacaagaaagtaatgtaagcatc

SEQ ID NO: 14677 - DNA, 40 bp, Artificial Sequence
  Description of Artificial Sequence: Synthetic primer
gagtagcagtgggccagattgccgcgggggtgccatttag

SEQ ID NO: 14678 - DNA, 40 bp, Artificial Sequence
  Description of Artificial Sequence: Synthetic primer
ccccagcatcgcacagtggagaaggtccagtcattgaagc

SEQ ID NO: 14679 - DNA, 40 bp, Artificial Sequence
  Description of Artificial Sequence: Synthetic primer
agagcagaaaagggtgaacaaagaagagtctctacaaatg

SEQ ID NO: 14680 - DNA, 40 bp, Artificial Sequence
  Description of Artificial Sequence: Synthetic primer
ggtggagaggtccatgggattctttacgatgtcaaaatag

SEQ ID NO: 14681 - DNA, 40 bp, Artificial Sequence
  Description of Artificial Sequence: Synthetic primer
aattggtttctttaagtacatttttcatgaaggtcatttc

SEQ ID NO: 14682 - DNA, 40 bp, Artificial Sequence
  Description of Artificial Sequence: Synthetic primer
gcctccggccagatgcgcctggagaaaaccgaccagattc

SEQ ID NO: 14683 - DNA, 40 bp, Artificial Sequence
  Description of Artificial Sequence: Synthetic primer
ccttgcataaaggcccaggggacattggagcccacaagag

SEQ ID NO: 14684 - DNA, 40 bp, Artificial Sequence
  Description of Artificial Sequence: Synthetic primer
ctttgtattgtttacactcctcttctgaataaccagcttc

SEQ ID NO: 14685 - DNA, 40 bp, Artificial Sequence
  Description of Artificial Sequence: Synthetic primer
gcccatttggcctgctcgtaaagctgattgattctgattg

SEQ ID NO: 14686 - DNA, 40 bp, Artificial Sequence
  Description of Artificial Sequence: Synthetic primer
gctgcgctccacctggccgccgcctccagcccagcacctg

SEQ ID NO: 14687 - DNA, 40 bp, Artificial Sequence
  Description of Artificial Sequence: Synthetic primer
ggcctccaggggtcattcagagtgttctcaaatccaattc

SEQ ID NO: 14688 - DNA, 40 bp, Artificial Sequence
  Description of Artificial Sequence: Synthetic primer
acattactaaaatagattgctgattgtctatttaacgaag

SEQ ID NO: 14689 - DNA, 40 bp, Artificial Sequence
  Description of Artificial Sequence: Synthetic primer
gggtaccggcgggcgaggcggcggaggctgaggggagtcg

SEQ ID NO: 14690 - DNA, 40 bp, Artificial Sequence
  Description of Artificial Sequence: Synthetic primer
gcatctccagagtgataggcaactggacatcttaaacatc

SEQ ID NO: 14691 - DNA, 40 bp, Artificial Sequence
  Description of Artificial Sequence: Synthetic primer
cactcagctcagcatttgcttcttgtaagggtaaaatatc

SEQ ID NO: 14692 - DNA, 40 bp, Artificial Sequence
  Description of Artificial Sequence: Synthetic primer
catgtcattgaccaaggagatgatggagacaacttttatg

SEQ ID NO: 14693 - DNA, 40 bp, Artificial Sequence
  Description of Artificial Sequence: Synthetic primer
atcaatttcagatctttcaaaactgtatttccccttttac

SEQ ID NO: 14694 - DNA, 40 bp, Artificial Sequence
  Description of Artificial Sequence: Synthetic primer
gaccacagagcactttctccccctgttgtaaaaggaaaac

SEQ ID NO: 14695 - DNA, 40 bp, Artificial Sequence
  Description of Artificial Sequence: Synthetic primer
gcacagagcttttatagagggtctaagcaggcaggtattc

SEQ ID NO: 14696 - DNA, 40 bp, Artificial Sequence
  Description of Artificial Sequence: Synthetic primer
gaacataaagagcgctgccacaactacttggaaagcatgg

SEQ ID NO: 14697 - DNA, 40 bp, Artificial Sequence
  Description of Artificial Sequence: Synthetic primer
tgcccgggttctctcttttgtattcctcaattttcttctc

SEQ ID NO: 14698 - DNA, 40 bp, Artificial Sequence
  Description of Artificial Sequence: Synthetic primer
aacaataacagcaaatcctagtccgtctcatcaaatacac

SEQ ID NO: 14699 - DNA, 40 bp, Artificial Sequence
  Description of Artificial Sequence: Synthetic primer
tgaaagaggactgaaattacaccaaacaatttataatcag

SEQ ID NO: 14700 - DNA, 40 bp, Artificial Sequence
  Description of Artificial Sequence: Synthetic primer
tgagtttttgaagctcttgactttaaatgacttaactttt

SEQ ID NO: 14701 - DNA, 40 bp, Artificial Sequence
  Description of Artificial Sequence: Synthetic primer
acagttttttataatgttgtgtgtggtgattgttcaggtc

SEQ ID NO: 14702 - DNA, 40 bp, Artificial Sequence
  Description of Artificial Sequence: Synthetic primer
atgccaaaaacccaaactgcaagtggtactgttataatga

SEQ ID NO: 14703 - DNA, 40 bp, Artificial Sequence
  Description of Artificial Sequence: Synthetic primer
gaccgagggaatgatccttactaaccacgaccatcaaatc

SEQ ID NO: 14704 - DNA, 40 bp, Artificial Sequence
  Description of Artificial Sequence: Synthetic primer
gcagctgtgacagtcctgacactccagagacagatgattc

SEQ ID NO: 14705 - DNA, 40 bp, Artificial Sequence
  Description of Artificial Sequence: Synthetic primer
agcctttgataactttagttcgatgtttttcttgtttttg

SEQ ID NO: 14706 - DNA, 40 bp, Artificial Sequence
  Description of Artificial Sequence: Synthetic primer
aaagcctgtcagggaattcctcaagtcagggtgcatttgg

SEQ ID NO: 14707 - DNA, 40 bp, Artificial Sequence
  Description of Artificial Sequence: Synthetic primer
tgcctttagtcattaaaataaaatgcaaatgtgttaattc

SEQ ID NO: 14708 - DNA, 40 bp, Artificial Sequence
  Description of Artificial Sequence: Synthetic primer
tttggttttaaactatctgcataaattctcaatgttccac

SEQ ID NO: 14709 - DNA, 40 bp, Artificial Sequence
  Description of Artificial Sequence: Synthetic primer
tcggcctccagctattacgggtgtagaatcctttatgacc

SEQ ID NO: 14710 - DNA, 40 bp, Artificial Sequence
  Description of Artificial Sequence: Synthetic primer
cttggagtgaaacgaaagctttttacttcacaggcaaatg

SEQ ID NO: 14711 - DNA, 40 bp, Artificial Sequence
  Description of Artificial Sequence: Synthetic primer
aaacagagcactactgaggcccagaagaaagcagctccag

SEQ ID NO: 14712 - DNA, 40 bp, Artificial Sequence
  Description of Artificial Sequence: Synthetic primer
tttcaagttttataatatcttaaggtgtatattttatttt

SEQ ID NO: 14713 - DNA, 40 bp, Artificial Sequence
  Description of Artificial Sequence: Synthetic primer
tggagaattcctacagtctttcttaccctgctagcaatag

SEQ ID NO: 14714 - DNA, 40 bp, Artificial Sequence
  Description of Artificial Sequence: Synthetic primer
ggccccgccccataggggcagctcctggaagacaaaattc

SEQ ID NO: 14715 - DNA, 40 bp, Artificial Sequence
  Description of Artificial Sequence: Synthetic primer
gtctcattccagtaatgacccactcagcaggaatatggtg

SEQ ID NO: 14716 - DNA, 40 bp, Artificial Sequence
  Description of Artificial Sequence: Synthetic primer
tcctgcagtgtacacgtgccgtccttagcactcatgttgg

SEQ ID NO: 14717 - DNA, 40 bp, Artificial Sequence
  Description of Artificial Sequence: Synthetic primer
atgccaatactactgctaccactgttttctcgacttccac

SEQ ID NO: 14718 - DNA, 40 bp, Artificial Sequence
  Description of Artificial Sequence: Synthetic primer
tgagagaatgcatggcttcaatctctttttgctcccgttc

SEQ ID NO: 14719 - DNA, 40 bp, Artificial Sequence
  Description of Artificial Sequence: Synthetic primer
attcctgagctagcacattctgatgcttaccagactagag

SEQ ID NO: 14720 - DNA, 40 bp, Artificial Sequence
  Description of Artificial Sequence: Synthetic primer
aacctgcatttttcactttgctctcaattaaagtctattc

SEQ ID NO: 14721 - DNA, 40 bp, Artificial Sequence
  Description of Artificial Sequence: Synthetic primer
gcaaggcagaagcttggaggagggttgtaaaagcatattg

SEQ ID NO: 14722 - DNA, 40 bp, Artificial Sequence
  Description of Artificial Sequence: Synthetic primer
gcctgctctatggagaaagatatccacaaagcaagtaaag

SEQ ID NO: 14723 - DNA, 40 bp, Artificial Sequence
  Description of Artificial Sequence: Synthetic primer
cagtcaagcacatctcaagagcaagtgtataatgactgtg

SEQ ID NO: 14724 - DNA, 40 bp, Artificial Sequence
  Description of Artificial Sequence: Synthetic primer
ccgagctcgagctgcctgccgaccccaaatgggagctgtc

SEQ ID NO: 14725 - DNA, 40 bp, Artificial Sequence
  Description of Artificial Sequence: Synthetic primer
actccagactgtccacagcattccgctgaccatcaataag

SEQ ID NO: 14726 - DNA, 40 bp, Artificial Sequence
  Description of Artificial Sequence: Synthetic primer
agatttttcctactaaaaatcttcttattcaaaataaacc

SEQ ID NO: 14727 - DNA, 40 bp, Artificial Sequence
  Description of Artificial Sequence: Synthetic primer
gccgggtctgtgcggggactctggggctccttcttgatcc

SEQ ID NO: 14728 - DNA, 40 bp, Artificial Sequence
  Description of Artificial Sequence: Synthetic primer
tgttgggtttttcattcaataaattggtgatttcttaccg

SEQ ID NO: 14729 - DNA, 40 bp, Artificial Sequence
  Description of Artificial Sequence: Synthetic primer
tctttgtatacaatttcgatgttccttatatattccctat

SEQ ID NO: 14730 - DNA, 40 bp, Artificial Sequence
  Description of Artificial Sequence: Synthetic primer
taatgtcatctgaattcaaacaaatcacatcgccatcttc

SEQ ID NO: 14731 - DNA, 40 bp, Artificial Sequence
  Description of Artificial Sequence: Synthetic primer
tttttaaccatgccattgaacttttgggtgcattaaagtg

SEQ ID NO: 14732 - DNA, 40 bp, Artificial Sequence
  Description of Artificial Sequence: Synthetic primer
ccatactttgtgatcaagtaaataacaccatgtttagctc

SEQ ID NO: 14733 - DNA, 40 bp, Artificial Sequence
  Description of Artificial Sequence: Synthetic primer
gctcagactgactgtggatctgaactttcactcctgcttc

SEQ ID NO: 14734 - DNA, 40 bp, Artificial Sequence
  Description of Artificial Sequence: Synthetic primer
atgagttcaacttcatcaaggtgttgggcaaaggcagctt

SEQ ID NO: 14735 - DNA, 40 bp, Artificial Sequence
  Description of Artificial Sequence: Synthetic primer
actgaagcagatgatcactttttgcctccaagttcttcac

SEQ ID NO: 14736 - DNA, 40 bp, Artificial Sequence
  Description of Artificial Sequence: Synthetic primer
agagccccgagccctccaaggaccccaggcactgctgctc

SEQ ID NO: 14737 - DNA, 40 bp, Artificial Sequence
  Description of Artificial Sequence: Synthetic primer
ctgacatttggactcttcccttgggccgaccactctgttc

SEQ ID NO: 14738 - DNA, 40 bp, Artificial Sequence
  Description of Artificial Sequence: Synthetic primer
agaagactcggcgtttgaactcctacacctccatttactc

SEQ ID NO: 14739 - DNA, 40 bp, Artificial Sequence
  Description of Artificial Sequence: Synthetic primer
tgaagagttctaagtcttcaacttccttggcttttgagtc

SEQ ID NO: 14740 - DNA, 40 bp, Artificial Sequence
  Description of Artificial Sequence: Synthetic primer
caagatcttgcagagaagataacttgcttttatgattgac

SEQ ID NO: 14741 - DNA, 40 bp, Artificial Sequence
  Description of Artificial Sequence: Synthetic primer
ccagctcatgctccttaattcccagagccaatggcgagag

SEQ ID NO: 14742 - DNA, 40 bp, Artificial Sequence
  Description of Artificial Sequence: Synthetic primer
gaggtgggcctcgttagactgctcagattactggaacctc

SEQ ID NO: 14743 - DNA, 40 bp, Artificial Sequence
  Description of Artificial Sequence: Synthetic primer
ccttctctttcctctgaggtttgaactgatgttctgtgtc

SEQ ID NO: 14744 - DNA, 40 bp, Artificial Sequence
  Description of Artificial Sequence: Synthetic primer
gacagcgtctcccgtgccacgctggcggccgagcctgccc

SEQ ID NO: 14745 - DNA, 40 bp, Artificial Sequence
  Description of Artificial Sequence: Synthetic primer
ctccaatttgactcctgtgtctcctgctcgggatttgctg

SEQ ID NO: 14746 - DNA, 40 bp, Artificial Sequence
  Description of Artificial Sequence: Synthetic primer
tctatggtatccataacttcatctggactacatacaaaac

SEQ ID NO: 14747 - DNA, 40 bp, Artificial Sequence
  Description of Artificial Sequence: Synthetic primer
tgggtagtttgtttgtgggtggctttacagctccatcagg

SEQ ID NO: 14748 - DNA, 40 bp, Artificial Sequence
  Description of Artificial Sequence: Synthetic primer
ctgcaagatttgtcgttaagtcactaatcctctcctcaag

SEQ ID NO: 14749 - DNA, 40 bp, Artificial Sequence
  Description of Artificial Sequence: Synthetic primer
ctctgaggacaatgtttcagggtaaactggtggtatttcc

SEQ ID NO: 14750 - DNA, 40 bp, Artificial Sequence
  Description of Artificial Sequence: Synthetic primer
cagttttccaggagagagactccagagcgttgaaggagag

SEQ ID NO: 14751 - DNA, 40 bp, Artificial Sequence
  Description of Artificial Sequence: Synthetic primer
ctacatacactctggcttatattcttcatttactctcaac

SEQ ID NO: 14752 - DNA, 40 bp, Artificial Sequence
  Description of Artificial Sequence: Synthetic primer
aaatgaaaagcaaacatatgcacgcacttttcttgttgac

SEQ ID NO: 14753 - DNA, 40 bp, Artificial Sequence
  Description of Artificial Sequence: Synthetic primer
tattccaatacatttcaaacaaaatatttacaaatgaagc

SEQ ID NO: 14754 - DNA, 40 bp, Artificial Sequence
  Description of Artificial Sequence: Synthetic primer
ggaggagctgctgctgctgagcctggacgggccccctgag

SEQ ID NO: 14755 - DNA, 40 bp, Artificial Sequence
  Description of Artificial Sequence: Synthetic primer
gcagaatgccttataaacctgcagggtcactcatctaaag

SEQ ID NO: 14756 - DNA, 40 bp, Artificial Sequence
  Description of Artificial Sequence: Synthetic primer
gttatggcacctgtggctcccaaagagccttctactcaag

SEQ ID NO: 14757 - DNA, 40 bp, Artificial Sequence
  Description of Artificial Sequence: Synthetic primer
caatgattttacaagatgaagagatccacttactctccac

SEQ ID NO: 14758 - DNA, 40 bp, Artificial Sequence
  Description of Artificial Sequence: Synthetic primer
agagaagcccatggacagcatctgggagagggactcaatc

SEQ ID NO: 14759 - DNA, 40 bp, Artificial Sequence
  Description of Artificial Sequence: Synthetic primer
tctggcttccctccgccttccccacatttacccgcatcac

SEQ ID NO: 14760 - DNA, 40 bp, Artificial Sequence
  Description of Artificial Sequence: Synthetic primer
cccaaagaatgggtttgtatttaagggccccagcagttag

SEQ ID NO: 14761 - DNA, 40 bp, Artificial Sequence
  Description of Artificial Sequence: Synthetic primer
ccacgcctgtcctccccatcactttcctgtccctgagaac

SEQ ID NO: 14762 - DNA, 40 bp, Artificial Sequence
  Description of Artificial Sequence: Synthetic primer
atctgtagcatgccgttctggattaataaaagcaacttag

SEQ ID NO: 14763 - DNA, 40 bp, Artificial Sequence
  Description of Artificial Sequence: Synthetic primer
aggctgttttggaagagaaagagaaagacctagccaatac

SEQ ID NO: 14764 - DNA, 40 bp, Artificial Sequence
  Description of Artificial Sequence: Synthetic primer
atggccctggcaatgctgatgggatcacttaatgttacac

SEQ ID NO: 14765 - DNA, 40 bp, Artificial Sequence
  Description of Artificial Sequence: Synthetic primer
ccctcaggcctggaggaggggagttcagagccagggagtg

SEQ ID NO: 14766 - DNA, 40 bp, Artificial Sequence
  Description of Artificial Sequence: Synthetic primer
aagtggttgtcagctcttcttttccaagcaaaacccaagg

SEQ ID NO: 14767 - DNA, 40 bp, Artificial Sequence
  Description of Artificial Sequence: Synthetic primer
attcaacatttcaaatagatggtttactcaaatcactcac

SEQ ID NO: 14768 - DNA, 40 bp, Artificial Sequence
  Description of Artificial Sequence: Synthetic primer
aacgtggtgaggtcggtcctgctggccccaatggatttgc

SEQ ID NO: 14769 - DNA, 40 bp, Artificial Sequence
  Description of Artificial Sequence: Synthetic primer
ggaaatcccttttggccacacagtttacaaacccagtatc

SEQ ID NO: 14770 - DNA, 40 bp, Artificial Sequence; identical to SEQ ID NO: 14672
  Description of Artificial Sequence: Synthetic primer

SEQ ID NO: 14771 - DNA, 40 bp, Artificial Sequence
  Description of Artificial Sequence: Synthetic primer
ctagtctgtagtcaccacagagaagaactcttctgtcttc

SEQ ID NO: 14772 - DNA, 40 bp, Artificial Sequence
  Description of Artificial Sequence: Synthetic primer
ccagttcttctgaagcacacattccagaccaagaaacgac

SEQ ID NO: 14773 - DNA, 40 bp, Artificial Sequence
  Description of Artificial Sequence: Synthetic primer
caaggaaagggaaagcagcattgtctaaagtgagtttctc

SEQ ID NO: 14774 - DNA, 40 bp, Artificial Sequence
  Description of Artificial Sequence: Synthetic primer
ttcagacagtcctaaaagccttggagattcattccatttc

SEQ ID NO: 14775 - DNA, 40 bp, Artificial Sequence
  Description of Artificial Sequence: Synthetic primer
gctatgagacttgtggccgaagcgagaatgaggctgaacg

SEQ ID NO: 14776 - DNA, 40 bp, Artificial Sequence
  Description of Artificial Sequence: Synthetic primer
cctcttgggccaacagcaccagcaggaccaacaggaccag

SEQ ID NO: 14777 - DNA, 40 bp, Artificial Sequence
  Description of Artificial Sequence: Synthetic primer
acggaagattcgttcccggccggagagatcggagctggtc

SEQ ID NO: 14778 - DNA, 40 bp, Artificial Sequence
  Description of Artificial Sequence: Synthetic primer
ggctctgctggtccagatcttgcgctcagcacactctagg

SEQ ID NO: 14779 - DNA, 40 bp, Artificial Sequence
  Description of Artificial Sequence: Synthetic primer
gtatgaacataatcttcagagaacagcctgcaatatgacc

SEQ ID NO: 14780 - DNA, 40 bp, Artificial Sequence
  Description of Artificial Sequence: Synthetic primer
aaaaaaggacaaaaataaacaaaacatcaaatatgaaaat

SEQ ID NO: 14781 - DNA, 40 bp, Artificial Sequence
  Description of Artificial Sequence: Synthetic primer
gaaagaggcatttcctgaaaagattcccctttttggagag

SEQ ID NO: 14782 - DNA, 40 bp, Artificial Sequence
  Description of Artificial Sequence: Synthetic primer
cggctggccgctcgcggcagcacccgctggaggcactgtc

SEQ ID NO: 14783 - DNA, 40 bp, Artificial Sequence
  Description of Artificial Sequence: Synthetic primer
aggcggcggggacggaatgtgagtgggtggagagctcctg

SEQ ID NO: 14784 - DNA, 40 bp, Artificial Sequence
  Description of Artificial Sequence: Synthetic primer
aaatgaattagcgtgtcgctccagagaggcaaaactaagc

SEQ ID NO: 14785 - DNA, 40 bp, Artificial Sequence
  Description of Artificial Sequence: Synthetic primer
ttcatctgcttcacaattgtacttttaccagattcaccag

SEQ ID NO: 14786 - DNA, 40 bp, Artificial Sequence
  Description of Artificial Sequence: Synthetic primer
agcacttaattgtcaataaggctcattttcctatttcagc

SEQ ID NO: 14787 - DNA, 40 bp, Artificial Sequence
  Description of Artificial Sequence: Synthetic primer
tggcaaagaggaggacgaagggagccacgatgagaatgtg

SEQ ID NO: 14788 - DNA, 40 bp, Artificial Sequence
  Description of Artificial Sequence: Synthetic primer
tttcaatgaaatcctcaagacaagccaccaagaagaagtc

SEQ ID NO: 14789 - DNA, 40 bp, Artificial Sequence
  Description of Artificial Sequence: Synthetic primer
cctggcccgcccggcccgacccacggaaattatgaaactg

SEQ ID NO: 14790 - DNA, 40 bp, Artificial Sequence
  Description of Artificial Sequence: Synthetic primer
gagtagggggtgtggccataggcattgccagagtattcac

SEQ ID NO: 14791 - DNA, 40 bp, Artificial Sequence
  Description of Artificial Sequence: Synthetic primer
aggggcgctctgccaggtctgcccgctctctggaacagtc

SEQ ID NO: 14792 - DNA, 40 bp, Artificial Sequence
  Description of Artificial Sequence: Synthetic primer
ctggctttaattttgggataatcacaccaacaccgtcttc

SEQ ID NO: 14793 - DNA, 40 bp, Artificial Sequence
  Description of Artificial Sequence: Synthetic primer
ccctccaaattatcagtacaggaaataacatttggtaaac

SEQ ID NO: 14794 - DNA, 40 bp, Artificial Sequence
  Description of Artificial Sequence: Synthetic primer
tggtggcggtggaaatttcggaccaggaccaggaagtaac

SEQ ID NO: 14795 - DNA, 40 bp, Artificial Sequence
  Description of Artificial Sequence: Synthetic primer
ggctggccggcgccgcctcctgggaagatggcgctgcact

SEQ ID NO: 14796 - DNA, 40 bp, Artificial Sequence
  Description of Artificial Sequence: Synthetic primer
tttttggagagcgacagcatctggttggtgtcagcaggag

SEQ ID NO: 14797 - DNA, 40 bp, Artificial Sequence
  Description of Artificial Sequence: Synthetic primer
cgctatccacgtccaaggcagccatttcctcttgtttcac

SEQ ID NO: 14798 - DNA, 40 bp, Artificial Sequence
  Description of Artificial Sequence: Synthetic primer
actagagaggtgctgccttttctaagtcataatgaggaac

SEQ ID NO: 14799 - DNA, 40 bp, Artificial Sequence
  Description of Artificial Sequence: Synthetic primer
agagggaagttctgccattgaaaaaccagccgcatctcag

SEQ ID NO: 14800 - DNA, 40 bp, Artificial Sequence
  Description of Artificial Sequence: Synthetic primer
cccgccgaggccgcgattctgcgccaggccctgcccttcg

SEQ ID NO: 14801 - DNA, 40 bp, Artificial Sequence
  Description of Artificial Sequence: Synthetic primer
gccccagcttcaggggcagatagagccgttcactgttgac

SEQ ID NO: 14802 - DNA, 40 bp, Artificial Sequence
  Description of Artificial Sequence: Synthetic primer
acatctgagttctgagaattgggacataggagaagaaagc

SEQ ID NO: 14803 - DNA, 40 bp, Artificial Sequence
  Description of Artificial Sequence: Synthetic primer
tttgaaatccagtgattacactttggaaacctgttttagc

SEQ ID NO: 14804 - DNA, 40 bp, Artificial Sequence
  Description of Artificial Sequence: Synthetic primer
ctgaaatcctcttcatttatagaggtttgatttttatttc

SEQ ID NO: 14805 - DNA, 40 bp, Artificial Sequence
  Description of Artificial Sequence: Synthetic primer
gagcctttcaaagccaagtccctgaaggatgtggaagacc

SEQ ID NO: 14806 - DNA, 40 bp, Artificial Sequence
  Description of Artificial Sequence: Synthetic primer
attgagtaagacttccgcggttgacatggtgtgcgaggtg

SEQ ID NO: 14807 - DNA, 40 bp, Artificial Sequence
  Description of Artificial Sequence: Synthetic primer
atgctgtacaggtctctgtaaaaagtccttgctgtctcag

SEQ ID NO: 14808 - DNA, 40 bp, Artificial Sequence
  Description of Artificial Sequence: Synthetic primer
gccgtttctgggactggctctgagctcccgcaaaaacttg

SEQ ID NO: 14809 - DNA, 40 bp, Artificial Sequence
  Description of Artificial Sequence: Synthetic primer
tacgctgtggtcacccaggagcccatctacatcatcactg

SEQ ID NO: 14810 - DNA, 40 bp, Artificial Sequence
  Description of Artificial Sequence: Synthetic primer
gcgcatatcttcaaagcacctagtacctcctaccattgtc

SEQ ID NO: 14811 - DNA, 40 bp, Artificial Sequence
  Description of Artificial Sequence: Synthetic primer
gctgttgaattaatatccttcactttgaatgaagtaggag

SEQ ID NO: 14812 - DNA, 40 bp, Artificial Sequence
  Description of Artificial Sequence: Synthetic primer
gatcgaaaacgcaagcaagaggaacaaatggaaactgagc

SEQ ID NO: 14813 - DNA, 40 bp, Artificial Sequence
  Description of Artificial Sequence: Synthetic primer
tgttggtatagtgctgagggttccaatgttaccagagttg

SEQ ID NO: 14814 - DNA, 40 bp, Artificial Sequence
  Description of Artificial Sequence: Synthetic primer
gggcaaataatctgcatacttttaattgggaataagatgg

SEQ ID NO: 14815 - DNA, 40 bp, Artificial Sequence
  Description of Artificial Sequence: Synthetic primer
cttatttattcatatcatgccttatggaaatttctttttc

SEQ ID NO: 14816 - DNA, 40 bp, Artificial Sequence
  Description of Artificial Sequence: Synthetic primer
ggcttactactcaggacaagtatgccccgctcagggtgtg

SEQ ID NO: 14817 - DNA, 40 bp, Artificial Sequence
  Description of Artificial Sequence: Synthetic primer
ttatattaccatgtgcatagctaaagtcttctatttttag

SEQ ID NO: 14818 - DNA, 40 bp, Artificial Sequence
  Description of Artificial Sequence: Synthetic primer
tgttattctttcatttccaagggttctctgtggctttgtg

SEQ ID NO: 14819 - DNA, 40 bp, Artificial Sequence
  Description of Artificial Sequence: Synthetic primer
gtggccgccctgttccccgcgctgcggcctggcggcttcc

SEQ ID NO: 14820 - DNA, 40 bp, Artificial Sequence
  Description of Artificial Sequence: Synthetic primer
aatattattctttgttatcaaaagagaaatatcacccaag

SEQ ID NO: 14821 - DNA, 40 bp, Artificial Sequence
  Description of Artificial Sequence: Synthetic primer
caccactttagaagacaagtctagtggcttatctgtgacg

SEQ ID NO: 14822 - DNA, 40 bp, Artificial Sequence
  Description of Artificial Sequence: Synthetic primer
gctgcagtagattatgtcttcatcaagctgttaatttgtg

SEQ ID NO: 14823 - DNA, 40 bp, Artificial Sequence
  Description of Artificial Sequence: Synthetic primer
tgcaaggctgtgatacctgcaaagatatgtaaaatctaat

SEQ ID NO: 14824 - DNA, 40 bp, Artificial Sequence
  Description of Artificial Sequence: Synthetic primer
cgccacaagagcgataaccaggtgaataaccgccagtctc

SEQ ID NO: 14825 - DNA, 40 bp, Artificial Sequence
  Description of Artificial Sequence: Synthetic primer
tcagttttgtttataaaattaaactaaaggaaaaatgatg

SEQ ID NO: 14826 - DNA, 40 bp, Artificial Sequence
  Description of Artificial Sequence: Synthetic primer
tccggggcctacacctgcggtgctggcaggctggctgctg

SEQ ID NO: 14827 - DNA, 40 bp, Artificial Sequence
  Description of Artificial Sequence: Synthetic primer
gaggacagcacccctcagcaccacccaccctcattcagag

SEQ ID NO: 14828 - DNA, 40 bp, Artificial Sequence
  Description of Artificial Sequence: Synthetic primer
gatgacaacactgctattctcagacaagttcacggtgctg

SEQ ID NO: 14829 - DNA, 40 bp, Artificial Sequence
  Description of Artificial Sequence: Synthetic primer
aggagtgatacagctgctcaaactcccaaacaatcttctc

SEQ ID NO: 14830 - DNA, 40 bp, Artificial Sequence
  Description of Artificial Sequence: Synthetic primer
gctgagctgcctcagcatgcccttcaggttcacaatgatg

SEQ ID NO: 14831 - DNA, 40 bp, Artificial Sequence
  Description of Artificial Sequence: Synthetic primer
ctcggtcctcatttggggagcattcggggtggcactctgc

SEQ ID NO: 14832 - DNA, 40 bp, Artificial Sequence
  Description of Artificial Sequence: Synthetic primer
tttcgattctgaaggctcccttatcatatggagggttgtc

SEQ ID NO: 14833 - DNA, 40 bp, Artificial Sequence
  Description of Artificial Sequence: Synthetic primer
acagtatgcacatatgcagacgacagcggttcctgttgag

SEQ ID NO: 14834 - DNA, 40 bp, Artificial Sequence
  Description of Artificial Sequence: Synthetic primer
ctaaaggataatgataagtggcattaggagagcttttgag

SEQ ID NO: 14835 - DNA, 40 bp, Artificial Sequence
  Description of Artificial Sequence: Synthetic primer
catcagagagaggctcattttccctgtacagcagagatac

SEQ ID NO: 14836 - DNA, 40 bp, Artificial Sequence
  Description of Artificial Sequence: Synthetic primer
aaggtgggacgggattacgtccagaaggcgcagactaaag

SEQ ID NO: 14837 - DNA, 40 bp, Artificial Sequence
  Description of Artificial Sequence: Synthetic primer
ccattatcagctccctaacatcttacaaagtcttatcaac

SEQ ID NO: 14838 - DNA, 40 bp, Artificial Sequence
  Description of Artificial Sequence: Synthetic primer
acttacgtgtcagtgacgagtaaagaggtggccgtcaatg

SEQ ID NO: 14839 - DNA, 40 bp, Artificial Sequence
  Description of Artificial Sequence: Synthetic primer
gagcatgcttattcttctgcttctaagagttgttctcaag

SEQ ID NO: 14840 - DNA, 40 bp, Artificial Sequence
  Description of Artificial Sequence: Synthetic primer
gagacttattgtaatgaatggcacttactcaggatttagg

SEQ ID NO: 14841 - DNA, 40 bp, Artificial Sequence
  Description of Artificial Sequence: Synthetic primer
aagctcatggcacctctatagccttactcacatagtcttc

SEQ ID NO: 14842 - DNA, 40 bp, Artificial Sequence
  Description of Artificial Sequence: Synthetic primer
tatgatcgacctgacagtcactggattaaagggagtccac

SEQ ID NO: 14843 - DNA, 40 bp, Artificial Sequence
  Description of Artificial Sequence: Synthetic primer
tgggatccaacagatttctattgatcacctctctaactcg

SEQ ID NO: 14844 - DNA, 40 bp, Artificial Sequence
  Description of Artificial Sequence: Synthetic primer
tcccttttcagagcacagcattaaagtttggggaattctg

SEQ ID NO: 14845 - DNA, 40 bp, Artificial Sequence
  Description of Artificial Sequence: Synthetic primer
gcaaaaaatgtgcgaaggccaaatctgtgtttttcttttc

SEQ ID NO: 14846 - DNA, 40 bp, Artificial Sequence
  Description of Artificial Sequence: Synthetic primer
gtttatatttatgtgaaagacagaggaaatatacaagcag

SEQ ID NO: 14847 - DNA, 40 bp, Artificial Sequence
  Description of Artificial Sequence: Synthetic primer
tcccaagatgcagaggccagaaagcagacagaatcagaac

SEQ ID NO: 14848 - DNA, 40 bp, Artificial Sequence
  Description of Artificial Sequence: Synthetic primer
caggccaggaggagctcgggcgcaggccaggcccccttgg

SEQ ID NO: 14849 - DNA, 40 bp, Artificial Sequence
  Description of Artificial Sequence: Synthetic primer
ccccgccctgctccatgatgcgccgggtcttgttcatcac

SEQ ID NO: 14850 - DNA, 40 bp, Artificial Sequence
  Description of Artificial Sequence: Synthetic primer
ggccctaaatgaaactgattaccactcatagggacaaacc

SEQ ID NO: 14851 - DNA, 40 bp, Artificial Sequence
  Description of Artificial Sequence: Synthetic primer
cagcaactcagccacaaacaacagaaactaatctccaaac

SEQ ID NO: 14852 - DNA, 40 bp, Artificial Sequence
  Description of Artificial Sequence: Synthetic primer
attcaatgtctccaggaggctcaaaccctgatttataagc

SEQ ID NO: 14853 - DNA, 40 bp, Artificial Sequence
  Description of Artificial Sequence: Synthetic primer
agcaagttgtgtgtgcgcccgggacgcgggagggaaggtg

SEQ ID NO: 14854 - DNA, 40 bp, Artificial Sequence
  Description of Artificial Sequence: Synthetic primer
ttttgcaccccctcaccgccaactctgttattcagtagag

SEQ ID NO: 14855 - DNA, 40 bp, Artificial Sequence
  Description of Artificial Sequence: Synthetic primer
tagcattaaatattgaatcctaggtgccacacttctttta

SEQ ID NO: 14856 - DNA, 40 bp, Artificial Sequence
  Description of Artificial Sequence: Synthetic primer
ctagatcatttgttagaggcttcagaaaaagaaaattagc

SEQ ID NO: 14857 - DNA, 40 bp, Artificial Sequence
  Description of Artificial Sequence: Synthetic primer
gatgtggcttttgtccagctgatagtagttagaggcttac

SEQ ID NO: 14858 - DNA, 40 bp, Artificial Sequence
  Description of Artificial Sequence: Synthetic primer
cagggagagacctcacagacttcctggagaatgtcctcac

SEQ ID NO: 14859 - DNA, 40 bp, Artificial Sequence
  Description of Artificial Sequence: Synthetic primer
ctggccaagaaattcagctcttctttagcaagagggtttg

SEQ ID NO: 14860 - DNA, 40 bp, Artificial Sequence
  Description of Artificial Sequence: Synthetic primer
caagcctatatcacatgtttatgttctatgctccctaatg

SEQ ID NO: 14861 - DNA, 40 bp, Artificial Sequence
  Description of Artificial Sequence: Synthetic primer
acaaacagagagaaaaggttcatgcaattatgaatatgac

SEQ ID NO: 14862 - DNA, 40 bp, Artificial Sequence
  Description of Artificial Sequence: Synthetic primer
ttgtcatctcataggcacgaatccgcttgtcacaggatgc

SEQ ID NO: 14863 - DNA, 40 bp, Artificial Sequence
  Description of Artificial Sequence: Synthetic primer
gtgcacgtccatacttaactactgaatgtgaagatgtcct

SEQ ID NO: 14864 - DNA, 40 bp, Artificial Sequence
  Description of Artificial Sequence: Synthetic primer
tccctgggaaagtctcaataggaaacaacctgtagatgag

SEQ ID NO: 14865 - DNA, 40 bp, Artificial Sequence
  Description of Artificial Sequence: Synthetic primer
cactcgatagcaatgcacttcccgatgccactggaacctc

SEQ ID NO: 14866 - DNA, 40 bp, Artificial Sequence
  Description of Artificial Sequence: Synthetic primer
cacaggatctgtaaggtggagggttcaggttgtttctttc

SEQ ID NO: 14867 - DNA, 40 bp, Artificial Sequence
  Description of Artificial Sequence: Synthetic primer
tccctccaggctaacactgaagctactgaagaaaatgaac

SEQ ID NO: 14868 - DNA, 40 bp, Artificial Sequence
  Description of Artificial Sequence: Synthetic primer
gacacgcagcagctacaacaacagctgagatcacttaata

SEQ ID NO: 14869 - DNA, 40 bp, Artificial Sequence
  Description of Artificial Sequence: Synthetic primer
tccatctcaccgctccggtgcccttccctcttcaggaatg

SEQ ID NO: 14870 - DNA, 40 bp, Artificial Sequence
  Description of Artificial Sequence: Synthetic primer
aagaaaaaatcaaaaagagccctctcactatatgctatcc

SEQ ID NO: 14871 - DNA, 40 bp, Artificial Sequence
  Description of Artificial Sequence: Synthetic primer
cggcagacggctgcccttccagttccatctgtccagcaac

SEQ ID NO: 14872 - DNA, 40 bp, Artificial Sequence
  Description of Artificial Sequence: Synthetic primer
cagacagtggggaggaagaatgccggtcacagcccaggag

SEQ ID NO: 14873 - DNA, 40 bp, Artificial Sequence
  Description of Artificial Sequence: Synthetic primer
cagcgaggacacctgcccactgaatgttcattcttatgac

SEQ ID NO: 14874 - DNA, 40 bp, Artificial Sequence
  Description of Artificial Sequence: Synthetic primer
ggctccctcgggagctcatcttcgtggggcgtgaggagtg

SEQ ID NO: 14875 - DNA, 40 bp, Artificial Sequence
  Description of Artificial Sequence: Synthetic primer
gcacagtttttctgatctacagagttccaaaagtgacatc

SEQ ID NO: 14876 - DNA, 40 bp, Artificial Sequence
  Description of Artificial Sequence: Synthetic primer
gctaaaagcttctaaagcacaagtgcatatttttatactg

SEQ ID NO: 14877 - DNA, 40 bp, Artificial Sequence
  Description of Artificial Sequence: Synthetic primer
gtccgtccaagcagaggagcaaaagctcatttctgaagag

SEQ ID NO: 14878 - DNA, 40 bp, Artificial Sequence
  Description of Artificial Sequence: Synthetic primer
gaagccttttgtggagttgtaccgtttgtttcttattgtc

SEQ ID NO: 14879 - DNA, 40 bp, Artificial Sequence
  Description of Artificial Sequence: Synthetic primer
ctcttcaaaccatttggactgggcctggttgtagagatcc

SEQ ID NO: 14880 - DNA, 40 bp, Artificial Sequence
  Description of Artificial Sequence: Synthetic primer
cccaggccgcgccggcccagccctgcgatgccgcctggag

SEQ ID NO: 14881 - DNA, 40 bp, Artificial Sequence
  Description of Artificial Sequence: Synthetic primer
ttgatattaacaactggaggaacaggatttgcaccacgag

SEQ ID NO: 14882 - DNA, 40 bp, Artificial Sequence
  Description of Artificial Sequence: Synthetic primer
gattccaggagattggatttgctgtgactagatacagatg

SEQ ID NO: 14883 - DNA, 40 bp, Artificial Sequence
  Description of Artificial Sequence: Synthetic primer
gtatttttactaattttctcaatagcacgaactgcttcac

SEQ ID NO: 14884 - DNA, 40 bp, Artificial Sequence
  Description of Artificial Sequence: Synthetic primer
gctggagaagtcccgcgtggtcatgcaaaatgaaaatgag

SEQ ID NO: 14885 - DNA, 40 bp, Artificial Sequence
  Description of Artificial Sequence: Synthetic primer
gagaaggaatcactttgcctactacaactatcacacttac

SEQ ID NO: 14886 - DNA, 40 bp, Artificial Sequence
  Description of Artificial Sequence: Synthetic primer
aaaatcaaccacattgaggaacattaggcacagagagtaa

SEQ ID NO: 14887 - DNA, 40 bp, Artificial Sequence
  Description of Artificial Sequence: Synthetic primer
gtgcaatgttcaatcataagtgtgacaaaaactgacaagc

SEQ ID NO: 14888 - DNA, 40 bp, Artificial Sequence
  Description of Artificial Sequence: Synthetic primer
tgcagaagctggaggaggcagaaaaagctgcagatgagag

SEQ ID NO: 14889 - DNA, 40 bp, Artificial Sequence
  Description of Artificial Sequence: Synthetic primer
ttgctgttatcaacagcatcgagtaatgataggtatctgg

SEQ ID NO: 14890 - DNA, 40 bp, Artificial Sequence
  Description of Artificial Sequence: Synthetic primer
caatagaaactttaatacaagtcatgttcttatccctctg

SEQ ID NO: 14891 - DNA, 40 bp, Artificial Sequence
  Description of Artificial Sequence: Synthetic primer
tcacgtggcttcaacagctttggaaatgggtcccgagtgg

SEQ ID NO: 14892 - DNA, 40 bp, Artificial Sequence
  Description of Artificial Sequence: Synthetic primer
gttcattttcgaagtctcggtcccgaagccgatctctctc

SEQ ID NO: 14893 - DNA, 40 bp, Artificial Sequence
  Description of Artificial Sequence: Synthetic primer
tggcctcgtggtgggaggaagaggaagccgaggaggagac

SEQ ID NO: 14894 - DNA, 40 bp, Artificial Sequence
  Description of Artificial Sequence: Synthetic primer
cacaacctccagactgtgcagctgttaataaagaaaaatc

SEQ ID NO: 14895 - DNA, 40 bp, Artificial Sequence
  Description of Artificial Sequence: Synthetic primer
tgcggtgaaacctcagaccctgggaggcgattccactttc

SEQ ID NO: 14896 - DNA, 40 bp, Artificial Sequence
  Description of Artificial Sequence: Synthetic primer
aggactcttctgtgcttttattgtagggctggggatcgag

SEQ ID NO: 14897 - DNA, 40 bp, Artificial Sequence
  Description of Artificial Sequence: Synthetic primer
atctgaaggtcctttacagacgcggttacttgagatgaac

SEQ ID NO: 14898 - DNA, 40 bp, Artificial Sequence
  Description of Artificial Sequence: Synthetic primer
catgtatcacaattctgctccaaatatggtgtggtctgag

SEQ ID NO: 14899 - DNA, 40 bp, Artificial Sequence
  Description of Artificial Sequence: Synthetic primer
ctgcgtccttcactgccaactccgtctctcccgtcatctc

SEQ ID NO: 14900 - DNA, 40 bp, Artificial Sequence
  Description of Artificial Sequence: Synthetic primer
agtaattccagaagaaactgccatagctggattggtccac

SEQ ID NO: 14901 - DNA, 40 bp, Artificial Sequence
  Description of Artificial Sequence: Synthetic primer
attggacaggaagcggtatttgttgtacggctccaacagg

SEQ ID NO: 14902 - DNA, 40 bp, Artificial Sequence
  Description of Artificial Sequence: Synthetic primer
tgtgtagtccaccgtcaacacatcgtcccaattcttgaac

SEQ ID NO: 14903 - DNA, 40 bp, Artificial Sequence
  Description of Artificial Sequence: Synthetic primer
taccgtgcccgccgaggggagggcgcgggagcgggaggag

SEQ ID NO: 14904 - DNA, 40 bp, Artificial Sequence
  Description of Artificial Sequence: Synthetic primer
tggcaggggttgcccgcacactcatcgatgttgatgttac

SEQ ID NO: 14905 - DNA, 40 bp, Artificial Sequence
  Description of Artificial Sequence: Synthetic primer
taataggtgcactcattaaaaacactacggaaaaacactg

SEQ ID NO: 14906 - DNA, 40 bp, Artificial Sequence
  Description of Artificial Sequence: Synthetic primer
gattcttggcaggatcattgtggcttggacttcctgattg

SEQ ID NO: 14907 - DNA, 40 bp, Artificial Sequence
  Description of Artificial Sequence: Synthetic primer
ttttgctttctgctgtctttttaaagtcacgttgtaggac

SEQ ID NO: 14908 - DNA, 40 bp, Artificial Sequence
  Description of Artificial Sequence: Synthetic primer
gccttagaagttagtagtttgggaacctatctgtaaaatc

SEQ ID NO: 14909 - DNA, 40 bp, Artificial Sequence
  Description of Artificial Sequence: Synthetic primer
catgtacttatacatgccctgatcctccgtctctatgtgg

SEQ ID NO: 14910 - DNA, 40 bp, Artificial Sequence
  Description of Artificial Sequence: Synthetic primer
gttatgatgcttgaaagttctcaataaagttcacggtttc

SEQ ID NO: 14911 - DNA, 40 bp, Artificial Sequence
  Description of Artificial Sequence: Synthetic primer
ccctaccttccgccttcctcctggctctaaacacaaatgc

SEQ ID NO: 14912 - DNA, 40 bp, Artificial Sequence
  Description of Artificial Sequence: Synthetic primer
tgctctgccaatcacacctgtttctttttgttgttctttc

SEQ ID NO: 14913 - DNA, 40 bp, Artificial Sequence
  Description of Artificial Sequence: Synthetic primer
actgttttttcattcataaagagcagttaagatgcagatg

SEQ ID NO: 14914 - DNA, 40 bp, Artificial Sequence
  Description of Artificial Sequence: Synthetic primer
tgtgctgggtgtggttaggcctcgagccgggagctatttg

SEQ ID NO: 14915 - DNA, 40 bp, Artificial Sequence
  Description of Artificial Sequence: Synthetic primer
gatgcagacggcaggtgtgtgggaagcgccgtttaaatac

SEQ ID NO: 14916 - DNA, 40 bp, Artificial Sequence
  Description of Artificial Sequence: Synthetic primer
ggtggggcggctcctcgggcggcagcgctataatagtagg

SEQ ID NO: 14917 - DNA, 40 bp, Artificial Sequence
  Description of Artificial Sequence: Synthetic primer
ctccctggctcgagaggtgaacgtggtctaccaggtgttg

SEQ ID NO: 14918 - DNA, 40 bp, Artificial Sequence
  Description of Artificial Sequence: Synthetic primer
cccccccaggaaattgccccagatgcctccttcatcgatg

SEQ ID NO: 14919 - DNA, 40 bp, Artificial Sequence
  Description of Artificial Sequence: Synthetic primer
ggaacaacagcgaagataacatctgtctctactggaaacc

SEQ ID NO: 14920 - DNA, 40 bp, Artificial Sequence
  Description of Artificial Sequence: Synthetic primer
cagcagtatggacgaccttcataagaaagatgctggaatg

SEQ ID NO: 14921 - DNA, 40 bp, Artificial Sequence
  Description of Artificial Sequence: Synthetic primer
ccaggacctttcgtgccatggagagtgttggcctcttgtc

SEQ ID NO: 14922 - DNA, 40 bp, Artificial Sequence
  Description of Artificial Sequence: Synthetic primer
acaatatacagcccacaaccgagtaggggccacccttgac

SEQ ID NO: 14923 - DNA, 40 bp, Artificial Sequence
  Description of Artificial Sequence: Synthetic primer
cggcccctctgtcgtaccaggagccccagacactccactc

SEQ ID NO: 14924 - DNA, 40 bp, Artificial Sequence
  Description of Artificial Sequence: Synthetic primer
tatttttggcacatacattcccatgaataagggtgttttc

SEQ ID NO: 14925 - DNA, 40 bp, Artificial Sequence
  Description of Artificial Sequence: Synthetic primer
ctggaatgaatgtgaacttattgttgtgcaggtaaagatg

SEQ ID NO: 14926 - DNA, 40 bp, Artificial Sequence
  Description of Artificial Sequence: Synthetic primer
gtctcagagtgatgtgtgcaagcctttttcaaagacaaac

SEQ ID NO: 14927 - DNA, 40 bp, Artificial Sequence
  Description of Artificial Sequence: Synthetic primer
atgcaggtacctgaggagtcgcactctatcccagagttgg

SEQ ID NO: 14928 - DNA, 40 bp, Artificial Sequence
  Description of Artificial Sequence: Synthetic primer
gagccccgagcgcggccgagggtccgcccgcctgcaagac

SEQ ID NO: 14929 - DNA, 40 bp, Artificial Sequence
  Description of Artificial Sequence: Synthetic primer
tggaagaatcaaaagggcaaatcggcgtgtgcgtactctg

SEQ ID NO: 14930 - DNA, 40 bp, Artificial Sequence
  Description of Artificial Sequence: Synthetic primer
agccgttttatgcacggtccccaatgacctgctgaaattg

SEQ ID NO: 14931 - DNA, 40 bp, Artificial Sequence
  Description of Artificial Sequence: Synthetic primer
agccagaagcaacaaagatgccaaggatccaacgaccaag

SEQ ID NO: 14932 - DNA, 40 bp, Artificial Sequence
  Description of Artificial Sequence: Synthetic primer
tcaccagatgcttgagagacagtatgtgtaggttgaactg

SEQ ID NO: 14933 - DNA, 40 bp, Artificial Sequence
  Description of Artificial Sequence: Synthetic primer
gatagttcaaaccagcaaggagatgcggacatcaaaccac

SEQ ID NO: 14934 - DNA, 40 bp, Artificial Sequence
  Description of Artificial Sequence: Synthetic primer
aggctccaacttgatgttctttttcccatacacacgatac

SEQ ID NO: 14935 - DNA, 40 bp, Artificial Sequence
  Description of Artificial Sequence: Synthetic primer
cacaccctgcctggcaatggtatgagagtcggacctggac

SEQ ID NO: 14936 - DNA, 40 bp, Artificial Sequence
  Description of Artificial Sequence: Synthetic primer
gtcctctctattaatacctctctcaataccttttgctgtg

SEQ ID NO: 14937 - DNA, 40 bp, Artificial Sequence
  Description of Artificial Sequence: Synthetic primer
acagcagccataaaaagcgaaagaataaaaaccggcacag

SEQ ID NO: 14938 - DNA, 40 bp, Artificial Sequence
  Description of Artificial Sequence: Synthetic primer
gtccgattaagtacaagcactttggggtaaggagcaggtc

SEQ ID NO: 14939 - DNA, 40 bp, Artificial Sequence
  Description of Artificial Sequence: Synthetic primer
ccacccaggcatacacgatgccctggttgtcctcactctc

SEQ ID NO: 14940 - DNA, 40 bp, Artificial Sequence
  Description of Artificial Sequence: Synthetic primer
ggctaaatggcattttgaagcccagtcattctctaaaaag

SEQ ID NO: 14941 - DNA, 40 bp, Artificial Sequence
  Description of Artificial Sequence: Synthetic primer
ggcctggataaagctgtgctacagtctatgagtggaagag

SEQ ID NO: 14942 - DNA, 40 bp, Artificial Sequence
  Description of Artificial Sequence: Synthetic primer
attataagagaccatggattaatcaaccttagaaagtttc

SEQ ID NO: 14943 - DNA, 40 bp, Artificial Sequence
  Description of Artificial Sequence: Synthetic primer
actgccgatttagaaagatgttaagacacacactagatac

SEQ ID NO: 14944 - DNA, 40 bp, Artificial Sequence
  Description of Artificial Sequence: Synthetic primer
taatcaacaaaggcggttcattcccagtactatgtatttc

SEQ ID NO: 14945 - DNA, 40 bp, Artificial Sequence
  Description of Artificial Sequence: Synthetic primer
gaatgcagggcctggcctacaatactggagttaaggaaat

SEQ ID NO: 14946 - DNA, 40 bp, Artificial Sequence
  Description of Artificial Sequence: Synthetic primer
gatctcagccttccctttccgctcattcttgttaattttc

SEQ ID NO: 14947 - DNA, 40 bp, Artificial Sequence
  Description of Artificial Sequence: Synthetic primer
tgggagggggcatgcataatgccacaggactgcaacacac

SEQ ID NO: 14948 - DNA, 40 bp, Artificial Sequence
  Description of Artificial Sequence: Synthetic primer
cccactgtgggagccattttagctggcaatcgcacaaaag

SEQ ID NO: 14949 - DNA, 40 bp, Artificial Sequence
  Description of Artificial Sequence: Synthetic primer
gtttggccacttctacacgcaggactgctacgtcttcctc

SEQ ID NO: 14950 - DNA, 40 bp, Artificial Sequence
  Description of Artificial Sequence: Synthetic primer
aggaggctgccggcaagaccaacccggggagggactccag

SEQ ID NO: 14951 - DNA, 40 bp, Artificial Sequence
  Description of Artificial Sequence: Synthetic primer
cagtgtttttctcgcaagtgtttttctaacaaaatgatcg

SEQ ID NO: 14952 - DNA, 40 bp, Artificial Sequence
  Description of Artificial Sequence: Synthetic primer
ttttatgatgacacctgtgttgtcccagaaaaattcgatg

SEQ ID NO: 14953 - DNA, 40 bp, Artificial Sequence
  Description of Artificial Sequence: Synthetic primer
gagctccaggaggaactgccaaagctggatctggccactg

SEQ ID NO: 14954 - DNA, 40 bp, Artificial Sequence
  Description of Artificial Sequence: Synthetic primer
aaaaacatatgattgtctggtaaacggcagcagggacagc

SEQ ID NO: 14955 - DNA, 40 bp, Artificial Sequence
  Description of Artificial Sequence: Synthetic primer
gttgattattaccaaacaaatgttgccctcttctattact

SEQ ID NO: 14956 - DNA, 40 bp, Artificial Sequence
  Description of Artificial Sequence: Synthetic primer
tatagacgctataagccctgtagatattatgggtatgaag

SEQ ID NO: 14957 - DNA, 40 bp, Artificial Sequence
  Description of Artificial Sequence: Synthetic primer
ttctattttcaaatacttgtgattaataaggcattctatg

SEQ ID NO: 14958 - DNA, 40 bp, Artificial Sequence
  Description of Artificial Sequence: Synthetic primer
taatggatactacagacaacagagaaaacttgttgaagag

SEQ ID NO: 14959 - DNA, 40 bp, Artificial Sequence
  Description of Artificial Sequence: Synthetic primer
gccaccactgctgccgacctcgcaaccactgctttgtctc

SEQ ID NO: 14960 - DNA, 40 bp, Artificial Sequence
  Description of Artificial Sequence: Synthetic primer
gcctctgggcggcctggccctgcaccccggcagcctctgg

SEQ ID NO: 14961 - DNA, 40 bp, Artificial Sequence
  Description of Artificial Sequence: Synthetic primer
ttggggggcagttaaaaatgaataaaaatctctcagctac

SEQ ID NO: 14962 - DNA, 40 bp, Artificial Sequence
  Description of Artificial Sequence: Synthetic primer
ccccgggggacgggcaggtgatgagggtggagttgagaac

SEQ ID NO: 14963 - DNA, 40 bp, Artificial Sequence
  Description of Artificial Sequence: Synthetic primer
tgggtgaaaagttggctgctgcaaatcaagcagatcattg

SEQ ID NO: 14964 - DNA, 40 bp, Artificial Sequence
  Description of Artificial Sequence: Synthetic primer
catggctctcacttgagaagctcacctgtgctgaatgtcc

SEQ ID NO: 14965 - DNA, 40 bp, Artificial Sequence
  Description of Artificial Sequence: Synthetic primer
aaggatggagctctccatggggttgtctgcttgcattgag

SEQ ID NO: 14966 - DNA, 40 bp, Artificial Sequence
  Description of Artificial Sequence: Synthetic primer
ctttaaaacccaaaagaacaaaatattaatactggataag

SEQ ID NO: 14967 - DNA, 40 bp, Artificial Sequence
  Description of Artificial Sequence: Synthetic primer
ccatcatggcctcctgagcacgttcatgaaactcttccac

SEQ ID NO: 14968 - DNA, 40 bp, Artificial Sequence
  Description of Artificial Sequence: Synthetic primer
tggaggcattgaccacaaacctcgggacggctttcatctg

SEQ ID NO: 14969 - DNA, 40 bp, Artificial Sequence
  Description of Artificial Sequence: Synthetic primer
agactctattctctactagtgtgcaacaccaccccaaaac

SEQ ID NO: 14970 - DNA, 40 bp, Artificial Sequence
  Description of Artificial Sequence: Synthetic primer
agactaaggaaagagcctggaaaatggagcagacctggac

SEQ ID NO: 14971 - DNA, 40 bp, Artificial Sequence
  Description of Artificial Sequence: Synthetic primer
ccaccaaaatcactatgtccttgggagaagtagcagcttg

SEQ ID NO: 14972 - DNA, 40 bp, Artificial Sequence
  Description of Artificial Sequence: Synthetic primer
agtggtgtacaagcctgtttcaacagatcccgagagtacc

SEQ ID NO: 14973 - DNA, 40 bp, Artificial Sequence
  Description of Artificial Sequence: Synthetic primer
tctgaaaaaagaagaccgctctgatgggagtgcacctagc

SEQ ID NO: 14974 - DNA, 40 bp, Artificial Sequence
  Description of Artificial Sequence: Synthetic primer
agatccgctttggagggagaaaggagattgcctcggattc

SEQ ID NO: 14975 - DNA, 40 bp, Artificial Sequence
  Description of Artificial Sequence: Synthetic primer
cttactaaagaaaaagttgaagaactgattaaacagagag

SEQ ID NO: 14976 - DNA, 40 bp, Artificial Sequence
  Description of Artificial Sequence: Synthetic primer
atgttatgtaaaattgataatcataaataaatacaaatac

SEQ ID NO: 14977 - DNA, 40 bp, Artificial Sequence
  Description of Artificial Sequence: Synthetic primer
gatgggcctcctggagagcattgcggtggccaaagccttc

SEQ ID NO: 14978 - DNA, 40 bp, Artificial Sequence
  Description of Artificial Sequence: Synthetic primer
caagtcatgttatacaggtgtgtcaaaaggtatcttggtc

SEQ ID NO: 14979 - DNA, 40 bp, Artificial Sequence
  Description of Artificial Sequence: Synthetic primer
cagtcgcatcttgcgagccatagggtccttgggcccactc

SEQ ID NO: 14980 - DNA, 40 bp, Artificial Sequence
  Description of Artificial Sequence: Synthetic primer
attgtacatttatttattactgtccctatctattaaagtg

SEQ ID NO: 14981 - DNA, 40 bp, Artificial Sequence
  Description of Artificial Sequence: Synthetic primer
aatatttcctagagaatagtaaccaggttttgtttttaac

SEQ ID NO: 14982 - DNA, 40 bp, Artificial Sequence
  Description of Artificial Sequence: Synthetic primer
accagcccatcgccacaaactctatcggagaacatgaatc

SEQ ID NO: 14983 - DNA, 40 bp, Artificial Sequence
  Description of Artificial Sequence: Synthetic primer
gaaaaaacatatagaaaaccagaaagcctggaaaataaag

SEQ ID NO: 14984 - DNA, 40 bp, Artificial Sequence
  Description of Artificial Sequence: Synthetic primer
aggttgtggcaacttgcaattcattttggtctggggagag

SEQ ID NO: 14985 - DNA, 40 bp, Artificial Sequence
  Description of Artificial Sequence: Synthetic primer
atatattctcctggctggtgcttatgattgcaaaacttgg

SEQ ID NO: 14986 - DNA, 40 bp, Artificial Sequence
  Description of Artificial Sequence: Synthetic primer
ctctgtgacagactcagtgcccttccgctcacaccgcttg

SEQ ID NO: 14987 - DNA, 40 bp, Artificial Sequence
  Description of Artificial Sequence: Synthetic primer
ctgcattcaaagctttctagatgcaccaactttaaaaatc

SEQ ID NO: 14988 - DNA, 40 bp, Artificial Sequence
  Description of Artificial Sequence: Synthetic primer
tgtctcaggcctctagacctagactggggttctggcaagg

SEQ ID NO: 14989 - DNA, 40 bp, Artificial Sequence
  Description of Artificial Sequence: Synthetic primer
ttttttctttttgcctgattagataagccccttcaaaatc

SEQ ID NO: 14990 - DNA, 40 bp, Artificial Sequence
  Description of Artificial Sequence: Synthetic primer
atgctgtatagcctttgtcattttataattttaattcctg

SEQ ID NO: 14991 - DNA, 40 bp, Artificial Sequence
  Description of Artificial Sequence: Synthetic primer
atgcatatgtctgtatgtgcttgtgtgcttttgggagtgc

SEQ ID NO: 14992 - DNA, 40 bp, Artificial Sequence
  Description of Artificial Sequence: Synthetic primer
gttcgttgtcttatccaaaattgcctttgtggagactatt

SEQ ID NO: 14993 - DNA, 40 bp, Artificial Sequence
  Description of Artificial Sequence: Synthetic primer
ttttcagaaactgatttttattaagggcatctgtaatgag

SEQ ID NO: 14994 - DNA, 40 bp, Artificial Sequence
  Description of Artificial Sequence: Synthetic primer
gttgataacttcataggataactcttctggcctggttagc

SEQ ID NO: 14995 - DNA, 40 bp, Artificial Sequence
  Description of Artificial Sequence: Synthetic primer
ctggggggttgtggggctgggcccgctcttgccactacgc

SEQ ID NO: 14996 - DNA, 40 bp, Artificial Sequence
  Description of Artificial Sequence: Synthetic primer
ctccgcctcctccttgcctcaccaatacaggaactacaac

SEQ ID NO: 14997 - DNA, 40 bp, Artificial Sequence
  Description of Artificial Sequence: Synthetic primer
tgcacttattcctcacaaaatcttcacttttggaactatc

SEQ ID NO: 14998 - DNA, 40 bp, Artificial Sequence
  Description of Artificial Sequence: Synthetic primer
tgtctctcccttatttactctgggaccgggtggcgactgc

SEQ ID NO: 14999 - DNA, 40 bp, Artificial Sequence
  Description of Artificial Sequence: Synthetic primer
tatccacatcagacagcccaggagatgaaaatgcagagtc

SEQ ID NO: 15000 - DNA, 40 bp, Artificial Sequence
  Description of Artificial Sequence: Synthetic primer
tgataagccactccgacaaggggctgttctttatgacttg

SEQ ID NO: 15001 - DNA, 40 bp, Artificial Sequence
  Description of Artificial Sequence: Synthetic primer
agtataagagggacaagttcaagaagacgaaatatggaag

SEQ ID NO: 15002 - DNA, 40 bp, Artificial Sequence
  Description of Artificial Sequence: Synthetic primer
ttgcattcaaacagtttaatgccaccaagtaggtctgaac

SEQ ID NO: 15003 - DNA, 40 bp, Artificial Sequence
  Description of Artificial Sequence: Synthetic primer
gctggtcccaccggtcctgtcggccctgttggcgcccgtg

SEQ ID NO: 15004 - DNA, 40 bp, Artificial Sequence
  Description of Artificial Sequence: Synthetic primer
gtcctttttccacttttattctttctaattcagcttttag

SEQ ID NO: 15005 - DNA, 40 bp, Artificial Sequence
  Description of Artificial Sequence: Synthetic primer
gctgctgctctgtgagtcaatgcttagtcggcagctatcc

SEQ ID NO: 15006 - DNA, 40 bp, Artificial Sequence
  Description of Artificial Sequence: Synthetic primer
caaagcctgaacccataaacccaaatgataggtgaagttg

SEQ ID NO: 15007 - DNA, 40 bp, Artificial Sequence
  Description of Artificial Sequence: Synthetic primer
aggaccctgggtctcatgcagcatgcagcaaacagcagag

SEQ ID NO: 15008 - DNA, 40 bp, Artificial Sequence
  Description of Artificial Sequence: Synthetic primer
ggcctgcagcttggtgatgaggttactgccattcacatac

SEQ ID NO: 15009 - DNA, 40 bp, Artificial Sequence
  Description of Artificial Sequence: Synthetic primer
aaaatgacttaacatattacacagatattcaataaaaatg

SEQ ID NO: 15010 - DNA, 40 bp, Artificial Sequence
  Description of Artificial Sequence: Synthetic primer
gatgacgttccttgctgagaatttgagtgagtttttgaag

SEQ ID NO: 15011 - DNA, 40 bp, Artificial Sequence
  Description of Artificial Sequence: Synthetic primer
ttactggccagtgctaacttggaagaagtcacaatgaaac

SEQ ID NO: 15012 - DNA, 40 bp, Artificial Sequence
  Description of Artificial Sequence: Synthetic primer
gagactttcgaaagaatatgatcaactcctgaaagaacac

SEQ ID NO: 15013 - DNA, 40 bp, Artificial Sequence
  Description of Artificial Sequence: Synthetic primer
tcggccatctgaggaatattaacattggtctcgttggtag

SEQ ID NO: 15014 - DNA, 40 bp, Artificial Sequence
  Description of Artificial Sequence: Synthetic primer
aaatggggtagcctctagcagttgagaaaagcaaataatg

SEQ ID NO: 15015 - DNA, 40 bp, Artificial Sequence
  Description of Artificial Sequence: Synthetic primer
gggagggtgtaccattacaggatcaacactgcttctgatg

SEQ ID NO: 15016 - DNA, 40 bp, Artificial Sequence
  Description of Artificial Sequence: Synthetic primer
cagcttcatgcagaagatggtcaaggagcactacaaaacc

SEQ ID NO: 15017 - DNA, 40 bp, Artificial Sequence
  Description of Artificial Sequence: Synthetic primer
ccgccccatggtcatcaaccacgaccacgacatcatctgg

SEQ ID NO: 15018 - DNA, 40 bp, Artificial Sequence
  Description of Artificial Sequence: Synthetic primer
ctccctccagcaaccaggaatgtgggcagtggtactgaag

SEQ ID NO: 15019 - DNA, 40 bp, Artificial Sequence
  Description of Artificial Sequence: Synthetic primer
ggctgggtcctgccctgggcccctggcctctgtacctcag

SEQ ID NO: 15020 - DNA, 40 bp, Artificial Sequence
  Description of Artificial Sequence: Synthetic primer
acggtcagccttaattgcagtgaggataaggaggttttgc

SEQ ID NO: 15021 - DNA, 40 bp, Artificial Sequence
  Description of Artificial Sequence: Synthetic primer
aatgagacccccactgaatgctttaggtggccctggaatg

SEQ ID NO: 15022 - DNA, 40 bp, Artificial Sequence
  Description of Artificial Sequence: Synthetic primer
ggacacaggctttcccaaggacctgagacacgaaggacac

SEQ ID NO: 15023 - DNA, 40 bp, Artificial Sequence
  Description of Artificial Sequence: Synthetic primer
gcagaaagtcgatgagttaaataaagaaattcagaaggag

SEQ ID NO: 15024 - DNA, 40 bp, Artificial Sequence
  Description of Artificial Sequence: Synthetic primer
tatgcaggggctgctggatttgccccagccattggatttc

SEQ ID NO: 15025 - DNA, 40 bp, Artificial Sequence
  Description of Artificial Sequence: Synthetic primer
actgttggcaatgttcattagatctatataaatttaaaag

SEQ ID NO: 15026 - DNA, 40 bp, Artificial Sequence
  Description of Artificial Sequence: Synthetic primer
ctaaaagctttgaaaattcacctggagatttgggtaattc

SEQ ID NO: 15027 - DNA, 40 bp, Artificial Sequence
  Description of Artificial Sequence: Synthetic primer
cactgcaaagccgattctgctgttttgacgtaagcattgg

SEQ ID NO: 15028 - DNA, 40 bp, Artificial Sequence
  Description of Artificial Sequence: Synthetic primer
tgacgcccgctaccagcaacagaacccagcggccgtactc

SEQ ID NO: 15029 - DNA, 40 bp, Artificial Sequence
  Description of Artificial Sequence: Synthetic primer
tgaggaagccctgatggggaatgtggggagcactaggaag

SEQ ID NO: 15030 - DNA, 40 bp, Artificial Sequence
  Description of Artificial Sequence: Synthetic primer
atagcagaagatctggcagtccaggtccacccagaaggtc

SEQ ID NO: 15031 - DNA, 40 bp, Artificial Sequence
  Description of Artificial Sequence: Synthetic primer
tcaacctccgattctgaagaagaaggagatgatcaagaag

SEQ ID NO: 15032 - DNA, 40 bp, Artificial Sequence
  Description of Artificial Sequence: Synthetic primer
tcctacattgttaaatgagaaatgtgagatgcagagaacg

SEQ ID NO: 15033 - DNA, 40 bp, Artificial Sequence
  Description of Artificial Sequence: Synthetic primer
gttaatactctagaaatatctgtgtgttgcaattcaaatg

SEQ ID NO: 15034 - DNA, 40 bp, Artificial Sequence
  Description of Artificial Sequence: Synthetic primer
gagttggccgggggcgaacgggtctctggtgagtttcagg

SEQ ID NO: 15035 - DNA, 40 bp, Artificial Sequence
  Description of Artificial Sequence: Synthetic primer
cgggctggacaaggacaaacccaaccgtgtgaccaaagtg

SEQ ID NO: 15036 - DNA, 40 bp, Artificial Sequence
  Description of Artificial Sequence: Synthetic primer
aaatcagtggcaactgtatttttgtcttttgaaataactc

SEQ ID NO: 15037 - DNA, 40 bp, Artificial Sequence
  Description of Artificial Sequence: Synthetic primer
ttttgtatttcacatagaattcctcaatttctacctcctc

SEQ ID NO: 15038 - DNA, 40 bp, Artificial Sequence
  Description of Artificial Sequence: Synthetic primer
atacgtaaaggtgtgctttctgtgttttatattatcttgc

SEQ ID NO: 15039 - DNA, 40 bp, Artificial Sequence
  Description of Artificial Sequence: Synthetic primer
tggtccaacactgacgaatcggtttgcgggggaggtgctg

SEQ ID NO: 15040 - DNA, 40 bp, Artificial Sequence
  Description of Artificial Sequence: Synthetic primer
ggataccgtgagagaacaatgatcatgttttaagacaaaa

SEQ ID NO: 15041 - DNA, 40 bp, Artificial Sequence
  Description of Artificial Sequence: Synthetic primer
gggaggggccagagttttctatgaatctatttttcttcag

SEQ ID NO: 15042 - DNA, 40 bp, Artificial Sequence
  Description of Artificial Sequence: Synthetic primer
agttggaattgacagaggtgatataccagacctttcacag

SEQ ID NO: 15043 - DNA, 40 bp, Artificial Sequence
  Description of Artificial Sequence: Synthetic primer
tgaccccaaagttgcatttcctcgtcgagcgcaacccaag

SEQ ID NO: 15044 - DNA, 40 bp, Artificial Sequence
  Description of Artificial Sequence: Synthetic primer
tcatgggcacattctcagtacatcttgctccagtgaatcc

SEQ ID NO: 15045 - DNA, 40 bp, Artificial Sequence
  Description of Artificial Sequence: Synthetic primer
cagtggaacctctgcagctgagctcccatgggctgtaaaa

SEQ ID NO: 15046 - DNA, 40 bp, Artificial Sequence
  Description of Artificial Sequence: Synthetic primer
gtttccaccagtccactagctggaaggacgatctcgttgg

SEQ ID NO: 15047 - DNA, 40 bp, Artificial Sequence
  Description of Artificial Sequence: Synthetic primer
cgttttgaaacttaaatatgtcttttcgttgatactgtgg

SEQ ID NO: 15048 - DNA, 40 bp, Artificial Sequence
  Description of Artificial Sequence: Synthetic primer
atgacttgcttcacccagacctggccctggccggtgactg

SEQ ID NO: 15049 - DNA, 40 bp, Artificial Sequence
  Description of Artificial Sequence: Synthetic primer
ggcggacgaagcagaagttcacctcaagttctctgccaag

SEQ ID NO: 15050 - DNA, 40 bp, Artificial Sequence
  Description of Artificial Sequence: Synthetic primer
ggggggtcagacttgatacactttcaggttgggagtggac

SEQ ID NO: 15051 - DNA, 40 bp, Artificial Sequence
  Description of Artificial Sequence: Synthetic primer
ctggctgccacccagccgcatgtgcagagtggggaggaag

SEQ ID NO: 15052 - DNA, 40 bp, Artificial Sequence
  Description of Artificial Sequence: Synthetic primer
cagctgcccacggccccagggggcaggggctgtagatgag

SEQ ID NO: 15053 - DNA, 40 bp, Artificial Sequence
  Description of Artificial Sequence: Synthetic primer
caccattcgacagttccactcttacacggcagccacatag

SEQ ID NO: 15054 - DNA, 40 bp, Artificial Sequence
  Description of Artificial Sequence: Synthetic primer
gccttggtctaaacctgtggtcaagtcataccaaatcctc

SEQ ID NO: 15055 - DNA, 40 bp, Artificial Sequence
  Description of Artificial Sequence: Synthetic primer
gtagtgacgtcggcgaaacaggaaggtggggacgccatgc

SEQ ID NO: 15056 - DNA, 40 bp, Artificial Sequence
  Description of Artificial Sequence: Synthetic primer
gcacccttggcaccagtaaggccgtttgctccaggattac

SEQ ID NO: 15057 - DNA, 40 bp, Artificial Sequence
  Description of Artificial Sequence: Synthetic primer
cggcctgcactctctccaccacgctgtgggtactcgtagg

SEQ ID NO: 15058 - DNA, 40 bp, Artificial Sequence
  Description of Artificial Sequence: Synthetic primer
gttcttcttcataaacatctgaatttgtttttaactccag

SEQ ID NO: 15059 - DNA, 40 bp, Artificial Sequence
  Description of Artificial Sequence: Synthetic primer
aagcaaaatagaaaactgacaatgttgagaggttctttcc

SEQ ID NO: 15060 - DNA, 40 bp, Artificial Sequence
  Description of Artificial Sequence: Synthetic primer
gggggtcctttaaagaacgcgctgtcctgaggccttctca

SEQ ID NO: 15061 - DNA, 40 bp, Artificial Sequence
  Description of Artificial Sequence: Synthetic primer
aattcgtcatgctttttacttggttctctgacagcagacg

SEQ ID NO: 15062 - DNA, 40 bp, Artificial Sequence
  Description of Artificial Sequence: Synthetic primer
tgccaatcttgtcatagtccaaaacagttaccaccacctg

SEQ ID NO: 15063 - DNA, 40 bp, Artificial Sequence
  Description of Artificial Sequence: Synthetic primer
tgtcatcatcacatcagggggtgtatccatgggggaaaag

SEQ ID NO: 15064 - DNA, 40 bp, Artificial Sequence
  Description of Artificial Sequence: Synthetic primer
cccaatggctctcagatcagtcttagaaaaacaattcagg

SEQ ID NO: 15065 - DNA, 40 bp, Artificial Sequence
  Description of Artificial Sequence: Synthetic primer
tgtctatacccttattccaaggtgaataaataaagttgtg

SEQ ID NO: 15066 - DNA, 40 bp, Artificial Sequence
  Description of Artificial Sequence: Synthetic primer
tccaagcatagaacagaggttacaggaagtgcgagagagc

SEQ ID NO: 15067 - DNA, 40 bp, Artificial Sequence
  Description of Artificial Sequence: Synthetic primer
tacttcaaggattatttgaaggactattcttagacccttt

SEQ ID NO: 15068 - DNA, 40 bp, Artificial Sequence
  Description of Artificial Sequence: Synthetic primer
aggaataacacccaaagagcggttatcttctcgagttaag

SEQ ID NO: 15069 - DNA, 40 bp, Artificial Sequence
  Description of Artificial Sequence: Synthetic primer
cagccagcgctattgccgctccatgagctgaactttaacc

SEQ ID NO: 15070 - DNA, 40 bp, Artificial Sequence
  Description of Artificial Sequence: Synthetic primer
ttgactatcaatttgtatcacatcattcaatatcaattcc

SEQ ID NO: 15071 - DNA, 40 bp, Artificial Sequence
  Description of Artificial Sequence: Synthetic primer
cccatcatgtccctccttatttcaattccttcttgagttc

SEQ ID NO: 15072 - DNA, 40 bp, Artificial Sequence
  Description of Artificial Sequence: Synthetic primer
gaattttataggtaaaagagaatgaaaattataaatgtag

SEQ ID NO: 15073 - DNA, 40 bp, Artificial Sequence
  Description of Artificial Sequence: Synthetic primer
gcctgccctgttcccagttacactttcagatccctttgtg

SEQ ID NO: 15074 - DNA, 40 bp, Artificial Sequence
  Description of Artificial Sequence: Synthetic primer
tgtggcagcaatgagggctgccacctcatccaactgatcg

SEQ ID NO: 15075 - DNA, 40 bp, Artificial Sequence
  Description of Artificial Sequence: Synthetic primer
ccccaaccttcctaccaaacctaatagggcctcccatctc

SEQ ID NO: 15076 - DNA, 40 bp, Artificial Sequence
  Description of Artificial Sequence: Synthetic primer
attaactaacttttaggcattttaaggaggtaaaacatac

SEQ ID NO: 15077 - DNA, 40 bp, Artificial Sequence
  Description of Artificial Sequence: Synthetic primer
cacgctgtccctgcaggtggcctccaaccccatcgaatgc

SEQ ID NO: 15078 - DNA, 40 bp, Artificial Sequence
  Description of Artificial Sequence: Synthetic primer
cgtccaaatgaagctggaattcctccagcgcaaattctgg

SEQ ID NO: 15079 - DNA, 40 bp, Artificial Sequence
  Description of Artificial Sequence: Synthetic primer
atctcctactcttttgctactttccagaaccaagaaatac

SEQ ID NO: 15080 - DNA, 40 bp, Artificial Sequence
  Description of Artificial Sequence: Synthetic primer
ttgtagacgtgattcatcatcacgatctcgttgtcgtagg

SEQ ID NO: 15081 - DNA, 40 bp, Artificial Sequence
  Description of Artificial Sequence: Synthetic primer
ggcgccctcaggtggccacataaaaaaccacagtctgagg

SEQ ID NO: 15082 - DNA, 40 bp, Artificial Sequence
  Description of Artificial Sequence: Synthetic primer
ataaaaacactgcagaaaggagaatactttggagaaaaag

SEQ ID NO: 15083 - DNA, 40 bp, Artificial Sequence
  Description of Artificial Sequence: Synthetic primer
gccagggctcagcccaccttggctacgacacagcccacac

SEQ ID NO: 15084 - DNA, 40 bp, Artificial Sequence
  Description of Artificial Sequence: Synthetic primer
ggtggaaaaacatttccatgggacctctctcaccttttcc

SEQ ID NO: 15085 - DNA, 40 bp, Artificial Sequence
  Description of Artificial Sequence: Synthetic primer
cagtttgtcagcacccctgtagtaattcaccaactgtacc

SEQ ID NO: 15086 - DNA, 40 bp, Artificial Sequence
  Description of Artificial Sequence: Synthetic primer
tgaggcggccctccttgatgccccggcaaatcttatattc

SEQ ID NO: 15087 - DNA, 40 bp, Artificial Sequence
  Description of Artificial Sequence: Synthetic primer
ttccagccccagttccccggcagcgggacccggcgaagac

SEQ ID NO: 15088 - DNA, 40 bp, Artificial Sequence
  Description of Artificial Sequence: Synthetic primer
cccttggcacatcttgtgagacgatccttttaaactctcc

SEQ ID NO: 15089 - DNA, 40 bp, Artificial Sequence
  Description of Artificial Sequence: Synthetic primer
actgactaggatctggcttggaagatgtttgggagagagg

SEQ ID NO: 15090 - DNA, 40 bp, Artificial Sequence
  Description of Artificial Sequence: Synthetic primer
gactgactggacagcggccactcaagtggagggagggatg

SEQ ID NO: 15091 - DNA, 40 bp, Artificial Sequence
  Description of Artificial Sequence: Synthetic primer
agcaggctcctcacagccctcatgaattctggcctctagc

SEQ ID NO: 15092 - DNA, 40 bp, Artificial Sequence
  Description of Artificial Sequence: Synthetic primer
atagtatttcaaatcactctatttacaagtttatcttttc

SEQ ID NO: 15093 - DNA, 40 bp, Artificial Sequence
  Description of Artificial Sequence: Synthetic primer
tggctgcctcgtcactaatgctcagaatggacctgtagtc

SEQ ID NO: 15094 - DNA, 40 bp, Artificial Sequence
  Description of Artificial Sequence: Synthetic primer
ctccagtactgcgcacacagatcaacataattgagaacag

SEQ ID NO: 15095 - DNA, 40 bp, Artificial Sequence
  Description of Artificial Sequence: Synthetic primer
ccaaggaagccaaatggtccctgacaaaagatgactaaag

SEQ ID NO: 15096 - DNA, 40 bp, Artificial Sequence
  Description of Artificial Sequence: Synthetic primer
tctgacatgctcgtgttaattctatggtcttctgttttag

SEQ ID NO: 15097 - DNA, 40 bp, Artificial Sequence
  Description of Artificial Sequence: Synthetic primer
caagttttctctcttcttgttctcatacctaactcctatc

SEQ ID NO: 15098 - DNA, 40 bp, Artificial Sequence
  Description of Artificial Sequence: Synthetic primer
atgtaatgagatgtatcaagatatcctagaaataaaaacc

SEQ ID NO: 15099 - DNA, 40 bp, Artificial Sequence
  Description of Artificial Sequence: Synthetic primer
ctacttaattgggaaaatgttctttaaatatcagtaatag

SEQ ID NO: 15100 - DNA, 40 bp, Artificial Sequence
  Description of Artificial Sequence: Synthetic primer
acgatgacaatgaattgatgacatctggtccacgaatgag

SEQ ID NO: 15101 - DNA, 40 bp, Artificial Sequence
  Description of Artificial Sequence: Synthetic primer
ttccttgcatatacacgcaaggactcatatgggagagaag

SEQ ID NO: 15102 - DNA, 40 bp, Artificial Sequence
  Description of Artificial Sequence: Synthetic primer
caggtaactgccgccccttattctgattagagtagatttc

SEQ ID NO: 15103 - DNA, 40 bp, Artificial Sequence
  Description of Artificial Sequence: Synthetic primer
aactgctctgaaagtcacctgggaagtttccatagtgttc

SEQ ID NO: 15104 - DNA, 40 bp, Artificial Sequence
  Description of Artificial Sequence: Synthetic primer
gtgcagcgcgtcaatgacttccactgcgagtgccgtgctg

SEQ ID NO: 15105 - DNA, 40 bp, Artificial Sequence
  Description of Artificial Sequence: Synthetic primer
gtgggaatcaatgttgaaaataaaagaaggacttctaagg

SEQ ID NO: 15106 - DNA, 40 bp, Artificial Sequence
  Description of Artificial Sequence: Synthetic primer
acatgctggtatgtgaagcaattggtgctaggactttacc

SEQ ID NO: 15107 - DNA, 40 bp, Artificial Sequence
  Description of Artificial Sequence: Synthetic primer
aggaagggggcctctctcccggccagccacgccccacctg

SEQ ID NO: 15108 - DNA, 40 bp, Artificial Sequence
  Description of Artificial Sequence: Synthetic primer
tgagttatgtttcctggagccttttactaggaacattaag

SEQ ID NO: 15109 - DNA, 40 bp, Artificial Sequence
  Description of Artificial Sequence: Synthetic primer
cacgcccgagctccagagaatcaagaagacccaggaccag

SEQ ID NO: 15110 - DNA, 40 bp, Artificial Sequence
  Description of Artificial Sequence: Synthetic primer
ctatgtaacacagcccatggggctcactgctggaaaggag

SEQ ID NO: 15111 - DNA, 40 bp, Artificial Sequence
  Description of Artificial Sequence: Synthetic primer
gtaatactcctaaaccaagcttctttgattttgaaggaaa

SEQ ID NO: 15112 - DNA, 40 bp, Artificial Sequence
  Description of Artificial Sequence: Synthetic primer
ggacgcatggcgaacgcagagacggcagcggcaccgactt

SEQ ID NO: 15113 - DNA, 40 bp, Artificial Sequence
  Description of Artificial Sequence: Synthetic primer
cgtgcatgggaaaagatggtgacaaatgaagagtaaagtg

SEQ ID NO: 15114 - DNA, 40 bp, Artificial Sequence
  Description of Artificial Sequence: Synthetic primer
ccaagcacagcctctgctcctcctggagccggtcgggaac

SEQ ID NO: 15115 - DNA, 40 bp, Artificial Sequence
  Description of Artificial Sequence: Synthetic primer
gccgctgctggccatgcttcaggggccggagggcacacac

SEQ ID NO: 15116 - DNA, 40 bp, Artificial Sequence
  Description of Artificial Sequence: Synthetic primer
ggtgccttgtggtgcccttctgaaattcaaacagtaatgc

SEQ ID NO: 15117 - DNA, 40 bp, Artificial Sequence
  Description of Artificial Sequence: Synthetic primer
gctggaggccaagattgcacagctggaggagcaggtcgag

SEQ ID NO: 15118 - DNA, 40 bp, Artificial Sequence
  Description of Artificial Sequence: Synthetic primer
ctgcaaaaggtagcagcagcatgtttcaatttctcctctc

SEQ ID NO: 15119 - DNA, 40 bp, Artificial Sequence
  Description of Artificial Sequence: Synthetic primer
ttcagaaacaaatatgaaataacatgacctaagatgaatg

SEQ ID NO: 15120 - DNA, 40 bp, Artificial Sequence
  Description of Artificial Sequence: Synthetic primer
taccgtagccgtcctgcgcaagcgcttttcaaccccactc

SEQ ID NO: 15121 - DNA, 40 bp, Artificial Sequence
  Description of Artificial Sequence: Synthetic primer
gggagtgggccatctttgtcctcctgcacattgacaactc

SEQ ID NO: 15122 - DNA, 40 bp, Artificial Sequence
  Description of Artificial Sequence: Synthetic primer
cagcctcatgctctgattagataatcttttacattgaacc

SEQ ID NO: 15123 - DNA, 40 bp, Artificial Sequence
  Description of Artificial Sequence: Synthetic primer
gacagggggctgacgccagctgggcggtgctgtggagagg

SEQ ID NO: 15124 - DNA, 40 bp, Artificial Sequence
  Description of Artificial Sequence: Synthetic primer
gagagatcaggctcatcttcagccacttccaacccaggtg

SEQ ID NO: 15125 - DNA, 40 bp, Artificial Sequence
  Description of Artificial Sequence: Synthetic primer
gccaagatcaagaaactggaggatgagatcctggtcatgg

SEQ ID NO: 15126 - DNA, 40 bp, Artificial Sequence
  Description of Artificial Sequence: Synthetic primer
gaagggaaggtaaagatcagatcacacagaactagaatac

SEQ ID NO: 15127 - DNA, 40 bp, Artificial Sequence
  Description of Artificial Sequence: Synthetic primer
ggctgctgctgctgctttttggtgtcccgacatacctacg

SEQ ID NO: 15128 - DNA, 40 bp, Artificial Sequence
  Description of Artificial Sequence: Synthetic primer
tgcagtgccacgtagtttttggtcagcacgagtaagtagc

SEQ ID NO: 15129 - DNA, 40 bp, Artificial Sequence
  Description of Artificial Sequence: Synthetic primer
acatgaggttagcttggtggcagaagggcgggccagacag

SEQ ID NO: 15130 - DNA, 40 bp, Artificial Sequence
  Description of Artificial Sequence: Synthetic primer
gtctgtgtgctggacaacgcacaggggtagtgagcctttg

SEQ ID NO: 15131 - DNA, 40 bp, Artificial Sequence
  Description of Artificial Sequence: Synthetic primer
atgtgatacccatagcttccatgagaacagcagggtagtc

SEQ ID NO: 15132 - DNA, 40 bp, Artificial Sequence
  Description of Artificial Sequence: Synthetic primer
ggcaccatgtccacagaacagaaggccacccatggcaaag

SEQ ID NO: 15133 - DNA, 40 bp, Artificial Sequence
  Description of Artificial Sequence: Synthetic primer
cccaccccactgtggaatcccatctgtactctcctcaaag

SEQ ID NO: 15134 - DNA, 40 bp, Artificial Sequence
  Description of Artificial Sequence: Synthetic primer
tgcgctcctggctggagcccacgcccggtgcgctctcctt

SEQ ID NO: 15135 - DNA, 40 bp, Artificial Sequence
  Description of Artificial Sequence: Synthetic primer
ccggcaggccgtgcagatcctggacgagctggcggagaag

SEQ ID NO: 15136 - DNA, 40 bp, Artificial Sequence
  Description of Artificial Sequence: Synthetic primer
gggaaatgtagtaacctagttagtagtcttcaatataacc

SEQ ID NO: 15137 - DNA, 40 bp, Artificial Sequence
  Description of Artificial Sequence: Synthetic primer
gactgcatcttcatttccatcacatcattttgtgccttag

SEQ ID NO: 15138 - DNA, 40 bp, Artificial Sequence
  Description of Artificial Sequence: Synthetic primer
agttgcaaagacacaagtggggaaatcaaagtattacaag

SEQ ID NO: 15139 - DNA, 40 bp, Artificial Sequence
  Description of Artificial Sequence: Synthetic primer
gcagcacttacaatcactaattcccttaaggttgaaactg

SEQ ID NO: 15140 - DNA, 40 bp, Artificial Sequence
  Description of Artificial Sequence: Synthetic primer
tcgtcgccagcgtcgggtgggctttcgcccgcggctcctg

SEQ ID NO: 15141 - DNA, 40 bp, Artificial Sequence
  Description of Artificial Sequence: Synthetic primer
ttgctggattcttgcttcatgttgcctcttatcaaaattc

SEQ ID NO: 15142 - DNA, 40 bp, Artificial Sequence
  Description of Artificial Sequence: Synthetic primer
ctgagggtggcaaatgttacagctgtttccccagtccttc

SEQ ID NO: 15143 - DNA, 40 bp, Artificial Sequence
  Description of Artificial Sequence: Synthetic primer
gggggtcaatcttcagaggtctctgtcttctccaccaagc

SEQ ID NO: 15144 - DNA, 40 bp, Artificial Sequence
  Description of Artificial Sequence: Synthetic primer
tttgctaagcttccaaatctactacaacttcatctagagc

SEQ ID NO: 15145 - DNA, 40 bp, Artificial Sequence
  Description of Artificial Sequence: Synthetic primer
tccacgggcacaggtggttagcatttttgatgaagagaac

SEQ ID NO: 15146 - DNA, 40 bp, Artificial Sequence
  Description of Artificial Sequence: Synthetic primer
gcacttttgtgagattataaatataccacggagggtaacg

SEQ ID NO: 15147 - DNA, 40 bp, Artificial Sequence
  Description of Artificial Sequence: Synthetic primer
gagatcgatggcctgaaggggcggcatgagaaatttaagg

SEQ ID NO: 15148 - DNA, 40 bp, Artificial Sequence
  Description of Artificial Sequence: Synthetic primer
ttgtcaaagttgtcataagcatctattgatgttcgcagag

SEQ ID NO: 15149 - DNA, 40 bp, Artificial Sequence
  Description of Artificial Sequence: Synthetic primer
ggggccatagaatcctacactacagctttcagtttttaga

SEQ ID NO: 15150 - DNA, 40 bp, Artificial Sequence
  Description of Artificial Sequence: Synthetic primer
ctgcagtcgtaagcggctagcgcgtcttcccgagccactc

SEQ ID NO: 15151 - DNA, 40 bp, Artificial Sequence
  Description of Artificial Sequence: Synthetic primer
agacctataaccctgatgaggaagaggaagatacagatcc

SEQ ID NO: 15152 - DNA, 40 bp, Artificial Sequence
  Description of Artificial Sequence: Synthetic primer
cccccgcaaagccagccatccctaggttaggccaggtaat

SEQ ID NO: 15153 - DNA, 40 bp, Artificial Sequence
  Description of Artificial Sequence: Synthetic primer
ccatcactcggattggcaggacctggggccaaaagccaag

SEQ ID NO: 15154 - DNA, 40 bp, Artificial Sequence
  Description of Artificial Sequence: Synthetic primer
ctgtgtctgggacagctgcttttctctcttcctcttcttt

SEQ ID NO: 15155 - DNA, 40 bp, Artificial Sequence
  Description of Artificial Sequence: Synthetic primer
cttaacatctttggagttattaaaggctttgtagaaccag

SEQ ID NO: 15156 - DNA, 40 bp, Artificial Sequence
  Description of Artificial Sequence: Synthetic primer
cgagaaggcgctggtgctgggcaaggtcatggagaacgtg

SEQ ID NO: 15157 - DNA, 40 bp, Artificial Sequence
  Description of Artificial Sequence: Synthetic primer
gaaatacttgttgaatgaatagatgcagcaaattacatag

SEQ ID NO: 15158 - DNA, 40 bp, Artificial Sequence
  Description of Artificial Sequence: Synthetic primer
tcaacttgaaatctacattgaccactggaatatgaacgtg

SEQ ID NO: 15159 - DNA, 40 bp, Artificial Sequence
  Description of Artificial Sequence: Synthetic primer
gggctgggcggggtcaggggtggctccatggtgttctgag

SEQ ID NO: 15160 - DNA, 40 bp, Artificial Sequence
  Description of Artificial Sequence: Synthetic primer
aaaaaaagttaaagaaaaggcagcattaaatttaggcaag

SEQ ID NO: 15161 - DNA, 40 bp, Artificial Sequence
  Description of Artificial Sequence: Synthetic primer
gaggtctctcccaaaatcttggagtgcccaaaatcagtaa

SEQ ID NO: 15162 - DNA, 40 bp, Artificial Sequence
  Description of Artificial Sequence: Synthetic primer
gaagatcgattgagaagttattagaatgggaaaacaatag

SEQ ID NO: 15163 - DNA, 40 bp, Artificial Sequence
  Description of Artificial Sequence: Synthetic primer
catgagaagccagtgtgctgcatggcttttaatacaagtg

SEQ ID NO: 15164 - DNA, 40 bp, Artificial Sequence
  Description of Artificial Sequence: Synthetic primer
taggtccggtggacaggggtgggcccccaggcgcgggaac

SEQ ID NO: 15165 - DNA, 40 bp, Artificial Sequence
  Description of Artificial Sequence: Synthetic primer
cagcagccccgagtcgtcttccggccacactgaggacaag

SEQ ID NO: 15166 - DNA, 40 bp, Artificial Sequence
  Description of Artificial Sequence: Synthetic primer
tggacagggcagctactcagcaccgacgctgacagggatg

SEQ ID NO: 15167 - DNA, 40 bp, Artificial Sequence
  Description of Artificial Sequence: Synthetic primer
cttgaattcattggtttaacttgcatcaaaataccatgtg

SEQ ID NO: 15168 - DNA, 40 bp, Artificial Sequence
  Description of Artificial Sequence: Synthetic primer
cctcctgccacacccatcgtccccgtggtccctcctacgc

SEQ ID NO: 15169 - DNA, 40 bp, Artificial Sequence
  Description of Artificial Sequence: Synthetic primer
gcctgagccagccagtgacagcgtttcctcagggcacttg

SEQ ID NO: 15170 - DNA, 40 bp, Artificial Sequence
  Description of Artificial Sequence: Synthetic primer
ccacacaaagacggggcattgaagaggactgataatggag

SEQ ID NO: 15171 - DNA, 40 bp, Artificial Sequence
  Description of Artificial Sequence: Synthetic primer
tctaagtgaactttcgcccatcttggagagcttttcattc

SEQ ID NO: 15172 - DNA, 40 bp, Artificial Sequence
  Description of Artificial Sequence: Synthetic primer
agcaactgtttgaccagcatcgtttcatctaatctcattg

SEQ ID NO: 15173 - DNA, 40 bp, Artificial Sequence
  Description of Artificial Sequence: Synthetic primer
gcctatcctgctactacaccaacaggcatgataggatatg

SEQ ID NO: 15174 - DNA, 40 bp, Artificial Sequence
  Description of Artificial Sequence: Synthetic primer
atttgctccttctgtggatactgatattctaatgggagac

SEQ ID NO: 15175 - DNA, 40 bp, Artificial Sequence
  Description of Artificial Sequence: Synthetic primer
cgagggcggggtaagggtgccggaagccaccgggaggaag

SEQ ID NO: 15176 - DNA, 40 bp, Artificial Sequence
  Description of Artificial Sequence: Synthetic primer
gagctggggctccaggacgggcacctgggtggcaatgaag

SEQ ID NO: 15177 - DNA, 40 bp, Artificial Sequence
  Description of Artificial Sequence: Synthetic primer
cccttgtatataaagtgttgcacatgtattatgtcgtctg

SEQ ID NO: 15178 - DNA, 40 bp, Artificial Sequence
  Description of Artificial Sequence: Synthetic primer
aaaaaaggatccagctggcaagctaaagaagtaaaattcc

SEQ ID NO: 15179 - DNA, 40 bp, Artificial Sequence
  Description of Artificial Sequence: Synthetic primer
tcattgtgacaataggtagttttcaggggcacagaccttg

SEQ ID NO: 15180 - DNA, 40 bp, Artificial Sequence
  Description of Artificial Sequence: Synthetic primer
gggcatgtcagatgttgcccaggagaagaacaaaaagcag

SEQ ID NO: 15181 - DNA, 40 bp, Artificial Sequence
  Description of Artificial Sequence: Synthetic primer
cacgtggactccctttaatccagtgactgtcaggtcgatc

SEQ ID NO: 15182 - DNA, 40 bp, Artificial Sequence
  Description of Artificial Sequence: Synthetic primer
tttggccatctgctgctcgaaggaggtgtcctcggtcttg

SEQ ID NO: 15183 - DNA, 40 bp, Artificial Sequence
  Description of Artificial Sequence: Synthetic primer
gcaggaagcgacacaattggttagggaggcagagagtgtg

SEQ ID NO: 15184 - DNA, 40 bp, Artificial Sequence
  Description of Artificial Sequence: Synthetic primer
attggagatgctaacatcctcccccatcccaactgcacct

SEQ ID NO: 15185 - DNA, 40 bp, Artificial Sequence
  Description of Artificial Sequence: Synthetic primer
ttctgatcccaagctcttggagccttagcctttagtgatg

SEQ ID NO: 15186 - DNA, 40 bp, Artificial Sequence
  Description of Artificial Sequence: Synthetic primer
tttttactatttatagctttagatagggcctcccttcccc

SEQ ID NO: 15187 - DNA, 40 bp, Artificial Sequence
  Description of Artificial Sequence: Synthetic primer
cctggaggcggctcccccatcgagccgccaccctcccccc

SEQ ID NO: 15188 - DNA, 40 bp, Artificial Sequence
  Description of Artificial Sequence: Synthetic primer
ccccaacatggcgagtatgaatccacagtaccgagaaatg

SEQ ID NO: 15189 - DNA, 40 bp, Artificial Sequence
  Description of Artificial Sequence: Synthetic primer
tccgcgcccgcgcccggggtcctccgcccgctctgctctg

SEQ ID NO: 15190 - DNA, 40 bp, Artificial Sequence
  Description of Artificial Sequence: Synthetic primer
gtacgaccttgcgccaatcagctacttctgctactagttc

SEQ ID NO: 15191 - DNA, 40 bp, Artificial Sequence
  Description of Artificial Sequence: Synthetic primer
agctcattggttatgagccaaagatcttcaaattgttcac

SEQ ID NO: 15192 - DNA, 40 bp, Artificial Sequence
  Description of Artificial Sequence: Synthetic primer
ccaaaaggtgtttcgtccttcttctccaccgggtctccag

SEQ ID NO: 15193 - DNA, 40 bp, Artificial Sequence
  Description of Artificial Sequence: Synthetic primer
cctgcatgtgaagtctacagaacccaaagccgcccctcag

SEQ ID NO: 15194 - DNA, 40 bp, Artificial Sequence
  Description of Artificial Sequence: Synthetic primer
acagcatcacagcaacagagcacactcactctaatcttac

SEQ ID NO: 15195 - DNA, 40 bp, Artificial Sequence
  Description of Artificial Sequence: Synthetic primer
aaccagcgacatggcgcctcccgcgtttcgggcgcccttg

SEQ ID NO: 15196 - DNA, 40 bp, Artificial Sequence
  Description of Artificial Sequence: Synthetic primer
tcatggccagagggaagacctcttcttcgcacttctgttc

SEQ ID NO: 15197 - DNA, 40 bp, Artificial Sequence
  Description of Artificial Sequence: Synthetic primer
aggtgtggtgaccgtgaacgcctctaaggagggcaagtcc

SEQ ID NO: 15198 - DNA, 40 bp, Artificial Sequence
  Description of Artificial Sequence: Synthetic primer
cagtgttgttatgctgaattgttttccattatcttatttg

SEQ ID NO: 15199 - DNA, 40 bp, Artificial Sequence
  Description of Artificial Sequence: Synthetic primer
ggagcaagacttcgggtgctctgtaccacagcgtgacgac

SEQ ID NO: 15200 - DNA, 40 bp, Artificial Sequence
  Description of Artificial Sequence: Synthetic primer
ctcgagtatctgccttgcctactactaaagcaaagcttcc

SEQ ID NO: 15201 - DNA, 40 bp, Artificial Sequence
  Description of Artificial Sequence: Synthetic primer
agcaaccagcacagcctcaaacccaccagcagatgaggac

SEQ ID NO: 15202 - DNA, 40 bp, Artificial Sequence
  Description of Artificial Sequence: Synthetic primer
tgccattgcaacaacaccttgtgtgacacttaactacctg

SEQ ID NO: 15203 - DNA, 40 bp, Artificial Sequence
  Description of Artificial Sequence: Synthetic primer
aatgtacgcctgaattttgtaaacagaagtattaaatgtc

SEQ ID NO: 15204 - DNA, 40 bp, Artificial Sequence
  Description of Artificial Sequence: Synthetic primer
tgttccatgtggacagaaagactgtgatcctgttgtgaag

SEQ ID NO: 15205 - DNA, 40 bp, Artificial Sequence
  Description of Artificial Sequence: Synthetic primer
atcttttttctaaacctgtgcctccctctcctcggacacc

SEQ ID NO: 15206 - DNA, 40 bp, Artificial Sequence
  Description of Artificial Sequence: Synthetic primer
gccaagcctcagccccagtcccagccacatgtcctccatc

SEQ ID NO: 15207 - DNA, 40 bp, Artificial Sequence
  Description of Artificial Sequence: Synthetic primer
ttggaaagtgctgaccctgccggggtggctcccacaactg

SEQ ID NO: 15208 - DNA, 40 bp, Artificial Sequence
  Description of Artificial Sequence: Synthetic primer
acttccagcatttctggaaagtgattgttactttgaatac

SEQ ID NO: 15209 - DNA, 40 bp, Artificial Sequence
  Description of Artificial Sequence: Synthetic primer
ccattgttagccagctgtattgctcctccctgggtaatgg

SEQ ID NO: 15210 - DNA, 40 bp, Artificial Sequence
  Description of Artificial Sequence: Synthetic primer
catcaagcctcccaagaaggacctggaggacggcgaggtg

SEQ ID NO: 15211 - DNA, 40 bp, Artificial Sequence
  Description of Artificial Sequence: Synthetic primer
cgcgggcggctagagccggagtggggcgagccgcggaacc

SEQ ID NO: 15212 - DNA, 40 bp, Artificial Sequence
  Description of Artificial Sequence: Synthetic primer
gtcattttttctcttggaaaattgttctttatttattgta

SEQ ID NO: 15213 - DNA, 40 bp, Artificial Sequence
  Description of Artificial Sequence: Synthetic primer
ccaaatgtcttggccccactgtttccaaataggttagagg

SEQ ID NO: 15214 - DNA, 40 bp, Artificial Sequence
  Description of Artificial Sequence: Synthetic primer
gctaccaaacacattttgttataggtgacattaaaactac

SEQ ID NO: 15215 - DNA, 40 bp, Artificial Sequence
  Description of Artificial Sequence: Synthetic primer
agatttacatgcaagtagtgggtttactgaagaatttgag

SEQ ID NO: 15216 - DNA, 40 bp, Artificial Sequence
  Description of Artificial Sequence: Synthetic primer
aggctgcagccgccgcagcgggcaggggagggcagggaag

SEQ ID NO: 15217 - DNA, 40 bp, Artificial Sequence
  Description of Artificial Sequence: Synthetic primer
ccacctcagcagcctcaacagtatggtattcagtattcag

SEQ ID NO: 15218 - DNA, 40 bp, Artificial Sequence
  Description of Artificial Sequence: Synthetic primer
atgctgcggctgcaggactatgaggagaagacaaagaagg

SEQ ID NO: 15219 - DNA, 40 bp, Artificial Sequence
  Description of Artificial Sequence: Synthetic primer
cgcgttcgcgcacaccctagcacacatgaacacgcgcaag

SEQ ID NO: 15220 - DNA, 40 bp, Artificial Sequence
  Description of Artificial Sequence: Synthetic primer
ggacggaaggtggtccacatatcggcttcttcacggtttc

SEQ ID NO: 15221 - DNA, 40 bp, Artificial Sequence
  Description of Artificial Sequence: Synthetic primer
ggaagtgtctgtagcgtccctccctctcaaccacaataac

SEQ ID NO: 15222 - DNA, 40 bp, Artificial Sequence
  Description of Artificial Sequence: Synthetic primer
tccaaaataacaaaataaataatctactgtacacaatctg

SEQ ID NO: 15223 - DNA, 40 bp, Artificial Sequence
  Description of Artificial Sequence: Synthetic primer
cagccagcggctggaaagactagaaatggaacatgaccag

SEQ ID NO: 15224 - DNA, 40 bp, Artificial Sequence
  Description of Artificial Sequence: Synthetic primer
acataggaagtcccagcagcatgatcaaaacacttctcag

SEQ ID NO: 15225 - DNA, 40 bp, Artificial Sequence
  Description of Artificial Sequence: Synthetic primer
gtcaaaatggaaaatgaaaagttagttttagcatgtgaag

SEQ ID NO: 15226 - DNA, 40 bp, Artificial Sequence
  Description of Artificial Sequence: Synthetic primer
gtggtttctttctctgttatgagctggagaatatgatctg

SEQ ID NO: 15227 - DNA, 40 bp, Artificial Sequence
  Description of Artificial Sequence: Synthetic primer
atcttttcaagctttctactcttttgaaagtaaaccaaac

SEQ ID NO: 15228 - DNA, 40 bp, Artificial Sequence
  Description of Artificial Sequence: Synthetic primer
ggggggcatctccagcctcccgaatggttcagaacacacc

SEQ ID NO: 15229 - DNA, 40 bp, Artificial Sequence
  Description of Artificial Sequence: Synthetic primer
ggaggaggaggaggaggccaagcacaacctggagaagcag

SEQ ID NO: 15230 - DNA, 40 bp, Artificial Sequence
  Description of Artificial Sequence: Synthetic primer
ccacacagaactatgatgccgaccagaagtttgggttctg

SEQ ID NO: 15231 - DNA, 40 bp, Artificial Sequence
  Description of Artificial Sequence: Synthetic primer
acaccatatgaagctactttgcagcaaggctttcagtacc

SEQ ID NO: 15232 - DNA, 40 bp, Artificial Sequence
  Description of Artificial Sequence: Synthetic primer
tgctgctccgaagctcatgaatacctttgctgcctagcac

SEQ ID NO: 15233 - DNA, 40 bp, Artificial Sequence
  Description of Artificial Sequence: Synthetic primer
cacttctgcaatccagagaaacactaaataaagcaatacg

SEQ ID NO: 15234 - DNA, 40 bp, Artificial Sequence
  Description of Artificial Sequence: Synthetic primer
tgccctccaaactacatatcgtggacctgtctaataattc

SEQ ID NO: 15235 - DNA, 40 bp, Artificial Sequence
  Description of Artificial Sequence: Synthetic primer
gtctgtacagtttaatagatgctggcatgtcggaggttac

SEQ ID NO: 15236 - DNA, 40 bp, Artificial Sequence
  Description of Artificial Sequence: Synthetic primer
ggccgtgaaggcgtcggccggaggacaccccatcgtgcag

SEQ ID NO: 15237 - DNA, 40 bp, Artificial Sequence
  Description of Artificial Sequence: Synthetic primer
cgtcgccgcagctgggtccgcaggaatcgccggggacagg

SEQ ID NO: 15238 - DNA, 40 bp, Artificial Sequence
  Description of Artificial Sequence: Synthetic primer
gaggtttattatcagtctgtgcataactaaaagttcaaag

SEQ ID NO: 15239 - DNA, 40 bp, Artificial Sequence
  Description of Artificial Sequence: Synthetic primer
gccaggctgctggtttcttgttttagaagattgggtttag

SEQ ID NO: 15240 - DNA, 40 bp, Artificial Sequence
  Description of Artificial Sequence: Synthetic primer
acttcaattaatgatgtttcaaaggattatcttctcatgc

SEQ ID NO: 15241 - DNA, 40 bp, Artificial Sequence
  Description of Artificial Sequence: Synthetic primer
cttcaacaagttttctctgttgtctgtagtatccattagc

SEQ ID NO: 15242 - DNA, 40 bp, Artificial Sequence
  Description of Artificial Sequence: Synthetic primer
ttttaatggcttgtggcggtttgcaggaccgttttcaaag

SEQ ID NO: 15243 - DNA, 40 bp, Artificial Sequence
  Description of Artificial Sequence: Synthetic primer
cgtcgacaaaaccagttagagtaacctacaccacatgcac

SEQ ID NO: 15244 - DNA, 40 bp, Artificial Sequence
  Description of Artificial Sequence: Synthetic primer
cccaccctccatctaccccttccagaagcaaaaacaaacc

SEQ ID NO: 15245 - DNA, 40 bp, Artificial Sequence
  Description of Artificial Sequence: Synthetic primer
tgacaatgcaagtctcttccttacagagagagccatttac

SEQ ID NO: 15246 - DNA, 40 bp, Artificial Sequence
  Description of Artificial Sequence: Synthetic primer
ctgcatctgacaccaggatctgattgagctggtcatacac

SEQ ID NO: 15247 - DNA, 40 bp, Artificial Sequence
  Description of Artificial Sequence: Synthetic primer
ttccaaggtccccctggtgagcctggcgagcctggagctt

SEQ ID NO: 15248 - DNA, 40 bp, Artificial Sequence
  Description of Artificial Sequence: Synthetic primer
ccaacccaacgagagtccttaggagttattctgatagtgc

SEQ ID NO: 15249 - DNA, 40 bp, Artificial Sequence
  Description of Artificial Sequence: Synthetic primer
ttctggtaggggtggccgatgcgccgggtcacggtgaagg

SEQ ID NO: 15250 - DNA, 40 bp, Artificial Sequence
  Description of Artificial Sequence: Synthetic primer
aaatgtatcctctcaatttcacaaagtttctgcccctttc

SEQ ID NO: 15251 - DNA, 40 bp, Artificial Sequence
  Description of Artificial Sequence: Synthetic primer
ttaatgggacctagaggcccacctggtgcagctggagccc

SEQ ID NO: 15252 - DNA, 40 bp, Artificial Sequence
  Description of Artificial Sequence: Synthetic primer
agtacaaattgggacagcactgtaggttgtttctattctc

SEQ ID NO: 15253 - DNA, 40 bp, Artificial Sequence
  Description of Artificial Sequence: Synthetic primer
ggggcccttgggcatgggcaggatgggcttcacgtctttg

SEQ ID NO: 15254 - DNA, 40 bp, Artificial Sequence
  Description of Artificial Sequence: Synthetic primer
gagcccctttccctcattgacgacctccatagccagatgc

SEQ ID NO: 15255 - DNA, 40 bp, Artificial Sequence
  Description of Artificial Sequence: Synthetic primer
ccctggagttcttgggaatcttggagcctaaagagaaacc

SEQ ID NO: 15256 - DNA, 40 bp, Artificial Sequence
  Description of Artificial Sequence: Synthetic primer
tttttttcttaagagaaatgatgtattcttgaaacatttg

SEQ ID NO: 15257 - DNA, 40 bp, Artificial Sequence
  Description of Artificial Sequence: Synthetic primer
gtaggctccgagctccaggtcctggtgaacgacacagacc

SEQ ID NO: 15258 - DNA, 40 bp, Artificial Sequence
  Description of Artificial Sequence: Synthetic primer
catacctatgctgagagaaaagcatcaaatcctttgtgta

SEQ ID NO: 15259 - DNA, 40 bp, Artificial Sequence
  Description of Artificial Sequence: Synthetic primer
catcgtgctgcagtacgtgcctcatgatcgcttcaacaag

SEQ ID NO: 15260 - DNA, 40 bp, Artificial Sequence
  Description of Artificial Sequence: Synthetic primer
cacaggcagccaaaccagctgccaccaagccagccaccac

SEQ ID NO: 15261 - DNA, 40 bp, Artificial Sequence
  Description of Artificial Sequence: Synthetic primer
aaagactgtcccaaagcataccacctcctatgccttaacc

SEQ ID NO: 15262 - DNA, 40 bp, Artificial Sequence
  Description of Artificial Sequence: Synthetic primer
ccctcttcttggctctcattcgccgccgtgctctttgtcg

SEQ ID NO: 15263 - DNA, 40 bp, Artificial Sequence
  Description of Artificial Sequence: Synthetic primer
cctggaggtgaggagtccaggaacccccttctcaaagatg

SEQ ID NO: 15264 - DNA, 40 bp, Artificial Sequence
  Description of Artificial Sequence: Synthetic primer
ctgtgaaatcgaccctgtgaagttgaaagacggagaaaac

SEQ ID NO: 15265 - DNA, 40 bp, Artificial Sequence
  Description of Artificial Sequence: Synthetic primer
tctcatggtaaagtaaaataaaatttcttggaattgaaac

SEQ ID NO: 15266 - DNA, 40 bp, Artificial Sequence
  Description of Artificial Sequence: Synthetic primer
aagcttccagtgagggggcacaggactgactttttaaacc

SEQ ID NO: 15267 - DNA, 40 bp, Artificial Sequence
  Description of Artificial Sequence: Synthetic primer
cagcccccgggagctagagggacctgtgtatgaaaaatgc

SEQ ID NO: 15268 - DNA, 40 bp, Artificial Sequence
  Description of Artificial Sequence: Synthetic primer
atcatattaaaaatatacaagctacagttgtccagatcac

SEQ ID NO: 15269 - DNA, 40 bp, Artificial Sequence
  Description of Artificial Sequence: Synthetic primer
cctgaagaacggggctaacaaagatatgcagaacaacagg

SEQ ID NO: 15270 - DNA, 40 bp, Artificial Sequence
  Description of Artificial Sequence: Synthetic primer
tattttatgcaagaagctaaacgaatgaagcataaagcag

SEQ ID NO: 15271 - DNA, 40 bp, Artificial Sequence
  Description of Artificial Sequence: Synthetic primer
caggcccggcactttgggacccatcgatgagaaagaccac

SEQ ID NO: 15272 - DNA, 40 bp, Artificial Sequence
  Description of Artificial Sequence: Synthetic primer
tggcatgccagtaggtcctgtaccaccagggttctttcag

SEQ ID NO: 15273 - DNA, 40 bp, Artificial Sequence
  Description of Artificial Sequence: Synthetic primer
aagtcttgatggaattaaaatactctgctttattctggtg

SEQ ID NO: 15274 - DNA, 40 bp, Artificial Sequence
  Description of Artificial Sequence: Synthetic primer
ccttcttccacagttcattgttctcagatgtaaatgtctc

SEQ ID NO: 15275 - DNA, 40 bp, Artificial Sequence
  Description of Artificial Sequence: Synthetic primer
ctaagtgcggccccggcgggagggtgccggggtccaggtc

SEQ ID NO: 15276 - DNA, 40 bp, Artificial Sequence
  Description of Artificial Sequence: Synthetic primer
acactccatgtgaaaacctcggtcacatgaatcacaaaag

SEQ ID NO: 15277 - DNA, 40 bp, Artificial Sequence
  Description of Artificial Sequence: Synthetic primer
aggcggagatcaacaggatcatctttgtattttccctcag

SEQ ID NO: 15278 - DNA, 40 bp, Artificial Sequence
  Description of Artificial Sequence: Synthetic primer
tgcggcggacgcctactgcggctggtgtgccctggagacg

SEQ ID NO: 15279 - DNA, 40 bp, Artificial Sequence
  Description of Artificial Sequence: Synthetic primer
aaaagggaccacgctgtaaagtattcaaaagcactaatcg

SEQ ID NO: 15280 - DNA, 40 bp, Artificial Sequence
  Description of Artificial Sequence: Synthetic primer
tcgcattacttaatttaggcagttctgacccgagtttacg

SEQ ID NO: 15281 - DNA, 40 bp, Artificial Sequence
  Description of Artificial Sequence: Synthetic primer
gagtggctggtgcagcgggcaaggctggttacccaacagg

SEQ ID NO: 15282 - DNA, 40 bp, Artificial Sequence
  Description of Artificial Sequence: Synthetic primer
aggtgccatagcaactgataatgtacagggactcaactac

SEQ ID NO: 15283 - DNA, 40 bp, Artificial Sequence
  Description of Artificial Sequence: Synthetic primer
gaatgaatcctgttctgatacagttcccctgcatactgac

SEQ ID NO: 15284 - DNA, 40 bp, Artificial Sequence
  Description of Artificial Sequence: Synthetic primer
tcaagagctgcacctctcctcctagcattagtttagatca

SEQ ID NO: 15285 - DNA, 40 bp, Artificial Sequence
  Description of Artificial Sequence: Synthetic primer
cttcttgggagacggtccacatgatactacaggagttacc

SEQ ID NO: 15286 - DNA, 40 bp, Artificial Sequence
  Description of Artificial Sequence: Synthetic primer
aaaaaccttcatgtatttcaatctagtgattactttttgc

SEQ ID NO: 15287 - DNA, 40 bp, Artificial Sequence
  Description of Artificial Sequence: Synthetic primer
ctgttgaggatctggtcgatgccgaagctaatgggctctg

SEQ ID NO: 15288 - DNA, 40 bp, Artificial Sequence
  Description of Artificial Sequence: Synthetic primer
cttgggttcttcatgagcatacgattgtttatttttgctg

SEQ ID NO: 15289 - DNA, 40 bp, Artificial Sequence
  Description of Artificial Sequence: Synthetic primer
caggtaaaatgacagctcggggttccccaggtggctcctc

SEQ ID NO: 15290 - DNA, 40 bp, Artificial Sequence
  Description of Artificial Sequence: Synthetic primer
gagcgctacatggataacaactctcgcttgtggcagatac

SEQ ID NO: 15291 - DNA, 40 bp, Artificial Sequence
  Description of Artificial Sequence: Synthetic primer
tcgcctcctgtccggccctgggtttctagcggtgcctgag

SEQ ID NO: 15292 - DNA, 40 bp, Artificial Sequence
  Description of Artificial Sequence: Synthetic primer
ggagattccttgtctgatttaataaaatacttaaacactg

SEQ ID NO: 15293 - DNA, 40 bp, Artificial Sequence
  Description of Artificial Sequence: Synthetic primer
ttagagccatcatttaaagaggctgaagtaccttccacag

SEQ ID NO: 15294 - DNA, 40 bp, Artificial Sequence
  Description of Artificial Sequence: Synthetic primer
ttggtttatattctgggtcttcatcttctctatcaaattc

SEQ ID NO: 15295 - DNA, 40 bp, Artificial Sequence
  Description of Artificial Sequence: Synthetic primer
ctgtgtaatattacagactaaaccaaattaataacataat

SEQ ID NO: 15296 - DNA, 40 bp, Artificial Sequence
  Description of Artificial Sequence: Synthetic primer
tgactggaagccctggcagccctggtcctgatggcaaaac

SEQ ID NO: 15297 - DNA, 40 bp, Artificial Sequence
  Description of Artificial Sequence: Synthetic primer
tcccagtttttgacgctccttctgcaattcattttctagc

SEQ ID NO: 15298 - DNA, 40 bp, Artificial Sequence
  Description of Artificial Sequence: Synthetic primer
ttttgaagagagcaacattgctgtggaagaagaatttaac

SEQ ID NO: 15299 - DNA, 40 bp, Artificial Sequence
  Description of Artificial Sequence: Synthetic primer
gctggtttctgagcaccgctagggggacggtggtcctgtg

SEQ ID NO: 15300 - DNA, 40 bp, Artificial Sequence
  Description of Artificial Sequence: Synthetic primer
aggattgtcttcggtaccttaaatatgctccctgtgcttc

SEQ ID NO: 15301 - DNA, 40 bp, Artificial Sequence
  Description of Artificial Sequence: Synthetic primer
atagcccatgaagagtaggatattcacatgtcgtgttttc

SEQ ID NO: 15302 - DNA, 40 bp, Artificial Sequence
  Description of Artificial Sequence: Synthetic primer
actgcttgatgtgcccacattgaggttggttgcaagttcc

SEQ ID NO: 15303 - DNA, 40 bp, Artificial Sequence
  Description of Artificial Sequence: Synthetic primer
tcataaattaatgattctgaagcttatgtttcttattctc

SEQ ID NO: 15304 - DNA, 40 bp, Artificial Sequence
  Description of Artificial Sequence: Synthetic primer
tccttttgttcaatatcagtggttcaaaatgaataaagag

SEQ ID NO: 15305 - DNA, 40 bp, Artificial Sequence
  Description of Artificial Sequence: Synthetic primer
cgctcatcgcggtccagcggcctaggtctctacccgaagc

SEQ ID NO: 15306 - DNA, 40 bp, Artificial Sequence
  Description of Artificial Sequence: Synthetic primer
gtgacgaaaattccaagaggctgtctagtcgtgctcgaaa

SEQ ID NO: 15307 - DNA, 40 bp, Artificial Sequence
  Description of Artificial Sequence: Synthetic primer
tcagaggataaggaagaatccatggaaatacatgccacag

SEQ ID NO: 15308 - DNA, 40 bp, Artificial Sequence
  Description of Artificial Sequence: Synthetic primer
gggtaaaaaactcgttatttagtgcactgctgctgagacg

SEQ ID NO: 15309 - DNA, 40 bp, Artificial Sequence
  Description of Artificial Sequence: Synthetic primer
gataactctgatcaaagtgaaatatgtaaactacaaaata

SEQ ID NO: 15310 - DNA, 40 bp, Artificial Sequence
  Description of Artificial Sequence: Synthetic primer
cggttcaggactcaaacgaatttttactggaatttcaaac

SEQ ID NO: 15311 - DNA, 40 bp, Artificial Sequence
  Description of Artificial Sequence: Synthetic primer
gtatgcagcctgcaggtttccatacactgaagcttttacc

SEQ ID NO: 15312 - DNA, 40 bp, Artificial Sequence
  Description of Artificial Sequence: Synthetic primer
attcatagttgtgattggcagtaagtttgaggagtgttac

SEQ ID NO: 15313 - DNA, 40 bp, Artificial Sequence
  Description of Artificial Sequence: Synthetic primer
accaagggtctaagacagatttagcaacaggatacatttc

SEQ ID NO: 15314 - DNA, 40 bp, Artificial Sequence
  Description of Artificial Sequence: Synthetic primer
ccctcgagagcttctcggagtctttgatgttaatactgtc

SEQ ID NO: 15315 - DNA, 40 bp, Artificial Sequence
  Description of Artificial Sequence: Synthetic primer
atcctcttctgttgtgcaggctttgactctctgtaatagg

SEQ ID NO: 15316 - DNA, 40 bp, Artificial Sequence
  Description of Artificial Sequence: Synthetic primer
ttttcagatatgtatctagtgatccaaattttacaaactc

SEQ ID NO: 15317 - DNA, 40 bp, Artificial Sequence
  Description of Artificial Sequence: Synthetic primer
gttcaaggtccacagttcttgagccacggcctagcttctc

SEQ ID NO: 15318 - DNA, 40 bp, Artificial Sequence
  Description of Artificial Sequence: Synthetic primer
tttctttcctttattagtcttccaccccaaattctcaatc

SEQ ID NO: 15319 - DNA, 40 bp, Artificial Sequence
  Description of Artificial Sequence: Synthetic primer
ttcctggggaaggataccagacgcacaggagccacgcaag

SEQ ID NO: 15320 - DNA, 40 bp, Artificial Sequence
  Description of Artificial Sequence: Synthetic primer
gctctgagtcagggctccagggcccaggttcatgttctgc

SEQ ID NO: 15321 - DNA, 40 bp, Artificial Sequence
  Description of Artificial Sequence: Synthetic primer
ttgaatccacctttatctgagccaatggagatttacttat

SEQ ID NO: 15322 - DNA, 40 bp, Artificial Sequence
  Description of Artificial Sequence: Synthetic primer
aactcactttccgagctaagcgaagaaaattttgatggaa

SEQ ID NO: 15323 - DNA, 40 bp, Artificial Sequence
  Description of Artificial Sequence: Synthetic primer
gcatgtttatgagctcttggagaataagatccagcttctg

SEQ ID NO: 15324 - DNA, 40 bp, Artificial Sequence
  Description of Artificial Sequence: Synthetic primer
ggcctccatcaccacgacttccagcaggaccggggggacc

SEQ ID NO: 15325 - DNA, 40 bp, Artificial Sequence
  Description of Artificial Sequence: Synthetic primer
gcgcgagagtatcagccgcctcatgcagaactatgaaaag

SEQ ID NO: 15326 - DNA, 40 bp, Artificial Sequence
  Description of Artificial Sequence: Synthetic primer
atcatggtagttaaagtcatagtaggcacttgatgactgc

SEQ ID NO: 15327 - DNA, 40 bp, Artificial Sequence
  Description of Artificial Sequence: Synthetic primer
ggctcaacattagcaggaggaagatcatgttctgtatttg

SEQ ID NO: 15328 - DNA, 40 bp, Artificial Sequence
  Description of Artificial Sequence: Synthetic primer
tgaaggccctaaggagtaggcatatcttggcttacagttc

SEQ ID NO: 15329 - DNA, 40 bp, Artificial Sequence
  Description of Artificial Sequence: Synthetic primer
gggccccccagtctctgtcccccacccgagaaaggaacaa

SEQ ID NO: 15330 - DNA, 40 bp, Artificial Sequence
  Description of Artificial Sequence: Synthetic primer
aatagtctatttgtagtcttgaattccctcactatttctg

SEQ ID NO: 15331 - DNA, 40 bp, Artificial Sequence
  Description of Artificial Sequence: Synthetic primer
gtttgccataaggggattggcagaagctttgcagatggag

SEQ ID NO: 15332 - DNA, 40 bp, Artificial Sequence
  Description of Artificial Sequence: Synthetic primer
aagggaagccagaagagaagccaacaagagacaagcaaag

SEQ ID NO: 15333 - DNA, 40 bp, Artificial Sequence
  Description of Artificial Sequence: Synthetic primer
tgagcagcaggccaagtctctgctcaagaacgagaacacc

SEQ ID NO: 15334 - DNA, 40 bp, Artificial Sequence
  Description of Artificial Sequence: Synthetic primer
agggaagctgggggcagtgtgtgtcacagccagacatgag

SEQ ID NO: 15335 - DNA, 40 bp, Artificial Sequence
  Description of Artificial Sequence: Synthetic primer
tggtctctgtgccagctctataattgttttgctacgattc

SEQ ID NO: 15336 - DNA, 40 bp, Artificial Sequence
  Description of Artificial Sequence: Synthetic primer
gctggcaaagatggagaggctggagctcagggaccccctg

SEQ ID NO: 15337 - DNA, 40 bp, Artificial Sequence
  Description of Artificial Sequence: Synthetic primer
aggggctttagcttttgagtggctgggtcactttctctac

SEQ ID NO: 15338 - DNA, 40 bp, Artificial Sequence
  Description of Artificial Sequence: Synthetic primer
gctccctgcctggacatcaagcagtggccatttcatctgg

SEQ ID NO: 15339 - DNA, 40 bp, Artificial Sequence
  Description of Artificial Sequence: Synthetic primer
agctttcataagaaatcccatggcaaagggtaataaaaag

SEQ ID NO: 15340 - DNA, 40 bp, Artificial Sequence
  Description of Artificial Sequence: Synthetic primer
cagggtctatatataagcgcggggagcctgcgtcctttcc

SEQ ID NO: 15341 - DNA, 40 bp, Artificial Sequence
  Description of Artificial Sequence: Synthetic primer
gcctcattaattcagcaataaaggaaaatatgcatctcaa

SEQ ID NO: 15342 - DNA, 40 bp, Artificial Sequence
  Description of Artificial Sequence: Synthetic primer
agcaatgtaggtcattgaaaacccttattttcctaattcc

SEQ ID NO: 15343 - DNA, 40 bp, Artificial Sequence
  Description of Artificial Sequence: Synthetic primer
actggctgggctcttctatctgtggggagaatatgcagtg

SEQ ID NO: 15344 - DNA, 40 bp, Artificial Sequence
  Description of Artificial Sequence: Synthetic primer
aaaacaattaactgccctctgaaataatgggattagaaac

SEQ ID NO: 15345 - DNA, 40 bp, Artificial Sequence
  Description of Artificial Sequence: Synthetic primer
ttttggaaagttcttccgtgtcccgatgtagaagaaatag

SEQ ID NO: 15346 - DNA, 40 bp, Artificial Sequence
  Description of Artificial Sequence: Synthetic primer
aagcagggcttcgaggcagccagcattaaggaggagaagg

SEQ ID NO: 15347 - DNA, 40 bp, Artificial Sequence
  Description of Artificial Sequence: Synthetic primer
ttatcagagggactattccttaataatgcagaccttacag

SEQ ID NO: 15348 - DNA, 40 bp, Artificial Sequence
  Description of Artificial Sequence: Synthetic primer
ctttgccaaaggctggctggatcagccctcacagacaagc

SEQ ID NO: 15349 - DNA, 40 bp, Artificial Sequence
  Description of Artificial Sequence: Synthetic primer
tctgtctatataaatagagaaatggggttagccatagagg

SEQ ID NO: 15350 - DNA, 40 bp, Artificial Sequence
  Description of Artificial Sequence: Synthetic primer
atggaatgctgtgacccaccactttccagaatgccaaaag

SEQ ID NO: 15351 - DNA, 40 bp, Artificial Sequence
  Description of Artificial Sequence: Synthetic primer
gctgcagtccagcttatctgggtcgtcagtcagctctatc

SEQ ID NO: 15352 - DNA, 40 bp, Artificial Sequence
  Description of Artificial Sequence: Synthetic primer
ttgagagttcaccagcagtctccgttctctcaataaaatc

SEQ ID NO: 15353 - DNA, 40 bp, Artificial Sequence
  Description of Artificial Sequence: Synthetic primer
gtgagcagctcagcctcacgctggaagtcctgccgagcac

SEQ ID NO: 15354 - DNA, 40 bp, Artificial Sequence
  Description of Artificial Sequence: Synthetic primer
cttgagatcaacgtgctagagaaaatcaatgagaaagacc

SEQ ID NO: 15355 - DNA, 40 bp, Artificial Sequence
  Description of Artificial Sequence: Synthetic primer
ggctcctgtgcgtctggtatccttccccaggaattaggac

SEQ ID NO: 15356 - DNA, 40 bp, Artificial Sequence
  Description of Artificial Sequence: Synthetic primer
ctaggcatagaaactgaacactcttcactaccccagagtc

SEQ ID NO: 15357 - DNA, 40 bp, Artificial Sequence
  Description of Artificial Sequence: Synthetic primer
tttacaactgtggccctatttattacacagtttgtctatc

SEQ ID NO: 15358 - DNA, 40 bp, Artificial Sequence
  Description of Artificial Sequence: Synthetic primer
gggggaaacccaacctctatcccttttccacgtgggcaag

SEQ ID NO: 15359 - DNA, 40 bp, Artificial Sequence
  Description of Artificial Sequence: Synthetic primer
tggcggggggcccaggccacactgagcagcaccaccaagg

SEQ ID NO: 15360 - DNA, 40 bp, Artificial Sequence
  Description of Artificial Sequence: Synthetic primer
attcctcctaatccacccatgggaccatctgacccaggac

SEQ ID NO: 15361 - DNA, 40 bp, Artificial Sequence
  Description of Artificial Sequence: Synthetic primer
gctgaaggcaggcaggattcctttgcttccatctgttatg

SEQ ID NO: 15362 - DNA, 40 bp, Artificial Sequence
  Description of Artificial Sequence: Synthetic primer
tgtcatgctgctaatccagccaatgtttctgcatctaaag

SEQ ID NO: 15363 - DNA, 40 bp, Artificial Sequence
  Description of Artificial Sequence: Synthetic primer
ggggtggcccagccagtagtccacctggaggccaatcacg

SEQ ID NO: 15364 - DNA, 40 bp, Artificial Sequence
  Description of Artificial Sequence: Synthetic primer
gggttttgctctcctatgcaatatttatgccttctcattc

SEQ ID NO: 15365 - DNA, 40 bp, Artificial Sequence
  Description of Artificial Sequence: Synthetic primer
ggggcatgatcattatgcaggagacattatacttctgctg

SEQ ID NO: 15366 - DNA, 40 bp, Artificial Sequence
  Description of Artificial Sequence: Synthetic primer
atattaggagggacaaagaaccgggtttgtggatcacagc

SEQ ID NO: 15367 - DNA, 40 bp, Artificial Sequence
  Description of Artificial Sequence: Synthetic primer
aatatgtttcaaaacattttagtaaataaggtatttatcc

SEQ ID NO: 15368 - DNA, 40 bp, Artificial Sequence
  Description of Artificial Sequence: Synthetic primer
ggggtccactgtcacttgagatttgccacgtctggtactg

SEQ ID NO: 15369 - DNA, 40 bp, Artificial Sequence
  Description of Artificial Sequence: Synthetic primer
accgtacgggcaacttctgaagggataccaggagtgacag

SEQ ID NO: 15370 - DNA, 40 bp, Artificial Sequence
  Description of Artificial Sequence: Synthetic primer
cagtcttagtccataccgtacaggggtagtaccatctaac

SEQ ID NO: 15371 - DNA, 40 bp, Artificial Sequence
  Description of Artificial Sequence: Synthetic primer
ggtttgcattaaacggtggctgcaattcattccattgagg

SEQ ID NO: 15372 - DNA, 40 bp, Artificial Sequence
  Description of Artificial Sequence: Synthetic primer
atttttgtttttcagcagttgctgttttgtactttggtag

SEQ ID NO: 15373 - DNA, 40 bp, Artificial Sequence
  Description of Artificial Sequence: Synthetic primer
tggcaggttccatgtgcaccacagccaggctcgcagacag

SEQ ID NO: 15374 - DNA, 40 bp, Artificial Sequence
  Description of Artificial Sequence: Synthetic primer
atcctttctgcataccaggtagcgggcctcgcttttgaac

SEQ ID NO: 15375 - DNA, 40 bp, Artificial Sequence
  Description of Artificial Sequence: Synthetic primer
gggctcctaatcgactgtcattcaagtgatcactgtaatg

SEQ ID NO: 15376 - DNA, 40 bp, Artificial Sequence
  Description of Artificial Sequence: Synthetic primer
aataaaactttcactgaatattttaacatctgtttttatt

SEQ ID NO: 15377 - DNA, 40 bp, Artificial Sequence
  Description of Artificial Sequence: Synthetic primer
ctatggccttgctctctgctgtcctgttggtgggcacgac

SEQ ID NO: 15378 - DNA, 40 bp, Artificial Sequence
  Description of Artificial Sequence: Synthetic primer
tccgccccctcttccccacttcctgcccagctctggatcg

SEQ ID NO: 15379 - DNA, 40 bp, Artificial Sequence
  Description of Artificial Sequence: Synthetic primer
ctgggaaagagcatcctctggcaggtgctcccaccaggtc

SEQ ID NO: 15380 - DNA, 40 bp, Artificial Sequence
  Description of Artificial Sequence: Synthetic primer
gaagctggagatggagatggaagctgcacgccatgagcac

SEQ ID NO: 15381 - DNA, 40 bp, Artificial Sequence
  Description of Artificial Sequence: Synthetic primer
gtagaggatacatctgacttctgcacttcatctatgttgg

SEQ ID NO: 15382 - DNA, 40 bp, Artificial Sequence
  Description of Artificial Sequence: Synthetic primer
agcctccgatgcggacttggagagagtgacacttgatacc

SEQ ID NO: 15383 - DNA, 40 bp, Artificial Sequence
  Description of Artificial Sequence: Synthetic primer
ctgggtgccaaatacggccaaggcagcaccaagaggcaac

SEQ ID NO: 15384 - DNA, 40 bp, Artificial Sequence
  Description of Artificial Sequence: Synthetic primer
ggcttaatgacaacatgaaaaactaatcacaactaataaa

SEQ ID NO: 15385 - DNA, 40 bp, Artificial Sequence
  Description of Artificial Sequence: Synthetic primer
tgtggagtgatggtgtacaagctctgccaaggtgctgaag

SEQ ID NO: 15386 - DNA, 40 bp, Artificial Sequence
  Description of Artificial Sequence: Synthetic primer
ggcaagcattgtgctatcggccccttgaggaataattttg

SEQ ID NO: 15387 - DNA, 40 bp, Artificial Sequence
  Description of Artificial Sequence: Synthetic primer
ctttgtgatcacgggaggaaagtcggtggaagatgcacag

SEQ ID NO: 15388 - DNA, 40 bp, Artificial Sequence
  Description of Artificial Sequence: Synthetic primer
agtaatgttaaatattaggaagaaagtaatactgtgattt

SEQ ID NO: 15389 - DNA, 40 bp, Artificial Sequence
  Description of Artificial Sequence: Synthetic primer
gtccttctggtcctgttggtcctgctggtgctgttggccc

SEQ ID NO: 15390 - DNA, 40 bp, Artificial Sequence
  Description of Artificial Sequence: Synthetic primer
ttcttgctttcgtataagccctcacaacaaccaacacttt

SEQ ID NO: 15391 - DNA, 40 bp, Artificial Sequence
  Description of Artificial Sequence: Synthetic primer
tgcatctcccaggcagatggagcacggctgaatcccaaac

SEQ ID NO: 15392 - DNA, 40 bp, Artificial Sequence
  Description of Artificial Sequence: Synthetic primer
ctcacccgcgaggagctgagcaggctgcagccggtgttgc

SEQ ID NO: 15393 - DNA, 40 bp, Artificial Sequence
  Description of Artificial Sequence: Synthetic primer
acaagagaaaagctccaaaggggctgtggggcgcagatgg

SEQ ID NO: 15394 - DNA, 40 bp, Artificial Sequence
  Description of Artificial Sequence: Synthetic primer
gaagaaaaacaaatcttcgcagctgcaactttaaagtatc

SEQ ID NO: 15395 - DNA, 40 bp, Artificial Sequence
  Description of Artificial Sequence: Synthetic primer
tctctctcatctcgctcggctgcgggaaatcgggctgaag

SEQ ID NO: 15396 - DNA, 40 bp, Artificial Sequence
  Description of Artificial Sequence: Synthetic primer
catgccaggcctcacgtgcttcacccacgacaaccagcac

SEQ ID NO: 15397 - DNA, 40 bp, Artificial Sequence
  Description of Artificial Sequence: Synthetic primer
ccattcatcagctgtgtgttctgaatctgcatctcctcag

SEQ ID NO: 15398 - DNA, 40 bp, Artificial Sequence
  Description of Artificial Sequence: Synthetic primer
gcttgctgtttgcgatacatattcaattcttctgttcaag

SEQ ID NO: 15399 - DNA, 40 bp, Artificial Sequence
  Description of Artificial Sequence: Synthetic primer
accgagtgccaagaaaccgtgcagctcttgctagagcgcg

SEQ ID NO: 15400 - DNA, 40 bp, Artificial Sequence
  Description of Artificial Sequence: Synthetic primer
ctaaccaacaagctgaagttacccccactggctgtcttgg

SEQ ID NO: 15401 - DNA, 40 bp, Artificial Sequence
  Description of Artificial Sequence: Synthetic primer
accaatccagaaaaccttccatcgctgccagatattccac

SEQ ID NO: 15402 - DNA, 40 bp, Artificial Sequence
  Description of Artificial Sequence: Synthetic primer
ggcctaacagctccatcaaacctccttgagagcaactacc

SEQ ID NO: 15403 - DNA, 40 bp, Artificial Sequence
  Description of Artificial Sequence: Synthetic primer
gccagaatcctttagcagtgggtcccaggacgtgcaccag

SEQ ID NO: 15404 - DNA, 40 bp, Artificial Sequence
  Description of Artificial Sequence: Synthetic primer
accaccaatttctctccgtatcatagtgcctcgccaccag

SEQ ID NO: 15405 - DNA, 40 bp, Artificial Sequence
  Description of Artificial Sequence: Synthetic primer
ctcaagagggcactacctgcccatggcttcacaggtccag

SEQ ID NO: 15406 - DNA, 40 bp, Artificial Sequence
  Description of Artificial Sequence: Synthetic primer
gcatctttttgaccctcattctttagagatgctaaaattc

SEQ ID NO: 15407 - DNA, 40 bp, Artificial Sequence
  Description of Artificial Sequence: Synthetic primer
atggtagccagacttcacatggcagttcactttcagacac

SEQ ID NO: 15408 - DNA, 40 bp, Artificial Sequence
  Description of Artificial Sequence: Synthetic primer
tcggttggtgagaccagctcgcagagtgtggttgtagctg

SEQ ID NO: 15409 - DNA, 40 bp, Artificial Sequence
  Description of Artificial Sequence: Synthetic primer
ggctgcttccatcaaccatgccactgttttttccaagacc

SEQ ID NO: 15410 - DNA, 40 bp, Artificial Sequence
  Description of Artificial Sequence: Synthetic primer
atctggagaggttgttcgtggctccatctggaaaaggttc

SEQ ID NO: 15411 - DNA, 40 bp, Artificial Sequence
  Description of Artificial Sequence: Synthetic primer
gagaacacaccattagctcctcaaatttccctctgccttg

SEQ ID NO: 15412 - DNA, 40 bp, Artificial Sequence
  Description of Artificial Sequence: Synthetic primer
acaatcctggactgttgcttcaagtaaacaatatccacat

SEQ ID NO: 15413 - DNA, 40 bp, Artificial Sequence
  Description of Artificial Sequence: Synthetic primer
tggctctgcggggctcctccgatccctggtgctcctcctg

SEQ ID NO: 15414 - DNA, 40 bp, Artificial Sequence
  Description of Artificial Sequence: Synthetic primer
atagtgaatctcttaaaatcagtgcacaacggagcaccag

SEQ ID NO: 15415 - DNA, 40 bp, Artificial Sequence
  Description of Artificial Sequence: Synthetic primer
atctggagctccgtgatctgaggggcctgggggagctgag

SEQ ID NO: 15416 - DNA, 40 bp, Artificial Sequence
  Description of Artificial Sequence: Synthetic primer
caggtcctcccagcctggtttcatggctgctctcatggtg

SEQ ID NO: 15417 - DNA, 40 bp, Artificial Sequence
  Description of Artificial Sequence: Synthetic primer
atgagcccagatcccaaggcctcccagcacttcgccagag

SEQ ID NO: 15418 - DNA, 40 bp, Artificial Sequence
  Description of Artificial Sequence: Synthetic primer
aaagcttcctctatgccttggttttttgagtttttagttg

SEQ ID NO: 15419 - DNA, 40 bp, Artificial Sequence
  Description of Artificial Sequence: Synthetic primer
tggtgtgggattttggccgagggaagcaggacagagaagg

SEQ ID NO: 15420 - DNA, 40 bp, Artificial Sequence
  Description of Artificial Sequence: Synthetic primer
aactcctgagcatcacggtactcacgggcctccagtttag

SEQ ID NO: 15421 - DNA, 40 bp, Artificial Sequence
  Description of Artificial Sequence: Synthetic primer
tggccacctatcttcggcagcccacctactgctcccattg

SEQ ID NO: 15422 - DNA, 40 bp, Artificial Sequence
  Description of Artificial Sequence: Synthetic primer
ttaggccaaggaagcttgaatcatctaaccttgataagtg

SEQ ID NO: 15423 - DNA, 40 bp, Artificial Sequence
  Description of Artificial Sequence: Synthetic primer
aaaagttccaggtgtggaatatgggggttatctgtacatc

SEQ ID NO: 15424 - DNA, 40 bp, Artificial Sequence
  Description of Artificial Sequence: Synthetic primer
cttccaagcagtcaatgatcttggttaatttatcttcagg

SEQ ID NO: 15425 - DNA, 40 bp, Artificial Sequence
  Description of Artificial Sequence: Synthetic primer
gcccacctggtactgcgactccaggggctccttctccttg

SEQ ID NO: 15426 - DNA, 40 bp, Artificial Sequence
  Description of Artificial Sequence: Synthetic primer
gtgtcctttgccactagaagacctgaattcatgagaggag

SEQ ID NO: 15427 - DNA, 40 bp, Artificial Sequence
  Description of Artificial Sequence: Synthetic primer
gtttgaggagctgctgcagaacgggagccgccacttcgag

SEQ ID NO: 15428 - DNA, 40 bp, Artificial Sequence
  Description of Artificial Sequence: Synthetic primer
ttgattcattcaagaagtctcatgccagccccacctattg

SEQ ID NO: 15429 - DNA, 40 bp, Artificial Sequence
  Description of Artificial Sequence: Synthetic primer
tttttttaagtctgaagcaatgtaaccccaaaaaattata

SEQ ID NO: 15430 - DNA, 40 bp, Artificial Sequence
  Description of Artificial Sequence: Synthetic primer
cacatcctaccccgtaaaaaaggagaaagtgacaggaact

SEQ ID NO: 15431 - DNA, 40 bp, Artificial Sequence
  Description of Artificial Sequence: Synthetic primer
tcacctcctccagttgctctgcagcatgagatggcacacc

SEQ ID NO: 15432 - DNA, 40 bp, Artificial Sequence
  Description of Artificial Sequence: Synthetic primer
tgcccctcggggtacacgggcccggcctgcagccaggacg

SEQ ID NO: 15433 - DNA, 40 bp, Artificial Sequence
  Description of Artificial Sequence: Synthetic primer
acgggctctcggccgccagctcccccgagcccggcaccag

SEQ ID NO: 15434 - DNA, 40 bp, Artificial Sequence
  Description of Artificial Sequence: Synthetic primer
cctcatgcaccagtacgtgttattgttggcgctggtgcag

SEQ ID NO: 15435 - DNA, 40 bp, Artificial Sequence
  Description of Artificial Sequence: Synthetic primer
tattatttcaagactatttttgaggtaattctagcctttt

SEQ ID NO: 15436 - DNA, 40 bp, Artificial Sequence
  Description of Artificial Sequence: Synthetic primer
gcgctcaagtcatcgccgcacgcctcgctgggaggctttc

SEQ ID NO: 15437 - DNA, 40 bp, Artificial Sequence
  Description of Artificial Sequence: Synthetic primer
tcccaggaaatctttttcttctttctggatctggtgactc

SEQ ID NO: 15438 - DNA, 40 bp, Artificial Sequence
  Description of Artificial Sequence: Synthetic primer
cttccagggtacattgttctctgtgcatcagattctgtaa

SEQ ID NO: 15439 - DNA, 40 bp, Artificial Sequence
  Description of Artificial Sequence: Synthetic primer
aaaagcagtttcatcgcacaacagtgtgaaggtaacatgc

SEQ ID NO: 15440 - DNA, 40 bp, Artificial Sequence
  Description of Artificial Sequence: Synthetic primer
gaaccccctcgatgagggggccccaggcagaccttatatg

SEQ ID NO: 15441 - DNA, 40 bp, Artificial Sequence
  Description of Artificial Sequence: Synthetic primer
tcggccatgtcgccaacgcagctgggagccgcctcagtgg

SEQ ID NO: 15442 - DNA, 40 bp, Artificial Sequence
  Description of Artificial Sequence: Synthetic primer
atcactcacagggagccccaaatgggcctagacagacaag

SEQ ID NO: 15443 - DNA, 40 bp, Artificial Sequence
  Description of Artificial Sequence: Synthetic primer
tttgagctttcatagagagtttcacagcatggactgtgtc

SEQ ID NO: 15444 - DNA, 40 bp, Artificial Sequence
  Description of Artificial Sequence: Synthetic primer
gaaacggaagagattaaggaccttgaagaacagcttactg

SEQ ID NO: 15445 - DNA, 40 bp, Artificial Sequence
  Description of Artificial Sequence: Synthetic primer
tgatctcgctggcggccgccgtggcacctgctcgccctag

SEQ ID NO: 15446 - DNA, 40 bp, Artificial Sequence
  Description of Artificial Sequence: Synthetic primer
ctggagtaaccgctgtagttctgtccataagaggaatcag

SEQ ID NO: 15447 - DNA, 40 bp, Artificial Sequence
  Description of Artificial Sequence: Synthetic primer
gggagcggctccctctttgccgttcgccggggcgctggcg

SEQ ID NO: 15448 - DNA, 40 bp, Artificial Sequence
  Description of Artificial Sequence: Synthetic primer
tattttgtacttccattgagtcacttgtacaattacaacc

SEQ ID NO: 15449 - DNA, 40 bp, Artificial Sequence
  Description of Artificial Sequence: Synthetic primer
aaaatagtttatagtaaaacgaaggcctaattcatggaag

SEQ ID NO: 15450 - DNA, 40 bp, Artificial Sequence
  Description of Artificial Sequence: Synthetic primer
ggctgacggtcagtggagacaatccagtcttcgtacagtc

SEQ ID NO: 15451 - DNA, 40 bp, Artificial Sequence
  Description of Artificial Sequence: Synthetic primer
gaggcaaaccctgacactggagtgctcacagtctcctggg

SEQ ID NO: 15452 - DNA, 40 bp, Artificial Sequence
  Description of Artificial Sequence: Synthetic primer
ccagcaaacgccgcccctcccgcgccctggctcaggctct

SEQ ID NO: 15453 - DNA, 40 bp, Artificial Sequence
  Description of Artificial Sequence: Synthetic primer
ctataaattccagaaaacataaacaagaaataaaccttac

SEQ ID NO: 15454 - DNA, 40 bp, Artificial Sequence
  Description of Artificial Sequence: Synthetic primer
acttctcagcaagtaggatacttctcatgttttgaaatta

SEQ ID NO: 15455 - DNA, 40 bp, Artificial Sequence
  Description of Artificial Sequence: Synthetic primer
aagcgccaacccggactgcagggcctcgcgcgccacaaac

SEQ ID NO: 15456 - DNA, 40 bp, Artificial Sequence
  Description of Artificial Sequence: Synthetic primer
gtgtggagaggagtgtcttcggaaagggacagcatcattg

SEQ ID NO: 15457 - DNA, 40 bp, Artificial Sequence
  Description of Artificial Sequence: Synthetic primer
attcttcttggtaaagtcaggtgtctggacaaactatcac

SEQ ID NO: 15458 - DNA, 40 bp, Artificial Sequence
  Description of Artificial Sequence: Synthetic primer
aagcggggaccccctttataggcgcctgggccgtcccagc

SEQ ID NO: 15459 - DNA, 40 bp, Artificial Sequence
  Description of Artificial Sequence: Synthetic primer
acccccaccaaggagactgggagagaggtccggcctcaag

SEQ ID NO: 15460 - DNA, 40 bp, Artificial Sequence
  Description of Artificial Sequence: Synthetic primer
tttggttctttccattctccgccattcattggaggcttcg

SEQ ID NO: 15461 - DNA, 40 bp, Artificial Sequence
  Description of Artificial Sequence: Synthetic primer
tgacagaatatcttgccctagatgtcctcttccctcttgc

SEQ ID NO: 15462 - DNA, 40 bp, Artificial Sequence
  Description of Artificial Sequence: Synthetic primer
caagtagtaaccgcaaaaatcaattagatacaaacggaag

SEQ ID NO: 15463 - DNA, 40 bp, Artificial Sequence
  Description of Artificial Sequence: Synthetic primer
tatttgcatctgttgggtgaaactccacagccaaaacaac

SEQ ID NO: 15464 - DNA, 40 bp, Artificial Sequence
  Description of Artificial Sequence: Synthetic primer
tttatcagagaattccacaaaaagtcttgagaaaatgaac

SEQ ID NO: 15465 - DNA, 40 bp, Artificial Sequence
  Description of Artificial Sequence: Synthetic primer
tcccagcaaactgcctattcccagcagcgcttccctccac

SEQ ID NO: 15466 - DNA, 40 bp, Artificial Sequence
  Description of Artificial Sequence: Synthetic primer
cctttgttaggaatgaaggaatgacgatcacaagaaatgc

SEQ ID NO: 15467 - DNA, 40 bp, Artificial Sequence
  Description of Artificial Sequence: Synthetic primer
caaagatctccttggcatcgtggtaaaacttgtgcagttc

SEQ ID NO: 15468 - DNA, 40 bp, Artificial Sequence
  Description of Artificial Sequence: Synthetic primer
tggcgtgtcacactgccccggcggggaggacgagaatcgg

SEQ ID NO: 15469 - DNA, 40 bp, Artificial Sequence
  Description of Artificial Sequence: Synthetic primer
gagggtcggggtgtaataacttaaaaaccgtaggtgacag

SEQ ID NO: 15470 - DNA, 40 bp, Artificial Sequence
  Description of Artificial Sequence: Synthetic primer
actcggatccacgtcgacaccgttgtacaaagatacgcgg

SEQ ID NO: 15471 - DNA, 40 bp, Artificial Sequence
  Description of Artificial Sequence: Synthetic primer
ttatttgccaggcaaacatattttgcatttttctgcactg

SEQ ID NO: 15472 - DNA, 40 bp, Artificial Sequence
  Description of Artificial Sequence: Synthetic primer
tagctcatcatctgggacagggcgctggcagcaaggctac

SEQ ID NO: 15473 - DNA, 40 bp, Artificial Sequence
  Description of Artificial Sequence: Synthetic primer
aattagttcatcatcttcttttagcagtagtttggcttcc

SEQ ID NO: 15474 - DNA, 40 bp, Artificial Sequence
  Description of Artificial Sequence: Synthetic primer
atttttgtgcgcgatatttaaggtcgtctggatggggaag

SEQ ID NO: 15475 - DNA, 40 bp, Artificial Sequence
  Description of Artificial Sequence: Synthetic primer
caggaagctgatgaagagaaggagagaattctggcccaac

SEQ ID NO: 15476 - DNA, 40 bp, Artificial Sequence
  Description of Artificial Sequence: Synthetic primer
gcctatggcattggggccctggccaagtcatcattctcag

SEQ ID NO: 15477 - DNA, 40 bp, Artificial Sequence
  Description of Artificial Sequence: Synthetic primer
gagctgtgggcatggacccaagggggaggggccgggacag

SEQ ID NO: 15478 - DNA, 40 bp, Artificial Sequence
  Description of Artificial Sequence: Synthetic primer
ggggccatcgatgaagttgaccatgacaatggcactgagc

SEQ ID NO: 15479 - DNA, 40 bp, Artificial Sequence
  Description of Artificial Sequence: Synthetic primer
ttccttcagcttcttgtctttctgcttcagcgacttggtg

SEQ ID NO: 15480 - DNA, 40 bp, Artificial Sequence
  Description of Artificial Sequence: Synthetic primer
ttattcagtgtataatggactctcagaataaaggaaagac

SEQ ID NO: 15481 - DNA, 40 bp, Artificial Sequence
  Description of Artificial Sequence: Synthetic primer
tctcagcattgtgttaaataaaaatgaaagctttagaagg

SEQ ID NO: 15482 - DNA, 40 bp, Artificial Sequence
  Description of Artificial Sequence: Synthetic primer
acctcattcagtaactgattgtcaaaatcacaattaaatc

SEQ ID NO: 15483 - DNA, 40 bp, Artificial Sequence
  Description of Artificial Sequence: Synthetic primer
atgatgtgtgataatcagcagaaaggctgctcaactcttg

SEQ ID NO: 15484 - DNA, 40 bp, Artificial Sequence
  Description of Artificial Sequence: Synthetic primer
gagaggactggaagctcctgggttccccaatgttgtctgc

SEQ ID NO: 15485 - DNA, 40 bp, Artificial Sequence
  Description of Artificial Sequence: Synthetic primer
tacttgaagaaaaccctaaatttggaataggaaaaggaaa

SEQ ID NO: 15486 - DNA, 40 bp, Artificial Sequence
  Description of Artificial Sequence: Synthetic primer
cagttcccgctgacgttgtgccaacatttgagcattcagg

SEQ ID NO: 15487 - DNA, 40 bp, Artificial Sequence
  Description of Artificial Sequence: Synthetic primer
ctgcttatatatttaataataaaagaagtgcacaagctgc

SEQ ID NO: 15488 - DNA, 40 bp, Artificial Sequence
  Description of Artificial Sequence: Synthetic primer
aaaaagacagcagaaagcaaaaatgtcccattggaacgag

SEQ ID NO: 15489 - DNA, 40 bp, Artificial Sequence
  Description of Artificial Sequence: Synthetic primer
acagtacatttccagcactcccaggtgttccatgtatgtg

SEQ ID NO: 15490 - DNA, 40 bp, Artificial Sequence
  Description of Artificial Sequence: Synthetic primer
ggtgctctcccgtaggcttataaaccacagtgaagcagga

SEQ ID NO: 15491 - DNA, 40 bp, Artificial Sequence
  Description of Artificial Sequence: Synthetic primer
attatgacacatatgcacaaggattaacactataacacac

SEQ ID NO: 15492 - DNA, 40 bp, Artificial Sequence
  Description of Artificial Sequence: Synthetic primer
gacagctggtaaaagtctgtgccccaatggttcgatattc

SEQ ID NO: 15493 - DNA, 40 bp, Artificial Sequence
  Description of Artificial Sequence: Synthetic primer
gaagggcttggtgtaaataaatgcgttgccgattttgagc

SEQ ID NO: 15494 - DNA, 40 bp, Artificial Sequence
  Description of Artificial Sequence: Synthetic primer
cgtaccctgttctcccagcgtgcgccatccttcccagagg

SEQ ID NO: 15495 - DNA, 40 bp, Artificial Sequence
  Description of Artificial Sequence: Synthetic primer
cttcaggagccacataaactacttcaaattcaatctctcc

SEQ ID NO: 15496 - DNA, 40 bp, Artificial Sequence
  Description of Artificial Sequence: Synthetic primer
cccgcaccagccatggcgcagatcctccctgttcgctttc

SEQ ID NO: 15497 - DNA, 40 bp, Artificial Sequence
  Description of Artificial Sequence: Synthetic primer
aaaagccaagttgaagaaaaataaaccaccaattcttacc

SEQ ID NO: 15498 - DNA, 40 bp, Artificial Sequence
  Description of Artificial Sequence: Synthetic primer
tttcattgtcttctctaactggtcattagcttgccttagc

SEQ ID NO: 15499 - DNA, 40 bp, Artificial Sequence
  Description of Artificial Sequence: Synthetic primer
tgtcctcatctgcctggcgcaactcggggagccggaactg

SEQ ID NO: 15500 - DNA, 40 bp, Artificial Sequence
  Description of Artificial Sequence: Synthetic primer
gtactactatcaagcaccttgtcttgctatttacagtttc

SEQ ID NO: 15501 - DNA, 40 bp, Artificial Sequence
  Description of Artificial Sequence: Synthetic primer
ccagaaatacaagctcttaaaaatcagctccaggaacgag

SEQ ID NO: 15502 - DNA, 40 bp, Artificial Sequence
  Description of Artificial Sequence: Synthetic primer
agatgcccctgacagttcaagtagcctcacggtggtagcc

SEQ ID NO: 15503 - DNA, 40 bp, Artificial Sequence
  Description of Artificial Sequence: Synthetic primer
ggggagagtgaagtgagctggcagtaccccatgtctgaag

SEQ ID NO: 15504 - DNA, 40 bp, Artificial Sequence
  Description of Artificial Sequence: Synthetic primer
atgaatcatcaagttttttctgcaattcagtcaacagatc

SEQ ID NO: 15505 - DNA, 40 bp, Artificial Sequence
  Description of Artificial Sequence: Synthetic primer
ttcattgtagaaaaccatctgacacttgatgcattgatag

SEQ ID NO: 15506 - DNA, 40 bp, Artificial Sequence
  Description of Artificial Sequence: Synthetic primer
gaaagtggccaccagcttcagggggtccctctgatatatg

SEQ ID NO: 15507 - DNA, 40 bp, Artificial Sequence
  Description of Artificial Sequence: Synthetic primer
cttccagtagagggttccgctgaatttgtccagtttgttg

SEQ ID NO: 15508 - DNA, 40 bp, Artificial Sequence
  Description of Artificial Sequence: Synthetic primer
agcaaggcctcattttccttcacatcttgttccatgagag

SEQ ID NO: 15509 - DNA, 40 bp, Artificial Sequence
  Description of Artificial Sequence: Synthetic primer
agaagagacctaagatctcttcttgcaccacatggttctc

SEQ ID NO: 15510 - DNA, 40 bp, Artificial Sequence
  Description of Artificial Sequence: Synthetic primer
cgctttctattgagcgcttgcaaaagctgctactggagaa

SEQ ID NO: 15511 - DNA, 40 bp, Artificial Sequence
  Description of Artificial Sequence: Synthetic primer
gaaatgtaatggactggatagtttttcccaaacccatttc

SEQ ID NO: 15512 - DNA, 40 bp, Artificial Sequence
  Description of Artificial Sequence: Synthetic primer
gagcgtggagagcccctccccaaaacggctggagagagag

SEQ ID NO: 15513 - DNA, 40 bp, Artificial Sequence
  Description of Artificial Sequence: Synthetic primer
gactgggggaggagtccgaggtggggttggttacctgtcc

SEQ ID NO: 15514 - DNA, 40 bp, Artificial Sequence
  Description of Artificial Sequence: Synthetic primer
cacaacatgctgaggggctttggggtccatgtccaaacag

SEQ ID NO: 15515 - DNA, 40 bp, Artificial Sequence
  Description of Artificial Sequence: Synthetic primer
agttcagagtaagagaactggagcaggcgcttcttgtgag

SEQ ID NO: 15516 - DNA, 40 bp, Artificial Sequence
  Description of Artificial Sequence: Synthetic primer
ttgttgtcaaaataccaatctctcttcgtgccactttctc

SEQ ID NO: 15517 - DNA, 40 bp, Artificial Sequence
  Description of Artificial Sequence: Synthetic primer
cctacagatcaggctaacaaaaatgttaacactgcaaacc

SEQ ID NO: 15518 - DNA, 40 bp, Artificial Sequence
  Description of Artificial Sequence: Synthetic primer
agatcgtgttggacattagctcccgagcgctggccttctg

SEQ ID NO: 15519 - DNA, 40 bp, Artificial Sequence
  Description of Artificial Sequence: Synthetic primer
cgcattctgcctgatggccaagatgtcagcaacaatccag

SEQ ID NO: 15520 - DNA, 40 bp, Artificial Sequence
  Description of Artificial Sequence: Synthetic primer
ggagctggaggaggagtctttcccagagagatccaaaaag

SEQ ID NO: 15521 - DNA, 40 bp, Artificial Sequence
  Description of Artificial Sequence: Synthetic primer
gctagggcccatgcggctcttctcaaactcctcatggtat

SEQ ID NO: 15522 - DNA, 40 bp, Artificial Sequence
  Description of Artificial Sequence: Synthetic primer
accattcactctcttactcaaacaaggaaatggtaagagc

SEQ ID NO: 15523 - DNA, 40 bp, Artificial Sequence
  Description of Artificial Sequence: Synthetic primer
atctcccattcagcacagatatctgtttctgtctcagaag

SEQ ID NO: 15524 - DNA, 40 bp, Artificial Sequence
  Description of Artificial Sequence: Synthetic primer
aatggtgattcccattcggccaacacacatgattatgatg

SEQ ID NO: 15525 - DNA, 40 bp, Artificial Sequence
  Description of Artificial Sequence: Synthetic primer
tgcaaactccagctctgcatccatggtggtaactcggaca

SEQ ID NO: 15526 - DNA, 40 bp, Artificial Sequence
  Description of Artificial Sequence: Synthetic primer
tactgttcattggaggcttcttccgagcaagggagacttt

SEQ ID NO: 15527 - DNA, 40 bp, Artificial Sequence
  Description of Artificial Sequence: Synthetic primer
acactgtctctaaggagctcagtgtcccagagctggagtg

SEQ ID NO: 15528 - DNA, 40 bp, Artificial Sequence
  Description of Artificial Sequence: Synthetic primer
agaaggttgatgcaggcttgattgtggaaggttcatgagg

SEQ ID NO: 15529 - DNA, 40 bp, Artificial Sequence
  Description of Artificial Sequence: Synthetic primer
tgaagaatgtcctaaaccacatgacacactgccagtcagg

SEQ ID NO: 15530 - DNA, 40 bp, Artificial Sequence
  Description of Artificial Sequence: Synthetic primer
agagccgcacaattttgttcaccattaatttcagcctttg

SEQ ID NO: 15531 - DNA, 40 bp, Artificial Sequence
  Description of Artificial Sequence: Synthetic primer
ggcgtctccgccagcgccgtcgctcgagctcaagcgcctg

SEQ ID NO: 15532 - DNA, 40 bp, Artificial Sequence
  Description of Artificial Sequence: Synthetic primer
gctgctgtccgcacattaatgatgtcctcacggtatttta

SEQ ID NO: 15533 - DNA, 40 bp, Artificial Sequence
  Description of Artificial Sequence: Synthetic primer
ttccccccaaaacgtgaagtcggggaagctgcggctacac

SEQ ID NO: 15534 - DNA, 40 bp, Artificial Sequence
  Description of Artificial Sequence: Synthetic primer
gggtgactgaggcagaccccaacccctgctctgcaccatc

SEQ ID NO: 15535 - DNA, 40 bp, Artificial Sequence
  Description of Artificial Sequence: Synthetic primer
tgctctgggagatcttcacctacggcaagcagccctggta

SEQ ID NO: 15536 - DNA, 40 bp, Artificial Sequence
  Description of Artificial Sequence: Synthetic primer
ttttagtgtatttttttaaaactttgctcaaagcttaggg

SEQ ID NO: 15537 - DNA, 40 bp, Artificial Sequence
  Description of Artificial Sequence: Synthetic primer
agcagcaaggctcctgcctacgtccgggactgcgtggaag

SEQ ID NO: 15538 - DNA, 40 bp, Artificial Sequence
  Description of Artificial Sequence: Synthetic primer
catgtacatggtattaacacttagtgttcggggttttttg

SEQ ID NO: 15539 - DNA, 40 bp, Artificial Sequence
  Description of Artificial Sequence: Synthetic primer
ccccctccacccggtcttggtggtggtatattaaaaaaag

SEQ ID NO: 15540 - DNA, 40 bp, Artificial Sequence
  Description of Artificial Sequence: Synthetic primer
ttcggtcactcatctctggactggctctggcttccaatgc

SEQ ID NO: 15541 - DNA, 40 bp, Artificial Sequence
  Description of Artificial Sequence: Synthetic primer
tcttctatggttccactgctccatctcgcctgcccacctg

SEQ ID NO: 15542 - DNA, 40 bp, Artificial Sequence
  Description of Artificial Sequence: Synthetic primer
agttttatacagtaatttacaaggtgaatgtagttaatag

SEQ ID NO: 15543 - DNA, 40 bp, Artificial Sequence
  Description of Artificial Sequence: Synthetic primer
catgcagccaatactgagatttcttcagttactgtgtgag

SEQ ID NO: 15544 - DNA, 40 bp, Artificial Sequence
  Description of Artificial Sequence: Synthetic primer
cttttctcctttgtggaggcgagcccggggtctggggaag

SEQ ID NO: 15545 - DNA, 40 bp, Artificial Sequence
  Description of Artificial Sequence: Synthetic primer
ctctgcttccaccagagctgccatccgcgcagcttcattc

SEQ ID NO: 15546 - DNA, 40 bp, Artificial Sequence
  Description of Artificial Sequence: Synthetic primer
atcctcagatgtaatggaaaagtcaatgagccatattgta

SEQ ID NO: 15547 - DNA, 40 bp, Artificial Sequence
  Description of Artificial Sequence: Synthetic primer
ccataacaatatttaactttaaaagctgtttgttatatgc

SEQ ID NO: 15548 - DNA, 40 bp, Artificial Sequence
  Description of Artificial Sequence: Synthetic primer
gaagcgaggatcgtacctccagttgttgtcacgtttctcg

SEQ ID NO: 15549 - DNA, 40 bp, Artificial Sequence
  Description of Artificial Sequence: Synthetic primer
cttaaagcattaagcagctagtgccctctgcagggcctgg

SEQ ID NO: 15550 - DNA, 40 bp, Artificial Sequence
  Description of Artificial Sequence: Synthetic primer
gtgttatacaacgtggaggagcaactgcagaggcattacg

SEQ ID NO: 15551 - DNA, 40 bp, Artificial Sequence
  Description of Artificial Sequence: Synthetic primer
gccctggagggacgtctgcaccccgaagcccctgtacctc

SEQ ID NO: 15552 - DNA, 40 bp, Artificial Sequence
  Description of Artificial Sequence: Synthetic primer
gccgggagtgggggtctccgctggtgccagcccgcttctg

SEQ ID NO: 15553 - DNA, 40 bp, Artificial Sequence
  Description of Artificial Sequence: Synthetic primer
gcgctggttgaaaaatggcaaagaattcaaacctgaccac

SEQ ID NO: 15554 - DNA, 40 bp, Artificial Sequence
  Description of Artificial Sequence: Synthetic primer
cccctctgctggctggccgcacactgctgtaagtcgaatg

SEQ ID NO: 15555 - DNA, 40 bp, Artificial Sequence
  Description of Artificial Sequence: Synthetic primer
tctgaaagaaaacgagcaaattccaaaatatgaaaagatt

SEQ ID NO: 15556 - DNA, 40 bp, Artificial Sequence
  Description of Artificial Sequence: Synthetic primer
gcaagtctgaattttgactggtcaccaaagccttttcatc

SEQ ID NO: 15557 - DNA, 40 bp, Artificial Sequence
  Description of Artificial Sequence: Synthetic primer
caggctggctgtatattaaggttggttgcgtcattacagg

SEQ ID NO: 15558 - DNA, 40 bp, Artificial Sequence
  Description of Artificial Sequence: Synthetic primer
gagttggatttgagtttgggaaagcccctctagaatttat

SEQ ID NO: 15559 - DNA, 40 bp, Artificial Sequence
  Description of Artificial Sequence: Synthetic primer
tgaccactgggtgtggacggtgtggggcagccctgaaagg

SEQ ID NO: 15560 - DNA, 40 bp, Artificial Sequence
  Description of Artificial Sequence: Synthetic primer
tcctttggcagaacacctaggtcattccttttaaagtcag

SEQ ID NO: 15561 - DNA, 40 bp, Artificial Sequence
  Description of Artificial Sequence: Synthetic primer
ctgaaccttgatatccaagccttagcctgcctgtcagcac

SEQ ID NO: 15562 - DNA, 40 bp, Artificial Sequence
  Description of Artificial Sequence: Synthetic primer
aatgtcgaaataaagggctttttgccatttctgttttcag

SEQ ID NO: 15563 - DNA, 40 bp, Artificial Sequence
  Description of Artificial Sequence: Synthetic primer
ccctacaccatggagggatacctctacgtgcaggagaaac

SEQ ID NO: 15564 - DNA, 40 bp, Artificial Sequence
  Description of Artificial Sequence: Synthetic primer
ttcccgtggaagtctgcagcccgtttactacgcatgaaag

SEQ ID NO: 15565 - DNA, 40 bp, Artificial Sequence
  Description of Artificial Sequence: Synthetic primer
agtgttcaggatctgctgacagaatcagagcagggacaag

SEQ ID NO: 15566 - DNA, 40 bp, Artificial Sequence
  Description of Artificial Sequence: Synthetic primer
agggctttctttgtgtatttgccataaataatactaaatc

SEQ ID NO: 15567 - DNA, 40 bp, Artificial Sequence
  Description of Artificial Sequence: Synthetic primer
ctgctcccacacttccagttgcgatcatcgacggtgggta

SEQ ID NO: 15568 - DNA, 40 bp, Artificial Sequence
  Description of Artificial Sequence: Synthetic primer
ggcatcgatggctcggtctcactaacgggacatcacacag

SEQ ID NO: 15569 - DNA, 40 bp, Artificial Sequence
  Description of Artificial Sequence: Synthetic primer
cattctgtgacggtctattaataaggttgccttgctagag

SEQ ID NO: 15570 - DNA, 40 bp, Artificial Sequence
  Description of Artificial Sequence: Synthetic primer
ttttgtaaatgccaaatgaaaaacgttttttgctgctatg

SEQ ID NO: 15571 - DNA, 40 bp, Artificial Sequence
  Description of Artificial Sequence: Synthetic primer
tgaattgactgtgtcagtttttcaccctttaaaataatgc

SEQ ID NO: 15572 - DNA, 40 bp, Artificial Sequence
  Description of Artificial Sequence: Synthetic primer
tgaatttatacagccctagatttgagattgtggccctgag

SEQ ID NO: 15573 - DNA, 40 bp, Artificial Sequence
  Description of Artificial Sequence: Synthetic primer
cctatgcaacaaaaaaggaaaaataaaaaattgctaatgc

SEQ ID NO: 15574 - DNA, 40 bp, Artificial Sequence
  Description of Artificial Sequence: Synthetic primer
aggacagctccctgggattcccggtcggagggcctggaac

SEQ ID NO: 15575 - DNA, 40 bp, Artificial Sequence
  Description of Artificial Sequence: Synthetic primer
tttaatttgctatgttgtttctaattctcttctggatctc

SEQ ID NO: 15576 - DNA, 40 bp, Artificial Sequence
  Description of Artificial Sequence: Synthetic primer
ctttctgctgacatcgccatggccacccgtgcagatgagg

SEQ ID NO: 15577 - DNA, 40 bp, Artificial Sequence
  Description of Artificial Sequence: Synthetic primer
ccaaacactgcattacataattttacctgcccaaacagac

SEQ ID NO: 15578 - DNA, 40 bp, Artificial Sequence
  Description of Artificial Sequence: Synthetic primer
tcccgtacagattccttccttactgtctcttcctgccaac

SEQ ID NO: 15579 - DNA, 40 bp, Artificial Sequence
  Description of Artificial Sequence: Synthetic primer
cttgacttgctgcaggtagcactgcttctccttggccatc

SEQ ID NO: 15580 - DNA, 40 bp, Artificial Sequence
  Description of Artificial Sequence: Synthetic primer
gccacctgtttggccaaggctcgagcctctggagaatctc

SEQ ID NO: 15581 - DNA, 40 bp, Artificial Sequence
  Description of Artificial Sequence: Synthetic primer
ggccgccggcggcccaacccgtctatcccttcggccgccg

SEQ ID NO: 15582 - DNA, 40 bp, Artificial Sequence
  Description of Artificial Sequence: Synthetic primer
aagggttaaaatggctgccattgtatgggtgttactttgc

SEQ ID NO: 15583 - DNA, 40 bp, Artificial Sequence
  Description of Artificial Sequence: Synthetic primer
atctctagatgaatgtggctaggtcaagttgggagtggtg

SEQ ID NO: 15584 - DNA, 40 bp, Artificial Sequence
  Description of Artificial Sequence: Synthetic primer
ccttatcccaccaatctgcaggaacttcagcatggaaagg

SEQ ID NO: 15585 - DNA, 40 bp, Artificial Sequence
  Description of Artificial Sequence: Synthetic primer
ggatacatatcagatgtatttacaccgtgtccagaagtat

SEQ ID NO: 15586 - DNA, 40 bp, Artificial Sequence
  Description of Artificial Sequence: Synthetic primer
ccaacttaggaagttcacagcggagatctgcattatcacg

SEQ ID NO: 15587 - DNA, 40 bp, Artificial Sequence
  Description of Artificial Sequence: Synthetic primer
gaagaaagcaagcaaagaagaaacccccagggacattttg

SEQ ID NO: 15588 - DNA, 40 bp, Artificial Sequence
  Description of Artificial Sequence: Synthetic primer
ttttgaatcagtttgtagaagttagcatcaaccggaatgc

SEQ ID NO: 15589 - DNA, 40 bp, Artificial Sequence
  Description of Artificial Sequence: Synthetic primer
gagcagggggtcagggctggacacagcatgctcctgaggc

SEQ ID NO: 15590 - DNA, 40 bp, Artificial Sequence
  Description of Artificial Sequence: Synthetic primer
tgagtttcatttgagcagttccatgtgtagacattccaag

SEQ ID NO: 15591 - DNA, 40 bp, Artificial Sequence
  Description of Artificial Sequence: Synthetic primer
cctttgcagcatgatctgcagcttgttggcatctcgctta

SEQ ID NO: 15592 - DNA, 40 bp, Artificial Sequence
  Description of Artificial Sequence: Synthetic primer
tcggcggggacctgtataacactgtgaccaaatactcagg

SEQ ID NO: 15593 - DNA, 40 bp, Artificial Sequence
  Description of Artificial Sequence: Synthetic primer
ctgagagaggtcggagctggggtgagggggccgagagagg

SEQ ID NO: 15594 - DNA, 40 bp, Artificial Sequence
  Description of Artificial Sequence: Synthetic primer
gaggctgcctgccttgccagcacccgtgtcctgagctcct

SEQ ID NO: 15595 - DNA, 40 bp, Artificial Sequence
  Description of Artificial Sequence: Synthetic primer
tctgaactgaacgcaaatacggtttcaccagtggtagctg

SEQ ID NO: 15596 - DNA, 40 bp, Artificial Sequence
  Description of Artificial Sequence: Synthetic primer
agtccttggtacccagcggctccttccacctgatctccag

SEQ ID NO: 15597 - DNA, 40 bp, Artificial Sequence
  Description of Artificial Sequence: Synthetic primer
attatggaaacttgaagttgctaaacagttggcatgggcc

SEQ ID NO: 15598 - DNA, 40 bp, Artificial Sequence
  Description of Artificial Sequence: Synthetic primer
gaagttatggataccatagatgaaggaaaatccaacagac

SEQ ID NO: 15599 - DNA, 40 bp, Artificial Sequence
  Description of Artificial Sequence: Synthetic primer
gaacttgaacttgcctagaggttctaggaagagcagctag

SEQ ID NO: 15600 - DNA, 40 bp, Artificial Sequence
  Description of Artificial Sequence: Synthetic primer
tgtgagccgtgagcagtttagagcccataaaacggtcctc

SEQ ID NO: 15601 - DNA, 40 bp, Artificial Sequence
  Description of Artificial Sequence: Synthetic primer
acagaaccaacaaaaccgcattcagtgcacctgcctcagc

SEQ ID NO: 15602 - DNA, 40 bp, Artificial Sequence
  Description of Artificial Sequence: Synthetic primer
tcgttcctgacatgctggaaaaagtttcttttgcttcaac

SEQ ID NO: 15603 - DNA, 40 bp, Artificial Sequence
  Description of Artificial Sequence: Synthetic primer
tgtaaagttcaattgtgaaaatgaatatcatgcaaataaa

SEQ ID NO: 15604 - DNA, 40 bp, Artificial Sequence
  Description of Artificial Sequence: Synthetic primer
ccggtattcattctctagggtgtggaataggacaggaaac

SEQ ID NO: 15605 - DNA, 40 bp, Artificial Sequence
  Description of Artificial Sequence: Synthetic primer
ggcccgcttcgaggtggagagagcccagtgggaggtggag

SEQ ID NO: 15606 - DNA, 40 bp, Artificial Sequence
  Description of Artificial Sequence: Synthetic primer
gctggaccagcagagggagttggcccggaagcgggagcag

SEQ ID NO: 15607 - DNA, 40 bp, Artificial Sequence
  Description of Artificial Sequence: Synthetic primer
tttcctcactcccattttgctttaatttcacttccttcac

SEQ ID NO: 15608 - DNA, 40 bp, Artificial Sequence
  Description of Artificial Sequence: Synthetic primer
tttcccagcgaccacctgggggacctgggagaccccttcc

SEQ ID NO: 15609 - DNA, 40 bp, Artificial Sequence
  Description of Artificial Sequence: Synthetic primer
tttgaagtccaggtgttgctcgactcactattttactcag

SEQ ID NO: 15610 - DNA, 40 bp, Artificial Sequence
  Description of Artificial Sequence: Synthetic primer
tcttttactacatgattgctggagccaaggagaagatgag

SEQ ID NO: 15611 - DNA, 40 bp, Artificial Sequence
  Description of Artificial Sequence: Synthetic primer
cttctttaattccgccaacaaacagcttcttcacagttac

SEQ ID NO: 15612 - DNA, 40 bp, Artificial Sequence
  Description of Artificial Sequence: Synthetic primer
tgtgcagggctattgttggcacatgtggcagaataagtag

SEQ ID NO: 15613 - DNA, 40 bp, Artificial Sequence
  Description of Artificial Sequence: Synthetic primer
caagcccggtgagtattcacttttgatcactattttctcc

SEQ ID NO: 15614 - DNA, 40 bp, Artificial Sequence
  Description of Artificial Sequence: Synthetic primer
gctgtagggagagatgggctcagtattcccagtgggcttg

SEQ ID NO: 15615 - DNA, 40 bp, Artificial Sequence
  Description of Artificial Sequence: Synthetic primer
actgttctcagtcactgctctcccacagctgattacagac

SEQ ID NO: 15616 - DNA, 40 bp, Artificial Sequence
  Description of Artificial Sequence: Synthetic primer
cgggtcccccaacagcgacatggccctcgccggcgacccc

SEQ ID NO: 15617 - DNA, 40 bp, Artificial Sequence
  Description of Artificial Sequence: Synthetic primer
gggagcccatgggtgagggacccaccaccccgctgcactg

SEQ ID NO: 15618 - DNA, 40 bp, Artificial Sequence
  Description of Artificial Sequence: Synthetic primer
ttttaagaagatctgggggaataaaaagccaacagtaagc

SEQ ID NO: 15619 - DNA, 40 bp, Artificial Sequence
  Description of Artificial Sequence: Synthetic primer
tattcctttgcaatcaggagggctgatgttccttttgaag

SEQ ID NO: 15620 - DNA, 40 bp, Artificial Sequence
  Description of Artificial Sequence: Synthetic primer
gttgtattcaggaggctgacgatgtttagaagccaggaag

SEQ ID NO: 15621 - DNA, 40 bp, Artificial Sequence
  Description of Artificial Sequence: Synthetic primer
gtaggggagatccaccttctccgagaagccctgcagaagg

SEQ ID NO: 15622 - DNA, 40 bp, Artificial Sequence
  Description of Artificial Sequence: Synthetic primer
gagccaagcaaatggagtggagaaagaggacagccagagc

SEQ ID NO: 15623 - DNA, 40 bp, Artificial Sequence
  Description of Artificial Sequence: Synthetic primer
gtcattcggtttcccatagcaaagactgtaaatattggtc

SEQ ID NO: 15624 - DNA, 40 bp, Artificial Sequence
  Description of Artificial Sequence: Synthetic primer
ttttacaaagaacatgctcacatcttcaggtgcctcattc

SEQ ID NO: 15625 - DNA, 40 bp, Artificial Sequence
  Description of Artificial Sequence: Synthetic primer
tcatcgatgacggtgttgttcctcaggtcaagtggtgttg

SEQ ID NO: 15626 - DNA, 40 bp, Artificial Sequence
  Description of Artificial Sequence: Synthetic primer
ctacccggtgcacgccctgggcatcatcacctgcttcgac

SEQ ID NO: 15627 - DNA, 40 bp, Artificial Sequence
  Description of Artificial Sequence: Synthetic primer
ttacttaaggaaaaagacctcttaatcaaagccaaaagtg

SEQ ID NO: 15628 - DNA, 40 bp, Artificial Sequence
  Description of Artificial Sequence: Synthetic primer
ggaaatgaaatgtgaagaaactcatgcaccaaactcgaac

SEQ ID NO: 15629 - DNA, 40 bp, Artificial Sequence
  Description of Artificial Sequence: Synthetic primer
accccatgggggcaatacagcaaataccatattaaataac

SEQ ID NO: 15630 - DNA, 40 bp, Artificial Sequence
  Description of Artificial Sequence: Synthetic primer
aacatttagagtttatctagagagcttggttaatctttcc

SEQ ID NO: 15631 - DNA, 40 bp, Artificial Sequence
  Description of Artificial Sequence: Synthetic primer
ttcccggatctgctcgcgggacacatgctccagcccaaag

SEQ ID NO: 15632 - DNA, 40 bp, Artificial Sequence
  Description of Artificial Sequence: Synthetic primer
attaatgactaatcaggaggcaacgtaaccaaaagcacag

SEQ ID NO: 15633 - DNA, 40 bp, Artificial Sequence
  Description of Artificial Sequence: Synthetic primer
actgggtcagattcataacctctctggactaacatttgaa

SEQ ID NO: 15634 - DNA, 40 bp, Artificial Sequence
  Description of Artificial Sequence: Synthetic primer
gtgctggagaagtccggaccccagaaattcagccctgtcg

SEQ ID NO: 15635 - DNA, 40 bp, Artificial Sequence
  Description of Artificial Sequence: Synthetic primer
ctccttcgggatccttagcaccgagtggattgagaaggag

SEQ ID NO: 15636 - DNA, 40 bp, Artificial Sequence
  Description of Artificial Sequence: Synthetic primer
acaaaaaaagaatctgtttcccattgtcctcctactcaac

SEQ ID NO: 15637 - DNA, 40 bp, Artificial Sequence
  Description of Artificial Sequence: Synthetic primer
aagcaagcagccttgaacaagtcattcaactcattgaagc

SEQ ID NO: 15638 - DNA, 40 bp, Artificial Sequence
  Description of Artificial Sequence: Synthetic primer
acactttgagaatctgaaaagtgtaaaaggggtagacaaa

SEQ ID NO: 15639 - DNA, 40 bp, Artificial Sequence
  Description of Artificial Sequence: Synthetic primer
tctttgtgaaagaacagcaatgagcaaagccacaggaacc

SEQ ID NO: 15640 - DNA, 40 bp, Artificial Sequence
  Description of Artificial Sequence: Synthetic primer
tcacttttacaggtgtgcggatatgcttgttccgatattc

SEQ ID NO: 15641 - DNA, 40 bp, Artificial Sequence
  Description of Artificial Sequence: Synthetic primer
agaggaggaggatctggacctgtctcttgctctccgatgc

SEQ ID NO: 15642 - DNA, 40 bp, Artificial Sequence
  Description of Artificial Sequence: Synthetic primer
ttcacttcttaggaggtgctcgaattactgttcttgcttc

SEQ ID NO: 15643 - DNA, 40 bp, Artificial Sequence
  Description of Artificial Sequence: Synthetic primer
ccattttccggaaatttgatgtcaatacttcagcagttca

SEQ ID NO: 15644 - DNA, 40 bp, Artificial Sequence
  Description of Artificial Sequence: Synthetic primer
ctcacccactcccagacacacacaagtcctcaaaagtttc

SEQ ID NO: 15645 - DNA, 40 bp, Artificial Sequence
  Description of Artificial Sequence: Synthetic primer
atcaaagggctagtagaaacagtgttatgttgggaagcag

SEQ ID NO: 15646 - DNA, 40 bp, Artificial Sequence
  Description of Artificial Sequence: Synthetic primer
ttgaggaagcactccacgaccccctgtttgttgtcctttc

SEQ ID NO: 15647 - DNA, 40 bp, Artificial Sequence
  Description of Artificial Sequence: Synthetic primer
cttccgtctcaggcttttctgaaatgagctgcattccttc

SEQ ID NO: 15648 - DNA, 40 bp, Artificial Sequence
  Description of Artificial Sequence: Synthetic primer
tgagccaaccttgctcttggggaaggggacagattatgaa

SEQ ID NO: 15649 - DNA, 40 bp, Artificial Sequence
  Description of Artificial Sequence: Synthetic primer
tttttcatgaacccacgccctctctggctggttgctaaaa

SEQ ID NO: 15650 - DNA, 40 bp, Artificial Sequence
  Description of Artificial Sequence: Synthetic primer
tcaccattcggtcaatcagagctcggcgagtcgcctctac

SEQ ID NO: 15651 - DNA, 40 bp, Artificial Sequence
  Description of Artificial Sequence: Synthetic primer
ttgggccttctgggagcttgcccagcttgagcctggagtc

SEQ ID NO: 15652 - DNA, 40 bp, Artificial Sequence
  Description of Artificial Sequence: Synthetic primer
agtgatagaactgatctgaggaagctgagatgctattaac

SEQ ID NO: 15653 - DNA, 40 bp, Artificial Sequence
  Description of Artificial Sequence: Synthetic primer
gggagcgtgatcacagtcctacaccaagtgttttcaacag

SEQ ID NO: 15654 - DNA, 40 bp, Artificial Sequence
  Description of Artificial Sequence: Synthetic primer
tccccaagaaaacttttgaaaggaaagagtagacccaaag

SEQ ID NO: 15655 - DNA, 40 bp, Artificial Sequence
  Description of Artificial Sequence: Synthetic primer
tcagaagctctggcaccaagggaagcaccagggttggatg

SEQ ID NO: 15656 - DNA, 40 bp, Artificial Sequence
  Description of Artificial Sequence: Synthetic primer
ctgacttcttacgttggaagtgttcgtccgcttgtcactg

SEQ ID NO: 15657 - DNA, 40 bp, Artificial Sequence
  Description of Artificial Sequence: Synthetic primer
agaagactttgctctggccaatgcggtacagattgctgtc

SEQ ID NO: 15658 - DNA, 40 bp, Artificial Sequence
  Description of Artificial Sequence: Synthetic primer
tgcctctctccgctctgcctatgacagcaccatggagacc

SEQ ID NO: 15659 - DNA, 40 bp, Artificial Sequence
  Description of Artificial Sequence: Synthetic primer
gtgaatcagtttcttgtttatatttttttcaccttttaaa

SEQ ID NO: 15660 - DNA, 40 bp, Artificial Sequence
  Description of Artificial Sequence: Synthetic primer
atgccccccacgatcacaagcagtttctggtccttgatga

SEQ ID NO: 15661 - DNA, 40 bp, Artificial Sequence
  Description of Artificial Sequence: Synthetic primer
atgtggctatcctactcttttgggcaatgcatgtattatg

SEQ ID NO: 15662 - DNA, 40 bp, Artificial Sequence
  Description of Artificial Sequence: Synthetic primer
cacttgtcttgctgcagttgatggctacatgaccagtttc

SEQ ID NO: 15663 - DNA, 40 bp, Artificial Sequence
  Description of Artificial Sequence: Synthetic primer
caagacttagatttactatacattttttctctcagattac

SEQ ID NO: 15664 - DNA, 40 bp, Artificial Sequence
  Description of Artificial Sequence: Synthetic primer
agttcattgatttgaagagtcatttcttctgactttgaat

SEQ ID NO: 15665 - DNA, 40 bp, Artificial Sequence
  Description of Artificial Sequence: Synthetic primer
cgtagagttagagtcacatttttctttgcagcgaaactcc

SEQ ID NO: 15666 - DNA, 40 bp, Artificial Sequence
  Description of Artificial Sequence: Synthetic primer
caaatgactcacagagaaaaaagatggcagaaccaagggc

SEQ ID NO: 15667 - DNA, 40 bp, Artificial Sequence
  Description of Artificial Sequence: Synthetic primer
tgatctgtttcatcaacatcaataaacattttgttgagag

SEQ ID NO: 15668 - DNA, 40 bp, Artificial Sequence
  Description of Artificial Sequence: Synthetic primer
ttgtcagctgggttgattttgcatgattattgaactagag

SEQ ID NO: 15669 - DNA, 40 bp, Artificial Sequence
  Description of Artificial Sequence: Synthetic primer
ttgactttctccggcacaaccagactcgtgctggcatctc

SEQ ID NO: 15670 - DNA, 40 bp, Artificial Sequence
  Description of Artificial Sequence: Synthetic primer
tttcttgcatagtttggatatagtggcgatgcagatcctc

SEQ ID NO: 15671 - DNA, 40 bp, Artificial Sequence
  Description of Artificial Sequence: Synthetic primer
attgactagtagaactcattctgttttagtgtatatttca

SEQ ID NO: 15672 - DNA, 40 bp, Artificial Sequence
  Description of Artificial Sequence: Synthetic primer
aagatgtggaatgtcctctcgtctctggcttggcgaattg

SEQ ID NO: 15673 - DNA, 40 bp, Artificial Sequence
  Description of Artificial Sequence: Synthetic primer
aaacatggaactagaagaaaaggagaaggcagagaaaaag

SEQ ID NO: 15674 - DNA, 40 bp, Artificial Sequence
  Description of Artificial Sequence: Synthetic primer
tgtggaagtccttgggaacaaaggcccatcaagatcctac

SEQ ID NO: 15675 - DNA, 40 bp, Artificial Sequence
  Description of Artificial Sequence: Synthetic primer
gtcatagatgggaactcagaagatgacctttacatgatgg

SEQ ID NO: 15676 - DNA, 40 bp, Artificial Sequence
  Description of Artificial Sequence: Synthetic primer
gggaccctctggcctgtgtcttcaggctcaaacaggttgt

SEQ ID NO: 15677 - DNA, 40 bp, Artificial Sequence
  Description of Artificial Sequence: Synthetic primer
ctaatgaaaaattggatccaccacctggaggccgcaaaac

SEQ ID NO: 15678 - DNA, 40 bp, Artificial Sequence
  Description of Artificial Sequence: Synthetic primer
ttacagaaggtcattcctcggcaccctggtgaccctgagc

SEQ ID NO: 15679 - DNA, 40 bp, Artificial Sequence
  Description of Artificial Sequence: Synthetic primer
gggatatgtcagtaatattcttaacttttatgtcagaacg

SEQ ID NO: 15680 - DNA, 40 bp, Artificial Sequence
  Description of Artificial Sequence: Synthetic primer
acttcagaataaatagtatctcgcaaagcttcaaacatgg

SEQ ID NO: 15681 - DNA, 40 bp, Artificial Sequence
  Description of Artificial Sequence: Synthetic primer
gtttgtcctcatgagctccacgtcggcgtgcaccatctcc

SEQ ID NO: 15682 - DNA, 40 bp, Artificial Sequence
  Description of Artificial Sequence: Synthetic primer
tgaaaatactgatggactaaataggacacaaagccaatta

SEQ ID NO: 15683 - DNA, 40 bp, Artificial Sequence
  Description of Artificial Sequence: Synthetic primer
aggaaccccggaaggtgcccccgagagcagaacggagaac

SEQ ID NO: 15684 - DNA, 40 bp, Artificial Sequence
  Description of Artificial Sequence: Synthetic primer
cgaatttacagtctagtacttattacatgctgctatacac

SEQ ID NO: 15685 - DNA, 40 bp, Artificial Sequence
  Description of Artificial Sequence: Synthetic primer
acttcccttcttccacgtttagcttaatagaacaaatcac

SEQ ID NO: 15686 - DNA, 40 bp, Artificial Sequence
  Description of Artificial Sequence: Synthetic primer
ccgagggtgtggcggcggcgcttacccccgagcggctcct

SEQ ID NO: 15687 - DNA, 40 bp, Artificial Sequence
  Description of Artificial Sequence: Synthetic primer
actcaaggaggctttaggtattccagccgctgcctctttc

SEQ ID NO: 15688 - DNA, 40 bp, Artificial Sequence
  Description of Artificial Sequence: Synthetic primer
gtgctagattgaggttgactagtctcagtgggcttgtttc

SEQ ID NO: 15689 - DNA, 40 bp, Artificial Sequence
  Description of Artificial Sequence: Synthetic primer
gagttgttctacaaaagacttggtgggctctgggttgtgg

SEQ ID NO: 15690 - DNA, 40 bp, Artificial Sequence
  Description of Artificial Sequence: Synthetic primer
gtggggtggccccctccccagacagcgctgctgacggcgg

SEQ ID NO: 15691 - DNA, 40 bp, Artificial Sequence
  Description of Artificial Sequence: Synthetic primer
ttttcctctagataaattctctcttttgggccactcttgg

SEQ ID NO: 15692 - DNA, 40 bp, Artificial Sequence
  Description of Artificial Sequence: Synthetic primer
aagaggaagaaatgaagcaaatggaagaacgatacaaaaa

SEQ ID NO: 15693 - DNA, 40 bp, Artificial Sequence
  Description of Artificial Sequence: Synthetic primer
ccccgccgctccacagcaaaatggcccgaggaagcagcag

SEQ ID NO: 15694 - DNA, 40 bp, Artificial Sequence
  Description of Artificial Sequence: Synthetic primer
tggtatggagagccaacatgtacaactcccatcttgaaac

SEQ ID NO: 15695 - DNA, 40 bp, Artificial Sequence
  Description of Artificial Sequence: Synthetic primer
ccgcctacccgtccgccaagacccccagcagcacctatcc

SEQ ID NO: 15696 - DNA, 40 bp, Artificial Sequence
  Description of Artificial Sequence: Synthetic primer
acccgagagcctggcctacaacaagttctccatcaagtcc

SEQ ID NO: 15697 - DNA, 40 bp, Artificial Sequence
  Description of Artificial Sequence: Synthetic primer
ttcctgtgccgcacagtcttctccctctagaagtaagcat

SEQ ID NO: 15698 - DNA, 40 bp, Artificial Sequence
  Description of Artificial Sequence: Synthetic primer
atattccgaggacctgaaggacgcgcaggagaagctggag

SEQ ID NO: 15699 - DNA, 40 bp, Artificial Sequence
  Description of Artificial Sequence: Synthetic primer
cttggtgatgaagctgccttcttgggttggaactgtcagg

SEQ ID NO: 15700 - DNA, 40 bp, Artificial Sequence
  Description of Artificial Sequence: Synthetic primer
tttttcttttacagctgtttttaaggctagcttttaggtg

SEQ ID NO: 15701 - DNA, 40 bp, Artificial Sequence
  Description of Artificial Sequence: Synthetic primer
tcaatgaaggtattggcattgttaaggacgtagcgtagac

SEQ ID NO: 15702 - DNA, 40 bp, Artificial Sequence
  Description of Artificial Sequence: Synthetic primer
tctctctcaacaatatgctcactggagatgacgtttttag

SEQ ID NO: 15703 - DNA, 40 bp, Artificial Sequence
  Description of Artificial Sequence: Synthetic primer
ataaccagggatcacgttgtgtagctggaatccaaaggtg

SEQ ID NO: 15704 - DNA, 40 bp, Artificial Sequence
  Description of Artificial Sequence: Synthetic primer
tcatggcagcctctccgggaaatggggctgaggcaagtcg

SEQ ID NO: 15705 - DNA, 40 bp, Artificial Sequence
  Description of Artificial Sequence: Synthetic primer
ctagtgcaaaaggcggtaaccaaccacccaagcccacacc

SEQ ID NO: 15706 - DNA, 40 bp, Artificial Sequence
  Description of Artificial Sequence: Synthetic primer
aacggcctttggtggaagactgagctccaaactggactgg

SEQ ID NO: 15707 - DNA, 40 bp, Artificial Sequence
  Description of Artificial Sequence: Synthetic primer
tccccggagtcgccgcgcagctggccggggaagcctttcc

SEQ ID NO: 15708 - DNA, 40 bp, Artificial Sequence
  Description of Artificial Sequence: Synthetic primer
cccagaatccacttgctggggtcctggagggtgggtgaag

SEQ ID NO: 15709 - DNA, 40 bp, Artificial Sequence
  Description of Artificial Sequence: Synthetic primer
ccagttggttggtgtgcagccagcggaaaacctcttgttc

SEQ ID NO: 15710 - DNA, 40 bp, Artificial Sequence
  Description of Artificial Sequence: Synthetic primer
tcttttgatgtttctgaacagcattaaataattgcaccac

SEQ ID NO: 15711 - DNA, 40 bp, Artificial Sequence
  Description of Artificial Sequence: Synthetic primer
ggatttattgacaatgaataaagggcacgaaggccaggcc

SEQ ID NO: 15712 - DNA, 40 bp, Artificial Sequence
  Description of Artificial Sequence: Synthetic primer
atcaagcagccctccaatcacagctggggtccggctaggg

SEQ ID NO: 15713 - DNA, 40 bp, Artificial Sequence
  Description of Artificial Sequence: Synthetic primer
acacgccatgaacctgtgggggtgtgcgggcagatcattc

SEQ ID NO: 15714 - DNA, 40 bp, Artificial Sequence
  Description of Artificial Sequence: Synthetic primer
ccagtccttccacagtaaatacaggtaaagagtgttgttc

SEQ ID NO: 15715 - DNA, 40 bp, Artificial Sequence
  Description of Artificial Sequence: Synthetic primer
gagtggaagcagcaggtgatgaccacagtacaaaatatgc

SEQ ID NO: 15716 - DNA, 40 bp, Artificial Sequence
  Description of Artificial Sequence: Synthetic primer
tctgagtccagggccgatgaggtggcgcctgcaaagaagg

SEQ ID NO: 15717 - DNA, 40 bp, Artificial Sequence
  Description of Artificial Sequence: Synthetic primer
gtactcatggccgtcagagctcacagactcaatcaccttc

SEQ ID NO: 15718 - DNA, 40 bp, Artificial Sequence
  Description of Artificial Sequence: Synthetic primer
ccagccaagcaatgcaggaatatatcgcagtagttaaaaa

SEQ ID NO: 15719 - DNA, 40 bp, Artificial Sequence
  Description of Artificial Sequence: Synthetic primer
tatcagcactagatggttccaccctcatgggataaaactg

SEQ ID NO: 15720 - DNA, 40 bp, Artificial Sequence
  Description of Artificial Sequence: Synthetic primer
ctggtgggcttcagaccacccctcctcggggcatggggcc

SEQ ID NO: 15721 - DNA, 40 bp, Artificial Sequence
  Description of Artificial Sequence: Synthetic primer
gctagaaggttgcaggctgccctcactggggctttccttg

SEQ ID NO: 15722 - DNA, 40 bp, Artificial Sequence
  Description of Artificial Sequence: Synthetic primer
agtttctccaaaagcaactgatcctgagtttccacataag

SEQ ID NO: 15723 - DNA, 40 bp, Artificial Sequence
  Description of Artificial Sequence: Synthetic primer
tactcaggaatctccttggcgtagaggagcttgttggttg

SEQ ID NO: 15724 - DNA, 40 bp, Artificial Sequence
  Description of Artificial Sequence: Synthetic primer
cgaggtacttatcggggttgggctgggcatctcccaattc

SEQ ID NO: 15725 - DNA, 40 bp, Artificial Sequence
  Description of Artificial Sequence: Synthetic primer
acagctgtgccccccgggaaatccaagtaccttggagaag

SEQ ID NO: 15726 - DNA, 40 bp, Artificial Sequence
  Description of Artificial Sequence: Synthetic primer
aaccacggtccagtgggtacttgaacaatgccatagcaag

SEQ ID NO: 15727 - DNA, 40 bp, Artificial Sequence
  Description of Artificial Sequence: Synthetic primer
tgctcagattcgggcctgtgcacttgtatgcaacctgtcg

SEQ ID NO: 15728 - DNA, 40 bp, Artificial Sequence
  Description of Artificial Sequence: Synthetic primer
tagctggaggccgaggtaatcgccgtgcaatacaaatcag

SEQ ID NO: 15729 - DNA, 40 bp, Artificial Sequence
  Description of Artificial Sequence: Synthetic primer
gcatctccacaagtcagcaattgaagtcaatcacagaaag

SEQ ID NO: 15730 - DNA, 40 bp, Artificial Sequence
  Description of Artificial Sequence: Synthetic primer
cagatgaagaaaacaactgtcatgcaggagaagtaaaagc

SEQ ID NO: 15731 - DNA, 40 bp, Artificial Sequence
  Description of Artificial Sequence: Synthetic primer
agcggccagcggggatccggggtcgcccagtcccctcagc

SEQ ID NO: 15732 - DNA, 40 bp, Artificial Sequence
  Description of Artificial Sequence: Synthetic primer
tcagggtccgcttctcctcctctgtcaggagcagtggccc

SEQ ID NO: 15733 - DNA, 40 bp, Artificial Sequence
  Description of Artificial Sequence: Synthetic primer
ccttcatggaaggaatattcacttctaaaacagacacatg

SEQ ID NO: 15734 - DNA, 40 bp, Artificial Sequence
  Description of Artificial Sequence: Synthetic primer
agctctgtaaggaagtgcttctataaattcttaggtttag

SEQ ID NO: 15735 - DNA, 40 bp, Artificial Sequence
  Description of Artificial Sequence: Synthetic primer
accatgttttctgaatgtactgggggaaatgtctattctc

SEQ ID NO: 15736 - DNA, 40 bp, Artificial Sequence
  Description of Artificial Sequence: Synthetic primer
tattagaagtgatcaggcgctgtcaacagaaagaaaaagg

SEQ ID NO: 15737 - DNA, 40 bp, Artificial Sequence
  Description of Artificial Sequence: Synthetic primer
ctgtggactgctggagtttaggagttattctttttatctg

SEQ ID NO: 15738 - DNA, 40 bp, Artificial Sequence
  Description of Artificial Sequence: Synthetic primer
aggtctaggctggaatgggggcccagttgaccacttttgc

SEQ ID NO: 15739 - DNA, 40 bp, Artificial Sequence
  Description of Artificial Sequence: Synthetic primer
catgcttcactgggtatagcccaactctctcaggctggtc

SEQ ID NO: 15740 - DNA, 40 bp, Artificial Sequence
  Description of Artificial Sequence: Synthetic primer
cttctctttgtcccgccaagtagcccgagagagcacctac

SEQ ID NO: 15741 - DNA, 40 bp, Artificial Sequence
  Description of Artificial Sequence: Synthetic primer
aaccaaacacacactacacagtcctggctgctcctaacac

SEQ ID NO: 15742 - DNA, 40 bp, Artificial Sequence
  Description of Artificial Sequence: Synthetic primer
ttactccttaagcacctcagtttttcaagtggggtttatc

SEQ ID NO: 15743 - DNA, 40 bp, Artificial Sequence
  Description of Artificial Sequence: Synthetic primer
gacgtgatgctctttttccttagcattgtaatgtatgtgt

SEQ ID NO: 15744 - DNA, 40 bp, Artificial Sequence
  Description of Artificial Sequence: Synthetic primer
tatattctggaatacctctcgatctagtgcccatgtttta

SEQ ID NO: 15745 - DNA, 40 bp, Artificial Sequence
  Description of Artificial Sequence: Synthetic primer
aggacagccccttcttggatttgcagcccaccagcttcag

SEQ ID NO: 15746 - DNA, 40 bp, Artificial Sequence
  Description of Artificial Sequence: Synthetic primer
ggaaccctgagaagtcacccccctccgtcccattagtctg

SEQ ID NO: 15747 - DNA, 40 bp, Artificial Sequence
  Description of Artificial Sequence: Synthetic primer
tttgcctttcaaaaagagttttttcatctgcatagccatc

SEQ ID NO: 15748 - DNA, 40 bp, Artificial Sequence
  Description of Artificial Sequence: Synthetic primer
tctcccagggcagcacttgcccagaaatcactgcctgtgg

SEQ ID NO: 15749 - DNA, 40 bp, Artificial Sequence
  Description of Artificial Sequence: Synthetic primer
tcagggtcggcgggtgtcaggagaggtcactatgggtctc

SEQ ID NO: 15750 - DNA, 40 bp, Artificial Sequence
  Description of Artificial Sequence: Synthetic primer
ctctatgacatacaatgtttctccttcaactacggaaatc

SEQ ID NO: 15751 - DNA, 40 bp, Artificial Sequence
  Description of Artificial Sequence: Synthetic primer
gaaaatatagcaagagaagtagaaggcaaaactccagaag

SEQ ID NO: 15752 - DNA, 40 bp, Artificial Sequence
  Description of Artificial Sequence: Synthetic primer
ggttccaaagacacttttgatgacgattcttaacaataac

SEQ ID NO: 15753 - DNA, 40 bp, Artificial Sequence
  Description of Artificial Sequence: Synthetic primer
tggattttcaataaggcaattaataaaaacccatatatgg

SEQ ID NO: 15754 - DNA, 40 bp, Artificial Sequence
  Description of Artificial Sequence: Synthetic primer
gatctcctcagagcagttcaccccgtggtagccggccacg

SEQ ID NO: 15755 - DNA, 40 bp, Artificial Sequence
  Description of Artificial Sequence: Synthetic primer
tataagaacaagatgatggtctgccaagtgggtggtatag

SEQ ID NO: 15756 - DNA, 40 bp, Artificial Sequence
  Description of Artificial Sequence: Synthetic primer
attagaaaggagagctcaggaaactgctgttaacctcgtc

SEQ ID NO: 15757 - DNA, 40 bp, Artificial Sequence
  Description of Artificial Sequence: Synthetic primer
gtgagcctggcccccctggccctgctggtgctgctggccc

SEQ ID NO: 15758 - DNA, 40 bp, Artificial Sequence
  Description of Artificial Sequence: Synthetic primer
tttaattttgtattttgaaaagtcagtatataaataagaa

SEQ ID NO: 15759 - DNA, 40 bp, Artificial Sequence
  Description of Artificial Sequence: Synthetic primer
ttacactagtccataaatgagcttcacaggattcataagc

SEQ ID NO: 15760 - DNA, 40 bp, Artificial Sequence
  Description of Artificial Sequence: Synthetic primer
aaggaagttcatcaacatctctcaaattagcaagcatatc

SEQ ID NO: 15761 - DNA, 40 bp, Artificial Sequence
  Description of Artificial Sequence: Synthetic primer
gattaactagtgcttcttgttcttgttccaatgtattttc

SEQ ID NO: 15762 - DNA, 40 bp, Artificial Sequence
  Description of Artificial Sequence: Synthetic primer
cagtaacaaagtttatagccacacctttcctcccaaatcg

SEQ ID NO: 15763 - DNA, 40 bp, Artificial Sequence
  Description of Artificial Sequence: Synthetic primer
gcctttaattcctcaaaccttgctgcagcttcctgaagag

SEQ ID NO: 15764 - DNA, 40 bp, Artificial Sequence
  Description of Artificial Sequence: Synthetic primer
aatgaaccatgtgtcaggcatgcaagcaaccactcctcag

SEQ ID NO: 15765 - DNA, 40 bp, Artificial Sequence
  Description of Artificial Sequence: Synthetic primer
ccctgggggggcctccgagtctggcaccgtcctcgagggg

SEQ ID NO: 15766 - DNA, 40 bp, Artificial Sequence
  Description of Artificial Sequence: Synthetic primer
caagaggccgcgcttcgactttccgggcagcgcgggagtg

SEQ ID NO: 15767 - DNA, 40 bp, Artificial Sequence
  Description of Artificial Sequence: Synthetic primer
caataatttctgtatttattgggttttgtaatttttttgg

SEQ ID NO: 15768 - DNA, 40 bp, Artificial Sequence
  Description of Artificial Sequence: Synthetic primer
gttttctgaatggaaatcaggaacaaactgctcatcactg

SEQ ID NO: 15769 - DNA, 40 bp, Artificial Sequence
  Description of Artificial Sequence: Synthetic primer
caagatgacactccacgccacccggggggctgcactcctc

SEQ ID NO: 15770 - DNA, 40 bp, Artificial Sequence
  Description of Artificial Sequence: Synthetic primer
taaaatgaacattttcttacaaactttatttgtaagaaac

SEQ ID NO: 15771 - DNA, 40 bp, Artificial Sequence
  Description of Artificial Sequence: Synthetic primer
tcccgaaggcctccagcagcgggttggactgcaggataat

SEQ ID NO: 15772 - DNA, 40 bp, Artificial Sequence
  Description of Artificial Sequence: Synthetic primer
gcttctaccttcatagaagggaagtaacagagaagagcag

SEQ ID NO: 15773 - DNA, 40 bp, Artificial Sequence
  Description of Artificial Sequence: Synthetic primer
ctttatattggccaaaagggaataaaaatgtcatcatagg

SEQ ID NO: 15774 - DNA, 40 bp, Artificial Sequence
  Description of Artificial Sequence: Synthetic primer
gaaggagggtgggtgagtggggctggggtgagggcgcttc

SEQ ID NO: 15775 - DNA, 40 bp, Artificial Sequence
  Description of Artificial Sequence: Synthetic primer
tgttgacccctcccctttctctcaggtgtctctaccacag

SEQ ID NO: 15776 - DNA, 40 bp, Artificial Sequence
  Description of Artificial Sequence: Synthetic primer
tcctcgttctcgtcgccgaacgtgtgcaggcggctgaagg

SEQ ID NO: 15777 - DNA, 40 bp, Artificial Sequence
  Description of Artificial Sequence: Synthetic primer
catggctcctgactcctgtgcggaacgtgagtgactgagc

SEQ ID NO: 15778 - DNA, 40 bp, Artificial Sequence
  Description of Artificial Sequence: Synthetic primer
aaacggcctggccgcagccaatcagcgttcggctactgac

SEQ ID NO: 15779 - DNA, 40 bp, Artificial Sequence
  Description of Artificial Sequence: Synthetic primer
tgctccccaagacggctgaaggacggacccttcgctgatg

SEQ ID NO: 15780 - DNA, 40 bp, Artificial Sequence
  Description of Artificial Sequence: Synthetic primer
cctctgcccttccactttggccagtatgcctctttggtag

SEQ ID NO: 15781 - DNA, 40 bp, Artificial Sequence
  Description of Artificial Sequence: Synthetic primer
ggaccagctcttcggacacgttggtgggcagcatggacag

SEQ ID NO: 15782 - DNA, 40 bp, Artificial Sequence
  Description of Artificial Sequence: Synthetic primer
gacgttccatttccactttattaaggcgtgcagcaaactc

SEQ ID NO: 15783 - DNA, 40 bp, Artificial Sequence
  Description of Artificial Sequence: Synthetic primer
ttgctgttgtcactactcctgcctcctcagtttctacttg

SEQ ID NO: 15784 - DNA, 40 bp, Artificial Sequence
  Description of Artificial Sequence: Synthetic primer
ccacgaggaccacgaagcccttctttcccagcaggaccag

SEQ ID NO: 15785 - DNA, 40 bp, Artificial Sequence
  Description of Artificial Sequence: Synthetic primer
ctcggcttcttgggccttgtccactgccttccctgcaaag

SEQ ID NO: 15786 - DNA, 40 bp, Artificial Sequence
  Description of Artificial Sequence: Synthetic primer
tcctgttccaggcacagtcatttcctcttggtctttcgtc

SEQ ID NO: 15787 - DNA, 40 bp, Artificial Sequence
  Description of Artificial Sequence: Synthetic primer
ccttctagatgatgcaaatctacgcaagaatgaactggag

SEQ ID NO: 15788 - DNA, 40 bp, Artificial Sequence
  Description of Artificial Sequence: Synthetic primer
cagaagcaggtgtctctggaggcctggttgcagcgtgagg

SEQ ID NO: 15789 - DNA, 40 bp, Artificial Sequence
  Description of Artificial Sequence: Synthetic primer
gctagcatggctctctcattcctgcggaacttggctcttc

SEQ ID NO: 15790 - DNA, 40 bp, Artificial Sequence
  Description of Artificial Sequence: Synthetic primer
cagcctaaagtagctccagcaacctggtcagcaggcgttc

SEQ ID NO: 15791 - DNA, 40 bp, Artificial Sequence
  Description of Artificial Sequence: Synthetic primer
cccacctctaacatatttgggctgagcttctagtgagcag

SEQ ID NO: 15792 - DNA, 40 bp, Artificial Sequence
  Description of Artificial Sequence: Synthetic primer
aagatgacgtgtatggaaactcatcaggaaggaagcacag

SEQ ID NO: 15793 - DNA, 40 bp, Artificial Sequence
  Description of Artificial Sequence: Synthetic primer
agtgaaatggaagatgcctatcatgaacatcaggcaaatc

SEQ ID NO: 15794 - DNA, 40 bp, Artificial Sequence
  Description of Artificial Sequence: Synthetic primer
tataagagcaaagaagaatccagtggcacaccagctcatc

SEQ ID NO: 15795 - DNA, 40 bp, Artificial Sequence
  Description of Artificial Sequence: Synthetic primer
caacgacaccaactggccaacagccaaccaccccgcagac

SEQ ID NO: 15796 - DNA, 40 bp, Artificial Sequence
  Description of Artificial Sequence: Synthetic primer
agactggagcagcagctctacaatatccagaaactcacag

SEQ ID NO: 15797 - DNA, 40 bp, Artificial Sequence
  Description of Artificial Sequence: Synthetic primer
cgacaggaggattcagacacccctaccccacagctctgac

SEQ ID NO: 15798 - DNA, 40 bp, Artificial Sequence
  Description of Artificial Sequence: Synthetic primer
acttgccaaggaatggacctgaacctttccacccgaccac

SEQ ID NO: 15799 - DNA, 40 bp, Artificial Sequence
  Description of Artificial Sequence: Synthetic primer
cggggccgtggccgcagcctcgcacttggggggccattac

SEQ ID NO: 15800 - DNA, 40 bp, Artificial Sequence
  Description of Artificial Sequence: Synthetic primer
ggtctgcatctctgtgatgtcagcgttcccgatgccaatg

SEQ ID NO: 15801 - DNA, 40 bp, Artificial Sequence
  Description of Artificial Sequence: Synthetic primer
cacaaggagcagcgtagaaaggaagaggcaggcaaagacg

SEQ ID NO: 15802 - DNA, 40 bp, Artificial Sequence
  Description of Artificial Sequence: Synthetic primer
ctccgactccgagtcctccgagcccagcggctcccactag

SEQ ID NO: 15803 - DNA, 40 bp, Artificial Sequence
  Description of Artificial Sequence: Synthetic primer
ccttctcggagctggcccagggggcctggagcatggacag

SEQ ID NO: 15804 - DNA, 40 bp, Artificial Sequence
  Description of Artificial Sequence: Synthetic primer
ggctttttctgccactgaggagacagaaagcctccgctgg

SEQ ID NO: 15805 - DNA, 40 bp, Artificial Sequence
  Description of Artificial Sequence: Synthetic primer
tgccccggggccgaggcccgtgacggggcgggcgggagcc

SEQ ID NO: 15806 - DNA, 40 bp, Artificial Sequence
  Description of Artificial Sequence: Synthetic primer
accgtccctcaccgaggaggacctcactgaagtgaagaag

SEQ ID NO: 15807 - DNA, 40 bp, Artificial Sequence
  Description of Artificial Sequence: Synthetic primer
gcgcttttcctgccgcggcagccgcccatgtcgctggccg

SEQ ID NO: 15808 - DNA, 40 bp, Artificial Sequence
  Description of Artificial Sequence: Synthetic primer
ggcctcttcaatttctacgaggacttgtacttcacctacc

SEQ ID NO: 15809 - DNA, 40 bp, Artificial Sequence
  Description of Artificial Sequence: Synthetic primer
aaatgaggctacacaacatgtctgaggcaatggcggtgac

SEQ ID NO: 15810 - DNA, 40 bp, Artificial Sequence
  Description of Artificial Sequence: Synthetic primer
gcctatgatgatctgaaagttggggttggtatccatgtag

SEQ ID NO: 15811 - DNA, 40 bp, Artificial Sequence
  Description of Artificial Sequence: Synthetic primer
agtgtcctgggatctggcacttcgatgagaaagctgtgac

SEQ ID NO: 15812 - DNA, 40 bp, Artificial Sequence
  Description of Artificial Sequence: Synthetic primer
tggggtggggtaagtggaggctgctctccccctcctggtc

SEQ ID NO: 15813 - DNA, 40 bp, Artificial Sequence
  Description of Artificial Sequence: Synthetic primer
acatagaaacactcaagcaggcagtaaatatacacaaagg

SEQ ID NO: 15814 - DNA, 40 bp, Artificial Sequence
  Description of Artificial Sequence: Synthetic primer
cctactaaaaattgatctgcctttccttctgctacagctc

SEQ ID NO: 15815 - DNA, 40 bp, Artificial Sequence
  Description of Artificial Sequence: Synthetic primer
cctacctctgcctattttaaatccaggttctgcataagac

SEQ ID NO: 15816 - DNA, 40 bp, Artificial Sequence
  Description of Artificial Sequence: Synthetic primer
ccatacttggttatcaagaacaccacatcatgcttttcac

SEQ ID NO: 15817 - DNA, 40 bp, Artificial Sequence
  Description of Artificial Sequence: Synthetic primer
ctcacggtaggcagaggtgcctctgccagggccacagaac

SEQ ID NO: 15818 - DNA, 40 bp, Artificial Sequence
  Description of Artificial Sequence: Synthetic primer
aagtaagaagagcaggaaggactcagacaccaaacagaag

SEQ ID NO: 15819 - DNA, 40 bp, Artificial Sequence
  Description of Artificial Sequence: Synthetic primer
caacgaacactccctggagcgctacctgcacatgctcctg

SEQ ID NO: 15820 - DNA, 40 bp, Artificial Sequence
  Description of Artificial Sequence: Synthetic primer
aactttccaaatctgagagagaaaaatttgggccagttcc

SEQ ID NO: 15821 - DNA, 40 bp, Artificial Sequence
  Description of Artificial Sequence: Synthetic primer
tctctggagggtgcgctggggtccctgatgcgtggtatcc

SEQ ID NO: 15822 - DNA, 40 bp, Artificial Sequence
  Description of Artificial Sequence: Synthetic primer
cccatgctgctgcagggactcccacagcgccaccgtgtcg

SEQ ID NO: 15823 - DNA, 40 bp, Artificial Sequence
  Description of Artificial Sequence: Synthetic primer
tgtgcagagaggccaggaaggtctccagcgggctagtctc

SEQ ID NO: 15824 - DNA, 40 bp, Artificial Sequence
  Description of Artificial Sequence: Synthetic primer
gatatcacccatgggagaagctggagaacctgagagaaag

SEQ ID NO: 15825 - DNA, 40 bp, Artificial Sequence
  Description of Artificial Sequence: Synthetic primer
ggccaacctggagcccaggacaggcctctaccaggactgc

SEQ ID NO: 15826 - DNA, 40 bp, Artificial Sequence
  Description of Artificial Sequence: Synthetic primer
ttgctgctactcttgcttttggaagttaccacagggtctg

SEQ ID NO: 15827 - DNA, 40 bp, Artificial Sequence
  Description of Artificial Sequence: Synthetic primer
gcacccccagggcccaccagtccacggaggggccatactc

SEQ ID NO: 15828 - DNA, 40 bp, Artificial Sequence
  Description of Artificial Sequence: Synthetic primer
ggagttgcattgattcagtattacaaatatatagcacatc

SEQ ID NO: 15829 - DNA, 40 bp, Artificial Sequence
  Description of Artificial Sequence: Synthetic primer
acagagcaaagtccctgggccctgggaaaagcctcatcac

SEQ ID NO: 15830 - DNA, 40 bp, Artificial Sequence
  Description of Artificial Sequence: Synthetic primer
ctcctctccctccactgtagctggatggcgagaccactgc

SEQ ID NO: 15831 - DNA, 40 bp, Artificial Sequence
  Description of Artificial Sequence: Synthetic primer
ccgctcgcacaagccacggcggactctcccgaggcggaac

SEQ ID NO: 15832 - DNA, 40 bp, Artificial Sequence
  Description of Artificial Sequence: Synthetic primer
agatactcaaagtcatagagagagggctttgcctcggaag

SEQ ID NO: 15833 - DNA, 40 bp, Artificial Sequence
  Description of Artificial Sequence: Synthetic primer
gcaacggcaaggactcagccctgctggagaccactgagag

SEQ ID NO: 15834 - DNA, 40 bp, Artificial Sequence
  Description of Artificial Sequence: Synthetic primer
cctactgaatgatgccttggctattcgtgagaaaactttg

SEQ ID NO: 15835 - DNA, 40 bp, Artificial Sequence
  Description of Artificial Sequence: Synthetic primer
aaacagctccagtgtttttaagagaatgtttcttaaaacc

SEQ ID NO: 15836 - DNA, 40 bp, Artificial Sequence
  Description of Artificial Sequence: Synthetic primer
gtggtctccgtttcgtggcgccagatgccttccatttcac

SEQ ID NO: 15837 - DNA, 40 bp, Artificial Sequence
  Description of Artificial Sequence: Synthetic primer
cggtctggacacgtctccggggtgggtcgtccggccttcg

SEQ ID NO: 15838 - DNA, 40 bp, Artificial Sequence
  Description of Artificial Sequence: Synthetic primer
cattccaacaggaatcaaatcgtaccagcagaaccacttc

SEQ ID NO: 15839 - DNA, 40 bp, Artificial Sequence
  Description of Artificial Sequence: Synthetic primer
gatggagatgcagtcacttattgtccaggtgaggcccaag

SEQ ID NO: 15840 - DNA, 40 bp, Artificial Sequence
  Description of Artificial Sequence: Synthetic primer
ccgatactgctcgaacaggtggttctgccgggccctcttg

SEQ ID NO: 15841 - DNA, 40 bp, Artificial Sequence
  Description of Artificial Sequence: Synthetic primer
attcaagaaattcagacatgcttgcttttgttcgttttgg

SEQ ID NO: 15842 - DNA, 40 bp, Artificial Sequence
  Description of Artificial Sequence: Synthetic primer
cttaaaaagagccatggaaggtaaaagtatgaaaatcttg

SEQ ID NO: 15843 - DNA, 40 bp, Artificial Sequence
  Description of Artificial Sequence: Synthetic primer
actcacaaactattagataatgaaaagtgtgatcatgaag

SEQ ID NO: 15844 - DNA, 40 bp, Artificial Sequence
  Description of Artificial Sequence: Synthetic primer
tcgttaccctccgtggtatatttataatctcacaaaagtg

SEQ ID NO: 15845 - DNA, 40 bp, Artificial Sequence
  Description of Artificial Sequence: Synthetic primer
ggacccggtacttccctctgagtactcgctcccgcagctc

SEQ ID NO: 15846 - DNA, 40 bp, Artificial Sequence
  Description of Artificial Sequence: Synthetic primer
cttttgaccatgctatttatcaaacctaatccaggactgc

SEQ ID NO: 15847 - DNA, 40 bp, Artificial Sequence
  Description of Artificial Sequence: Synthetic primer
actggccatctttaagtctggaggcattcctgccctggtg

SEQ ID NO: 15848 - DNA, 40 bp, Artificial Sequence
  Description of Artificial Sequence: Synthetic primer
caagctttctattttgatgctgaatgaaaccccctaccac

SEQ ID NO: 15849 - DNA, 40 bp, Artificial Sequence
  Description of Artificial Sequence: Synthetic primer
agtttgcagagcttttgttttggcagaatcaggagcattc

SEQ ID NO: 15850 - DNA, 40 bp, Artificial Sequence
  Description of Artificial Sequence: Synthetic primer
attttattttccttgttcaccatacaatcatgtactcttt

SEQ ID NO: 15851 - DNA, 40 bp, Artificial Sequence
  Description of Artificial Sequence: Synthetic primer
cagagcgctgctgccagttcctggtagccttgaccacgac

SEQ ID NO: 15852 - DNA, 40 bp, Artificial Sequence
  Description of Artificial Sequence: Synthetic primer
ttgttctttgtacgacttaccttacccagcagctccaaac

SEQ ID NO: 15853 - DNA, 40 bp, Artificial Sequence
  Description of Artificial Sequence: Synthetic primer
agtgcccctgaagctctccgatgcgtccagcattcaccag

SEQ ID NO: 15854 - DNA, 40 bp, Artificial Sequence
  Description of Artificial Sequence: Synthetic primer
tgctctgaaattgccttggccgacatggctgcagagagac

SEQ ID NO: 15855 - DNA, 40 bp, Artificial Sequence
  Description of Artificial Sequence: Synthetic primer
tatcatgggtcccatctgatagtggctttgggaacctctg

SEQ ID NO: 15856 - DNA, 40 bp, Artificial Sequence
  Description of Artificial Sequence: Synthetic primer
gtttggcgctgttctctgttatctcaaacacctggacttc

SEQ ID NO: 15857 - DNA, 40 bp, Artificial Sequence
  Description of Artificial Sequence: Synthetic primer
tctggaacaaaactcctaccaaagagactaagagctaagg

SEQ ID NO: 15858 - DNA, 40 bp, Artificial Sequence
  Description of Artificial Sequence: Synthetic primer
agttacgatgatgcagaatctctgaaaaccttacgctatg

SEQ ID NO: 15859 - DNA, 40 bp, Artificial Sequence
  Description of Artificial Sequence: Synthetic primer
ggtctcttagtaagcaaaagcaccagaaatccttctctac

SEQ ID NO: 15860 - DNA, 40 bp, Artificial Sequence
  Description of Artificial Sequence: Synthetic primer
gcaggaggcgccccctgggccccctccggctgctgctggg

SEQ ID NO: 15861 - DNA, 40 bp, Artificial Sequence
  Description of Artificial Sequence: Synthetic primer
gtacttgctgaattcaatcatttttaacaagccaataaag

SEQ ID NO: 15862 - DNA, 40 bp, Artificial Sequence
  Description of Artificial Sequence: Synthetic primer
gctgcaccggccacgccatgccacggtcagccgcagcctc

SEQ ID NO: 15863 - DNA, 40 bp, Artificial Sequence
  Description of Artificial Sequence: Synthetic primer
ttttgaaggtgcagattatgaaagtcaccttctgcgtgag

SEQ ID NO: 15864 - DNA, 40 bp, Artificial Sequence
  Description of Artificial Sequence: Synthetic primer
tccaggaggccaagcagaggctcccctcatgaaggaagcc

SEQ ID NO: 15865 - DNA, 40 bp, Artificial Sequence
  Description of Artificial Sequence: Synthetic primer
caagctgcggaactggcagtggtggaggcttttcaccaaa

SEQ ID NO: 15866 - DNA, 40 bp, Artificial Sequence
  Description of Artificial Sequence: Synthetic primer
tattgcaacactgggcgttggtgggttcggaagagttgag

SEQ ID NO: 15867 - DNA, 40 bp, Artificial Sequence
  Description of Artificial Sequence: Synthetic primer
aggacgcctgacttgccgatgcttctgcgagcacttgagg

SEQ ID NO: 15868 - DNA, 40 bp, Artificial Sequence
  Description of Artificial Sequence: Synthetic primer
taaatctatcaatggtttcaacatcacaggtacaatcatc

SEQ ID NO: 15869 - DNA, 40 bp, Artificial Sequence
  Description of Artificial Sequence: Synthetic primer
attagttgaaaccactaccatatagcgtgttcgattctgg

SEQ ID NO: 15870 - DNA, 40 bp, Artificial Sequence
  Description of Artificial Sequence: Synthetic primer
atgaagcactgtttcacagttactttcacttcccgaataa

SEQ ID NO: 15871 - DNA, 40 bp, Artificial Sequence
  Description of Artificial Sequence: Synthetic primer
gatgagcaagacatgcttaatgcatatttcggcttgtgta

SEQ ID NO: 15872 - DNA, 40 bp, Artificial Sequence
  Description of Artificial Sequence: Synthetic primer
aaaggttttggcaataaattttgctcatattcccatcaac

SEQ ID NO: 15873 - DNA, 40 bp, Artificial Sequence
  Description of Artificial Sequence: Synthetic primer
atggtgcccacctggggcctggatccaaatgcgatttctc

SEQ ID NO: 15874 - DNA, 40 bp, Artificial Sequence
  Description of Artificial Sequence: Synthetic primer
aagggcagcacctttgacagttagaaagctctcgctgatg

SEQ ID NO: 15875 - DNA, 40 bp, Artificial Sequence
  Description of Artificial Sequence: Synthetic primer
gaaacctaaataaagataattttttaaaatgtacctcttg

SEQ ID NO: 15876 - DNA, 40 bp, Artificial Sequence
  Description of Artificial Sequence: Synthetic primer
tcactaagacacatgagaatttaactttataaccgcgtga

SEQ ID NO: 15877 - DNA, 40 bp, Artificial Sequence
  Description of Artificial Sequence: Synthetic primer
cagccccttcccctgggaactctcctggccttctaggaat

SEQ ID NO: 15878 - DNA, 40 bp, Artificial Sequence
  Description of Artificial Sequence: Synthetic primer
gaagctgctgttcggaggccctctattggtgcctctctcc

SEQ ID NO: 15879 - DNA, 40 bp, Artificial Sequence
  Description of Artificial Sequence: Synthetic primer
ctggtttatgactggtggaacgaacctaggaaataaaaac

SEQ ID NO: 15880 - DNA, 40 bp, Artificial Sequence
  Description of Artificial Sequence: Synthetic primer
caattacatatttaaaactgtatctgtaagggcttttcaa

SEQ ID NO: 15881 - DNA, 40 bp, Artificial Sequence
  Description of Artificial Sequence: Synthetic primer
tgggatcagattccaacaaaagtaacaatttgcgtgtttc

SEQ ID NO: 15882 - DNA, 40 bp, Artificial Sequence
  Description of Artificial Sequence: Synthetic primer
gattgtcttggtttgtttttcctatttgtggggtattttc

SEQ ID NO: 15883 - DNA, 40 bp, Artificial Sequence
  Description of Artificial Sequence: Synthetic primer
gtgtaggtttcatggtgcagtgtaaaggtgcagtggattc

SEQ ID NO: 15884 - DNA, 40 bp, Artificial Sequence
  Description of Artificial Sequence: Synthetic primer
gtttaattggtttgatgggtggagcaagaggttcagcatc

SEQ ID NO: 15885 - DNA, 40 bp, Artificial Sequence
  Description of Artificial Sequence: Synthetic primer
tggggaccattagggtgggttcttttcccagcatcaaatg

SEQ ID NO: 15886 - DNA, 40 bp, Artificial Sequence
  Description of Artificial Sequence: Synthetic primer
tagccaaattatttttgcacatctttctgtttctcatgtc

SEQ ID NO: 15887 - DNA, 40 bp, Artificial Sequence
  Description of Artificial Sequence: Synthetic primer
ggtgatttctgtaccattgagggcactgggcttgaactgc

SEQ ID NO: 15888 - DNA, 40 bp, Artificial Sequence
  Description of Artificial Sequence: Synthetic primer
ggccatgtttgcaaagacctggagagtccacgccatcttc

SEQ ID NO: 15889 - DNA, 40 bp, Artificial Sequence
  Description of Artificial Sequence: Synthetic primer
cttctacttgcgctgaaatgaaaccaaaacaggccgttgg

SEQ ID NO: 15890 - DNA, 40 bp, Artificial Sequence
  Description of Artificial Sequence: Synthetic primer
ctactgctcctttcacctgagaaaaacaccactgaatatc

SEQ ID NO: 15891 - DNA, 40 bp, Artificial Sequence
  Description of Artificial Sequence: Synthetic primer
ataaaaatcttttcaaaagcaaatcaaaccccaatcaacc

SEQ ID NO: 15892 - DNA, 40 bp, Artificial Sequence
  Description of Artificial Sequence: Synthetic primer
ccgggccgccgggggcggggagaaggcgggccggcccggg

SEQ ID NO: 15893 - DNA, 40 bp, Artificial Sequence
  Description of Artificial Sequence: Synthetic primer
gtaccctcaagtgagggcctacaacttcccacccaaaaag

SEQ ID NO: 15894 - DNA, 40 bp, Artificial Sequence
  Description of Artificial Sequence: Synthetic primer
accatcgacaagctgcttttggaggaagaggatagcgacg

SEQ ID NO: 15895 - DNA, 40 bp, Artificial Sequence
  Description of Artificial Sequence: Synthetic primer
taggggcctggccaatccagagcctgccccagagcccaag

SEQ ID NO: 15896 - DNA, 40 bp, Artificial Sequence
  Description of Artificial Sequence: Synthetic primer
catctgctcagttgaactggtcaggaaagcggggagtggg

SEQ ID NO: 15897 - DNA, 40 bp, Artificial Sequence
  Description of Artificial Sequence: Synthetic primer
aagagtttgttgtattcttctgttactttgttgagaagag

SEQ ID NO: 15898 - DNA, 40 bp, Artificial Sequence
  Description of Artificial Sequence: Synthetic primer
tcttggttacatcagaggaaggagacaatgaatctagaag

SEQ ID NO: 15899 - DNA, 40 bp, Artificial Sequence
  Description of Artificial Sequence: Synthetic primer
catgtgggtggggacccagactagccaggtggagatcaag

SEQ ID NO: 15900 - DNA, 40 bp, Artificial Sequence
  Description of Artificial Sequence: Synthetic primer
ttgagtctcgggcccggcctcagtcccggccccgcctccc

SEQ ID NO: 15901 - DNA, 40 bp, Artificial Sequence
  Description of Artificial Sequence: Synthetic primer
actttgttggacaatgatggcaagaaaattcactgtgctg

SEQ ID NO: 15902 - DNA, 40 bp, Artificial Sequence
  Description of Artificial Sequence: Synthetic primer
gatgaaccgccaaaggtttttcaggcctcaactcaaactc

SEQ ID NO: 15903 - DNA, 40 bp, Artificial Sequence
  Description of Artificial Sequence: Synthetic primer
agctcactcttcgaaatggcatctgctttggcaatgatgg

SEQ ID NO: 15904 - DNA, 40 bp, Artificial Sequence
  Description of Artificial Sequence: Synthetic primer
aagagaaatgagacctctgttatcgatcagattggggaag

SEQ ID NO: 15905 - DNA, 40 bp, Artificial Sequence
  Description of Artificial Sequence: Synthetic primer
tgccagagcaaacaagaacagaaatacaaatggagaactg

SEQ ID NO: 15906 - DNA, 40 bp, Artificial Sequence
  Description of Artificial Sequence: Synthetic primer
catatgaaaaagatccccgattatactttgacgacacttg

SEQ ID NO: 15907 - DNA, 40 bp, Artificial Sequence
  Description of Artificial Sequence: Synthetic primer
gcctcacacactcctcccatcaatggatcagacagcattc

SEQ ID NO: 15908 - DNA, 40 bp, Artificial Sequence
  Description of Artificial Sequence: Synthetic primer
ttgaagaaattctagcatgaagagcttgtatctccaaatc

SEQ ID NO: 15909 - DNA, 40 bp, Artificial Sequence
  Description of Artificial Sequence: Synthetic primer
accgtagctgggcgtcccgtcgaaggtgaccgtgctgtaa

SEQ ID NO: 15910 - DNA, 40 bp, Artificial Sequence
  Description of Artificial Sequence: Synthetic primer
actccccactgtacgatgccttcgggaagactcagtggtg

SEQ ID NO: 15911 - DNA, 40 bp, Artificial Sequence
  Description of Artificial Sequence: Synthetic primer
tcgcgcccggagtcacggcgatacacaggctttcattgtg

SEQ ID NO: 15912 - DNA, 40 bp, Artificial Sequence
  Description of Artificial Sequence: Synthetic primer
taggagctgcagcagccgccgcgaatggctcgccgcgcgg

SEQ ID NO: 15913 - DNA, 40 bp, Artificial Sequence
  Description of Artificial Sequence: Synthetic primer
gacggccatcatcgtgtccatcgtcatctgcagcgtcctg

SEQ ID NO: 15914 - DNA, 40 bp, Artificial Sequence
  Description of Artificial Sequence: Synthetic primer
aaatccatcttctggtggtttcctggactttatgtttttg

SEQ ID NO: 15915 - DNA, 40 bp, Artificial Sequence
  Description of Artificial Sequence: Synthetic primer
gctgcctgtagagctggcgagggacatgcagacagacacg

SEQ ID NO: 15916 - DNA, 40 bp, Artificial Sequence
  Description of Artificial Sequence: Synthetic primer
cactggagttgtaggccagcagcagcctcacttccacctg

SEQ ID NO: 15917 - DNA, 40 bp, Artificial Sequence
  Description of Artificial Sequence: Synthetic primer
aagctaattattacttgttggagtcttgtctcaggcatgc

SEQ ID NO: 15918 - DNA, 40 bp, Artificial Sequence
  Description of Artificial Sequence: Synthetic primer
tgcaggaggaacttgaaaacaggacctccgaaaccaacac

SEQ ID NO: 15919 - DNA, 40 bp, Artificial Sequence
  Description of Artificial Sequence: Synthetic primer
cttgttgctgttgccattgaagtgttggggaataaccttc

SEQ ID NO: 15920 - DNA, 40 bp, Artificial Sequence
  Description of Artificial Sequence: Synthetic primer
gtttgcttccaaggagccattcgctgaaagggacagctac

SEQ ID NO: 15921 - DNA, 40 bp, Artificial Sequence
  Description of Artificial Sequence: Synthetic primer
tggctttttatcagttgcaacaggactgtgacctgagctg

SEQ ID NO: 15922 - DNA, 40 bp, Artificial Sequence
  Description of Artificial Sequence: Synthetic primer
gcgagccgacaccatgcgatccaaggcgagggcgaggaag

SEQ ID NO: 15923 - DNA, 40 bp, Artificial Sequence
  Description of Artificial Sequence: Synthetic primer
gcaaaagtaaaaatgattcaaattgacgaatgacctgtcc

SEQ ID NO: 15924 - DNA, 40 bp, Artificial Sequence
  Description of Artificial Sequence: Synthetic primer
cgccacagaatcagtaggggcacagagatgaaggcagcac

SEQ ID NO: 15925 - DNA, 40 bp, Artificial Sequence
  Description of Artificial Sequence: Synthetic primer
tgtgaattgtcttttactggcatctttgttttcctctttg

SEQ ID NO: 15926 - DNA, 40 bp, Artificial Sequence
  Description of Artificial Sequence: Synthetic primer
agcatgacagctgtctttggcagtctgtcatttttctagc

SEQ ID NO: 15927 - DNA, 40 bp, Artificial Sequence
  Description of Artificial Sequence: Synthetic primer
ggttcagccccagtccccggtggctgtcagtcaaagcaag

SEQ ID NO: 15928 - DNA, 40 bp, Artificial Sequence
  Description of Artificial Sequence: Synthetic primer
aataatttcagagatctttctttcaagatattttttcctg

SEQ ID NO: 15929 - DNA, 40 bp, Artificial Sequence
  Description of Artificial Sequence: Synthetic primer
ccattccaacaagtgaaggagctctgcagggccatcttgg

SEQ ID NO: 15930 - DNA, 40 bp, Artificial Sequence
  Description of Artificial Sequence: Synthetic primer
cgtctccctttccgtccgccatcttcccacggcccaccag

SEQ ID NO: 15931 - DNA, 40 bp, Artificial Sequence
  Description of Artificial Sequence: Synthetic primer
tctctttgaagtgagaaaacaccaccagggaacgtataac

SEQ ID NO: 15932 - DNA, 40 bp, Artificial Sequence
  Description of Artificial Sequence: Synthetic primer
ctgaggctctccctgagtgcagcttcgatctgctcctgac

SEQ ID NO: 15933 - DNA, 40 bp, Artificial Sequence
  Description of Artificial Sequence: Synthetic primer
aactactcccgggccaaagcctggcccaccaggcactaag

SEQ ID NO: 15934 - DNA, 40 bp, Artificial Sequence
  Description of Artificial Sequence: Synthetic primer
cctttgggagtacagttggcctttggcctccgggtggaag

SEQ ID NO: 15935 - DNA, 40 bp, Artificial Sequence
  Description of Artificial Sequence: Synthetic primer
tggcacacagcagcaggaagaatggctcccccaccgtctc

SEQ ID NO: 15936 - DNA, 40 bp, Artificial Sequence
  Description of Artificial Sequence: Synthetic primer
gcccctggcccagcgggagccccccctccccccagtgcgc

SEQ ID NO: 15937 - DNA, 40 bp, Artificial Sequence
  Description of Artificial Sequence: Synthetic primer
ttgtctttttattcaacatggtttccttctcttccaaacg

SEQ ID NO: 15938 - DNA, 40 bp, Artificial Sequence
  Description of Artificial Sequence: Synthetic primer
ggtgtgggaaggagagggcctctttagaagaaaacgacac

SEQ ID NO: 15939 - DNA, 40 bp, Artificial Sequence
  Description of Artificial Sequence: Synthetic primer
gaagaaaatgatttatggccaaagttacagaacattcatc

SEQ ID NO: 15940 - DNA, 40 bp, Artificial Sequence
  Description of Artificial Sequence: Synthetic primer
aaccctccggagttcctgcacgagacctatcatgccaacg

SEQ ID NO: 15941 - DNA, 40 bp, Artificial Sequence
  Description of Artificial Sequence: Synthetic primer
gttcagtgttggtggaaatgagctggtttttcaagtcaag

SEQ ID NO: 15942 - DNA, 40 bp, Artificial Sequence
  Description of Artificial Sequence: Synthetic primer
tggcctggatttatgctataatatatattttcatgttaag

SEQ ID NO: 15943 - DNA, 40 bp, Artificial Sequence
  Description of Artificial Sequence: Synthetic primer
ggaacctcacttcgtggtggtccactgcacaggctacatc

SEQ ID NO: 15944 - DNA, 40 bp, Artificial Sequence
  Description of Artificial Sequence: Synthetic primer
aaaacgccgtcctttgaataacaattctgaaattgcactg

SEQ ID NO: 15945 - DNA, 40 bp, Artificial Sequence
  Description of Artificial Sequence: Synthetic primer
ggacatatcaccaagtgagctaattcacagcaatgcacac

SEQ ID NO: 15946 - DNA, 40 bp, Artificial Sequence
  Description of Artificial Sequence: Synthetic primer
gcataccatttatcgggctcggcgcaggcccgcggggagc

SEQ ID NO: 15947 - DNA, 40 bp, Artificial Sequence
  Description of Artificial Sequence: Synthetic primer
aactaaggaggagttttatattaagggagacattttagtc

SEQ ID NO: 15948 - DNA, 40 bp, Artificial Sequence
  Description of Artificial Sequence: Synthetic primer
gcatgcagggctgggggcgggggcgacctggggcccgact

SEQ ID NO: 15949 - DNA, 40 bp, Artificial Sequence
  Description of Artificial Sequence: Synthetic primer
gggtcagggcaagtgtgacccaccaggcaaaattgagcag

SEQ ID NO: 15950 - DNA, 40 bp, Artificial Sequence
  Description of Artificial Sequence: Synthetic primer
gagaaatacttgaggccttctccaggattcttgtttcacc

SEQ ID NO: 15951 - DNA, 40 bp, Artificial Sequence
  Description of Artificial Sequence: Synthetic primer
gggagggagattttaaaacaatctgccagagaaaaatgac

SEQ ID NO: 15952 - DNA, 40 bp, Artificial Sequence
  Description of Artificial Sequence: Synthetic primer
gagaaagaagagaagcagaaactcattctgaaatacaagg

SEQ ID NO: 15953 - DNA, 40 bp, Artificial Sequence
  Description of Artificial Sequence: Synthetic primer
gcgatttcagacctagcagggaaggtgaagatgaagaagc

SEQ ID NO: 15954 - DNA, 40 bp, Artificial Sequence
  Description of Artificial Sequence: Synthetic primer
gaatggaatccttgaacaaggggctcccagctctggctgt

SEQ ID NO: 15955 - DNA, 40 bp, Artificial Sequence
  Description of Artificial Sequence: Synthetic primer
aaccctgccaaaatggatctgagcatgaagatcaatgtcc

SEQ ID NO: 15956 - DNA, 40 bp, Artificial Sequence
  Description of Artificial Sequence: Synthetic primer
ccaaaccagtggtactggctagtggtgcagctctgagttc

SEQ ID NO: 15957 - DNA, 40 bp, Artificial Sequence
  Description of Artificial Sequence: Synthetic primer
tcttttggctaagttctgtattttccaaatccaattgttg

SEQ ID NO: 15958 - DNA, 40 bp, Artificial Sequence
  Description of Artificial Sequence: Synthetic primer
gcggccgagtgcgcaggggccgcgcgcgcccgtcgctcgc

SEQ ID NO: 15959 - DNA, 40 bp, Artificial Sequence
  Description of Artificial Sequence: Synthetic primer
cagacaggaactgccagagggcaatggtgtgttttaactg

SEQ ID NO: 15960 - DNA, 40 bp, Artificial Sequence
  Description of Artificial Sequence: Synthetic primer
caaactcagattcctttcttcccttagctttgtccttatc

SEQ ID NO: 15961 - DNA, 40 bp, Artificial Sequence
  Description of Artificial Sequence: Synthetic primer
caggacaataaagactactcctatctgcggaacaactagc

SEQ ID NO: 15962 - DNA, 40 bp, Artificial Sequence
  Description of Artificial Sequence: Synthetic primer
tcacttgagtgttcacatgtttcacgtctctctggagctg

SEQ ID NO: 15963 - DNA, 40 bp, Artificial Sequence
  Description of Artificial Sequence: Synthetic primer
gccccgcaagcagcaagccaatttccattaattaccgaac

SEQ ID NO: 15964 - DNA, 40 bp, Artificial Sequence
  Description of Artificial Sequence: Synthetic primer
catttccttcactgctctttaggagaatcacctttggttg

SEQ ID NO: 15965 - DNA, 40 bp, Artificial Sequence
  Description of Artificial Sequence: Synthetic primer
agagcgcgccttgcaattgcaaaagccttctgatttggag

SEQ ID NO: 15966 - DNA, 40 bp, Artificial Sequence
  Description of Artificial Sequence: Synthetic primer
cttccccaggggacgtgagacccctcccccagggccctgc

SEQ ID NO: 15967 - DNA, 40 bp, Artificial Sequence
  Description of Artificial Sequence: Synthetic primer
actggcacggctcctggaagtcttcggccggactgttctg

SEQ ID NO: 15968 - DNA, 40 bp, Artificial Sequence
  Description of Artificial Sequence: Synthetic primer
cctcaaatgtaaccaaaattgcctaaagaatgcgggaaac

SEQ ID NO: 15969 - DNA, 40 bp, Artificial Sequence
  Description of Artificial Sequence: Synthetic primer
agcagctaaggccatggataaacctgtatgtaaggactgg

SEQ ID NO: 15970 - DNA, 40 bp, Artificial Sequence
  Description of Artificial Sequence: Synthetic primer
agtgaaatgaactttaggaacattctcagccataagcaag

SEQ ID NO: 15971 - DNA, 40 bp, Artificial Sequence
  Description of Artificial Sequence: Synthetic primer
ccttgctctggggcagcttccagcagacctccagcactgt

SEQ ID NO: 15972 - DNA, 40 bp, Artificial Sequence
  Description of Artificial Sequence: Synthetic primer
ttgaagcgggcgaggaacaggagaagacgctgtggagcag

SEQ ID NO: 15973 - DNA, 40 bp, Artificial Sequence
  Description of Artificial Sequence: Synthetic primer
cagaggtagagcactcacgcccccgccattgagaataagg

SEQ ID NO: 15974 - DNA, 40 bp, Artificial Sequence
  Description of Artificial Sequence: Synthetic primer
aaggtcttggacattccagaaaagagacagggctctggac

SEQ ID NO: 15975 - DNA, 40 bp, Artificial Sequence
  Description of Artificial Sequence: Synthetic primer
ggaaggagagtgggaacaggggcggggaccgggcacgctc

SEQ ID NO: 15976 - DNA, 40 bp, Artificial Sequence
  Description of Artificial Sequence: Synthetic primer
aatgattcagaagaaaaagaaaaaggagactttattggtc

SEQ ID NO: 15977 - DNA, 40 bp, Artificial Sequence
  Description of Artificial Sequence: Synthetic primer
gtggctgcgcgcgtccaccgcgggcatgatcctgcctaag

SEQ ID NO: 15978 - DNA, 40 bp, Artificial Sequence
  Description of Artificial Sequence: Synthetic primer
caggagcactggggcccccaggaggtcctggggcaggtag

SEQ ID NO: 15979 - DNA, 40 bp, Artificial Sequence
  Description of Artificial Sequence: Synthetic primer
taaccaccactcccaaaaatggaccaggaccaacaaaaac

SEQ ID NO: 15980 - DNA, 40 bp, Artificial Sequence
  Description of Artificial Sequence: Synthetic primer
atcacacacgatgatgaggggaagctggtctgtgagcttg

SEQ ID NO: 15981 - DNA, 40 bp, Artificial Sequence
  Description of Artificial Sequence: Synthetic primer
tttaagtcccaaattgagcagcttaaacaacaaaactacc

SEQ ID NO: 15982 - DNA, 40 bp, Artificial Sequence
  Description of Artificial Sequence: Synthetic primer
cggctgctgatagcccagcaggctggggctcaggctcttg

SEQ ID NO: 15983 - DNA, 40 bp, Artificial Sequence
  Description of Artificial Sequence: Synthetic primer
gaggctctgcgggaggagatcctaagccgggccctggaag

SEQ ID NO: 15984 - DNA, 40 bp, Artificial Sequence
  Description of Artificial Sequence: Synthetic primer
atgcaagtcatgctttcattctacatgtagttaaaactac

SEQ ID NO: 15985 - DNA, 40 bp, Artificial Sequence
  Description of Artificial Sequence: Synthetic primer
gtgagtggtcctgtagttgtttctctgaggttacatttcg

SEQ ID NO: 15986 - DNA, 40 bp, Artificial Sequence
  Description of Artificial Sequence: Synthetic primer
gtaaaggtcttcttcatgttctgggtttggggtgagtcag

SEQ ID NO: 15987 - DNA, 40 bp, Artificial Sequence
  Description of Artificial Sequence: Synthetic primer
gcagcagggcctgggtggccaggctcaagggcagccgaac

SEQ ID NO: 15988 - DNA, 40 bp, Artificial Sequence
  Description of Artificial Sequence: Synthetic primer
tttatgtctgcttttcaccttcgagagcacgaacaagtgc

SEQ ID NO: 15989 - DNA, 40 bp, Artificial Sequence
  Description of Artificial Sequence: Synthetic primer
caggtgccttacaactacaaccagctggaaggcagattca

SEQ ID NO: 15990 - DNA, 40 bp, Artificial Sequence
  Description of Artificial Sequence: Synthetic primer
ccatcactaccctgccctgcatccacacggccgccaggtc

SEQ ID NO: 15991 - DNA, 40 bp, Artificial Sequence
  Description of Artificial Sequence: Synthetic primer
catataattctatattgtatttctcacaacaatggctacc

SEQ ID NO: 15992 - DNA, 40 bp, Artificial Sequence
  Description of Artificial Sequence: Synthetic primer
tgactgctgaactgtgtgtggtttattgttgtacattcac

SEQ ID NO: 15993 - DNA, 40 bp, Artificial Sequence
  Description of Artificial Sequence: Synthetic primer
ggacactttgacaagcagaccagctcagggagttgtcacc

SEQ ID NO: 15994 - DNA, 40 bp, Artificial Sequence
  Description of Artificial Sequence: Synthetic primer
gttccttaatagcagagaaatctgcaacaggacttgatcc

SEQ ID NO: 15995 - DNA, 40 bp, Artificial Sequence
  Description of Artificial Sequence: Synthetic primer
gaggtggccctcagcgtcgtcctctacactcttggctctc

SEQ ID NO: 15996 - DNA, 40 bp, Artificial Sequence
  Description of Artificial Sequence: Synthetic primer
caaatggtttttatccaaggaattgcaaaaataaatataa

SEQ ID NO: 15997 - DNA, 40 bp, Artificial Sequence
  Description of Artificial Sequence: Synthetic primer
agccagcacgcaagaatgtccatgatgattcgtccagagg

SEQ ID NO: 15998 - DNA, 40 bp, Artificial Sequence
  Description of Artificial Sequence: Synthetic primer
ttttagtaagaaagctatctttttatggatgttagcagtt

SEQ ID NO: 15999 - DNA, 40 bp, Artificial Sequence
  Description of Artificial Sequence: Synthetic primer
ggaggggagaagggctggggagcctcgagggtccacgtag

SEQ ID NO: 16000 - DNA, 40 bp, Artificial Sequence
  Description of Artificial Sequence: Synthetic primer
actgatataactcctgaatgtttggtgtctccccgctatc

SEQ ID NO: 16001 - DNA, 40 bp, Artificial Sequence
  Description of Artificial Sequence: Synthetic primer
gcaattgttttagctctctctgttgctgctgtagtttagc

SEQ ID NO: 16002 - DNA, 40 bp, Artificial Sequence
  Description of Artificial Sequence: Synthetic primer
acagccaccagcaaccactcctcctttcaaaacacactgc

SEQ ID NO: 16003 - DNA, 40 bp, Artificial Sequence
  Description of Artificial Sequence: Synthetic primer
ccagccttgggcacagctccacccatcaccccagaacacc

SEQ ID NO: 16004 - DNA, 40 bp, Artificial Sequence
  Description of Artificial Sequence: Synthetic primer
gacaacataaaattcaggaatgttttatttagccttggtt

SEQ ID NO: 16005 - DNA, 40 bp, Artificial Sequence
  Description of Artificial Sequence: Synthetic primer
aagccgaaacgcactcaaatatgaacacaaagaaattgag

SEQ ID NO: 16006 - DNA, 40 bp, Artificial Sequence
  Description of Artificial Sequence: Synthetic primer
agacttcatttcttgtattaaaaatacactgttggcggac

SEQ ID NO: 16007 - DNA, 40 bp, Artificial Sequence
  Description of Artificial Sequence: Synthetic primer
catggtgatccccagagttggaaggtggtgtagacttgag

SEQ ID NO: 16008 - DNA, 40 bp, Artificial Sequence
  Description of Artificial Sequence: Synthetic primer
tactctgtggaaccttgcaaaagtgaagaaacgttgaagg

SEQ ID NO: 16009 - DNA, 40 bp, Artificial Sequence
  Description of Artificial Sequence: Synthetic primer
acggcggcacctgcaaagacatgaccagtggctacgtgtg

SEQ ID NO: 16010 - DNA, 40 bp, Artificial Sequence
  Description of Artificial Sequence: Synthetic primer
ccagggccccggcggccctcctggtcccaagggtaacagc

SEQ ID NO: 16011 - DNA, 40 bp, Artificial Sequence
  Description of Artificial Sequence: Synthetic primer
taccagcccttggggcactcacccctgtgatcaagcaatc

SEQ ID NO: 16012 - DNA, 40 bp, Artificial Sequence
  Description of Artificial Sequence: Synthetic primer
cggtggaaacggcaccagccccgacttctcccactccaag

SEQ ID NO: 16013 - DNA, 40 bp, Artificial Sequence
  Description of Artificial Sequence: Synthetic primer
cgcgggctccccagctgcggggccgccgctgcagccccgg

SEQ ID NO: 16014 - DNA, 40 bp, Artificial Sequence
  Description of Artificial Sequence: Synthetic primer
tacagcccgcacagcccttctgcttccctttgggctggac

SEQ ID NO: 16015 - DNA, 40 bp, Artificial Sequence
  Description of Artificial Sequence: Synthetic primer
ttgagcatttagctggagatttcctcaggatctggacttc

SEQ ID NO: 16016 - DNA, 40 bp, Artificial Sequence
  Description of Artificial Sequence: Synthetic primer
caagacgcttaaaaccttcaatcttctggggcgaagcaag

SEQ ID NO: 16017 - DNA, 40 bp, Artificial Sequence
  Description of Artificial Sequence: Synthetic primer
ttttcacagtgaaattagacccctttacttcaccattctg

SEQ ID NO: 16018 - DNA, 40 bp, Artificial Sequence
  Description of Artificial Sequence: Synthetic primer
ggtctctttcccggggcggctcacctggtgtcttggttcc

SEQ ID NO: 16019 - DNA, 40 bp, Artificial Sequence
  Description of Artificial Sequence: Synthetic primer
atgatgcccaatttaccaaaatgttcacgctgaatataag

SEQ ID NO: 16020 - DNA, 40 bp, Artificial Sequence
  Description of Artificial Sequence: Synthetic primer
cctggggacccaggggctcctcctttgccaccagatctac

SEQ ID NO: 16021 - DNA, 40 bp, Artificial Sequence
  Description of Artificial Sequence: Synthetic primer
cccctcaactgtgaatgcttttggagcctctgcagtcaag

SEQ ID NO: 16022 - DNA, 40 bp, Artificial Sequence
  Description of Artificial Sequence: Synthetic primer
cgccgtgggcgactgacgcagcgcgggcgcgtggagccgc

SEQ ID NO: 16023 - DNA, 40 bp, Artificial Sequence
  Description of Artificial Sequence: Synthetic primer
gtagaatcatctgcttggccaacccgcagtcctgaaaaac

SEQ ID NO: 16024 - DNA, 40 bp, Artificial Sequence
  Description of Artificial Sequence: Synthetic primer
ggatttaacgcgccgcttccccctatggccagaccagttc

SEQ ID NO: 16025 - DNA, 40 bp, Artificial Sequence
  Description of Artificial Sequence: Synthetic primer
acctgtgatggccaagacaacacattcatcacctgttacc

SEQ ID NO: 16026 - DNA, 40 bp, Artificial Sequence
  Description of Artificial Sequence: Synthetic primer
ctgttcttttgcaggcaagaatagaacaagaggctggttg

SEQ ID NO: 16027 - DNA, 40 bp, Artificial Sequence
  Description of Artificial Sequence: Synthetic primer
tcggacccgaggggcgctgggaaactccacacccaacagc

SEQ ID NO: 16028 - DNA, 40 bp, Artificial Sequence
  Description of Artificial Sequence: Synthetic primer
aacgctcttctcagtcaaacctagctgttgcaccagcaac

SEQ ID NO: 16029 - DNA, 40 bp, Artificial Sequence
  Description of Artificial Sequence: Synthetic primer
ggagtaccaccaagccacaggcacccttagtgcccacttc

SEQ ID NO: 16030 - DNA, 40 bp, Artificial Sequence
  Description of Artificial Sequence: Synthetic primer
acccctttgaaacttgatcctctagggcccctggcctctg

SEQ ID NO: 16031 - DNA, 40 bp, Artificial Sequence
  Description of Artificial Sequence: Synthetic primer
ggacgtaatgacttgaaacgaccaatgcaagcaccaccag

SEQ ID NO: 16032 - DNA, 40 bp, Artificial Sequence
  Description of Artificial Sequence: Synthetic primer
atctccctggaagaagccaacacgccctccgtggcaatag

SEQ ID NO: 16033 - DNA, 40 bp, Artificial Sequence
  Description of Artificial Sequence: Synthetic primer
agttgaggctgagtacttaaggccaacaccagagtccttg

SEQ ID NO: 16034 - DNA, 40 bp, Artificial Sequence
  Description of Artificial Sequence: Synthetic primer
gtattccacacagtctctggtcaagaaacacaaggacgtg

SEQ ID NO: 16035 - DNA, 40 bp, Artificial Sequence
  Description of Artificial Sequence: Synthetic primer
ggaggtggggtacccagtgagtggtttgtctgagaaggac

SEQ ID NO: 16036 - DNA, 40 bp, Artificial Sequence
  Description of Artificial Sequence: Synthetic primer
aggtgaatacagcttgatcatcactccactcaacgacatc

SEQ ID NO: 16037 - DNA, 40 bp, Artificial Sequence
  Description of Artificial Sequence: Synthetic primer
acgatggtcttggcgagagacttggagctgccgggcttcc

SEQ ID NO: 16038 - DNA, 40 bp, Artificial Sequence
  Description of Artificial Sequence: Synthetic primer
cagatttttaaactatactgagtcaacggtgcaggtaaac

SEQ ID NO: 16039 - DNA, 40 bp, Artificial Sequence
  Description of Artificial Sequence: Synthetic primer
ggtgagagaagggagaaggcggaagggggacggacagttc

SEQ ID NO: 16040 - DNA, 40 bp, Artificial Sequence
  Description of Artificial Sequence: Synthetic primer
aaagtgctaaacagtactgccttaaaagtcactgcaaatg

SEQ ID NO: 16041 - DNA, 40 bp, Artificial Sequence
  Description of Artificial Sequence: Synthetic primer
tccctatgatgccagtccctgcgttccctggcccgagctg

SEQ ID NO: 16042 - DNA, 40 bp, Artificial Sequence
  Description of Artificial Sequence: Synthetic primer
gacaccatgcagttgcgggctgctagatctcggtgcacaa

SEQ ID NO: 16043 - DNA, 40 bp, Artificial Sequence
  Description of Artificial Sequence: Synthetic primer
tctgtttttctggggacagcagatctgccagaaattgagg

SEQ ID NO: 16044 - DNA, 40 bp, Artificial Sequence
  Description of Artificial Sequence: Synthetic primer
ttcagaattggtgctgtccgatcggcccacaatcattttc

SEQ ID NO: 16045 - DNA, 40 bp, Artificial Sequence
  Description of Artificial Sequence: Synthetic primer
ctgtgagaacacccatatgaccatctggcttggcatcgtc

SEQ ID NO: 16046 - DNA, 40 bp, Artificial Sequence
  Description of Artificial Sequence: Synthetic primer
gtataagcttatttattagtgtatttaatggttcatcaat

SEQ ID NO: 16047 - DNA, 40 bp, Artificial Sequence
  Description of Artificial Sequence: Synthetic primer
atctgaagaagaaaccaatcatgggaagctggatttcaac

SEQ ID NO: 16048 - DNA, 40 bp, Artificial Sequence
  Description of Artificial Sequence: Synthetic primer
caatcaccccaaaggtcgcgataatattattgacctcttc

SEQ ID NO: 16049 - DNA, 40 bp, Artificial Sequence
  Description of Artificial Sequence: Synthetic primer
tcgtcagaccccagacctccccacctcccacctgcaccag

SEQ ID NO: 16050 - DNA, 40 bp, Artificial Sequence
  Description of Artificial Sequence: Synthetic primer
aaagcttttaaagtttttgctgtacttcaatttacttctt

SEQ ID NO: 16051 - DNA, 40 bp, Artificial Sequence; identical to SEQ ID NO: 11256
  Description of Artificial Sequence: Synthetic primer

SEQ ID NO: 16052 - DNA, 40 bp, Artificial Sequence
  Description of Artificial Sequence: Synthetic primer
ggaggagggaaagaagtagcagggctggaggtaggtgaag

SEQ ID NO: 16053 - DNA, 40 bp, Artificial Sequence
  Description of Artificial Sequence: Synthetic primer
aaggaattagaattgctcctaatgtcaaccgagaatgagc

SEQ ID NO: 16054 - DNA, 40 bp, Artificial Sequence
  Description of Artificial Sequence: Synthetic primer
actggtcgatcgggacctatcctgatgacacaccagcaac

SEQ ID NO: 16055 - DNA, 40 bp, Artificial Sequence
  Description of Artificial Sequence: Synthetic primer
tctttggataatctgggttttccagaagaaaattacaaag

SEQ ID NO: 16056 - DNA, 40 bp, Artificial Sequence
  Description of Artificial Sequence: Synthetic primer
ctaagttcagcgaggggtggggggaggggggagatttttc

SEQ ID NO: 16057 - DNA, 40 bp, Artificial Sequence
  Description of Artificial Sequence: Synthetic primer
gcgtactatgagcagcagatggcggccaggcaggccaatg

SEQ ID NO: 16058 - DNA, 40 bp, Artificial Sequence
  Description of Artificial Sequence: Synthetic primer
ctttcttttttaacagggtcaaatattcctgaatataatc

SEQ ID NO: 16059 - DNA, 40 bp, Artificial Sequence
  Description of Artificial Sequence: Synthetic primer
ggtagaaggagaacgtccgcgcctctgcggggcagtcagg

SEQ ID NO: 16060 - DNA, 40 bp, Artificial Sequence
  Description of Artificial Sequence: Synthetic primer
tcaatatatacaataggtcttgggcctacattaatacttc

SEQ ID NO: 16061 - DNA, 40 bp, Artificial Sequence
  Description of Artificial Sequence: Synthetic primer
tgggcgcagcggcacttgtccccatctgggcaggctttgc

SEQ ID NO: 16062 - DNA, 40 bp, Artificial Sequence
  Description of Artificial Sequence: Synthetic primer
attcaatgaaaattcacagaatgaacaaattcaatgttta

SEQ ID NO: 16063 - DNA, 40 bp, Artificial Sequence
  Description of Artificial Sequence: Synthetic primer
taattcctccataaactttctattgaacatggtggagatg

SEQ ID NO: 16064 - DNA, 40 bp, Artificial Sequence
  Description of Artificial Sequence: Synthetic primer
cactttaacattttactgtgctgttaacttggaagacctg

SEQ ID NO: 16065 - DNA, 40 bp, Artificial Sequence
  Description of Artificial Sequence: Synthetic primer
gcccgcgccggactggtaggggctgtaggccagggaggag

SEQ ID NO: 16066 - DNA, 40 bp, Artificial Sequence
  Description of Artificial Sequence: Synthetic primer
gtgccaatcaatagcacccctactcacatacacacacacc

SEQ ID NO: 16067 - DNA, 40 bp, Artificial Sequence
  Description of Artificial Sequence: Synthetic primer
tcctgctctcgcaggctccttggcacccaggccgggaggc

SEQ ID NO: 16068 - DNA, 40 bp, Artificial Sequence
  Description of Artificial Sequence: Synthetic primer
atgacggaaaggagtcagaagtggtttcctttctcaccac

SEQ ID NO: 16069 - DNA, 40 bp, Artificial Sequence
  Description of Artificial Sequence: Synthetic primer
tgaagctgaaccgcactggcctctgctacctgcccgagga

SEQ ID NO: 16070 - DNA, 40 bp, Artificial Sequence
  Description of Artificial Sequence: Synthetic primer
gagcccccgacgcgccactccggggagagagcggggatcc

SEQ ID NO: 16071 - DNA, 40 bp, Artificial Sequence
  Description of Artificial Sequence: Synthetic primer
tccacactggcgtaagagaaggcccagcagagcaggaatc

SEQ ID NO: 16072 - DNA, 40 bp, Artificial Sequence
  Description of Artificial Sequence: Synthetic primer
aggcccctgatgcccgcgtccagcgcggcctcccgtggcc

SEQ ID NO: 16073 - DNA, 40 bp, Artificial Sequence
  Description of Artificial Sequence: Synthetic primer
tgataagaggcgtgagggggtggacatggtgagggtgctg

SEQ ID NO: 16074 - DNA, 40 bp, Artificial Sequence
  Description of Artificial Sequence: Synthetic primer
gtctgttctctggattaaacagacaagataccaccgtttg

SEQ ID NO: 16075 - DNA, 40 bp, Artificial Sequence
  Description of Artificial Sequence: Synthetic primer
agttctggttttccaactactagacttaaagaaattctgg

SEQ ID NO: 16076 - DNA, 40 bp, Artificial Sequence
  Description of Artificial Sequence: Synthetic primer
ccctcatgggccccctgaactgcatagcttattcgatttg

SEQ ID NO: 16077 - DNA, 40 bp, Artificial Sequence
  Description of Artificial Sequence: Synthetic primer
caaaacatacagatagctaccacaaattaggtcaaacgac

SEQ ID NO: 16078 - DNA, 40 bp, Artificial Sequence
  Description of Artificial Sequence: Synthetic primer
ggtgattgtctatcacgcaaggctttgttttgtactgttc

SEQ ID NO: 16079 - DNA, 40 bp, Artificial Sequence
  Description of Artificial Sequence: Synthetic primer
ccttccaccttggcacaggacggacagcggtccccacagc

SEQ ID NO: 16080 - DNA, 40 bp, Artificial Sequence
  Description of Artificial Sequence: Synthetic primer
cttggccctggttgtctatgaaatcgagaagctctgaagc

SEQ ID NO: 16081 - DNA, 40 bp, Artificial Sequence
  Description of Artificial Sequence: Synthetic primer
ttcatcaaagcaatattcacagcttttgtccctcccaaac

SEQ ID NO: 16082 - DNA, 40 bp, Artificial Sequence
  Description of Artificial Sequence: Synthetic primer
gggaggtagcacagatggtttaagacagaaacaagttgac

SEQ ID NO: 16083 - DNA, 40 bp, Artificial Sequence
  Description of Artificial Sequence: Synthetic primer
tcctatctgaggaggagaatagaaaagtagggtaaatatg

SEQ ID NO: 16084 - DNA, 40 bp, Artificial Sequence
  Description of Artificial Sequence: Synthetic primer
atagtcacaccaacagtcaaacaggaatcgtcccagagtg

SEQ ID NO: 16085 - DNA, 40 bp, Artificial Sequence
  Description of Artificial Sequence: Synthetic primer
tgggacttgggtggtgggactggagacctcacccctgctc

SEQ ID NO: 16086 - DNA, 40 bp, Artificial Sequence
  Description of Artificial Sequence: Synthetic primer
cacttgtcggcatgaaccgttctgagatgaattaggaaac

SEQ ID NO: 16087 - DNA, 40 bp, Artificial Sequence
  Description of Artificial Sequence: Synthetic primer
tatcatgcaataagtcatcaagggcttagtctagtgtacc

SEQ ID NO: 16088 - DNA, 40 bp, Artificial Sequence
  Description of Artificial Sequence: Synthetic primer
actcaccgagttttcggcatctgagtcttccgagctgctg

SEQ ID NO: 16089 - DNA, 40 bp, Artificial Sequence
  Description of Artificial Sequence: Synthetic primer
ctcggttcctctcgcagaagccgctgacgtcgtaggagac

SEQ ID NO: 16090 - DNA, 40 bp, Artificial Sequence
  Description of Artificial Sequence: Synthetic primer
atctcataaatgtattttttcaaatccaagttaaaacatc

SEQ ID NO: 16091 - DNA, 40 bp, Artificial Sequence
  Description of Artificial Sequence: Synthetic primer
atcaatacccccgtccacttccagtcgccaccacctgtgc

SEQ ID NO: 16092 - DNA, 40 bp, Artificial Sequence
  Description of Artificial Sequence: Synthetic primer
agacctggagagccggcagcgatccctggagcaggccaac

SEQ ID NO: 16093 - DNA, 40 bp, Artificial Sequence
  Description of Artificial Sequence: Synthetic primer
agcccactccgtggccaaggagccggccaaaggagccgcc

SEQ ID NO: 16094 - DNA, 40 bp, Artificial Sequence
  Description of Artificial Sequence: Synthetic primer
gggggacgcaccctaacggccacagatgacccaccccaag

SEQ ID NO: 16095 - DNA, 40 bp, Artificial Sequence
  Description of Artificial Sequence: Synthetic primer
agctaaccggcgggtgctgggcgacggtggaggagtatcg

SEQ ID NO: 16096 - DNA, 40 bp, Artificial Sequence
  Description of Artificial Sequence: Synthetic primer
tctactgcctcattcctggaaattgcactggaactgtctg

SEQ ID NO: 16097 - DNA, 40 bp, Artificial Sequence
  Description of Artificial Sequence: Synthetic primer
ggtacttggatagcatcaaactcagaacttactcctagtg

SEQ ID NO: 16098 - DNA, 40 bp, Artificial Sequence
  Description of Artificial Sequence: Synthetic primer
ccagctcagagcaggacaacccgtccaccagtggctgcag

SEQ ID NO: 16099 - DNA, 40 bp, Artificial Sequence
  Description of Artificial Sequence: Synthetic primer
cctggctggttccatctagtaccagaggcctcttttcctg

SEQ ID NO: 16100 - DNA, 40 bp, Artificial Sequence
  Description of Artificial Sequence: Synthetic primer
acatggttatgaagctggaagagcagatcaggtggtatcg

SEQ ID NO: 16101 - DNA, 40 bp, Artificial Sequence
  Description of Artificial Sequence: Synthetic primer
tgtattaatctcaatatattttaatagcatacatatggtc

SEQ ID NO: 16102 - DNA, 40 bp, Artificial Sequence
  Description of Artificial Sequence: Synthetic primer
ctggagatgatccatgggttcaacatgccaagtggtttcc

SEQ ID NO: 16103 - DNA, 40 bp, Artificial Sequence
  Description of Artificial Sequence: Synthetic primer
tcattttgggaggagggagaacccacttgctttccaaatg

SEQ ID NO: 16104 - DNA, 40 bp, Artificial Sequence
  Description of Artificial Sequence: Synthetic primer
ttcgctcccgaacatgcgcagcacgtccactgccctttcc

SEQ ID NO: 16105 - DNA, 40 bp, Artificial Sequence
  Description of Artificial Sequence: Synthetic primer
aggcctccgggaaggtctcggaggtgaagcgcaccaacag

SEQ ID NO: 16106 - DNA, 40 bp, Artificial Sequence
  Description of Artificial Sequence: Synthetic primer
aattctagaacatgggccagaggcaaatatccaatgtaga

SEQ ID NO: 16107 - DNA, 40 bp, Artificial Sequence
  Description of Artificial Sequence: Synthetic primer
tggaagagctgccacgagagtgtggtgagccggttacttg

SEQ ID NO: 16108 - DNA, 40 bp, Artificial Sequence
  Description of Artificial Sequence: Synthetic primer
ccacctggctatgaggaagccatgagccagcagcccaaac

SEQ ID NO: 16109 - DNA, 40 bp, Artificial Sequence
  Description of Artificial Sequence: Synthetic primer
taaccatttagtggttggtggcaacaattttatgtacagg

SEQ ID NO: 16110 - DNA, 40 bp, Artificial Sequence
  Description of Artificial Sequence: Synthetic primer
tgtccatgtagccaccgtcgctctccccggtcaaggacac

SEQ ID NO: 16111 - DNA, 40 bp, Artificial Sequence
  Description of Artificial Sequence: Synthetic primer
gctccagaccagtgctccggccttggcggtgccagcagtg

SEQ ID NO: 16112 - DNA, 40 bp, Artificial Sequence
  Description of Artificial Sequence: Synthetic primer
gggtggcgcggcggcggtggcatctgcggccatggcggcg

SEQ ID NO: 16113 - DNA, 40 bp, Artificial Sequence
  Description of Artificial Sequence: Synthetic primer
agattgtgtacagtagattatttattttgttattttggaa

SEQ ID NO: 16114 - DNA, 40 bp, Artificial Sequence
  Description of Artificial Sequence: Synthetic primer
tgaaatccagtcaattgtaataactgtgatatcaaaaacc

SEQ ID NO: 16115 - DNA, 40 bp, Artificial Sequence
  Description of Artificial Sequence: Synthetic primer
gaattgcagggaggttacctttgtgccaggtttatacaag

SEQ ID NO: 16116 - DNA, 40 bp, Artificial Sequence
  Description of Artificial Sequence: Synthetic primer
taaagaactcttctctctgggggcagagcttctatttatg

SEQ ID NO: 16117 - DNA, 40 bp, Artificial Sequence
  Description of Artificial Sequence: Synthetic primer
gaagatccccaaggaggacggcgagagcacggacagactc

SEQ ID NO: 16118 - DNA, 40 bp, Artificial Sequence
  Description of Artificial Sequence: Synthetic primer
tggcccagcagatgagtcatctgtcactaggcagcaccgg

SEQ ID NO: 16119 - DNA, 40 bp, Artificial Sequence
  Description of Artificial Sequence: Synthetic primer
tgtttcttgttggtggggtctctatatcttcttcaaaagc

SEQ ID NO: 16120 - DNA, 40 bp, Artificial Sequence
  Description of Artificial Sequence: Synthetic primer
ctgctggaaggtctttggcgagaggaagtccaaagtatag

SEQ ID NO: 16121 - DNA, 40 bp, Artificial Sequence
  Description of Artificial Sequence: Synthetic primer
tttcggcataaagaaaggttgccactgcagcccattggag

SEQ ID NO: 16122 - DNA, 40 bp, Artificial Sequence
  Description of Artificial Sequence: Synthetic primer
cctgcatcattaatagatgcaagttagatgtacgaacaag

SEQ ID NO: 16123 - DNA, 40 bp, Artificial Sequence
  Description of Artificial Sequence: Synthetic primer
cagacattccagccagaacatcttctcgttcttgagattc

SEQ ID NO: 16124 - DNA, 40 bp, Artificial Sequence
  Description of Artificial Sequence: Synthetic primer
tcgtacctcgtcctgctccgagacccaccgattatctctc

SEQ ID NO: 16125 - DNA, 40 bp, Artificial Sequence
  Description of Artificial Sequence: Synthetic primer
tttctccctcctggaactccaggtgaggggtctggagcac

SEQ ID NO: 16126 - DNA, 40 bp, Artificial Sequence
  Description of Artificial Sequence: Synthetic primer
gcgagcagagctgcgctgcgggcgtcctgggaagggagat

SEQ ID NO: 16127 - DNA, 40 bp, Artificial Sequence
  Description of Artificial Sequence: Synthetic primer
gaaatgttcaagtttaccaaaagagaggcaccgctggaac

SEQ ID NO: 16128 - DNA, 40 bp, Artificial Sequence
  Description of Artificial Sequence: Synthetic primer
attcagcatcttccgcagcgactcagccctgcagtaccac

SEQ ID NO: 16129 - DNA, 40 bp, Artificial Sequence
  Description of Artificial Sequence: Synthetic primer
gcatgtagtaaacagtccagaagacggtgaaacagcctac

SEQ ID NO: 16130 - DNA, 40 bp, Artificial Sequence
  Description of Artificial Sequence: Synthetic primer
cttgtatggtttcaagtgatccccagcttgaggttcatac

SEQ ID NO: 16131 - DNA, 40 bp, Artificial Sequence
  Description of Artificial Sequence: Synthetic primer
ggagtggttggcaagggaagcctgcaaccaggacgctctc

SEQ ID NO: 16132 - DNA, 40 bp, Artificial Sequence
  Description of Artificial Sequence: Synthetic primer
tgttttagttgatgagaagtggctcctatgaatgcctctg

SEQ ID NO: 16133 - DNA, 40 bp, Artificial Sequence
  Description of Artificial Sequence: Synthetic primer
taggacagctgaacaaaacctccaagaaataaattaggtg

SEQ ID NO: 16134 - DNA, 40 bp, Artificial Sequence
  Description of Artificial Sequence: Synthetic primer
gctcagcttgtcatagttcatggctggccggttcttctgg

SEQ ID NO: 16135 - DNA, 40 bp, Artificial Sequence
  Description of Artificial Sequence: Synthetic primer
gctccggcaagaagccggagtccgcggcgggcagccagag

SEQ ID NO: 16136 - DNA, 40 bp, Artificial Sequence
  Description of Artificial Sequence: Synthetic primer
gttctccacgaagacagcattcaaggcttcagacatgtag

SEQ ID NO: 16137 - DNA, 40 bp, Artificial Sequence
  Description of Artificial Sequence: Synthetic primer
acgtgtctgcaggggctgcgggcggcgtggtctccccaag

SEQ ID NO: 16138 - DNA, 40 bp, Artificial Sequence
  Description of Artificial Sequence: Synthetic primer
tttcgcagcggagacgcgcgcgggcactctcgggccgacg

SEQ ID NO: 16139 - DNA, 40 bp, Artificial Sequence
  Description of Artificial Sequence: Synthetic primer
ctttcccctcggccactgtccgtattggaccaaactgttc

SEQ ID NO: 16140 - DNA, 40 bp, Artificial Sequence
  Description of Artificial Sequence: Synthetic primer
ccgctcatctttaacatgatacgctcagtgccttagactt

SEQ ID NO: 16141 - DNA, 40 bp, Artificial Sequence
  Description of Artificial Sequence: Synthetic primer
caagcagccaatgacattggggaccatcaccaaacgaacc

SEQ ID NO: 16142 - DNA, 40 bp, Artificial Sequence
  Description of Artificial Sequence: Synthetic primer
agttcagagaggctgagatgccctttcattctgtgtcatc

SEQ ID NO: 16143 - DNA, 40 bp, Artificial Sequence
  Description of Artificial Sequence: Synthetic primer
atatattgagaaggacttaggttcagtttacctgcaacag

SEQ ID NO: 16144 - DNA, 40 bp, Artificial Sequence
  Description of Artificial Sequence: Synthetic primer
ggaggctgtgaggctgtggcatttcccatcgacgtccttc

SEQ ID NO: 16145 - DNA, 40 bp, Artificial Sequence
  Description of Artificial Sequence: Synthetic primer
tggccgtttcgactctaagcggcgggagggcaagcagctc

SEQ ID NO: 16146 - DNA, 40 bp, Artificial Sequence
  Description of Artificial Sequence: Synthetic primer
gtgcgatatccggggtttcttgttggctagggggtcgatg

SEQ ID NO: 16147 - DNA, 40 bp, Artificial Sequence
  Description of Artificial Sequence: Synthetic primer
ttgtgttccactgtagctggggattttgatcgaggtgatt

SEQ ID NO: 16148 - DNA, 40 bp, Artificial Sequence
  Description of Artificial Sequence: Synthetic primer
aaaggcctggggcgtcctggggtctgggaggaaggcagac

SEQ ID NO: 16149 - DNA, 40 bp, Artificial Sequence
  Description of Artificial Sequence: Synthetic primer
caccagcactctttgacaaaactgtgagtgacccttttta

SEQ ID NO: 16150 - DNA, 40 bp, Artificial Sequence
  Description of Artificial Sequence: Synthetic primer
agctctgagaagaggagctcagacagctcaagcaagttgg

SEQ ID NO: 16151 - DNA, 40 bp, Artificial Sequence
  Description of Artificial Sequence: Synthetic primer
tagtagaaattctcctgtattattgcttggaaaatgttac

SEQ ID NO: 16152 - DNA, 40 bp, Artificial Sequence
  Description of Artificial Sequence: Synthetic primer
gtgttgccggtgtccgggcctgttccttggggaactgaag

SEQ ID NO: 16153 - DNA, 40 bp, Artificial Sequence
  Description of Artificial Sequence: Synthetic primer
catcgttagggcggcatcactcgggggctgcttcctgagc

SEQ ID NO: 16154 - DNA, 40 bp, Artificial Sequence
  Description of Artificial Sequence: Synthetic primer
atgaacatttttcaaccacttctgctacaagctgttcatc

SEQ ID NO: 16155 - DNA, 40 bp, Artificial Sequence
  Description of Artificial Sequence: Synthetic primer
cagcttatagctgaatggaagaaaaacgcagaaaatctgg

SEQ ID NO: 16156 - DNA, 40 bp, Artificial Sequence
  Description of Artificial Sequence: Synthetic primer
ccggctcatacagcttagggtactccatgctccgctgctc

SEQ ID NO: 16157 - DNA, 40 bp, Artificial Sequence
  Description of Artificial Sequence: Synthetic primer
tataacttggacgatgaccaggcggcttgggagaatgagc

SEQ ID NO: 16158 - DNA, 40 bp, Artificial Sequence
  Description of Artificial Sequence: Synthetic primer
atgaagggaaagacgatggagggcagcgaagagagtcacc

SEQ ID NO: 16159 - DNA, 40 bp, Artificial Sequence
  Description of Artificial Sequence: Synthetic primer
actttgtcctgcagggcactctgtcaggggacttcacacc

SEQ ID NO: 16160 - DNA, 40 bp, Artificial Sequence
  Description of Artificial Sequence: Synthetic primer
gtgatctagggcaggctgtcttccagtccatgtgttctcg

SEQ ID NO: 16161 - DNA, 40 bp, Artificial Sequence
  Description of Artificial Sequence: Synthetic primer
ctgagtccaccatcacagcaaaagcatttgacatcatcac

SEQ ID NO: 16162 - DNA, 40 bp, Artificial Sequence
  Description of Artificial Sequence: Synthetic primer
cccagcagtccagaaactgggcaaaaatattctgcagtgg

SEQ ID NO: 16163 - DNA, 40 bp, Artificial Sequence
  Description of Artificial Sequence: Synthetic primer
aaatgacctaaataagaacactgtacctaaaataaagagg

SEQ ID NO: 16164 - DNA, 40 bp, Artificial Sequence
  Description of Artificial Sequence: Synthetic primer
ctgaatagctatccctgtgtctgcattgtttattctgttc

SEQ ID NO: 16165 - DNA, 40 bp, Artificial Sequence
  Description of Artificial Sequence: Synthetic primer
caaccaccattagaattgacttgtgatcagttcacctttg

SEQ ID NO: 16166 - DNA, 40 bp, Artificial Sequence
  Description of Artificial Sequence: Synthetic primer
ttctgtagaaatctgcgtatgccttctttctttgatcagc

SEQ ID NO: 16167 - DNA, 40 bp, Artificial Sequence
  Description of Artificial Sequence: Synthetic primer
aactgtttcttttgaataaagcctgattcccccactctgc

SEQ ID NO: 16168 - DNA, 40 bp, Artificial Sequence
  Description of Artificial Sequence: Synthetic primer
aggatcctccatggtactgtgtaaggcgcagttgctgaag

SEQ ID NO: 16169 - DNA, 40 bp, Artificial Sequence
  Description of Artificial Sequence: Synthetic primer
ctttaacaccaccagatgggtgttttcccccatccaccac

SEQ ID NO: 16170 - DNA, 40 bp, Artificial Sequence
  Description of Artificial Sequence: Synthetic primer
ttaggagcaattctaattcctttattcgcttttccttctc

SEQ ID NO: 16171 - DNA, 40 bp, Artificial Sequence
  Description of Artificial Sequence: Synthetic primer
gaggaggaggaagcaatgctgtcgggtgttcctgaacgat

SEQ ID NO: 16172 - DNA, 40 bp, Artificial Sequence
  Description of Artificial Sequence: Synthetic primer
catgatgtgataccttgaagcacaccattacagacaagtg

SEQ ID NO: 16173 - DNA, 40 bp, Artificial Sequence
  Description of Artificial Sequence: Synthetic primer
gaggaagcacagacggcggaggaggcgcagccggacattt

SEQ ID NO: 16174 - DNA, 40 bp, Artificial Sequence
  Description of Artificial Sequence: Synthetic primer
tctttagggcagaaaagacaccatctttggttagggaagg

SEQ ID NO: 16175 - DNA, 40 bp, Artificial Sequence
  Description of Artificial Sequence: Synthetic primer
ggactcacttgaatccacttgagcaacaatggttcctttc

SEQ ID NO: 16176 - DNA, 40 bp, Artificial Sequence
  Description of Artificial Sequence: Synthetic primer
caattctaacccgtacttctggccttctatccccacagtc

SEQ ID NO: 16177 - DNA, 40 bp, Artificial Sequence
  Description of Artificial Sequence: Synthetic primer
aaggcttcttctctagtaacattagcatggtctaagagtg

SEQ ID NO: 16178 - DNA, 40 bp, Artificial Sequence
  Description of Artificial Sequence: Synthetic primer
tgaaacacttcataaagcagtgcaaggttgtggagcacac

SEQ ID NO: 16179 - DNA, 40 bp, Artificial Sequence
  Description of Artificial Sequence: Synthetic primer
tctcttcagaaacaggcgactggatataatttccctgaag

SEQ ID NO: 16180 - DNA, 40 bp, Artificial Sequence
  Description of Artificial Sequence: Synthetic primer
tgctcgccctctcccgcaggcagggccggccgccctgcac

SEQ ID NO: 16181 - DNA, 40 bp, Artificial Sequence
  Description of Artificial Sequence: Synthetic primer
ctctgcccagccagcattccctgcaggagccctacacagc

SEQ ID NO: 16182 - DNA, 40 bp, Artificial Sequence
  Description of Artificial Sequence: Synthetic primer
acagagccaaactctcacagatcagacaaatctaccatac

SEQ ID NO: 16183 - DNA, 40 bp, Artificial Sequence
  Description of Artificial Sequence: Synthetic primer
atgcaacctgacaaaccactgaggtcatggtgactcagtg

SEQ ID NO: 16184 - DNA, 40 bp, Artificial Sequence
  Description of Artificial Sequence: Synthetic primer
agtggttgaggacacagggccccagcccagccctctgcac

SEQ ID NO: 16185 - DNA, 40 bp, Artificial Sequence
  Description of Artificial Sequence: Synthetic primer
agcagaaatcaaattgaagagagcagttgaagaagtgaag

SEQ ID NO: 16186 - DNA, 40 bp, Artificial Sequence
  Description of Artificial Sequence: Synthetic primer
gactgaaaacctcatggacgacctgctggataacatcacg

SEQ ID NO: 16187 - DNA, 40 bp, Artificial Sequence
  Description of Artificial Sequence: Synthetic primer
ggttcagaactgttcctttcccttccatgatgtccttgac

SEQ ID NO: 16188 - DNA, 40 bp, Artificial Sequence
  Description of Artificial Sequence: Synthetic primer
ttggtaactcagagagctcttggccctgatggggacttgc

SEQ ID NO: 16189 - DNA, 40 bp, Artificial Sequence
  Description of Artificial Sequence: Synthetic primer
atccaccactggaacgccaaccggctggacctgttcgaga

SEQ ID NO: 16190 - DNA, 40 bp, Artificial Sequence
  Description of Artificial Sequence: Synthetic primer
tccaaaacagccttcatggtattcatctgttcctcttttc

SEQ ID NO: 16191 - DNA, 40 bp, Artificial Sequence
  Description of Artificial Sequence: Synthetic primer
aaaagcactctggctgctaggaagaaagcaagccggaacc

SEQ ID NO: 16192 - DNA, 40 bp, Artificial Sequence
  Description of Artificial Sequence: Synthetic primer
ttcatgactggtatacctgcaacacctggcaatgagatcc

SEQ ID NO: 16193 - DNA, 40 bp, Artificial Sequence
  Description of Artificial Sequence: Synthetic primer
gcgaagtcatcacagacacggtcttagccacctgctgaac

SEQ ID NO: 16194 - DNA, 40 bp, Artificial Sequence
  Description of Artificial Sequence: Synthetic primer
aggctgtgactggagggggaggcagggggcacccgtgggg

SEQ ID NO: 16195 - DNA, 40 bp, Artificial Sequence
  Description of Artificial Sequence: Synthetic primer
ccaggcctggctgctggacctgcggggctggctgttgacc

SEQ ID NO: 16196 - DNA, 40 bp, Artificial Sequence
  Description of Artificial Sequence: Synthetic primer
cggccaaaacagggctcaccaagctcatcgatgcctccag

SEQ ID NO: 16197 - DNA, 40 bp, Artificial Sequence
  Description of Artificial Sequence: Synthetic primer
ggtttctcaccagtatggattttctgatgttgactaagtt

SEQ ID NO: 16198 - DNA, 40 bp, Artificial Sequence
  Description of Artificial Sequence: Synthetic primer
ccatgattgtgttatctctcgcctgacgaagggagtgagg

SEQ ID NO: 16199 - DNA, 40 bp, Artificial Sequence
  Description of Artificial Sequence: Synthetic primer
gcccaacaccaagaagctgaggaggagcaatgggtcttgg

SEQ ID NO: 16200 - DNA, 40 bp, Artificial Sequence
  Description of Artificial Sequence: Synthetic primer
ctaacctattaaacactatgatggaattgcggaagtgctg

SEQ ID NO: 16201 - DNA, 40 bp, Artificial Sequence
  Description of Artificial Sequence: Synthetic primer
acatttccggcagaaccagggtcccgttggcacctgaacg

SEQ ID NO: 16202 - DNA, 40 bp, Artificial Sequence
  Description of Artificial Sequence: Synthetic primer
gctgggcccaaggttgtgggcttggcaatgggaacaaaag

SEQ ID NO: 16203 - DNA, 40 bp, Artificial Sequence
  Description of Artificial Sequence: Synthetic primer
gtggctatttcactccctggcccagtgtgattgggtgatg

SEQ ID NO: 16204 - DNA, 40 bp, Artificial Sequence
  Description of Artificial Sequence: Synthetic primer
cattggggtgggaaggaatgggttgtgcaccttgccttgg

SEQ ID NO: 16205 - DNA, 40 bp, Artificial Sequence
  Description of Artificial Sequence: Synthetic primer
gggctcacaggagggcggagcccggggagccagttcctga

SEQ ID NO: 16206 - DNA, 40 bp, Artificial Sequence
  Description of Artificial Sequence: Synthetic primer
tgtcctgcgcctcagtgtcagttacctccgggtgaagagc

SEQ ID NO: 16207 - DNA, 40 bp, Artificial Sequence
  Description of Artificial Sequence: Synthetic primer
tcatagattttagagagatcagtttctataactccagagc

SEQ ID NO: 16208 - DNA, 40 bp, Artificial Sequence
  Description of Artificial Sequence: Synthetic primer
tagctaaactgcagccaactttggttgtgtgtggaaaagg

SEQ ID NO: 16209 - DNA, 40 bp, Artificial Sequence
  Description of Artificial Sequence: Synthetic primer
gtgcttgccagggaagacactgcattggaaagtgtagttg

SEQ ID NO: 16210 - DNA, 40 bp, Artificial Sequence
  Description of Artificial Sequence: Synthetic primer
ccagacacaaagcctccaaccacgtcaacagaaggaggtg

SEQ ID NO: 16211 - DNA, 40 bp, Artificial Sequence
  Description of Artificial Sequence: Synthetic primer
gccgctggacacagagttacccccggagggcatggtgttg

SEQ ID NO: 16212 - DNA, 40 bp, Artificial Sequence
  Description of Artificial Sequence: Synthetic primer
aaggaaatgctcccccagagagagatgtgcctcgagaacc

SEQ ID NO: 16213 - DNA, 40 bp, Artificial Sequence
  Description of Artificial Sequence: Synthetic primer
atagatttagaagtagaatgtttgaggtggttgacaagac

SEQ ID NO: 16214 - DNA, 40 bp, Artificial Sequence
  Description of Artificial Sequence: Synthetic primer
gccgcacacagacttcaccctgtgcaagtgcatgatcgac

SEQ ID NO: 16215 - DNA, 40 bp, Artificial Sequence
  Description of Artificial Sequence: Synthetic primer
gttggaattcaggtacagcttcttcagcttgctcagcttg

SEQ ID NO: 16216 - DNA, 40 bp, Artificial Sequence
  Description of Artificial Sequence: Synthetic primer
cgactcacccccattttgcagtgcacaaggcatttagatc

SEQ ID NO: 16217 - DNA, 40 bp, Artificial Sequence
  Description of Artificial Sequence: Synthetic primer
ttggtccccctggcttcgctggtgagaagggtccctctgg

SEQ ID NO: 16218 - DNA, 40 bp, Artificial Sequence
  Description of Artificial Sequence: Synthetic primer
ctgtcagtttggtccgagtcctcccactatctgggctctg

SEQ ID NO: 16219 - DNA, 40 bp, Artificial Sequence
  Description of Artificial Sequence: Synthetic primer
atacagtgcttctagggttggcatgagggcctggcgtaac

SEQ ID NO: 16220 - DNA, 40 bp, Artificial Sequence
  Description of Artificial Sequence: Synthetic primer
gtccttctctgatacaaattagtacattaagaataaaaag

SEQ ID NO: 16221 - DNA, 40 bp, Artificial Sequence
  Description of Artificial Sequence: Synthetic primer
caatccaacttaaaagcatcttggactttgttttcccttc

SEQ ID NO: 16222 - DNA, 40 bp, Artificial Sequence
  Description of Artificial Sequence: Synthetic primer
gacaggccagccgttggccaccatgtcacattctgagtga

SEQ ID NO: 16223 - DNA, 40 bp, Artificial Sequence
  Description of Artificial Sequence: Synthetic primer
tttgggactccagttttgaggaaaggctctgatgatgagg

SEQ ID NO: 16224 - DNA, 40 bp, Artificial Sequence
  Description of Artificial Sequence: Synthetic primer
ccttgttgcaccacttccaatctgggtgggccttgaagtg

SEQ ID NO: 16225 - DNA, 40 bp, Artificial Sequence
  Description of Artificial Sequence: Synthetic primer
tgacactgaggtcattgtttagagcagatctcaagcagcc

SEQ ID NO: 16226 - DNA, 40 bp, Artificial Sequence
  Description of Artificial Sequence: Synthetic primer
tatgattttaaaatgctaattgttgcattccgggaaactt

SEQ ID NO: 16227 - DNA, 40 bp, Artificial Sequence
  Description of Artificial Sequence: Synthetic primer
tgcactaacagtgctctcaagttgtagcaaccttgtttcc

SEQ ID NO: 16228 - DNA, 40 bp, Artificial Sequence
  Description of Artificial Sequence: Synthetic primer
gagcagtggagcagtgagctgcctcctctcctagcacctg

SEQ ID NO: 16229 - DNA, 40 bp, Artificial Sequence
  Description of Artificial Sequence: Synthetic primer
ctcctgggcagccaggctctgattcagttcttcaattctc

SEQ ID NO: 16230 - DNA, 40 bp, Artificial Sequence
  Description of Artificial Sequence: Synthetic primer
ttcactctacgagttgtgcagaaagatgggaactcctgtg

SEQ ID NO: 16231 - DNA, 40 bp, Artificial Sequence
  Description of Artificial Sequence: Synthetic primer
agcactcatcaagatagatgtgaacaaaacccggaaaatc

SEQ ID NO: 16232 - DNA, 40 bp, Artificial Sequence
  Description of Artificial Sequence: Synthetic primer
ctatcagttctcgacggagatatttcacctgacttgattc

SEQ ID NO: 16233 - DNA, 40 bp, Artificial Sequence
  Description of Artificial Sequence: Synthetic primer
ggagaaagacaaatgtggaagaaatcatagagctggagac

SEQ ID NO: 16234 - DNA, 40 bp, Artificial Sequence
  Description of Artificial Sequence: Synthetic primer
cgtcataaatcagggagtcagatggagtggacgccgcaag

SEQ ID NO: 16235 - DNA, 40 bp, Artificial Sequence
  Description of Artificial Sequence: Synthetic primer
ctcttccctcctttcttcctgtcactaaaaaacacattgg

SEQ ID NO: 16236 - DNA, 40 bp, Artificial Sequence
  Description of Artificial Sequence: Synthetic primer
aagggtggtcagccagggggtgaaagggacaggggtctcg

SEQ ID NO: 16237 - DNA, 40 bp, Artificial Sequence
  Description of Artificial Sequence: Synthetic primer
ctccatcttggagatgcgcgtctggcatgcctccagggcc

SEQ ID NO: 16238 - DNA, 40 bp, Artificial Sequence
  Description of Artificial Sequence: Synthetic primer
atttcctggactgaaacatgctgctcctgatggtctccag

SEQ ID NO: 16239 - DNA, 40 bp, Artificial Sequence
  Description of Artificial Sequence: Synthetic primer
ccatcttcctgtttcttctttctcaaattcccaaaattgc

SEQ ID NO: 16240 - DNA, 40 bp, Artificial Sequence
  Description of Artificial Sequence: Synthetic primer
actctaccgtatgatggacaagggcgtcctcagctactgg

SEQ ID NO: 16241 - DNA, 40 bp, Artificial Sequence
  Description of Artificial Sequence: Synthetic primer
ctggggctcggggcggggaggaggcggagggagcggccgc

SEQ ID NO: 16242 - DNA, 40 bp, Artificial Sequence
  Description of Artificial Sequence: Synthetic primer
aaatagtgaactagtgaagaggatcttgaatttcttaatg

SEQ ID NO: 16243 - DNA, 40 bp, Artificial Sequence
  Description of Artificial Sequence: Synthetic primer
atttaagaaagtcaagcttgtttaacaacaaaatatgaag

SEQ ID NO: 16244 - DNA, 40 bp, Artificial Sequence
  Description of Artificial Sequence: Synthetic primer
tggagcccctggactgtcccaccatttgggctgtggaatc

SEQ ID NO: 16245 - DNA, 40 bp, Artificial Sequence
  Description of Artificial Sequence: Synthetic primer
gccatatgagtttgacatcagggtcccgttctacgtgagg

SEQ ID NO: 16246 - DNA, 40 bp, Artificial Sequence
  Description of Artificial Sequence: Synthetic primer
ttggatatttttcttaaagagtgtttgctgtaactagaac

SEQ ID NO: 16247 - DNA, 40 bp, Artificial Sequence
  Description of Artificial Sequence: Synthetic primer
tgagatgtagagagctagaaatcattattaaccacaacag

SEQ ID NO: 16248 - DNA, 40 bp, Artificial Sequence
  Description of Artificial Sequence: Synthetic primer
ttttacagtgtttacatgcaagtgcattttataagtgttc

SEQ ID NO: 16249 - DNA, 40 bp, Artificial Sequence
  Description of Artificial Sequence: Synthetic primer
caccaacctgtctgcctcaggcgccttctacacactgctg

SEQ ID NO: 16250 - DNA, 40 bp, Artificial Sequence
  Description of Artificial Sequence: Synthetic primer
tacaaaatggctcactttctaaaaagattttacagtgaat

SEQ ID NO: 16251 - DNA, 40 bp, Artificial Sequence
  Description of Artificial Sequence: Synthetic primer
ttaatatttcctctgtttattcctcctctccctcccattg

SEQ ID NO: 16252 - DNA, 40 bp, Artificial Sequence
  Description of Artificial Sequence: Synthetic primer
tctcttacatcatacaaacttcaatttttaccttgaatac

SEQ ID NO: 16253 - DNA, 40 bp, Artificial Sequence
  Description of Artificial Sequence: Synthetic primer
tcagaaaaaaagaaaactgaaggccttgttaagttaacac

SEQ ID NO: 16254 - DNA, 40 bp, Artificial Sequence
  Description of Artificial Sequence: Synthetic primer
gatggaggcctgatggttaagggcccaagacataaacctg

SEQ ID NO: 16255 - DNA, 40 bp, Artificial Sequence
  Description of Artificial Sequence: Synthetic primer
agtcataccagtgctgtctcaattgcaggaaaagaaactc

SEQ ID NO: 16256 - DNA, 40 bp, Artificial Sequence
  Description of Artificial Sequence: Synthetic primer
aattgtctgtattaaacatggcgttatttaagtagtcctg

SEQ ID NO: 16257 - DNA, 40 bp, Artificial Sequence
  Description of Artificial Sequence: Synthetic primer
cgagcgaatgggtcagagtgattttggggctgggcattac

SEQ ID NO: 16258 - DNA, 40 bp, Artificial Sequence
  Description of Artificial Sequence: Synthetic primer
actgggagaaagagccagcgtaaacagggcgacgtactgg

SEQ ID NO: 16259 - DNA, 40 bp, Artificial Sequence
  Description of Artificial Sequence: Synthetic primer
cccaggggcttttccctactgttcccacgcttcctctctc

SEQ ID NO: 16260 - DNA, 40 bp, Artificial Sequence
  Description of Artificial Sequence: Synthetic primer
ccctgtatgttggatcagtactccagtgagaagacagcag

SEQ ID NO: 16261 - DNA, 40 bp, Artificial Sequence
  Description of Artificial Sequence: Synthetic primer
agggaaatgtagacttcataaacatggctgtataattttg

SEQ ID NO: 16262 - DNA, 40 bp, Artificial Sequence
  Description of Artificial Sequence: Synthetic primer
taattaagtgcttcccacttaaaacatatcaggccttcta

SEQ ID NO: 16263 - DNA, 40 bp, Artificial Sequence
  Description of Artificial Sequence: Synthetic primer
gttaaaatctttgcgagtcctcaatttgaaaggcaacaag

SEQ ID NO: 16264 - DNA, 40 bp, Artificial Sequence
  Description of Artificial Sequence: Synthetic primer
gaatcatctagaggtggaggtgggggtggaagaaaatcac

SEQ ID NO: 16265 - DNA, 40 bp, Artificial Sequence
  Description of Artificial Sequence: Synthetic primer
agtttatcctacccttacaatgagaaataagcccacaatg

SEQ ID NO: 16266 - DNA, 40 bp, Artificial Sequence
  Description of Artificial Sequence: Synthetic primer
gctgcagcagcagctgcccatgccgatacccggggagctg

SEQ ID NO: 16267 - DNA, 40 bp, Artificial Sequence
  Description of Artificial Sequence: Synthetic primer
tgccttttattccccaaagagttacctttcccagattagg

SEQ ID NO: 16268 - DNA, 40 bp, Artificial Sequence
  Description of Artificial Sequence: Synthetic primer
ttccataactttgctacttcatctctgaccttttcacttg

SEQ ID NO: 16269 - DNA, 40 bp, Artificial Sequence
  Description of Artificial Sequence: Synthetic primer
atccttcagcttcttctcggtccgacgcacctgtttgcag

SEQ ID NO: 16270 - DNA, 40 bp, Artificial Sequence
  Description of Artificial Sequence: Synthetic primer
cgccgcctatgaaggcttgagcctgtggcagtggatggtg

SEQ ID NO: 16271 - DNA, 40 bp, Artificial Sequence
  Description of Artificial Sequence: Synthetic primer
tgtgaggccaccgtcaaaggaaagaagttccagaccatcc

SEQ ID NO: 16272 - DNA, 40 bp, Artificial Sequence
  Description of Artificial Sequence: Synthetic primer
cccagggctgtcctggctgggcacctcatccacctgcatc

SEQ ID NO: 16273 - DNA, 40 bp, Artificial Sequence
  Description of Artificial Sequence: Synthetic primer
ccaaggcagacgtctgcagaaaggagttgggaatcactcc

SEQ ID NO: 16274 - DNA, 40 bp, Artificial Sequence
  Description of Artificial Sequence: Synthetic primer
ggcggcttcagcagcccccagcatcccagcccctgcggcg

SEQ ID NO: 16275 - DNA, 40 bp, Artificial Sequence
  Description of Artificial Sequence: Synthetic primer
gtcgcaacagcatttctaaaatgttctgaacgttctgaac

SEQ ID NO: 16276 - DNA, 40 bp, Artificial Sequence
  Description of Artificial Sequence: Synthetic primer
ctccattatgctagaaggatggcatggtcccatgttagtt

SEQ ID NO: 16277 - DNA, 40 bp, Artificial Sequence
  Description of Artificial Sequence: Synthetic primer
cactggcatggccaggtccaaagactctgttgtgcttttg

SEQ ID NO: 16278 - DNA, 40 bp, Artificial Sequence
  Description of Artificial Sequence: Synthetic primer
ggtgcagcttgcttctggtcttcatcctcaagtatgctgt

SEQ ID NO: 16279 - DNA, 40 bp, Artificial Sequence
  Description of Artificial Sequence: Synthetic primer
ctgtaagtactggctgatattcacacacatgtactacaga

SEQ ID NO: 16280 - DNA, 40 bp, Artificial Sequence
  Description of Artificial Sequence: Synthetic primer
cctaataaaaacaagatggagatgtctctgcaaccatatt

SEQ ID NO: 16281 - DNA, 40 bp, Artificial Sequence
  Description of Artificial Sequence: Synthetic primer
atacattttctccttcacatcagcagttagggcatccaaa

SEQ ID NO: 16282 - DNA, 40 bp, Artificial Sequence
  Description of Artificial Sequence: Synthetic primer
cagtgtgagcacgctggagaaggtgccatcctgggccttg

SEQ ID NO: 16283 - DNA, 40 bp, Artificial Sequence
  Description of Artificial Sequence: Synthetic primer
ggcagaatcccccaaagaaccagggtattctttttccatc

SEQ ID NO: 16284 - DNA, 40 bp, Artificial Sequence
  Description of Artificial Sequence: Synthetic primer
ggaggtgacctctgctgctgcacccaaagggaccatcctt

SEQ ID NO: 16285 - DNA, 40 bp, Artificial Sequence
  Description of Artificial Sequence: Synthetic primer
cctccggtggaaggtggggatgatggaggaatggacatag

SEQ ID NO: 16286 - DNA, 40 bp, Artificial Sequence
  Description of Artificial Sequence: Synthetic primer
gagggacgcacggcggggcccaaggatgcgtcgtgttgga

SEQ ID NO: 16287 - DNA, 40 bp, Artificial Sequence
  Description of Artificial Sequence: Synthetic primer
ctcggcagcctgactggcgctgggctccccgtaggcgatg

SEQ ID NO: 16288 - DNA, 40 bp, Artificial Sequence
  Description of Artificial Sequence: Synthetic primer
ttctgcttcttggaaggactctgcccatccgactgagctt

SEQ ID NO: 16289 - DNA, 40 bp, Artificial Sequence
  Description of Artificial Sequence: Synthetic primer
gatggggcagctgggcccccagtgccctccttgttccggc

SEQ ID NO: 16290 - DNA, 40 bp, Artificial Sequence
  Description of Artificial Sequence: Synthetic primer
aagtctcaggagggagaagtggttatattgccattgatga

SEQ ID NO: 16291 - DNA, 40 bp, Artificial Sequence
  Description of Artificial Sequence: Synthetic primer
gatggaaggtatagagatcctactacagttactacactac

SEQ ID NO: 16292 - DNA, 40 bp, Artificial Sequence
  Description of Artificial Sequence: Synthetic primer
atggtgatgaccacgatgatccctaggatgacgagcagga

SEQ ID NO: 16293 - DNA, 40 bp, Artificial Sequence
  Description of Artificial Sequence: Synthetic primer
atgagctggctgacgagatcgccaacagcagcggcaaagg

SEQ ID NO: 16294 - DNA, 40 bp, Artificial Sequence
  Description of Artificial Sequence: Synthetic primer
acagccaaggaagtttcggatgctcacccggaagtcagat

SEQ ID NO: 16295 - DNA, 40 bp, Artificial Sequence
  Description of Artificial Sequence: Synthetic primer
agagcctccggtcctcttccgacaaagcttgcatggtgat

SEQ ID NO: 16296 - DNA, 40 bp, Artificial Sequence
  Description of Artificial Sequence: Synthetic primer
cgccagggcttccccaacagggtggtcttccaggagtttc

SEQ ID NO: 16297 - DNA, 40 bp, Artificial Sequence
  Description of Artificial Sequence: Synthetic primer
atcctcactttgactttctccaaaagctacactgtcaaac

SEQ ID NO: 16298 - DNA, 40 bp, Artificial Sequence
  Description of Artificial Sequence: Synthetic primer
ggccctgagcagttccagtaggtattcccagagccggatg

SEQ ID NO: 16299 - DNA, 40 bp, Artificial Sequence
  Description of Artificial Sequence: Synthetic primer
acatgactccctcttccaggcctctacggcctttggatac

SEQ ID NO: 16300 - DNA, 40 bp, Artificial Sequence
  Description of Artificial Sequence: Synthetic primer
ggggacagacggcatgttctggggatgagacacggtccag

SEQ ID NO: 16301 - DNA, 40 bp, Artificial Sequence
  Description of Artificial Sequence: Synthetic primer
tggggaagatggggtttccttcatcagtccactgggcatc

SEQ ID NO: 16302 - DNA, 40 bp, Artificial Sequence
  Description of Artificial Sequence: Synthetic primer
atccgtcccttcccctcccatccctggattctttctgcac

SEQ ID NO: 16303 - DNA, 40 bp, Artificial Sequence
  Description of Artificial Sequence: Synthetic primer
gggcgctgggctcgggatgcgcggtccagggctggagtct

SEQ ID NO: 16304 - DNA, 40 bp, Artificial Sequence
  Description of Artificial Sequence: Synthetic primer
atgtttgtccatatgcaaatattgttccattatatccttc

SEQ ID NO: 16305 - DNA, 40 bp, Artificial Sequence
  Description of Artificial Sequence: Synthetic primer
gggttagggcaagtctttgccatcccccagatggctctgt

SEQ ID NO: 16306 - DNA, 40 bp, Artificial Sequence
  Description of Artificial Sequence: Synthetic primer
ctacatgggtgacacggatgtctatagtgtccaccacatt

SEQ ID NO: 16307 - DNA, 40 bp, Artificial Sequence
  Description of Artificial Sequence: Synthetic primer
gagctgctgtaggtgtgtaaggggccggtaaccccaggat

SEQ ID NO: 16308 - DNA, 40 bp, Artificial Sequence
  Description of Artificial Sequence: Synthetic primer
ttcaccagaagctggagttgttttcaatgtgatctgtctc

SEQ ID NO: 16309 - DNA, 40 bp, Artificial Sequence
  Description of Artificial Sequence: Synthetic primer
accccagctcctccaggacctgccactatgatgccggatg

SEQ ID NO: 16310 - DNA, 40 bp, Artificial Sequence
  Description of Artificial Sequence: Synthetic primer
cttctgcaggtaggctttggaaggcatccattgtagattc

SEQ ID NO: 16311 - DNA, 40 bp, Artificial Sequence
  Description of Artificial Sequence: Synthetic primer
atgggaggtggagaggcataagttccctgaggctgtgaag

SEQ ID NO: 16312 - DNA, 40 bp, Artificial Sequence
  Description of Artificial Sequence: Synthetic primer
cacaaacgacatggcagtctccagactctgctgtttggat

SEQ ID NO: 16313 - DNA, 40 bp, Artificial Sequence
  Description of Artificial Sequence: Synthetic primer
aggagcctatgctgtcggatgagtcctgggactcctcact

SEQ ID NO: 16314 - DNA, 40 bp, Artificial Sequence
  Description of Artificial Sequence: Synthetic primer
tgccgtccacctcgatggccactgagcggatggagcgact

SEQ ID NO: 16315 - DNA, 40 bp, Artificial Sequence
  Description of Artificial Sequence: Synthetic primer
acacagagccatatagggtcagctgccattgccggaggat

SEQ ID NO: 16316 - DNA, 40 bp, Artificial Sequence
  Description of Artificial Sequence: Synthetic primer
ttctgagagattttttattcgttactatgtggatgttcca

SEQ ID NO: 16317 - DNA, 40 bp, Artificial Sequence
  Description of Artificial Sequence: Synthetic primer
ccagcctggaggaggacagcgccagcctgtctggggagag

SEQ ID NO: 16318 - DNA, 40 bp, Artificial Sequence
  Description of Artificial Sequence: Synthetic primer
catcgtggatctcctgggctaggatggccacgtccttcac

SEQ ID NO: 16319 - DNA, 40 bp, Artificial Sequence
  Description of Artificial Sequence: Synthetic primer
gatgctttgatgcggaaggtgcagcacatggagtttccag

SEQ ID NO: 16320 - DNA, 40 bp, Artificial Sequence
  Description of Artificial Sequence: Synthetic primer
gatggaaccacagaaaggcgaagaggtataagggcaaaaa

SEQ ID NO: 16321 - DNA, 40 bp, Artificial Sequence
  Description of Artificial Sequence: Synthetic primer
cacctacaggaggccccccggcgtccacaactcagcctac

SEQ ID NO: 16322 - DNA, 40 bp, Artificial Sequence
  Description of Artificial Sequence: Synthetic primer
atggcccatgacagaacaccaagaaggatgaggaaggagt

SEQ ID NO: 16323 - DNA, 40 bp, Artificial Sequence
  Description of Artificial Sequence: Synthetic primer
gcgctggtgtcgcgtcgatctataataagcatccgcacct

SEQ ID NO: 16324 - DNA, 40 bp, Artificial Sequence
  Description of Artificial Sequence: Synthetic primer
ataacctgaggaccatggatgctgatgagggtcaagacat

SEQ ID NO: 16325 - DNA, 40 bp, Artificial Sequence
  Description of Artificial Sequence: Synthetic primer
aagctataccgcttgtagtcgagagctgcatccgttacat

SEQ ID NO: 16326 - DNA, 40 bp, Artificial Sequence
  Description of Artificial Sequence: Synthetic primer
agatagagctggacaaacaacaaggataactcatcccaaa

SEQ ID NO: 16327 - DNA, 40 bp, Artificial Sequence
  Description of Artificial Sequence: Synthetic primer
gccccaccgagcacgaggatgtgactgtgatggacaccaa

SEQ ID NO: 16328 - DNA, 40 bp, Artificial Sequence
  Description of Artificial Sequence: Synthetic primer
ccatgcgccttactgaagttagaagctgcgaggagcatac

SEQ ID NO: 16329 - DNA, 40 bp, Artificial Sequence
  Description of Artificial Sequence: Synthetic primer
agcgggagcttttgtatccaggttcttctaaggatgatgt

SEQ ID NO: 16330 - DNA, 40 bp, Artificial Sequence
  Description of Artificial Sequence: Synthetic primer
gccccagacgcaggttccaaaacggatgccggttattgct

SEQ ID NO: 16331 - DNA, 40 bp, Artificial Sequence
  Description of Artificial Sequence: Synthetic primer
tcagaagcccccctgggagggaggggaggatgagcacgcc

SEQ ID NO: 16332 - DNA, 40 bp, Artificial Sequence
  Description of Artificial Sequence: Synthetic primer
attacaattccccgggtcttcacgtgcagcacatgggaac

SEQ ID NO: 16333 - DNA, 40 bp, Artificial Sequence
  Description of Artificial Sequence: Synthetic primer
atcccagtttttggtcttctgtcaaaaacacagggatgag

SEQ ID NO: 16334 - DNA, 40 bp, Artificial Sequence
  Description of Artificial Sequence: Synthetic primer
gcggggaggactccaccatcccacaagccagccggctcaa

SEQ ID NO: 16335 - DNA, 40 bp, Artificial Sequence
  Description of Artificial Sequence: Synthetic primer
aagaaagatacaccaaaacaacatggaacgtgtcccaaag

SEQ ID NO: 16336 - DNA, 40 bp, Artificial Sequence
  Description of Artificial Sequence: Synthetic primer
tggggttcatcaccaaatacatgaggctccaggagatagc

SEQ ID NO: 16337 - DNA, 40 bp, Artificial Sequence
  Description of Artificial Sequence: Synthetic primer
gagcaggcggaggaacaaaggcgacccaagacacccagag

SEQ ID NO: 16338 - DNA, 40 bp, Artificial Sequence
  Description of Artificial Sequence: Synthetic primer
gtggtgtcttctccgttcagccagttccagctcctcatgc

SEQ ID NO: 16339 - DNA, 40 bp, Artificial Sequence
  Description of Artificial Sequence: Synthetic primer
aattaaaaaaggaagcaaaggggatacatccatgttgaaa

SEQ ID NO: 16340 - DNA, 40 bp, Artificial Sequence
  Description of Artificial Sequence: Synthetic primer
cataagtggatttccaagattactaagaaagggatgaaaa

SEQ ID NO: 16341 - DNA, 40 bp, Artificial Sequence
  Description of Artificial Sequence: Synthetic primer
ggaggctccggtcatcccgtcctggcggccctgaaggtca

SEQ ID NO: 16342 - DNA, 40 bp, Artificial Sequence
  Description of Artificial Sequence: Synthetic primer
cttggatatgaaatcttgtgccacattctcctcttctcac

SEQ ID NO: 16343 - DNA, 40 bp, Artificial Sequence
  Description of Artificial Sequence: Synthetic primer
ggcccagttgctgtcctgatatagaaattgcccagtaacc

SEQ ID NO: 16344 - DNA, 40 bp, Artificial Sequence
  Description of Artificial Sequence: Synthetic primer
gctgcgactgctgcagatggtaggatgtgggattctccag

SEQ ID NO: 16345 - DNA, 40 bp, Artificial Sequence
  Description of Artificial Sequence: Synthetic primer
accaaaaaaagtgcctgtggatgtatataaaattaagatg

SEQ ID NO: 16346 - DNA, 40 bp, Artificial Sequence
  Description of Artificial Sequence: Synthetic primer
cactgcagcaacttctgggccagctcagcatcccgcgact

SEQ ID NO: 16347 - DNA, 40 bp, Artificial Sequence
  Description of Artificial Sequence: Synthetic primer
atccgctccatccagactgacaagcgggaaaagtattacg

SEQ ID NO: 16348 - DNA, 40 bp, Artificial Sequence
  Description of Artificial Sequence: Synthetic primer
ccatcacatgggtagggattttccatccagagccaataaa

SEQ ID NO: 16349 - DNA, 40 bp, Artificial Sequence
  Description of Artificial Sequence: Synthetic primer
agtttcataaagctggtggatccgctgtcatccactattc

SEQ ID NO: 16350 - DNA, 40 bp, Artificial Sequence
  Description of Artificial Sequence: Synthetic primer
ccccgctacatcatccgccagctgggcctcacccgtgacc

SEQ ID NO: 16351 - DNA, 40 bp, Artificial Sequence
  Description of Artificial Sequence: Synthetic primer
tgtggtaattgactattctgcaaatcatccaaaatctcct

SEQ ID NO: 16352 - DNA, 40 bp, Artificial Sequence
  Description of Artificial Sequence: Synthetic primer
ctctgggcggaatgaaggggcaactgacgaaggccccagt

SEQ ID NO: 16353 - DNA, 40 bp, Artificial Sequence
  Description of Artificial Sequence: Synthetic primer
tcccacctgtgttgccaatcttaaagcacccaggcttgat

SEQ ID NO: 16354 - DNA, 40 bp, Artificial Sequence
  Description of Artificial Sequence: Synthetic primer
tccaaactgccctagtccctccccattttgactaaccaat

SEQ ID NO: 16355 - DNA, 40 bp, Artificial Sequence
  Description of Artificial Sequence: Synthetic primer
gaggaactatcatcatgctggttttgtgtttcatcctctt

SEQ ID NO: 16356 - DNA, 40 bp, Artificial Sequence
  Description of Artificial Sequence: Synthetic primer
cgaatggacaggtctttggcagagaatggctggatgttct

SEQ ID NO: 16357 - DNA, 40 bp, Artificial Sequence
  Description of Artificial Sequence: Synthetic primer
tttgaatctggtcgcttccggagggactgcaaaagctctc

SEQ ID NO: 16358 - DNA, 40 bp, Artificial Sequence
  Description of Artificial Sequence: Synthetic primer
tcctcgtcataggagttcacgtggtgatacctgtctgagc

SEQ ID NO: 16359 - DNA, 40 bp, Artificial Sequence
  Description of Artificial Sequence: Synthetic primer
accattctgaggcaaaggtatgaaaaaggtattctgcatc

SEQ ID NO: 16360 - DNA, 40 bp, Artificial Sequence
  Description of Artificial Sequence: Synthetic primer
actcagtgtggtgtagaggttgtcaaagatgctctcagga

SEQ ID NO: 16361 - DNA, 40 bp, Artificial Sequence
  Description of Artificial Sequence: Synthetic primer
ccctccagatctggtggcagagcagtttacactgatggat

SEQ ID NO: 16362 - DNA, 40 bp, Artificial Sequence
  Description of Artificial Sequence: Synthetic primer
gaacaatgccttctgtgccagcatcatctaggggatgaaa

SEQ ID NO: 16363 - DNA, 40 bp, Artificial Sequence
  Description of Artificial Sequence: Synthetic primer
cagggaggaggtagagggcgtgggggatatgacaaggatg

SEQ ID NO: 16364 - DNA, 40 bp, Artificial Sequence
  Description of Artificial Sequence: Synthetic primer
atgtttttctggctcttcctgcacactcatccctagatta

SEQ ID NO: 16365 - DNA, 40 bp, Artificial Sequence
  Description of Artificial Sequence: Synthetic primer
atgatgttgtggataagactcctgtcatccgctcagtgat

SEQ ID NO: 16366 - DNA, 40 bp, Artificial Sequence
  Description of Artificial Sequence: Synthetic primer
cagagataaacttcacggaaaacgttccctaacctccttt

SEQ ID NO: 16367 - DNA, 40 bp, Artificial Sequence
  Description of Artificial Sequence: Synthetic primer
aggacttcctctgagatgagtacacctgaaggatgaagtt

SEQ ID NO: 16368 - DNA, 40 bp, Artificial Sequence
  Description of Artificial Sequence: Synthetic primer
tacccactatcgcctggcaccgtaggacaaatcccccatc

SEQ ID NO: 16369 - DNA, 40 bp, Artificial Sequence
  Description of Artificial Sequence: Synthetic primer
gcttcctgtggtgcacaggatgagtgggcagctggtctgg

SEQ ID NO: 16370 - DNA, 40 bp, Artificial Sequence
  Description of Artificial Sequence: Synthetic primer
tgcccagaatgacaagcatactggcccagtgagagccttg

SEQ ID NO: 16371 - DNA, 40 bp, Artificial Sequence
  Description of Artificial Sequence: Synthetic primer
cttggctctcattagtcccaaggaataagcaggtggatga

SEQ ID NO: 16372 - DNA, 40 bp, Artificial Sequence
  Description of Artificial Sequence: Synthetic primer
gatgggacagggcacgggctctcagaaaataaactgcttt

SEQ ID NO: 16373 - DNA, 40 bp, Artificial Sequence
  Description of Artificial Sequence: Synthetic primer
atgccactttttccctcatcatggatgactttgttaagat

SEQ ID NO: 16374 - DNA, 40 bp, Artificial Sequence
  Description of Artificial Sequence: Synthetic primer
caccttgacgaagccctgcctcactggccggacctccatc

SEQ ID NO: 16375 - DNA, 40 bp, Artificial Sequence
  Description of Artificial Sequence: Synthetic primer
accacagctccagtcctctcagcctccatactcccagcag

SEQ ID NO: 16376 - DNA, 40 bp, Artificial Sequence
  Description of Artificial Sequence: Synthetic primer
tgccactctgaagagagagcaggagagctataaacagatg

SEQ ID NO: 16377 - DNA, 40 bp, Artificial Sequence
  Description of Artificial Sequence: Synthetic primer
actttatgatgaaaaaaattagctaggtgtgaagttggtg

SEQ ID NO: 16378 - DNA, 40 bp, Artificial Sequence
  Description of Artificial Sequence: Synthetic primer
tccaaagtgacttgttgcggatctgataaggtcagtctta

SEQ ID NO: 16379 - DNA, 40 bp, Artificial Sequence
  Description of Artificial Sequence: Synthetic primer
cgcagagtatctgtcccgacggtcatccttcatgcctcct

SEQ ID NO: 16380 - DNA, 40 bp, Artificial Sequence
  Description of Artificial Sequence: Synthetic primer
ggaagtcttactcaatatggagtctcccagcgatatcctg

SEQ ID NO: 16381 - DNA, 40 bp, Artificial Sequence
  Description of Artificial Sequence: Synthetic primer
gtagacaacatgtcatccatagtggctgtgatccgttttt

SEQ ID NO: 16382 - DNA, 40 bp, Artificial Sequence
  Description of Artificial Sequence: Synthetic primer
gatgaccccagtgccactgcagggagcatccagcagtact

SEQ ID NO: 16383 - DNA, 40 bp, Artificial Sequence
  Description of Artificial Sequence: Synthetic primer
gccatggaaccctcctacgagctcatccacacacagatga

SEQ ID NO: 16384 - DNA, 40 bp, Artificial Sequence
  Description of Artificial Sequence: Synthetic primer
acaagaacaagaagcactagttaatcgcctctggaaaagg

SEQ ID NO: 16385 - DNA, 40 bp, Artificial Sequence
  Description of Artificial Sequence: Synthetic primer
atacccattaccatcttggacctggaagaagtgttcagac

SEQ ID NO: 16386 - DNA, 40 bp, Artificial Sequence
  Description of Artificial Sequence: Synthetic primer
ctatgggctctgcgggcgcgcatcctggggacaagctagg

SEQ ID NO: 16387 - DNA, 40 bp, Artificial Sequence
  Description of Artificial Sequence: Synthetic primer
gatgaggaacagcaggatgaagatggtgaagaggaacacg

SEQ ID NO: 16388 - DNA, 40 bp, Artificial Sequence
  Description of Artificial Sequence: Synthetic primer
tcggccaggacgacatccacctttaaggccccagcgtcca

SEQ ID NO: 16389 - DNA, 40 bp, Artificial Sequence
  Description of Artificial Sequence: Synthetic primer
cgtattttttacctaagaaactttaataattggatgaaaa

SEQ ID NO: 16390 - DNA, 40 bp, Artificial Sequence
  Description of Artificial Sequence: Synthetic primer
ggggagctcactccgagaacaggagaaatcaacattgcag

SEQ ID NO: 16391 - DNA, 40 bp, Artificial Sequence
  Description of Artificial Sequence: Synthetic primer
acaatgagctggctggccagttatctagcggatgctgact

SEQ ID NO: 16392 - DNA, 40 bp, Artificial Sequence
  Description of Artificial Sequence: Synthetic primer
atcctcccgagccacaccttggagtatgggaactacactg

SEQ ID NO: 16393 - DNA, 40 bp, Artificial Sequence
  Description of Artificial Sequence: Synthetic primer
gctaatgcaccattagaagatattagtcttggggcaggat

SEQ ID NO: 16394 - DNA, 40 bp, Artificial Sequence
  Description of Artificial Sequence: Synthetic primer
aagcctacgctacacatttcagaggagattaaaacattcc

SEQ ID NO: 16395 - DNA, 40 bp, Artificial Sequence
  Description of Artificial Sequence: Synthetic primer
gccccagggccccgctgtcacttgcccaaaagatcccttc

SEQ ID NO: 16396 - DNA, 40 bp, Artificial Sequence
  Description of Artificial Sequence: Synthetic primer
agagtgggtgtcatacctggcctagaccagtgcccataac

SEQ ID NO: 16397 - DNA, 40 bp, Artificial Sequence
  Description of Artificial Sequence: Synthetic primer
cagatgtagaaattgttgctttgtttctctgataaaactg

SEQ ID NO: 16398 - DNA, 40 bp, Artificial Sequence
  Description of Artificial Sequence: Synthetic primer
gcaccagctgttcaccccactagccactgcctcccttgtc

SEQ ID NO: 16399 - DNA, 40 bp, Artificial Sequence
  Description of Artificial Sequence: Synthetic primer
catagtcttaaagaacaggctaaacaccacagagagattg

SEQ ID NO: 16400 - DNA, 40 bp, Artificial Sequence
  Description of Artificial Sequence: Synthetic primer
gaatacatgtttgcgtaaaaggccacggtcaccacgttgc

SEQ ID NO: 16401 - DNA, 40 bp, Artificial Sequence
  Description of Artificial Sequence: Synthetic primer
ggttccacaagctggtgggcttgtttctggatccgtggac

SEQ ID NO: 16402 - DNA, 40 bp, Artificial Sequence
  Description of Artificial Sequence: Synthetic primer
gaaaaatcagaacagggctatttgaagaattattttatac

SEQ ID NO: 16403 - DNA, 40 bp, Artificial Sequence
  Description of Artificial Sequence: Synthetic primer
ccaacaaaaataaaaatcatcaggacggaatgtcccaaag

SEQ ID NO: 16404 - DNA, 40 bp, Artificial Sequence
  Description of Artificial Sequence: Synthetic primer
ctccagtcatctgtagttgtgatcagaaaaaggtatctgc

SEQ ID NO: 16405 - DNA, 40 bp, Artificial Sequence
  Description of Artificial Sequence: Synthetic primer
gaattctgggttgaattttttaaaaatcaggtaccacttg

SEQ ID NO: 16406 - DNA, 40 bp, Artificial Sequence
  Description of Artificial Sequence: Synthetic primer
ggttaccctggatacccgtcaggctcgggctgcagagaag

SEQ ID NO: 16407 - DNA, 40 bp, Artificial Sequence
  Description of Artificial Sequence: Synthetic primer
acagtgatgtctaggttgcccaagaagagcgtccggttag

SEQ ID NO: 16408 - DNA, 40 bp, Artificial Sequence
  Description of Artificial Sequence: Synthetic primer
accgagcccgggtaaagcagggctgcagaaagcagaaacg

SEQ ID NO: 16409 - DNA, 40 bp, Artificial Sequence
  Description of Artificial Sequence: Synthetic primer
ccctgctgatattgtaatcaccctgatgcacgttggcttc

SEQ ID NO: 16410 - DNA, 40 bp, Artificial Sequence
  Description of Artificial Sequence: Synthetic primer
cctccagctggcgcagcttcgtagacacgttgagcttctg

SEQ ID NO: 16411 - DNA, 40 bp, Artificial Sequence
  Description of Artificial Sequence: Synthetic primer
tcggccgtggagaagctcccgccaccgccgtcgttgtctc

SEQ ID NO: 16412 - DNA, 40 bp, Artificial Sequence
  Description of Artificial Sequence: Synthetic primer
agttctagctcagctttcaaccagctcaccaacaacacag

SEQ ID NO: 16413 - DNA, 40 bp, Artificial Sequence
  Description of Artificial Sequence: Synthetic primer
aaagagttttgctgggtgacactgactttctaaatattcc

SEQ ID NO: 16414 - DNA, 40 bp, Artificial Sequence
  Description of Artificial Sequence: Synthetic primer
agacagttaggaaaaccacacttcagcattaataaacagc

SEQ ID NO: 16415 - DNA, 40 bp, Artificial Sequence
  Description of Artificial Sequence: Synthetic primer
atgtgatcaagttgatggctaagccaagatgaccaaagcg

SEQ ID NO: 16416 - DNA, 40 bp, Artificial Sequence
  Description of Artificial Sequence: Synthetic primer
cacagatctgatgcatctttcttccgcactctgtacattc

SEQ ID NO: 16417 - DNA, 40 bp, Artificial Sequence
  Description of Artificial Sequence: Synthetic primer
cgctgaggccttcaagtacttcgtgcagggcatgggatac

SEQ ID NO: 16418 - DNA, 40 bp, Artificial Sequence
  Description of Artificial Sequence: Synthetic primer
agcacccctggagagtcagagctcttctttgcgctaaacc

SEQ ID NO: 16419 - DNA, 40 bp, Artificial Sequence
  Description of Artificial Sequence: Synthetic primer
ctggtttaaactactcaatctcattatttcattttcggca

SEQ ID NO: 16420 - DNA, 40 bp, Artificial Sequence
  Description of Artificial Sequence: Synthetic primer
taaggattaggcccacttggaggaggggtcatggtacttc

SEQ ID NO: 16421 - DNA, 40 bp, Artificial Sequence
  Description of Artificial Sequence: Synthetic primer
ctccttgttcagaataagaatcatcaacaccaaattcttc

SEQ ID NO: 16422 - DNA, 40 bp, Artificial Sequence
  Description of Artificial Sequence: Synthetic primer
gatgtggcgcgcggaggggaaatggctgccgaaaacaagc

SEQ ID NO: 16423 - DNA, 40 bp, Artificial Sequence
  Description of Artificial Sequence: Synthetic primer
tgtggcttgactttgtcaagggcaaaatctgcatattatc

SEQ ID NO: 16424 - DNA, 40 bp, Artificial Sequence
  Description of Artificial Sequence: Synthetic primer
gaccggctgtcagaacttccaggcacagccaaaagaatgg

SEQ ID NO: 16425 - DNA, 40 bp, Artificial Sequence
  Description of Artificial Sequence: Synthetic primer
gcgtcggcctgcgagtgagcctgcccattctgccctgtgg

SEQ ID NO: 16426 - DNA, 40 bp, Artificial Sequence
  Description of Artificial Sequence: Synthetic primer
tatatacagttgtcctgcattattataaagagttttcagg

SEQ ID NO: 16427 - DNA, 40 bp, Artificial Sequence
  Description of Artificial Sequence: Synthetic primer
atcagtcctacaagatttctcagcttccagataatgattc

SEQ ID NO: 16428 - DNA, 40 bp, Artificial Sequence
  Description of Artificial Sequence: Synthetic primer
cattggggacagggaggtggattctgatgcctactatgtc

SEQ ID NO: 16429 - DNA, 40 bp, Artificial Sequence
  Description of Artificial Sequence: Synthetic primer
agccaccgggaggcagaggggaggcggcggctgcggcggc

SEQ ID NO: 16430 - DNA, 40 bp, Artificial Sequence
  Description of Artificial Sequence: Synthetic primer
cagtttttactaacactgtactagggtgatattaataaag

SEQ ID NO: 16431 - DNA, 40 bp, Artificial Sequence
  Description of Artificial Sequence: Synthetic primer
tggaagttcccgccccggagagcggcgaggcggcagccac

SEQ ID NO: 16432 - DNA, 40 bp, Artificial Sequence
  Description of Artificial Sequence: Synthetic primer
aaatgtcagaaaccagttatgtgaatgatctctctgaatc

SEQ ID NO: 16433 - DNA, 40 bp, Artificial Sequence
  Description of Artificial Sequence: Synthetic primer
cttcacagacttgtcgttcttatcagcctctgccttttgc

SEQ ID NO: 16434 - DNA, 40 bp, Artificial Sequence
  Description of Artificial Sequence: Synthetic primer
ttaaagagggattactgctctgtgaactggcctgtccttg

SEQ ID NO: 16435 - DNA, 40 bp, Artificial Sequence
  Description of Artificial Sequence: Synthetic primer
gcctcaaaacatttttattgtcaggaaagcttttcagtgg

SEQ ID NO: 16436 - DNA, 40 bp, Artificial Sequence
  Description of Artificial Sequence: Synthetic primer
cctgtctatttcctgcacttcgagaagaatcaaaatgttc

SEQ ID NO: 16437 - DNA, 40 bp, Artificial Sequence
  Description of Artificial Sequence: Synthetic primer
gaaagctgcaaacagtcagggctcagcagccttgttaatg

SEQ ID NO: 16438 - DNA, 40 bp, Artificial Sequence
  Description of Artificial Sequence: Synthetic primer
agcctcttcctgacagacttgtacaaggaccggaagctgc

SEQ ID NO: 16439 - DNA, 40 bp, Artificial Sequence
  Description of Artificial Sequence: Synthetic primer
ccgctcagttgcacagaacagccatgccaagtgaaaacag

SEQ ID NO: 16440 - DNA, 40 bp, Artificial Sequence
  Description of Artificial Sequence: Synthetic primer
gcgtgctgtagaacgatgagttggcgctgtctggctcttc

SEQ ID NO: 16441 - DNA, 40 bp, Artificial Sequence
  Description of Artificial Sequence: Synthetic primer
gcagcagatgaaggcacaggcccgggaggagaagcaccag

SEQ ID NO: 16442 - DNA, 40 bp, Artificial Sequence
  Description of Artificial Sequence: Synthetic primer
ggagacagatttgggaaggagtggaggggaggccccaagg

SEQ ID NO: 16443 - DNA, 40 bp, Artificial Sequence
  Description of Artificial Sequence: Synthetic primer
ccatgcactcctcctcgtcgatcagctccccaacgtactc

SEQ ID NO: 16444 - DNA, 40 bp, Artificial Sequence
  Description of Artificial Sequence: Synthetic primer
tctgatcagtcaattctaatcctcccactgaacttgtgtc

SEQ ID NO: 16445 - DNA, 40 bp, Artificial Sequence
  Description of Artificial Sequence: Synthetic primer
tgcaccttccgcgctgctacagccaacctcacacgactcc

SEQ ID NO: 16446 - DNA, 40 bp, Artificial Sequence
  Description of Artificial Sequence: Synthetic primer
tttgtaaagtccatctgtttcagtatccctgctccaaagc

SEQ ID NO: 16447 - DNA, 40 bp, Artificial Sequence
  Description of Artificial Sequence: Synthetic primer
caaattagtttcttgcaagagaaaattaaagtatatgaaa

SEQ ID NO: 16448 - DNA, 40 bp, Artificial Sequence
  Description of Artificial Sequence: Synthetic primer
cacttcaaatcctcccattccaatcaaacaaatcacaagc

SEQ ID NO: 16449 - DNA, 40 bp, Artificial Sequence
  Description of Artificial Sequence: Synthetic primer
tgctgctcctcccttccactcaccactctcccaaactcag

SEQ ID NO: 16450 - DNA, 40 bp, Artificial Sequence
  Description of Artificial Sequence: Synthetic primer
gagttctggacaagatgagtattaatgcttctttaaattg

SEQ ID NO: 16451 - DNA, 40 bp, Artificial Sequence
  Description of Artificial Sequence: Synthetic primer
tttaacttagcattttttgccttctcttcatttgttgacg

SEQ ID NO: 16452 - DNA, 40 bp, Artificial Sequence
  Description of Artificial Sequence: Synthetic primer
gagcaacgaggccatgggccgcgaggtgaacgcactcaag

SEQ ID NO: 16453 - DNA, 40 bp, Artificial Sequence
  Description of Artificial Sequence: Synthetic primer
tcagagctacggaaaattttttcaaacttggaagatattc

SEQ ID NO: 16454 - DNA, 40 bp, Artificial Sequence
  Description of Artificial Sequence: Synthetic primer
taaaaccttaactgttttgggactgactttcaaaagagcg

SEQ ID NO: 16455 - DNA, 40 bp, Artificial Sequence
  Description of Artificial Sequence: Synthetic primer
atctgttgcctagagctatagtacatgtgtgttatgaatg

SEQ ID NO: 16456 - DNA, 40 bp, Artificial Sequence
  Description of Artificial Sequence: Synthetic primer
ggcatcattgtgcataccatggctgcagtggaggccctgg

SEQ ID NO: 16457 - DNA, 40 bp, Artificial Sequence
  Description of Artificial Sequence: Synthetic primer
caacttagtaatgacttgtggtcttttggatatggctgac

SEQ ID NO: 16458 - DNA, 40 bp, Artificial Sequence
  Description of Artificial Sequence: Synthetic primer
aaattgagctattttccatagtggctagcaattgctacac

SEQ ID NO: 16459 - DNA, 40 bp, Artificial Sequence
  Description of Artificial Sequence: Synthetic primer
tctttggtaacaaaccaaccctgactttaggaaccaatac

SEQ ID NO: 16460 - DNA, 40 bp, Artificial Sequence
  Description of Artificial Sequence: Synthetic primer
tcatcagtatggtcggttgcgctgatcatttctgtagtcg

SEQ ID NO: 16461 - DNA, 40 bp, Artificial Sequence
  Description of Artificial Sequence: Synthetic primer
agcagggccctggccaaggagcggcagaagaaagacaatc

SEQ ID NO: 16462 - DNA, 40 bp, Artificial Sequence
  Description of Artificial Sequence: Synthetic primer
catctgttccattctgttccaccagcttcttcagtttttc

SEQ ID NO: 16463 - DNA, 40 bp, Artificial Sequence
  Description of Artificial Sequence: Synthetic primer
caagctgtttctccacatttgcaaccatctgtttcttttc

SEQ ID NO: 16464 - DNA, 40 bp, Artificial Sequence
  Description of Artificial Sequence: Synthetic primer
agagcgttagaggggccagcggccctcccaggcgatcttg

SEQ ID NO: 16465 - DNA, 40 bp, Artificial Sequence
  Description of Artificial Sequence: Synthetic primer
tcatgtatataatgatcgagacagtcaagatagcaagaag

SEQ ID NO: 16466 - DNA, 40 bp, Artificial Sequence
  Description of Artificial Sequence: Synthetic primer
catgtcgttactcaggcgcagagacaccgcgcatgaaggg

SEQ ID NO: 16467 - DNA, 40 bp, Artificial Sequence
  Description of Artificial Sequence: Synthetic primer
tgggtacgtgcccctctgtttaaaaataaactgaatatgg

SEQ ID NO: 16468 - DNA, 40 bp, Artificial Sequence
  Description of Artificial Sequence: Synthetic primer
gacagaagagttcttctctgtggtgactacagactagagg

SEQ ID NO: 16469 - DNA, 40 bp, Artificial Sequence
  Description of Artificial Sequence: Synthetic primer
agaagaattcctcactaatgagctctccagaaaattgatg

SEQ ID NO: 16470 - DNA, 40 bp, Artificial Sequence
  Description of Artificial Sequence: Synthetic primer
tcagccaatccggtgctactcgcgcgcccaggagcgatcc

SEQ ID NO: 16471 - DNA, 40 bp, Artificial Sequence
  Description of Artificial Sequence: Synthetic primer
tggggcagtttctctttttaaaaaataaattttagactgc

SEQ ID NO: 16472 - DNA, 40 bp, Artificial Sequence
  Description of Artificial Sequence: Synthetic primer
tttgtggttccaaagagtcctccactgctagtactggttc

SEQ ID NO: 16473 - DNA, 40 bp, Artificial Sequence
  Description of Artificial Sequence: Synthetic primer
attttattattactattgatttactttattcctggcttcc

SEQ ID NO: 16474 - DNA, 40 bp, Artificial Sequence
  Description of Artificial Sequence: Synthetic primer
aacacaagtgaaagttcaggaactgatggttggatcttag

SEQ ID NO: 16475 - DNA, 40 bp, Artificial Sequence
  Description of Artificial Sequence: Synthetic primer
cagtgcttgctgggaaattaacaacttgttctggactttc

SEQ ID NO: 16476 - DNA, 40 bp, Artificial Sequence
  Description of Artificial Sequence: Synthetic primer
tggaaccacctggagaaccaggaccttccaccaatattcc

SEQ ID NO: 16477 - DNA, 40 bp, Artificial Sequence
  Description of Artificial Sequence: Synthetic primer
tgtttaaaagtgacagtaattcattttgtaaactaaaaaa

SEQ ID NO: 16478 - DNA, 40 bp, Artificial Sequence
  Description of Artificial Sequence: Synthetic primer
aggcgttgtcgaagaaacggtcgaaggcttgaggcaggac

SEQ ID NO: 16479 - DNA, 40 bp, Artificial Sequence
  Description of Artificial Sequence: Synthetic primer
atgtaaatgaaatcacatttaaaataaactgcctctgacc

SEQ ID NO: 16480 - DNA, 40 bp, Artificial Sequence
  Description of Artificial Sequence: Synthetic primer
gaaagaaaagctccacttgtaaattttgattgtagtaacc

SEQ ID NO: 16481 - DNA, 40 bp, Artificial Sequence
  Description of Artificial Sequence: Synthetic primer
ataaaataatattttgcttaaaaattagaatcattcaaag

SEQ ID NO: 16482 - DNA, 40 bp, Artificial Sequence
  Description of Artificial Sequence: Synthetic primer
accagaaatcacgaaggcctttatcacttctcggttggac

SEQ ID NO: 16483 - DNA, 40 bp, Artificial Sequence
  Description of Artificial Sequence: Synthetic primer
gtacacatgagcaaaggagctgagggccagctcacaaagg

SEQ ID NO: 16484 - DNA, 40 bp, Artificial Sequence
  Description of Artificial Sequence: Synthetic primer
ttattcttatattatgaagggattctttgcctagcagtgg

SEQ ID NO: 16485 - DNA, 40 bp, Artificial Sequence
  Description of Artificial Sequence: Synthetic primer
ttgtaaataatgaaccttattttttattattgccaatccc

SEQ ID NO: 16486 - DNA, 40 bp, Artificial Sequence
  Description of Artificial Sequence: Synthetic primer
tgtccatgggcagagaaaatatgctgctgcaacttgtttg

SEQ ID NO: 16487 - DNA, 40 bp, Artificial Sequence
  Description of Artificial Sequence: Synthetic primer
taactcagtggagccaggctttggggtagcggccctgagc

SEQ ID NO: 16488 - DNA, 40 bp, Artificial Sequence
  Description of Artificial Sequence: Synthetic primer
cctggcgacagtggtccgggtcccggaagaggtcagagag

SEQ ID NO: 16489 - DNA, 40 bp, Artificial Sequence
  Description of Artificial Sequence: Synthetic primer
acttcgagagttcttccaaagtcgcccaggcaccttctcc

SEQ ID NO: 16490 - DNA, 40 bp, Artificial Sequence
  Description of Artificial Sequence: Synthetic primer
caaacacctagccgagagtatgtcgacttagaaagagaag

SEQ ID NO: 16491 - DNA, 40 bp, Artificial Sequence
  Description of Artificial Sequence: Synthetic primer
ggggtctaaggtatcatttttcttcttttcaaactgatcc

SEQ ID NO: 16492 - DNA, 40 bp, Artificial Sequence
  Description of Artificial Sequence: Synthetic primer
gctgctgtctgccaacaccatctccaagcaaggtcctgag

SEQ ID NO: 16493 - DNA, 40 bp, Artificial Sequence
  Description of Artificial Sequence: Synthetic primer
gaatcattgaacaatctttttattacagaagaagattatc

SEQ ID NO: 16494 - DNA, 40 bp, Artificial Sequence
  Description of Artificial Sequence: Synthetic primer
ctctatttttgtatttcatgtctgtattccttatttcttg

SEQ ID NO: 16495 - DNA, 40 bp, Artificial Sequence
  Description of Artificial Sequence: Synthetic primer
gctcttccagcaatcttattttatcatctttaacataaac

SEQ ID NO: 16496 - DNA, 40 bp, Artificial Sequence
  Description of Artificial Sequence: Synthetic primer
actgctgggactcctagagggctgatggtttatgagatgc

SEQ ID NO: 16497 - DNA, 40 bp, Artificial Sequence
  Description of Artificial Sequence: Synthetic primer
tcagtctggcagcaagaaggatcctgaaggaattctgtgg

SEQ ID NO: 16498 - DNA, 40 bp, Artificial Sequence
  Description of Artificial Sequence: Synthetic primer
tcctgctgaaagtcctgctttcctatctagcatttatttc

SEQ ID NO: 16499 - DNA, 40 bp, Artificial Sequence
  Description of Artificial Sequence: Synthetic primer
atacatcttcaaaaactcactcaaattctcagcaaggaac

SEQ ID NO: 16500 - DNA, 40 bp, Artificial Sequence
  Description of Artificial Sequence: Synthetic primer
attggcaccccacagcccttcaccttcgctatcaaacatc

SEQ ID NO: 16501 - DNA, 40 bp, Artificial Sequence
  Description of Artificial Sequence: Synthetic primer
ttgttcagagttcaccagttgagcggccttctacttccac

SEQ ID NO: 16502 - DNA, 40 bp, Artificial Sequence
  Description of Artificial Sequence: Synthetic primer
ttgcaactactttattatatttagaaatccaataaacttc

SEQ ID NO: 16503 - DNA, 40 bp, Artificial Sequence
  Description of Artificial Sequence: Synthetic primer
aacatgcttgtcattgatatatggaagatgctatagttag

SEQ ID NO: 16504 - DNA, 40 bp, Artificial Sequence
  Description of Artificial Sequence: Synthetic primer
atggtttcttacatttcctgaaataaaaaatggcttcctg

SEQ ID NO: 16505 - DNA, 40 bp, Artificial Sequence
  Description of Artificial Sequence: Synthetic primer
gaactgtgctccatataactttttagattcatttgctatg

SEQ ID NO: 16506 - DNA, 40 bp, Artificial Sequence
  Description of Artificial Sequence: Synthetic primer
ggttaagcttttgcagattacacatattttctatgccttc

SEQ ID NO: 16507 - DNA, 40 bp, Artificial Sequence
  Description of Artificial Sequence: Synthetic primer
attcttattttccagttcttctctaaactgttctaattgc

SEQ ID NO: 16508 - DNA, 40 bp, Artificial Sequence
  Description of Artificial Sequence: Synthetic primer
cgaggttcgggctggttgttccgttgcgagctgcagctgc

SEQ ID NO: 16509 - DNA, 40 bp, Artificial Sequence
  Description of Artificial Sequence: Synthetic primer
ctttcgacgtaccaggtagcgagaaagacttttgaagagg

SEQ ID NO: 16510 - DNA, 40 bp, Artificial Sequence
  Description of Artificial Sequence: Synthetic primer
acatcaatatgtatatatgtatttctatatagacttggag

SEQ ID NO: 16511 - DNA, 40 bp, Artificial Sequence
  Description of Artificial Sequence: Synthetic primer
tgcaacaggacataaaatatattcccacagaagatgtttc

SEQ ID NO: 16512 - DNA, 40 bp, Artificial Sequence
  Description of Artificial Sequence: Synthetic primer
gagcagcagctccagcaactccagcagctcctggcctccc

SEQ ID NO: 16513 - DNA, 40 bp, Artificial Sequence
  Description of Artificial Sequence: Synthetic primer
aatgtggactttacaagtagtcatgcaactgctgtttgtg

SEQ ID NO: 16514 - DNA, 40 bp, Artificial Sequence
  Description of Artificial Sequence: Synthetic primer
tatgcattaagtatgtcttgctcatcaatgaaaatgttag

SEQ ID NO: 16515 - DNA, 40 bp, Artificial Sequence
  Description of Artificial Sequence: Synthetic primer
aaccaacatctttgcgaaaagataaacctggagatattat

SEQ ID NO: 16516 - DNA, 40 bp, Artificial Sequence
  Description of Artificial Sequence: Synthetic primer
ctgattcaggatatctctgtaattttatctgagtgagtgg

SEQ ID NO: 16517 - DNA, 40 bp, Artificial Sequence
  Description of Artificial Sequence: Synthetic primer
agcaggagtaataaatttactcacagcacttgttttcagg

SEQ ID NO: 16518 - DNA, 40 bp, Artificial Sequence
  Description of Artificial Sequence: Synthetic primer
acaggaggaaccaatttacgagatgacataatgaggcttg

SEQ ID NO: 16519 - DNA, 40 bp, Artificial Sequence
  Description of Artificial Sequence: Synthetic primer
ccaaaatgtcattgccatacagcttcactagagttctttg

SEQ ID NO: 16520 - DNA, 40 bp, Artificial Sequence
  Description of Artificial Sequence: Synthetic primer
tgctgcgtgagctactcacttgtttgattaacatgaaagg

SEQ ID NO: 16521 - DNA, 40 bp, Artificial Sequence
  Description of Artificial Sequence: Synthetic primer
ttctgcaccacaatacaactgtaaaaaaatctgcatcatc

SEQ ID NO: 16522 - DNA, 40 bp, Artificial Sequence
  Description of Artificial Sequence: Synthetic primer
gacttgtggaggggaatgttttcagaattgttgtgagctg

SEQ ID NO: 16523 - DNA, 40 bp, Artificial Sequence
  Description of Artificial Sequence: Synthetic primer
taagcatactttatcaaacaaaacactaaatcgctgtcac

SEQ ID NO: 16524 - DNA, 40 bp, Artificial Sequence
  Description of Artificial Sequence: Synthetic primer
agggagccacagctcctctgacagagttacttcactctag

SEQ ID NO: 16525 - DNA, 40 bp, Artificial Sequence
  Description of Artificial Sequence: Synthetic primer
tcggaaaggagactcttttggagatacgtagggagagagg

SEQ ID NO: 16526 - DNA, 40 bp, Artificial Sequence
  Description of Artificial Sequence: Synthetic primer
tatttacttgtagaacaatgaattttttaagaaaatactc

SEQ ID NO: 16527 - DNA, 40 bp, Artificial Sequence
  Description of Artificial Sequence: Synthetic primer
atcaatcctcagatgcagcagaatgtcttccagtatccag

SEQ ID NO: 16528 - DNA, 40 bp, Artificial Sequence
  Description of Artificial Sequence: Synthetic primer
cctacttagtaaggattgttttaaattgtgctttctctgg

SEQ ID NO: 16529 - DNA, 40 bp, Artificial Sequence
  Description of Artificial Sequence: Synthetic primer
gtggtagtggtggtgaatggtgacaacatataatttaatc

SEQ ID NO: 16530 - DNA, 40 bp, Artificial Sequence
  Description of Artificial Sequence: Synthetic primer
tccagttacattactgtgttctttctaatgaaaagtaaag

SEQ ID NO: 16531 - DNA, 40 bp, Artificial Sequence
  Description of Artificial Sequence: Synthetic primer
atccaaggccactcctagcttgagtagattaaatttgtcc

SEQ ID NO: 16532 - DNA, 40 bp, Artificial Sequence
  Description of Artificial Sequence: Synthetic primer
agcgactttcattagaaggagagcgacagcccaagtcacc

SEQ ID NO: 16533 - DNA, 40 bp, Artificial Sequence
  Description of Artificial Sequence: Synthetic primer
cttggttctcatggagatgtggcccttgctggcaatctgg

SEQ ID NO: 16534 - DNA, 40 bp, Artificial Sequence
  Description of Artificial Sequence: Synthetic primer
ccgagccggtgcaagatctcttcgacttcatcacggaaag

SEQ ID NO: 16535 - DNA, 40 bp, Artificial Sequence
  Description of Artificial Sequence: Synthetic primer
aacaaaactgaacttcattgctatattcaggttacttttg

SEQ ID NO: 16536 - DNA, 40 bp, Artificial Sequence
  Description of Artificial Sequence: Synthetic primer
gatatgtttgataaatttatgtttttaggtaaataaaaac

SEQ ID NO: 16537 - DNA, 40 bp, Artificial Sequence
  Description of Artificial Sequence: Synthetic primer
tgtgccagaggaacttaagcagccgttacacagaaagtcc

SEQ ID NO: 16538 - DNA, 40 bp, Artificial Sequence
  Description of Artificial Sequence: Synthetic primer
agaagcattgcgtaagaagtgttaagtctacaacaaatac

SEQ ID NO: 16539 - DNA, 40 bp, Artificial Sequence
  Description of Artificial Sequence: Synthetic primer
taccacagcgagcctgtagaagatgagaaaccttaacaag

SEQ ID NO: 16540 - DNA, 40 bp, Artificial Sequence
  Description of Artificial Sequence: Synthetic primer
gacctctgccctcgtggccgccctggtcctggctttctcc

SEQ ID NO: 16541 - DNA, 40 bp, Artificial Sequence
  Description of Artificial Sequence: Synthetic primer
aacattgtcttcatcttctgatgctggtgccattaaaacg

SEQ ID NO: 16542 - DNA, 40 bp, Artificial Sequence
  Description of Artificial Sequence: Synthetic primer
tgcctggagctgctcctgcagctgcaatttctctgccatg

SEQ ID NO: 16543 - DNA, 40 bp, Artificial Sequence
  Description of Artificial Sequence: Synthetic primer
tctataaagagagctcaaataaacatgaatcagtatgtag

SEQ ID NO: 16544 - DNA, 40 bp, Artificial Sequence
  Description of Artificial Sequence: Synthetic primer
attctctttaggacaaagcagagagtccaatttattgagg

SEQ ID NO: 16545 - DNA, 40 bp, Artificial Sequence
  Description of Artificial Sequence: Synthetic primer
gctccacacctacctgcctgcccacatcccctaccaggag

SEQ ID NO: 16546 - DNA, 40 bp, Artificial Sequence
  Description of Artificial Sequence: Synthetic primer
cttcctgggacctcacgcccctgttgacagatggagattg

SEQ ID NO: 16547 - DNA, 40 bp, Artificial Sequence
  Description of Artificial Sequence: Synthetic primer
gttctggtttcaagttataaaaataaattggacatttaac

SEQ ID NO: 16548 - DNA, 40 bp, Artificial Sequence
  Description of Artificial Sequence: Synthetic primer
accctggggccctgcctcaccaaggaaataaagactcaag

SEQ ID NO: 16549 - DNA, 40 bp, Artificial Sequence
  Description of Artificial Sequence: Synthetic primer
ccgtgccgctccccggagaaggggtacagggtccggcagc

SEQ ID NO: 16550 - DNA, 40 bp, Artificial Sequence
  Description of Artificial Sequence: Synthetic primer
ttatgactacacttgtatgccaggaggcagcagcctatac

SEQ ID NO: 16551 - DNA, 40 bp, Artificial Sequence
  Description of Artificial Sequence: Synthetic primer
gatgctctgattagcacagtatatgcatacttctccaaag

SEQ ID NO: 16552 - DNA, 40 bp, Artificial Sequence
  Description of Artificial Sequence: Synthetic primer
gtcttcacacgctcaacgccgtggacatggagctctacac

SEQ ID NO: 16553 - DNA, 40 bp, Artificial Sequence
  Description of Artificial Sequence: Synthetic primer
ggagtaataatcctttctgaattgactcaggaaatgaacc

SEQ ID NO: 16554 - DNA, 40 bp, Artificial Sequence
  Description of Artificial Sequence: Synthetic primer
ccctctttgggccaagtagttttacagctgctcctactgg

SEQ ID NO: 16555 - DNA, 40 bp, Artificial Sequence
  Description of Artificial Sequence: Synthetic primer
taacgttttctactcgcacaaaacacttgtgaagactaag

SEQ ID NO: 16556 - DNA, 40 bp, Artificial Sequence
  Description of Artificial Sequence: Synthetic primer
gtgtctttagtgctccaagtctaggaactccctcagatcc

SEQ ID NO: 16557 - DNA, 40 bp, Artificial Sequence
  Description of Artificial Sequence: Synthetic primer
tcagatgggaatgtttaggtcaaagcagaatgacgccaac

SEQ ID NO: 16558 - DNA, 40 bp, Artificial Sequence
  Description of Artificial Sequence: Synthetic primer
cctaaacaaagggccactcagaaacttcgcccagtcttgc

SEQ ID NO: 16559 - DNA, 40 bp, Artificial Sequence
  Description of Artificial Sequence: Synthetic primer
accagtgggaggaccggatccaggtgtggcatgcggaaca

SEQ ID NO: 16560 - DNA, 40 bp, Artificial Sequence
  Description of Artificial Sequence: Synthetic primer
cggaagaagctggtctccatctgtgagcagtatggtttac

SEQ ID NO: 16561 - DNA, 40 bp, Artificial Sequence
  Description of Artificial Sequence: Synthetic primer
gctccaggttctgcagagctgtatcaccaagtgacagtcc

SEQ ID NO: 16562 - DNA, 40 bp, Artificial Sequence
  Description of Artificial Sequence: Synthetic primer
aaatgagtggacgtatgatttttgaattaaatgacttttc

SEQ ID NO: 16563 - DNA, 40 bp, Artificial Sequence
  Description of Artificial Sequence: Synthetic primer
gttacatcttgtaggatctactttttgaacttttcattcc

SEQ ID NO: 16564 - DNA, 40 bp, Artificial Sequence
  Description of Artificial Sequence: Synthetic primer
aaccacacaccaggcttcgttggggtttattcttctctcg

SEQ ID NO: 16565 - DNA, 40 bp, Artificial Sequence
  Description of Artificial Sequence: Synthetic primer
ggaggttcgagatcacatgcaggactctttcttaatgcag

SEQ ID NO: 16566 - DNA, 40 bp, Artificial Sequence
  Description of Artificial Sequence: Synthetic primer
gctgcgctgcggggccgagcgcgggcggatggccgggatg

SEQ ID NO: 16567 - DNA, 40 bp, Artificial Sequence
  Description of Artificial Sequence: Synthetic primer
tggacagcaccggagcggccgctccagccagccccgcagg

SEQ ID NO: 16568 - DNA, 40 bp, Artificial Sequence
  Description of Artificial Sequence: Synthetic primer
tccttcatagaaattaaaaaatcaatttgagctcatttcg

SEQ ID NO: 16569 - DNA, 40 bp, Artificial Sequence
  Description of Artificial Sequence: Synthetic primer
ccatgtagatggcatggcttgatatctgcagtgtccttgc

SEQ ID NO: 16570 - DNA, 40 bp, Artificial Sequence
  Description of Artificial Sequence: Synthetic primer
gttcacttatgtatttatgaatggaaaaagtttataatgc

SEQ ID NO: 16571 - DNA, 40 bp, Artificial Sequence
  Description of Artificial Sequence: Synthetic primer
agcccgggctctgcccacgctcccttcctcccagcacgac

SEQ ID NO: 16572 - DNA, 40 bp, Artificial Sequence
  Description of Artificial Sequence: Synthetic primer
gacctggagtgaatggagtgacccggtcatctttcagacc

SEQ ID NO: 16573 - DNA, 40 bp, Artificial Sequence
  Description of Artificial Sequence: Synthetic primer
caagaagagagactgacacagatgagaaatgaatatgagc

SEQ ID NO: 16574 - DNA, 40 bp, Artificial Sequence
  Description of Artificial Sequence: Synthetic primer
aaatatgaataaatgttatataaggaaactcacctatttg

SEQ ID NO: 16575 - DNA, 40 bp, Artificial Sequence
  Description of Artificial Sequence: Synthetic primer
atctcagaaccaatgtgtcaccttcaaacacagaatatgg

SEQ ID NO: 16576 - DNA, 40 bp, Artificial Sequence
  Description of Artificial Sequence: Synthetic primer
tcttttgttaaaataaataaaacattcaatgtttttctcc

SEQ ID NO: 16577 - DNA, 40 bp, Artificial Sequence
  Description of Artificial Sequence: Synthetic primer
gatgattcatattctgaagcagtaagacagaatgaagagc

SEQ ID NO: 16578 - DNA, 40 bp, Artificial Sequence
  Description of Artificial Sequence: Synthetic primer
tggtcacactctggacctactaatgggctgctattcatac

SEQ ID NO: 16579 - DNA, 40 bp, Artificial Sequence
  Description of Artificial Sequence: Synthetic primer
acttggataaagttccagagcctggagtgcccactgaaac

SEQ ID NO: 16580 - DNA, 40 bp, Artificial Sequence
  Description of Artificial Sequence: Synthetic primer
tttttgctaaacctatttcacaaatcaccaccgactgaag

SEQ ID NO: 16581 - DNA, 40 bp, Artificial Sequence
  Description of Artificial Sequence: Synthetic primer
gcagcttctggagaagcagggcgacggggaggccggcgtc

SEQ ID NO: 16582 - DNA, 40 bp, Artificial Sequence
  Description of Artificial Sequence: Synthetic primer
cctgtgaacctcggcggtgcgtccctgggactctgctccg

SEQ ID NO: 16583 - DNA, 40 bp, Artificial Sequence
  Description of Artificial Sequence: Synthetic primer
aatcagaccaaaaataaaaacaaaaaatgattgacttcag

SEQ ID NO: 16584 - DNA, 40 bp, Artificial Sequence
  Description of Artificial Sequence: Synthetic primer
ctctttgttggagtgcatctagcttgctggtgtattcttc

SEQ ID NO: 16585 - DNA, 40 bp, Artificial Sequence
  Description of Artificial Sequence: Synthetic primer
aatgtttgtactcttcaaagttccaagggtcataaaacag

SEQ ID NO: 16586 - DNA, 40 bp, Artificial Sequence
  Description of Artificial Sequence: Synthetic primer
agatttgtcaaattcacatctccttcaaaatagattgaac

SEQ ID NO: 16587 - DNA, 40 bp, Artificial Sequence
  Description of Artificial Sequence: Synthetic primer
tcagccatgccttagccttcccctctcagccagagaagac

SEQ ID NO: 16588 - DNA, 40 bp, Artificial Sequence
  Description of Artificial Sequence: Synthetic primer
gttttcaggagatttccagatgatgatgatgaaagtgaag

SEQ ID NO: 16589 - DNA, 40 bp, Artificial Sequence
  Description of Artificial Sequence: Synthetic primer
cccaggactggcttacccaaaagcagaccttggagaacag

SEQ ID NO: 16590 - DNA, 40 bp, Artificial Sequence
  Description of Artificial Sequence: Synthetic primer
gcgcccaggttcccctccccagcccggaccccgagccggg

SEQ ID NO: 16591 - DNA, 40 bp, Artificial Sequence
  Description of Artificial Sequence: Synthetic primer
gctccagcatgatgttggaatcctgacttgagaactgttc

SEQ ID NO: 16592 - DNA, 40 bp, Artificial Sequence
  Description of Artificial Sequence: Synthetic primer
gagtgcctgagccctgccaggaaattcaccaacaagaagg

SEQ ID NO: 16593 - DNA, 40 bp, Artificial Sequence
  Description of Artificial Sequence: Synthetic primer
acagcgatggctggcttcacactggagacatcggaaaatg

SEQ ID NO: 16594 - DNA, 40 bp, Artificial Sequence
  Description of Artificial Sequence: Synthetic primer
cagtaagggtatacctacatctgtaagggtcagtggactc

SEQ ID NO: 16595 - DNA, 40 bp, Artificial Sequence
  Description of Artificial Sequence: Synthetic primer
tgaacgccactgcctccatgctgtctgtgagaggtccatc

SEQ ID NO: 16596 - DNA, 40 bp, Artificial Sequence
  Description of Artificial Sequence: Synthetic primer
gtgccttcacacttaggcagctactactagaagcttactc

SEQ ID NO: 16597 - DNA, 40 bp, Artificial Sequence
  Description of Artificial Sequence: Synthetic primer
cacagcaacagcccgagccacccgcagcgggagcagccgg

SEQ ID NO: 16598 - DNA, 40 bp, Artificial Sequence
  Description of Artificial Sequence: Synthetic primer
aatagggcatgacagccggctctccgcggcgcgcctccgg

SEQ ID NO: 16599 - DNA, 40 bp, Artificial Sequence
  Description of Artificial Sequence: Synthetic primer
ctcttcagaggagaaagaaacagataacaccaaaccaaac

SEQ ID NO: 16600 - DNA, 40 bp, Artificial Sequence
  Description of Artificial Sequence: Synthetic primer
aaacgctgatggtctttggctactcctccagaacttttcc

SEQ ID NO: 16601 - DNA, 40 bp, Artificial Sequence
  Description of Artificial Sequence: Synthetic primer
tcacggcttctaagacattccaggtgacggcttatgcaac

SEQ ID NO: 16602 - DNA, 40 bp, Artificial Sequence
  Description of Artificial Sequence: Synthetic primer
gaccatgactcataagcttcttgtcattcttcattgcttg

SEQ ID NO: 16603 - DNA, 40 bp, Artificial Sequence
  Description of Artificial Sequence: Synthetic primer
ccaggccttgcacaaagatggtgttgttgtctgaattatc

SEQ ID NO: 16604 - DNA, 40 bp, Artificial Sequence
  Description of Artificial Sequence: Synthetic primer
ggttgtatacctgagtctctacctctccatcagtactttc

SEQ ID NO: 16605 - DNA, 40 bp, Artificial Sequence
  Description of Artificial Sequence: Synthetic primer
ttgttttattctaaataaattgtttcttttgaggaaaatg

SEQ ID NO: 16606 - DNA, 40 bp, Artificial Sequence
  Description of Artificial Sequence: Synthetic primer
aaaagtaacattttaaatataaaaaagaaaaacttcctgg

SEQ ID NO: 16607 - DNA, 40 bp, Artificial Sequence
  Description of Artificial Sequence: Synthetic primer
atcaccatggtaccatttgaccaaaagtcaggaggaaaag

SEQ ID NO: 16608 - DNA, 40 bp, Artificial Sequence
  Description of Artificial Sequence: Synthetic primer
gatcgtcagccgcttcctccagggcaagccccggctgagc

SEQ ID NO: 16609 - DNA, 40 bp, Artificial Sequence
  Description of Artificial Sequence: Synthetic primer
actgcctctgagcatttccctaactctttccaaatgttgc

SEQ ID NO: 16610 - DNA, 40 bp, Artificial Sequence
  Description of Artificial Sequence: Synthetic primer
cataagattcagggaaccatgtgcaggactcagccagttc

SEQ ID NO: 16611 - DNA, 40 bp, Artificial Sequence
  Description of Artificial Sequence: Synthetic primer
caaaagagaatgaagctccacaagtctctggatcaattcc

SEQ ID NO: 16612 - DNA, 40 bp, Artificial Sequence
  Description of Artificial Sequence: Synthetic primer
aaggcctttctactcaggctaatgacaaacacaataaagg

SEQ ID NO: 16613 - DNA, 40 bp, Artificial Sequence
  Description of Artificial Sequence: Synthetic primer
aggcttttttagtaatagaacggatccgatttccttggag

SEQ ID NO: 16614 - DNA, 40 bp, Artificial Sequence
  Description of Artificial Sequence: Synthetic primer
tgaattactgtagcaatttaagcaaatacaatcttcttgg

SEQ ID NO: 16615 - DNA, 40 bp, Artificial Sequence
  Description of Artificial Sequence: Synthetic primer
tattaaaagcactgattttcaaactttttgatttaagaac

SEQ ID NO: 16616 - DNA, 40 bp, Artificial Sequence
  Description of Artificial Sequence: Synthetic primer
gctgctgctgttattcagcgttgttacagaaaatataaac

SEQ ID NO: 16617 - DNA, 40 bp, Artificial Sequence
  Description of Artificial Sequence: Synthetic primer
aagtttaacaagtccattaatttagcagattgataacagg

SEQ ID NO: 16618 - DNA, 40 bp, Artificial Sequence
  Description of Artificial Sequence: Synthetic primer
tctaccgcgtgtccggtgtggccacggacatccaggcact

SEQ ID NO: 16619 - DNA, 40 bp, Artificial Sequence
  Description of Artificial Sequence: Synthetic primer
aggtattggtaggactgatcgtaggaccacggtggggatg

SEQ ID NO: 16620 - DNA, 40 bp, Artificial Sequence
  Description of Artificial Sequence: Synthetic primer
tatgcatatgcctgttggttcataccattgtgcatatttg

SEQ ID NO: 16621 - DNA, 40 bp, Artificial Sequence
  Description of Artificial Sequence: Synthetic primer
gctcccacttgagcacgatgtcccggcgcttgatgtggtg

SEQ ID NO: 16622 - DNA, 40 bp, Artificial Sequence
  Description of Artificial Sequence: Synthetic primer
gacggagtctcatatgaaaatagtgagaaagtcagaaatg

SEQ ID NO: 16623 - DNA, 40 bp, Artificial Sequence
  Description of Artificial Sequence: Synthetic primer
cccgagttacaggggctggtgaccgagcacgtcttcttac

SEQ ID NO: 16624 - DNA, 40 bp, Artificial Sequence
  Description of Artificial Sequence: Synthetic primer
tcatgggcaagggcccctggcccacatgcccaatgccagc

SEQ ID NO: 16625 - DNA, 40 bp, Artificial Sequence
  Description of Artificial Sequence: Synthetic primer
aaaaaaataaaacagtatctcttaatcactggatccatag

SEQ ID NO: 16626 - DNA, 40 bp, Artificial Sequence
  Description of Artificial Sequence: Synthetic primer
acttatacagatgcaatacttaaaatattctcttaagtgc

SEQ ID NO: 16627 - DNA, 40 bp, Artificial Sequence
  Description of Artificial Sequence: Synthetic primer
cccgctcgccctgaacccagtgcctgcagccatggctccc

SEQ ID NO: 16628 - DNA, 40 bp, Artificial Sequence
  Description of Artificial Sequence: Synthetic primer
tacgcactggcgctgcaacaagaccctgcccatcgctttc

SEQ ID NO: 16629 - DNA, 40 bp, Artificial Sequence
  Description of Artificial Sequence: Synthetic primer
cgcagcagcctcctaccatctccttcatactcccatgagc

SEQ ID NO: 16630 - DNA, 40 bp, Artificial Sequence
  Description of Artificial Sequence: Synthetic primer
tctggatctttcaagtagcctttgaacacatttggtcctc

SEQ ID NO: 16631 - DNA, 40 bp, Artificial Sequence
  Description of Artificial Sequence: Synthetic primer
tcaggatctcctgtgtctgcatcttctccagaagtgagag

SEQ ID NO: 16632 - DNA, 40 bp, Artificial Sequence
  Description of Artificial Sequence: Synthetic primer
cgcttctgcaccggtgacgcaaccgctgtgtctccgccag

SEQ ID NO: 16633 - DNA, 40 bp, Artificial Sequence
  Description of Artificial Sequence: Synthetic primer
ttccttctgggctctgcgtggcggggctgggtgggcttcc

SEQ ID NO: 16634 - DNA, 40 bp, Artificial Sequence
  Description of Artificial Sequence: Synthetic primer
ggtggcgcggcagacgcagcggtaggagccgacctcgttg

SEQ ID NO: 16635 - DNA, 40 bp, Artificial Sequence
  Description of Artificial Sequence: Synthetic primer
tgtctcggaaactttcggagcgaggcggaggccgtctttc

SEQ ID NO: 16636 - DNA, 40 bp, Artificial Sequence
  Description of Artificial Sequence: Synthetic primer
ggtataatactctagaattgtgtaacattaaagtgtaaac

SEQ ID NO: 16637 - DNA, 40 bp, Artificial Sequence
  Description of Artificial Sequence: Synthetic primer
cacgcggcagcacctctgagccggagggcaccagggactc

SEQ ID NO: 16638 - DNA, 40 bp, Artificial Sequence
  Description of Artificial Sequence: Synthetic primer
tccagcttcggtcgaggggtggcatcatgtagttgtgaac

SEQ ID NO: 16639 - DNA, 40 bp, Artificial Sequence
  Description of Artificial Sequence: Synthetic primer
atttttttggtggcaaataaagataaatttcattctgttc

SEQ ID NO: 16640 - DNA, 40 bp, Artificial Sequence
  Description of Artificial Sequence: Synthetic primer
aggttctggttctgagaggccactgttggtttgagaagtc

SEQ ID NO: 16641 - DNA, 40 bp, Artificial Sequence
  Description of Artificial Sequence: Synthetic primer
ctacagtttaaaacaaactttaaaccactatcttgcactg

SEQ ID NO: 16642 - DNA, 40 bp, Artificial Sequence
  Description of Artificial Sequence: Synthetic primer
caacttaaggttgttcctcgattccagcctatcagtgaac

SEQ ID NO: 16643 - DNA, 40 bp, Artificial Sequence
  Description of Artificial Sequence: Synthetic primer
ccaacagggctcaagctggtattagaagaaggggttagag

SEQ ID NO: 16644 - DNA, 40 bp, Artificial Sequence
  Description of Artificial Sequence: Synthetic primer
attttttctagtccactgtcagaatctctcattgctttcc

SEQ ID NO: 16645 - DNA, 40 bp, Artificial Sequence
  Description of Artificial Sequence: Synthetic primer
aaagcagatggtttgttaagagttcttactgtcccatgtc

SEQ ID NO: 16646 - DNA, 40 bp, Artificial Sequence
  Description of Artificial Sequence: Synthetic primer
tctcagataaatcacacatgatccaactggggataactgg

SEQ ID NO: 16647 - DNA, 40 bp, Artificial Sequence
  Description of Artificial Sequence: Synthetic primer
tcccagacttgcctgtcttccttcctgttcctccaaatcc

SEQ ID NO: 16648 - DNA, 40 bp, Artificial Sequence
  Description of Artificial Sequence: Synthetic primer
cctacagaatgaatgcacacaatttgacacattttcttag

SEQ ID NO: 16649 - DNA, 40 bp, Artificial Sequence
  Description of Artificial Sequence: Synthetic primer
taatttatgtgaaaaaaataaataaaagcctccggatccg

SEQ ID NO: 16650 - DNA, 40 bp, Artificial Sequence
  Description of Artificial Sequence: Synthetic primer
gcgcttccccgggtggaggcggccggggagccgggacttg

SEQ ID NO: 16651 - DNA, 40 bp, Artificial Sequence
  Description of Artificial Sequence: Synthetic primer
gtgaccttcctggagaaggtagttggtgcactggtcatag

SEQ ID NO: 16652 - DNA, 40 bp, Artificial Sequence
  Description of Artificial Sequence: Synthetic primer
tgccctcttccgaggcagagccggcttctcacttttgtgc

SEQ ID NO: 16653 - DNA, 40 bp, Artificial Sequence
  Description of Artificial Sequence: Synthetic primer
ccaagacagtcttccacaagatccagcctcttttcaccag

SEQ ID NO: 16654 - DNA, 40 bp, Artificial Sequence
  Description of Artificial Sequence: Synthetic primer
tcattggatatttctgatccttattgcattgtacctaaag

SEQ ID NO: 16655 - DNA, 40 bp, Artificial Sequence
  Description of Artificial Sequence: Synthetic primer
tcttcctgtaaggacttaaaaagacttttctccggaacac

SEQ ID NO: 16656 - DNA, 40 bp, Artificial Sequence
  Description of Artificial Sequence: Synthetic primer
gggtgctggaagagatcgggaataatagcgcagaccaatg

SEQ ID NO: 16657 - DNA, 40 bp, Artificial Sequence
  Description of Artificial Sequence: Synthetic primer
cgctttctctttcgggcctgcacgagggtttctgctttgc

SEQ ID NO: 16658 - DNA, 40 bp, Artificial Sequence
  Description of Artificial Sequence: Synthetic primer
aaagagaatatcaacaatcaaaaataatccccaaatatcc

SEQ ID NO: 16659 - DNA, 40 bp, Artificial Sequence
  Description of Artificial Sequence: Synthetic primer
tgcctccatgctggcagtcaccttcagtggtggggacaag

SEQ ID NO: 16660 - DNA, 40 bp, Artificial Sequence
  Description of Artificial Sequence: Synthetic primer
gacacaagatcatgttgttcttcaggaagaatttgtctcc

SEQ ID NO: 16661 - DNA, 40 bp, Artificial Sequence
  Description of Artificial Sequence: Synthetic primer
tgctgaaggtttttaataacaaaattacaaatactctatc

SEQ ID NO: 16662 - DNA, 40 bp, Artificial Sequence
  Description of Artificial Sequence: Synthetic primer
ccttattaaatagggattgtatcaatattgaaatgaagac

SEQ ID NO: 16663 - DNA, 40 bp, Artificial Sequence
  Description of Artificial Sequence: Synthetic primer
cgaggaaatgtcacaacaaactcgccagcacactgattgg

SEQ ID NO: 16664 - DNA, 40 bp, Artificial Sequence
  Description of Artificial Sequence: Synthetic primer
aaattgttgcacaaatgcatacatttaaggtatctgtatg

SEQ ID NO: 16665 - DNA, 40 bp, Artificial Sequence
  Description of Artificial Sequence: Synthetic primer
tgccctctcctatcctcttgccatatgaatagcgttttcc

SEQ ID NO: 16666 - DNA, 40 bp, Artificial Sequence
  Description of Artificial Sequence: Synthetic primer
cttctttctttgggaatatttgaatcttgtctcaatgctc

SEQ ID NO: 16667 - DNA, 40 bp, Artificial Sequence
  Description of Artificial Sequence: Synthetic primer
caccccaccaatatttgcatccaaaaagatgtgctcactg

SEQ ID NO: 16668 - DNA, 40 bp, Artificial Sequence
  Description of Artificial Sequence: Synthetic primer
atcctcttgaggtatgatgctgggagaaacagctgatgac

SEQ ID NO: 16669 - DNA, 40 bp, Artificial Sequence
  Description of Artificial Sequence: Synthetic primer
aggaagctgagcggctcttcagtaaatcctcggttacctc

SEQ ID NO: 16670 - DNA, 40 bp, Artificial Sequence
  Description of Artificial Sequence: Synthetic primer
tatcaatggaaaatcccactcagtttttgatgaacagttt

SEQ ID NO: 16671 - DNA, 40 bp, Artificial Sequence
  Description of Artificial Sequence: Synthetic primer
ccaatgctatttaacaaattgaagaataccatcagcaagt

SEQ ID NO: 16672 - DNA, 40 bp, Artificial Sequence
  Description of Artificial Sequence: Synthetic primer
ggacgggcctttgtccgaggagcggccactgcccaaggtg

SEQ ID NO: 16673 - DNA, 40 bp, Artificial Sequence
  Description of Artificial Sequence: Synthetic primer
gaagatcatggacaggttcgaagaggttgtgtaccaggcc

SEQ ID NO: 16674 - DNA, 40 bp, Artificial Sequence
  Description of Artificial Sequence: Synthetic primer
aattcgaagccattggaatggaaggactcaggccggaatc

SEQ ID NO: 16675 - DNA, 40 bp, Artificial Sequence
  Description of Artificial Sequence: Synthetic primer
caggctgctgggattcagctgggttttgtcgataatcttg

SEQ ID NO: 16676 - DNA, 40 bp, Artificial Sequence
  Description of Artificial Sequence: Synthetic primer
gtctgtgttctggttgcgctggccattgtctatctcattg

SEQ ID NO: 16677 - DNA, 40 bp, Artificial Sequence
  Description of Artificial Sequence: Synthetic primer
ctgctcactggagccggactcccaggttgtaattctaatg

SEQ ID NO: 16678 - DNA, 40 bp, Artificial Sequence
  Description of Artificial Sequence: Synthetic primer
ggacttccaaagctgggaatcctattttttattatgttgc

SEQ ID NO: 16679 - DNA, 40 bp, Artificial Sequence
  Description of Artificial Sequence: Synthetic primer
ctttgtctttctgttacacatacagttttgatttatttac

SEQ ID NO: 16680 - DNA, 40 bp, Artificial Sequence
  Description of Artificial Sequence: Synthetic primer
ccctttttgtacccctgagcagcacaaggagtgtgcagag

SEQ ID NO: 16681 - DNA, 40 bp, Artificial Sequence
  Description of Artificial Sequence: Synthetic primer
tcgttgccaattagggaatggaccgtttgggtccctttag

SEQ ID NO: 16682 - DNA, 40 bp, Artificial Sequence
  Description of Artificial Sequence: Synthetic primer
gtcctggaggggaagggaaagaaggcggcagccggcaagg

SEQ ID NO: 16683 - DNA, 40 bp, Artificial Sequence
  Description of Artificial Sequence: Synthetic primer
ttactacgtactcctggagcctctctccggaagggaaaag

SEQ ID NO: 16684 - DNA, 40 bp, Artificial Sequence
  Description of Artificial Sequence: Synthetic primer
catcacccggaagtaggcccaaactgtgtcttcccaggtg

SEQ ID NO: 16685 - DNA, 40 bp, Artificial Sequence
  Description of Artificial Sequence: Synthetic primer
ttagaaaaaatgagccaatcatcaaagtcagtgaccatag

SEQ ID NO: 16686 - DNA, 40 bp, Artificial Sequence
  Description of Artificial Sequence: Synthetic primer
atagagtcacctggaatcttggcagggagcggccgtggtg

SEQ ID NO: 16687 - DNA, 40 bp, Artificial Sequence
  Description of Artificial Sequence: Synthetic primer
gtgggttttaacatggacctttaagtaggaggcagaggag

SEQ ID NO: 16688 - DNA, 40 bp, Artificial Sequence
  Description of Artificial Sequence: Synthetic primer
gtaaaccgcagtcacacattagggttagtattaaactttg

SEQ ID NO: 16689 - DNA, 40 bp, Artificial Sequence
  Description of Artificial Sequence: Synthetic primer
ggaggtactgcattcattaaagtatacatgttatcaccag

SEQ ID NO: 16690 - DNA, 40 bp, Artificial Sequence
  Description of Artificial Sequence: Synthetic primer
tcatattcaacttctggtttagataagtctcggcagaaag

SEQ ID NO: 16691 - DNA, 40 bp, Artificial Sequence
  Description of Artificial Sequence: Synthetic primer
accagtaaagaatgggtgctgcttcacctcataggcactg

SEQ ID NO: 16692 - DNA, 40 bp, Artificial Sequence
  Description of Artificial Sequence: Synthetic primer
gcaaacagtctttccattcccaagacattctaggttgtag

SEQ ID NO: 16693 - DNA, 40 bp, Artificial Sequence
  Description of Artificial Sequence: Synthetic primer
ccccacagctgcggctgctactccgatggcaaatattacg

SEQ ID NO: 16694 - DNA, 40 bp, Artificial Sequence
  Description of Artificial Sequence: Synthetic primer
gactgtgtgtaagataaattccctgaccccagtctgatcc

SEQ ID NO: 16695 - DNA, 40 bp, Artificial Sequence
  Description of Artificial Sequence: Synthetic primer
agtcatcctgtacaccctcgtcagcggctccctgcccttc

SEQ ID NO: 16696 - DNA, 40 bp, Artificial Sequence
  Description of Artificial Sequence: Synthetic primer
caatggactgtgatgtgatcaaccggatttttaggatatg

SEQ ID NO: 16697 - DNA, 40 bp, Artificial Sequence
  Description of Artificial Sequence: Synthetic primer
ctgacatgtcgagactgtcagttgttagaacataaagagc

SEQ ID NO: 16698 - DNA, 40 bp, Artificial Sequence
  Description of Artificial Sequence: Synthetic primer
ggcaaaagaatgtatggctggaacttcagggtcagaggag

SEQ ID NO: 16699 - DNA, 40 bp, Artificial Sequence
  Description of Artificial Sequence: Synthetic primer
tggaccccttgtacttgaaacgtttgccaagttacctgtc

SEQ ID NO: 16700 - DNA, 40 bp, Artificial Sequence
  Description of Artificial Sequence: Synthetic primer
ttcaaaactaaaacgacaccaactggttcatactggagag

SEQ ID NO: 16701 - DNA, 40 bp, Artificial Sequence
  Description of Artificial Sequence: Synthetic primer
caatggcaatataaccacttctccctcctgagacttcagc

SEQ ID NO: 16702 - DNA, 40 bp, Artificial Sequence
  Description of Artificial Sequence: Synthetic primer
aaagctggtactggctaatattctgaaatgcaaatctgtg

SEQ ID NO: 16703 - DNA, 40 bp, Artificial Sequence
  Description of Artificial Sequence: Synthetic primer
ttaaggaaacaagttgaaaataaaaacaagtatattgaag

SEQ ID NO: 16704 - DNA, 40 bp, Artificial Sequence
  Description of Artificial Sequence: Synthetic primer
cctaaaaggattgtacaccttagaagtgcttaaggaagag

SEQ ID NO: 16705 - DNA, 40 bp, Artificial Sequence
  Description of Artificial Sequence: Synthetic primer
ccagctgagaaaagccgaggcacaggtatagctgggcacc

SEQ ID NO: 16706 - DNA, 40 bp, Artificial Sequence
  Description of Artificial Sequence: Synthetic primer
gatgtatatgatatttatccttattggtaagatgcttttg

SEQ ID NO: 16707 - DNA, 40 bp, Artificial Sequence
  Description of Artificial Sequence: Synthetic primer
agtgaagggaaaaaagcctagacaaacattttgtcagaac

SEQ ID NO: 16708 - DNA, 40 bp, Artificial Sequence
  Description of Artificial Sequence: Synthetic primer
ctggaagaaccgggagagcaaacatgatttttcttatttc

SEQ ID NO: 16709 - DNA, 40 bp, Artificial Sequence
  Description of Artificial Sequence: Synthetic primer
caaatgcttcatatacatgagaataacatactgcatggtg

SEQ ID NO: 16710 - DNA, 40 bp, Artificial Sequence
  Description of Artificial Sequence: Synthetic primer
catagttgaagagctagccttaaaatttgtgagaggttgc

SEQ ID NO: 16711 - DNA, 40 bp, Artificial Sequence
  Description of Artificial Sequence: Synthetic primer
aactttcaatattttaactttttgtttttatttcttttag

SEQ ID NO: 16712 - DNA, 40 bp, Artificial Sequence
  Description of Artificial Sequence: Synthetic primer
cctgaactggagaaaagtcagtgaaaatggtcaagcacag

SEQ ID NO: 16713 - DNA, 40 bp, Artificial Sequence
  Description of Artificial Sequence: Synthetic primer
ttggcataaatgaactaaatgttccacagtgatcttcaac

SEQ ID NO: 16714 - DNA, 40 bp, Artificial Sequence
  Description of Artificial Sequence: Synthetic primer
atcagtcagaaagcaggttttttcttcttcaaaaccattc

SEQ ID NO: 16715 - DNA, 40 bp, Artificial Sequence
  Description of Artificial Sequence: Synthetic primer
tttctatgagaagcacttcatagggagaagcacttatgac

SEQ ID NO: 16716 - DNA, 40 bp, Artificial Sequence
  Description of Artificial Sequence: Synthetic primer
catcttcaacaaaatcaatgtctctcaagtcccattctgc

SEQ ID NO: 16717 - DNA, 40 bp, Artificial Sequence
  Description of Artificial Sequence: Synthetic primer
ggagctgggatcttcaactggggacagtacagtaaagaac

SEQ ID NO: 16718 - DNA, 40 bp, Artificial Sequence
  Description of Artificial Sequence: Synthetic primer
tgagaggaacaagaaggtggaaggcagtgttatttatttc

SEQ ID NO: 16719 - DNA, 40 bp, Artificial Sequence
  Description of Artificial Sequence: Synthetic primer
taataaaagaaacccactgaatgccggctcatgggagtgg

SEQ ID NO: 16720 - DNA, 40 bp, Artificial Sequence
  Description of Artificial Sequence: Synthetic primer
aaagctttgcaacttatagtaacagcacgaactacacgag

SEQ ID NO: 16721 - DNA, 40 bp, Artificial Sequence
  Description of Artificial Sequence: Synthetic primer
cttcagcctccttctggatttcctcaataagcttctcatc

SEQ ID NO: 16722 - DNA, 40 bp, Artificial Sequence
  Description of Artificial Sequence: Synthetic primer
taatttttccttcctgagtggtgggctcttcattctttac

SEQ ID NO: 16723 - DNA, 40 bp, Artificial Sequence
  Description of Artificial Sequence: Synthetic primer
ctcggctcccaagtgcaccagagcggccgggaagaggttc

SEQ ID NO: 16724 - DNA, 40 bp, Artificial Sequence
  Description of Artificial Sequence: Synthetic primer
ccagcgcctcagaagagaggacgcggccgccccaggaagc

SEQ ID NO: 16725 - DNA, 40 bp, Artificial Sequence
  Description of Artificial Sequence: Synthetic primer
caggaaacaagtgatatgaccctagaactcaagaatcagc

SEQ ID NO: 16726 - DNA, 40 bp, Artificial Sequence
  Description of Artificial Sequence: Synthetic primer
atcagcggggcagctctggacataccccacctccctctgg

SEQ ID NO: 16727 - DNA, 40 bp, Artificial Sequence
  Description of Artificial Sequence: Synthetic primer
gcaggctcataatcatcagtgggttctgtttttataattg

SEQ ID NO: 16728 - DNA, 40 bp, Artificial Sequence
  Description of Artificial Sequence: Synthetic primer
ttttaacactttacttgggtttaccaagcctcaactggac

SEQ ID NO: 16729 - DNA, 40 bp, Artificial Sequence
  Description of Artificial Sequence: Synthetic primer
ttgtgcgaaagaaggaacgctgaacctgtccacgggaaac

SEQ ID NO: 16730 - DNA, 40 bp, Artificial Sequence
  Description of Artificial Sequence: Synthetic primer
tggctgccctgctggccgcgccgggagcggcgctggcccc

SEQ ID NO: 16731 - DNA, 40 bp, Artificial Sequence
  Description of Artificial Sequence: Synthetic primer
gtgggttgcacgcaggtggcagagttccctcaacataagg

SEQ ID NO: 16732 - DNA, 40 bp, Artificial Sequence
  Description of Artificial Sequence: Synthetic primer
gccattatcttataagaatgggtgtgctaagttacttggc

SEQ ID NO: 16733 - DNA, 40 bp, Artificial Sequence
  Description of Artificial Sequence: Synthetic primer
cagatgaagctgtttgtgggaaaggagagtagaaatatgc

SEQ ID NO: 16734 - DNA, 40 bp, Artificial Sequence
  Description of Artificial Sequence: Synthetic primer
acgggcagcaaaatctttaaacatgtcatcttcttttaac

SEQ ID NO: 16735 - DNA, 40 bp, Artificial Sequence
  Description of Artificial Sequence: Synthetic primer
aggcttcatatctccctgattcaattctgtcccgtatttc

SEQ ID NO: 16736 - DNA, 40 bp, Artificial Sequence
  Description of Artificial Sequence: Synthetic primer
ttgaaatattgaaacttccatcatcttctaagagatcaac

SEQ ID NO: 16737 - DNA, 40 bp, Artificial Sequence
  Description of Artificial Sequence: Synthetic primer
tccaaccacatgaacccggtcagcaacggcctgtctcctc

SEQ ID NO: 16738 - DNA, 40 bp, Artificial Sequence
  Description of Artificial Sequence: Synthetic primer
attagagatatttgatctaacacctcagtatgataacgtc

SEQ ID NO: 16739 - DNA, 40 bp, Artificial Sequence
  Description of Artificial Sequence: Synthetic primer
ttgctaaatatatgacaaccccggtcactttattgctatg

SEQ ID NO: 16740 - DNA, 40 bp, Artificial Sequence
  Description of Artificial Sequence: Synthetic primer
ttaatctttgtaatctcactaattttcatgataaatgaag

SEQ ID NO: 16741 - DNA, 40 bp, Artificial Sequence
  Description of Artificial Sequence: Synthetic primer
agatactgctgtagctttggcttctggaaatgtgaaattg

SEQ ID NO: 16742 - DNA, 40 bp, Artificial Sequence
  Description of Artificial Sequence: Synthetic primer
ttctgaggctttaaaacatacactgtgcaggcaggctaag

SEQ ID NO: 16743 - DNA, 40 bp, Artificial Sequence
  Description of Artificial Sequence: Synthetic primer
attgtcaaaatacccaggttccattgatgtgactcggttg

SEQ ID NO: 16744 - DNA, 40 bp, Artificial Sequence
  Description of Artificial Sequence: Synthetic primer
gggctttaggttgtgttcagactgtagaaaagtccttacc

SEQ ID NO: 16745 - DNA, 40 bp, Artificial Sequence
  Description of Artificial Sequence: Synthetic primer
actgtaaagttccttggcacgctcatgtgcagtacgtttc

SEQ ID NO: 16746 - DNA, 40 bp, Artificial Sequence
  Description of Artificial Sequence: Synthetic primer
cagcggcaggaatgaacgccgacccctcgcgcgggctgac

SEQ ID NO: 16747 - DNA, 40 bp, Artificial Sequence
  Description of Artificial Sequence: Synthetic primer
caccatggccatgactgtggtcaccaaagaaaagaacaag

SEQ ID NO: 16748 - DNA, 40 bp, Artificial Sequence
  Description of Artificial Sequence: Synthetic primer
atatacacaaaaggatctgtttgcaaaatatgagaattac

SEQ ID NO: 16749 - DNA, 40 bp, Artificial Sequence
  Description of Artificial Sequence: Synthetic primer
cttaggaattctaaatgatctctccgactgtgaagataag

SEQ ID NO: 16750 - DNA, 40 bp, Artificial Sequence
  Description of Artificial Sequence: Synthetic primer
ttactgtcgactgaccccaagtatttggccacagggtgag

SEQ ID NO: 16751 - DNA, 40 bp, Artificial Sequence
  Description of Artificial Sequence: Synthetic primer
ccctcctcccaacatgaccaccaacgagaggagagtcatc

SEQ ID NO: 16752 - DNA, 40 bp, Artificial Sequence
  Description of Artificial Sequence: Synthetic primer
ctgcaacctatgggcagaccgcctatgcaacttcttatgg

SEQ ID NO: 16753 - DNA, 40 bp, Artificial Sequence
  Description of Artificial Sequence: Synthetic primer
ctgacttaatgtgctcctcaaatgaaaccgttttattatc

SEQ ID NO: 16754 - DNA, 40 bp, Artificial Sequence
  Description of Artificial Sequence: Synthetic primer
aaaccaatttagacagacacctaaagaaacatgagaatgg

SEQ ID NO: 16755 - DNA, 40 bp, Artificial Sequence
  Description of Artificial Sequence: Synthetic primer
attggtcattttaatggaaaatttattaagacaccaccag

SEQ ID NO: 16756 - DNA, 40 bp, Artificial Sequence
  Description of Artificial Sequence: Synthetic primer
cccctactcctcctacagcgaggcctggcgcttccccaac

SEQ ID NO: 16757 - DNA, 40 bp, Artificial Sequence
  Description of Artificial Sequence: Synthetic primer
tttaaaatttaccttgtttaaagaacttctgacttttgag

SEQ ID NO: 16758 - DNA, 40 bp, Artificial Sequence
  Description of Artificial Sequence: Synthetic primer
tcctctgcccggtctgcagcgcagccgtatccaggtggtg

SEQ ID NO: 16759 - DNA, 40 bp, Artificial Sequence
  Description of Artificial Sequence: Synthetic primer
gccaatttttcagactgctttgctatgaagggctatgttg

SEQ ID NO: 16760 - DNA, 40 bp, Artificial Sequence
  Description of Artificial Sequence: Synthetic primer
acatatatgtgaaaatttaagtcccattctccaactaaag

SEQ ID NO: 16761 - DNA, 40 bp, Artificial Sequence
  Description of Artificial Sequence: Synthetic primer
ccccaccctgaaagccctgagctttctgctatcaaagagg

SEQ ID NO: 16762 - DNA, 40 bp, Artificial Sequence
  Description of Artificial Sequence: Synthetic primer
ttcttccaggctcctctctgctcttaacagccacaaggac

SEQ ID NO: 16763 - DNA, 40 bp, Artificial Sequence
  Description of Artificial Sequence: Synthetic primer
ataccaggaaattctgttctactcgtcacaaatctcaatc

SEQ ID NO: 16764 - DNA, 40 bp, Artificial Sequence
  Description of Artificial Sequence: Synthetic primer
gggcactgaggaggccaaaactggcaataataaaccattc

SEQ ID NO: 16765 - DNA, 40 bp, Artificial Sequence
  Description of Artificial Sequence: Synthetic primer
ccgagccccaggagcagagggagcgggctcatctgcagag

SEQ ID NO: 16766 - DNA, 40 bp, Artificial Sequence
  Description of Artificial Sequence: Synthetic primer
gaaagcaaggagtcaaaggtaggtcggggagggtcatctg

SEQ ID NO: 16767 - DNA, 40 bp, Artificial Sequence
  Description of Artificial Sequence: Synthetic primer
tctcgcccctgccgcctgccccagcttccccgactccatc

SEQ ID NO: 16768 - DNA, 40 bp, Artificial Sequence
  Description of Artificial Sequence: Synthetic primer
tgttctctcttctccacctcccacaaaggagagctagcag

SEQ ID NO: 16769 - DNA, 40 bp, Artificial Sequence
  Description of Artificial Sequence: Synthetic primer
gagacgcccgcaccgggaggcaagttgccaccaagtttgc

SEQ ID NO: 16770 - DNA, 40 bp, Artificial Sequence
  Description of Artificial Sequence: Synthetic primer
agagaagctggcctcctaccaggctgcgcgcaaagacagc

SEQ ID NO: 16771 - DNA, 40 bp, Artificial Sequence
  Description of Artificial Sequence: Synthetic primer
aaaagttaatttaccacctcagtaactccaagaatcttcc

SEQ ID NO: 16772 - DNA, 40 bp, Artificial Sequence
  Description of Artificial Sequence: Synthetic primer
atttttaaagataactcagcatgtttgtaaagcaggatac

SEQ ID NO: 16773 - DNA, 40 bp, Artificial Sequence
  Description of Artificial Sequence: Synthetic primer
aaatgtattataactttaacttttatcctaatttggtttc

SEQ ID NO: 16774 - DNA, 40 bp, Artificial Sequence
  Description of Artificial Sequence: Synthetic primer
ggcggagggtcaggtggaccacaggtggcaccgggctgag

SEQ ID NO: 16775 - DNA, 40 bp, Artificial Sequence
  Description of Artificial Sequence: Synthetic primer
acggggctgctcccagcagaatccacaaagtagctcattc

SEQ ID NO: 16776 - DNA, 40 bp, Artificial Sequence
  Description of Artificial Sequence: Synthetic primer
ggattcagggccaccaacagtttgtacattcacctttctg

SEQ ID NO: 16777 - DNA, 40 bp, Artificial Sequence
  Description of Artificial Sequence: Synthetic primer
ggtatctgatgtctgcaccagaacaagagaacctctgacg

SEQ ID NO: 16778 - DNA, 40 bp, Artificial Sequence
  Description of Artificial Sequence: Synthetic primer
tcagactctgaagagccacctgcgaatccacacaggagag

SEQ ID NO: 16779 - DNA, 40 bp, Artificial Sequence
  Description of Artificial Sequence: Synthetic primer
ggacgccctggtatggccgggccggggctggggcttgctc

SEQ ID NO: 16780 - DNA, 40 bp, Artificial Sequence
  Description of Artificial Sequence: Synthetic primer
cacaaacttcaaaatgtttctcatttgtcacacaaggttc

SEQ ID NO: 16781 - DNA, 40 bp, Artificial Sequence
  Description of Artificial Sequence: Synthetic primer
ctgattagcatttgtgtacagtcatttcttgtatttagag

SEQ ID NO: 16782 - DNA, 40 bp, Artificial Sequence
  Description of Artificial Sequence: Synthetic primer
gtgatccacggtcatctgcaggatctcggctttttctagc

SEQ ID NO: 16783 - DNA, 40 bp, Artificial Sequence
  Description of Artificial Sequence: Synthetic primer
tttttgtcatgaactgtactactcctaattattgtaatgt

SEQ ID NO: 16784 - DNA, 40 bp, Artificial Sequence
  Description of Artificial Sequence: Synthetic primer
acacgcagctgcggcatgaaacagacatgttcaaccaaag

SEQ ID NO: 16785 - DNA, 40 bp, Artificial Sequence
  Description of Artificial Sequence: Synthetic primer
acggggcatttctacctgtgtttctgcagcacccccactg

SEQ ID NO: 16786 - DNA, 40 bp, Artificial Sequence
  Description of Artificial Sequence: Synthetic primer
taaacaggagaaaggctgacaaaccatgttcctttatgtg

SEQ ID NO: 16787 - DNA, 40 bp, Artificial Sequence
  Description of Artificial Sequence: Synthetic primer
agggacccggggtctcaaactgcccagcttgtcccacacc

SEQ ID NO: 16788 - DNA, 40 bp, Artificial Sequence
  Description of Artificial Sequence: Synthetic primer
atgtgcttgtgacaatacagcatggagatgtcaccaatcg

SEQ ID NO: 16789 - DNA, 40 bp, Artificial Sequence
  Description of Artificial Sequence: Synthetic primer
atctagtttgtaaaagagatggtgacgcatgtaaataaag

SEQ ID NO: 16790 - DNA, 40 bp, Artificial Sequence
  Description of Artificial Sequence: Synthetic primer
aagacatggaacagaatgattcactgggtaagactaaagg

SEQ ID NO: 16791 - DNA, 40 bp, Artificial Sequence
  Description of Artificial Sequence: Synthetic primer
ctggggtggccggtcacctggaggggtctcagagagtgag

SEQ ID NO: 16792 - DNA, 40 bp, Artificial Sequence
  Description of Artificial Sequence: Synthetic primer
taaaacaagtgtgatgccatatcaagtccatgttattctc

SEQ ID NO: 16793 - DNA, 40 bp, Artificial Sequence
  Description of Artificial Sequence: Synthetic primer
gggcagcaaagcagctgtcccggcttaacgcgcaaagttc

SEQ ID NO: 16794 - DNA, 40 bp, Artificial Sequence
  Description of Artificial Sequence: Synthetic primer
gaagcgagagccgagcgcggacccagccaggacccacagc

SEQ ID NO: 16795 - DNA, 40 bp, Artificial Sequence
  Description of Artificial Sequence: Synthetic primer
agaaataaatgttacctaattattacagccttaaagacaa

SEQ ID NO: 16796 - DNA, 40 bp, Artificial Sequence
  Description of Artificial Sequence: Synthetic primer
ataaatagaagcatttggaaaaagccaagtaattttaagg

SEQ ID NO: 16797 - DNA, 40 bp, Artificial Sequence
  Description of Artificial Sequence: Synthetic primer
tctacatgagcatcacattttccttggtgccactaactac

SEQ ID NO: 16798 - DNA, 40 bp, Artificial Sequence
  Description of Artificial Sequence: Synthetic primer
ttgtcagagaacctgttgaaatgtgaattaagaagctaag

SEQ ID NO: 16799 - DNA, 40 bp, Artificial Sequence
  Description of Artificial Sequence: Synthetic primer
aagagaatgatgctcaaaatctttccaaataaaatgttcc

SEQ ID NO: 16800 - DNA, 40 bp, Artificial Sequence
  Description of Artificial Sequence: Synthetic primer
ggtaatcagactctggggaaggagttaccagcactctctc

SEQ ID NO: 16801 - DNA, 40 bp, Artificial Sequence
  Description of Artificial Sequence: Synthetic primer
aggtttacacggggtctttttaatacaacgtttaatcatc

SEQ ID NO: 16802 - DNA, 40 bp, Artificial Sequence
  Description of Artificial Sequence: Synthetic primer
gctcctggaaaggctcagtctcaggagcatggggataaag

SEQ ID NO: 16803 - DNA, 40 bp, Artificial Sequence
  Description of Artificial Sequence: Synthetic primer
tatgtcaatacttagtgtttctcattttgaggactttttc

SEQ ID NO: 16804 - DNA, 40 bp, Artificial Sequence
  Description of Artificial Sequence: Synthetic primer
ggcaatgggaggctgtggagccggcgaaataaaatcagag

SEQ ID NO: 16805 - DNA, 40 bp, Artificial Sequence
  Description of Artificial Sequence: Synthetic primer
cgtgtacagggtacatcattggaaatgagaaagggaggag

SEQ ID NO: 16806 - DNA, 40 bp, Artificial Sequence
  Description of Artificial Sequence: Synthetic primer
gcaccgcctcaatctgctcctggcaagctttgagacaatc

SEQ ID NO: 16807 - DNA, 40 bp, Artificial Sequence
  Description of Artificial Sequence: Synthetic primer
tttctgaaaagacttctgtctgtaggcaagtagacatagc

SEQ ID NO: 16808 - DNA, 40 bp, Artificial Sequence
  Description of Artificial Sequence: Synthetic primer
gaggctgaaaatgtggccttcgccaataaggaccaacatc

SEQ ID NO: 16809 - DNA, 40 bp, Artificial Sequence
  Description of Artificial Sequence: Synthetic primer
gatagacttgctcagagacagccacatcttccagctcttc

SEQ ID NO: 16810 - DNA, 40 bp, Artificial Sequence
  Description of Artificial Sequence: Synthetic primer
gaaacattcctgaacttggcggtaaagccacaggctggtc

SEQ ID NO: 16811 - DNA, 40 bp, Artificial Sequence
  Description of Artificial Sequence: Synthetic primer
atttcaagttttcacattcttccattatttgtctcttttc

SEQ ID NO: 16812 - DNA, 40 bp, Artificial Sequence
  Description of Artificial Sequence: Synthetic primer
ccagtggggtcagcggggcacggtgtccagtgggccaggt

SEQ ID NO: 16813 - DNA, 40 bp, Artificial Sequence
  Description of Artificial Sequence: Synthetic primer
ggccatcaaacccgtatttgagcgtttccagtctgtcatc

SEQ ID NO: 16814 - DNA, 40 bp, Artificial Sequence
  Description of Artificial Sequence: Synthetic primer
agctgaacctgaagctggttccgtggccggggccagagtg

SEQ ID NO: 16815 - DNA, 40 bp, Artificial Sequence
  Description of Artificial Sequence: Synthetic primer
ccatgaatgggtacagcatgtcccagccaatgatgaacag

SEQ ID NO: 16816 - DNA, 40 bp, Artificial Sequence
  Description of Artificial Sequence: Synthetic primer
tcggctggcctggggacccaatctgctgcttcatctgctg

SEQ ID NO: 16817 - DNA, 40 bp, Artificial Sequence
  Description of Artificial Sequence: Synthetic primer
gactgcctcttgagaatggcttacttggattaaaaagcag

SEQ ID NO: 16818 - DNA, 40 bp, Artificial Sequence
  Description of Artificial Sequence: Synthetic primer
gattggggagcgcgtgcgcacactggtgctgggcctggtg

SEQ ID NO: 16819 - DNA, 40 bp, Artificial Sequence
  Description of Artificial Sequence: Synthetic primer
ctgtgcagttcttgtgccccaacatcagcgtggcctacag

SEQ ID NO: 16820 - DNA, 40 bp, Artificial Sequence
  Description of Artificial Sequence: Synthetic primer
ctttggggaaggccaccccaatctacctggacattcttgg

SEQ ID NO: 16821 - DNA, 40 bp, Artificial Sequence
  Description of Artificial Sequence: Synthetic primer
agagatctgtggttccagaagtaacaggagagacagcaac

SEQ ID NO: 16822 - DNA, 40 bp, Artificial Sequence
  Description of Artificial Sequence: Synthetic primer
cccagcgggccgatcagcgcttcgcgcaagctcccatttc

SEQ ID NO: 16823 - DNA, 40 bp, Artificial Sequence
  Description of Artificial Sequence: Synthetic primer
gaaagaagctacctgcaagctctatttttaccagatgctc

SEQ ID NO: 16824 - DNA, 40 bp, Artificial Sequence
  Description of Artificial Sequence: Synthetic primer
gcaccaaaggcaaggatttggacggtttctcattgatttc

SEQ ID NO: 16825 - DNA, 40 bp, Artificial Sequence
  Description of Artificial Sequence: Synthetic primer
atccctaaaggaggggcgttgatttacattattgttccag

SEQ ID NO: 16826 - DNA, 40 bp, Artificial Sequence
  Description of Artificial Sequence: Synthetic primer
cgtggttgatgtggtgcagtgggctggctgagtcctcctc

SEQ ID NO: 16827 - DNA, 40 bp, Artificial Sequence
  Description of Artificial Sequence: Synthetic primer
ggcagtgtgccaaaccagatgatgcctcgaataactccac

SEQ ID NO: 16828 - DNA, 40 bp, Artificial Sequence
  Description of Artificial Sequence: Synthetic primer
ctcccccacaaggaagaagctggaaagggcagtgccttag

SEQ ID NO: 16829 - DNA, 40 bp, Artificial Sequence
  Description of Artificial Sequence: Synthetic primer
tgaagaccgggatcctacacagtttgaagagagacatttg

SEQ ID NO: 16830 - DNA, 40 bp, Artificial Sequence
  Description of Artificial Sequence: Synthetic primer
gtgtaaagcatcttgggaggaaagagagagaatgttaaag

SEQ ID NO: 16831 - DNA, 40 bp, Artificial Sequence
  Description of Artificial Sequence: Synthetic primer
cagttggtagagtaaatgccgagaatcaaacagagtaacc

SEQ ID NO: 16832 - DNA, 40 bp, Artificial Sequence
  Description of Artificial Sequence: Synthetic primer
ggacagcagtttgcccaaatgttagttcaagatgaagagc

SEQ ID NO: 16833 - DNA, 40 bp, Artificial Sequence
  Description of Artificial Sequence: Synthetic primer
cctttgttgtattgctttctttaagtttttcattcagacg

SEQ ID NO: 16834 - DNA, 40 bp, Artificial Sequence
  Description of Artificial Sequence: Synthetic primer
tttccatctggggagtatgttgcagaagaaatctgtattg

SEQ ID NO: 16835 - DNA, 40 bp, Artificial Sequence
  Description of Artificial Sequence: Synthetic primer
gaagaagctgaagagcatggaggccgagatgatccagttg

SEQ ID NO: 16836 - DNA, 40 bp, Artificial Sequence
  Description of Artificial Sequence: Synthetic primer
ctgcgctggccaccgaggagggggtagggactctgttatc

SEQ ID NO: 16837 - DNA, 40 bp, Artificial Sequence
  Description of Artificial Sequence: Synthetic primer
ctcaaatttggagctgatggccacctggtcattgccacgg

SEQ ID NO: 16838 - DNA, 40 bp, Artificial Sequence
  Description of Artificial Sequence: Synthetic primer
cttggaaacaggctttggaagttcgggcttttaactcttc

SEQ ID NO: 16839 - DNA, 40 bp, Artificial Sequence
  Description of Artificial Sequence: Synthetic primer
ccggggaggcagtcctgggcgcaaagacaaaagccacgag

SEQ ID NO: 16840 - DNA, 40 bp, Artificial Sequence
  Description of Artificial Sequence: Synthetic primer
caagattgcacagctggaggagcagctggacaacgagacc

SEQ ID NO: 16841 - DNA, 40 bp, Artificial Sequence
  Description of Artificial Sequence: Synthetic primer
attcttccagtgtgaaatgatttgtcgagaagatgcacag

SEQ ID NO: 16842 - DNA, 40 bp, Artificial Sequence
  Description of Artificial Sequence: Synthetic primer
cgcgcgtctttgctttattcacaaaatacccaaaggaatc

SEQ ID NO: 16843 - DNA, 40 bp, Artificial Sequence
  Description of Artificial Sequence: Synthetic primer
cgctcaaatacgggtttgatggccagcgaggcgtccatgc

SEQ ID NO: 16844 - DNA, 40 bp, Artificial Sequence
  Description of Artificial Sequence: Synthetic primer
cctccgaggactcctgcgagatgccctcctcttcctcctt

SEQ ID NO: 16845 - DNA, 40 bp, Artificial Sequence
  Description of Artificial Sequence: Synthetic primer
gcagcttctgccgggcgctctcctcctcctccagctgctc

SEQ ID NO: 16846 - DNA, 40 bp, Artificial Sequence
  Description of Artificial Sequence: Synthetic primer
acaaagaatactataaagtaaaagaacctggtgaaagtcc

SEQ ID NO: 16847 - DNA, 40 bp, Artificial Sequence
  Description of Artificial Sequence: Synthetic primer
atctccatttctgagatcaggtctgacaagtctttctctg

SEQ ID NO: 16848 - DNA, 40 bp, Artificial Sequence
  Description of Artificial Sequence: Synthetic primer
ctccagccgtgcttgaaaatatacaaagcaactgtcatgg

SEQ ID NO: 16849 - DNA, 40 bp, Artificial Sequence
  Description of Artificial Sequence: Synthetic primer
agctttggagtggttctgtatgaacttttcacatacattg

SEQ ID NO: 16850 - DNA, 40 bp, Artificial Sequence
  Description of Artificial Sequence: Synthetic primer
agtgctactgctatggccgtggcattggggagtggcattg

SEQ ID NO: 16851 - DNA, 40 bp, Artificial Sequence
  Description of Artificial Sequence: Synthetic primer
ggccaggaggaccgactcggccagcagcaccagggaaacc

SEQ ID NO: 16852 - DNA, 40 bp, Artificial Sequence
  Description of Artificial Sequence: Synthetic primer
ccagctcacccttggcctggcgtggctgtccatccacaag

SEQ ID NO: 16853 - DNA, 40 bp, Artificial Sequence
  Description of Artificial Sequence: Synthetic primer
ctcctggggcagcggcgaccagagcagctcctcctttgac

SEQ ID NO: 16854 - DNA, 40 bp, Artificial Sequence
  Description of Artificial Sequence: Synthetic primer
tacctctgagtcatcaattcggaacatatagcaaccaatg

SEQ ID NO: 16855 - DNA, 40 bp, Artificial Sequence
  Description of Artificial Sequence: Synthetic primer
atcgagtcctccaactacatggccccttacgataactacg

SEQ ID NO: 16856 - DNA, 40 bp, Artificial Sequence
  Description of Artificial Sequence: Synthetic primer
gctgcctacaacagaacctgtggatagtagtgtctcttcc

SEQ ID NO: 16857 - DNA, 40 bp, Artificial Sequence
  Description of Artificial Sequence: Synthetic primer
catcaaaacccatcacaatgacacagagctcatcagaaag

SEQ ID NO: 16858 - DNA, 40 bp, Artificial Sequence; identical to SEQ ID NO: 7025
  Description of Artificial Sequence: Synthetic primer

SEQ ID NO: 16859 - DNA, 40 bp, Artificial Sequence
  Description of Artificial Sequence: Synthetic primer
gccatgtattctgactatgtagcaattccttttcttgctc

SEQ ID NO: 16860 - DNA, 40 bp, Artificial Sequence
  Description of Artificial Sequence: Synthetic primer
tgatgcctggaaagaagggcaattcaaagatatcattacc

SEQ ID NO: 16861 - DNA, 40 bp, Artificial Sequence
  Description of Artificial Sequence: Synthetic primer
gtagactttacaacgtcagcatatggtcctggccccttag

SEQ ID NO: 16862 - DNA, 40 bp, Artificial Sequence
  Description of Artificial Sequence: Synthetic primer
gggctactagatcgagaggagtctgaagacatttgagagg

SEQ ID NO: 16863 - DNA, 40 bp, Artificial Sequence
  Description of Artificial Sequence: Synthetic primer
cccgggagggcaggtgggggcagggctggtgcggggtcac

SEQ ID NO: 16864 - DNA, 40 bp, Artificial Sequence
  Description of Artificial Sequence: Synthetic primer
caaaggccagccggccgcccccacccagcgccgccatctc

SEQ ID NO: 16865 - DNA, 40 bp, Artificial Sequence
  Description of Artificial Sequence: Synthetic primer
gcccgcagaagtggcagaagaaggcttcagttggcaaaag

SEQ ID NO: 16866 - DNA, 40 bp, Artificial Sequence
  Description of Artificial Sequence: Synthetic primer
ctgtggagggagagtcttcaaccagacccaccttcaccac

SEQ ID NO: 16867 - DNA, 40 bp, Artificial Sequence
  Description of Artificial Sequence: Synthetic primer
agaatctcagaatcgggcgttgggctttgccgggtgcttc

SEQ ID NO: 16868 - DNA, 40 bp, Artificial Sequence
  Description of Artificial Sequence: Synthetic primer
ggcctcctcctcttcacctttcccgaatttacttctcagg

SEQ ID NO: 16869 - DNA, 40 bp, Artificial Sequence
  Description of Artificial Sequence: Synthetic primer
tgaagttacagcatttcagattttattgtcagatatttag

SEQ ID NO: 16870 - DNA, 40 bp, Artificial Sequence
  Description of Artificial Sequence: Synthetic primer
ctgccaatttgagcaaagaagacagtttaaatcctactgc

SEQ ID NO: 16871 - DNA, 40 bp, Artificial Sequence
  Description of Artificial Sequence: Synthetic primer
aacagaaaagagatgaagttaaatgtaaattggacaagag

SEQ ID NO: 16872 - DNA, 40 bp, Artificial Sequence
  Description of Artificial Sequence: Synthetic primer
cttagttttgttgttactgctgttgttgttggtttggttg

SEQ ID NO: 16873 - DNA, 40 bp, Artificial Sequence
  Description of Artificial Sequence: Synthetic primer
cacataaacatgcttttaaaaactctgtaagtctcttttt

SEQ ID NO: 16874 - DNA, 40 bp, Artificial Sequence
  Description of Artificial Sequence: Synthetic primer
ttgctgcaaactggtttaagatagcttgccgattttggtg

SEQ ID NO: 16875 - DNA, 40 bp, Artificial Sequence
  Description of Artificial Sequence: Synthetic primer
atcttctgcagaaaatgacagagatattttgaggagagaa

SEQ ID NO: 16876 - DNA, 40 bp, Artificial Sequence
  Description of Artificial Sequence: Synthetic primer
gcttccgaggtcgccgccactcaaggtgctggcggagcag

SEQ ID NO: 16877 - DNA, 40 bp, Artificial Sequence
  Description of Artificial Sequence: Synthetic primer
cagtgcaaacaagattgcggcataagccatttcggaaatc

SEQ ID NO: 16878 - DNA, 40 bp, Artificial Sequence
  Description of Artificial Sequence: Synthetic primer
aaacaaaattctcgcaagttttctcactataatctctcag

SEQ ID NO: 16879 - DNA, 40 bp, Artificial Sequence
  Description of Artificial Sequence: Synthetic primer
gaagggaactcagcttataaacacagaggagcaaagttgg

SEQ ID NO: 16880 - DNA, 40 bp, Artificial Sequence
  Description of Artificial Sequence: Synthetic primer
atacacccccttgtagtataatttcaaggaactgtgtacg

SEQ ID NO: 16881 - DNA, 40 bp, Artificial Sequence
  Description of Artificial Sequence: Synthetic primer
gttatcatgttttcttttagcatgattctatacacctagc

SEQ ID NO: 16882 - DNA, 40 bp, Artificial Sequence
  Description of Artificial Sequence: Synthetic primer
ggaggttacctccatgaagaaagtactagaagaatacaag

SEQ ID NO: 16883 - DNA, 40 bp, Artificial Sequence
  Description of Artificial Sequence: Synthetic primer
tttaatgttattaaatcagacactttcttggactagattc

SEQ ID NO: 16884 - DNA, 40 bp, Artificial Sequence
  Description of Artificial Sequence: Synthetic primer
ggcgcagggccgggcagcgtggtgccctggctgggtccgg

SEQ ID NO: 16885 - DNA, 40 bp, Artificial Sequence
  Description of Artificial Sequence: Synthetic primer
ctcggagctcgaagtctgctgggatcggaatgtcttcagg

SEQ ID NO: 16886 - DNA, 40 bp, Artificial Sequence
  Description of Artificial Sequence: Synthetic primer
ttgcttccccgtgttgatgtagccgaggatcttcttaaac

SEQ ID NO: 16887 - DNA, 40 bp, Artificial Sequence
  Description of Artificial Sequence: Synthetic primer
aagcgcgcgctgcccgggctggaagttttctgagttcctg

SEQ ID NO: 16888 - DNA, 40 bp, Artificial Sequence
  Description of Artificial Sequence: Synthetic primer
cctctctatgggactgattcactgttccaatgtgggtctg

SEQ ID NO: 16889 - DNA, 40 bp, Artificial Sequence
  Description of Artificial Sequence: Synthetic primer
ccttacggaagatccagtttaacttcccctatttccgaag

SEQ ID NO: 16890 - DNA, 40 bp, Artificial Sequence
  Description of Artificial Sequence: Synthetic primer
ccagtgatgaagtgtatctttgccattcagagttgtgttg

SEQ ID NO: 16891 - DNA, 40 bp, Artificial Sequence
  Description of Artificial Sequence: Synthetic primer
accgcctctctccgcctagtgccaggtgctaataaagttg

SEQ ID NO: 16892 - DNA, 40 bp, Artificial Sequence
  Description of Artificial Sequence: Synthetic primer
gcctaggattcacagttgtactggtaggttacactggtag

SEQ ID NO: 16893 - DNA, 40 bp, Artificial Sequence
  Description of Artificial Sequence: Synthetic primer
aaccaggtgtaggagaaagcgcggacgtgaggcagcagtg

SEQ ID NO: 16894 - DNA, 40 bp, Artificial Sequence
  Description of Artificial Sequence: Synthetic primer
gccacctggcttcggcccgccaggcattttgccgcctttg

SEQ ID NO: 16895 - DNA, 40 bp, Artificial Sequence
  Description of Artificial Sequence: Synthetic primer
cgtcagttgcttcagcgtcccggtgtggctgtgccgttgg

SEQ ID NO: 16896 - DNA, 40 bp, Artificial Sequence
  Description of Artificial Sequence: Synthetic primer
tccggtcctcccactggtccctggtaagtttgtgctggtc

SEQ ID NO: 16897 - DNA, 40 bp, Artificial Sequence
  Description of Artificial Sequence: Synthetic primer
tgcattgaatgggctgggaggatctctgaggagtattttg

SEQ ID NO: 16898 - DNA, 40 bp, Artificial Sequence
  Description of Artificial Sequence: Synthetic primer
tcaagatagagtctttactttgggtgactgcttattgaac

SEQ ID NO: 16899 - DNA, 40 bp, Artificial Sequence
  Description of Artificial Sequence: Synthetic primer
ttgcagtgcccaggtctccattttcatgtgtgtcagttac

SEQ ID NO: 16900 - DNA, 40 bp, Artificial Sequence
  Description of Artificial Sequence: Synthetic primer
gggccgccccggcagccgccagcgccgctcccattgtctg

SEQ ID NO: 16901 - DNA, 40 bp, Artificial Sequence
  Description of Artificial Sequence: Synthetic primer
atctgtacaagtttagcactttctagatctttctcagcag

SEQ ID NO: 16902 - DNA, 40 bp, Artificial Sequence
  Description of Artificial Sequence: Synthetic primer
tgtgaagcctaaaaatattcacaaataagcttttaaactg

SEQ ID NO: 16903 - DNA, 40 bp, Artificial Sequence
  Description of Artificial Sequence: Synthetic primer
aatgagccgcttgaagtactgcaggttgctggagcggtag

SEQ ID NO: 16904 - DNA, 40 bp, Artificial Sequence
  Description of Artificial Sequence: Synthetic primer
caccattgccgaaatgttttgttcggaaactggaattgtc

SEQ ID NO: 16905 - DNA, 40 bp, Artificial Sequence
  Description of Artificial Sequence: Synthetic primer
tgggcgtgcattttggacaagcccaccatgcccgcagctc

SEQ ID NO: 16906 - DNA, 40 bp, Artificial Sequence
  Description of Artificial Sequence: Synthetic primer
cattgttggacaggttttagcagcattgaaaataagtacc

SEQ ID NO: 16907 - DNA, 40 bp, Artificial Sequence
  Description of Artificial Sequence: Synthetic primer
gcatcaatatgagatcaggcatgcaacagcaaattacacc

SEQ ID NO: 16908 - DNA, 40 bp, Artificial Sequence
  Description of Artificial Sequence: Synthetic primer
caaagactaatctctccaaaaatggggaaaacattgattc

SEQ ID NO: 16909 - DNA, 40 bp, Artificial Sequence
  Description of Artificial Sequence: Synthetic primer
gcgccgcgcgctgccgcggccacccggacctgagcgtcat

SEQ ID NO: 16910 - DNA, 40 bp, Artificial Sequence
  Description of Artificial Sequence: Synthetic primer
gcgagccctgctggacagcgcagctccgggcacgttggac

SEQ ID NO: 16911 - DNA, 40 bp, Artificial Sequence
  Description of Artificial Sequence: Synthetic primer
gcgcgctcactccgcatcccgcggcctcgcagacgccatc

SEQ ID NO: 16912 - DNA, 40 bp, Artificial Sequence
  Description of Artificial Sequence: Synthetic primer
gggggcacgctctgaaagggggtcgctggggagacagagg

SEQ ID NO: 16913 - DNA, 40 bp, Artificial Sequence
  Description of Artificial Sequence: Synthetic primer
catgaacagagagaactctatgaggctgccaggcttgtcc

SEQ ID NO: 16914 - DNA, 40 bp, Artificial Sequence
  Description of Artificial Sequence: Synthetic primer
ctggagcctatggctttaagcaagcactactgcactttac

SEQ ID NO: 16915 - DNA, 40 bp, Artificial Sequence
  Description of Artificial Sequence: Synthetic primer
atagtacaggtatattacaacaaaacacaaatagcttgac

SEQ ID NO: 16916 - DNA, 40 bp, Artificial Sequence
  Description of Artificial Sequence: Synthetic primer
gagtatcagccgagacaaagctgaaaaacttcttttggac

SEQ ID NO: 16917 - DNA, 40 bp, Artificial Sequence
  Description of Artificial Sequence: Synthetic primer
tggagcagcggcggggcgggaccgcgactcgggtttaatg

SEQ ID NO: 16918 - DNA, 40 bp, Artificial Sequence
  Description of Artificial Sequence: Synthetic primer
ttgacaatagatcactctggaaattcatgtcaatggtagc

SEQ ID NO: 16919 - DNA, 40 bp, Artificial Sequence
  Description of Artificial Sequence: Synthetic primer
ctgcagtcgcgactctgattgctgctccagacatttgaac

SEQ ID NO: 16920 - DNA, 40 bp, Artificial Sequence
  Description of Artificial Sequence: Synthetic primer
cccatctgaggattctttaggtagacatctttcatttttg

SEQ ID NO: 16921 - DNA, 40 bp, Artificial Sequence
  Description of Artificial Sequence: Synthetic primer
cctggtatacctggccacgatcgcagactccaaccagaac

SEQ ID NO: 16922 - DNA, 40 bp, Artificial Sequence
  Description of Artificial Sequence: Synthetic primer
gtcatcataaaactgcctggggcccttttcaaacatacag

SEQ ID NO: 16923 - DNA, 40 bp, Artificial Sequence
  Description of Artificial Sequence: Synthetic primer
gcttggaaactacattcaactgttcttgcaatgactctac

SEQ ID NO: 16924 - DNA, 40 bp, Artificial Sequence
  Description of Artificial Sequence: Synthetic primer
taagcttacaaataacaaagaagtagaacttgaagaattg

SEQ ID NO: 16925 - DNA, 40 bp, Artificial Sequence
  Description of Artificial Sequence: Synthetic primer
gctctttaacaatttggaaataaaaggttgttttactatg

SEQ ID NO: 16926 - DNA, 40 bp, Artificial Sequence
  Description of Artificial Sequence: Synthetic primer
acaccacattgtgggaagatctcagcttccagggtaaaag

SEQ ID NO: 16927 - DNA, 40 bp, Artificial Sequence
  Description of Artificial Sequence: Synthetic primer
gccgctgctctcccgcgcccgtgggccccgccccctcatc

SEQ ID NO: 16928 - DNA, 40 bp, Artificial Sequence
  Description of Artificial Sequence: Synthetic primer
attcacggggttcatttagctggctgtcaagctccttcag

SEQ ID NO: 16929 - DNA, 40 bp, Artificial Sequence
  Description of Artificial Sequence: Synthetic primer
gagcgggccgggcctcgcggggtgaggacggtgagaggac

SEQ ID NO: 16930 - DNA, 40 bp, Artificial Sequence
  Description of Artificial Sequence: Synthetic primer
gcaccctcacccagaacatcatggttttcaacaagtgctc

SEQ ID NO: 16931 - DNA, 40 bp, Artificial Sequence
  Description of Artificial Sequence: Synthetic primer
tttcaactgaggaaattgagtatagttcattgaagaatgg

SEQ ID NO: 16932 - DNA, 40 bp, Artificial Sequence
  Description of Artificial Sequence: Synthetic primer
acagtccatggcagaccatagaataatgcaacaggaaaag

SEQ ID NO: 16933 - DNA, 40 bp, Artificial Sequence
  Description of Artificial Sequence: Synthetic primer
ctttgaagctcaggaaagaagagaaatccactgagaacag

SEQ ID NO: 16934 - DNA, 40 bp, Artificial Sequence
  Description of Artificial Sequence: Synthetic primer
ctttttgagctgctgcagggctgtcaaagtcgacaaaacc

SEQ ID NO: 16935 - DNA, 40 bp, Artificial Sequence
  Description of Artificial Sequence: Synthetic primer
gtgggggctggggcagccgcctctccgtgctcacagtctc

SEQ ID NO: 16936 - DNA, 40 bp, Artificial Sequence
  Description of Artificial Sequence: Synthetic primer
ctgcatacagctctgtctctgcctgcagctgttcctgtag

SEQ ID NO: 16937 - DNA, 40 bp, Artificial Sequence
  Description of Artificial Sequence: Synthetic primer
cttaagaagcgggtttatgaggaattcacgaaagtggttc

SEQ ID NO: 16938 - DNA, 40 bp, Artificial Sequence
  Description of Artificial Sequence: Synthetic primer
atcatatagatttgatatcttctatgtattcgtatttttg

SEQ ID NO: 16939 - DNA, 40 bp, Artificial Sequence
  Description of Artificial Sequence: Synthetic primer
cgggcagggttgggctgaatcaaatgggagccctccagac

SEQ ID NO: 16940 - DNA, 40 bp, Artificial Sequence
  Description of Artificial Sequence: Synthetic primer
atccccctcagggctatggacagcagaaccagtacaacag

SEQ ID NO: 16941 - DNA, 40 bp, Artificial Sequence
  Description of Artificial Sequence: Synthetic primer
acagattacacaaaagagcccaaagaacagatcatttcag

SEQ ID NO: 16942 - DNA, 40 bp, Artificial Sequence
  Description of Artificial Sequence: Synthetic primer
ggggagacttgggccttgaggtgcccagctccgcgctttc

SEQ ID NO: 16943 - DNA, 40 bp, Artificial Sequence
  Description of Artificial Sequence: Synthetic primer
gctgtgaaagttttccctgaaggatttcgttcttctcttc

SEQ ID NO: 16944 - DNA, 40 bp, Artificial Sequence
  Description of Artificial Sequence: Synthetic primer
agcccgccctggtgcatggtggacggtggcaggggctgag

SEQ ID NO: 16945 - DNA, 40 bp, Artificial Sequence
  Description of Artificial Sequence: Synthetic primer
gacccaatatttaccagaccacaaaacttttctaatactc

SEQ ID NO: 16946 - DNA, 40 bp, Artificial Sequence
  Description of Artificial Sequence: Synthetic primer
tttgctttccggcgtcggtttacatttttgttcaggagag

SEQ ID NO: 16947 - DNA, 40 bp, Artificial Sequence
  Description of Artificial Sequence: Synthetic primer
ctacttcttctgctgtattttcgtggttatttgttcctac

SEQ ID NO: 16948 - DNA, 40 bp, Artificial Sequence
  Description of Artificial Sequence: Synthetic primer
aagaattctctcctgttctaaggcttctatatactttgag

SEQ ID NO: 16949 - DNA, 40 bp, Artificial Sequence
  Description of Artificial Sequence: Synthetic primer
acagccacagctattggatttcccacccagaatctttagg

SEQ ID NO: 16950 - DNA, 40 bp, Artificial Sequence
  Description of Artificial Sequence: Synthetic primer
ccatgatgcctcgctcccatcagccgccgccgccgccaca

SEQ ID NO: 16951 - DNA, 40 bp, Artificial Sequence
  Description of Artificial Sequence: Synthetic primer
gagcagagaggagcttttctttctcactagcctctgttac

SEQ ID NO: 16952 - DNA, 40 bp, Artificial Sequence
  Description of Artificial Sequence: Synthetic primer
taataaagttcctgtttatgagagtcatgtttcatctcag

SEQ ID NO: 16953 - DNA, 40 bp, Artificial Sequence
  Description of Artificial Sequence: Synthetic primer
ctaaggagctaaaagaccttacatatctttttcttctgag

SEQ ID NO: 16954 - DNA, 40 bp, Artificial Sequence
  Description of Artificial Sequence: Synthetic primer
taaaaactttttcaggctctcattaactaaaggagttttg

SEQ ID NO: 16955 - DNA, 40 bp, Artificial Sequence
  Description of Artificial Sequence: Synthetic primer
ccaaggagtgcctgctcatttcaaacaggagccaatggtg

SEQ ID NO: 16956 - DNA, 40 bp, Artificial Sequence
  Description of Artificial Sequence: Synthetic primer
caggcttcacctaccttagccaaattgtagccagacagac

SEQ ID NO: 16957 - DNA, 40 bp, Artificial Sequence
  Description of Artificial Sequence: Synthetic primer
atgcaaaacaaaagtggttacttctgactggtatatctgc

SEQ ID NO: 16958 - DNA, 40 bp, Artificial Sequence
  Description of Artificial Sequence: Synthetic primer
attgttgcaggccttcagcaggtccccacactctccattg

SEQ ID NO: 16959 - DNA, 40 bp, Artificial Sequence
  Description of Artificial Sequence: Synthetic primer
ggagaagctgtctctgatccgcaagcatgctcagaccttc

SEQ ID NO: 16960 - DNA, 40 bp, Artificial Sequence
  Description of Artificial Sequence: Synthetic primer
tgtacatacataaaacaaacagtgcaattataaaaccttg

SEQ ID NO: 16961 - DNA, 40 bp, Artificial Sequence
  Description of Artificial Sequence: Synthetic primer
agccccattgttttcttgtaaaacgacgtcaaggacgaag

SEQ ID NO: 16962 - DNA, 40 bp, Artificial Sequence
  Description of Artificial Sequence: Synthetic primer
ccttggccagtttgaccagaatatggcagcaaaagtgttc

SEQ ID NO: 16963 - DNA, 40 bp, Artificial Sequence
  Description of Artificial Sequence: Synthetic primer
aaacaaacactgaaaacccgtgttagtatcgtagaataag

SEQ ID NO: 16964 - DNA, 40 bp, Artificial Sequence
  Description of Artificial Sequence: Synthetic primer
aatggaattcgaaaagaattcatgttcacagaactcaacg

SEQ ID NO: 16965 - DNA, 40 bp, Artificial Sequence
  Description of Artificial Sequence: Synthetic primer
atacgggaagctagagctccgctgcatgagtcccccagtg

SEQ ID NO: 16966 - DNA, 40 bp, Artificial Sequence
  Description of Artificial Sequence: Synthetic primer
cccggaacttgaactggaggggattctccttcctgacctc

SEQ ID NO: 16967 - DNA, 40 bp, Artificial Sequence
  Description of Artificial Sequence: Synthetic primer
agcatttctttcccagggagtggattctattgttatggag

SEQ ID NO: 16968 - DNA, 40 bp, Artificial Sequence
  Description of Artificial Sequence: Synthetic primer
aagagtttgcgcaggttgtgtaaagtctgaagttcttttg

SEQ ID NO: 16969 - DNA, 40 bp, Artificial Sequence
  Description of Artificial Sequence: Synthetic primer
gacacctatcagaaagaaattgaggacaaaaagatatcag

SEQ ID NO: 16970 - DNA, 40 bp, Artificial Sequence
  Description of Artificial Sequence: Synthetic primer
ggggtacacagcctggacggcggagaagtagacagtcagg

SEQ ID NO: 16971 - DNA, 40 bp, Artificial Sequence
  Description of Artificial Sequence: Synthetic primer
aaccccaatgaccaaacccactcctgaggaaataaaactg

SEQ ID NO: 16972 - DNA, 40 bp, Artificial Sequence
  Description of Artificial Sequence: Synthetic primer
gatgttgataaagccttacaaaactctccacggttaatgc

SEQ ID NO: 16973 - DNA, 40 bp, Artificial Sequence
  Description of Artificial Sequence: Synthetic primer
cagtgtatagccataaactctttaacggcagtatggaagc

SEQ ID NO: 16974 - DNA, 40 bp, Artificial Sequence
  Description of Artificial Sequence: Synthetic primer
acaattgatgtgtttttagttaaatcccacattgtctcac

SEQ ID NO: 16975 - DNA, 40 bp, Artificial Sequence
  Description of Artificial Sequence: Synthetic primer
cactggtcttgatgtcaaacacaaaactatcctgcagctc

SEQ ID NO: 16976 - DNA, 40 bp, Artificial Sequence
  Description of Artificial Sequence: Synthetic primer
tgaccctccagctttgaacagagtacccaaaaagaagaag

SEQ ID NO: 16977 - DNA, 40 bp, Artificial Sequence
  Description of Artificial Sequence: Synthetic primer
ttctccttcttggagttacaacagaagctggggaggtgag

SEQ ID NO: 16978 - DNA, 40 bp, Artificial Sequence
  Description of Artificial Sequence: Synthetic primer
aagagttcgatgttagcgtttacgttgtattttcttacac

SEQ ID NO: 16979 - DNA, 40 bp, Artificial Sequence
  Description of Artificial Sequence: Synthetic primer
tgccagtactagaagtacttgggggtctcacaggtgtgtg

SEQ ID NO: 16980 - DNA, 40 bp, Artificial Sequence
  Description of Artificial Sequence: Synthetic primer
gcccccctcccctgttcccacttcctcatctggcactatg

SEQ ID NO: 16981 - DNA, 40 bp, Artificial Sequence
  Description of Artificial Sequence: Synthetic primer
ccatatgagcctcttccagagaatgtcaagttttattatg

SEQ ID NO: 16982 - DNA, 40 bp, Artificial Sequence
  Description of Artificial Sequence: Synthetic primer
tgttcgctttgaatctgttttgctgggtttagataagaag

SEQ ID NO: 16983 - DNA, 40 bp, Artificial Sequence
  Description of Artificial Sequence: Synthetic primer
cataaaaggcagcaatgacataattatacataaagtaccc

SEQ ID NO: 16984 - DNA, 40 bp, Artificial Sequence
  Description of Artificial Sequence: Synthetic primer
atcagctaaagaaacagcttgattttagtgtcagtatttg

SEQ ID NO: 16985 - DNA, 40 bp, Artificial Sequence
  Description of Artificial Sequence: Synthetic primer
tcggtgggagatgtttggtggcatggatctgaggtaaatc

SEQ ID NO: 16986 - DNA, 40 bp, Artificial Sequence
  Description of Artificial Sequence: Synthetic primer
caagccaaagaagtccaagtcgggccaggatccccagcag

SEQ ID NO: 16987 - DNA, 40 bp, Artificial Sequence
  Description of Artificial Sequence: Synthetic primer
ctgatggagattcactttatcccgaagtaatacaaatgtc

SEQ ID NO: 16988 - DNA, 40 bp, Artificial Sequence
  Description of Artificial Sequence: Synthetic primer
aagaaatttcaaaactgcctctgtgaccccagctgataac

SEQ ID NO: 16989 - DNA, 40 bp, Artificial Sequence
  Description of Artificial Sequence: Synthetic primer
ccgaaaactgccacacatcttgagctctctgggtactacg

SEQ ID NO: 16990 - DNA, 40 bp, Artificial Sequence
  Description of Artificial Sequence: Synthetic primer
tggcacacgccagcccccatatggtccctctgcccctgtg

SEQ ID NO: 16991 - DNA, 40 bp, Artificial Sequence
  Description of Artificial Sequence: Synthetic primer
agtaggagacatggcggcaagctcttcttcagacaatatg

SEQ ID NO: 16992 - DNA, 40 bp, Artificial Sequence
  Description of Artificial Sequence: Synthetic primer
ggcttcaccaaggacgaggtgatccgcctgaagcagaagc

SEQ ID NO: 16993 - DNA, 40 bp, Artificial Sequence
  Description of Artificial Sequence: Synthetic primer
gcggttcctggatagtttgcggctgagaatgcacttactg

SEQ ID NO: 16994 - DNA, 40 bp, Artificial Sequence
  Description of Artificial Sequence: Synthetic primer
cacttagatctgtttgtttgataggagataaagaacaaag

SEQ ID NO: 16995 - DNA, 40 bp, Artificial Sequence
  Description of Artificial Sequence: Synthetic primer
gcagccagcggtcaatgtgctggtaagtgatacccacaac

SEQ ID NO: 16996 - DNA, 40 bp, Artificial Sequence
  Description of Artificial Sequence: Synthetic primer
gtgcgcagcacagaactgccaaaggccctgcaaggacaag

SEQ ID NO: 16997 - DNA, 40 bp, Artificial Sequence
  Description of Artificial Sequence: Synthetic primer
tgctgcatttgctctggaattcttgtagagatattacttg

SEQ ID NO: 16998 - DNA, 40 bp, Artificial Sequence
  Description of Artificial Sequence: Synthetic primer
ttgggcagtggtttgatgtccgcatctccttgctggtttg

SEQ ID NO: 16999 - DNA, 40 bp, Artificial Sequence
  Description of Artificial Sequence: Synthetic primer
agaaaatatggcacttcaaatatcctatcttcttcctgtg

SEQ ID NO: 17000 - DNA, 40 bp, Artificial Sequence
  Description of Artificial Sequence: Synthetic primer
atatactagatctggacacacgcatactaagtgtatatag

SEQ ID NO: 17001 - DNA, 40 bp, Artificial Sequence
  Description of Artificial Sequence: Synthetic primer
ccccaacaaagggttggacataatagagctgttgctgaag

SEQ ID NO: 17002 - DNA, 40 bp, Artificial Sequence
  Description of Artificial Sequence: Synthetic primer
tgctctgggtgcagttttgagggggcaacagagctagcag

SEQ ID NO: 17003 - DNA, 40 bp, Artificial Sequence
  Description of Artificial Sequence: Synthetic primer
gtcccctctggctcccttcacctcatttgtctacaccatc

SEQ ID NO: 17004 - DNA, 40 bp, Artificial Sequence
  Description of Artificial Sequence: Synthetic primer
ctcccccttctggcagcttttggagtagttatgtcaactg

SEQ ID NO: 17005 - DNA, 40 bp, Artificial Sequence
  Description of Artificial Sequence: Synthetic primer
cgggaaaaccgcctgtcagaacacttggctactcctaccc

SEQ ID NO: 17006 - DNA, 40 bp, Artificial Sequence
  Description of Artificial Sequence: Synthetic primer
acggcaagtgcacggacaacctggcagtgttcctggaaag

SEQ ID NO: 17007 - DNA, 40 bp, Artificial Sequence
  Description of Artificial Sequence: Synthetic primer
ctgccttctttcctccttcctgtgtttctgatgtggactg

SEQ ID NO: 17008 - DNA, 40 bp, Artificial Sequence
  Description of Artificial Sequence: Synthetic primer
accccaccagaagcatttttcgttggtctttggcaagctg

SEQ ID NO: 17009 - DNA, 40 bp, Artificial Sequence
  Description of Artificial Sequence: Synthetic primer
tctgtgtgcatgtctaactgtcagagctgattgtgttttc

SEQ ID NO: 17010 - DNA, 40 bp, Artificial Sequence
  Description of Artificial Sequence: Synthetic primer
cccgtcgctgaagtggtccttgcagtactggtcgtacagg

SEQ ID NO: 17011 - DNA, 40 bp, Artificial Sequence
  Description of Artificial Sequence: Synthetic primer
cacaaaattaactaatctttttgcctcagaataccaaaac

SEQ ID NO: 17012 - DNA, 40 bp, Artificial Sequence
  Description of Artificial Sequence: Synthetic primer
aggtcaccacagagaggatcagcgagagtggcaggtgtgg

SEQ ID NO: 17013 - DNA, 40 bp, Artificial Sequence
  Description of Artificial Sequence: Synthetic primer
actttaaagatactatttccccttatttaaaaggtatatg

SEQ ID NO: 17014 - DNA, 40 bp, Artificial Sequence
  Description of Artificial Sequence: Synthetic primer
agggttctctgttctggccgtgctcatgctgttttaattg

SEQ ID NO: 17015 - DNA, 40 bp, Artificial Sequence
  Description of Artificial Sequence: Synthetic primer
cagttgcatgagtaagagtaatgagatttgtattttaagg

SEQ ID NO: 17016 - DNA, 40 bp, Artificial Sequence
  Description of Artificial Sequence: Synthetic primer
cggctgctatgtccattcctccatcatccccaccttccac

SEQ ID NO: 17017 - DNA, 40 bp, Artificial Sequence
  Description of Artificial Sequence: Synthetic primer
ttagggaactttaaagaagaaaagaaaaacttgaattgtg

SEQ ID NO: 17018 - DNA, 40 bp, Artificial Sequence
  Description of Artificial Sequence: Synthetic primer
tttggttatttttagtttaatttcaggtgagccagtcttc

SEQ ID NO: 17019 - DNA, 40 bp, Artificial Sequence
  Description of Artificial Sequence: Synthetic primer
aaacctgaataagttaaatctgttagtaaaagcagagtcg

SEQ ID NO: 17020 - DNA, 40 bp, Artificial Sequence
  Description of Artificial Sequence: Synthetic primer
gtagcaacaaaatgcctgagtagcaacgtctttatactgc

SEQ ID NO: 17021 - DNA, 40 bp, Artificial Sequence
  Description of Artificial Sequence: Synthetic primer
ccgtgccccgccatgcccccagccatgccggcactccctt

SEQ ID NO: 17022 - DNA, 40 bp, Artificial Sequence
  Description of Artificial Sequence: Synthetic primer
aatactctgtctagaaaaagagttaaaagaagagaaatcc

SEQ ID NO: 17023 - DNA, 40 bp, Artificial Sequence
  Description of Artificial Sequence: Synthetic primer
ggaaactgtaaaacaagaaaatgctgcagttcagaagatg

SEQ ID NO: 17024 - DNA, 40 bp, Artificial Sequence
  Description of Artificial Sequence: Synthetic primer
tttttacagcacacacttccatatgtcattgctaatcctc

SEQ ID NO: 17025 - DNA, 40 bp, Artificial Sequence
  Description of Artificial Sequence: Synthetic primer
tcagctcctggatcaacttcattacagtggtagttaacag

SEQ ID NO: 17026 - DNA, 40 bp, Artificial Sequence
  Description of Artificial Sequence: Synthetic primer
cccacatgatagaactaaattcagatatcattaaataaac

SEQ ID NO: 17027 - DNA, 40 bp, Artificial Sequence
  Description of Artificial Sequence: Synthetic primer
gtcatttccttaagtttctgaagctcagcatctatactcg

SEQ ID NO: 17028 - DNA, 40 bp, Artificial Sequence
  Description of Artificial Sequence: Synthetic primer
gtggatcttcagataaattctgtcattttcctttcacttc

SEQ ID NO: 17029 - DNA, 40 bp, Artificial Sequence
  Description of Artificial Sequence: Synthetic primer
acaaaatggattttagtcaaatatttattggatgatacag

SEQ ID NO: 17030 - DNA, 40 bp, Artificial Sequence
  Description of Artificial Sequence: Synthetic primer
tggctcaagtccagcttgatctttctcacttttatgatcc

SEQ ID NO: 17031 - DNA, 40 bp, Artificial Sequence
  Description of Artificial Sequence: Synthetic primer
gatctgctgccaacataagggctctaaacatgcctccttc

SEQ ID NO: 17032 - DNA, 40 bp, Artificial Sequence
  Description of Artificial Sequence: Synthetic primer
cgccgtgccggcacgggctcagaacgcactcgttgatgtc

SEQ ID NO: 17033 - DNA, 40 bp, Artificial Sequence
  Description of Artificial Sequence: Synthetic primer
tacagtcctatataaataaatgacaggaaagtgggtgcag

SEQ ID NO: 17034 - DNA, 40 bp, Artificial Sequence
  Description of Artificial Sequence: Synthetic primer
ttataaagagcacaggaagatcctcatgcactacatgttt

SEQ ID NO: 17035 - DNA, 40 bp, Artificial Sequence
  Description of Artificial Sequence: Synthetic primer
ggcggagtaaaatgaacattgcttggagatgctgttggag

SEQ ID NO: 17036 - DNA, 40 bp, Artificial Sequence
  Description of Artificial Sequence: Synthetic primer
ccgctgccggccgccccgacgacgagcaaccgctcacctg

SEQ ID NO: 17037 - DNA, 40 bp, Artificial Sequence
  Description of Artificial Sequence: Synthetic primer
atgcttcttctagaaagtttgtcctccctcttttgtaatg

SEQ ID NO: 17038 - DNA, 40 bp, Artificial Sequence
  Description of Artificial Sequence: Synthetic primer
cccaaaattttgctagttgatccaagaaatccaatctcac

SEQ ID NO: 17039 - DNA, 40 bp, Artificial Sequence
  Description of Artificial Sequence: Synthetic primer
gtgggtggaggaagctgacaacaatgaaaatcttcaggag

SEQ ID NO: 17040 - DNA, 40 bp, Artificial Sequence
  Description of Artificial Sequence: Synthetic primer
tacagttggtgaattactacaggggtgctgacaaactgtg

SEQ ID NO: 17041 - DNA, 40 bp, Artificial Sequence
  Description of Artificial Sequence: Synthetic primer
tggaaggcggcgtgaagcggcggctcgtgctggcatctac

SEQ ID NO: 17042 - DNA, 40 bp, Artificial Sequence
  Description of Artificial Sequence: Synthetic primer
aaggcactgaagaggtggaaaaataatcgtgtcaatctgg

SEQ ID NO: 17043 - DNA, 40 bp, Artificial Sequence
  Description of Artificial Sequence: Synthetic primer
agctcatacaacttggtgatcttctcattggttgtagtag

SEQ ID NO: 17044 - DNA, 40 bp, Artificial Sequence
  Description of Artificial Sequence: Synthetic primer
tggtccaggactcatcgctgtccgactcctcatagtccac

SEQ ID NO: 17045 - DNA, 40 bp, Artificial Sequence
  Description of Artificial Sequence: Synthetic primer
acctggataatctccatttttgtcatggactgttaaaacg

SEQ ID NO: 17046 - DNA, 40 bp, Artificial Sequence
  Description of Artificial Sequence: Synthetic primer
gatggaaaactgtacaacttttgcaattccagttgtgtgg

SEQ ID NO: 17047 - DNA, 40 bp, Artificial Sequence
  Description of Artificial Sequence: Synthetic primer
tggtttaaggcaaagggaagttcttcggaacctttcttcc

SEQ ID NO: 17048 - DNA, 40 bp, Artificial Sequence
  Description of Artificial Sequence: Synthetic primer
catgggagttgtcgtagactatacaaaccaagtggaaatc

SEQ ID NO: 17049 - DNA, 40 bp, Artificial Sequence
  Description of Artificial Sequence: Synthetic primer
ccaaagaaagagctggatatctttggattgaaccctgctg

SEQ ID NO: 17050 - DNA, 40 bp, Artificial Sequence
  Description of Artificial Sequence: Synthetic primer
tcagggcaaatttcctcttcatatcatttctggaagagtc

SEQ ID NO: 17051 - DNA, 40 bp, Artificial Sequence
  Description of Artificial Sequence: Synthetic primer
gccgctcagggtgggtacaggtgaagcccagcataaaagg

SEQ ID NO: 17052 - DNA, 40 bp, Artificial Sequence
  Description of Artificial Sequence: Synthetic primer
taaggacggagcaggatttctacgtgcgcctcattgactc

SEQ ID NO: 17053 - DNA, 40 bp, Artificial Sequence
  Description of Artificial Sequence: Synthetic primer
tcccataacccagtctgtcaggtattctaccatcttattc

SEQ ID NO: 17054 - DNA, 40 bp, Artificial Sequence
  Description of Artificial Sequence: Synthetic primer
ggtcagggctgcaagccaggggtccagggcccttccgttc

SEQ ID NO: 17055 - DNA, 40 bp, Artificial Sequence
  Description of Artificial Sequence: Synthetic primer
gcgatggtggagcagagacgggctggtctaatttttcctg

SEQ ID NO: 17056 - DNA, 40 bp, Artificial Sequence
  Description of Artificial Sequence: Synthetic primer
tccacctgggcagggcagatggaatgggaggactctcctg

SEQ ID NO: 17057 - DNA, 40 bp, Artificial Sequence
  Description of Artificial Sequence: Synthetic primer
tcagttttctttccagtctaatcatctttggaactaaaac

SEQ ID NO: 17058 - DNA, 40 bp, Artificial Sequence
  Description of Artificial Sequence: Synthetic primer
ttttgataactagcatcttggagggttgcttggcactagg

SEQ ID NO: 17059 - DNA, 40 bp, Artificial Sequence
  Description of Artificial Sequence: Synthetic primer
aggcaacggtaacggccaccgccacggccgagtcgctcca

SEQ ID NO: 17060 - DNA, 40 bp, Artificial Sequence
  Description of Artificial Sequence: Synthetic primer
agcccgggtggactgagggcccaggaaggagcaggtaggg

SEQ ID NO: 17061 - DNA, 40 bp, Artificial Sequence
  Description of Artificial Sequence: Synthetic primer
aagcagagcctctggaggtgaaccagttcctcaaagtgac

SEQ ID NO: 17062 - DNA, 40 bp, Artificial Sequence
  Description of Artificial Sequence: Synthetic primer
tggactggaccagacaatgttgtgtttggatttgtaactg

SEQ ID NO: 17063 - DNA, 40 bp, Artificial Sequence
  Description of Artificial Sequence: Synthetic primer
accagggagaacttcgcttgattcttccccaattctaccg

SEQ ID NO: 17064 - DNA, 40 bp, Artificial Sequence
  Description of Artificial Sequence: Synthetic primer
tgtgcttgaaaaggacagataagtattgcccagagctaag

SEQ ID NO: 17065 - DNA, 40 bp, Artificial Sequence
  Description of Artificial Sequence: Synthetic primer
agtcgatgctgccaaagtatttgcttgtgtggctgctctg

SEQ ID NO: 17066 - DNA, 40 bp, Artificial Sequence
  Description of Artificial Sequence: Synthetic primer
cacgttagaatttttggaagagtgtatttctggatttagc

SEQ ID NO: 17067 - DNA, 40 bp, Artificial Sequence
  Description of Artificial Sequence: Synthetic primer
cttccctggcaccagggtctgcctctcactcgcccaggtc

SEQ ID NO: 17068 - DNA, 40 bp, Artificial Sequence
  Description of Artificial Sequence: Synthetic primer
attgcttaagttaaacaacgtgtttcttgaagccaaatac

SEQ ID NO: 17069 - DNA, 40 bp, Artificial Sequence
  Description of Artificial Sequence: Synthetic primer
ggctaaacagaatcaaaactgaagtaggagataattggag

SEQ ID NO: 17070 - DNA, 40 bp, Artificial Sequence
  Description of Artificial Sequence: Synthetic primer
tgcttcaagccttggccaatcacgttaatgttctccaaag

SEQ ID NO: 17071 - DNA, 40 bp, Artificial Sequence
  Description of Artificial Sequence: Synthetic primer
tgggtggaatcctgttcttcaagctctggtactgattcat

SEQ ID NO: 17072 - DNA, 40 bp, Artificial Sequence
  Description of Artificial Sequence: Synthetic primer
agggcacctatcctcatatttggtaacatgtcattttctg

SEQ ID NO: 17073 - DNA, 40 bp, Artificial Sequence
  Description of Artificial Sequence: Synthetic primer
attaaatgcgtacaacttctgggtctggtgaataattaag

SEQ ID NO: 17074 - DNA, 40 bp, Artificial Sequence
  Description of Artificial Sequence: Synthetic primer
ctgcagctgtgctactatgagtgctgtttctcagagtttc

SEQ ID NO: 17075 - DNA, 40 bp, Artificial Sequence
  Description of Artificial Sequence: Synthetic primer
agaattcatgttattgccccaagctcctcttctgactgag

SEQ ID NO: 17076 - DNA, 40 bp, Artificial Sequence
  Description of Artificial Sequence: Synthetic primer
ccgcttgttaatccgcagccggggagcatagaagacgaag

SEQ ID NO: 17077 - DNA, 40 bp, Artificial Sequence
  Description of Artificial Sequence: Synthetic primer
aacttcactgcagtcattcaaaaggttcataaataatgtg

SEQ ID NO: 17078 - DNA, 40 bp, Artificial Sequence
  Description of Artificial Sequence: Synthetic primer
cctcatattattggagcagaagatgatgattttggtactg

SEQ ID NO: 17079 - DNA, 40 bp, Artificial Sequence
  Description of Artificial Sequence: Synthetic primer
catgagcagcctgcccaacttctgcgggatcttcaaccac

SEQ ID NO: 17080 - DNA, 40 bp, Artificial Sequence
  Description of Artificial Sequence: Synthetic primer
gccgccatcttgcgaccatctctcccccgcgcccccttcc

SEQ ID NO: 17081 - DNA, 40 bp, Artificial Sequence
  Description of Artificial Sequence: Synthetic primer
cctctttgcgagactgactcaaatctgtgatcttctgttc

SEQ ID NO: 17082 - DNA, 40 bp, Artificial Sequence
  Description of Artificial Sequence: Synthetic primer
ggcctatgccatggacaaggcagaaggactgccgttggtg

SEQ ID NO: 17083 - DNA, 40 bp, Artificial Sequence
  Description of Artificial Sequence: Synthetic primer
aaaagtgtctcctcagagccccgctccgcttcggaggccg

SEQ ID NO: 17084 - DNA, 40 bp, Artificial Sequence
  Description of Artificial Sequence: Synthetic primer
cccgttcctccgcagtctgccgtctgcaccgggaacaagc

SEQ ID NO: 17085 - DNA, 40 bp, Artificial Sequence
  Description of Artificial Sequence: Synthetic primer
tcacccaacgggttcatgattggtgatgtgatgggaacag

SEQ ID NO: 17086 - DNA, 40 bp, Artificial Sequence
  Description of Artificial Sequence: Synthetic primer
ttcggttccatgaaactcgttataaataacagccttgagc

SEQ ID NO: 17087 - DNA, 40 bp, Artificial Sequence
  Description of Artificial Sequence: Synthetic primer
tgggcgagccggtcaccaggggactcctgctcgctttaac

SEQ ID NO: 17088 - DNA, 40 bp, Artificial Sequence
  Description of Artificial Sequence: Synthetic primer
agcgagaagaccaggaacagctacaagaagagattaagag

SEQ ID NO: 17089 - DNA, 40 bp, Artificial Sequence
  Description of Artificial Sequence: Synthetic primer
cgggagaaggcaacaaatccttttcttttgcagcactctg

SEQ ID NO: 17090 - DNA, 40 bp, Artificial Sequence
  Description of Artificial Sequence: Synthetic primer
tcatagcctttctccagcaggaactcagccaggtaggaac

SEQ ID NO: 17091 - DNA, 40 bp, Artificial Sequence
  Description of Artificial Sequence: Synthetic primer
ggtctgggtgaatatccaggccaagaccacaggctatgac

SEQ ID NO: 17092 - DNA, 40 bp, Artificial Sequence
  Description of Artificial Sequence: Synthetic primer
aacttttattaaagagcatattcactgtgactggataaag

SEQ ID NO: 17093 - DNA, 40 bp, Artificial Sequence
  Description of Artificial Sequence: Synthetic primer
tatgttgtgctacttcctgaacatgtgcttttaaagattc

SEQ ID NO: 17094 - DNA, 40 bp, Artificial Sequence
  Description of Artificial Sequence: Synthetic primer
attgatgagcttagcaaacagctcagaaggaaaagtagac

SEQ ID NO: 17095 - DNA, 40 bp, Artificial Sequence
  Description of Artificial Sequence: Synthetic primer
cagccccggctccctggagagaggaggggaaggaaagagc

SEQ ID NO: 17096 - DNA, 40 bp, Artificial Sequence
  Description of Artificial Sequence: Synthetic primer
tcgtgtgacactttttatgacattcagcaaagtctcttcc

SEQ ID NO: 17097 - DNA, 40 bp, Artificial Sequence
  Description of Artificial Sequence: Synthetic primer
ggaggccactgccctaagtgaggatcagcatcgactccac

SEQ ID NO: 17098 - DNA, 40 bp, Artificial Sequence
  Description of Artificial Sequence: Synthetic primer
gcatcagtaatgtctttttcgagcacaccactttttgttc

SEQ ID NO: 17099 - DNA, 40 bp, Artificial Sequence
  Description of Artificial Sequence: Synthetic primer
aaacccaaagcaattgttagcaaatcaaaacaaccctatg

SEQ ID NO: 17100 - DNA, 40 bp, Artificial Sequence
  Description of Artificial Sequence: Synthetic primer
cctcagaaatccagtgacccaattctaaagaccatagcac

SEQ ID NO: 17101 - DNA, 40 bp, Artificial Sequence
  Description of Artificial Sequence: Synthetic primer
gggaagagacctaaaacccctagcagggaaaatactgacg

SEQ ID NO: 17102 - DNA, 40 bp, Artificial Sequence
  Description of Artificial Sequence: Synthetic primer
cattgaatggctaatgtgtatgtgaaataaagaaataaag

SEQ ID NO: 17103 - DNA, 40 bp, Artificial Sequence
  Description of Artificial Sequence: Synthetic primer
cactcaacggaccttacatgagaagatgagcaagatgaac

SEQ ID NO: 17104 - DNA, 40 bp, Artificial Sequence
  Description of Artificial Sequence: Synthetic primer
gtgtgtttcgagtcgccagttcccattattggggtgttag

SEQ ID NO: 17105 - DNA, 40 bp, Artificial Sequence
  Description of Artificial Sequence: Synthetic primer
tatgaataatattgaatttgctcatataaagctgtcactg

SEQ ID NO: 17106 - DNA, 40 bp, Artificial Sequence
  Description of Artificial Sequence: Synthetic primer
cgcagttggacagcattggcttcagcataatcaggaaatg

SEQ ID NO: 17107 - DNA, 40 bp, Artificial Sequence
  Description of Artificial Sequence: Synthetic primer
gcaaaaaagaaaaagcaagcccccaaatggatttttgatg

SEQ ID NO: 17108 - DNA, 40 bp, Artificial Sequence
  Description of Artificial Sequence: Synthetic primer
cggaatttctctccaaatgcacctgctcacttttcttttg

SEQ ID NO: 17109 - DNA, 40 bp, Artificial Sequence
  Description of Artificial Sequence: Synthetic primer
gaaaggtagtaatctccattgctcactagatagcattttt

SEQ ID NO: 17110 - DNA, 40 bp, Artificial Sequence
  Description of Artificial Sequence: Synthetic primer
actcttttaaacgaacttcaatattcttacgcacttcttc

SEQ ID NO: 17111 - DNA, 40 bp, Artificial Sequence
  Description of Artificial Sequence: Synthetic primer
attcctgaacttgaagaacaagtggattggtgaaattagg

SEQ ID NO: 17112 - DNA, 40 bp, Artificial Sequence
  Description of Artificial Sequence: Synthetic primer
ggggctcttcccctagacctccccctcacttacataaagc

SEQ ID NO: 17113 - DNA, 40 bp, Artificial Sequence
  Description of Artificial Sequence: Synthetic primer
tgtcacacgtcctttcaattccatcttcatactcttcatc

SEQ ID NO: 17114 - DNA, 40 bp, Artificial Sequence
  Description of Artificial Sequence: Synthetic primer
gcctccagagtctttaaattctcagttatcaacgccaagg

SEQ ID NO: 17115 - DNA, 40 bp, Artificial Sequence
  Description of Artificial Sequence: Synthetic primer
tttaaataagaaggtataataaaatatcccattggtttta

SEQ ID NO: 17116 - DNA, 40 bp, Artificial Sequence
  Description of Artificial Sequence: Synthetic primer
aaggaagagtgtatgtgatcatcgatctctcagggtcgtc

SEQ ID NO: 17117 - DNA, 40 bp, Artificial Sequence
  Description of Artificial Sequence: Synthetic primer
tgacggcggcacagcagccagcgggtgggggacgcctgtg

SEQ ID NO: 17118 - DNA, 40 bp, Artificial Sequence
  Description of Artificial Sequence: Synthetic primer
ctaaaggttgtttctgaagaacttttgctttctttgttgg

SEQ ID NO: 17119 - DNA, 40 bp, Artificial Sequence
  Description of Artificial Sequence: Synthetic primer
cggaggtgaaaacctttgctgggttttctgttcaataaag

SEQ ID NO: 17120 - DNA, 40 bp, Artificial Sequence
  Description of Artificial Sequence: Synthetic primer
ttttttaaaccagggatgtctgttgaaataaaacattcag

SEQ ID NO: 17121 - DNA, 40 bp, Artificial Sequence
  Description of Artificial Sequence: Synthetic primer
gtttggcgtcccctacgtctacacacagagccgcattctc

SEQ ID NO: 17122 - DNA, 40 bp, Artificial Sequence
  Description of Artificial Sequence: Synthetic primer
ctcgcagctctcagccaccttcccccagctgaagtccttg

SEQ ID NO: 17123 - DNA, 40 bp, Artificial Sequence
  Description of Artificial Sequence: Synthetic primer
gcggctttctctccgcgcctgtgttcgccgggacgcattc

SEQ ID NO: 17124 - DNA, 40 bp, Artificial Sequence
  Description of Artificial Sequence: Synthetic primer
agatgacaaataactaggaatatctgctggcaagttggtc

SEQ ID NO: 17125 - DNA, 40 bp, Artificial Sequence
  Description of Artificial Sequence: Synthetic primer
agctttcccgggataagtagctttagcgatcgggagacag

SEQ ID NO: 17126 - DNA, 40 bp, Artificial Sequence
  Description of Artificial Sequence: Synthetic primer
tagaaacttcacttacaggttgttgtgaactacgattttc

SEQ ID NO: 17127 - DNA, 40 bp, Artificial Sequence
  Description of Artificial Sequence: Synthetic primer
ccctcccttgcaggggctgcggggaggagtcgcccacctg

SEQ ID NO: 17128 - DNA, 40 bp, Artificial Sequence
  Description of Artificial Sequence: Synthetic primer
ctgtgcagtaaagaagataattaaaatgagcgataaatag

SEQ ID NO: 17129 - DNA, 40 bp, Artificial Sequence
  Description of Artificial Sequence: Synthetic primer
gccaagcgggcccggcatggacagcagtggggcgacaagg

SEQ ID NO: 17130 - DNA, 40 bp, Artificial Sequence
  Description of Artificial Sequence: Synthetic primer
aagaagtaccaacctaaaaagaactcgaaggaggaagaag

SEQ ID NO: 17131 - DNA, 40 bp, Artificial Sequence
  Description of Artificial Sequence: Synthetic primer
ggagtcaactgaggcatagggggagggggtggagcaatag

SEQ ID NO: 17132 - DNA, 40 bp, Artificial Sequence
  Description of Artificial Sequence: Synthetic primer
tctagagaactgaatgttagtaaaatcggctcctttgctg

SEQ ID NO: 17133 - DNA, 40 bp, Artificial Sequence
  Description of Artificial Sequence: Synthetic primer
caggtctccgtagcggcagtactcagtgatgatatagatg

SEQ ID NO: 17134 - DNA, 40 bp, Artificial Sequence
  Description of Artificial Sequence: Synthetic primer
agctcagctgcagaggttccactgattagcaaaggactac

SEQ ID NO: 17135 - DNA, 40 bp, Artificial Sequence
  Description of Artificial Sequence: Synthetic primer
atccccgtaggctccgggcgagcggctgctgcttcttcag

SEQ ID NO: 17136 - DNA, 40 bp, Artificial Sequence
  Description of Artificial Sequence: Synthetic primer
aagctcatagtggcatgtgtgaatctgacaaaattaaaag

SEQ ID NO: 17137 - DNA, 40 bp, Artificial Sequence
  Description of Artificial Sequence: Synthetic primer
gaaagtactgatggagaggtagagactcaggtatacaacc

SEQ ID NO: 17138 - DNA, 40 bp, Artificial Sequence
  Description of Artificial Sequence: Synthetic primer
gggggtctcattgcacctccatagttctgtaatgataacc

SEQ ID NO: 17139 - DNA, 40 bp, Artificial Sequence
  Description of Artificial Sequence: Synthetic primer
gcacaggaatggaccctgtgtgaggaggtcagaacaaaag

SEQ ID NO: 17140 - DNA, 40 bp, Artificial Sequence
  Description of Artificial Sequence: Synthetic primer
gggcctgtagtttttgcagattagtattctccctttgaac

SEQ ID NO: 17141 - DNA, 40 bp, Artificial Sequence
  Description of Artificial Sequence: Synthetic primer
aactctgactaataaatagatccaaattaagaatttctac

SEQ ID NO: 17142 - DNA, 40 bp, Artificial Sequence
  Description of Artificial Sequence: Synthetic primer
ccaggccctcggcctcctgcttcacgggcaccgccacctc

SEQ ID NO: 17143 - DNA, 40 bp, Artificial Sequence
  Description of Artificial Sequence: Synthetic primer
attatcatgagtattaacacgacttttaaaatacgcacag

SEQ ID NO: 17144 - DNA, 40 bp, Artificial Sequence
  Description of Artificial Sequence: Synthetic primer
gattctgaggaagatgaacccacaaagaagaaaactatcc

SEQ ID NO: 17145 - DNA, 40 bp, Artificial Sequence
  Description of Artificial Sequence: Synthetic primer
tgcgtgccccctgcgagcgccctgccctcactcccctgtg

SEQ ID NO: 17146 - DNA, 40 bp, Artificial Sequence
  Description of Artificial Sequence: Synthetic primer
aggaacaaagcacctctatcatataagcacataaacacac

SEQ ID NO: 17147 - DNA, 40 bp, Artificial Sequence
  Description of Artificial Sequence: Synthetic primer
atccagaaggaggctgaagaggaacagaaaagaaagaatg

SEQ ID NO: 17148 - DNA, 40 bp, Artificial Sequence
  Description of Artificial Sequence: Synthetic primer
gtaactcagcataaactattactatcactcctttgaactc

SEQ ID NO: 17149 - DNA, 40 bp, Artificial Sequence
  Description of Artificial Sequence: Synthetic primer
aaatgactcataggtccctgacatttagttgattattttc

SEQ ID NO: 17150 - DNA, 40 bp, Artificial Sequence
  Description of Artificial Sequence: Synthetic primer
gcaagctttgcccatattgaggaagagaattttgtgaatg

SEQ ID NO: 17151 - DNA, 40 bp, Artificial Sequence
  Description of Artificial Sequence: Synthetic primer
aagcttcagactcctctattttgacttcctgtctctgaac

SEQ ID NO: 17152 - DNA, 40 bp, Artificial Sequence
  Description of Artificial Sequence: Synthetic primer
acagagagattggtgtttttgtgaggcagtgagacctaag

SEQ ID NO: 17153 - DNA, 40 bp, Artificial Sequence
  Description of Artificial Sequence: Synthetic primer
tatacatttatcacctttcctttatgtttaaggttgttag

SEQ ID NO: 17154 - DNA, 40 bp, Artificial Sequence
  Description of Artificial Sequence: Synthetic primer
ttcctgggcctggccaccccagtcctagctacggttcctg

SEQ ID NO: 17155 - DNA, 40 bp, Artificial Sequence
  Description of Artificial Sequence: Synthetic primer
tttttcacccaccagcagcaattttggaagaaaaatgaag

SEQ ID NO: 17156 - DNA, 40 bp, Artificial Sequence
  Description of Artificial Sequence: Synthetic primer
attgcagatgaaaacaatatgcttttggactatcaagacc

SEQ ID NO: 17157 - DNA, 40 bp, Artificial Sequence
  Description of Artificial Sequence: Synthetic primer
tttaggatttcatccacacagctcacatcaccagaagctg

SEQ ID NO: 17158 - DNA, 40 bp, Artificial Sequence
  Description of Artificial Sequence: Synthetic primer
ccagtgatgacctgaactggtgaatttgggtaagtaggat

SEQ ID NO: 17159 - DNA, 40 bp, Artificial Sequence
  Description of Artificial Sequence: Synthetic primer
tcacaagccctgcaggttgtccctgacctctccaagaagg

SEQ ID NO: 17160 - DNA, 40 bp, Artificial Sequence
  Description of Artificial Sequence: Synthetic primer
caggagctgccgctccgcgtccttgcggctcaggttcttg

SEQ ID NO: 17161 - DNA, 40 bp, Artificial Sequence
  Description of Artificial Sequence: Synthetic primer
aaaatccgctcactgagagttgtactttttggttatcctg

SEQ ID NO: 17162 - DNA, 40 bp, Artificial Sequence
  Description of Artificial Sequence: Synthetic primer
cttccagtttgggaaatgaatttagtttatcaatgtcttc

SEQ ID NO: 17163 - DNA, 40 bp, Artificial Sequence
  Description of Artificial Sequence: Synthetic primer
aaattttgccaaacgcatcatcaactaagcgtatttcttc

SEQ ID NO: 17164 - DNA, 40 bp, Artificial Sequence
  Description of Artificial Sequence: Synthetic primer
ggaactcaggtttagaaactccaactgaggaacatttgac

SEQ ID NO: 17165 - DNA, 40 bp, Artificial Sequence
  Description of Artificial Sequence: Synthetic primer
aggagtcgatgcttgagttgtgtttggtaccgtggaaacg

SEQ ID NO: 17166 - DNA, 40 bp, Artificial Sequence
  Description of Artificial Sequence: Synthetic primer
tcatagtattgtcatggaaaaaataaatatattttcttac

SEQ ID NO: 17167 - DNA, 40 bp, Artificial Sequence
  Description of Artificial Sequence: Synthetic primer
ttgtaatttgacttattcttgggataatattttagttttc

SEQ ID NO: 17168 - DNA, 40 bp, Artificial Sequence
  Description of Artificial Sequence: Synthetic primer
taggatttctaagtcagtatgtgcatttcacacgataaag

SEQ ID NO: 17169 - DNA, 40 bp, Artificial Sequence
  Description of Artificial Sequence: Synthetic primer
cgcagccccagtttctgggccagctcctgaccaagctgag

SEQ ID NO: 17170 - DNA, 40 bp, Artificial Sequence
  Description of Artificial Sequence: Synthetic primer
agctccaggctcgccaggctcaccagggggaccttggaag

SEQ ID NO: 17171 - DNA, 40 bp, Artificial Sequence
  Description of Artificial Sequence: Synthetic primer
catatcctatcatgcctgttggtgtagtagcaggataggc

SEQ ID NO: 17172 - DNA, 40 bp, Artificial Sequence
  Description of Artificial Sequence: Synthetic primer
gcaaaccaatatttgataatttccgaccccctccactaac

SEQ ID NO: 17173 - DNA, 40 bp, Artificial Sequence
  Description of Artificial Sequence: Synthetic primer
ccagccagtggcagtgcgaggtggaggaggcaaacaagtg

SEQ ID NO: 17174 - DNA, 40 bp, Artificial Sequence
  Description of Artificial Sequence: Synthetic primer
ggctcttcaccaggagcgtgacgggctcgggttcggtctc

SEQ ID NO: 17175 - DNA, 40 bp, Artificial Sequence
  Description of Artificial Sequence: Synthetic primer
tgtgctggtagaatgtggtggcatttattaatggttgctg

SEQ ID NO: 17176 - DNA, 40 bp, Artificial Sequence
  Description of Artificial Sequence: Synthetic primer
tttcttttttaattagataatcacacggaaaattaagctg

SEQ ID NO: 17177 - DNA, 40 bp, Artificial Sequence
  Description of Artificial Sequence: Synthetic primer
ataaacttcaaacctaacttttataagaacagactgatgc

SEQ ID NO: 17178 - DNA, 40 bp, Artificial Sequence
  Description of Artificial Sequence: Synthetic primer
ggggaagctgaagattaacatgaaaaagtactgcaagaag

SEQ ID NO: 17179 - DNA, 40 bp, Artificial Sequence
  Description of Artificial Sequence: Synthetic primer
gttagaagaatttatcaatggaccaaataatgctcatatc

SEQ ID NO: 17180 - DNA, 40 bp, Artificial Sequence
  Description of Artificial Sequence: Synthetic primer
ccagacaacaagtatataatgtctaactcgggagactatg

SEQ ID NO: 17181 - DNA, 40 bp, Artificial Sequence
  Description of Artificial Sequence: Synthetic primer
cgctcgctcgccgcgcgctctcttcctcttacaaactttc

SEQ ID NO: 17182 - DNA, 40 bp, Artificial Sequence
  Description of Artificial Sequence: Synthetic primer
tgggctctggcaaatctctgaggctggaacaggggtctcc

SEQ ID NO: 17183 - DNA, 40 bp, Artificial Sequence
  Description of Artificial Sequence: Synthetic primer
ccgtcgacctcagaggcggggccggaagcgctacggtttg

SEQ ID NO: 17184 - DNA, 40 bp, Artificial Sequence
  Description of Artificial Sequence: Synthetic primer
ggcatctggcgccacgaaacggagaccactcttcacgatg

SEQ ID NO: 17185 - DNA, 40 bp, Artificial Sequence
  Description of Artificial Sequence: Synthetic primer
gaaataatatattctatcatagcttcagatgacacactac

SEQ ID NO: 17186 - DNA, 40 bp, Artificial Sequence
  Description of Artificial Sequence: Synthetic primer
tagtggctgccgccaagccgtggtggtccaggaggacagc

SEQ ID NO: 17187 - DNA, 40 bp, Artificial Sequence
  Description of Artificial Sequence: Synthetic primer
accttgaaaggttttgttttgtactctcttaattttgtgc

SEQ ID NO: 17188 - DNA, 40 bp, Artificial Sequence
  Description of Artificial Sequence: Synthetic primer
ccgatgttgaggtgggaactgaccttgtcccttctgtcac

SEQ ID NO: 17189 - DNA, 40 bp, Artificial Sequence
  Description of Artificial Sequence: Synthetic primer
ggggggaactgcattttagggttccattgtcttggtggtg

SEQ ID NO: 17190 - DNA, 40 bp, Artificial Sequence
  Description of Artificial Sequence: Synthetic primer
agctgttatttcacagatagagggaaatggcagagaactg

SEQ ID NO: 17191 - DNA, 40 bp, Artificial Sequence
  Description of Artificial Sequence: Synthetic primer
cttgcctttccttctcaagttctgcttgaagggctgattg

SEQ ID NO: 17192 - DNA, 40 bp, Artificial Sequence
  Description of Artificial Sequence: Synthetic primer
gcaggttcagaggactgggtgaatgctattgagtttgttc

SEQ ID NO: 17193 - DNA, 40 bp, Artificial Sequence
  Description of Artificial Sequence: Synthetic primer
cccaggatgtttttctttctactgggtctccctctggttg

SEQ ID NO: 17194 - DNA, 40 bp, Artificial Sequence
  Description of Artificial Sequence: Synthetic primer
ctccctagagcccttcttccagtcggctcccgctccactc

SEQ ID NO: 17195 - DNA, 40 bp, Artificial Sequence
  Description of Artificial Sequence: Synthetic primer
gcaaaattctgtcaagataatcaaacaatttcatcagaac

SEQ ID NO: 17196 - DNA, 40 bp, Artificial Sequence
  Description of Artificial Sequence: Synthetic primer
gaagggcccttgaccactggggcattagtccctccaaacc

SEQ ID NO: 17197 - DNA, 40 bp, Artificial Sequence
  Description of Artificial Sequence: Synthetic primer
tcaggatatactgaagtatttgggaaaataaaagctgcac

SEQ ID NO: 17198 - DNA, 40 bp, Artificial Sequence
  Description of Artificial Sequence: Synthetic primer
aagcagctgggggcacagatgtgggagcagggggaagagg

SEQ ID NO: 17199 - DNA, 40 bp, Artificial Sequence
  Description of Artificial Sequence: Synthetic primer
aaactgaaagctgattaattacaggaggtttgttcaggtc

SEQ ID NO: 17200 - DNA, 40 bp, Artificial Sequence
  Description of Artificial Sequence: Synthetic primer
ttggtgaaatcaagaaagcaagtaaatactggtaatacac

SEQ ID NO: 17201 - DNA, 40 bp, Artificial Sequence
  Description of Artificial Sequence: Synthetic primer
accaggtccttaactgccttatcattcttgtcggcctcag

SEQ ID NO: 17202 - DNA, 40 bp, Artificial Sequence
  Description of Artificial Sequence: Synthetic primer
gttgattctcagttactgtaggcatcaaaaggcaaaaatc

SEQ ID NO: 17203 - DNA, 40 bp, Artificial Sequence
  Description of Artificial Sequence: Synthetic primer
aaggataaactgacagaggctgaagacaaaattaaagagc

SEQ ID NO: 17204 - DNA, 40 bp, Artificial Sequence
  Description of Artificial Sequence: Synthetic primer
ctctactgaaatggtgccagaagaagacacaaggttatgc

SEQ ID NO: 17205 - DNA, 40 bp, Artificial Sequence
  Description of Artificial Sequence: Synthetic primer
ggtggtctccaggtgccattttaaagctctaaagaaatgc

SEQ ID NO: 17206 - DNA, 40 bp, Artificial Sequence
  Description of Artificial Sequence: Synthetic primer
ccccgccgggtcgcgcggacgagggcgcgggctcgggcag

SEQ ID NO: 17207 - DNA, 40 bp, Artificial Sequence
  Description of Artificial Sequence: Synthetic primer
tcaccaacactattgttgcgctcatgcaggtgggagatcg

SEQ ID NO: 17208 - DNA, 40 bp, Artificial Sequence
  Description of Artificial Sequence: Synthetic primer
tgctggccccgaacggccggcgccacacggtgaaggtgac

SEQ ID NO: 17209 - DNA, 40 bp, Artificial Sequence
  Description of Artificial Sequence: Synthetic primer
attttgatgatgatggagaagggaacagtaaatttttgag

SEQ ID NO: 17210 - DNA, 40 bp, Artificial Sequence
  Description of Artificial Sequence: Synthetic primer
acgacaacgttgctgaatacttgaagcttgccaacagtgc

SEQ ID NO: 17211 - DNA, 40 bp, Artificial Sequence
  Description of Artificial Sequence: Synthetic primer
gcagggctaagtcgaagctgtccatggtgggaggtgtcag

SEQ ID NO: 17212 - DNA, 40 bp, Artificial Sequence
  Description of Artificial Sequence: Synthetic primer
gttcattgctcctccgccacccattcgcatgtctctttcc

SEQ ID NO: 17213 - DNA, 40 bp, Artificial Sequence
  Description of Artificial Sequence: Synthetic primer
cgctcctccacggccatctccacctccccactcctcactg

SEQ ID NO: 17214 - DNA, 40 bp, Artificial Sequence
  Description of Artificial Sequence: Synthetic primer
aagtgatcacttctggaaaacgcagcatcacattcactgc

SEQ ID NO: 17215 - DNA, 40 bp, Artificial Sequence
  Description of Artificial Sequence: Synthetic primer
ttcggtgtgggtgcagttcttccacaacaatctgataagc

SEQ ID NO: 17216 - DNA, 40 bp, Artificial Sequence
  Description of Artificial Sequence: Synthetic primer
tgagccgactccgttcatctactagtccttctagcatcag

SEQ ID NO: 17217 - DNA, 40 bp, Artificial Sequence
  Description of Artificial Sequence: Synthetic primer
gctggggggaactgtactggggcatctgggggttcctctg

SEQ ID NO: 17218 - DNA, 40 bp, Artificial Sequence
  Description of Artificial Sequence: Synthetic primer
caatctacactgaaaccctgtgttggaatgctttactttc

SEQ ID NO: 17219 - DNA, 40 bp, Artificial Sequence
  Description of Artificial Sequence: Synthetic primer
gagtttaatggaatgattaatggagaaaccaatgaaaata

SEQ ID NO: 17220 - DNA, 40 bp, Artificial Sequence
  Description of Artificial Sequence: Synthetic primer
aatccggggtagccacggccataggtcgccacgaagttgg

SEQ ID NO: 17221 - DNA, 40 bp, Artificial Sequence
  Description of Artificial Sequence: Synthetic primer
ctgcatgatcaaagatgatgtttccctctttttacttttc

SEQ ID NO: 17222 - DNA, 40 bp, Artificial Sequence
  Description of Artificial Sequence: Synthetic primer
agggccctcccctgccctgcacacgtggtatttcgctatc

SEQ ID NO: 17223 - DNA, 40 bp, Artificial Sequence
  Description of Artificial Sequence: Synthetic primer
tgcttcttatccttacactcccccagccccagagaaactg

SEQ ID NO: 17224 - DNA, 40 bp, Artificial Sequence
  Description of Artificial Sequence: Synthetic primer
cagtgcagcccctcctccccgctgtgtttattaggggaag

SEQ ID NO: 17225 - DNA, 40 bp, Artificial Sequence
  Description of Artificial Sequence: Synthetic primer
aggtaatccaaactggcagacagtaaatgggttgtatgac

SEQ ID NO: 17226 - DNA, 40 bp, Artificial Sequence
  Description of Artificial Sequence: Synthetic primer
gtgtgaatggacacctatcaggagcctactccaaaactgc

SEQ ID NO: 17227 - DNA, 40 bp, Artificial Sequence
  Description of Artificial Sequence: Synthetic primer
cgcagcttgtcaccctgcttgtccgaggagtttgttactc

SEQ ID NO: 17228 - DNA, 40 bp, Artificial Sequence
  Description of Artificial Sequence: Synthetic primer
ctacataagactggacatttaacttttctaccatttctgc

SEQ ID NO: 17229 - DNA, 40 bp, Artificial Sequence
  Description of Artificial Sequence: Synthetic primer
ttttttcccctgtaagcaaccgaggtagaaaaataaattg

SEQ ID NO: 17230 - DNA, 40 bp, Artificial Sequence
  Description of Artificial Sequence: Synthetic primer
ctctgggggagaatgttcctcgtagatcagcaggtttctg

SEQ ID NO: 17231 - DNA, 40 bp, Artificial Sequence
  Description of Artificial Sequence: Synthetic primer
ctccatcatggctgccttcatggacaaccctttcgagttc

SEQ ID NO: 17232 - DNA, 40 bp, Artificial Sequence
  Description of Artificial Sequence: Synthetic primer
ttctgatacattgaagactccagattttacaaaactatcc

SEQ ID NO: 17233 - DNA, 40 bp, Artificial Sequence
  Description of Artificial Sequence: Synthetic primer
ccttggctttataactcctctgggggtgatattggtggtg

SEQ ID NO: 17234 - DNA, 40 bp, Artificial Sequence
  Description of Artificial Sequence: Synthetic primer
gagcacctcctaagaagtgaaaacccattacattcacctg

SEQ ID NO: 17235 - DNA, 40 bp, Artificial Sequence
  Description of Artificial Sequence: Synthetic primer
tggtgcccgagtcggccaagcatgggcaaccactcaggac

SEQ ID NO: 17236 - DNA, 40 bp, Artificial Sequence
  Description of Artificial Sequence: Synthetic primer
caactccccatgaagccccggcctcaccccgaactacaac

SEQ ID NO: 17237 - DNA, 40 bp, Artificial Sequence
  Description of Artificial Sequence: Synthetic primer
ccgatatcatctgtctggtctctgtgaacagcaaggaatc

SEQ ID NO: 17238 - DNA, 40 bp, Artificial Sequence
  Description of Artificial Sequence: Synthetic primer
gtgccactgccatttggtgagcacccccagcaggagtatg

SEQ ID NO: 17239 - DNA, 40 bp, Artificial Sequence
  Description of Artificial Sequence: Synthetic primer
tccctccccctaggacagcacagtgaatatagctcagtag

SEQ ID NO: 17240 - DNA, 40 bp, Artificial Sequence
  Description of Artificial Sequence: Synthetic primer
cctgaactccaggtaaaagtaacaaagactatcaagaatg

SEQ ID NO: 17241 - DNA, 40 bp, Artificial Sequence
  Description of Artificial Sequence: Synthetic primer
tcaagtcttgtcttgcttgttctcgtctatcttgcataac

SEQ ID NO: 17242 - DNA, 40 bp, Artificial Sequence
  Description of Artificial Sequence: Synthetic primer
gcttctcctttatctgcgcctccctgaaggccttggtcac

SEQ ID NO: 17243 - DNA, 40 bp, Artificial Sequence
  Description of Artificial Sequence: Synthetic primer
gcacaagatgccacagaaaattctgcttccagtttagcac

SEQ ID NO: 17244 - DNA, 40 bp, Artificial Sequence
  Description of Artificial Sequence: Synthetic primer
gggctggaggcagcagggtctccaaggaggctgccagtgc

SEQ ID NO: 17245 - DNA, 40 bp, Artificial Sequence
  Description of Artificial Sequence: Synthetic primer
tatgtgtatgtttttcacaaggctggtagaggttattttg

SEQ ID NO: 17246 - DNA, 40 bp, Artificial Sequence
  Description of Artificial Sequence: Synthetic primer
aattgaatctgaacaccacagtcaaacttaagacacatac

SEQ ID NO: 17247 - DNA, 40 bp, Artificial Sequence
  Description of Artificial Sequence: Synthetic primer
caggcccaccagaagccatcgctctgactatcttcctttg

SEQ ID NO: 17248 - DNA, 40 bp, Artificial Sequence
  Description of Artificial Sequence: Synthetic primer
aaaaaattaacaaagaagagcgaaaatgacagaccgcaac

SEQ ID NO: 17249 - DNA, 40 bp, Artificial Sequence
  Description of Artificial Sequence: Synthetic primer
taaccccgtttgatggcattgtagaactgctcgttcatgg

SEQ ID NO: 17250 - DNA, 40 bp, Artificial Sequence
  Description of Artificial Sequence: Synthetic primer
gcaccagagcagcaccgaggtctcctccaccaaccaggtg

SEQ ID NO: 17251 - DNA, 40 bp, Artificial Sequence
  Description of Artificial Sequence: Synthetic primer
gtgaagactcagtgtgcagaaaaggtggagtaacctcagc

SEQ ID NO: 17252 - DNA, 40 bp, Artificial Sequence
  Description of Artificial Sequence: Synthetic primer
caacccagaacaaagcaaaacccagcagactgtacttagc

SEQ ID NO: 17253 - DNA, 40 bp, Artificial Sequence
  Description of Artificial Sequence: Synthetic primer
tgtcccagtctctccagcgaggtgctgccttggtctctcg

SEQ ID NO: 17254 - DNA, 40 bp, Artificial Sequence
  Description of Artificial Sequence: Synthetic primer
gcacggcagcggagcgtccccagtgcatgggcggctaagg

SEQ ID NO: 17255 - DNA, 40 bp, Artificial Sequence
  Description of Artificial Sequence: Synthetic primer
actcaggagtggctagagaagcaggcccagctggagaagg

SEQ ID NO: 17256 - DNA, 40 bp, Artificial Sequence
  Description of Artificial Sequence: Synthetic primer
gccactgaagacttaacatatgtcttttacactcaggttg

SEQ ID NO: 17257 - DNA, 40 bp, Artificial Sequence
  Description of Artificial Sequence: Synthetic primer
ggaccacagacggtaatgtggtgatcacagccaggtggag

SEQ ID NO: 17258 - DNA, 40 bp, Artificial Sequence
  Description of Artificial Sequence: Synthetic primer
gtcctttcgcagacaagctctcaagctgctccaaataagc

SEQ ID NO: 17259 - DNA, 40 bp, Artificial Sequence
  Description of Artificial Sequence: Synthetic primer
ttcgttttgggagataacttgttttgctccaagccgcatc

SEQ ID NO: 17260 - DNA, 40 bp, Artificial Sequence
  Description of Artificial Sequence: Synthetic primer
ccactgtaacggtgccaactccaatttaccaaactagcag

SEQ ID NO: 17261 - DNA, 40 bp, Artificial Sequence
  Description of Artificial Sequence: Synthetic primer
ccaacaccttgtcttgattttactttcccaaatccaaacc

SEQ ID NO: 17262 - DNA, 40 bp, Artificial Sequence
  Description of Artificial Sequence: Synthetic primer
tttttcattttgacatgtggtttacctaatagttttgttc

SEQ ID NO: 17263 - DNA, 40 bp, Artificial Sequence
  Description of Artificial Sequence: Synthetic primer
cagggccgcttccaacagcaagatcagctcctcaaagtag

SEQ ID NO: 17264 - DNA, 40 bp, Artificial Sequence
  Description of Artificial Sequence: Synthetic primer
gaagggcagcggggcgaggccggcgggcagcttgtagagc

SEQ ID NO: 17265 - DNA, 40 bp, Artificial Sequence
  Description of Artificial Sequence: Synthetic primer
aggtggaagagggctgcaaatccttgtgggaaaagaaatc

SEQ ID NO: 17266 - DNA, 40 bp, Artificial Sequence
  Description of Artificial Sequence: Synthetic primer
gtacggtcaggttgacgtggctcacgctgatctcaggaag

SEQ ID NO: 17267 - DNA, 40 bp, Artificial Sequence
  Description of Artificial Sequence: Synthetic primer
tgcctctaccacttctatgaccagatggacctggctggag

SEQ ID NO: 17268 - DNA, 40 bp, Artificial Sequence
  Description of Artificial Sequence: Synthetic primer
ccgggggaggagcctgcggacgcccagtcgggtggagcac

SEQ ID NO: 17269 - DNA, 40 bp, Artificial Sequence
  Description of Artificial Sequence: Synthetic primer
aatgaagtgctatcatctctggaaggtatctgcattgaac

SEQ ID NO: 17270 - DNA, 40 bp, Artificial Sequence
  Description of Artificial Sequence: Synthetic primer
acccccagaaaatgcatgtatcaatatgagaataaagaac

SEQ ID NO: 17271 - DNA, 40 bp, Artificial Sequence
  Description of Artificial Sequence: Synthetic primer
gcagagcggactgtacgacagccagaacccacccacagtc

SEQ ID NO: 17272 - DNA, 40 bp, Artificial Sequence
  Description of Artificial Sequence: Synthetic primer
ccagacctggaggactgcagcttccggtgtcgggggacct

SEQ ID NO: 17273 - DNA, 40 bp, Artificial Sequence
  Description of Artificial Sequence: Synthetic primer
aatacgtgtgcggctgcttttaagaactatgtgtctggtc

SEQ ID NO: 17274 - DNA, 40 bp, Artificial Sequence
  Description of Artificial Sequence: Synthetic primer
gtcgcagggcccggcggcacccctgcccggcctcttcgtc

SEQ ID NO: 17275 - DNA, 40 bp, Artificial Sequence
  Description of Artificial Sequence: Synthetic primer
cgtccaaaaagaatgttatagcgagtgctcttaaatgttg

SEQ ID NO: 17276 - DNA, 40 bp, Artificial Sequence
  Description of Artificial Sequence: Synthetic primer
atcagctctccagaaatacccaagggagtcactgttattg

SEQ ID NO: 17277 - DNA, 40 bp, Artificial Sequence
  Description of Artificial Sequence: Synthetic primer
gcacctcaacgtccatcgttgtcagcatggtgtcctcttc

SEQ ID NO: 17278 - DNA, 40 bp, Artificial Sequence
  Description of Artificial Sequence: Synthetic primer
atctcctttggaatccattttataaggcccccaaatcaac

SEQ ID NO: 17279 - DNA, 40 bp, Artificial Sequence
  Description of Artificial Sequence: Synthetic primer
gtcccatgacgtttggaccccgcggccaccactggcaagg

SEQ ID NO: 17280 - DNA, 40 bp, Artificial Sequence
  Description of Artificial Sequence: Synthetic primer
ggctggcggggcccccacgctgcagctgccaggctgtctc

SEQ ID NO: 17281 - DNA, 40 bp, Artificial Sequence
  Description of Artificial Sequence: Synthetic primer
gccaaaatggaagtggatcaaccagaaccagcagatactc

SEQ ID NO: 17282 - DNA, 40 bp, Artificial Sequence
  Description of Artificial Sequence: Synthetic primer
caaagtggatccagttagagcccattaatcttgatcattc

SEQ ID NO: 17283 - DNA, 40 bp, Artificial Sequence
  Description of Artificial Sequence: Synthetic primer
ccggggcttccagttcagcttctgtttcgctttggtgcag

SEQ ID NO: 17284 - DNA, 40 bp, Artificial Sequence
  Description of Artificial Sequence: Synthetic primer
ccccctttgctctttatatctgacttcttgttgttgttgg

SEQ ID NO: 17285 - DNA, 40 bp, Artificial Sequence
  Description of Artificial Sequence: Synthetic primer
tgctgtcgccatgcatgttgctgccaactctatccaaaac

SEQ ID NO: 17286 - DNA, 40 bp, Artificial Sequence
  Description of Artificial Sequence: Synthetic primer
agtctctcaggcacaacacaagtgtcgtcaaagtataatc

SEQ ID NO: 17287 - DNA, 40 bp, Artificial Sequence
  Description of Artificial Sequence: Synthetic primer
actgagttgactcctttgttggaggaggtagtgggtggag

SEQ ID NO: 17288 - DNA, 40 bp, Artificial Sequence
  Description of Artificial Sequence: Synthetic primer
gcccctgccactgccaccccagccccgactagccctttcc

SEQ ID NO: 17289 - DNA, 40 bp, Artificial Sequence
  Description of Artificial Sequence: Synthetic primer
gacctctaactgtaatttccttgcttcttctgtatgtttc

SEQ ID NO: 17290 - DNA, 40 bp, Artificial Sequence
  Description of Artificial Sequence: Synthetic primer
taaccaaaaagcaggatcaagctgctcgaaaaataatgag

SEQ ID NO: 17291 - DNA, 40 bp, Artificial Sequence
  Description of Artificial Sequence: Synthetic primer
attccacagatatctttttcattattgtgaagtgatgttc

SEQ ID NO: 17292 - DNA, 40 bp, Artificial Sequence
  Description of Artificial Sequence: Synthetic primer
cagtgcttttctcttcttcaacatcaagaaccggaatcag

SEQ ID NO: 17293 - DNA, 40 bp, Artificial Sequence
  Description of Artificial Sequence: Synthetic primer
ggaggcagttgttcagatttcatttctgtgtctgaatttg

SEQ ID NO: 17294 - DNA, 40 bp, Artificial Sequence
  Description of Artificial Sequence: Synthetic primer
taccggttggttgtttaagcgtgaatttctgggaaagcag

SEQ ID NO: 17295 - DNA, 40 bp, Artificial Sequence
  Description of Artificial Sequence: Synthetic primer
agtagtctggatctcagagtataccaaatctccctttttg

SEQ ID NO: 17296 - DNA, 40 bp, Artificial Sequence
  Description of Artificial Sequence: Synthetic primer
ctgcttttccctcctcctgtcgcggctccgcgcccccaac

SEQ ID NO: 17297 - DNA, 40 bp, Artificial Sequence
  Description of Artificial Sequence: Synthetic primer
gaacttaatgtctgaagaccgctagggtacggtgctgctc

SEQ ID NO: 17298 - DNA, 40 bp, Artificial Sequence
  Description of Artificial Sequence: Synthetic primer
cttggtaatataaatattctggggttctctggtgctgatg

SEQ ID NO: 17299 - DNA, 40 bp, Artificial Sequence
  Description of Artificial Sequence: Synthetic primer
gcccgcctcggccctcctgcctctcagcgatcgccacctc

SEQ ID NO: 17300 - DNA, 40 bp, Artificial Sequence
  Description of Artificial Sequence: Synthetic primer
accagagggaatgctgctggaagctcacagacaggtgatg

SEQ ID NO: 17301 - DNA, 40 bp, Artificial Sequence
  Description of Artificial Sequence: Synthetic primer
ttcctttttcactgttccagtctttagatccaggatacgc

SEQ ID NO: 17302 - DNA, 40 bp, Artificial Sequence
  Description of Artificial Sequence: Synthetic primer
gatgcctctggcacttccttcaaaccattttcttcctctg

SEQ ID NO: 17303 - DNA, 40 bp, Artificial Sequence
  Description of Artificial Sequence: Synthetic primer
ccatggaagcggtagtgtatagaggtatactattctcagc

SEQ ID NO: 17304 - DNA, 40 bp, Artificial Sequence
  Description of Artificial Sequence: Synthetic primer
ggcctcctgagctacactgacaagctgtgttcccagaaag

SEQ ID NO: 17305 - DNA, 40 bp, Artificial Sequence
  Description of Artificial Sequence: Synthetic primer
cctccaaaataagtgagagtctatggtggtttaaaaagag

SEQ ID NO: 17306 - DNA, 40 bp, Artificial Sequence
  Description of Artificial Sequence: Synthetic primer
ccctccatcacctcacgcctttctgttccttgtcctcacc

SEQ ID NO: 17307 - DNA, 40 bp, Artificial Sequence
  Description of Artificial Sequence: Synthetic primer
cgcgctccgaccctgccatgtctctccccagctgtctctc

SEQ ID NO: 17308 - DNA, 40 bp, Artificial Sequence
  Description of Artificial Sequence: Synthetic primer
gtatgcagcttaaagttgataaagagaagtggttatatcg

SEQ ID NO: 17309 - DNA, 40 bp, Artificial Sequence
  Description of Artificial Sequence: Synthetic primer
ggccccggatgttcatgggaattcccttgtacactcgatc

SEQ ID NO: 17310 - DNA, 40 bp, Artificial Sequence
  Description of Artificial Sequence: Synthetic primer
actttttttgtgcacagtacctccaaataccttattcatc

SEQ ID NO: 17311 - DNA, 40 bp, Artificial Sequence
  Description of Artificial Sequence: Synthetic primer
tactgagtactcgcacagaagcattagaagccttacagag

SEQ ID NO: 17312 - DNA, 40 bp, Artificial Sequence
  Description of Artificial Sequence: Synthetic primer
tgttgggtggcagggacagtgctggaggagatgcctttac

SEQ ID NO: 17313 - DNA, 40 bp, Artificial Sequence
  Description of Artificial Sequence: Synthetic primer
acaataatagtacacacttcagagtaagacaaatgcaaag

SEQ ID NO: 17314 - DNA, 40 bp, Artificial Sequence
  Description of Artificial Sequence: Synthetic primer
cagccagtttgcttaatagctgcaaagctatcctctacac

SEQ ID NO: 17315 - DNA, 40 bp, Artificial Sequence
  Description of Artificial Sequence: Synthetic primer
gccagccaccgcggcgggcgggctgagcgggggtacacag

SEQ ID NO: 17316 - DNA, 40 bp, Artificial Sequence
  Description of Artificial Sequence: Synthetic primer
ggctgtgcactattgtcaccagaaaaatattgtacacagg

SEQ ID NO: 17317 - DNA, 40 bp, Artificial Sequence
  Description of Artificial Sequence: Synthetic primer
gagatgtggcagcttccctccagctgtttcatcaactaac

SEQ ID NO: 17318 - DNA, 40 bp, Artificial Sequence
  Description of Artificial Sequence: Synthetic primer
ttcaaaatccgacaaactctggtcttcggacgtttgactc

SEQ ID NO: 17319 - DNA, 40 bp, Artificial Sequence
  Description of Artificial Sequence: Synthetic primer
tggggcccagcggccccgccttcgtgcagcccctgctctc

SEQ ID NO: 17320 - DNA, 40 bp, Artificial Sequence
  Description of Artificial Sequence: Synthetic primer
agccccttcttgtctgcaaaagaaactttttcgcctccac

SEQ ID NO: 17321 - DNA, 40 bp, Artificial Sequence
  Description of Artificial Sequence: Synthetic primer
tctctaaagacctcagtcagatactagtcaatatcaaatc

SEQ ID NO: 17322 - DNA, 40 bp, Artificial Sequence
  Description of Artificial Sequence: Synthetic primer
cgcagcctcgcgcccgccgccgcccgtccccaggtgagtg

SEQ ID NO: 17323 - DNA, 40 bp, Artificial Sequence
  Description of Artificial Sequence: Synthetic primer
agatgctcacttcgccagactctatgatgtaaaagctatc

SEQ ID NO: 17324 - DNA, 40 bp, Artificial Sequence
  Description of Artificial Sequence: Synthetic primer
gagctcccaacgggccgtggtctggttcatcatctgtaag

SEQ ID NO: 17325 - DNA, 40 bp, Artificial Sequence
  Description of Artificial Sequence: Synthetic primer
agccacatatgcacacagatagtaatcattccagtattgc

SEQ ID NO: 17326 - DNA, 40 bp, Artificial Sequence
  Description of Artificial Sequence: Synthetic primer
cacgacggcagctgcggggcccgaggagaagttcgagagc

SEQ ID NO: 17327 - DNA, 40 bp, Artificial Sequence
  Description of Artificial Sequence: Synthetic primer
tcgctttatgactcaccttattttgtttttccgtactctg

SEQ ID NO: 17328 - DNA, 40 bp, Artificial Sequence
  Description of Artificial Sequence: Synthetic primer
gggccatctctacgggcagcgctccaatattcttcagcag

SEQ ID NO: 17329 - DNA, 40 bp, Artificial Sequence
  Description of Artificial Sequence: Synthetic primer
cctgaacaaaccttagttttagaaaacagtatatgaattg

SEQ ID NO: 17330 - DNA, 40 bp, Artificial Sequence
  Description of Artificial Sequence: Synthetic primer
acgtcagcagttcaactcccaagcgttcccctgtcaaaag

SEQ ID NO: 17331 - DNA, 40 bp, Artificial Sequence
  Description of Artificial Sequence: Synthetic primer
aagggcaccattcctcttggaggagtcattctctgcattg

SEQ ID NO: 17332 - DNA, 40 bp, Artificial Sequence
  Description of Artificial Sequence: Synthetic primer
gcgtctcagcacacgctccgctccgggcctgggtgcctac

SEQ ID NO: 17333 - DNA, 40 bp, Artificial Sequence
  Description of Artificial Sequence: Synthetic primer
catctgctccttggtgtgcacctcgggccgcagccagtcc

SEQ ID NO: 17334 - DNA, 40 bp, Artificial Sequence
  Description of Artificial Sequence: Synthetic primer
gctggcagtctccctgcccaccttcctcttcctgctctac

SEQ ID NO: 17335 - DNA, 40 bp, Artificial Sequence
  Description of Artificial Sequence: Synthetic primer
aacataaaagttttaaattggtattaactctgtactctgc

SEQ ID NO: 17336 - DNA, 40 bp, Artificial Sequence
  Description of Artificial Sequence: Synthetic primer
gcgcaccaggtgtctttttccagtccccagaagcagagag

SEQ ID NO: 17337 - DNA, 40 bp, Artificial Sequence
  Description of Artificial Sequence: Synthetic primer
cctcaaagagctctcccgtctcctcacattcctcaaagtc

SEQ ID NO: 17338 - DNA, 40 bp, Artificial Sequence
  Description of Artificial Sequence: Synthetic primer
gctgaagctttagagaagtatggtctggaaaaagaaaacc

SEQ ID NO: 17339 - DNA, 40 bp, Artificial Sequence
  Description of Artificial Sequence: Synthetic primer
ccacgtcctccggcctcaagcagcacaagcatatccacag

SEQ ID NO: 17340 - DNA, 40 bp, Artificial Sequence
  Description of Artificial Sequence: Synthetic primer
aggaaaggcagtgaagcataactaataaacatcataatac

SEQ ID NO: 17341 - DNA, 40 bp, Artificial Sequence
  Description of Artificial Sequence: Synthetic primer
ctccttcaattatgcattcttaaaatagaagtgaaatgac

SEQ ID NO: 17342 - DNA, 40 bp, Artificial Sequence
  Description of Artificial Sequence: Synthetic primer
aggtttttgtctgcctctgatgtggtctcttccattcctg

SEQ ID NO: 17343 - DNA, 40 bp, Artificial Sequence
  Description of Artificial Sequence: Synthetic primer
ctcctcggccaccgtgtactttgccaatgctgagttctac

SEQ ID NO: 17344 - DNA, 40 bp, Artificial Sequence
  Description of Artificial Sequence: Synthetic primer
gggccacaggggacagggctgggagaagaaatagacttgc

SEQ ID NO: 17345 - DNA, 40 bp, Artificial Sequence
  Description of Artificial Sequence: Synthetic primer
caaagagctggtcacagtcttcgcagcgatattgccgttc

SEQ ID NO: 17346 - DNA, 40 bp, Artificial Sequence
  Description of Artificial Sequence: Synthetic primer
cggctccccacaccgccggcccctgtcagtggacaaacac

SEQ ID NO: 17347 - DNA, 40 bp, Artificial Sequence
  Description of Artificial Sequence: Synthetic primer
tggcacctgctcccgtgcagtagtaggcccagccgatttc

SEQ ID NO: 17348 - DNA, 40 bp, Artificial Sequence
  Description of Artificial Sequence: Synthetic primer
tctgaatttctttccattaaggcttgcaccaacttctctg

SEQ ID NO: 17349 - DNA, 40 bp, Artificial Sequence
  Description of Artificial Sequence: Synthetic primer
cagaatttgttaaggaagcaagagggtttggtttaaattc

SEQ ID NO: 17350 - DNA, 40 bp, Artificial Sequence
  Description of Artificial Sequence: Synthetic primer
agattttcccaagatgaatactccctcaatcaagctatcc

SEQ ID NO: 17351 - DNA, 40 bp, Artificial Sequence
  Description of Artificial Sequence: Synthetic primer
ccagtgactgaaatgccatgctgctcctcttttaattttg

SEQ ID NO: 17352 - DNA, 40 bp, Artificial Sequence
  Description of Artificial Sequence: Synthetic primer
ctgtcagggtggctctcacttagctccagcactcggacag

SEQ ID NO: 17353 - DNA, 40 bp, Artificial Sequence
  Description of Artificial Sequence: Synthetic primer
cgatctgcttgtctttctcctgcagcatctggtccttgtc

SEQ ID NO: 17354 - DNA, 40 bp, Artificial Sequence
  Description of Artificial Sequence: Synthetic primer
ggttgccagttagatcccccagttaacttcttttcacctg

SEQ ID NO: 17355 - DNA, 40 bp, Artificial Sequence
  Description of Artificial Sequence: Synthetic primer
tgaaagcagcgcgtcgttccccgtaacctcctctccttac

SEQ ID NO: 17356 - DNA, 40 bp, Artificial Sequence
  Description of Artificial Sequence: Synthetic primer
gagtgggagggcccagcaagcatttatcagaaatagaatc

SEQ ID NO: 17357 - DNA, 40 bp, Artificial Sequence
  Description of Artificial Sequence: Synthetic primer
agaaaaacttttaaataaagcctctgagctactctttttc

SEQ ID NO: 17358 - DNA, 40 bp, Artificial Sequence
  Description of Artificial Sequence: Synthetic primer
ccagctcaaggaagagttggaaaaagtaacaagacttacc

SEQ ID NO: 17359 - DNA, 40 bp, Artificial Sequence
  Description of Artificial Sequence: Synthetic primer
cggccccggggtggcttaggagccacactgccacctccac

SEQ ID NO: 17360 - DNA, 40 bp, Artificial Sequence
  Description of Artificial Sequence: Synthetic primer
cctcccgcgcgcacgctccgcgcctgatggcagcgacaag

SEQ ID NO: 17361 - DNA, 40 bp, Artificial Sequence
  Description of Artificial Sequence: Synthetic primer
tgagctaagaagaaaactgaaattaggaactggggaaatg

SEQ ID NO: 17362 - DNA, 40 bp, Artificial Sequence
  Description of Artificial Sequence: Synthetic primer
gtctgaaatctcaatgtcctcgccatacagaactccagtc

SEQ ID NO: 17363 - DNA, 40 bp, Artificial Sequence
  Description of Artificial Sequence: Synthetic primer
acatgttctcatttttacactaaaccacacaggattgatg

SEQ ID NO: 17364 - DNA, 40 bp, Artificial Sequence
  Description of Artificial Sequence: Synthetic primer
atcctgtagttacagtggcataaaggactgacaaaacctg

SEQ ID NO: 17365 - DNA, 40 bp, Artificial Sequence
  Description of Artificial Sequence: Synthetic primer
catgccatgaaaattttgtagtgggggcaaatagggcttc

SEQ ID NO: 17366 - DNA, 40 bp, Artificial Sequence
  Description of Artificial Sequence: Synthetic primer
caggccggcgcaactctcgccgggtataggcgcgctcacg

SEQ ID NO: 17367 - DNA, 40 bp, Artificial Sequence
  Description of Artificial Sequence: Synthetic primer
ttgaagagttttactagctcttcagcaatgtttgtactgg

SEQ ID NO: 17368 - DNA, 40 bp, Artificial Sequence
  Description of Artificial Sequence: Synthetic primer
tgtacacgcagactggggtggccccgccggggtgctgcag

SEQ ID NO: 17369 - DNA, 40 bp, Artificial Sequence
  Description of Artificial Sequence: Synthetic primer
attgtttactgttagaaagtgggaatggggtccctagcag

SEQ ID NO: 17370 - DNA, 40 bp, Artificial Sequence
  Description of Artificial Sequence: Synthetic primer
gcacgggcgcggaggtggattacctggagcagtttggaac

SEQ ID NO: 17371 - DNA, 40 bp, Artificial Sequence
  Description of Artificial Sequence: Synthetic primer
tcggcacatatacaaaccacaagctgtttatttctacaac

SEQ ID NO: 17372 - DNA, 40 bp, Artificial Sequence
  Description of Artificial Sequence: Synthetic primer
ggtcgcggaggacgcctaccggctcccagcacagtcaagg

SEQ ID NO: 17373 - DNA, 40 bp, Artificial Sequence
  Description of Artificial Sequence: Synthetic primer
actaatagttctcccaactggaccctcaattctctttatg

SEQ ID NO: 17374 - DNA, 40 bp, Artificial Sequence
  Description of Artificial Sequence: Synthetic primer
tttaagtgacataattgtccagttataagcgtatttagac

SEQ ID NO: 17375 - DNA, 40 bp, Artificial Sequence
  Description of Artificial Sequence: Synthetic primer
cacactccttgtgctgctcaggggtacaaaaaggggcatc

SEQ ID NO: 17376 - DNA, 40 bp, Artificial Sequence
  Description of Artificial Sequence: Synthetic primer
tgcatgaggttctgggcattgtgaaccagcatctctgtgg

SEQ ID NO: 17377 - DNA, 40 bp, Artificial Sequence
  Description of Artificial Sequence: Synthetic primer
caccgagtgatgttggtgaactcgatgaacaccgtgaaag

SEQ ID NO: 17378 - DNA, 40 bp, Artificial Sequence
  Description of Artificial Sequence: Synthetic primer
aaggagaactgttcacccacaattccagcttcaaatacag

SEQ ID NO: 17379 - DNA, 40 bp, Artificial Sequence
  Description of Artificial Sequence: Synthetic primer
cccggggcttccggaggtcgcggagatggaattggagcag

SEQ ID NO: 17380 - DNA, 40 bp, Artificial Sequence
  Description of Artificial Sequence: Synthetic primer
cccctgcccgtggtgggcccctaaagcaatagcaccgtag

SEQ ID NO: 17381 - DNA, 40 bp, Artificial Sequence
  Description of Artificial Sequence: Synthetic primer
actcaggaattctgagtcttccctgctacaggaccagttc

SEQ ID NO: 17382 - DNA, 40 bp, Artificial Sequence
  Description of Artificial Sequence: Synthetic primer
tttgcttcctgccattgtccacatcaatcatcagccattc

SEQ ID NO: 17383 - DNA, 40 bp, Artificial Sequence
  Description of Artificial Sequence: Synthetic primer
tggaaccaattgttttacagtctgttccgcatgatcgtta

SEQ ID NO: 17384 - DNA, 40 bp, Artificial Sequence
  Description of Artificial Sequence: Synthetic primer
tcttacttctgcattatgaccattgatggtatggtatttc

SEQ ID NO: 17385 - DNA, 40 bp, Artificial Sequence
  Description of Artificial Sequence: Synthetic primer
aatgcagtaattgctgtacgtgtatcatcattccagtttc

SEQ ID NO: 17386 - DNA, 40 bp, Artificial Sequence
  Description of Artificial Sequence: Synthetic primer
atttcagaagaaatgttctccaaagataaaacatttatag

SEQ ID NO: 17387 - DNA, 40 bp, Artificial Sequence
  Description of Artificial Sequence: Synthetic primer
tggcggttagggtcgggccgcctttcgcacaggaagtacg

SEQ ID NO: 17388 - DNA, 40 bp, Artificial Sequence
  Description of Artificial Sequence: Synthetic primer
tgcaccatagccggcctgttgctggtactgttggtacatc

SEQ ID NO: 17389 - DNA, 40 bp, Artificial Sequence
  Description of Artificial Sequence: Synthetic primer
ttagttccatatcctgaagagggcaaagaggccaaagacc

SEQ ID NO: 17390 - DNA, 40 bp, Artificial Sequence
  Description of Artificial Sequence: Synthetic primer
actcagaggactggttgcggcgttagacaagaaagcaagg

SEQ ID NO: 17391 - DNA, 40 bp, Artificial Sequence
  Description of Artificial Sequence: Synthetic primer
ccacacagctgtgcgaagcggaactcttgtccatccatgc

SEQ ID NO: 17392 - DNA, 40 bp, Artificial Sequence
  Description of Artificial Sequence: Synthetic primer
accgaagagaagcccctgccccttggagtgcctgatgctg

SEQ ID NO: 17393 - DNA, 40 bp, Artificial Sequence
  Description of Artificial Sequence: Synthetic primer
gcagcagggacaggatcacaccgtgctttcaaaatatgac

SEQ ID NO: 17394 - DNA, 40 bp, Artificial Sequence
  Description of Artificial Sequence: Synthetic primer
ttaggggaggtggttagccattcttcgtgtttctcaaatg

SEQ ID NO: 17395 - DNA, 40 bp, Artificial Sequence
  Description of Artificial Sequence: Synthetic primer
gagtgatgtctggtcatatggaatattactgtgggaaatc

SEQ ID NO: 17396 - DNA, 40 bp, Artificial Sequence
  Description of Artificial Sequence: Synthetic primer
cttcatgcacttgcttaagatgttcatttaggttatagag

SEQ ID NO: 17397 - DNA, 40 bp, Artificial Sequence
  Description of Artificial Sequence: Synthetic primer
tgcagctgctgattccaagaagtcccagcccaagatccag

SEQ ID NO: 17398 - DNA, 40 bp, Artificial Sequence
  Description of Artificial Sequence: Synthetic primer
tgtctgggagatggaagcgaaaactgaccgggacctgtgc

SEQ ID NO: 17399 - DNA, 40 bp, Artificial Sequence
  Description of Artificial Sequence: Synthetic primer
catatcttcaccactttcccgtgggtgacaagcacgttcc

SEQ ID NO: 17400 - DNA, 40 bp, Artificial Sequence
  Description of Artificial Sequence: Synthetic primer
cagtggcgatccctcccgagtcaaggctgggcacaagcac

SEQ ID NO: 17401 - DNA, 40 bp, Artificial Sequence
  Description of Artificial Sequence: Synthetic primer
actgtgccccagccctccttccaaaatctcctagagacac

SEQ ID NO: 17402 - DNA, 40 bp, Artificial Sequence
  Description of Artificial Sequence: Synthetic primer
atgctaccatatggctcgggtcactgctcactagatccac

SEQ ID NO: 17403 - DNA, 40 bp, Artificial Sequence
  Description of Artificial Sequence: Synthetic primer
tcttcagctaaacctgagacattttaaagtgcatggacag

SEQ ID NO: 17404 - DNA, 40 bp, Artificial Sequence
  Description of Artificial Sequence: Synthetic primer
gctcttctctatatacagatataacagttttaagaactgc

SEQ ID NO: 17405 - DNA, 40 bp, Artificial Sequence
  Description of Artificial Sequence: Synthetic primer
gataagttcgaaaccaaatggctgctagcaaggcaaagag

SEQ ID NO: 17406 - DNA, 40 bp, Artificial Sequence
  Description of Artificial Sequence: Synthetic primer
tttgatttactggtatttaccccaaaataggctgtgtatg

SEQ ID NO: 17407 - DNA, 40 bp, Artificial Sequence
  Description of Artificial Sequence: Synthetic primer
gcccctatggcaccatgtacctctcaccacccgcggacac

SEQ ID NO: 17408 - DNA, 40 bp, Artificial Sequence
  Description of Artificial Sequence: Synthetic primer
cagcagggctccgcgagactgcgggcgaggaggaaagaag

SEQ ID NO: 17409 - DNA, 40 bp, Artificial Sequence
  Description of Artificial Sequence: Synthetic primer
ctattccatagcacttaactgtagtgaatactgtgtcacc

SEQ ID NO: 17410 - DNA, 40 bp, Artificial Sequence
  Description of Artificial Sequence: Synthetic primer
agaagaagcgtccagacttgaagttccattgaagaattag

SEQ ID NO: 17411 - DNA, 40 bp, Artificial Sequence
  Description of Artificial Sequence: Synthetic primer
ttttaaacttccaagttctgaaaattgtttactggttatc

SEQ ID NO: 17412 - DNA, 40 bp, Artificial Sequence
  Description of Artificial Sequence: Synthetic primer
tgccgctctccaaagcccgacaccttggctggcacctctg

SEQ ID NO: 17413 - DNA, 40 bp, Artificial Sequence
  Description of Artificial Sequence: Synthetic primer
aaggggaatgtgtccatcgtcttgcaagtaaaaatgcttc

SEQ ID NO: 17414 - DNA, 40 bp, Artificial Sequence
  Description of Artificial Sequence: Synthetic primer
gccgggagggacgttaatgcctgggctggcgctcttactg

SEQ ID NO: 17415 - DNA, 40 bp, Artificial Sequence
  Description of Artificial Sequence: Synthetic primer
ccttttagaaacctcattggccagctcataaaatggaagc

SEQ ID NO: 17416 - DNA, 40 bp, Artificial Sequence
  Description of Artificial Sequence: Synthetic primer
acactttctggaacccgagacttggccataaagataatgc

SEQ ID NO: 17417 - DNA, 40 bp, Artificial Sequence
  Description of Artificial Sequence: Synthetic primer
gaacacttttgctgccatattctggtcaaactggccaagg

SEQ ID NO: 17418 - DNA, 40 bp, Artificial Sequence
  Description of Artificial Sequence: Synthetic primer
ttaactaattttcattttgctcctctcctgcttttctctg

SEQ ID NO: 17419 - DNA, 40 bp, Artificial Sequence
  Description of Artificial Sequence: Synthetic primer
ttaagttactctcaatcaaaaccaggcaatgattaaactg

SEQ ID NO: 17420 - DNA, 40 bp, Artificial Sequence
  Description of Artificial Sequence: Synthetic primer
ggaatggctccaagccaacctggggcctatcaaccaagac

SEQ ID NO: 17421 - DNA, 40 bp, Artificial Sequence
  Description of Artificial Sequence: Synthetic primer
actacgcctgccgccggagggacgccctcactggccacct

SEQ ID NO: 17422 - DNA, 40 bp, Artificial Sequence
  Description of Artificial Sequence: Synthetic primer
ttatttcattttattttaatttttaacgtgggattcagag

SEQ ID NO: 17423 - DNA, 40 bp, Artificial Sequence
  Description of Artificial Sequence: Synthetic primer
cccggaacctgggaggggagggaacactggggtttaggac

SEQ ID NO: 17424 - DNA, 40 bp, Artificial Sequence
  Description of Artificial Sequence: Synthetic primer
aatgtaaagttagaatttgctagggctgggatagggagtg

SEQ ID NO: 17425 - DNA, 40 bp, Artificial Sequence
  Description of Artificial Sequence: Synthetic primer
ttgctcctgctgccccacacacactaacccaaccatcttg

SEQ ID NO: 17426 - DNA, 40 bp, Artificial Sequence
  Description of Artificial Sequence: Synthetic primer
aatatgcggagggtggtgctcctcctgggcctcttgaatg

SEQ ID NO: 17427 - DNA, 40 bp, Artificial Sequence
  Description of Artificial Sequence: Synthetic primer
cagaggtgacagttctacactaacaaagcaagaacttaaa

SEQ ID NO: 17428 - DNA, 40 bp, Artificial Sequence
  Description of Artificial Sequence: Synthetic primer
acagcagagcctccctcaggctttctgtttcctgggagtg

SEQ ID NO: 17429 - DNA, 40 bp, Artificial Sequence
  Description of Artificial Sequence: Synthetic primer
caatgctttgagaaataagaaaaactctcgtcgagtcagc

SEQ ID NO: 17430 - DNA, 40 bp, Artificial Sequence
  Description of Artificial Sequence: Synthetic primer
tttgatctgtgtcagcgtcatgcttgagaagtccatgttg

SEQ ID NO: 17431 - DNA, 40 bp, Artificial Sequence
  Description of Artificial Sequence: Synthetic primer
taaaaccttacttttaatgtatataaactgttataactac

SEQ ID NO: 17432 - DNA, 40 bp, Artificial Sequence
  Description of Artificial Sequence: Synthetic primer
cagttacaagagaaactttatgtgcctgtaaaagaatacc

SEQ ID NO: 17433 - DNA, 40 bp, Artificial Sequence
  Description of Artificial Sequence: Synthetic primer
tgtctttggccgggtccacttttcgaagcagctgatccac

SEQ ID NO: 17434 - DNA, 40 bp, Artificial Sequence
  Description of Artificial Sequence: Synthetic primer
gagacggggctcccagctcctgtgccccccatccctcccc

SEQ ID NO: 17435 - DNA, 40 bp, Artificial Sequence
  Description of Artificial Sequence: Synthetic primer
taactgtgttttcatggttgcgaagacctaacctcaaatg

SEQ ID NO: 17436 - DNA, 40 bp, Artificial Sequence
  Description of Artificial Sequence: Synthetic primer
gaaaggcagagcagggtacaccacggtggccgtgaagatg

SEQ ID NO: 17437 - DNA, 40 bp, Artificial Sequence
  Description of Artificial Sequence: Synthetic primer
ttaaaaaagccaacagcatggtcaagtccttcttcattcg

SEQ ID NO: 17438 - DNA, 40 bp, Artificial Sequence
  Description of Artificial Sequence: Synthetic primer
tgtaaggcccctaaaccagatggcccaggagggggaccag

SEQ ID NO: 17439 - DNA, 40 bp, Artificial Sequence
  Description of Artificial Sequence: Synthetic primer
gccatggcggcagcggagttagaaagggaggtgagcgaac

SEQ ID NO: 17440 - DNA, 40 bp, Artificial Sequence
  Description of Artificial Sequence: Synthetic primer
gatttgacagccatggagtcatgtattccaaacaaaggtg

SEQ ID NO: 17441 - DNA, 40 bp, Artificial Sequence
  Description of Artificial Sequence: Synthetic primer
cacccccaggaaagaggcgggcccgaaagttgagctgttg

SEQ ID NO: 17442 - DNA, 40 bp, Artificial Sequence
  Description of Artificial Sequence: Synthetic primer
ccaggccgccctggcccacgtccccggggtggcctagctg

SEQ ID NO: 17443 - DNA, 40 bp, Artificial Sequence
  Description of Artificial Sequence: Synthetic primer
gtgagatattttcagaattagacttcatcttggggctttg

SEQ ID NO: 17444 - DNA, 40 bp, Artificial Sequence
  Description of Artificial Sequence: Synthetic primer
ctcaccagtagttacccaaactggagtagaagataacagg

SEQ ID NO: 17445 - DNA, 40 bp, Artificial Sequence
  Description of Artificial Sequence: Synthetic primer
tgggggaggagtgtccctgagcggtgagagcagcttggtg

SEQ ID NO: 17446 - DNA, 40 bp, Artificial Sequence
  Description of Artificial Sequence: Synthetic primer
cgtcggtggtatctccctccagccccttcgccaccttctg

SEQ ID NO: 17447 - DNA, 40 bp, Artificial Sequence
  Description of Artificial Sequence: Synthetic primer
cataccaccaaaatcgccaaaaggcacaagagaacaactc

SEQ ID NO: 17448 - DNA, 40 bp, Artificial Sequence
  Description of Artificial Sequence: Synthetic primer
tgtcatcaacttggtccacagtcgtgtcaggaggggcatc

SEQ ID NO: 17449 - DNA, 40 bp, Artificial Sequence
  Description of Artificial Sequence: Synthetic primer
aaggcctggctgtcacacgtgaagatcatgcacccatttc

SEQ ID NO: 17450 - DNA, 40 bp, Artificial Sequence
  Description of Artificial Sequence: Synthetic primer
gtgtagtggccagcctctgccaccttcacgcgaaccagtg

SEQ ID NO: 17451 - DNA, 40 bp, Artificial Sequence
  Description of Artificial Sequence: Synthetic primer
actcccgcgcccccgccgacccctggtcacattcctcctc

SEQ ID NO: 17452 - DNA, 40 bp, Artificial Sequence
  Description of Artificial Sequence: Synthetic primer
caagaggacagtattttatgtctacccgctgcttactgtg

SEQ ID NO: 17453 - DNA, 40 bp, Artificial Sequence
  Description of Artificial Sequence: Synthetic primer
ggctgaaaagtatgtgttcgattccatccctcttctcatc

SEQ ID NO: 17454 - DNA, 40 bp, Artificial Sequence
  Description of Artificial Sequence: Synthetic primer
tgggtccaagtgaaagaggaggtggcagagctcgaggaac

SEQ ID NO: 17455 - DNA, 40 bp, Artificial Sequence
  Description of Artificial Sequence: Synthetic primer
cctcctgctcctgacctacacgcctctaatcttcacacag

SEQ ID NO: 17456 - DNA, 40 bp, Artificial Sequence
  Description of Artificial Sequence: Synthetic primer
cagccgatgtgtaagagtaggaaatactgtgtcactggag

SEQ ID NO: 17457 - DNA, 40 bp, Artificial Sequence
  Description of Artificial Sequence: Synthetic primer
cagataactcaaaatatccttacccctcaattctgttatc

SEQ ID NO: 17458 - DNA, 40 bp, Artificial Sequence
  Description of Artificial Sequence: Synthetic primer
gcatagtcaaagaaggtagtgctgggactccactatcacc

SEQ ID NO: 17459 - DNA, 40 bp, Artificial Sequence
  Description of Artificial Sequence: Synthetic primer
catagggcagtttccctgtggtgtagggcagtccatagcc

SEQ ID NO: 17460 - DNA, 40 bp, Artificial Sequence
  Description of Artificial Sequence: Synthetic primer
gttgcggagagcccccgggtgtgggcgctgccttgaactc

SEQ ID NO: 17461 - DNA, 40 bp, Artificial Sequence
  Description of Artificial Sequence: Synthetic primer
ttactgagatctggagacaggtatcctcgtcccaccataa

SEQ ID NO: 17462 - DNA, 40 bp, Artificial Sequence
  Description of Artificial Sequence: Synthetic primer
gttgtcggctaaagctggtcttgcgccgtcagcctctacc

SEQ ID NO: 17463 - DNA, 40 bp, Artificial Sequence
  Description of Artificial Sequence: Synthetic primer
ccagaccaaaaccgggaggtgttggagcagaagggcatag

SEQ ID NO: 17464 - DNA, 40 bp, Artificial Sequence
  Description of Artificial Sequence: Synthetic primer
tgaaaaaaactcaagaaaaccccctccctacaaacacatc

SEQ ID NO: 17465 - DNA, 40 bp, Artificial Sequence
  Description of Artificial Sequence: Synthetic primer
tccttatccaccgtggcttccatctcccaaatttgctgtc

SEQ ID NO: 17466 - DNA, 40 bp, Artificial Sequence
  Description of Artificial Sequence: Synthetic primer
cttgaacctatcagcagcaggatgtaaacattcacaagaa

SEQ ID NO: 17467 - DNA, 40 bp, Artificial Sequence
  Description of Artificial Sequence: Synthetic primer
ctcctaggagctccatggtatatggtatgtcctgcaattc

SEQ ID NO: 17468 - DNA, 40 bp, Artificial Sequence
  Description of Artificial Sequence: Synthetic primer
ttccatgggcatataatcataccacccagagggcaaagag

SEQ ID NO: 17469 - DNA, 40 bp, Artificial Sequence
  Description of Artificial Sequence: Synthetic primer
atccccgctcaccaggagccccttgccaggagtgttcaag

SEQ ID NO: 17470 - DNA, 40 bp, Artificial Sequence
  Description of Artificial Sequence: Synthetic primer
acaattagatcaaacatacatttagaaaataattaagacc

SEQ ID NO: 17471 - DNA, 40 bp, Artificial Sequence
  Description of Artificial Sequence: Synthetic primer
gcagcagatgaaggcccaggcccgggaggagaagcatcag

SEQ ID NO: 17472 - DNA, 40 bp, Artificial Sequence
  Description of Artificial Sequence: Synthetic primer
attacctggaacttcatcatcatctacttcacaggaattg

SEQ ID NO: 17473 - DNA, 40 bp, Artificial Sequence
  Description of Artificial Sequence: Synthetic primer
gctccaaggagcagtcgcagtccgcccacctctggaagtc

SEQ ID NO: 17474 - DNA, 40 bp, Artificial Sequence
  Description of Artificial Sequence: Synthetic primer
aatcaataaatgaataaattcaataaatgcctataaccag

SEQ ID NO: 17475 - DNA, 40 bp, Artificial Sequence
  Description of Artificial Sequence: Synthetic primer
tctgatcatcttggaattcacattactcaaggcaaaatag

SEQ ID NO: 17476 - DNA, 40 bp, Artificial Sequence
  Description of Artificial Sequence: Synthetic primer
ctggctgaccccggaggaaaccagcgggcggggacctagc

SEQ ID NO: 17477 - DNA, 40 bp, Artificial Sequence
  Description of Artificial Sequence: Synthetic primer
aattattctccagtcccctcccactttgcttcttgtatgc

SEQ ID NO: 17478 - DNA, 40 bp, Artificial Sequence
  Description of Artificial Sequence: Synthetic primer
gatgaaaacatggacctcttggaaggtataactggctttg

SEQ ID NO: 17479 - DNA, 40 bp, Artificial Sequence
  Description of Artificial Sequence: Synthetic primer
tgcggagagactccctgtgggttggggcctggcaggaacg

SEQ ID NO: 17480 - DNA, 40 bp, Artificial Sequence
  Description of Artificial Sequence: Synthetic primer
tcgcctggcaatgaggtatatcaacttcttggtcaaggtc

SEQ ID NO: 17481 - DNA, 40 bp, Artificial Sequence
  Description of Artificial Sequence: Synthetic primer
tgaagaaaactggcagacctcgaaaagaaaacaaattcag

SEQ ID NO: 17482 - DNA, 40 bp, Artificial Sequence
  Description of Artificial Sequence: Synthetic primer
ctacagttagcagatatggtatcctctgagcgccacaaac

SEQ ID NO: 17483 - DNA, 40 bp, Artificial Sequence
  Description of Artificial Sequence: Synthetic primer
cggccgcgcgagcaagtcagtggctacacagctcgtttcc

SEQ ID NO: 17484 - DNA, 40 bp, Artificial Sequence
  Description of Artificial Sequence: Synthetic primer
tgttatgatcagcacaaccttgttgcatgccagataaatg

SEQ ID NO: 17485 - DNA, 40 bp, Artificial Sequence
  Description of Artificial Sequence: Synthetic primer
aagcaatttaaagaaaattttaaaaggaatcttggattat

SEQ ID NO: 17486 - DNA, 40 bp, Artificial Sequence
  Description of Artificial Sequence: Synthetic primer
tttgagctgatttctgagctcctacatggagcagatattc

SEQ ID NO: 17487 - DNA, 40 bp, Artificial Sequence
  Description of Artificial Sequence: Synthetic primer
tataaaggacaaggtaagaagaagacaagcgggcagaagg

SEQ ID NO: 17488 - DNA, 40 bp, Artificial Sequence
  Description of Artificial Sequence: Synthetic primer
cttgaaggagaacgtcttcatgatggtcgtctgcatcgag

SEQ ID NO: 17489 - DNA, 40 bp, Artificial Sequence
  Description of Artificial Sequence: Synthetic primer
cgaatggaaattccccatagcagcagcgacactcaatcag

SEQ ID NO: 17490 - DNA, 40 bp, Artificial Sequence
  Description of Artificial Sequence: Synthetic primer
gttggcaggagataggttaactacctgttttcttttcaag

SEQ ID NO: 17491 - DNA, 40 bp, Artificial Sequence
  Description of Artificial Sequence: Synthetic primer
cggcatggcttccccgcggagctccgggcagcccgggccg

SEQ ID NO: 17492 - DNA, 40 bp, Artificial Sequence
  Description of Artificial Sequence: Synthetic primer
caccacgagctccagtgggaccagcagggccgctgggacc

SEQ ID NO: 17493 - DNA, 40 bp, Artificial Sequence
  Description of Artificial Sequence: Synthetic primer
tctgggctgcctcctcggccatgtcctgtgcaagctggtc

SEQ ID NO: 17494 - DNA, 40 bp, Artificial Sequence
  Description of Artificial Sequence: Synthetic primer
gctgccgtggagcacgagcagcgtgaggcggcagccaagg

SEQ ID NO: 17495 - DNA, 40 bp, Artificial Sequence
  Description of Artificial Sequence: Synthetic primer
ctaccacaagggctccagccagaatgtgtgtcccttactg

SEQ ID NO: 17496 - DNA, 40 bp, Artificial Sequence
  Description of Artificial Sequence: Synthetic primer
atggacaacttttaatttgatcagcaagacatcttggaac

SEQ ID NO: 17497 - DNA, 40 bp, Artificial Sequence
  Description of Artificial Sequence: Synthetic primer
tatgattcagaggctgattcatcgccttcctagggtcttg

SEQ ID NO: 17498 - DNA, 40 bp, Artificial Sequence
  Description of Artificial Sequence: Synthetic primer
atgccccctgtggtgctgttggctcccactgagcctgaag

SEQ ID NO: 17499 - DNA, 40 bp, Artificial Sequence
  Description of Artificial Sequence: Synthetic primer
cacagaattctgagagtaatatggaataaaacaactccac

SEQ ID NO: 17500 - DNA, 40 bp, Artificial Sequence
  Description of Artificial Sequence: Synthetic primer
gagctcgtccaccgtgggctggtagggcagctggtgaagg

SEQ ID NO: 17501 - DNA, 40 bp, Artificial Sequence
  Description of Artificial Sequence: Synthetic primer
gaacctgtgtctgcctcaacacatattgcatcttcactgg

SEQ ID NO: 17502 - DNA, 40 bp, Artificial Sequence
  Description of Artificial Sequence: Synthetic primer
tggaggcgctgggcctcctgctggctctcgcctccctgag

SEQ ID NO: 17503 - DNA, 40 bp, Artificial Sequence
  Description of Artificial Sequence: Synthetic primer
ccagaagcagaatctagtattaccacttcatcttcagcag

SEQ ID NO: 17504 - DNA, 40 bp, Artificial Sequence
  Description of Artificial Sequence: Synthetic primer
gtaactgggacttttgtaaataaatgtttgtgcgctctgc

SEQ ID NO: 17505 - DNA, 40 bp, Artificial Sequence
  Description of Artificial Sequence: Synthetic primer
aaaacacacacatcagaaaaacaggcctatcaaagagaac

SEQ ID NO: 17506 - DNA, 40 bp, Artificial Sequence
  Description of Artificial Sequence: Synthetic primer
ttggtcagccagttgtccagctgccatttgtttgttgttg

SEQ ID NO: 17507 - DNA, 40 bp, Artificial Sequence
  Description of Artificial Sequence: Synthetic primer
aatgctgctctctacagaggcatgtgcacagacagatcct

SEQ ID NO: 17508 - DNA, 40 bp, Artificial Sequence
  Description of Artificial Sequence: Synthetic primer
cccttacttctattgaccaaggagctgaagctttattttg

SEQ ID NO: 17509 - DNA, 40 bp, Artificial Sequence
  Description of Artificial Sequence: Synthetic primer
gctcttcacagaacagctgctcctatagcaacctcacctc

SEQ ID NO: 17510 - DNA, 40 bp, Artificial Sequence
  Description of Artificial Sequence: Synthetic primer
gggacatgccataggtagcaatttcccaaagcaatactcc

SEQ ID NO: 17511 - DNA, 40 bp, Artificial Sequence
  Description of Artificial Sequence: Synthetic primer
actcctcagaagtaaatgcagcacactaaaattcattatc

SEQ ID NO: 17512 - DNA, 40 bp, Artificial Sequence
  Description of Artificial Sequence: Synthetic primer
gactccatcgcggccaagcagagcagcctcaaccccaagc

SEQ ID NO: 17513 - DNA, 40 bp, Artificial Sequence
  Description of Artificial Sequence: Synthetic primer
ctgcatccctgattcagcctggggtgctgcgctgctactg

SEQ ID NO: 17514 - DNA, 40 bp, Artificial Sequence
  Description of Artificial Sequence: Synthetic primer
ctgttgcatctgggtatgaatgggagcagaaagcaatgtg

SEQ ID NO: 17515 - DNA, 40 bp, Artificial Sequence
  Description of Artificial Sequence: Synthetic primer
tgatttcatcagcttcatgaaaaggactagtgtcattaac

SEQ ID NO: 17516 - DNA, 40 bp, Artificial Sequence
  Description of Artificial Sequence: Synthetic primer
ttttcctagaactaactttgacaattaagggtgccttttt

SEQ ID NO: 17517 - DNA, 40 bp, Artificial Sequence
  Description of Artificial Sequence: Synthetic primer
tccccatcgcccctgtctggccatgtagcccaggcctttc

SEQ ID NO: 17518 - DNA, 40 bp, Artificial Sequence
  Description of Artificial Sequence: Synthetic primer
cggcggccttcgaggaggtcatgaaggacctgagcctgac

SEQ ID NO: 17519 - DNA, 40 bp, Artificial Sequence
  Description of Artificial Sequence: Synthetic primer
gaccttagtcggatcacactggatgctcaagatgttttag

SEQ ID NO: 17520 - DNA, 40 bp, Artificial Sequence
  Description of Artificial Sequence: Synthetic primer
cgtaggtcagcgtggccatttgcaccaccggggtgtcctc

SEQ ID NO: 17521 - DNA, 40 bp, Artificial Sequence
  Description of Artificial Sequence: Synthetic primer
tcccaggatccgatatcctgagtccaggaagctcttttgc

SEQ ID NO: 17522 - DNA, 40 bp, Artificial Sequence
  Description of Artificial Sequence: Synthetic primer
agcaaaatccgctgccaaggtggctgccaaagcccagctc

SEQ ID NO: 17523 - DNA, 40 bp, Artificial Sequence
  Description of Artificial Sequence: Synthetic primer
gggggggacgtgtggagggtacccggggagggtcgtgctc

SEQ ID NO: 17524 - DNA, 40 bp, Artificial Sequence
  Description of Artificial Sequence: Synthetic primer
acatctacatatgtcatgccatttagaaggcacattgctg

SEQ ID NO: 17525 - DNA, 40 bp, Artificial Sequence
  Description of Artificial Sequence: Synthetic primer
atttgggatagtcttgagtttgcgattatcacagtacatt

SEQ ID NO: 17526 - DNA, 40 bp, Artificial Sequence
  Description of Artificial Sequence: Synthetic primer
gactcacacgggagagaaaccctatgagtgtattctagtt

SEQ ID NO: 17527 - DNA, 40 bp, Artificial Sequence
  Description of Artificial Sequence: Synthetic primer
cggcgtgaacacctacaactgccgctgcccgccagagtgg

SEQ ID NO: 17528 - DNA, 40 bp, Artificial Sequence
  Description of Artificial Sequence: Synthetic primer
acttcaggaagaggacaaatttgacaaagaagaatatagg

SEQ ID NO: 17529 - DNA, 40 bp, Artificial Sequence
  Description of Artificial Sequence: Synthetic primer
caggtctcctgggagagaccacgccgcaccagggcaccag

SEQ ID NO: 17530 - DNA, 40 bp, Artificial Sequence
  Description of Artificial Sequence: Synthetic primer
cctgagctttcccagtagcctccagtttcctttgtaagac

SEQ ID NO: 17531 - DNA, 40 bp, Artificial Sequence
  Description of Artificial Sequence: Synthetic primer
tcagcatacacagaattaggtcctccagagatgataatag

SEQ ID NO: 17532 - DNA, 40 bp, Artificial Sequence
  Description of Artificial Sequence: Synthetic primer
caaaggggcgcacacgtgtcagcgggctcatcagggactc

SEQ ID NO: 17533 - DNA, 40 bp, Artificial Sequence
  Description of Artificial Sequence: Synthetic primer
aagagaaactttctaaagtagatgaaaagatcagccatgc

SEQ ID NO: 17534 - DNA, 40 bp, Artificial Sequence
  Description of Artificial Sequence: Synthetic primer
cagcaacaaagaatatgagatcttccaataatttggttac

SEQ ID NO: 17535 - DNA, 40 bp, Artificial Sequence
  Description of Artificial Sequence: Synthetic primer
tgggggggttggagggcctcattcccacttgtggcttctg

SEQ ID NO: 17536 - DNA, 40 bp, Artificial Sequence
  Description of Artificial Sequence: Synthetic primer
ttatattcaattcggcattgcccttccggctgggggacac

SEQ ID NO: 17537 - DNA, 40 bp, Artificial Sequence
  Description of Artificial Sequence: Synthetic primer
aaccacaagtgaatctttctcctggtgactcaaataaaag

SEQ ID NO: 17538 - DNA, 40 bp, Artificial Sequence
  Description of Artificial Sequence: Synthetic primer
ttacatcacaggcttaagtctcacatttagaaaaactgtc

SEQ ID NO: 17539 - DNA, 40 bp, Artificial Sequence
  Description of Artificial Sequence: Synthetic primer
cgtgaccttttgaggtgactataactgaagattgctttac

SEQ ID NO: 17540 - DNA, 40 bp, Artificial Sequence
  Description of Artificial Sequence: Synthetic primer
ccagtgcagtagtgacctgttccagtccacacacaatgtc

SEQ ID NO: 17541 - DNA, 40 bp, Artificial Sequence
  Description of Artificial Sequence: Synthetic primer
taaaatggcagcttaaagttgtgtatctgctattgtgatg

SEQ ID NO: 17542 - DNA, 40 bp, Artificial Sequence
  Description of Artificial Sequence: Synthetic primer
gtggggaacttgtctgtggggaaacgtggtgtggagaagg

SEQ ID NO: 17543 - DNA, 40 bp, Artificial Sequence
  Description of Artificial Sequence: Synthetic primer
acagcaggagcgacccccggcgcgcagcaacccccaccac

SEQ ID NO: 17544 - DNA, 40 bp, Artificial Sequence
  Description of Artificial Sequence: Synthetic primer
gtcaatgaggcgcacgtagaaatcctgctccgtccttatc

SEQ ID NO: 17545 - DNA, 40 bp, Artificial Sequence
  Description of Artificial Sequence: Synthetic primer
tattctgaaaaggaggacaaatatgaagaagaaattaaac

SEQ ID NO: 17546 - DNA, 40 bp, Artificial Sequence
  Description of Artificial Sequence: Synthetic primer
aagttgatgatatgttatcaaaagtagagaaaatgaaagg

SEQ ID NO: 17547 - DNA, 40 bp, Artificial Sequence
  Description of Artificial Sequence: Synthetic primer
gaagaaggacttgtttccctttcctgtgtggggagaggtg

SEQ ID NO: 17548 - DNA, 40 bp, Artificial Sequence
  Description of Artificial Sequence: Synthetic primer
tgacggacgtggaagtgtcgccccaggaaggctgcatcac

SEQ ID NO: 17549 - DNA, 40 bp, Artificial Sequence
  Description of Artificial Sequence: Synthetic primer
tttgttttttctttttcaagtaactaaaacagcatctaca

SEQ ID NO: 17550 - DNA, 40 bp, Artificial Sequence
  Description of Artificial Sequence: Synthetic primer
agaaacttgcatgcgattcactggcagggacaggggtcca

SEQ ID NO: 17551 - DNA, 40 bp, Artificial Sequence
  Description of Artificial Sequence: Synthetic primer
tccatatgccatggtgatttttagagcaatatttaatcag

SEQ ID NO: 17552 - DNA, 40 bp, Artificial Sequence
  Description of Artificial Sequence: Synthetic primer
ttagcaataatgtattgggttcactgggtgttctgaggat

SEQ ID NO: 17553 - DNA, 40 bp, Artificial Sequence
  Description of Artificial Sequence: Synthetic primer
cagccttgctgaaattgtattcttgatagagacgttcctg

SEQ ID NO: 17554 - DNA, 40 bp, Artificial Sequence
  Description of Artificial Sequence: Synthetic primer
gccaggcagaagggcctaattcaaagagttcaataatatc

SEQ ID NO: 17555 - DNA, 40 bp, Artificial Sequence
  Description of Artificial Sequence: Synthetic primer
tttcccccctcacacatgcacttttgggcctttttttata

SEQ ID NO: 17556 - DNA, 40 bp, Artificial Sequence
  Description of Artificial Sequence: Synthetic primer
gcagcatgtcaccatcagccagctgttcgcgcccggagac

SEQ ID NO: 17557 - DNA, 40 bp, Artificial Sequence
  Description of Artificial Sequence: Synthetic primer
aaacccacatggtagcactaagcctaggcgaggacccatc

SEQ ID NO: 17558 - DNA, 40 bp, Artificial Sequence
  Description of Artificial Sequence: Synthetic primer
aggctgcgagaggactctagtatgagtctccaacatttgg

SEQ ID NO: 17559 - DNA, 40 bp, Artificial Sequence
  Description of Artificial Sequence: Synthetic primer
ccactagacagagccgggcctagcccagagacatggagag

SEQ ID NO: 17560 - DNA, 40 bp, Artificial Sequence
  Description of Artificial Sequence: Synthetic primer
cagatggcagaagggaccccttggactttttctcgccatc

SEQ ID NO: 17561 - DNA, 40 bp, Artificial Sequence
  Description of Artificial Sequence: Synthetic primer
aaaaagtaagcttcatgaattaaagtatttttcattgcat

SEQ ID NO: 17562 - DNA, 40 bp, Artificial Sequence
  Description of Artificial Sequence: Synthetic primer
tcctggtcatgtttgagttcctgagatggaaagagaaagg

SEQ ID NO: 17563 - DNA, 40 bp, Artificial Sequence
  Description of Artificial Sequence: Synthetic primer
aactggctgttttgttgtggctgcacttctgtttcattac

SEQ ID NO: 17564 - DNA, 40 bp, Artificial Sequence
  Description of Artificial Sequence: Synthetic primer
cggaggccgcggtccgatctgagggcgtcgttaatgtgag

SEQ ID NO: 17565 - DNA, 40 bp, Artificial Sequence
  Description of Artificial Sequence: Synthetic primer
ctcgccatggacggatagcgacgattctgcaggcttggtg

SEQ ID NO: 17566 - DNA, 40 bp, Artificial Sequence
  Description of Artificial Sequence: Synthetic primer
cagggaatgcaggccactgaaacagcttgggggcacatag

SEQ ID NO: 17567 - DNA, 40 bp, Artificial Sequence; identical to SEQ ID NO: 16400
  Description of Artificial Sequence: Synthetic primer

SEQ ID NO: 17568 - DNA, 40 bp, Artificial Sequence
  Description of Artificial Sequence: Synthetic primer
atcctggtggccgaccaggaggtcaagataggaggcatcg

SEQ ID NO: 17569 - DNA, 40 bp, Artificial Sequence
  Description of Artificial Sequence: Synthetic primer
cctggctgtggctgtactgctcgccatagtactcctcctg

SEQ ID NO: 17570 - DNA, 40 bp, Artificial Sequence
  Description of Artificial Sequence: Synthetic primer
cgaaatttctgtttatttcactcaggggcactgtggttgc

SEQ ID NO: 17571 - DNA, 40 bp, Artificial Sequence
  Description of Artificial Sequence: Synthetic primer
ctgtaatttcaaggactcttcagttcctaaatgacctttc

SEQ ID NO: 17572 - DNA, 40 bp, Artificial Sequence
  Description of Artificial Sequence: Synthetic primer
tcccaaataattcatgaagcactttttcctcctttttaac

SEQ ID NO: 17573 - DNA, 40 bp, Artificial Sequence
  Description of Artificial Sequence: Synthetic primer
cggagctgggggctgttgtgggagaggtttcggatcattc

SEQ ID NO: 17574 - DNA, 40 bp, Artificial Sequence
  Description of Artificial Sequence: Synthetic primer
gacataagtgggctctggggagtcgtagccccagtaaagc

SEQ ID NO: 17575 - DNA, 40 bp, Artificial Sequence
  Description of Artificial Sequence: Synthetic primer
ttcttcaatttgagatcctaattcttcctcatcagctcca

SEQ ID NO: 17576 - DNA, 40 bp, Artificial Sequence
  Description of Artificial Sequence: Synthetic primer
ggacagagtcttcaaagccagttataccttccaagaggtc

SEQ ID NO: 17577 - DNA, 40 bp, Artificial Sequence
  Description of Artificial Sequence: Synthetic primer
attgaatccctttttgatcatatctacaccacgcaaagtg

SEQ ID NO: 17578 - DNA, 40 bp, Artificial Sequence
  Description of Artificial Sequence: Synthetic primer
tttttgtggaagaaaccagtaaacgtaagctgcaaatgag

SEQ ID NO: 17579 - DNA, 40 bp, Artificial Sequence
  Description of Artificial Sequence: Synthetic primer
aataccgagcccccgggcttgcaccgcacgcactgactcc

SEQ ID NO: 17580 - DNA, 40 bp, Artificial Sequence
  Description of Artificial Sequence: Synthetic primer
cagccaagtacttcagctacccagtcatctccggctccag

SEQ ID NO: 17581 - DNA, 40 bp, Artificial Sequence
  Description of Artificial Sequence: Synthetic primer
catataaattgatgtaacggatgcagctctcgactacaag

SEQ ID NO: 17582 - DNA, 40 bp, Artificial Sequence
  Description of Artificial Sequence: Synthetic primer
ccccagatctcccactgcggggagacagaagcctggactc

SEQ ID NO: 17583 - DNA, 40 bp, Artificial Sequence
  Description of Artificial Sequence: Synthetic primer
aactcctgaactctgtataccggcgataaatattccattc

SEQ ID NO: 17584 - DNA, 40 bp, Artificial Sequence
  Description of Artificial Sequence: Synthetic primer
tgccagggctctcaggaaggatcaagtgcagaaccgtgtc

SEQ ID NO: 17585 - DNA, 40 bp, Artificial Sequence
  Description of Artificial Sequence: Synthetic primer
ggaagttgccaacacttacttcctgttcctcctcattctg

SEQ ID NO: 17586 - DNA, 40 bp, Artificial Sequence
  Description of Artificial Sequence: Synthetic primer
ggacactgtcctcctagcattgcctgcatcagggactcac

SEQ ID NO: 17587 - DNA, 40 bp, Artificial Sequence
  Description of Artificial Sequence: Synthetic primer
ttttctttcataatggaagccttatgctattacagactgc

SEQ ID NO: 17588 - DNA, 40 bp, Artificial Sequence
  Description of Artificial Sequence: Synthetic primer
tggttgtagactttcacctggattattgatattctacctc

SEQ ID NO: 17589 - DNA, 40 bp, Artificial Sequence
  Description of Artificial Sequence: Synthetic primer
tggtgggaccatatggggagggaacctagaagacagaaag

SEQ ID NO: 17590 - DNA, 40 bp, Artificial Sequence
  Description of Artificial Sequence: Synthetic primer
ccgagcgaaatgccaaggcagagtcaagacaatcattacc

SEQ ID NO: 17591 - DNA, 40 bp, Artificial Sequence
  Description of Artificial Sequence: Synthetic primer
aacaaagccatcacccgcattcttcctccttcttctggtg

SEQ ID NO: 17592 - DNA, 40 bp, Artificial Sequence
  Description of Artificial Sequence: Synthetic primer
cccctaccttaggccagagggaagtagccaccaaactcag

SEQ ID NO: 17593 - DNA, 40 bp, Artificial Sequence
  Description of Artificial Sequence: Synthetic primer
cagtttaacattttctaaatggattttatcccacatttac

SEQ ID NO: 17594 - DNA, 40 bp, Artificial Sequence
  Description of Artificial Sequence: Synthetic primer
cgcaggcggctcggctcgggcccctccggcagcgccgagc

SEQ ID NO: 17595 - DNA, 40 bp, Artificial Sequence
  Description of Artificial Sequence: Synthetic primer
agccaggctggcaggtgcagctgggcggggcaggtcacag

SEQ ID NO: 17596 - DNA, 40 bp, Artificial Sequence
  Description of Artificial Sequence: Synthetic primer
cacttttactgtatatagaaattgaaataaagacctcagc

SEQ ID NO: 17597 - DNA, 40 bp, Artificial Sequence
  Description of Artificial Sequence: Synthetic primer
tcgagaaataccaggaatcttcttaatctcagtgaccatc

SEQ ID NO: 17598 - DNA, 40 bp, Artificial Sequence
  Description of Artificial Sequence: Synthetic primer
aaccatgtgtaggcaaaggctcggacgtggggcagaagtg

SEQ ID NO: 17599 - DNA, 40 bp, Artificial Sequence
  Description of Artificial Sequence: Synthetic primer
ttttttaaaggacagaggctaagctgtaaggttagcatgg

SEQ ID NO: 17600 - DNA, 40 bp, Artificial Sequence
  Description of Artificial Sequence: Synthetic primer
gagtgcttccacccgggcatggaaaccacaaagcaaactc

SEQ ID NO: 17601 - DNA, 40 bp, Artificial Sequence
  Description of Artificial Sequence: Synthetic primer
atgcccctcttaggtattccgcctgggattttgttttgtc

SEQ ID NO: 17602 - DNA, 40 bp, Artificial Sequence
  Description of Artificial Sequence: Synthetic primer
tttagaaagctgatggaccataactgcagccttattaacc

SEQ ID NO: 17603 - DNA, 40 bp, Artificial Sequence
  Description of Artificial Sequence: Synthetic primer
aactattttaagaaagataaattctctttaaagagatctc

SEQ ID NO: 17604 - DNA, 40 bp, Artificial Sequence
  Description of Artificial Sequence: Synthetic primer
tatgtgttccctcaagtgcttctgctcttggaactgcttc

SEQ ID NO: 17605 - DNA, 40 bp, Artificial Sequence
  Description of Artificial Sequence: Synthetic primer
ttctggagtttcgatgagacatgtaagtaagagttctgtg

SEQ ID NO: 17606 - DNA, 40 bp, Artificial Sequence
  Description of Artificial Sequence: Synthetic primer
gggtggaagttaaagaaggcatttccaagtctgagttttc

SEQ ID NO: 17607 - DNA, 40 bp, Artificial Sequence
  Description of Artificial Sequence: Synthetic primer
tcttcaagattcctgaggacagtggcaaactcctgcaaag

SEQ ID NO: 17608 - DNA, 40 bp, Artificial Sequence
  Description of Artificial Sequence: Synthetic primer
gacccaccagtctccaccccagcaaaacgtccagcctaag

SEQ ID NO: 17609 - DNA, 40 bp, Artificial Sequence
  Description of Artificial Sequence: Synthetic primer
tccagacagtcgctcagtctgttcactgcattcaccttag

SEQ ID NO: 17610 - DNA, 40 bp, Artificial Sequence
  Description of Artificial Sequence: Synthetic primer
ctgtgtccttgtctgtataaagatttatcattggttttcc

SEQ ID NO: 17611 - DNA, 40 bp, Artificial Sequence
  Description of Artificial Sequence: Synthetic primer
gggccagctcatcggcagtgttttcagccacagtcactac

SEQ ID NO: 17612 - DNA, 40 bp, Artificial Sequence
  Description of Artificial Sequence: Synthetic primer
ccttctctaaatcagccggccttccttgacctcagtgacc

SEQ ID NO: 17613 - DNA, 40 bp, Artificial Sequence
  Description of Artificial Sequence: Synthetic primer
tctgctgagtcaatcgtctggtaggcactacggtcctgag

SEQ ID NO: 17614 - DNA, 40 bp, Artificial Sequence
  Description of Artificial Sequence: Synthetic primer
cggaggacggagatcaccatcgtcaaaccccaggagtcag

SEQ ID NO: 17615 - DNA, 40 bp, Artificial Sequence
  Description of Artificial Sequence: Synthetic primer
cattgaaactttctaaggttgattaatccatggtctctta

SEQ ID NO: 17616 - DNA, 40 bp, Artificial Sequence
  Description of Artificial Sequence: Synthetic primer
catctaaagccgcccaagccccatctccgtggggggccag

SEQ ID NO: 17617 - DNA, 40 bp, Artificial Sequence
  Description of Artificial Sequence: Synthetic primer
cagaaagcataacagaaatatgcatagaatttaagtatac

SEQ ID NO: 17618 - DNA, 40 bp, Artificial Sequence
  Description of Artificial Sequence: Synthetic primer
gatgatgaggagcccctccctgccatagggacgtgcaaag

SEQ ID NO: 17619 - DNA, 40 bp, Artificial Sequence
  Description of Artificial Sequence: Synthetic primer
gatggggagcgggcccgggcggagctcaatgacaaagtcc

SEQ ID NO: 17620 - DNA, 40 bp, Artificial Sequence
  Description of Artificial Sequence: Synthetic primer
gggacggcgtggcggtggccgcgggggctgcggtggcggc

SEQ ID NO: 17621 - DNA, 40 bp, Artificial Sequence
  Description of Artificial Sequence: Synthetic primer
aatagctatcaacataccaccattaaattaaggtattcac

SEQ ID NO: 17622 - DNA, 40 bp, Artificial Sequence
  Description of Artificial Sequence: Synthetic primer
agctgaggcctgccacgggcacctcccctcatagctggac

SEQ ID NO: 17623 - DNA, 40 bp, Artificial Sequence
  Description of Artificial Sequence: Synthetic primer
aaggcatttttagaaataacaattactgaaaactttgaag

SEQ ID NO: 17624 - DNA, 40 bp, Artificial Sequence
  Description of Artificial Sequence: Synthetic primer
cagccgtcttggggagcaaagcccgcaatttatgttttcc

SEQ ID NO: 17625 - DNA, 40 bp, Artificial Sequence
  Description of Artificial Sequence: Synthetic primer
tttttctttttcctaaaaaagcaattaaaatggtcactgc

SEQ ID NO: 17626 - DNA, 40 bp, Artificial Sequence
  Description of Artificial Sequence: Synthetic primer
ggacatgttccaggagaccatggaggccatgaggattatg

SEQ ID NO: 17627 - DNA, 40 bp, Artificial Sequence
  Description of Artificial Sequence: Synthetic primer
gtggggctgccaggtgtatacccaggtggcgtgctcccag

SEQ ID NO: 17628 - DNA, 40 bp, Artificial Sequence
  Description of Artificial Sequence: Synthetic primer
gattgaatctgccatcttggatctctgcacctggtgtaac

SEQ ID NO: 17629 - DNA, 40 bp, Artificial Sequence
  Description of Artificial Sequence: Synthetic primer
cttccttcccgcagatgtcacactgatgccacggacattc

SEQ ID NO: 17630 - DNA, 40 bp, Artificial Sequence
  Description of Artificial Sequence: Synthetic primer
cggcctttactgcgacgtgcccagcgtgtcctgtgaggtg

SEQ ID NO: 17631 - DNA, 40 bp, Artificial Sequence
  Description of Artificial Sequence: Synthetic primer
agaggtcatctgcaagcttctgggccctgacttccttctc

SEQ ID NO: 17632 - DNA, 40 bp, Artificial Sequence
  Description of Artificial Sequence: Synthetic primer
ctggaatggatatgattaagcaggagggagacacaacacg

SEQ ID NO: 17633 - DNA, 40 bp, Artificial Sequence
  Description of Artificial Sequence: Synthetic primer
gctgctgctgcagctgcagctgcagctggagtcccaacgc

SEQ ID NO: 17634 - DNA, 40 bp, Artificial Sequence
  Description of Artificial Sequence: Synthetic primer
acccggctgatcctccagtaccttgattcagagagaagac

SEQ ID NO: 17635 - DNA, 40 bp, Artificial Sequence
  Description of Artificial Sequence: Synthetic primer
ttttcttcatttgctgccatcaaggactccacagcttttt

SEQ ID NO: 17636 - DNA, 40 bp, Artificial Sequence
  Description of Artificial Sequence: Synthetic primer
caaactctttgttcaggacctggctacaagagttaaaaag

SEQ ID NO: 17637 - DNA, 40 bp, Artificial Sequence
  Description of Artificial Sequence: Synthetic primer
atgataatattttccagtggctcatttggatgagaactac

SEQ ID NO: 17638 - DNA, 40 bp, Artificial Sequence
  Description of Artificial Sequence: Synthetic primer
ctacacactcagtgaggagtggctgctgcgggagaacatc

SEQ ID NO: 17639 - DNA, 40 bp, Artificial Sequence
  Description of Artificial Sequence: Synthetic primer
acctgctttttacctgtgggaacttgccttattggacaac

SEQ ID NO: 17640 - DNA, 40 bp, Artificial Sequence
  Description of Artificial Sequence: Synthetic primer
gaactagctaatgtccaagaccatttgaacctagcaaaac

SEQ ID NO: 17641 - DNA, 40 bp, Artificial Sequence
  Description of Artificial Sequence: Synthetic primer
aagttaacttttcatactaacaaacagaacaagatttaag

SEQ ID NO: 17642 - DNA, 40 bp, Artificial Sequence
  Description of Artificial Sequence: Synthetic primer
gaagtgctggccaggaccatcgagtacctgcagcccaacc

SEQ ID NO: 17643 - DNA, 40 bp, Artificial Sequence
  Description of Artificial Sequence: Synthetic primer
gctggcaaacagcatcagccatgcagacctattgggacac

SEQ ID NO: 17644 - DNA, 40 bp, Artificial Sequence
  Description of Artificial Sequence: Synthetic primer
cacacactatgaagagaagaaagcttctcccagtcactca

SEQ ID NO: 17645 - DNA, 40 bp, Artificial Sequence
  Description of Artificial Sequence: Synthetic primer
ggctcagcaaatgttgctgatctgccaaaagttttagttc

SEQ ID NO: 17646 - DNA, 40 bp, Artificial Sequence
  Description of Artificial Sequence: Synthetic primer
ctggtgacattggccagggtcagccccagggatggcagac

SEQ ID NO: 17647 - DNA, 40 bp, Artificial Sequence
  Description of Artificial Sequence: Synthetic primer
aagtccagccgcatttcatgagcagagaaggagcttggag

SEQ ID NO: 17648 - DNA, 40 bp, Artificial Sequence
  Description of Artificial Sequence: Synthetic primer
gttcgtttttcctttagtcaggaaggacgttggtgttgag

SEQ ID NO: 17649 - DNA, 40 bp, Artificial Sequence
  Description of Artificial Sequence: Synthetic primer
gattgagaacacagcgccctccactcattcagccaggttc

SEQ ID NO: 17650 - DNA, 40 bp, Artificial Sequence
  Description of Artificial Sequence: Synthetic primer
ggaaactgatccttcatgtttcaatagctgttgttgtttt

SEQ ID NO: 17651 - DNA, 40 bp, Artificial Sequence
  Description of Artificial Sequence: Synthetic primer
gaaggcaccttttaacatcttccccactctgcttacatac

SEQ ID NO: 17652 - DNA, 40 bp, Artificial Sequence
  Description of Artificial Sequence: Synthetic primer
aggacagcaatttttactagaacagggtactcctagtgac

SEQ ID NO: 17653 - DNA, 40 bp, Artificial Sequence
  Description of Artificial Sequence: Synthetic primer
ggcagcatgcggccgccaccaagcggcggggcgggaggac

SEQ ID NO: 17654 - DNA, 40 bp, Artificial Sequence
  Description of Artificial Sequence: Synthetic primer
actgtttggactgaattatttccagtttcatctctctgtc

SEQ ID NO: 17655 - DNA, 40 bp, Artificial Sequence
  Description of Artificial Sequence: Synthetic primer
attaaaaatgtggaatttacagaaaacagccccagccaaa

SEQ ID NO: 17656 - DNA, 40 bp, Artificial Sequence
  Description of Artificial Sequence: Synthetic primer
gcccatctgtgtcccatgtcccagcacccaggcctctctc

SEQ ID NO: 17657 - DNA, 40 bp, Artificial Sequence
  Description of Artificial Sequence: Synthetic primer
aacatggacttctcaagcatgacgctgacacagatcaaac

SEQ ID NO: 17658 - DNA, 40 bp, Artificial Sequence
  Description of Artificial Sequence: Synthetic primer
gagcaaaataatatagttgtctggctagcagaggttctac

SEQ ID NO: 17659 - DNA, 40 bp, Artificial Sequence
  Description of Artificial Sequence: Synthetic primer
tgctggtttgacgtggagctatcctgtgaaataaaacagc

SEQ ID NO: 17660 - DNA, 40 bp, Artificial Sequence
  Description of Artificial Sequence: Synthetic primer
caaatgttaacatggataagtgatcatggtgtgcgagtgg

SEQ ID NO: 17661 - DNA, 40 bp, Artificial Sequence
  Description of Artificial Sequence: Synthetic primer
cggcgccggcggcgacgccaagaagctcaccgagtcctac

SEQ ID NO: 17662 - DNA, 40 bp, Artificial Sequence
  Description of Artificial Sequence: Synthetic primer
tggcaaaccgctccttatcgttagacatctgatcatcatc

SEQ ID NO: 17663 - DNA, 40 bp, Artificial Sequence
  Description of Artificial Sequence: Synthetic primer
agctgtttgctaagctcatcaatttcttttgtacatcatc

SEQ ID NO: 17664 - DNA, 40 bp, Artificial Sequence
  Description of Artificial Sequence: Synthetic primer
ctggtgtccgcgggtggtgagaggtacatggtgccatagg

SEQ ID NO: 17665 - DNA, 40 bp, Artificial Sequence
  Description of Artificial Sequence: Synthetic primer
cagccgatccataaatttgctgacaggtgtatctgcgttt

SEQ ID NO: 17666 - DNA, 40 bp, Artificial Sequence
  Description of Artificial Sequence: Synthetic primer
agaactagaagatattaaagtgtcattacaaagaagtgtg

SEQ ID NO: 17667 - DNA, 40 bp, Artificial Sequence
  Description of Artificial Sequence: Synthetic primer
tttaaaaggtacttttctcatcacattgtagagaggtctg

SEQ ID NO: 17668 - DNA, 40 bp, Artificial Sequence
  Description of Artificial Sequence: Synthetic primer
gtagggatccatcatgttctcgtcgctatactgggagagg

SEQ ID NO: 17669 - DNA, 40 bp, Artificial Sequence
  Description of Artificial Sequence: Synthetic primer
ctcatcttgcgcttgggcgaggtggggtcctcgggtgctg

SEQ ID NO: 17670 - DNA, 40 bp, Artificial Sequence
  Description of Artificial Sequence: Synthetic primer
cttactctctctaactgcaattcccatgatagatcagatg

SEQ ID NO: 17671 - DNA, 40 bp, Artificial Sequence
  Description of Artificial Sequence: Synthetic primer
caggcaaatgcacagcagtttccatttcctccaaactacg

SEQ ID NO: 17672 - DNA, 40 bp, Artificial Sequence
  Description of Artificial Sequence: Synthetic primer
cttcacagtctccagattcaaatcaaagcataaataacac

SEQ ID NO: 17673 - DNA, 40 bp, Artificial Sequence
  Description of Artificial Sequence: Synthetic primer
ccagggctgttcgccagcttgctcagagcctaccctgaag

SEQ ID NO: 17674 - DNA, 40 bp, Artificial Sequence
  Description of Artificial Sequence: Synthetic primer
ccggttgatcttcggtagagagtgttggagcagctcaatg

SEQ ID NO: 17675 - DNA, 40 bp, Artificial Sequence
  Description of Artificial Sequence: Synthetic primer
gcctggtgaatgactggaacagattgccttggttttcctc

SEQ ID NO: 17676 - DNA, 40 bp, Artificial Sequence
  Description of Artificial Sequence: Synthetic primer
acatatatattaggaccactaaactcagataaagcagagc

SEQ ID NO: 17677 - DNA, 40 bp, Artificial Sequence
  Description of Artificial Sequence: Synthetic primer
cctggtgcacctgagcctgctttgctggtgggggtcactg

SEQ ID NO: 17678 - DNA, 40 bp, Artificial Sequence
  Description of Artificial Sequence: Synthetic primer
gactccgggtggtcaagacagacagatcagatggtagctc

SEQ ID NO: 17679 - DNA, 40 bp, Artificial Sequence
  Description of Artificial Sequence: Synthetic primer
attcactcccaggaatactcattcgtctactctgatgttg

SEQ ID NO: 17680 - DNA, 40 bp, Artificial Sequence
  Description of Artificial Sequence: Synthetic primer
tcagcaggagctacagatgctgcagaagcagttgggagaa

SEQ ID NO: 17681 - DNA, 40 bp, Artificial Sequence
  Description of Artificial Sequence: Synthetic primer
agatacctctttctcctgaagccaccctagcaaagaaaag

SEQ ID NO: 17682 - DNA, 40 bp, Artificial Sequence
  Description of Artificial Sequence: Synthetic primer
gttccaaagatgtgggtagaagggaggctaaaggtagagc

SEQ ID NO: 17683 - DNA, 40 bp, Artificial Sequence
  Description of Artificial Sequence: Synthetic primer
tagctgggggctcccccatattcccaggcccagaagacag

SEQ ID NO: 17684 - DNA, 40 bp, Artificial Sequence
  Description of Artificial Sequence: Synthetic primer
gtttctaggcagaacctggagtcggccttgcctgagaacc

SEQ ID NO: 17685 - DNA, 40 bp, Artificial Sequence
  Description of Artificial Sequence: Synthetic primer
tccatggtctccaaaacttccaggtaagggtcattgatac

SEQ ID NO: 17686 - DNA, 40 bp, Artificial Sequence
  Description of Artificial Sequence: Synthetic primer
ttacaaaataagtcccgcatatactttaatgttttaactc

SEQ ID NO: 17687 - DNA, 40 bp, Artificial Sequence
  Description of Artificial Sequence: Synthetic primer
gggcgggcggcgagaacagaccccagcagttgtgtaacag

SEQ ID NO: 17688 - DNA, 40 bp, Artificial Sequence
  Description of Artificial Sequence: Synthetic primer
gggaaaagaaatgttttacagatgaaggaatgttttatag

SEQ ID NO: 17689 - DNA, 40 bp, Artificial Sequence
  Description of Artificial Sequence: Synthetic primer
agctccaagagagctatattggcgtctttttcactaatgg

SEQ ID NO: 17690 - DNA, 40 bp, Artificial Sequence
  Description of Artificial Sequence: Synthetic primer
gtataaccaggagctggtttactctctattactagattac

SEQ ID NO: 17691 - DNA, 40 bp, Artificial Sequence
  Description of Artificial Sequence: Synthetic primer
ccgcagtgccgttactgagcagagaaaaggtttccaattc

SEQ ID NO: 17692 - DNA, 40 bp, Artificial Sequence
  Description of Artificial Sequence: Synthetic primer
aggcgctcgttgaactcaatcagctcgccatgcatctctg

SEQ ID NO: 17693 - DNA, 40 bp, Artificial Sequence
  Description of Artificial Sequence: Synthetic primer
tgtggtgttggagcaggacaataaagtccactagaaatgc

SEQ ID NO: 17694 - DNA, 40 bp, Artificial Sequence
  Description of Artificial Sequence: Synthetic primer
gtttccagttttactccactttaccaaatactatctacag

SEQ ID NO: 17695 - DNA, 40 bp, Artificial Sequence
  Description of Artificial Sequence: Synthetic primer
actcggctcagggtcccccgaggtccaggacgagggaagg

SEQ ID NO: 17696 - DNA, 40 bp, Artificial Sequence
  Description of Artificial Sequence: Synthetic primer
taacttcggaatttgctctggataaggatggcagcctgtg

SEQ ID NO: 17697 - DNA, 40 bp, Artificial Sequence
  Description of Artificial Sequence: Synthetic primer
tcagttactaagatattccaaaagaacaagaaattaatgc

SEQ ID NO: 17698 - DNA, 40 bp, Artificial Sequence
  Description of Artificial Sequence: Synthetic primer
cacgggggtagaagggctggacgagaagttattgcttgag

SEQ ID NO: 17699 - DNA, 40 bp, Artificial Sequence
  Description of Artificial Sequence: Synthetic primer
agggacgcgccagtctgaagatgagctggggaatttgctg

SEQ ID NO: 17700 - DNA, 40 bp, Artificial Sequence
  Description of Artificial Sequence: Synthetic primer
aggcttaaagttttctgtaccttgtgatgaatgttaatag

SEQ ID NO: 17701 - DNA, 40 bp, Artificial Sequence
  Description of Artificial Sequence: Synthetic primer
cttggagtgctagctggagtttctttcgatgaagtgaatg

SEQ ID NO: 17702 - DNA, 40 bp, Artificial Sequence
  Description of Artificial Sequence: Synthetic primer
ctcctagagcttctataaagagaactgggaagaggacagg

SEQ ID NO: 17703 - DNA, 40 bp, Artificial Sequence
  Description of Artificial Sequence: Synthetic primer
tctgcagtggaggagataaacctctaagtgctctggattc

SEQ ID NO: 17704 - DNA, 40 bp, Artificial Sequence
  Description of Artificial Sequence: Synthetic primer
catgatcacaaaaagaaaacaagggagctacagaaagaac

SEQ ID NO: 17705 - DNA, 40 bp, Artificial Sequence
  Description of Artificial Sequence: Synthetic primer
tatgcagtgagatgggcttaagtttgggctagagtttgac

SEQ ID NO: 17706 - DNA, 40 bp, Artificial Sequence
  Description of Artificial Sequence: Synthetic primer
ttaagagttccttgagatttacaacagtcacaccttgcag

SEQ ID NO: 17707 - DNA, 40 bp, Artificial Sequence
  Description of Artificial Sequence: Synthetic primer
gcgccttttccttctaacctttgagtccagccctttccag

SEQ ID NO: 17708 - DNA, 40 bp, Artificial Sequence
  Description of Artificial Sequence: Synthetic primer
gaagcagagtacaggaaaccttagcaatatgctaccatcc

SEQ ID NO: 17709 - DNA, 40 bp, Artificial Sequence
  Description of Artificial Sequence: Synthetic primer
atggcaactccgtagttgtccacgaaggcccggtacacac

SEQ ID NO: 17710 - DNA, 40 bp, Artificial Sequence
  Description of Artificial Sequence: Synthetic primer
ctttcatgactgcagcttctttcaagaactcttccacctc

SEQ ID NO: 17711 - DNA, 40 bp, Artificial Sequence
  Description of Artificial Sequence: Synthetic primer
gtccaggtggtggtagaccttggccaaacccaacaaatgc

SEQ ID NO: 17712 - DNA, 40 bp, Artificial Sequence
  Description of Artificial Sequence: Synthetic primer
gaagggcaaacaaatgcagaaggaaatgtcagaattcatc

SEQ ID NO: 17713 - DNA, 40 bp, Artificial Sequence
  Description of Artificial Sequence: Synthetic primer
cgcgtgtggtccttgcgccgctgacttctccactggttcc

SEQ ID NO: 17714 - DNA, 40 bp, Artificial Sequence
  Description of Artificial Sequence: Synthetic primer
cccgcaggtggaggaggtgggccaccgaggaggctcctcg

SEQ ID NO: 17715 - DNA, 40 bp, Artificial Sequence
  Description of Artificial Sequence: Synthetic primer
tcaaccatctccttccacagtgcccaaaactgaagaccag

SEQ ID NO: 17716 - DNA, 40 bp, Artificial Sequence
  Description of Artificial Sequence: Synthetic primer
aaaatttttggaggataatttaaaaactaagccaataagg

SEQ ID NO: 17717 - DNA, 40 bp, Artificial Sequence
  Description of Artificial Sequence: Synthetic primer
gagcttgattctgcaggctgttaccttcactttgatcctg

SEQ ID NO: 17718 - DNA, 40 bp, Artificial Sequence
  Description of Artificial Sequence: Synthetic primer
ctacaggtgcacctgcccccagggctacactggccccaac

SEQ ID NO: 17719 - DNA, 40 bp, Artificial Sequence
  Description of Artificial Sequence: Synthetic primer
gatggccacaccatgtggcgggcagggggtccaggtgctc

SEQ ID NO: 17720 - DNA, 40 bp, Artificial Sequence
  Description of Artificial Sequence: Synthetic primer
agcttccagcggttattactgtcctcctgcacttgtaacc

SEQ ID NO: 17721 - DNA, 40 bp, Artificial Sequence
  Description of Artificial Sequence: Synthetic primer
tgcccacgggaagacagtctcctcctacggggcagcaagc

SEQ ID NO: 17722 - DNA, 40 bp, Artificial Sequence
  Description of Artificial Sequence: Synthetic primer
tttttatcttttcagcctccttatacagttttgaatacac

SEQ ID NO: 17723 - DNA, 40 bp, Artificial Sequence
  Description of Artificial Sequence: Synthetic primer
cattgaatgactgcttgataccatgtcctcttcgtacttc

SEQ ID NO: 17724 - DNA, 40 bp, Artificial Sequence
  Description of Artificial Sequence: Synthetic primer
ggtcctataaactaacagatgctccctgtcccccacaaag

SEQ ID NO: 17725 - DNA, 40 bp, Artificial Sequence
  Description of Artificial Sequence: Synthetic primer
gctggaagggcgcccgtcagtgtttcccagcatgcaactc

SEQ ID NO: 17726 - DNA, 40 bp, Artificial Sequence
  Description of Artificial Sequence: Synthetic primer
taccactcaactgcttgtaaagaaggtctttccctgcttc

SEQ ID NO: 17727 - DNA, 40 bp, Artificial Sequence
  Description of Artificial Sequence: Synthetic primer
atcataaatgcccttattgaaaaagtcccctgtccatttg

SEQ ID NO: 17728 - DNA, 40 bp, Artificial Sequence
  Description of Artificial Sequence: Synthetic primer
ggtagagagaaaaatcctggatctgtatgctttgagcaag

SEQ ID NO: 17729 - DNA, 40 bp, Artificial Sequence
  Description of Artificial Sequence: Synthetic primer
ggaccggggccgcctgccaaggccatgttcacgttgtagg

SEQ ID NO: 17730 - DNA, 40 bp, Artificial Sequence
  Description of Artificial Sequence: Synthetic primer
tctgccatggaggcagaggtagctggtgcagaatgtcagg

SEQ ID NO: 17731 - DNA, 40 bp, Artificial Sequence
  Description of Artificial Sequence: Synthetic primer
agggaagcgatgcaagaataagatgtggcgctttcatgtc

SEQ ID NO: 17732 - DNA, 40 bp, Artificial Sequence
  Description of Artificial Sequence: Synthetic primer
ttggcgttcttttgcctcaaaggattgggtttctcacctc

SEQ ID NO: 17733 - DNA, 40 bp, Artificial Sequence
  Description of Artificial Sequence: Synthetic primer
actcagcaccagagattccacactggggagaaagactacg

SEQ ID NO: 17734 - DNA, 40 bp, Artificial Sequence
  Description of Artificial Sequence: Synthetic primer
gctgtttggcccagctcattactttctccctttctctacc

SEQ ID NO: 17735 - DNA, 40 bp, Artificial Sequence
  Description of Artificial Sequence: Synthetic primer
ttgggtgctgtgaccgtccgggggcgggggaagggcaagg

SEQ ID NO: 17736 - DNA, 40 bp, Artificial Sequence
  Description of Artificial Sequence: Synthetic primer
cccaagggtcccggagttccctgtggagctgcaagttctg

SEQ ID NO: 17737 - DNA, 40 bp, Artificial Sequence
  Description of Artificial Sequence: Synthetic primer
tcatcagttttattgcctgctcgattatatagaaaaatac

SEQ ID NO: 17738 - DNA, 40 bp, Artificial Sequence
  Description of Artificial Sequence: Synthetic primer
gtccaaaagaagtttttcagctttgtctcggctgatactc

SEQ ID NO: 17739 - DNA, 40 bp, Artificial Sequence
  Description of Artificial Sequence: Synthetic primer
ccccatggcgctgctcaccatcgggtccagctcagagaag

SEQ ID NO: 17740 - DNA, 40 bp, Artificial Sequence
  Description of Artificial Sequence: Synthetic primer
aaatttgatgtcttttattgcatgaacattacggatattg

SEQ ID NO: 17741 - DNA, 40 bp, Artificial Sequence
  Description of Artificial Sequence: Synthetic primer
ccagagggacaagtaggtgccttcggtgctctttttgtcg

SEQ ID NO: 17742 - DNA, 40 bp, Artificial Sequence
  Description of Artificial Sequence: Synthetic primer
gaggcttagtttggggctttggccattttagctacttatc

SEQ ID NO: 17743 - DNA, 40 bp, Artificial Sequence
  Description of Artificial Sequence: Synthetic primer
cctgctttacaaaaagttaatttcttgcccgtgcttgagc

SEQ ID NO: 17744 - DNA, 40 bp, Artificial Sequence
  Description of Artificial Sequence: Synthetic primer
tgtgcttccagttttgcagccctgggaccctctttcttgc

SEQ ID NO: 17745 - DNA, 40 bp, Artificial Sequence
  Description of Artificial Sequence: Synthetic primer
aaaatggtttcctattttgcttattaaaaccatggaaatg

SEQ ID NO: 17746 - DNA, 40 bp, Artificial Sequence
  Description of Artificial Sequence: Synthetic primer
tctgtcttgctctctttacacacgaaacatgagtgaatcc

SEQ ID NO: 17747 - DNA, 40 bp, Artificial Sequence
  Description of Artificial Sequence: Synthetic primer
gggagcacgagctgcagcaccacttccgggtgagtgcaag

SEQ ID NO: 17748 - DNA, 40 bp, Artificial Sequence
  Description of Artificial Sequence: Synthetic primer
tggcttctcttctggcttccctttctttcagtcttttctc

SEQ ID NO: 17749 - DNA, 40 bp, Artificial Sequence
  Description of Artificial Sequence: Synthetic primer
tgagactttctgcactaaaacttatcctcatatgtacaac

SEQ ID NO: 17750 - DNA, 40 bp, Artificial Sequence
  Description of Artificial Sequence: Synthetic primer
ggcacgtttagaaaatgataaagaatccctcgttcttcag

SEQ ID NO: 17751 - DNA, 40 bp, Artificial Sequence
  Description of Artificial Sequence: Synthetic primer
ggtcattgtggtcatgagatacctcttcgctttcctcaac

SEQ ID NO: 17752 - DNA, 40 bp, Artificial Sequence
  Description of Artificial Sequence: Synthetic primer
aacaaaataaaaatatcagctaccctaaatgtcacgtacc

SEQ ID NO: 17753 - DNA, 40 bp, Artificial Sequence
  Description of Artificial Sequence: Synthetic primer
ctgtaaaaatttttcacacatcccaaataaggggtcaagt

SEQ ID NO: 17754 - DNA, 40 bp, Artificial Sequence
  Description of Artificial Sequence: Synthetic primer
ctgggacactctggaaccgacggatagtgtctggagtacg

SEQ ID NO: 17755 - DNA, 40 bp, Artificial Sequence
  Description of Artificial Sequence: Synthetic primer
tctaaaaggagatttattggaaaatggtttactcttttgg

SEQ ID NO: 17756 - DNA, 40 bp, Artificial Sequence
  Description of Artificial Sequence: Synthetic primer
gccataaacaacagtgccaggggtgagaggtcggctattg

SEQ ID NO: 17757 - DNA, 40 bp, Artificial Sequence
  Description of Artificial Sequence: Synthetic primer
ccggggcagaactacccccgcacgggattccctttggaag

SEQ ID NO: 17758 - DNA, 40 bp, Artificial Sequence
  Description of Artificial Sequence: Synthetic primer
acaacagcttcccagaataaattaacctctggtcctctgg

SEQ ID NO: 17759 - DNA, 40 bp, Artificial Sequence
  Description of Artificial Sequence: Synthetic primer
gagatgccgtcggtggcccggcctcggcctgtcgggggta

SEQ ID NO: 17760 - DNA, 40 bp, Artificial Sequence
  Description of Artificial Sequence: Synthetic primer
tgcaacatagtaagaaggggaaaactgcgcaggggttaag

SEQ ID NO: 17761 - DNA, 40 bp, Artificial Sequence
  Description of Artificial Sequence: Synthetic primer
gctgtcccaccaaattcattaggtaaattggagcataatc

SEQ ID NO: 17762 - DNA, 40 bp, Artificial Sequence
  Description of Artificial Sequence: Synthetic primer
ccagcagcttgaccttggcacaccacataatctgagtgaa

SEQ ID NO: 17763 - DNA, 40 bp, Artificial Sequence
  Description of Artificial Sequence: Synthetic primer
cagactctcctgaggggaggtcccccgacaccggaagctg

SEQ ID NO: 17764 - DNA, 40 bp, Artificial Sequence
  Description of Artificial Sequence: Synthetic primer
ggaagcgagtggccgttcggcaccggagactcctgaatac

SEQ ID NO: 17765 - DNA, 40 bp, Artificial Sequence
  Description of Artificial Sequence: Synthetic primer
caactatgtctttgaaaaagaatatgtctgcccacagcag

SEQ ID NO: 17766 - DNA, 40 bp, Artificial Sequence
  Description of Artificial Sequence: Synthetic primer
ctcatgaagacaggcacatcaaattctatgataacaatac

SEQ ID NO: 17767 - DNA, 40 bp, Artificial Sequence
  Description of Artificial Sequence: Synthetic primer
cttggtcagagtcagccagtttcttactcagttcttccac

SEQ ID NO: 17768 - DNA, 40 bp, Artificial Sequence
  Description of Artificial Sequence: Synthetic primer
ggtgcttagggggtcagaattttctggatctttgctaatc

SEQ ID NO: 17769 - DNA, 40 bp, Artificial Sequence
  Description of Artificial Sequence: Synthetic primer
atccacatgggatctgaaaattcccaacggttacatcttg

SEQ ID NO: 17770 - DNA, 40 bp, Artificial Sequence
  Description of Artificial Sequence: Synthetic primer
acaaactgaaaaccactagttaatggattaaaaatagagc

SEQ ID NO: 17771 - DNA, 40 bp, Artificial Sequence
  Description of Artificial Sequence: Synthetic primer
ttcaaatgtcttaaggctagaatgtatcaccattattttg

SEQ ID NO: 17772 - DNA, 40 bp, Artificial Sequence
  Description of Artificial Sequence: Synthetic primer
gggaagccagctgacagagaggctcaccagcaaactcagc

SEQ ID NO: 17773 - DNA, 40 bp, Artificial Sequence
  Description of Artificial Sequence: Synthetic primer
gggcctgcagttttctcgaatgctagtgcaggacgaggag

SEQ ID NO: 17774 - DNA, 40 bp, Artificial Sequence
  Description of Artificial Sequence: Synthetic primer
gcgtcaaaaggctatgttgaggataattcttatgactatg

SEQ ID NO: 17775 - DNA, 40 bp, Artificial Sequence
  Description of Artificial Sequence: Synthetic primer
ttgccgatctgcgagcaggtctgagccagcagcgccaagg

SEQ ID NO: 17776 - DNA, 40 bp, Artificial Sequence
  Description of Artificial Sequence: Synthetic primer
cgctgtcttctaggttaactcacgaagtacattctctgtc

SEQ ID NO: 17777 - DNA, 40 bp, Artificial Sequence
  Description of Artificial Sequence: Synthetic primer
cggggccctcgctttcctgcccggcggctgccttcatttc

SEQ ID NO: 17778 - DNA, 40 bp, Artificial Sequence
  Description of Artificial Sequence: Synthetic primer
ccacacaaaaacgtcgcctttcgtgtcactgtagtagagg

SEQ ID NO: 17779 - DNA, 40 bp, Artificial Sequence
  Description of Artificial Sequence: Synthetic primer
ggcctcctggagcccccgtgaacatgtactctagaagagc

SEQ ID NO: 17780 - DNA, 40 bp, Artificial Sequence
  Description of Artificial Sequence: Synthetic primer
agcaggaaagagagagacagagagaaagatgtgtgagaaa

SEQ ID NO: 17781 - DNA, 40 bp, Artificial Sequence
  Description of Artificial Sequence: Synthetic primer
cgtagaaacagtacatcaaaagctcttataaaagaaaaac

SEQ ID NO: 17782 - DNA, 40 bp, Artificial Sequence
  Description of Artificial Sequence: Synthetic primer
tgggaatcaagcaggagcctcgggattactgcgtcgattc

SEQ ID NO: 17783 - DNA, 40 bp, Artificial Sequence
  Description of Artificial Sequence: Synthetic primer
ggcacggctgatttcatagggactatcaatttcaatgttc

SEQ ID NO: 17784 - DNA, 40 bp, Artificial Sequence
  Description of Artificial Sequence: Synthetic primer
ttaacttttaaaacaaaacatcaattaaagagaaatatcg

SEQ ID NO: 17785 - DNA, 40 bp, Artificial Sequence
  Description of Artificial Sequence: Synthetic primer
gtagactgataatttggctttttgcaatatcactctgttc

SEQ ID NO: 17786 - DNA, 40 bp, Artificial Sequence
  Description of Artificial Sequence: Synthetic primer
gatctatatatcaaatacatacagaaatgatgtaaaaacc

SEQ ID NO: 17787 - DNA, 40 bp, Artificial Sequence
  Description of Artificial Sequence: Synthetic primer
gtgctcgtggaaatgatggtgctactggtgctgccgggcc

SEQ ID NO: 17788 - DNA, 40 bp, Artificial Sequence
  Description of Artificial Sequence: Synthetic primer
ttttcccagttgttcctcatttctttagttgacaattctg

SEQ ID NO: 17789 - DNA, 40 bp, Artificial Sequence
  Description of Artificial Sequence: Synthetic primer
tcctcctcctgacgttgtaaatcaggaccccaacaataac

SEQ ID NO: 17790 - DNA, 40 bp, Artificial Sequence
  Description of Artificial Sequence: Synthetic primer
gcgcagcgaggaaggtgaggaaagcgaccccctccatttc

SEQ ID NO: 17791 - DNA, 40 bp, Artificial Sequence
  Description of Artificial Sequence: Synthetic primer
gagattggtatggaccagctgtggttgctcacattttaag

SEQ ID NO: 17792 - DNA, 40 bp, Artificial Sequence
  Description of Artificial Sequence: Synthetic primer
tgggagttgtacctctttcgaagtggagtcttgccttttc

SEQ ID NO: 17793 - DNA, 40 bp, Artificial Sequence
  Description of Artificial Sequence: Synthetic primer
aagggcaagcagtagttcacctcgccagtctgagaagctc

SEQ ID NO: 17794 - DNA, 40 bp, Artificial Sequence
  Description of Artificial Sequence: Synthetic primer
gacccgtcttctgggctgggtgtgaccaagcaggatctgg

SEQ ID NO: 17795 - DNA, 40 bp, Artificial Sequence
  Description of Artificial Sequence: Synthetic primer
aggttcacatcaggaagggtaaagtcattaatttgctgtc

SEQ ID NO: 17796 - DNA, 40 bp, Artificial Sequence
  Description of Artificial Sequence: Synthetic primer
gcaccccacagactcagcgccgccagagatagggtttttg

SEQ ID NO: 17797 - DNA, 40 bp, Artificial Sequence
  Description of Artificial Sequence: Synthetic primer
ggcgctcttcctgtctctctgctgctacctgcgtctggtc

SEQ ID NO: 17798 - DNA, 40 bp, Artificial Sequence
  Description of Artificial Sequence: Synthetic primer
gatcaccctgggatatacacaggccgatgtggggctcacc

SEQ ID NO: 17799 - DNA, 40 bp, Artificial Sequence
  Description of Artificial Sequence: Synthetic primer
aatgttaaatatagtatctatgtagattggttagtaaaac

SEQ ID NO: 17800 - DNA, 40 bp, Artificial Sequence
  Description of Artificial Sequence: Synthetic primer
gtgctgcttccaacatggtgatcagctcttcaaaatagcc

SEQ ID NO: 17801 - DNA, 40 bp, Artificial Sequence
  Description of Artificial Sequence: Synthetic primer
catggcattcctcagggaatactttgagaggttggagaag

SEQ ID NO: 17802 - DNA, 40 bp, Artificial Sequence
  Description of Artificial Sequence: Synthetic primer
aaagccaaaatgcagaaacagagtttttcagtaaggcttc

SEQ ID NO: 17803 - DNA, 40 bp, Artificial Sequence
  Description of Artificial Sequence: Synthetic primer
catctcgatggcaaggattttaagcatattgtcggttgtg

SEQ ID NO: 17804 - DNA, 40 bp, Artificial Sequence
  Description of Artificial Sequence: Synthetic primer
tctgattccaaacagttcacctattaccctctggtggaag

SEQ ID NO: 17805 - DNA, 40 bp, Artificial Sequence
  Description of Artificial Sequence: Synthetic primer
cacaagttaaagccatattttatctggtgagccccttaac

SEQ ID NO: 17806 - DNA, 40 bp, Artificial Sequence
  Description of Artificial Sequence: Synthetic primer
ggctctgaggtactctgctcacaggccccagacagatgct

SEQ ID NO: 17807 - DNA, 40 bp, Artificial Sequence
  Description of Artificial Sequence: Synthetic primer
aggagaggtcaccttctatctagcctactgataactctgg

SEQ ID NO: 17808 - DNA, 40 bp, Artificial Sequence
  Description of Artificial Sequence: Synthetic primer
aatattacataaaaatggacagcacattaaataaacattc

SEQ ID NO: 17809 - DNA, 40 bp, Artificial Sequence
  Description of Artificial Sequence: Synthetic primer
cctccgtcggggccctccaaccccatgaaccccaccattg

SEQ ID NO: 17810 - DNA, 40 bp, Artificial Sequence
  Description of Artificial Sequence: Synthetic primer
ctcggacagcgagctggacgagaccatcgaggtggagaag

SEQ ID NO: 17811 - DNA, 40 bp, Artificial Sequence
  Description of Artificial Sequence: Synthetic primer
aaggcatcagcacctgaaccccctgcagaagaagaagtgg

SEQ ID NO: 17812 - DNA, 40 bp, Artificial Sequence
  Description of Artificial Sequence: Synthetic primer
tgcgaaagactaacactctgccatcccatacacattctcc

SEQ ID NO: 17813 - DNA, 40 bp, Artificial Sequence
  Description of Artificial Sequence: Synthetic primer
cattaaaaataactgaaaggactacaaaataaaaaccaaa

SEQ ID NO: 17814 - DNA, 40 bp, Artificial Sequence
  Description of Artificial Sequence: Synthetic primer
cctccaagtgggaactgcccggcaccccctaggacacctc

SEQ ID NO: 17815 - DNA, 40 bp, Artificial Sequence
  Description of Artificial Sequence: Synthetic primer
tgctctttcccggagggctcttgctggtgctcaaggagtc

SEQ ID NO: 17816 - DNA, 40 bp, Artificial Sequence
  Description of Artificial Sequence: Synthetic primer
actggctgcttgaccaaacacagaaccagtattactagac

SEQ ID NO: 17817 - DNA, 40 bp, Artificial Sequence
  Description of Artificial Sequence: Synthetic primer
ttcaacctgatgctgggagagaggaatcggctgcccttcg

SEQ ID NO: 17818 - DNA, 40 bp, Artificial Sequence
  Description of Artificial Sequence: Synthetic primer
aagcaacaagaacaaatggtggcttgtttggatagctgac

SEQ ID NO: 17819 - DNA, 40 bp, Artificial Sequence
  Description of Artificial Sequence: Synthetic primer
actttccaaagcactgcgtgctgatgaaaactactacaag

SEQ ID NO: 17820 - DNA, 40 bp, Artificial Sequence
  Description of Artificial Sequence: Synthetic primer
tgtcagttaactggatatcaactacagcctccagcatcac

SEQ ID NO: 17821 - DNA, 40 bp, Artificial Sequence
  Description of Artificial Sequence: Synthetic primer
cccattcctgaagagggaagggcaccggagcggtgagatg

SEQ ID NO: 17822 - DNA, 40 bp, Artificial Sequence
  Description of Artificial Sequence: Synthetic primer
tgtgtgctgtaacatttatcctatgggagagaggagtatc

SEQ ID NO: 17823 - DNA, 40 bp, Artificial Sequence
  Description of Artificial Sequence: Synthetic primer
actggcctgaattttattagcttcattataaatcactgag

SEQ ID NO: 17824 - DNA, 40 bp, Artificial Sequence
  Description of Artificial Sequence: Synthetic primer
cagctttgccacaaagcccagtctgtgtctcaaatcaacc

SEQ ID NO: 17825 - DNA, 40 bp, Artificial Sequence
  Description of Artificial Sequence: Synthetic primer
aaaaatccactttcttcattgctatgaaatagctcagtag

SEQ ID NO: 17826 - DNA, 40 bp, Artificial Sequence
  Description of Artificial Sequence: Synthetic primer
ctcccctgactcatgggcaggcctcgaccccgctacactg

SEQ ID NO: 17827 - DNA, 40 bp, Artificial Sequence
  Description of Artificial Sequence: Synthetic primer
aaggcatctgtaatacaatgttctaagagaaaactaaaac

SEQ ID NO: 17828 - DNA, 40 bp, Artificial Sequence
  Description of Artificial Sequence: Synthetic primer
ccttgaacttctaggatacagaaaagaagatctaggaaag

SEQ ID NO: 17829 - DNA, 40 bp, Artificial Sequence
  Description of Artificial Sequence: Synthetic primer
taatcggaggaagtgaaaggcaaggatttaggaaacattc

SEQ ID NO: 17830 - DNA, 40 bp, Artificial Sequence
  Description of Artificial Sequence: Synthetic primer
ccagtggcagcagcggcggtggcggcagcaagaggatcag

SEQ ID NO: 17831 - DNA, 40 bp, Artificial Sequence
  Description of Artificial Sequence: Synthetic primer
acctcagcgagaaaggaagtcatcttcatcctcagaagac

SEQ ID NO: 17832 - DNA, 40 bp, Artificial Sequence
  Description of Artificial Sequence: Synthetic primer
aacctcggagcagcttcttctggaaaaggccggccagcag

SEQ ID NO: 17833 - DNA, 40 bp, Artificial Sequence
  Description of Artificial Sequence: Synthetic primer
ctgtggcctctgccagtaccacccggcgaaccagctccag

SEQ ID NO: 17834 - DNA, 40 bp, Artificial Sequence
  Description of Artificial Sequence: Synthetic primer
atgcctctgtcgttttcgcttccttggcttgtcaaatatc

SEQ ID NO: 17835 - DNA, 40 bp, Artificial Sequence
  Description of Artificial Sequence: Synthetic primer
cgaccggatagctgtccgtgctctgcttctccaccagagg

SEQ ID NO: 17836 - DNA, 40 bp, Artificial Sequence
  Description of Artificial Sequence: Synthetic primer
tgctcctcatttccatatatttttagtttcttcttcactg

SEQ ID NO: 17837 - DNA, 40 bp, Artificial Sequence
  Description of Artificial Sequence: Synthetic primer
ttttctcataagaatattcgggaaaatgtgtttggccatt

SEQ ID NO: 17838 - DNA, 40 bp, Artificial Sequence
  Description of Artificial Sequence: Synthetic primer
cccccagcatgcggcacgccttgcccgggccgcactccac

SEQ ID NO: 17839 - DNA, 40 bp, Artificial Sequence
  Description of Artificial Sequence: Synthetic primer
ctctcagataagagttcttctaatttttcaccatttatcc

SEQ ID NO: 17840 - DNA, 40 bp, Artificial Sequence
  Description of Artificial Sequence: Synthetic primer
ggagctcttgtttccagcattccagttccctcagcttttc

SEQ ID NO: 17841 - DNA, 40 bp, Artificial Sequence
  Description of Artificial Sequence: Synthetic primer
actctctcaagatcttccttatgttcacatcatttaccag

SEQ ID NO: 17842 - DNA, 40 bp, Artificial Sequence
  Description of Artificial Sequence: Synthetic primer
tgggagccgccgttctcagccttaaaagttgcagagattg

SEQ ID NO: 17843 - DNA, 40 bp, Artificial Sequence
  Description of Artificial Sequence: Synthetic primer
agtgttttttaaaattgttctccagcattttatggctcct

SEQ ID NO: 17844 - DNA, 40 bp, Artificial Sequence
  Description of Artificial Sequence: Synthetic primer
ctggtgaatctggtaaaagtacaattgtgaagcagatgaa

SEQ ID NO: 17845 - DNA, 40 bp, Artificial Sequence
  Description of Artificial Sequence: Synthetic primer
ttgaaagctgttagctttgtcaacacgcattgtccttgtc

SEQ ID NO: 17846 - DNA, 40 bp, Artificial Sequence
  Description of Artificial Sequence: Synthetic primer
tattgtccaagtacctggtgaacgtgtgtgaggaattaac

SEQ ID NO: 17847 - DNA, 40 bp, Artificial Sequence
  Description of Artificial Sequence: Synthetic primer
ggccatgtcagcattatcttctggaatattacgagctagg

SEQ ID NO: 17848 - DNA, 40 bp, Artificial Sequence
  Description of Artificial Sequence: Synthetic primer
gctctgttaccgcgtcctgagacactcgcagcaggattac

SEQ ID NO: 17849 - DNA, 40 bp, Artificial Sequence
  Description of Artificial Sequence: Synthetic primer
aatatcccactgagcacgttctctctgaggtcggggtttc

SEQ ID NO: 17850 - DNA, 40 bp, Artificial Sequence
  Description of Artificial Sequence: Synthetic primer
gcttttaggattgatcagaagaaacactccaaaaattgag

SEQ ID NO: 17851 - DNA, 40 bp, Artificial Sequence
  Description of Artificial Sequence: Synthetic primer
tgtggttctgcaccacgatgtaggccatctcacctttatg

SEQ ID NO: 17852 - DNA, 40 bp, Artificial Sequence
  Description of Artificial Sequence: Synthetic primer
atttcacagtcgtgacttgttagcagcctggagaaagtgg

SEQ ID NO: 17853 - DNA, 40 bp, Artificial Sequence
  Description of Artificial Sequence: Synthetic primer
ttaaacaaacttttggacgtttaaaatatcagtggccttg

SEQ ID NO: 17854 - DNA, 40 bp, Artificial Sequence
  Description of Artificial Sequence: Synthetic primer
ttttgtttcgctacttaacagacatacacaagccttccac

SEQ ID NO: 17855 - DNA, 40 bp, Artificial Sequence
  Description of Artificial Sequence: Synthetic primer
cagtcctcttcaatgccccgtctttgtgtgggcacagctc

SEQ ID NO: 17856 - DNA, 40 bp, Artificial Sequence
  Description of Artificial Sequence: Synthetic primer
gtctaagatgtgatgactttgatgaaacacaactgaaaac

SEQ ID NO: 17857 - DNA, 40 bp, Artificial Sequence
  Description of Artificial Sequence: Synthetic primer
gggcagcggcccatggcgccctaccggccctcccagcaag

SEQ ID NO: 17858 - DNA, 40 bp, Artificial Sequence
  Description of Artificial Sequence: Synthetic primer
cagggtcacattgctgccatgctctattatgtacagttcc

SEQ ID NO: 17859 - DNA, 40 bp, Artificial Sequence
  Description of Artificial Sequence: Synthetic primer
gttagtgtacagtatcctcgaaggacaaccctatttttcg

SEQ ID NO: 17860 - DNA, 40 bp, Artificial Sequence
  Description of Artificial Sequence: Synthetic primer
ccgcccagccatttggccccaagggtggctactcttacta

SEQ ID NO: 17861 - DNA, 40 bp, Artificial Sequence
  Description of Artificial Sequence: Synthetic primer
ggtgtccccagtcaggcctagtttctggagttaatatttg

SEQ ID NO: 17862 - DNA, 40 bp, Artificial Sequence
  Description of Artificial Sequence: Synthetic primer
gagctccagatgctgcagatgctgctggttctcgatgtag

SEQ ID NO: 17863 - DNA, 40 bp, Artificial Sequence
  Description of Artificial Sequence: Synthetic primer
ctacagtgggcgcaactgcgagaccgacatcgacgactgc

SEQ ID NO: 17864 - DNA, 40 bp, Artificial Sequence
  Description of Artificial Sequence: Synthetic primer
gggatattcacagaggcaggctggctggctgtaggaggtg

SEQ ID NO: 17865 - DNA, 40 bp, Artificial Sequence
  Description of Artificial Sequence: Synthetic primer
ttaacataggaggcagtggttgcctgggcctgaatttctc

SEQ ID NO: 17866 - DNA, 40 bp, Artificial Sequence
  Description of Artificial Sequence: Synthetic primer
tgcagggggccctcccagcggggccatgcccttctacaac

SEQ ID NO: 17867 - DNA, 40 bp, Artificial Sequence
  Description of Artificial Sequence: Synthetic primer
gttcgtaatctttcaccttatgtttccaatgaactgttgg

SEQ ID NO: 17868 - DNA, 40 bp, Artificial Sequence
  Description of Artificial Sequence: Synthetic primer
agaggctctcagcacgagactaggctgtttggaatggttc

SEQ ID NO: 17869 - DNA, 40 bp, Artificial Sequence
  Description of Artificial Sequence: Synthetic primer
tgctggtacccggcctgctgctggctgtactgggagtttc

SEQ ID NO: 17870 - DNA, 40 bp, Artificial Sequence
  Description of Artificial Sequence: Synthetic primer
ccggctccaggctgaggaaccaccgcacctggcacagaag

SEQ ID NO: 17871 - DNA, 40 bp, Artificial Sequence
  Description of Artificial Sequence: Synthetic primer
catgaccacaaccaccaccttcaagggagtcgaccccaac

SEQ ID NO: 17872 - DNA, 40 bp, Artificial Sequence
  Description of Artificial Sequence: Synthetic primer
agtgcaggaagtatttcagcaaatgcaactctgactgtcc

SEQ ID NO: 17873 - DNA, 40 bp, Artificial Sequence
  Description of Artificial Sequence: Synthetic primer
gaccctttcctggcctccttcccatctaaaaagaaaaagg

SEQ ID NO: 17874 - DNA, 40 bp, Artificial Sequence
  Description of Artificial Sequence: Synthetic primer
ggcgaccgagaaccccgccgcgcaggcgccctggcctagc

SEQ ID NO: 17875 - DNA, 40 bp, Artificial Sequence
  Description of Artificial Sequence: Synthetic primer
ttgagccatggacaaagatggtaaaatcggaccaaattgc

SEQ ID NO: 17876 - DNA, 40 bp, Artificial Sequence
  Description of Artificial Sequence: Synthetic primer
aggttgagaacctgaaaatgtgagattgagtatatcagag

SEQ ID NO: 17877 - DNA, 40 bp, Artificial Sequence
  Description of Artificial Sequence: Synthetic primer
cactgtggccacatccttggtcattgtggttagcgtgcag

SEQ ID NO: 17878 - DNA, 40 bp, Artificial Sequence
  Description of Artificial Sequence: Synthetic primer
actgagaccaggagtggctgcagacgggtggggcgaggac

SEQ ID NO: 17879 - DNA, 40 bp, Artificial Sequence
  Description of Artificial Sequence: Synthetic primer
agcgtcagccactccaccaggcaccagagcccccggaaag

SEQ ID NO: 17880 - DNA, 40 bp, Artificial Sequence
  Description of Artificial Sequence: Synthetic primer
ctccagaacattccccactcgggctagagaattgcgtctg

SEQ ID NO: 17881 - DNA, 40 bp, Artificial Sequence
  Description of Artificial Sequence: Synthetic primer
ttccatctaaccagacaagaaatagtatcattattcaacg

SEQ ID NO: 17882 - DNA, 40 bp, Artificial Sequence
  Description of Artificial Sequence: Synthetic primer
aggggctccagggcgacctctctcaccaggcaggccacgg

SEQ ID NO: 17883 - DNA, 40 bp, Artificial Sequence
  Description of Artificial Sequence: Synthetic primer
caactactttaaggggaagataagatttctgtctactaag

SEQ ID NO: 17884 - DNA, 40 bp, Artificial Sequence
  Description of Artificial Sequence: Synthetic primer
gttccgacctcagcgccgcagctacaggtactttgagcac

SEQ ID NO: 17885 - DNA, 40 bp, Artificial Sequence
  Description of Artificial Sequence: Synthetic primer
tttaatcaatcataagaacaatgattcatcagtggggaag

SEQ ID NO: 17886 - DNA, 40 bp, Artificial Sequence
  Description of Artificial Sequence: Synthetic primer
ccatttcctaggtctgcctcttggccgtttttctccagtg

SEQ ID NO: 17887 - DNA, 40 bp, Artificial Sequence
  Description of Artificial Sequence: Synthetic primer
ttcagcaactgagataagttgagctgtggatactggaagg

SEQ ID NO: 17888 - DNA, 40 bp, Artificial Sequence
  Description of Artificial Sequence: Synthetic primer
cgtggttgtgccgctttgcgggttgctgattctgactatg

SEQ ID NO: 17889 - DNA, 40 bp, Artificial Sequence
  Description of Artificial Sequence: Synthetic primer
gtgcgaggggctccgggcggccgggcgggcgcacaccatc

SEQ ID NO: 17890 - DNA, 40 bp, Artificial Sequence
  Description of Artificial Sequence: Synthetic primer
agaagaaataattttcatttctaaattaagtcccttttag

SEQ ID NO: 17891 - DNA, 40 bp, Artificial Sequence
  Description of Artificial Sequence: Synthetic primer
cgggctggctggttctcagattcgctctggttttgccttg

SEQ ID NO: 17892 - DNA, 40 bp, Artificial Sequence
  Description of Artificial Sequence: Synthetic primer
tttaagtgagttaaaccatgtaacccagttataggaaaag

SEQ ID NO: 17893 - DNA, 40 bp, Artificial Sequence
  Description of Artificial Sequence: Synthetic primer
agggtttccctgccatactgcttacaggcctcggtcagtg

SEQ ID NO: 17894 - DNA, 40 bp, Artificial Sequence
  Description of Artificial Sequence: Synthetic primer
aattgattctcccactaaagtgaagaaaaatgcacataac

SEQ ID NO: 17895 - DNA, 40 bp, Artificial Sequence
  Description of Artificial Sequence: Synthetic primer
tgcccccctaccagctgccggactccacctaccccaccac

SEQ ID NO: 17896 - DNA, 40 bp, Artificial Sequence
  Description of Artificial Sequence: Synthetic primer
aatactgtctatttttaaaaccacatgcttaaatagactc

SEQ ID NO: 17897 - DNA, 40 bp, Artificial Sequence
  Description of Artificial Sequence: Synthetic primer
caagcccgaacagtgcccgacacttctttggagtatttgc

SEQ ID NO: 17898 - DNA, 40 bp, Artificial Sequence
  Description of Artificial Sequence: Synthetic primer
aacggccctgtccctgggccctatggcctgcctccccaag

SEQ ID NO: 17899 - DNA, 40 bp, Artificial Sequence
  Description of Artificial Sequence: Synthetic primer
caaaaacaagaggaatggtactacaaacatggctttgtcc

SEQ ID NO: 17900 - DNA, 40 bp, Artificial Sequence
  Description of Artificial Sequence: Synthetic primer
tgtgcactgtgtcctttagccagggccgtgccaacttatg

SEQ ID NO: 17901 - DNA, 40 bp, Artificial Sequence
  Description of Artificial Sequence: Synthetic primer
tgctgctgggagctccagctcagtgaaatggacagaaggg

SEQ ID NO: 17902 - DNA, 40 bp, Artificial Sequence
  Description of Artificial Sequence: Synthetic primer
tttatttcatgaaacaaagagctacggtaatttaacacac

SEQ ID NO: 17903 - DNA, 40 bp, Artificial Sequence
  Description of Artificial Sequence: Synthetic primer
ccgctctctccgctattactatgaaaagggcatcatgcag

SEQ ID NO: 17904 - DNA, 40 bp, Artificial Sequence
  Description of Artificial Sequence: Synthetic primer
gtagcctttttacttcagattccttttcttctagttgttc

SEQ ID NO: 17905 - DNA, 40 bp, Artificial Sequence
  Description of Artificial Sequence: Synthetic primer
gagtgactacgacctggttctagctgaagatgaagaaatg

SEQ ID NO: 17906 - DNA, 40 bp, Artificial Sequence
  Description of Artificial Sequence: Synthetic primer
aaaaataatactcatggaaaagcctgcaggaaaataaaag

SEQ ID NO: 17907 - DNA, 40 bp, Artificial Sequence
  Description of Artificial Sequence: Synthetic primer
caacggcatagttggcttttctttctcgtttaggtggttc

SEQ ID NO: 17908 - DNA, 40 bp, Artificial Sequence
  Description of Artificial Sequence: Synthetic primer
ggtaaattgtcttttgcatatacatcttgagcaaggactc

SEQ ID NO: 17909 - DNA, 40 bp, Artificial Sequence
  Description of Artificial Sequence: Synthetic primer
ccattaacaataaacttactgtcaatcatttctctctatg

SEQ ID NO: 17910 - DNA, 40 bp, Artificial Sequence
  Description of Artificial Sequence: Synthetic primer
ccgatgaagtcctggggcagggaggagagcggtgagtagg

SEQ ID NO: 17911 - DNA, 40 bp, Artificial Sequence
  Description of Artificial Sequence: Synthetic primer
gcaggtatagcaagtgtttgctaaagttgtagttcagagc

SEQ ID NO: 17912 - DNA, 40 bp, Artificial Sequence
  Description of Artificial Sequence: Synthetic primer
atgttaccagaaaagtgaagtcagtaaatagttcgtaaac

SEQ ID NO: 17913 - DNA, 40 bp, Artificial Sequence
  Description of Artificial Sequence: Synthetic primer
atcatttcctctttggtataaaaatcagactctcaccttg

SEQ ID NO: 17914 - DNA, 40 bp, Artificial Sequence
  Description of Artificial Sequence: Synthetic primer
ctgagatccactattttaccagggccctttttagtgaatc

SEQ ID NO: 17915 - DNA, 40 bp, Artificial Sequence
  Description of Artificial Sequence: Synthetic primer
agaactgctttgttcttcatctctttgttaggtgttggag

SEQ ID NO: 17916 - DNA, 40 bp, Artificial Sequence
  Description of Artificial Sequence: Synthetic primer
tcgtagtgtatattgttactgacattaaaatactttatag

SEQ ID NO: 17917 - DNA, 40 bp, Artificial Sequence
  Description of Artificial Sequence: Synthetic primer
cccagaggttggtagatggagcccacaagctcataagaat

SEQ ID NO: 17918 - DNA, 40 bp, Artificial Sequence
  Description of Artificial Sequence: Synthetic primer
gagagaaaagctcttgtttcagatgaaggccaacccaatg

SEQ ID NO: 17919 - DNA, 40 bp, Artificial Sequence
  Description of Artificial Sequence: Synthetic primer
acctgaccttcccaagagaagactcagtgagggggttgag

SEQ ID NO: 17920 - DNA, 40 bp, Artificial Sequence
  Description of Artificial Sequence: Synthetic primer
cctctgcgtgaacctgcttctggctctcaacctgcacctg

SEQ ID NO: 17921 - DNA, 40 bp, Artificial Sequence
  Description of Artificial Sequence: Synthetic primer
tgctgagagtaactgctctgatcataactagtcggctgtg

SEQ ID NO: 17922 - DNA, 40 bp, Artificial Sequence
  Description of Artificial Sequence: Synthetic primer
atgggcttagttttgcctctctggagcgacacgctaattc

SEQ ID NO: 17923 - DNA, 40 bp, Artificial Sequence
  Description of Artificial Sequence: Synthetic primer
tgcttcagaatatgctgaaggagttcatagagcacatcac

SEQ ID NO: 17924 - DNA, 40 bp, Artificial Sequence
  Description of Artificial Sequence: Synthetic primer
ggcctcgacctgcagccctgcatcgacctcattgagaagc

SEQ ID NO: 17925 - DNA, 40 bp, Artificial Sequence
  Description of Artificial Sequence: Synthetic primer
gagatggccaggacatttgtccacttaaactctcaacaac

SEQ ID NO: 17926 - DNA, 40 bp, Artificial Sequence
  Description of Artificial Sequence: Synthetic primer
cttgagaaacttcgccagcgaatacatgataaagctgttg

SEQ ID NO: 17927 - DNA, 40 bp, Artificial Sequence
  Description of Artificial Sequence: Synthetic primer
tcatccacctggtaacaccgccctgatcgtcatgaaacaa

SEQ ID NO: 17928 - DNA, 40 bp, Artificial Sequence
  Description of Artificial Sequence: Synthetic primer
tcatcttcccttctctaaggagcaggtggaagagtgatgg

SEQ ID NO: 17929 - DNA, 40 bp, Artificial Sequence
  Description of Artificial Sequence: Synthetic primer
aggaaaataatcatctgcaagaagaattggaacgactcag

SEQ ID NO: 17930 - DNA, 40 bp, Artificial Sequence
  Description of Artificial Sequence: Synthetic primer
ttctatcataaataaagttatggcttcttgttggatgaat

SEQ ID NO: 17931 - DNA, 40 bp, Artificial Sequence
  Description of Artificial Sequence: Synthetic primer
gtatgcagtactgcaagctaataacgttggtttgttatgt

SEQ ID NO: 17932 - DNA, 40 bp, Artificial Sequence
  Description of Artificial Sequence: Synthetic primer
ccaaacgtttgctggcatcatctagcttcctcttggtttg

SEQ ID NO: 17933 - DNA, 40 bp, Artificial Sequence
  Description of Artificial Sequence: Synthetic primer
tctgaatcatgaacagtaattgaggttggttttactacac

SEQ ID NO: 17934 - DNA, 40 bp, Artificial Sequence
  Description of Artificial Sequence: Synthetic primer
cgactcggacgggctgcgcgccgaggacggcttcgaggat

SEQ ID NO: 17935 - DNA, 40 bp, Artificial Sequence
  Description of Artificial Sequence: Synthetic primer
ggtccactgaatgtatctctcagtgaagaaggaaaatctc

SEQ ID NO: 17936 - DNA, 40 bp, Artificial Sequence
  Description of Artificial Sequence: Synthetic primer
cggccttttgtccggctcctgcttccagcattgcagcatc

SEQ ID NO: 17937 - DNA, 40 bp, Artificial Sequence
  Description of Artificial Sequence: Synthetic primer
ctgaaagctagcagtattgttgtcgtttaaaaggttcctc

SEQ ID NO: 17938 - DNA, 40 bp, Artificial Sequence
  Description of Artificial Sequence: Synthetic primer
cggggagccccgcctgaggtgccctaaacacactatgacc

SEQ ID NO: 17939 - DNA, 40 bp, Artificial Sequence
  Description of Artificial Sequence: Synthetic primer
attgtcagtgccatggtatcaaatcagtgcccattgtcag

SEQ ID NO: 17940 - DNA, 40 bp, Artificial Sequence
  Description of Artificial Sequence: Synthetic primer
tgctcgcggcctgagcggtgtggagcagcatctctgcttg

SEQ ID NO: 17941 - DNA, 40 bp, Artificial Sequence
  Description of Artificial Sequence: Synthetic primer
attttctggcctgaaaacccaagtgcttaaaaataagatt

SEQ ID NO: 17942 - DNA, 40 bp, Artificial Sequence
  Description of Artificial Sequence: Synthetic primer
tcgaggaacctcttcttctcattttgttgtttcttttgtc

SEQ ID NO: 17943 - DNA, 40 bp, Artificial Sequence
  Description of Artificial Sequence: Synthetic primer
gggaaaagtgcagctcctctgatcatctgccccatgagtg

SEQ ID NO: 17944 - DNA, 40 bp, Artificial Sequence
  Description of Artificial Sequence: Synthetic primer
gagctctatgagccccgcccaggttgcctaggtccctgac

SEQ ID NO: 17945 - DNA, 40 bp, Artificial Sequence
  Description of Artificial Sequence: Synthetic primer
tttttctatttgtattcagtgaaagtttttacatttcaag

SEQ ID NO: 17946 - DNA, 40 bp, Artificial Sequence
  Description of Artificial Sequence: Synthetic primer
agctgcaactgccccagatttgctgtggaagcaggggcta

SEQ ID NO: 17947 - DNA, 40 bp, Artificial Sequence
  Description of Artificial Sequence: Synthetic primer
ccaggaagctctgagactgggagagactgaagtaactgag

SEQ ID NO: 17948 - DNA, 40 bp, Artificial Sequence
  Description of Artificial Sequence: Synthetic primer
tttgccaccctggagatgaaccccaagagagcccagaaac

SEQ ID NO: 17949 - DNA, 40 bp, Artificial Sequence
  Description of Artificial Sequence: Synthetic primer
ccctgttgaaatgtatcaatcccgtactttatctctccag

SEQ ID NO: 17950 - DNA, 40 bp, Artificial Sequence
  Description of Artificial Sequence: Synthetic primer
tagtttctgcctgagctgcaatttcatctatatcaggaac

SEQ ID NO: 17951 - DNA, 40 bp, Artificial Sequence
  Description of Artificial Sequence: Synthetic primer
gccaacacagatctatagatttcttcgaactcggaatctc

SEQ ID NO: 17952 - DNA, 40 bp, Artificial Sequence
  Description of Artificial Sequence: Synthetic primer
ccacctgttcaccggggagtccctcgccacctgcaagagc

SEQ ID NO: 17953 - DNA, 40 bp, Artificial Sequence
  Description of Artificial Sequence: Synthetic primer
cttacacaccttctccgagttcaagcaggcctatatcacc

SEQ ID NO: 17954 - DNA, 40 bp, Artificial Sequence
  Description of Artificial Sequence: Synthetic primer
ggaaaggagaagaggccagatattgaaaaaaggggaacag

SEQ ID NO: 17955 - DNA, 40 bp, Artificial Sequence
  Description of Artificial Sequence: Synthetic primer
gggtgagtggcaggggtggctggctgggcattaatgtaac

SEQ ID NO: 17956 - DNA, 40 bp, Artificial Sequence
  Description of Artificial Sequence: Synthetic primer
agtaactgcgaatacactttcctcttctaatgcagactgt

SEQ ID NO: 17957 - DNA, 40 bp, Artificial Sequence
  Description of Artificial Sequence: Synthetic primer
ctggctgtagctcccactctggggctgcccatagctgctg

SEQ ID NO: 17958 - DNA, 40 bp, Artificial Sequence
  Description of Artificial Sequence: Synthetic primer
aggctcaagaattataagtattctggacaacaaaagaaaa

SEQ ID NO: 17959 - DNA, 40 bp, Artificial Sequence
  Description of Artificial Sequence: Synthetic primer
gattcttctgtggcagacctagcaccaaaagggaaaagtg

SEQ ID NO: 17960 - DNA, 40 bp, Artificial Sequence
  Description of Artificial Sequence: Synthetic primer
ggcccccgatccttgccaggaatcatgcccacggcagcag

SEQ ID NO: 17961 - DNA, 40 bp, Artificial Sequence
  Description of Artificial Sequence: Synthetic primer
cagtgtgtgggtcgggccatcaggggcaagacggactacg

SEQ ID NO: 17962 - DNA, 40 bp, Artificial Sequence
  Description of Artificial Sequence: Synthetic primer
caggagttcccatctttctgcacaactcgtagagtgaatg

SEQ ID NO: 17963 - DNA, 40 bp, Artificial Sequence
  Description of Artificial Sequence: Synthetic primer
ctaggttcaaatggtcttggacattagctagttcctcctg

SEQ ID NO: 17964 - DNA, 40 bp, Artificial Sequence
  Description of Artificial Sequence: Synthetic primer
cgcggcgctggggcccgcgctccgctgctgttgctccatt

SEQ ID NO: 17965 - DNA, 40 bp, Artificial Sequence
  Description of Artificial Sequence: Synthetic primer
cacattgttcatgtgcgttctatgttgaagcaatgtgtcc

SEQ ID NO: 17966 - DNA, 40 bp, Artificial Sequence
  Description of Artificial Sequence: Synthetic primer
ataatcttgtaattatgaaaaagttctatgtatcacttgg

SEQ ID NO: 17967 - DNA, 40 bp, Artificial Sequence
  Description of Artificial Sequence: Synthetic primer
tgaaggcctaggaacagatgcattttcaacaggatgagag

SEQ ID NO: 17968 - DNA, 40 bp, Artificial Sequence
  Description of Artificial Sequence: Synthetic primer
aatggacccgtcgggggagtcattccatagtcttcgtatc

SEQ ID NO: 17969 - DNA, 40 bp, Artificial Sequence
  Description of Artificial Sequence: Synthetic primer
ctgtgacccgggatttcggtgagatgcttctgcactctgg

SEQ ID NO: 17970 - DNA, 40 bp, Artificial Sequence
  Description of Artificial Sequence: Synthetic primer
agtatggcaccttgtcatactctagctccccaagcacgtc

SEQ ID NO: 17971 - DNA, 40 bp, Artificial Sequence
  Description of Artificial Sequence: Synthetic primer
catctgaagatggattgggtgagggctggcaaaacgaagg

SEQ ID NO: 17972 - DNA, 40 bp, Artificial Sequence
  Description of Artificial Sequence: Synthetic primer
gcccagcccctgaggttccgttgaaaacagtgggtacacg

SEQ ID NO: 17973 - DNA, 40 bp, Artificial Sequence
  Description of Artificial Sequence: Synthetic primer
tgccaccattgtcatgtcctggtttacttaaccctttttc

SEQ ID NO: 17974 - DNA, 40 bp, Artificial Sequence
  Description of Artificial Sequence: Synthetic primer
ggacgaggtgagcacgagctacgccaatgaggacgaggtg

SEQ ID NO: 17975 - DNA, 40 bp, Artificial Sequence
  Description of Artificial Sequence: Synthetic primer
gtcaatccgccggatcttgcccttctggtcggggttggag

SEQ ID NO: 17976 - DNA, 40 bp, Artificial Sequence
  Description of Artificial Sequence: Synthetic primer
ccggcagagccatcgcaagaaggtgctcccggaaatctac

SEQ ID NO: 17977 - DNA, 40 bp, Artificial Sequence
  Description of Artificial Sequence: Synthetic primer
gggattccccaatgatgaaacgatctcctgggccatcagc

SEQ ID NO: 17978 - DNA, 40 bp, Artificial Sequence
  Description of Artificial Sequence: Synthetic primer
aagatagtttgtaataccagccgacccagctgcttaactg

SEQ ID NO: 17979 - DNA, 40 bp, Artificial Sequence
  Description of Artificial Sequence: Synthetic primer
ctcctctgctcgattatgcactggaagtagagaagattac

SEQ ID NO: 17980 - DNA, 40 bp, Artificial Sequence
  Description of Artificial Sequence: Synthetic primer
ccagttcgtaaccatggtgatagaaagtgaagagtccttg

SEQ ID NO: 17981 - DNA, 40 bp, Artificial Sequence
  Description of Artificial Sequence: Synthetic primer
caagatgtttcttgataattggaatattcagacagctctt

SEQ ID NO: 17982 - DNA, 40 bp, Artificial Sequence
  Description of Artificial Sequence: Synthetic primer
cgggcctgggcaaatcgacctgtctgcgtggctggtcctg

SEQ ID NO: 17983 - DNA, 40 bp, Artificial Sequence; identical to SEQ ID NO: 6714
  Description of Artificial Sequence: Synthetic primer

SEQ ID NO: 17984 - DNA, 40 bp, Artificial Sequence
  Description of Artificial Sequence: Synthetic primer
aatattagccaatctgaaaacgtcccataatataaaaatg

SEQ ID NO: 17985 - DNA, 40 bp, Artificial Sequence
  Description of Artificial Sequence: Synthetic primer
cgccctgggcatcatcacctgcttcgacgtcctcaagtgg

SEQ ID NO: 17986 - DNA, 40 bp, Artificial Sequence
  Description of Artificial Sequence: Synthetic primer
tcattcccttacttgaacggctagacctgaagaaggacaa

SEQ ID NO: 17987 - DNA, 40 bp, Artificial Sequence
  Description of Artificial Sequence: Synthetic primer
tacagtaacagcttaattttgttaaatttgttctttatac

SEQ ID NO: 17988 - DNA, 40 bp, Artificial Sequence
  Description of Artificial Sequence: Synthetic primer
tcggatctccgaggacaccggacgggagcgcttggccatc

SEQ ID NO: 17989 - DNA, 40 bp, Artificial Sequence
  Description of Artificial Sequence: Synthetic primer
ggagggcttttgttatctgaccaagagaggagcgttagac

SEQ ID NO: 17990 - DNA, 40 bp, Artificial Sequence
  Description of Artificial Sequence: Synthetic primer
tgatattcccagcctggagcaccaagtgtaatattgaatg

SEQ ID NO: 17991 - DNA, 40 bp, Artificial Sequence
  Description of Artificial Sequence: Synthetic primer
ccgaagccgcgctaacggccaacggccgcagcagggtacg

SEQ ID NO: 17992 - DNA, 40 bp, Artificial Sequence
  Description of Artificial Sequence: Synthetic primer
tgccgcccccaccgcctgccgcatcccagggggccacacg

SEQ ID NO: 17993 - DNA, 40 bp, Artificial Sequence
  Description of Artificial Sequence: Synthetic primer
ttatctcataaacattcagttgcttgctttctgctgtacc

SEQ ID NO: 17994 - DNA, 40 bp, Artificial Sequence
  Description of Artificial Sequence: Synthetic primer
gcggcggcgagcgcctttacaatggccctgaccctgtttg

SEQ ID NO: 17995 - DNA, 40 bp, Artificial Sequence
  Description of Artificial Sequence: Synthetic primer
aatacataattcttaaattgtttcaaaatggcattaactc

SEQ ID NO: 17996 - DNA, 40 bp, Artificial Sequence
  Description of Artificial Sequence: Synthetic primer
tagcaccaaagtacctactatgtgtgtggactggagtaac

SEQ ID NO: 17997 - DNA, 40 bp, Artificial Sequence
  Description of Artificial Sequence: Synthetic primer
gaggaggcggaggcggaggcgactagggaggcggagatgg

SEQ ID NO: 17998 - DNA, 40 bp, Artificial Sequence
  Description of Artificial Sequence: Synthetic primer
ggcctggggacgcgagctcaaaagctgggcgccgagaacg

SEQ ID NO: 17999 - DNA, 40 bp, Artificial Sequence
  Description of Artificial Sequence: Synthetic primer
agggagctccccagctgtgtcttccgaggaacttctcgtc

SEQ ID NO: 18000 - DNA, 40 bp, Artificial Sequence
  Description of Artificial Sequence: Synthetic primer
tacctttcagtcatttcaagattgcattaacataagtgag

SEQ ID NO: 18001 - DNA, 40 bp, Artificial Sequence
  Description of Artificial Sequence: Synthetic primer
ctgtagattaccaaaacaagattaatttcatcactaaaag

SEQ ID NO: 18002 - DNA, 40 bp, Artificial Sequence
  Description of Artificial Sequence: Synthetic primer
gttgatcttcttcatggcaaagcgctgccgggtggacttg

SEQ ID NO: 18003 - DNA, 40 bp, Artificial Sequence
  Description of Artificial Sequence: Synthetic primer
gttgtgcgggctgatgcgcctggcagaacccggagaccag

SEQ ID NO: 18004 - DNA, 40 bp, Artificial Sequence
  Description of Artificial Sequence: Synthetic primer
ggctaggcctggacactgggcactgccgtccacgatctgc

SEQ ID NO: 18005 - DNA, 40 bp, Artificial Sequence
  Description of Artificial Sequence: Synthetic primer
aagaagaggaaaagggacaagcagccgggagagaccaatg

SEQ ID NO: 18006 - DNA, 40 bp, Artificial Sequence
  Description of Artificial Sequence: Synthetic primer
tggaagtttagctaatgcctgaaaggcgtcctttatcttg

SEQ ID NO: 18007 - DNA, 40 bp, Artificial Sequence
  Description of Artificial Sequence: Synthetic primer
aacacacctatctctcggtaacttgaaccaatagacttac

SEQ ID NO: 18008 - DNA, 40 bp, Artificial Sequence
  Description of Artificial Sequence: Synthetic primer
actggttggccggggagccggcgctagtgcggtactgctg

SEQ ID NO: 18009 - DNA, 40 bp, Artificial Sequence
  Description of Artificial Sequence: Synthetic primer
gttgggtaaccagccttgcccgctgcaccagccactcctc

SEQ ID NO: 18010 - DNA, 40 bp, Artificial Sequence
  Description of Artificial Sequence: Synthetic primer
ctccttacagtctctgaacgatgggaagaaaaggctaagg

SEQ ID NO: 18011 - DNA, 40 bp, Artificial Sequence
  Description of Artificial Sequence: Synthetic primer
aaatgtgcagattcaatgttcttgttacagattgaataaa

SEQ ID NO: 18012 - DNA, 40 bp, Artificial Sequence
  Description of Artificial Sequence: Synthetic primer
gatttgcagctgcactgggattcctgcttgtagctctctg

SEQ ID NO: 18013 - DNA, 40 bp, Artificial Sequence
  Description of Artificial Sequence: Synthetic primer
gtcacagtgagatattacaggatcacttacggagagacag

SEQ ID NO: 18014 - DNA, 40 bp, Artificial Sequence
  Description of Artificial Sequence: Synthetic primer
attaagcaaatgtacttcatctgtcttatctttaacttcc

SEQ ID NO: 18015 - DNA, 40 bp, Artificial Sequence
  Description of Artificial Sequence: Synthetic primer
aaacaggtggtaataaaaattcattttccatatcaagctc

SEQ ID NO: 18016 - DNA, 40 bp, Artificial Sequence
  Description of Artificial Sequence: Synthetic primer
aggtatcttcattaaacccataattaaaataatcagaaag

SEQ ID NO: 18017 - DNA, 40 bp, Artificial Sequence
  Description of Artificial Sequence: Synthetic primer
aaactaaggcaaattattattagatatgtttgaattttac

SEQ ID NO: 18018 - DNA, 40 bp, Artificial Sequence
  Description of Artificial Sequence: Synthetic primer
ggcgttgtggcctcaaccatttccggcaaatcacagatcg

SEQ ID NO: 18019 - DNA, 40 bp, Artificial Sequence
  Description of Artificial Sequence: Synthetic primer
gagaaactgcctgtgcaaatgtagccctgttctgatcttt

SEQ ID NO: 18020 - DNA, 40 bp, Artificial Sequence
  Description of Artificial Sequence: Synthetic primer
caatggtgggagggttatggtgcacattatccacggatgg

SEQ ID NO: 18021 - DNA, 40 bp, Artificial Sequence
  Description of Artificial Sequence: Synthetic primer
ggacagtacctttcaatgattaattttaatagcctgtgag

SEQ ID NO: 18022 - DNA, 40 bp, Artificial Sequence
  Description of Artificial Sequence: Synthetic primer
agccccagactgggcagagaaaggaaatggcacatcactc

SEQ ID NO: 18023 - DNA, 40 bp, Artificial Sequence
  Description of Artificial Sequence: Synthetic primer
agaagcactctttcttggactgcttcatggcatttggaag

SEQ ID NO: 18024 - DNA, 40 bp, Artificial Sequence
  Description of Artificial Sequence: Synthetic primer
gtgtccgctgtttctccttcctccttttcattgcctgctc

SEQ ID NO: 18025 - DNA, 40 bp, Artificial Sequence
  Description of Artificial Sequence: Synthetic primer
aaaggccctggaggtggaggagtccaactcagaggacgag

SEQ ID NO: 18026 - DNA, 40 bp, Artificial Sequence
  Description of Artificial Sequence: Synthetic primer
ggcctgggtcacttccttcctgctttgccggccaggtttg

SEQ ID NO: 18027 - DNA, 40 bp, Artificial Sequence
  Description of Artificial Sequence: Synthetic primer
agcgccaccgccgactccggccccgcctctgggacgttgg

SEQ ID NO: 18028 - DNA, 40 bp, Artificial Sequence
  Description of Artificial Sequence: Synthetic primer
ctccttcgaaaactgtgcaccgcactgatcacagacaaag

SEQ ID NO: 18029 - DNA, 40 bp, Artificial Sequence
  Description of Artificial Sequence: Synthetic primer
gagacttgaggttgttggtgacattcttcagctcctcctc

SEQ ID NO: 18030 - DNA, 40 bp, Artificial Sequence
  Description of Artificial Sequence: Synthetic primer
cctgagttaggaccaaggtctgcgcctgagcggccttcac

SEQ ID NO: 18031 - DNA, 40 bp, Artificial Sequence
  Description of Artificial Sequence: Synthetic primer
aatacaacaaagggtgaacttcagttaaaattggatgaac

SEQ ID NO: 18032 - DNA, 40 bp, Artificial Sequence
  Description of Artificial Sequence: Synthetic primer
tgctaatggagcaatacgtttccattgtgatcccaccttc

SEQ ID NO: 18033 - DNA, 40 bp, Artificial Sequence
  Description of Artificial Sequence: Synthetic primer
aacctggaatgatagatatctaccacagccatcttcagag

SEQ ID NO: 18034 - DNA, 40 bp, Artificial Sequence
  Description of Artificial Sequence: Synthetic primer
atagatattttaaccaattaaaacaatttctacatattcc

SEQ ID NO: 18035 - DNA, 40 bp, Artificial Sequence
  Description of Artificial Sequence: Synthetic primer
cccatcaggagtgggttacataaactgtttccaagtagag

SEQ ID NO: 18036 - DNA, 40 bp, Artificial Sequence
  Description of Artificial Sequence: Synthetic primer
atactccatagctccccagcgctgctggaccagaaattcg

SEQ ID NO: 18037 - DNA, 40 bp, Artificial Sequence
  Description of Artificial Sequence: Synthetic primer
ccctccaccggacacggctggggccggcgatgcctgagag

SEQ ID NO: 18038 - DNA, 40 bp, Artificial Sequence
  Description of Artificial Sequence: Synthetic primer
cctggtgaacaaggtccctctggagcctctggtcctgctg

SEQ ID NO: 18039 - DNA, 40 bp, Artificial Sequence
  Description of Artificial Sequence: Synthetic primer
cagcctatgggcagcagccagcagccactgcacctacaag

SEQ ID NO: 18040 - DNA, 40 bp, Artificial Sequence
  Description of Artificial Sequence: Synthetic primer
cgacttccgttctccgccgcccggcatgggcctcaatcag

SEQ ID NO: 18041 - DNA, 40 bp, Artificial Sequence
  Description of Artificial Sequence: Synthetic primer
cgcccaagtggattcgaaggcctgttggtgcttctttttc

SEQ ID NO: 18042 - DNA, 40 bp, Artificial Sequence
  Description of Artificial Sequence: Synthetic primer
caaatcttgaagcagccggtgtcagagagactggactttg

SEQ ID NO: 18043 - DNA, 40 bp, Artificial Sequence
  Description of Artificial Sequence: Synthetic primer
tgggcagggaagggtatgatgggaaagagaaagacttagg

SEQ ID NO: 18044 - DNA, 40 bp, Artificial Sequence
  Description of Artificial Sequence: Synthetic primer
acgaaagccaggcggcgcggcggccggagctgtactgagg

SEQ ID NO: 18045 - DNA, 40 bp, Artificial Sequence
  Description of Artificial Sequence: Synthetic primer
catttcctataaaccatgtattccggtctctatattactg

SEQ ID NO: 18046 - DNA, 40 bp, Artificial Sequence
  Description of Artificial Sequence: Synthetic primer
aggaagaagaagtgttatatgtcctaaagtaaggtttcag

SEQ ID NO: 18047 - DNA, 40 bp, Artificial Sequence
  Description of Artificial Sequence: Synthetic primer
agggggcggcaggctgcaaagcggctgggggcaggtccag

SEQ ID NO: 18048 - DNA, 40 bp, Artificial Sequence
  Description of Artificial Sequence: Synthetic primer
agccagggctccactcagatgggttgtaatctgattcgtc

SEQ ID NO: 18049 - DNA, 40 bp, Artificial Sequence
  Description of Artificial Sequence: Synthetic primer
tgagacccccaaactcatgaattccattagggaacttttc

SEQ ID NO: 18050 - DNA, 40 bp, Artificial Sequence
  Description of Artificial Sequence: Synthetic primer
tgctgcctgccccagcagcccccacaaaatccccctcacc

SEQ ID NO: 18051 - DNA, 40 bp, Artificial Sequence
  Description of Artificial Sequence: Synthetic primer
gaaacgctcaaccaagctgaaacaaaatcaaaatcacttg

SEQ ID NO: 18052 - DNA, 40 bp, Artificial Sequence
  Description of Artificial Sequence: Synthetic primer
tacttcaaagcaagcaaagtcagtaccattacagatattc

SEQ ID NO: 18053 - DNA, 40 bp, Artificial Sequence
  Description of Artificial Sequence: Synthetic primer
ctggctggggccgttgctctgtattcttactgatcgtttg

SEQ ID NO: 18054 - DNA, 40 bp, Artificial Sequence
  Description of Artificial Sequence: Synthetic primer
ctgccaggcgttcaaagcatcgcacaagtttataaatcca

SEQ ID NO: 18055 - DNA, 40 bp, Artificial Sequence
  Description of Artificial Sequence: Synthetic primer
tccagctccccagcccgtacagagccacccacccatcatc

SEQ ID NO: 18056 - DNA, 40 bp, Artificial Sequence
  Description of Artificial Sequence: Synthetic primer
ggaaggctagccagcttgggtatggagtgaaaatgaaagc

SEQ ID NO: 18057 - DNA, 40 bp, Artificial Sequence
  Description of Artificial Sequence: Synthetic primer
accgttttccacaagtttgatatgaatgcctcagcaatcc

SEQ ID NO: 18058 - DNA, 40 bp, Artificial Sequence
  Description of Artificial Sequence: Synthetic primer
gcgcagcgggccgcccttcgcccgtggccgcctcaagcag

SEQ ID NO: 18059 - DNA, 40 bp, Artificial Sequence
  Description of Artificial Sequence: Synthetic primer
tccggcctgagtccttccattccaatggcttcgaattcag

SEQ ID NO: 18060 - DNA, 40 bp, Artificial Sequence
  Description of Artificial Sequence: Synthetic primer
ttgcatcttgcaaatgctcgtgaagttgctgctcaactcg

SEQ ID NO: 18061 - DNA, 40 bp, Artificial Sequence
  Description of Artificial Sequence: Synthetic primer
ggggccttggacctccagggtaccgaggtgacataaaagg

SEQ ID NO: 18062 - DNA, 40 bp, Artificial Sequence
  Description of Artificial Sequence: Synthetic primer
ttccatctggttcactgctatttttcaatttgctaatctc

SEQ ID NO: 18063 - DNA, 40 bp, Artificial Sequence
  Description of Artificial Sequence: Synthetic primer
cctcgtccctgggcaattccgcatttaattcatggtattc

SEQ ID NO: 18064 - DNA, 40 bp, Artificial Sequence
  Description of Artificial Sequence: Synthetic primer
tctctcaaatcttagagttcataaatttacttgaggttgc

SEQ ID NO: 18065 - DNA, 40 bp, Artificial Sequence
  Description of Artificial Sequence: Synthetic primer
attaatttcttcagtatgcagattggcttttgtagatcag

SEQ ID NO: 18066 - DNA, 40 bp, Artificial Sequence
  Description of Artificial Sequence: Synthetic primer
aacggtcctgcaaaccgccacaagccattaaaaccaaaac

SEQ ID NO: 18067 - DNA, 40 bp, Artificial Sequence
  Description of Artificial Sequence: Synthetic primer
tgggggcgtgtacactcggcgcacctgcgagactacagag

SEQ ID NO: 18068 - DNA, 40 bp, Artificial Sequence
  Description of Artificial Sequence: Synthetic primer
tccgctccatgatgggcttggaacacacattgcactgctc

SEQ ID NO: 18069 - DNA, 40 bp, Artificial Sequence
  Description of Artificial Sequence: Synthetic primer
acaggcagcgctgcaggctatggagcgggaggcagagcag

SEQ ID NO: 18070 - DNA, 40 bp, Artificial Sequence
  Description of Artificial Sequence: Synthetic primer
ctttgatgtcaatggctacattgttggagccaacattgag

SEQ ID NO: 18071 - DNA, 40 bp, Artificial Sequence
  Description of Artificial Sequence: Synthetic primer
ataatcagagccagagatgtggctttatttcttctataac

SEQ ID NO: 18072 - DNA, 40 bp, Artificial Sequence
  Description of Artificial Sequence: Synthetic primer
tcagcctgacactgtggccaacattcagcagcgtcagaag

SEQ ID NO: 18073 - DNA, 40 bp, Artificial Sequence
  Description of Artificial Sequence: Synthetic primer
cgtcctgctagttctaacataagatttaaaaggactatgg

SEQ ID NO: 18074 - DNA, 40 bp, Artificial Sequence
  Description of Artificial Sequence: Synthetic primer
gacagctttgggtcgacacgaggctccctggacaaacctg

SEQ ID NO: 18075 - DNA, 40 bp, Artificial Sequence
  Description of Artificial Sequence: Synthetic primer
tctagttagtatctcagtggcgaggctaccaaatgccttc

SEQ ID NO: 18076 - DNA, 40 bp, Artificial Sequence
  Description of Artificial Sequence: Synthetic primer
gtggtcccagcggccctgctggtcccactggagctcgtgg

SEQ ID NO: 18077 - DNA, 40 bp, Artificial Sequence
  Description of Artificial Sequence: Synthetic primer
cttttgaaagcagttcctctattggagcagagaaaccaag

SEQ ID NO: 18078 - DNA, 40 bp, Artificial Sequence
  Description of Artificial Sequence: Synthetic primer
ttctcttaaactaagggtgggggatctgaatgtttttatg

SEQ ID NO: 18079 - DNA, 40 bp, Artificial Sequence
  Description of Artificial Sequence: Synthetic primer
acgggaggcccaggtgcggaaaggaggctccgtgagatgg

SEQ ID NO: 18080 - DNA, 40 bp, Artificial Sequence
  Description of Artificial Sequence: Synthetic primer
aactgttttagtgtctcattaaatgtcaggatcatttttc

SEQ ID NO: 18081 - DNA, 40 bp, Artificial Sequence
  Description of Artificial Sequence: Synthetic primer
tacctaagtgcccccaaatcaactgtttttcaacttcttg

SEQ ID NO: 18082 - DNA, 40 bp, Artificial Sequence
  Description of Artificial Sequence: Synthetic primer
gagccaggttacgtgtccaataagcatttttcaaactctc

SEQ ID NO: 18083 - DNA, 40 bp, Artificial Sequence
  Description of Artificial Sequence: Synthetic primer
tcaaacattctatttgggtttcaagatcccttatcagttc

SEQ ID NO: 18084 - DNA, 40 bp, Artificial Sequence
  Description of Artificial Sequence: Synthetic primer
agccgccgccacccaggccgtgcctgcccccaaccagcag

SEQ ID NO: 18085 - DNA, 40 bp, Artificial Sequence
  Description of Artificial Sequence: Synthetic primer
ccgaccccccgtgggctcccgtgttttgtaggagacttgc

SEQ ID NO: 18086 - DNA, 40 bp, Artificial Sequence
  Description of Artificial Sequence: Synthetic primer
ccgggggcacttgggccgagtagggataggagatctgacg

SEQ ID NO: 18087 - DNA, 40 bp, Artificial Sequence
  Description of Artificial Sequence: Synthetic primer
gcgggaaagagacatgcgaatgggtggcggaggagcaatg

SEQ ID NO: 18088 - DNA, 40 bp, Artificial Sequence
  Description of Artificial Sequence: Synthetic primer
cagggaagctcttcgtgttagtgaacctaaagcacccaag

SEQ ID NO: 18089 - DNA, 40 bp, Artificial Sequence
  Description of Artificial Sequence: Synthetic primer
cctgcccggcgtctcttcccaaagagctcctctatctgag

SEQ ID NO: 18090 - DNA, 40 bp, Artificial Sequence
  Description of Artificial Sequence: Synthetic primer
ttctccgagtcaagacaagaaaaatcaaaccgaattaaag

SEQ ID NO: 18091 - DNA, 40 bp, Artificial Sequence
  Description of Artificial Sequence: Synthetic primer
gcatgtaatgcaacccttgcttcatcaaccatcagataac

SEQ ID NO: 18092 - DNA, 40 bp, Artificial Sequence
  Description of Artificial Sequence: Synthetic primer
gatgcgacgagtttctttggaattggtatgtttatacagg

SEQ ID NO: 18093 - DNA, 40 bp, Artificial Sequence
  Description of Artificial Sequence: Synthetic primer
cacaggtggatctggggtttgaggtctcctcccacttcac

SEQ ID NO: 18094 - DNA, 40 bp, Artificial Sequence
  Description of Artificial Sequence: Synthetic primer
aaagcagaagccactggagaaaaacggccaagaggcagac

SEQ ID NO: 18095 - DNA, 40 bp, Artificial Sequence
  Description of Artificial Sequence: Synthetic primer
gacaggggccagcagctacaggctgaaaggaagaagatgg

SEQ ID NO: 18096 - DNA, 40 bp, Artificial Sequence
  Description of Artificial Sequence: Synthetic primer
cgagtaccttagcaaacgcagcttcataggaatgaacagg

SEQ ID NO: 18097 - DNA, 40 bp, Artificial Sequence
  Description of Artificial Sequence: Synthetic primer
gctccgtcacattccagaccccggaagtcacaaaacagtc

SEQ ID NO: 18098 - DNA, 40 bp, Artificial Sequence
  Description of Artificial Sequence: Synthetic primer
ctgcttgcatgcgttactaatacaaacaaatgtgatcaag

SEQ ID NO: 18099 - DNA, 40 bp, Artificial Sequence
  Description of Artificial Sequence: Synthetic primer
tttgttcaccaaatcactgcctcaaatgtctgggaaattg

SEQ ID NO: 18100 - DNA, 40 bp, Artificial Sequence
  Description of Artificial Sequence: Synthetic primer
gacagagatcgtggagacatgggactagcaaggggtgaac

SEQ ID NO: 18101 - DNA, 40 bp, Artificial Sequence
  Description of Artificial Sequence: Synthetic primer
tccactgttacagtggccagtggtaggggagagttcaacg

SEQ ID NO: 18102 - DNA, 40 bp, Artificial Sequence
  Description of Artificial Sequence: Synthetic primer
caggcaaaagcttaagcaacagctcctgtactcccctgac

SEQ ID NO: 18103 - DNA, 40 bp, Artificial Sequence
  Description of Artificial Sequence: Synthetic primer
aacacatgatgttttaaagaaggcaaggactaacttagag

SEQ ID NO: 18104 - DNA, 40 bp, Artificial Sequence
  Description of Artificial Sequence: Synthetic primer
tttaattaagggagtaaaaaggatacttgaaaaccctcag

SEQ ID NO: 18105 - DNA, 40 bp, Artificial Sequence
  Description of Artificial Sequence: Synthetic primer
ccgcgagcctccagcccctcgcctgttgccgcgcgagtcc

SEQ ID NO: 18106 - DNA, 40 bp, Artificial Sequence
  Description of Artificial Sequence: Synthetic primer
agcaaacgtttggagtttctgtatgataaacttagggaac

SEQ ID NO: 18107 - DNA, 40 bp, Artificial Sequence
  Description of Artificial Sequence: Synthetic primer
atttttgctactaccgaaaatatgtaaattgtgaactctg

SEQ ID NO: 18108 - DNA, 40 bp, Artificial Sequence
  Description of Artificial Sequence: Synthetic primer
acagttcctcaggctacagtgaagactggattacagaaag

SEQ ID NO: 18109 - DNA, 40 bp, Artificial Sequence
  Description of Artificial Sequence: Synthetic primer
gagaagcagcctactggacagcagagagcttggaatactg

SEQ ID NO: 18110 - DNA, 40 bp, Artificial Sequence
  Description of Artificial Sequence: Synthetic primer
tctattacttattgtatgagcttttgttgtttacttggag

SEQ ID NO: 18111 - DNA, 40 bp, Artificial Sequence
  Description of Artificial Sequence: Synthetic primer
ggaagctcactcaggatctgctctccggcaaagtagtaag

SEQ ID NO: 18112 - DNA, 40 bp, Artificial Sequence
  Description of Artificial Sequence: Synthetic primer
tgatgctaaatttgagccactaaattattatccatcagag

SEQ ID NO: 18113 - DNA, 40 bp, Artificial Sequence
  Description of Artificial Sequence: Synthetic primer
aatgtcatggttgtgtggtcgtcattgaagaaaacgtatg

SEQ ID NO: 18114 - DNA, 40 bp, Artificial Sequence
  Description of Artificial Sequence: Synthetic primer
aattaattgcatctgttctagaagtgcttctgggtcttag

SEQ ID NO: 18115 - DNA, 40 bp, Artificial Sequence
  Description of Artificial Sequence: Synthetic primer
gtcatggagcggtgcggggcctacgcctgttccgtgtgag

SEQ ID NO: 18116 - DNA, 40 bp, Artificial Sequence
  Description of Artificial Sequence: Synthetic primer
agagagttcgaacttcattttcatctggtttgtaagattg

SEQ ID NO: 18117 - DNA, 40 bp, Artificial Sequence
  Description of Artificial Sequence: Synthetic primer
accaacacggacagccagttgaagaagtcatggacagtgg

SEQ ID NO: 18118 - DNA, 40 bp, Artificial Sequence
  Description of Artificial Sequence: Synthetic primer
ccagctcgtagtatttcgcttgctcttctctggacagtgc

SEQ ID NO: 18119 - DNA, 40 bp, Artificial Sequence
  Description of Artificial Sequence: Synthetic primer
tttaaaagttctggataaagcacacagaaactattcagag

SEQ ID NO: 18120 - DNA, 40 bp, Artificial Sequence
  Description of Artificial Sequence: Synthetic primer
gggggaagacttcctcctcacagcgctgctcctcacatac

SEQ ID NO: 18121 - DNA, 40 bp, Artificial Sequence
  Description of Artificial Sequence: Synthetic primer
ggccaagatggcgagaggggtgaagttgggcttggattcg

SEQ ID NO: 18122 - DNA, 40 bp, Artificial Sequence
  Description of Artificial Sequence: Synthetic primer
ccagacacaattgatgaaagaacaatcaacaaaaagaagc

SEQ ID NO: 18123 - DNA, 40 bp, Artificial Sequence
  Description of Artificial Sequence: Synthetic primer
tctagtgagcaacatgttcaacaaccgccagcacagcaac

SEQ ID NO: 18124 - DNA, 40 bp, Artificial Sequence
  Description of Artificial Sequence: Synthetic primer
tggcagctgaccctatatggctctgtgtggagtgcagtag

SEQ ID NO: 18125 - DNA, 40 bp, Artificial Sequence
  Description of Artificial Sequence: Synthetic primer
gactcttccaagcccgtcgttgctcagggacccggccccg

SEQ ID NO: 18126 - DNA, 40 bp, Artificial Sequence
  Description of Artificial Sequence: Synthetic primer
aacaccatggagccacccctgaccccgcccagcccagcag

SEQ ID NO: 18127 - DNA, 40 bp, Artificial Sequence
  Description of Artificial Sequence: Synthetic primer
catggtgagcacgttggcaaattgcacctcggggatgtag

SEQ ID NO: 18128 - DNA, 40 bp, Artificial Sequence
  Description of Artificial Sequence: Synthetic primer
ttataaaaatgaaatgataccaagaataacaaatttatag

SEQ ID NO: 18129 - DNA, 40 bp, Artificial Sequence
  Description of Artificial Sequence: Synthetic primer
aaaagtactttttccaaataaaactttgccttttgaattt

SEQ ID NO: 18130 - DNA, 40 bp, Artificial Sequence
  Description of Artificial Sequence: Synthetic primer
tccttgccttgtagtaggttcttctcctcagaatccaatc

SEQ ID NO: 18131 - DNA, 40 bp, Artificial Sequence
  Description of Artificial Sequence: Synthetic primer
ctgaaaatcacaggaaagaaaacttttgtgtatttattag

SEQ ID NO: 18132 - DNA, 40 bp, Artificial Sequence
  Description of Artificial Sequence: Synthetic primer
agtggagatctgcgattcctgactagttaattcagctttc

SEQ ID NO: 18133 - DNA, 40 bp, Artificial Sequence
  Description of Artificial Sequence: Synthetic primer
tgggtggaagggtttctttggaagaccccagtgtggaatc

SEQ ID NO: 18134 - DNA, 40 bp, Artificial Sequence
  Description of Artificial Sequence: Synthetic primer
actggttacaagggaccagatgcttggaaaatatggaatg

SEQ ID NO: 18135 - DNA, 40 bp, Artificial Sequence
  Description of Artificial Sequence: Synthetic primer
catactgtgagaactgcagctcgttgcagctgggggcaag

SEQ ID NO: 18136 - DNA, 40 bp, Artificial Sequence
  Description of Artificial Sequence: Synthetic primer
ctcctttgacactgaatgcaatcaagacaatgacaaccag

SEQ ID NO: 18137 - DNA, 40 bp, Artificial Sequence
  Description of Artificial Sequence: Synthetic primer
tatgggagggggacacattggggccttgctcctcttcctc

SEQ ID NO: 18138 - DNA, 40 bp, Artificial Sequence
  Description of Artificial Sequence: Synthetic primer
agaggacagtgcccactcacttcttgttggcagcctcctg

SEQ ID NO: 18139 - DNA, 40 bp, Artificial Sequence
  Description of Artificial Sequence: Synthetic primer
gctacggatccgcttccgcgcggcggggccgggtgcttgg

SEQ ID NO: 18140 - DNA, 40 bp, Artificial Sequence
  Description of Artificial Sequence: Synthetic primer
tagaccctccatactcacccaggctagatcctccatacac

SEQ ID NO: 18141 - DNA, 40 bp, Artificial Sequence
  Description of Artificial Sequence: Synthetic primer
ctctatgctactaagtttttagcctgtaaataatgcaaac

SEQ ID NO: 18142 - DNA, 40 bp, Artificial Sequence
  Description of Artificial Sequence: Synthetic primer
aggagcaagggggcggcccagccacgcggcatgctgactc

SEQ ID NO: 18143 - DNA, 40 bp, Artificial Sequence
  Description of Artificial Sequence: Synthetic primer
ttctcagactgaatttgagaaaaatgtgtggtcctttttg

SEQ ID NO: 18144 - DNA, 40 bp, Artificial Sequence
  Description of Artificial Sequence: Synthetic primer
gtatggtattacacaggcttcactgttgagaagtacaatg

SEQ ID NO: 18145 - DNA, 40 bp, Artificial Sequence
  Description of Artificial Sequence: Synthetic primer
cgccagctatctgtccagttgcaatcctaattttgtcagg

SEQ ID NO: 18146 - DNA, 40 bp, Artificial Sequence
  Description of Artificial Sequence: Synthetic primer
taagttacagatgccctgtaactgaattccttccttgacg

SEQ ID NO: 18147 - DNA, 40 bp, Artificial Sequence
  Description of Artificial Sequence: Synthetic primer
tgcattataaaatctaacccaaaactatgtcatttcactg

SEQ ID NO: 18148 - DNA, 40 bp, Artificial Sequence
  Description of Artificial Sequence: Synthetic primer
tggaaaaaagacaatgaactactgcatgatgctgaaatgg

SEQ ID NO: 18149 - DNA, 40 bp, Artificial Sequence
  Description of Artificial Sequence: Synthetic primer
cgctggtcaaccagaacctggagagcttgactgagtattg

SEQ ID NO: 18150 - DNA, 40 bp, Artificial Sequence
  Description of Artificial Sequence: Synthetic primer
gtcggtttctgtgaaattaacatgattgaacttactccac

SEQ ID NO: 18151 - DNA, 40 bp, Artificial Sequence
  Description of Artificial Sequence: Synthetic primer
ccagctgccgaggagttcagctcccgcgctaaggagttcg

SEQ ID NO: 18152 - DNA, 40 bp, Artificial Sequence
  Description of Artificial Sequence: Synthetic primer
tttacttcttagatagttgagaagatcaccatagcaacag

SEQ ID NO: 18153 - DNA, 40 bp, Artificial Sequence
  Description of Artificial Sequence: Synthetic primer
ttacaagttgatatcgttgaatgaaaagcaaaacaaaaac

SEQ ID NO: 18154 - DNA, 40 bp, Artificial Sequence
  Description of Artificial Sequence: Synthetic primer
ctcttcagcgtctcctctgattctagctgctccaggctga

SEQ ID NO: 18155 - DNA, 40 bp, Artificial Sequence
  Description of Artificial Sequence: Synthetic primer
tcgcaagcagctcgccagccgctatgcctcggtggagaag

SEQ ID NO: 18156 - DNA, 40 bp, Artificial Sequence
  Description of Artificial Sequence: Synthetic primer
atcgcaggctccctgcctactcccccaccggggatttcag

SEQ ID NO: 18157 - DNA, 40 bp, Artificial Sequence
  Description of Artificial Sequence: Synthetic primer
ggtcttcctgaaaaacttgcccagaagaatccaatgtatc

SEQ ID NO: 18158 - DNA, 40 bp, Artificial Sequence
  Description of Artificial Sequence: Synthetic primer
catgtaccctagctccgtgcgccactctggcggcctcaac

SEQ ID NO: 18159 - DNA, 40 bp, Artificial Sequence
  Description of Artificial Sequence: Synthetic primer
gcagtaactaggtctatttagctgagttccccccaccccc

SEQ ID NO: 18160 - DNA, 40 bp, Artificial Sequence
  Description of Artificial Sequence: Synthetic primer
gtgctggtggtcctggcccagccagagtccctgagaggag

SEQ ID NO: 18161 - DNA, 40 bp, Artificial Sequence
  Description of Artificial Sequence: Synthetic primer
atggtacaattcagaacctcaaggaaactctgaaaagcag

SEQ ID NO: 18162 - DNA, 40 bp, Artificial Sequence
  Description of Artificial Sequence: Synthetic primer
cgacggcggagcagccaccccgggcttcctcaccgggcgg

SEQ ID NO: 18163 - DNA, 40 bp, Artificial Sequence
  Description of Artificial Sequence: Synthetic primer
gcctggacttgccaactgtaaggctccatttggggcaatg

SEQ ID NO: 18164 - DNA, 40 bp, Artificial Sequence
  Description of Artificial Sequence: Synthetic primer
ttctagttcctgttagacttggtggagaaagaaccaacac

SEQ ID NO: 18165 - DNA, 40 bp, Artificial Sequence
  Description of Artificial Sequence: Synthetic primer
gcagttctcattttaagccactgagttgaagcagttccag

SEQ ID NO: 18166 - DNA, 40 bp, Artificial Sequence
  Description of Artificial Sequence: Synthetic primer
gcgactcacacaccacacctgattcctgttgcttccagac

SEQ ID NO: 18167 - DNA, 40 bp, Artificial Sequence
  Description of Artificial Sequence: Synthetic primer
aggtccccagctgtccaatcttgaagaagtatcttacacc

SEQ ID NO: 18168 - DNA, 40 bp, Artificial Sequence
  Description of Artificial Sequence: Synthetic primer
tgtcactggccaaacaccaaaggccactgtgcctcataac

SEQ ID NO: 18169 - DNA, 40 bp, Artificial Sequence
  Description of Artificial Sequence: Synthetic primer
ggaaggcgtctaccccctgggcacagtgccgcccggcctg

SEQ ID NO: 18170 - DNA, 40 bp, Artificial Sequence
  Description of Artificial Sequence: Synthetic primer
tatattaaaaatataaaactgcgttaaaggctcgattttg

SEQ ID NO: 18171 - DNA, 40 bp, Artificial Sequence
  Description of Artificial Sequence: Synthetic primer
gcgttgggaagtggcaggatcgatatgggagggccgaatc

SEQ ID NO: 18172 - DNA, 40 bp, Artificial Sequence
  Description of Artificial Sequence: Synthetic primer
gttgaaatacgggacagaattgaatcagggagatatgaag

SEQ ID NO: 18173 - DNA, 40 bp, Artificial Sequence
  Description of Artificial Sequence: Synthetic primer
cgtctgagcttgttattactttcaaacacaaagcttcatt

SEQ ID NO: 18174 - DNA, 40 bp, Artificial Sequence
  Description of Artificial Sequence: Synthetic primer
aacctgggaaaaggtggtggcgatgggccttgtagggatg

SEQ ID NO: 18175 - DNA, 40 bp, Artificial Sequence
  Description of Artificial Sequence: Synthetic primer
ataggatcagatttacgtctaccctaattcttaacattgc

SEQ ID NO: 18176 - DNA, 40 bp, Artificial Sequence
  Description of Artificial Sequence: Synthetic primer
cttggcagataaggggatctggagacagtccagaagagag

SEQ ID NO: 18177 - DNA, 40 bp, Artificial Sequence
  Description of Artificial Sequence: Synthetic primer
tgaaggaattaatgtgatttaagtgttttgtaacttcatt

SEQ ID NO: 18178 - DNA, 40 bp, Artificial Sequence
  Description of Artificial Sequence: Synthetic primer
aaacacactctgtgttctattaatagtactcttacttatc

SEQ ID NO: 18179 - DNA, 40 bp, Artificial Sequence
  Description of Artificial Sequence: Synthetic primer
cttccaaccccgtcgtctgcacgcagcccaaatccccatc

SEQ ID NO: 18180 - DNA, 40 bp, Artificial Sequence
  Description of Artificial Sequence: Synthetic primer
aattattcttgatgatgatgagtgtcctttacaaatcttc

SEQ ID NO: 18181 - DNA, 40 bp, Artificial Sequence
  Description of Artificial Sequence: Synthetic primer
ttgccatgggctgccagggctgtagccagcatcacctcag

SEQ ID NO: 18182 - DNA, 40 bp, Artificial Sequence
  Description of Artificial Sequence: Synthetic primer
aaaatttgtcacatggtcagtgatggctcttgggtggttc

SEQ ID NO: 18183 - DNA, 40 bp, Artificial Sequence
  Description of Artificial Sequence: Synthetic primer
ttttggtcacttccaacacatcagttggcattgtggcaga

SEQ ID NO: 18184 - DNA, 40 bp, Artificial Sequence
  Description of Artificial Sequence: Synthetic primer
aggagggcttcctgggaggtgtctctgggggtggggtgag

SEQ ID NO: 18185 - DNA, 40 bp, Artificial Sequence
  Description of Artificial Sequence: Synthetic primer
cccccttcatagtcttcaggctgagggaggtctggcaagc

SEQ ID NO: 18186 - DNA, 40 bp, Artificial Sequence
  Description of Artificial Sequence: Synthetic primer
ttgtcaaatgaaaattttaactggaattgtctgatattta

SEQ ID NO: 18187 - DNA, 40 bp, Artificial Sequence
  Description of Artificial Sequence: Synthetic primer
cagctagaagtgaaactactgcttccatgcttgcctggtc

SEQ ID NO: 18188 - DNA, 40 bp, Artificial Sequence
  Description of Artificial Sequence: Synthetic primer
tttttgtgataacagccaccgaggggactccggcacacac

SEQ ID NO: 18189 - DNA, 40 bp, Artificial Sequence
  Description of Artificial Sequence: Synthetic primer
agtactacgcatatgtaactgagcgccaaaaagtacactg

SEQ ID NO: 18190 - DNA, 40 bp, Artificial Sequence
  Description of Artificial Sequence: Synthetic primer
ctgtatgtcatgaccccttaggttgggtttatgccacatc

SEQ ID NO: 18191 - DNA, 40 bp, Artificial Sequence
  Description of Artificial Sequence: Synthetic primer
taaaagatattgtgtgacagtgtcttatttagggggaaag

SEQ ID NO: 18192 - DNA, 40 bp, Artificial Sequence
  Description of Artificial Sequence: Synthetic primer
cggcaggcgatggagcgcccgccggccctggaggacacag

SEQ ID NO: 18193 - DNA, 40 bp, Artificial Sequence
  Description of Artificial Sequence: Synthetic primer
ctgtgtttccgacctcatctccaggacagtgggaagagtg

SEQ ID NO: 18194 - DNA, 40 bp, Artificial Sequence
  Description of Artificial Sequence: Synthetic primer
cttgaatttgtcttccaaaaagaaagaatctcagcttcag

SEQ ID NO: 18195 - DNA, 40 bp, Artificial Sequence
  Description of Artificial Sequence: Synthetic primer
cttgagagaactaacggctcggtgccttctccctggtctc

SEQ ID NO: 18196 - DNA, 40 bp, Artificial Sequence
  Description of Artificial Sequence: Synthetic primer
ggcgggagacagagcgcggcgaagagccattgagtggtca

SEQ ID NO: 18197 - DNA, 40 bp, Artificial Sequence
  Description of Artificial Sequence: Synthetic primer
aaaagtcctgtgaccggacagagcagagcggggactgcaa

SEQ ID NO: 18198 - DNA, 40 bp, Artificial Sequence
  Description of Artificial Sequence: Synthetic primer
ccccgctctgctcgcccaacggctacctgggcagcctcaa

SEQ ID NO: 18199 - DNA, 40 bp, Artificial Sequence
  Description of Artificial Sequence: Synthetic primer
cttcctgggtcaggcgttccatagctggtatgtcttcagg

SEQ ID NO: 18200 - DNA, 40 bp, Artificial Sequence
  Description of Artificial Sequence: Synthetic primer
aatgctgtttattcatgctgaggtgattcagttccctcct

SEQ ID NO: 18201 - DNA, 40 bp, Artificial Sequence
  Description of Artificial Sequence: Synthetic primer
tcctatggcatgggtctaaagcacagatttgaggtagatg

SEQ ID NO: 18202 - DNA, 40 bp, Artificial Sequence
  Description of Artificial Sequence: Synthetic primer
agattatcagagaggatcaggctggggtaggccgtgtctg

SEQ ID NO: 18203 - DNA, 40 bp, Artificial Sequence
  Description of Artificial Sequence: Synthetic primer
tcagaagtaaaagccttgtcaggatggcacattgtgtgtg

SEQ ID NO: 18204 - DNA, 40 bp, Artificial Sequence
  Description of Artificial Sequence: Synthetic primer
aatgaatggcaaagctctcctgctgctgaccaaagaggac

SEQ ID NO: 18205 - DNA, 40 bp, Artificial Sequence
  Description of Artificial Sequence: Synthetic primer
ctgcttcaattatacctaaatctcgggctaaattctctcg

SEQ ID NO: 18206 - DNA, 40 bp, Artificial Sequence
  Description of Artificial Sequence: Synthetic primer
cctggccgccatctgctgctcatagtacgcgtccccaaac

SEQ ID NO: 18207 - DNA, 40 bp, Artificial Sequence
  Description of Artificial Sequence: Synthetic primer
aaaatattaaagccctataaaagatctgagcagtcaactc

SEQ ID NO: 18208 - DNA, 40 bp, Artificial Sequence
  Description of Artificial Sequence: Synthetic primer
cacgtttaactgcatcttcattttgtcgtgcaacctcttc

SEQ ID NO: 18209 - DNA, 40 bp, Artificial Sequence
  Description of Artificial Sequence: Synthetic primer
ctgcaggagtggtacaaaaagatgctggacaaggcgtttg

SEQ ID NO: 18210 - DNA, 40 bp, Artificial Sequence
  Description of Artificial Sequence: Synthetic primer
ccacgcccaggacctcggcgttgtcaacctcaccaaccac

SEQ ID NO: 18211 - DNA, 40 bp, Artificial Sequence
  Description of Artificial Sequence: Synthetic primer
cttagcccaggggaatgctcctccttgagatgatgaggtg

SEQ ID NO: 18212 - DNA, 40 bp, Artificial Sequence
  Description of Artificial Sequence: Synthetic primer
atggtccacttctggtttggcttcttctgtggcttctcag

SEQ ID NO: 18213 - DNA, 40 bp, Artificial Sequence
  Description of Artificial Sequence: Synthetic primer
ccaccaggaaaagagatttggggaaaaactaaaaatggag

SEQ ID NO: 18214 - DNA, 40 bp, Artificial Sequence
  Description of Artificial Sequence: Synthetic primer
gcatcttctgtagggtcctgtatcctctttgtgtggtttc

SEQ ID NO: 18215 - DNA, 40 bp, Artificial Sequence
  Description of Artificial Sequence: Synthetic primer
tgctcgctccgtccctctgtgtccggtctgtcctccttgg

SEQ ID NO: 18216 - DNA, 40 bp, Artificial Sequence
  Description of Artificial Sequence: Synthetic primer
ccggctcctctttcgggggccgtcggggtcttcagagatg

SEQ ID NO: 18217 - DNA, 40 bp, Artificial Sequence
  Description of Artificial Sequence: Synthetic primer
gccccacgggcgacgtcacccacgagtgtgcctgcctgcc

SEQ ID NO: 18218 - DNA, 40 bp, Artificial Sequence
  Description of Artificial Sequence: Synthetic primer
gagccttgggggtgtgatgtggggaagagctattgtaggc

SEQ ID NO: 18219 - DNA, 40 bp, Artificial Sequence
  Description of Artificial Sequence: Synthetic primer
agacttggggggctccatctgtccctccctgaggtccctc

SEQ ID NO: 18220 - DNA, 40 bp, Artificial Sequence
  Description of Artificial Sequence: Synthetic primer
cccttgccactcccactttctggcaccgagtttatttttc

SEQ ID NO: 18221 - DNA, 40 bp, Artificial Sequence
  Description of Artificial Sequence: Synthetic primer
aactccgaagggaaatcaagaggctccaagaatacaggac

SEQ ID NO: 18222 - DNA, 40 bp, Artificial Sequence
  Description of Artificial Sequence: Synthetic primer
agttgcctctgccccagcctcttcctctggctcgaaactg

SEQ ID NO: 18223 - DNA, 40 bp, Artificial Sequence
  Description of Artificial Sequence: Synthetic primer
tctggtaagggaggtgcttggtgctaatggcaggctccac

SEQ ID NO: 18224 - DNA, 40 bp, Artificial Sequence
  Description of Artificial Sequence: Synthetic primer
tgccactgaggactccgaagaggtagcagtcttctgaaag

SEQ ID NO: 18225 - DNA, 40 bp, Artificial Sequence
  Description of Artificial Sequence: Synthetic primer
gctcttcctggaggttgtcacagcaaccaacttggaacac

SEQ ID NO: 18226 - DNA, 40 bp, Artificial Sequence
  Description of Artificial Sequence: Synthetic primer
cagcccaggaaagttccatgacaatgactgtcgcagaagg

SEQ ID NO: 18227 - DNA, 40 bp, Artificial Sequence
  Description of Artificial Sequence: Synthetic primer
ctgctcacagacttctttgggacttatgttatattttacc

SEQ ID NO: 18228 - DNA, 40 bp, Artificial Sequence
  Description of Artificial Sequence: Synthetic primer
cgaatgtaaggagtgtgggaaggcctttcgctggggttcg

SEQ ID NO: 18229 - DNA, 40 bp, Artificial Sequence
  Description of Artificial Sequence: Synthetic primer
ggaagccaacagcgaaaagaccaataacggaattcactac

SEQ ID NO: 18230 - DNA, 40 bp, Artificial Sequence
  Description of Artificial Sequence: Synthetic primer
cccggcttctgttcagctactgtaacttctccatcaacac

SEQ ID NO: 18231 - DNA, 40 bp, Artificial Sequence
  Description of Artificial Sequence: Synthetic primer
ctcctgctgccagaggaaaatctcgcatctccagggcata

SEQ ID NO: 18232 - DNA, 40 bp, Artificial Sequence
  Description of Artificial Sequence: Synthetic primer
tcaaacttactcaatgccaacgtagacagtggtctcatgc

SEQ ID NO: 18233 - DNA, 40 bp, Artificial Sequence
  Description of Artificial Sequence: Synthetic primer
ccatggttaagaggcttggaatgtccgggaaggcttattg

SEQ ID NO: 18234 - DNA, 40 bp, Artificial Sequence
  Description of Artificial Sequence: Synthetic primer
gaccattttgatgacagccttcctccccattttcctttgg

SEQ ID NO: 18235 - DNA, 40 bp, Artificial Sequence
  Description of Artificial Sequence: Synthetic primer
cttgccagtacctgactgagcttgagcaatcacatcatac

SEQ ID NO: 18236 - DNA, 40 bp, Artificial Sequence
  Description of Artificial Sequence: Synthetic primer
aaagagaaaagatgtgttgatagtctcctgaagatgtgtg

SEQ ID NO: 18237 - DNA, 40 bp, Artificial Sequence
  Description of Artificial Sequence: Synthetic primer
gaaatcggtgcaggtgggagagggcggccagcatcagtgc

SEQ ID NO: 18238 - DNA, 40 bp, Artificial Sequence
  Description of Artificial Sequence: Synthetic primer
tgggcgatagaggaagcagatgtcggggctgcctgccttg

SEQ ID NO: 18239 - DNA, 40 bp, Artificial Sequence
  Description of Artificial Sequence: Synthetic primer
tggaaggcggctgcttctcaaagtgagcccgggccagacc

SEQ ID NO: 18240 - DNA, 40 bp, Artificial Sequence
  Description of Artificial Sequence: Synthetic primer
tgaacagaagccgggagaaattgctgaagaactcgcaagc

SEQ ID NO: 18241 - DNA, 40 bp, Artificial Sequence
  Description of Artificial Sequence: Synthetic primer
gtttgtgattaaaataataaaagctaggcgtgtttgatgc

SEQ ID NO: 18242 - DNA, 40 bp, Artificial Sequence
  Description of Artificial Sequence: Synthetic primer
cttctccaacgatccctgtaccagtgtcaaaaagctgaag

SEQ ID NO: 18243 - DNA, 40 bp, Artificial Sequence
  Description of Artificial Sequence: Synthetic primer
cgccgccccatggacccctcgcccaggccggggctggagg

SEQ ID NO: 18244 - DNA, 40 bp, Artificial Sequence
  Description of Artificial Sequence: Synthetic primer
ggcgttcacccaggcttccacgttcccctcgcttgggtca

SEQ ID NO: 18245 - DNA, 40 bp, Artificial Sequence
  Description of Artificial Sequence: Synthetic primer
tcttagcagtttcaggtagatgctgcacagctggccatac

SEQ ID NO: 18246 - DNA, 40 bp, Artificial Sequence
  Description of Artificial Sequence: Synthetic primer
aacatgaccacgaacgagcgcagagttatcgtgccagcag

SEQ ID NO: 18247 - DNA, 40 bp, Artificial Sequence
  Description of Artificial Sequence: Synthetic primer
gagaaggctaaaggaaacgaaagatggttttatgtttttg

SEQ ID NO: 18248 - DNA, 40 bp, Artificial Sequence
  Description of Artificial Sequence: Synthetic primer
gctccggaagtctctccacggcctgcccttgagtctgagg

SEQ ID NO: 18249 - DNA, 40 bp, Artificial Sequence
  Description of Artificial Sequence: Synthetic primer
aggggctgctgcctgagtgaccaggaggtccccagacttg

SEQ ID NO: 18250 - DNA, 40 bp, Artificial Sequence
  Description of Artificial Sequence: Synthetic primer
ataaacattaaattgttggcaatagagaactacaaagtgc

SEQ ID NO: 18251 - DNA, 40 bp, Artificial Sequence
  Description of Artificial Sequence: Synthetic primer
cactgcttcctttagcttccgggaaagacattccatacac

SEQ ID NO: 18252 - DNA, 40 bp, Artificial Sequence
  Description of Artificial Sequence: Synthetic primer
aggacaatctcaataactcaggccaaagcggtttacaatc

SEQ ID NO: 18253 - DNA, 40 bp, Artificial Sequence
  Description of Artificial Sequence: Synthetic primer
cccggaacagatcattgccctcagcaaacagattctgcac

SEQ ID NO: 18254 - DNA, 40 bp, Artificial Sequence
  Description of Artificial Sequence: Synthetic primer
cctgagtccacgacctaggcagtaggccggtgtgcctgac

SEQ ID NO: 18255 - DNA, 40 bp, Artificial Sequence
  Description of Artificial Sequence: Synthetic primer
tgtgtaaccggagaaaccaggacccaggccttggaatgcc

SEQ ID NO: 18256 - DNA, 40 bp, Artificial Sequence
  Description of Artificial Sequence: Synthetic primer
aacattaaacttaaataaaacaaacctaaattaaaaatgc

SEQ ID NO: 18257 - DNA, 40 bp, Artificial Sequence
  Description of Artificial Sequence: Synthetic primer
aggatcttcccaagcattgcctctataccagactcagttc

SEQ ID NO: 18258 - DNA, 40 bp, Artificial Sequence
  Description of Artificial Sequence: Synthetic primer
aatactttatacatttttcatgttaaagagccgtgtctcc

SEQ ID NO: 18259 - DNA, 40 bp, Artificial Sequence
  Description of Artificial Sequence: Synthetic primer
tctgagtaggcagtactggaatttaaactacaattaagag

SEQ ID NO: 18260 - DNA, 40 bp, Artificial Sequence
  Description of Artificial Sequence: Synthetic primer
tgggtcacagacaaatttgtagacgtatcgctctccagcc

SEQ ID NO: 18261 - DNA, 40 bp, Artificial Sequence
  Description of Artificial Sequence: Synthetic primer
gagaacaaccaccaggagtcctaccctctgtcagtgtctc

SEQ ID NO: 18262 - DNA, 40 bp, Artificial Sequence
  Description of Artificial Sequence: Synthetic primer
cccgtaggccctgccaccacctccggctgcaatgatcagg

SEQ ID NO: 18263 - DNA, 40 bp, Artificial Sequence
  Description of Artificial Sequence: Synthetic primer
tagagtttttccaagaaccaagttcttccgagggaattcc

SEQ ID NO: 18264 - DNA, 40 bp, Artificial Sequence
  Description of Artificial Sequence: Synthetic primer
gggaggatctggaccatggtggccgggggtggcgcctctg

SEQ ID NO: 18265 - DNA, 40 bp, Artificial Sequence
  Description of Artificial Sequence: Synthetic primer
gagagcagccatcatcttgggttaccgaattcaaggtgtc

SEQ ID NO: 18266 - DNA, 40 bp, Artificial Sequence
  Description of Artificial Sequence: Synthetic primer
ctacaagggcaacctcgccagccacaagaccgtccatacc

SEQ ID NO: 18267 - DNA, 40 bp, Artificial Sequence
  Description of Artificial Sequence: Synthetic primer
gatatccctgttgtggaggtggtccctggtatgcatcttg

SEQ ID NO: 18268 - DNA, 40 bp, Artificial Sequence
  Description of Artificial Sequence: Synthetic primer
cgtcaggatccagaatcccttccctttcgtcaacctgtgg

SEQ ID NO: 18269 - DNA, 40 bp, Artificial Sequence
  Description of Artificial Sequence: Synthetic primer
ttagtcctatcaccagccagccatctcacagaagtcactc

SEQ ID NO: 18270 - DNA, 40 bp, Artificial Sequence
  Description of Artificial Sequence: Synthetic primer
aaaacgatcaaaccccactggccatctataactctatcag

SEQ ID NO: 18271 - DNA, 40 bp, Artificial Sequence
  Description of Artificial Sequence: Synthetic primer
actttgtcagcagcagaaccggagggagccgcaatgtacg

SEQ ID NO: 18272 - DNA, 40 bp, Artificial Sequence
  Description of Artificial Sequence: Synthetic primer
ctgccgcttgagctgcttcaggcgggtagatgccttgtcg

SEQ ID NO: 18273 - DNA, 40 bp, Artificial Sequence
  Description of Artificial Sequence: Synthetic primer
gagtctcccacgaacagtacatcaggctctttgtctttac

SEQ ID NO: 18274 - DNA, 40 bp, Artificial Sequence
  Description of Artificial Sequence: Synthetic primer
aaatgctctgtaatagggattgtaatagtgattcttcaac

SEQ ID NO: 18275 - DNA, 40 bp, Artificial Sequence
  Description of Artificial Sequence: Synthetic primer
gggtatgcgggtccggagggtgggctggcgaccttatgtg

SEQ ID NO: 18276 - DNA, 40 bp, Artificial Sequence
  Description of Artificial Sequence: Synthetic primer
gctcgccaccacctcaccacccccacccccaccgagtttg

SEQ ID NO: 18277 - DNA, 40 bp, Artificial Sequence
  Description of Artificial Sequence: Synthetic primer
ccgcaggagatacttctggccacctttcgaggtaccttac

SEQ ID NO: 18278 - DNA, 40 bp, Artificial Sequence
  Description of Artificial Sequence: Synthetic primer
tatgtctcggagcctggtacaggagagcaccgggggcaac

SEQ ID NO: 18279 - DNA, 40 bp, Artificial Sequence
  Description of Artificial Sequence: Synthetic primer
accagccccagtcccatcaggattgaggaggaggtcaagg

SEQ ID NO: 18280 - DNA, 40 bp, Artificial Sequence
  Description of Artificial Sequence: Synthetic primer
caggagaaaatggacccattgcctgtagcctgtcgactcc

SEQ ID NO: 18281 - DNA, 40 bp, Artificial Sequence
  Description of Artificial Sequence: Synthetic primer
aatggctgataagggccctaactccctcacccaggaagtg

SEQ ID NO: 18282 - DNA, 40 bp, Artificial Sequence
  Description of Artificial Sequence: Synthetic primer
catgtctacaaatgcgactccgatgagaccatctacattc

SEQ ID NO: 18283 - DNA, 40 bp, Artificial Sequence
  Description of Artificial Sequence: Synthetic primer
cttctcttcagagaagctagtaaaatggtttgcacttatg

SEQ ID NO: 18284 - DNA, 40 bp, Artificial Sequence
  Description of Artificial Sequence: Synthetic primer
tgtcatgtgaagagctacattcaatattacacttggtgct

SEQ ID NO: 18285 - DNA, 40 bp, Artificial Sequence
  Description of Artificial Sequence: Synthetic primer
ttcagaagttccatgcgcagcatgaaggagaatctgtgtc

SEQ ID NO: 18286 - DNA, 40 bp, Artificial Sequence
  Description of Artificial Sequence: Synthetic primer
cgacctgcccaccagtcccctggccatggaatatgttaat

SEQ ID NO: 18287 - DNA, 40 bp, Artificial Sequence
  Description of Artificial Sequence: Synthetic primer
gataagtctgcagtgaagatctgtaccctgccaataggac

SEQ ID NO: 18288 - DNA, 40 bp, Artificial Sequence
  Description of Artificial Sequence: Synthetic primer
ccagccatgcagaacatgaatccaatgcaggcgggcgttc

SEQ ID NO: 18289 - DNA, 40 bp, Artificial Sequence
  Description of Artificial Sequence: Synthetic primer
cctgcttacgccaacgggcgcggcggttactgaaccagac

SEQ ID NO: 18290 - DNA, 40 bp, Artificial Sequence
  Description of Artificial Sequence: Synthetic primer
acagtattattcaaaagaggttaaagatctaaaaactgag

SEQ ID NO: 18291 - DNA, 40 bp, Artificial Sequence
  Description of Artificial Sequence: Synthetic primer
tgcccgaccagagaagcaagttcgagaacgaggagttttt

SEQ ID NO: 18292 - DNA, 40 bp, Artificial Sequence
  Description of Artificial Sequence: Synthetic primer
gacttcctcactgtcccagcccaaggggtagagggcacag

SEQ ID NO: 18293 - DNA, 40 bp, Artificial Sequence
  Description of Artificial Sequence: Synthetic primer
aggatcagatcaccagtggaaaatacaacttcattcctga

SEQ ID NO: 18294 - DNA, 40 bp, Artificial Sequence
  Description of Artificial Sequence: Synthetic primer
tccaaatttgatgcactggcagagataactccttgagctg

SEQ ID NO: 18295 - DNA, 40 bp, Artificial Sequence
  Description of Artificial Sequence: Synthetic primer
cctcctcaatactgtcagtgaactcagtgcttgtatcttc

SEQ ID NO: 18296 - DNA, 40 bp, Artificial Sequence
  Description of Artificial Sequence: Synthetic primer
gagctgggattccagttgtcccaggtgctgggatcccagg

SEQ ID NO: 18297 - DNA, 40 bp, Artificial Sequence
  Description of Artificial Sequence: Synthetic primer
gaaaacggccgtggggcagcgtcgcaggcccgtcctctcg

SEQ ID NO: 18298 - DNA, 40 bp, Artificial Sequence
  Description of Artificial Sequence: Synthetic primer
tacaaaaccagttatgtttcggaaagagggaaaagagtcc

SEQ ID NO: 18299 - DNA, 40 bp, Artificial Sequence
  Description of Artificial Sequence: Synthetic primer
ccctgtcttcccccacatctttgccagaggtgtgacatgg

SEQ ID NO: 18300 - DNA, 40 bp, Artificial Sequence
  Description of Artificial Sequence: Synthetic primer
cggcacaggcctgggtgccaaggacccttgctcgcgtttg

SEQ ID NO: 18301 - DNA, 40 bp, Artificial Sequence
  Description of Artificial Sequence: Synthetic primer
ggctcttgtttaatagtcacttctgatccaggagctgtgc

SEQ ID NO: 18302 - DNA, 40 bp, Artificial Sequence
  Description of Artificial Sequence: Synthetic primer
tggaagatcccagcaccgactactaccaagagctgcagag

SEQ ID NO: 18303 - DNA, 40 bp, Artificial Sequence
  Description of Artificial Sequence: Synthetic primer
tgatctgctagaagtgtatgagtgagaggcaatagcatac

SEQ ID NO: 18304 - DNA, 40 bp, Artificial Sequence
  Description of Artificial Sequence: Synthetic primer
gctttataaaagaccactggatcccaagagtgaagctcag

SEQ ID NO: 18305 - DNA, 40 bp, Artificial Sequence
  Description of Artificial Sequence: Synthetic primer
actcacaaaacttagaactgaacaaaatgaaagacagaag

SEQ ID NO: 18306 - DNA, 40 bp, Artificial Sequence
  Description of Artificial Sequence: Synthetic primer
gccgtccattcacaaaaacccccccaagctgattcactcc

SEQ ID NO: 18307 - DNA, 40 bp, Artificial Sequence
  Description of Artificial Sequence: Synthetic primer
ttataggtgtccatggtggtacccaaataaggataatctg

SEQ ID NO: 18308 - DNA, 40 bp, Artificial Sequence
  Description of Artificial Sequence: Synthetic primer
gcacctgttgctgctgcaggggagagctgggagacctgag

SEQ ID NO: 18309 - DNA, 40 bp, Artificial Sequence
  Description of Artificial Sequence: Synthetic primer
tcttcctctgcccagggctggtagcttgaaaactggtcac

SEQ ID NO: 18310 - DNA, 40 bp, Artificial Sequence
  Description of Artificial Sequence: Synthetic primer
aaaaaaacaaaaatatatatgggggaaattaacttttttt

SEQ ID NO: 18311 - DNA, 40 bp, Artificial Sequence
  Description of Artificial Sequence: Synthetic primer
aatacaattctcccttcacagttcacaacaaagaaaaatc

SEQ ID NO: 18312 - DNA, 40 bp, Artificial Sequence
  Description of Artificial Sequence: Synthetic primer
tcagcatacagagacacatctgactccgattctagaggac

SEQ ID NO: 18313 - DNA, 40 bp, Artificial Sequence
  Description of Artificial Sequence: Synthetic primer
aaacgcgtgagaaggcctgagcagttgtgtttgcagatcc

SEQ ID NO: 18314 - DNA, 40 bp, Artificial Sequence
  Description of Artificial Sequence: Synthetic primer
ccagcaaccaagttgcgtatccttccttatagctagtttc

SEQ ID NO: 18315 - DNA, 40 bp, Artificial Sequence
  Description of Artificial Sequence: Synthetic primer
tccacggccacagtcccagcccccccactccagtccttcc

SEQ ID NO: 18316 - DNA, 40 bp, Artificial Sequence
  Description of Artificial Sequence: Synthetic primer
cactcacagcccttcccagccccacctccaagtagtatgc

SEQ ID NO: 18317 - DNA, 40 bp, Artificial Sequence
  Description of Artificial Sequence: Synthetic primer
atacagatgtctgcagacagctgtcctttccttctaggag

SEQ ID NO: 18318 - DNA, 40 bp, Artificial Sequence
  Description of Artificial Sequence: Synthetic primer
ggtatcctgtgatgggctgtgtctccctgaagattgtctg

SEQ ID NO: 18319 - DNA, 40 bp, Artificial Sequence
  Description of Artificial Sequence: Synthetic primer
tttccattaaaatgaccaataacagcttcacatttttctg

SEQ ID NO: 18320 - DNA, 40 bp, Artificial Sequence
  Description of Artificial Sequence: Synthetic primer
ttgagggggcttcccaaatgaaaagcctgacttcagttac

SEQ ID NO: 18321 - DNA, 40 bp, Artificial Sequence
  Description of Artificial Sequence: Synthetic primer
gcacagccacagctacccaaaagagggctttgtgcagagg

SEQ ID NO: 18322 - DNA, 40 bp, Artificial Sequence
  Description of Artificial Sequence: Synthetic primer
gttctccgggaagctccccttcagtggcgggtacaccttc

SEQ ID NO: 18323 - DNA, 40 bp, Artificial Sequence
  Description of Artificial Sequence: Synthetic primer
gaataagcatctgattttatgactgagccttttcctgtcc

SEQ ID NO: 18324 - DNA, 40 bp, Artificial Sequence
  Description of Artificial Sequence: Synthetic primer
gaaactataaaatccaaagtatataagattccgagccaag

SEQ ID NO: 18325 - DNA, 40 bp, Artificial Sequence
  Description of Artificial Sequence: Synthetic primer
atgcctcttccaaagaagttgaaaagtgtcacacctgtag

SEQ ID NO: 18326 - DNA, 40 bp, Artificial Sequence
  Description of Artificial Sequence: Synthetic primer
ttctctgtgacggtggcgtcggctcgcctctgctcctttc

SEQ ID NO: 18327 - DNA, 40 bp, Artificial Sequence
  Description of Artificial Sequence: Synthetic primer
gccaaagcacctcgaatctgctcttctccttccggtccac

SEQ ID NO: 18328 - DNA, 40 bp, Artificial Sequence
  Description of Artificial Sequence: Synthetic primer
acggagacccaagcagaggacactgagcccgatcctggtg

SEQ ID NO: 18329 - DNA, 40 bp, Artificial Sequence
  Description of Artificial Sequence: Synthetic primer
tgcaactattttttattttttaaagaaatgaaatatcttc

SEQ ID NO: 18330 - DNA, 40 bp, Artificial Sequence
  Description of Artificial Sequence: Synthetic primer
gtgtgcgtcctcaggtgtctggtgagattggctgatctgg

SEQ ID NO: 18331 - DNA, 40 bp, Artificial Sequence
  Description of Artificial Sequence: Synthetic primer
ctgtacctgcctgttttgtgaaagtcacttctctgagact

SEQ ID NO: 18332 - DNA, 40 bp, Artificial Sequence
  Description of Artificial Sequence: Synthetic primer
tcttccttcttagcctctctgttgaaaaaccactagaaag

SEQ ID NO: 18333 - DNA, 40 bp, Artificial Sequence
  Description of Artificial Sequence: Synthetic primer
accgacagctgtgcgccatgttcgccccgtgaagtgaagc

SEQ ID NO: 18334 - DNA, 40 bp, Artificial Sequence
  Description of Artificial Sequence: Synthetic primer
cctaggggcagctgctcctccagcaaagtggctctttcac

SEQ ID NO: 18335 - DNA, 40 bp, Artificial Sequence
  Description of Artificial Sequence: Synthetic primer
acgcagcgcgtactgtgccacttcagtgtgcgggtgacag

SEQ ID NO: 18336 - DNA, 40 bp, Artificial Sequence
  Description of Artificial Sequence: Synthetic primer
gtcattacgagctgcagagcccaacagcttcgctcgatac

SEQ ID NO: 18337 - DNA, 40 bp, Artificial Sequence
  Description of Artificial Sequence: Synthetic primer
ttttaaatggaaatgtcaataaatgctatgaattggtgtc

SEQ ID NO: 18338 - DNA, 40 bp, Artificial Sequence
  Description of Artificial Sequence: Synthetic primer
aatgtggctcccctacacagtttactttggctgtgttctg

SEQ ID NO: 18339 - DNA, 40 bp, Artificial Sequence
  Description of Artificial Sequence: Synthetic primer
gtaattcattgttgagttgtaatttcacgatatctcttag

SEQ ID NO: 18340 - DNA, 40 bp, Artificial Sequence
  Description of Artificial Sequence: Synthetic primer
ctccttcatactatgggagacctcgtcctccagtgacacg

SEQ ID NO: 18341 - DNA, 40 bp, Artificial Sequence
  Description of Artificial Sequence: Synthetic primer
actcagatccatcaccttcttcagttctttggcctcttgc

SEQ ID NO: 18342 - DNA, 40 bp, Artificial Sequence
  Description of Artificial Sequence: Synthetic primer
aaccagagggtaggggcacatgggggtggggcttgtcagc

SEQ ID NO: 18343 - DNA, 40 bp, Artificial Sequence
  Description of Artificial Sequence: Synthetic primer
aggagctgctgaaagagactcttaagagagagaaaacaac

SEQ ID NO: 18344 - DNA, 40 bp, Artificial Sequence
  Description of Artificial Sequence: Synthetic primer
gacacagattatcaactggggggaccaaatagccaccttg

SEQ ID NO: 18345 - DNA, 40 bp, Artificial Sequence
  Description of Artificial Sequence: Synthetic primer
gcccacaaccacgatgaatcctataactcagtatgttcag

SEQ ID NO: 18346 - DNA, 40 bp, Artificial Sequence
  Description of Artificial Sequence: Synthetic primer
cctctggggcttcaaagggatcacggtgcttgtttccaac

SEQ ID NO: 18347 - DNA, 40 bp, Artificial Sequence
  Description of Artificial Sequence: Synthetic primer
agcattcagtgtgcccactaaatgccagccacacctccac

SEQ ID NO: 18348 - DNA, 40 bp, Artificial Sequence
  Description of Artificial Sequence: Synthetic primer
tttaatacttcttaatctttcaaatactatacagaatacc

SEQ ID NO: 18349 - DNA, 40 bp, Artificial Sequence
  Description of Artificial Sequence: Synthetic primer
gtgcgacctgagacgccgccctcgccgagggcccatgggc

SEQ ID NO: 18350 - DNA, 40 bp, Artificial Sequence
  Description of Artificial Sequence: Synthetic primer
gaggaaccggagggactacttttttagactcatcactttc

SEQ ID NO: 18351 - DNA, 40 bp, Artificial Sequence
  Description of Artificial Sequence: Synthetic primer
aacacacgaattctaaagaaagccttcagttacctctacc

SEQ ID NO: 18352 - DNA, 40 bp, Artificial Sequence
  Description of Artificial Sequence: Synthetic primer
ttaattttccaaaatgttataccacactatgttcttggtc

SEQ ID NO: 18353 - DNA, 40 bp, Artificial Sequence
  Description of Artificial Sequence: Synthetic primer
ctgtgtgtgttagcttgtatatatatttttaaaaatctac

SEQ ID NO: 18354 - DNA, 40 bp, Artificial Sequence
  Description of Artificial Sequence: Synthetic primer
aggagagaaagaagtgatgaaactctggaatctccatgtc

SEQ ID NO: 18355 - DNA, 40 bp, Artificial Sequence
  Description of Artificial Sequence: Synthetic primer
gggctattttattggtactactcccaatagctttgaattg

SEQ ID NO: 18356 - DNA, 40 bp, Artificial Sequence
  Description of Artificial Sequence: Synthetic primer
agccaacttttcacccatctgtacatcctatgtcaactgc

SEQ ID NO: 18357 - DNA, 40 bp, Artificial Sequence
  Description of Artificial Sequence: Synthetic primer
ggcgtggggtggccgtgaccggtccaggctgatctcctgg

SEQ ID NO: 18358 - DNA, 40 bp, Artificial Sequence
  Description of Artificial Sequence: Synthetic primer
gtacttgcctgggagaaggcagcggacgcatcacttgcac

SEQ ID NO: 18359 - DNA, 40 bp, Artificial Sequence
  Description of Artificial Sequence: Synthetic primer
atggaaaaaagaaaaataaaaatcatttttcttgttttag

SEQ ID NO: 18360 - DNA, 40 bp, Artificial Sequence
  Description of Artificial Sequence: Synthetic primer
aggcggaggaggagggggtggagccacctacgtatttaag

SEQ ID NO: 18361 - DNA, 40 bp, Artificial Sequence
  Description of Artificial Sequence: Synthetic primer
caacccctgcgtccacggggcctgccgggacagcctcaac

SEQ ID NO: 18362 - DNA, 40 bp, Artificial Sequence
  Description of Artificial Sequence: Synthetic primer
tccattctgggcacatgccacaagacgcaaagcaacaaag

SEQ ID NO: 18363 - DNA, 40 bp, Artificial Sequence
  Description of Artificial Sequence: Synthetic primer
tctatgtcaggtatgtgccttctctgacctggggtctctc

SEQ ID NO: 18364 - DNA, 40 bp, Artificial Sequence
  Description of Artificial Sequence: Synthetic primer
ttgccttgcacgatgatatggagagccagcccctgattgg

SEQ ID NO: 18365 - DNA, 40 bp, Artificial Sequence
  Description of Artificial Sequence: Synthetic primer
agtagttgggtggtggtcttcaaatctctcattacaactc

SEQ ID NO: 18366 - DNA, 40 bp, Artificial Sequence
  Description of Artificial Sequence: Synthetic primer
tcccatttagggctgaatgaagccatgacttggaaaggtg

SEQ ID NO: 18367 - DNA, 40 bp, Artificial Sequence
  Description of Artificial Sequence: Synthetic primer
accccccttcccagcatcagtaaaagatggctatgctgtc

SEQ ID NO: 18368 - DNA, 40 bp, Artificial Sequence
  Description of Artificial Sequence: Synthetic primer
gcgggtacccctggcctgctgcccacagcgtctgctccac

SEQ ID NO: 18369 - DNA, 40 bp, Artificial Sequence
  Description of Artificial Sequence: Synthetic primer
atccgaaaagttcgctttgatatattcctggagggccaag

SEQ ID NO: 18370 - DNA, 40 bp, Artificial Sequence
  Description of Artificial Sequence: Synthetic primer
attgaagagggtgaatgtataggagccatcggacactagg

SEQ ID NO: 18371 - DNA, 40 bp, Artificial Sequence
  Description of Artificial Sequence: Synthetic primer
ccaaacccgaggttgctgacgagggcccactggagggttc

SEQ ID NO: 18372 - DNA, 40 bp, Artificial Sequence
  Description of Artificial Sequence: Synthetic primer
gtctttttcagcatggcatggttctctttccctgggactc

SEQ ID NO: 18373 - DNA, 40 bp, Artificial Sequence
  Description of Artificial Sequence: Synthetic primer
ggccggagcgcgccgagccaagcgcgggggggaagagcgg

SEQ ID NO: 18374 - DNA, 40 bp, Artificial Sequence
  Description of Artificial Sequence: Synthetic primer
cctactctaaaaccaaaccaaaaaaataaaataacacatc

SEQ ID NO: 18375 - DNA, 40 bp, Artificial Sequence
  Description of Artificial Sequence: Synthetic primer
tctcttcctcttctgcagactcaccacctggcggctcctc

SEQ ID NO: 18376 - DNA, 40 bp, Artificial Sequence
  Description of Artificial Sequence: Synthetic primer
ggggaatgttttcctgctgacggcatcgtgccattcattg

SEQ ID NO: 18377 - DNA, 40 bp, Artificial Sequence
  Description of Artificial Sequence: Synthetic primer
aaacccttcacagaagagtgatgtgtattaagccatcagg

SEQ ID NO: 18378 - DNA, 40 bp, Artificial Sequence
  Description of Artificial Sequence: Synthetic primer
cttgtccataaggaggtccagttcccatcatgcccccttg

SEQ ID NO: 18379 - DNA, 40 bp, Artificial Sequence
  Description of Artificial Sequence: Synthetic primer
ggacggacgggtgggccgaggtacaggccccacggccgcc

SEQ ID NO: 18380 - DNA, 40 bp, Artificial Sequence
  Description of Artificial Sequence: Synthetic primer
tacgccatccccccacagaactcatacggcggggggcatg

SEQ ID NO: 18381 - DNA, 40 bp, Artificial Sequence
  Description of Artificial Sequence: Synthetic primer
tttggcacactgccacggatcatacttgggtcaggtagag

SEQ ID NO: 18382 - DNA, 40 bp, Artificial Sequence
  Description of Artificial Sequence: Synthetic primer
agcctctcctccatgcagaagcacatgaagggccacaagc

SEQ ID NO: 18383 - DNA, 40 bp, Artificial Sequence
  Description of Artificial Sequence: Synthetic primer
aaaacgtgcagtggttcacacccatcttcttaaccctgag

SEQ ID NO: 18384 - DNA, 40 bp, Artificial Sequence
  Description of Artificial Sequence: Synthetic primer
atgtccgcggcgatcacgttcatctcgctctccttgaagc

SEQ ID NO: 18385 - DNA, 40 bp, Artificial Sequence
  Description of Artificial Sequence: Synthetic primer
aaaagctttcgtttcactccaagagtccagcgcctgaatg

SEQ ID NO: 18386 - DNA, 40 bp, Artificial Sequence
  Description of Artificial Sequence: Synthetic primer
tttgactcagtaggcctgggtcaaaggctttacagatagc

SEQ ID NO: 18387 - DNA, 40 bp, Artificial Sequence
  Description of Artificial Sequence: Synthetic primer
ccctggccctgccggacccgctggaccccctggccccatt

SEQ ID NO: 18388 - DNA, 40 bp, Artificial Sequence
  Description of Artificial Sequence: Synthetic primer
ccaggtccaggaccctggggctgtttacggcctggaactt

SEQ ID NO: 18389 - DNA, 40 bp, Artificial Sequence
  Description of Artificial Sequence: Synthetic primer
tgcatccaatggatgctgcccagagatcgcagcatatcaa

SEQ ID NO: 18390 - DNA, 40 bp, Artificial Sequence
  Description of Artificial Sequence: Synthetic primer
aaacttcctgaaaaaataaaactagttgattcacttcttc

SEQ ID NO: 18391 - DNA, 40 bp, Artificial Sequence
  Description of Artificial Sequence: Synthetic primer
taagctgttggttgatataaataagaacctgtgggaaaaa

SEQ ID NO: 18392 - DNA, 40 bp, Artificial Sequence
  Description of Artificial Sequence: Synthetic primer
cctgcaagaatggtgccaagtgcctggacggacccaacac

SEQ ID NO: 18393 - DNA, 40 bp, Artificial Sequence
  Description of Artificial Sequence: Synthetic primer
cgcttttatagtctggaccgcctcctacgccgcagggaac

SEQ ID NO: 18394 - DNA, 40 bp, Artificial Sequence
  Description of Artificial Sequence: Synthetic primer
ttcttctgcagtatgagcacttgtcacttctttccagagc

SEQ ID NO: 18395 - DNA, 40 bp, Artificial Sequence
  Description of Artificial Sequence: Synthetic primer
tgccgccgccggtccctcccggcgcgcccgcgcctcctcc

SEQ ID NO: 18396 - DNA, 40 bp, Artificial Sequence
  Description of Artificial Sequence: Synthetic primer
aaaatcacctaggcaaggacagatgcccaggggtgccatc

SEQ ID NO: 18397 - DNA, 40 bp, Artificial Sequence
  Description of Artificial Sequence: Synthetic primer
taatcctgtctgtgaaaccttctttccttgtgccagagtc

SEQ ID NO: 18398 - DNA, 40 bp, Artificial Sequence
  Description of Artificial Sequence: Synthetic primer
aatctgtggtaactatagaggtttaacttatatcattttc

SEQ ID NO: 18399 - DNA, 40 bp, Artificial Sequence
  Description of Artificial Sequence: Synthetic primer
caagccgggagccctgccggccaacctggacgacatgaag

SEQ ID NO: 18400 - DNA, 40 bp, Artificial Sequence
  Description of Artificial Sequence: Synthetic primer
gcttttcaagacaagccaataaagcataaagccatcttcc

SEQ ID NO: 18401 - DNA, 40 bp, Artificial Sequence
  Description of Artificial Sequence: Synthetic primer
atctgtctcaccgggacccttttcgtggaagttgttcttc

SEQ ID NO: 18402 - DNA, 40 bp, Artificial Sequence
  Description of Artificial Sequence: Synthetic primer
tgttcatcgaatgttccatcgaggactgtgaattctgctc

SEQ ID NO: 18403 - DNA, 40 bp, Artificial Sequence
  Description of Artificial Sequence: Synthetic primer
atgttaacacaataaatatcttgacaattttattttctac

SEQ ID NO: 18404 - DNA, 40 bp, Artificial Sequence
  Description of Artificial Sequence: Synthetic primer
gcgtctgcgaaatcatatggctgtagcattcgtgctatcc

SEQ ID NO: 18405 - DNA, 40 bp, Artificial Sequence
  Description of Artificial Sequence: Synthetic primer
tttccttttccattggcatcacaacggaccgaagtttctc

SEQ ID NO: 18406 - DNA, 40 bp, Artificial Sequence
  Description of Artificial Sequence: Synthetic primer
aaccatgggtccttcaggtaaaataagtcatttcatagtg

SEQ ID NO: 18407 - DNA, 40 bp, Artificial Sequence
  Description of Artificial Sequence: Synthetic primer
tagagacacaagagaggctgtggatggcctattaaaatga

SEQ ID NO: 18408 - DNA, 40 bp, Artificial Sequence
  Description of Artificial Sequence: Synthetic primer
cataaaatcattatttgcagagattttcttcctccctacc

SEQ ID NO: 18409 - DNA, 40 bp, Artificial Sequence
  Description of Artificial Sequence: Synthetic primer
gaaggcttgtaactgctgaggtgtaggtgctgtcacattc

SEQ ID NO: 18410 - DNA, 40 bp, Artificial Sequence
  Description of Artificial Sequence: Synthetic primer
ggctggaggagatcttcgaggctgtgtgggtgaatgagtc

SEQ ID NO: 18411 - DNA, 40 bp, Artificial Sequence
  Description of Artificial Sequence: Synthetic primer
agatgatcagctttatccaagaaagaagactagtaaattg

SEQ ID NO: 18412 - DNA, 40 bp, Artificial Sequence
  Description of Artificial Sequence: Synthetic primer
tgtatgaaattggacctgaactgttggatttttctagttg

SEQ ID NO: 18413 - DNA, 40 bp, Artificial Sequence
  Description of Artificial Sequence: Synthetic primer
gttctcctgggaaccccatcggccccctgccagcacacac

SEQ ID NO: 18414 - DNA, 40 bp, Artificial Sequence
  Description of Artificial Sequence: Synthetic primer
tgagacctttgataacataaccattagcagagaggctcag

SEQ ID NO: 18415 - DNA, 40 bp, Artificial Sequence
  Description of Artificial Sequence: Synthetic primer
cattcagatgaagaactgctccccaaaatggctcagaagc

SEQ ID NO: 18416 - DNA, 40 bp, Artificial Sequence
  Description of Artificial Sequence: Synthetic primer
ttttggaaacagcctcctgctctccttgcacaaccctttc

SEQ ID NO: 18417 - DNA, 40 bp, Artificial Sequence
  Description of Artificial Sequence: Synthetic primer
tccctttcttataggcaggtggctgtcttactttgcagtg

SEQ ID NO: 18418 - DNA, 40 bp, Artificial Sequence
  Description of Artificial Sequence: Synthetic primer
ttccaaaggctccttcgcctagctcccttttcagaacaat

SEQ ID NO: 18419 - DNA, 40 bp, Artificial Sequence
  Description of Artificial Sequence: Synthetic primer
agctgagggactcctgcagacatggctgttggagatgaac

SEQ ID NO: 18420 - DNA, 40 bp, Artificial Sequence
  Description of Artificial Sequence: Synthetic primer
gacgggaccttgtgcatgacgcaggatcagatcctggaag

SEQ ID NO: 18421 - DNA, 40 bp, Artificial Sequence
  Description of Artificial Sequence: Synthetic primer
tgacccagaggctggccagggaagcaagttttgcctagtg

SEQ ID NO: 18422 - DNA, 40 bp, Artificial Sequence
  Description of Artificial Sequence: Synthetic primer
ctgaccctaggcctccaccctggcaggaatcccaatttgc

SEQ ID NO: 18423 - DNA, 40 bp, Artificial Sequence
  Description of Artificial Sequence: Synthetic primer
ttgtacatgtgtagcctgtgcatgtatgtcttggacactg

SEQ ID NO: 18424 - DNA, 40 bp, Artificial Sequence
  Description of Artificial Sequence: Synthetic primer
catttacatttgatttctttttcaatactatacagttcta

SEQ ID NO: 18425 - DNA, 40 bp, Artificial Sequence
  Description of Artificial Sequence: Synthetic primer
tggatctaggatattgagtcagaaatgaaggtatcctttt

SEQ ID NO: 18426 - DNA, 40 bp, Artificial Sequence
  Description of Artificial Sequence: Synthetic primer
gtcatagtgggcttcagccgggccagggaacgaagcactg

SEQ ID NO: 18427 - DNA, 40 bp, Artificial Sequence
  Description of Artificial Sequence: Synthetic primer
gcatcacccaagttagaggaggcaggcggtggtggaaatc

SEQ ID NO: 18428 - DNA, 40 bp, Artificial Sequence
  Description of Artificial Sequence: Synthetic primer
agtatcagcactagaaattgggcagtcttaatgttgaatg

SEQ ID NO: 18429 - DNA, 40 bp, Artificial Sequence
  Description of Artificial Sequence: Synthetic primer
aaatccgagacaaattactcaaggacgcggtctgtgatcg

SEQ ID NO: 18430 - DNA, 40 bp, Artificial Sequence
  Description of Artificial Sequence: Synthetic primer
aaatctttatactatatgttccacgtgttaagaataaatg

SEQ ID NO: 18431 - DNA, 40 bp, Artificial Sequence
  Description of Artificial Sequence: Synthetic primer
gattgtactaggcctatcaagaaaagctgtgaacagcaac

SEQ ID NO: 18432 - DNA, 40 bp, Artificial Sequence
  Description of Artificial Sequence: Synthetic primer
ctccttggccggggttaaaatgcagttcccgctcaaaatg

SEQ ID NO: 18433 - DNA, 40 bp, Artificial Sequence
  Description of Artificial Sequence: Synthetic primer
agagccgttgtgtaaaagagctctggaaatccgagaaaag

SEQ ID NO: 18434 - DNA, 40 bp, Artificial Sequence
  Description of Artificial Sequence: Synthetic primer
aagttggtcccagcagcataaaatgggttggccccaaagg

SEQ ID NO: 18435 - DNA, 40 bp, Artificial Sequence
  Description of Artificial Sequence: Synthetic primer
gatatctctaatgccagctcctcctttggctggttgtctc

SEQ ID NO: 18436 - DNA, 40 bp, Artificial Sequence
  Description of Artificial Sequence: Synthetic primer
ccccccggagcccaccaaaaccaggccctgtggcaacaac

SEQ ID NO: 18437 - DNA, 40 bp, Artificial Sequence
  Description of Artificial Sequence: Synthetic primer
taacctcacctttgtcttcctggcaagcctccttgttctc

SEQ ID NO: 18438 - DNA, 40 bp, Artificial Sequence
  Description of Artificial Sequence: Synthetic primer
atccctcttctcgccatacacctgctgtgctgaaatagcc

SEQ ID NO: 18439 - DNA, 40 bp, Artificial Sequence
  Description of Artificial Sequence: Synthetic primer
ccagttgtcagtggaggtcctcagggctgcaaatgtcaag

SEQ ID NO: 18440 - DNA, 40 bp, Artificial Sequence
  Description of Artificial Sequence: Synthetic primer
cggaggtccccaacaccagaagccgcgggcaccataactg

SEQ ID NO: 18441 - DNA, 40 bp, Artificial Sequence
  Description of Artificial Sequence: Synthetic primer
tgagtgttgcaagctcaggcctttaaggactgctgatgcc

SEQ ID NO: 18442 - DNA, 40 bp, Artificial Sequence
  Description of Artificial Sequence: Synthetic primer
ctggaagcggatccggccccggcccactaagaccagcttc

SEQ ID NO: 18443 - DNA, 40 bp, Artificial Sequence
  Description of Artificial Sequence: Synthetic primer
cccccaggaccagttgcctcagatgaggagcttcccgaac

SEQ ID NO: 18444 - DNA, 40 bp, Artificial Sequence
  Description of Artificial Sequence: Synthetic primer
cacccggggagtactgctcgaaaggcgccgacaggtccag

SEQ ID NO: 18445 - DNA, 40 bp, Artificial Sequence
  Description of Artificial Sequence: Synthetic primer
tacttcacattttaaagcaggagtataatattcaccaagg

SEQ ID NO: 18446 - DNA, 40 bp, Artificial Sequence
  Description of Artificial Sequence: Synthetic primer
aatcagtttcattgacaaactggaggttagtgggagcatc

SEQ ID NO: 18447 - DNA, 40 bp, Artificial Sequence
  Description of Artificial Sequence: Synthetic primer
tgttccccctggggactctgtcagaggctccatggaggcc

SEQ ID NO: 18448 - DNA, 40 bp, Artificial Sequence
  Description of Artificial Sequence: Synthetic primer
tttcagcccaaccagcagggcccgtttctaacgagagagg

SEQ ID NO: 18449 - DNA, 40 bp, Artificial Sequence
  Description of Artificial Sequence: Synthetic primer
caggtccaccaaactgctgttgagggccaaggtgcacaca

SEQ ID NO: 18450 - DNA, 40 bp, Artificial Sequence
  Description of Artificial Sequence: Synthetic primer
ctggcagtgatggccgacgtcgtgggagtggttgtgtctg

SEQ ID NO: 18451 - DNA, 40 bp, Artificial Sequence
  Description of Artificial Sequence: Synthetic primer
tgccgatactgcccttctgcactgcaatggcacgagctgc

SEQ ID NO: 18452 - DNA, 40 bp, Artificial Sequence
  Description of Artificial Sequence: Synthetic primer
taactatttggaaccaatctggtgctatacaactcttctg

SEQ ID NO: 18453 - DNA, 40 bp, Artificial Sequence
  Description of Artificial Sequence: Synthetic primer
ccagcagtttctgggtatcggcattatagccaaattcttc

SEQ ID NO: 18454 - DNA, 40 bp, Artificial Sequence
  Description of Artificial Sequence: Synthetic primer
tgtagttgaagcaatttgtgtgcaaagcctacatctaaac

SEQ ID NO: 18455 - DNA, 40 bp, Artificial Sequence
  Description of Artificial Sequence: Synthetic primer
aggcagcgggagcctggcccaggctgtcatcagggaagtc

SEQ ID NO: 18456 - DNA, 40 bp, Artificial Sequence
  Description of Artificial Sequence: Synthetic primer
ccattttttcttgtctttatctaataaactcaatattaag

SEQ ID NO: 18457 - DNA, 40 bp, Artificial Sequence
  Description of Artificial Sequence: Synthetic primer
ggaaaaataactactagaaaaaagtaacaactttggttcc

SEQ ID NO: 18458 - DNA, 40 bp, Artificial Sequence
  Description of Artificial Sequence: Synthetic primer
tggattacatactaaattttcctgtatcatgttttctaag

SEQ ID NO: 18459 - DNA, 40 bp, Artificial Sequence
  Description of Artificial Sequence: Synthetic primer
agcctttacagttactgacacttcttcagggtcctgagtc

SEQ ID NO: 18460 - DNA, 40 bp, Artificial Sequence
  Description of Artificial Sequence: Synthetic primer
ttcctgtgtacctatagagccttcaccaccacccaacagg

SEQ ID NO: 18461 - DNA, 40 bp, Artificial Sequence
  Description of Artificial Sequence: Synthetic primer
tacaaaagctgagtttacttctcctccttctttgttcaag

SEQ ID NO: 18462 - DNA, 40 bp, Artificial Sequence
  Description of Artificial Sequence: Synthetic primer
cagtgtttctgcttgcttgaactttccttgtttcaaatag

SEQ ID NO: 18463 - DNA, 40 bp, Artificial Sequence
  Description of Artificial Sequence: Synthetic primer
gcccaacgagacctcggtccaggccaacggcagcttcgtg

SEQ ID NO: 18464 - DNA, 40 bp, Artificial Sequence
  Description of Artificial Sequence: Synthetic primer
gaagatgttcagcgtagagtcgctggagcgggcggagctg

SEQ ID NO: 18465 - DNA, 40 bp, Artificial Sequence
  Description of Artificial Sequence: Synthetic primer
gaagcagctggctgcggagaacaggctcacggagatggag

SEQ ID NO: 18466 - DNA, 40 bp, Artificial Sequence
  Description of Artificial Sequence: Synthetic primer
gaacaggagagaattcttcttaagatccaagaagaactag

SEQ ID NO: 18467 - DNA, 40 bp, Artificial Sequence
  Description of Artificial Sequence: Synthetic primer
cctccaacctgccccaggtccaacccgtgcgcgaagtgac

SEQ ID NO: 18468 - DNA, 40 bp, Artificial Sequence
  Description of Artificial Sequence: Synthetic primer
ggtctccctgaccccacgctgttcccacgcccagctctcg

SEQ ID NO: 18469 - DNA, 40 bp, Artificial Sequence
  Description of Artificial Sequence: Synthetic primer
aatgcagacatggctggccgggccccttagtgcacactgc

SEQ ID NO: 18470 - DNA, 40 bp, Artificial Sequence
  Description of Artificial Sequence: Synthetic primer
ggctggccgcccctttagttggaggctgagcgggaacacc

SEQ ID NO: 18471 - DNA, 40 bp, Artificial Sequence
  Description of Artificial Sequence: Synthetic primer
tccaatttgggcggctcccccaccttcctcaacggctcag

SEQ ID NO: 18472 - DNA, 40 bp, Artificial Sequence
  Description of Artificial Sequence: Synthetic primer
acggcgagatgggcaagcccaggaacgtggcgctcatcac

SEQ ID NO: 18473 - DNA, 40 bp, Artificial Sequence
  Description of Artificial Sequence: Synthetic primer
aagaaatgctatacatgcattttgaccaagtaaaagaaac

SEQ ID NO: 18474 - DNA, 40 bp, Artificial Sequence
  Description of Artificial Sequence: Synthetic primer
gactacactgctattgtggtgtttgcgctttcggactctc

SEQ ID NO: 18475 - DNA, 40 bp, Artificial Sequence
  Description of Artificial Sequence: Synthetic primer
ggggtgagtgcggggaacgtgggaggcgccgtggagaagg

SEQ ID NO: 18476 - DNA, 40 bp, Artificial Sequence
  Description of Artificial Sequence: Synthetic primer
tctgatgccttcttccctttccgagataacgtagacagag

SEQ ID NO: 18477 - DNA, 40 bp, Artificial Sequence
  Description of Artificial Sequence: Synthetic primer
agacctggggtttaagacagtttttggaacacctagtaag

SEQ ID NO: 18478 - DNA, 40 bp, Artificial Sequence
  Description of Artificial Sequence: Synthetic primer
aagattttgctgtcaaagttgtgtcagtgaatacaaacag

SEQ ID NO: 18479 - DNA, 40 bp, Artificial Sequence
  Description of Artificial Sequence: Synthetic primer
ccttgcccacggaacccaggccgctcgacagcaaacttcc

SEQ ID NO: 18480 - DNA, 40 bp, Artificial Sequence
  Description of Artificial Sequence: Synthetic primer
agtcccgcctgtgacatgcattcctccagaagctgatttc

SEQ ID NO: 18481 - DNA, 40 bp, Artificial Sequence
  Description of Artificial Sequence: Synthetic primer
tcctgatctgactggcttatgtgaaccaactccccaagac

SEQ ID NO: 18482 - DNA, 40 bp, Artificial Sequence
  Description of Artificial Sequence: Synthetic primer
ttcttcaatttgtatcattcacttccaccactactatctc

SEQ ID NO: 18483 - DNA, 40 bp, Artificial Sequence
  Description of Artificial Sequence: Synthetic primer
gctcaacacctgctgctgtggggcacctcagtggggacac

SEQ ID NO: 18484 - DNA, 40 bp, Artificial Sequence
  Description of Artificial Sequence: Synthetic primer
gtggccaggtataccaggttccggtgcaggatctgctggt

SEQ ID NO: 18485 - DNA, 40 bp, Artificial Sequence
  Description of Artificial Sequence: Synthetic primer
ggccgttgctggggagtacgccctggtcataaatggtcac

SEQ ID NO: 18486 - DNA, 40 bp, Artificial Sequence
  Description of Artificial Sequence: Synthetic primer
tctttcaatcaaagtaattaaggtattacatctcctctgg

SEQ ID NO: 18487 - DNA, 40 bp, Artificial Sequence
  Description of Artificial Sequence: Synthetic primer
acaggtctgcaaatgaagggctcagcttttcggtgacatc

SEQ ID NO: 18488 - DNA, 40 bp, Artificial Sequence
  Description of Artificial Sequence: Synthetic primer
agttggtggattggacttcaagaagaaagagccaatgatg

SEQ ID NO: 18489 - DNA, 40 bp, Artificial Sequence
  Description of Artificial Sequence: Synthetic primer
ccacttgagaaagctgtgcagtccagactcacgggagagg

SEQ ID NO: 18490 - DNA, 40 bp, Artificial Sequence
  Description of Artificial Sequence: Synthetic primer
agctccaggaggaattgccacagctggatctgcccgcttc

SEQ ID NO: 18491 - DNA, 40 bp, Artificial Sequence
  Description of Artificial Sequence: Synthetic primer
gcacttctgccaccctctgtttgtgaacattgtcaagacc

SEQ ID NO: 18492 - DNA, 40 bp, Artificial Sequence
  Description of Artificial Sequence: Synthetic primer
tcctgtttgctacagttggtataaaaaggcatgaaatatg

SEQ ID NO: 18493 - DNA, 40 bp, Artificial Sequence
  Description of Artificial Sequence: Synthetic primer
atacctggacttggtaccaagctcacagatttgagtttgc

SEQ ID NO: 18494 - DNA, 40 bp, Artificial Sequence
  Description of Artificial Sequence: Synthetic primer
ctcttgtccatggtgaaactaattcatgcagatccaaagc

SEQ ID NO: 18495 - DNA, 40 bp, Artificial Sequence
  Description of Artificial Sequence: Synthetic primer
gctggtgttgacattaatggaaactgaggcgcccttgggg

SEQ ID NO: 18496 - DNA, 40 bp, Artificial Sequence
  Description of Artificial Sequence: Synthetic primer
gtttgtctgcacagcagccaccctgcctggcaacagagac

SEQ ID NO: 18497 - DNA, 40 bp, Artificial Sequence
  Description of Artificial Sequence: Synthetic primer
caggcacgggcttctcttcactctgccccaggctgcctgg

SEQ ID NO: 18498 - DNA, 40 bp, Artificial Sequence
  Description of Artificial Sequence: Synthetic primer
aagtaaaaaagtatgcttgttaattttattcaagaatgcc

SEQ ID NO: 18499 - DNA, 40 bp, Artificial Sequence
  Description of Artificial Sequence: Synthetic primer
tccctggccaacaagacctccgactggcttggctacatgc

SEQ ID NO: 18500 - DNA, 40 bp, Artificial Sequence
  Description of Artificial Sequence: Synthetic primer
gggagcgctggtggcagagcttacactcaaagggcttctc

SEQ ID NO: 18501 - DNA, 40 bp, Artificial Sequence
  Description of Artificial Sequence: Synthetic primer
aggatcaataaatatgttgtcttttcgattacttccacac

SEQ ID NO: 18502 - DNA, 40 bp, Artificial Sequence
  Description of Artificial Sequence: Synthetic primer
aaaagctaactttcaacaaccccacagaggactttaggag

SEQ ID NO: 18503 - DNA, 40 bp, Artificial Sequence
  Description of Artificial Sequence: Synthetic primer
ctgtagagaaagcaactgctacgatcctgagcgagtcaag

SEQ ID NO: 18504 - DNA, 40 bp, Artificial Sequence
  Description of Artificial Sequence: Synthetic primer
agattagctgaagatctctgaaacgctgaattttctgcac

SEQ ID NO: 18505 - DNA, 40 bp, Artificial Sequence
  Description of Artificial Sequence: Synthetic primer
ggggcaggaccaagtgttgctgctgtcagggaaatcatgg

SEQ ID NO: 18506 - DNA, 40 bp, Artificial Sequence
  Description of Artificial Sequence: Synthetic primer
cagagcttccacggtgctggcaaagtcctgcagcttcttc

SEQ ID NO: 18507 - DNA, 40 bp, Artificial Sequence
  Description of Artificial Sequence: Synthetic primer
tcactcaatggggattcttaccaaggggcccaggttggag

SEQ ID NO: 18508 - DNA, 40 bp, Artificial Sequence
  Description of Artificial Sequence: Synthetic primer
cccatcacgctccagctctccaaatcggagccggcatttc

SEQ ID NO: 18509 - DNA, 40 bp, Artificial Sequence
  Description of Artificial Sequence: Synthetic primer
catctgctacggtcactggggagcccccttcatattccag

SEQ ID NO: 18510 - DNA, 40 bp, Artificial Sequence
  Description of Artificial Sequence: Synthetic primer
agagaaaagcagctgtcccagacacagtcacagcagcaag

SEQ ID NO: 18511 - DNA, 40 bp, Artificial Sequence
  Description of Artificial Sequence: Synthetic primer
ggcaaatgggagccaaggcacctcgggcagcgccaacgac

SEQ ID NO: 18512 - DNA, 40 bp, Artificial Sequence
  Description of Artificial Sequence: Synthetic primer
tggtaattgttcatgaagatgtgccgcatggtttctgctt

SEQ ID NO: 18513 - DNA, 40 bp, Artificial Sequence
  Description of Artificial Sequence: Synthetic primer
caagcttcctcccacacccctctctccaactaagatgcac

SEQ ID NO: 18514 - DNA, 40 bp, Artificial Sequence
  Description of Artificial Sequence: Synthetic primer
ctagcaccaatgaacaatcccatctgaccaccaatatcac

SEQ ID NO: 18515 - DNA, 40 bp, Artificial Sequence
  Description of Artificial Sequence: Synthetic primer
catattggtcaatttcataatcttcacttgaattggtagc

SEQ ID NO: 18516 - DNA, 40 bp, Artificial Sequence
  Description of Artificial Sequence: Synthetic primer
ccaagctcgggcaggatgttgtcccgcagggcatcgctga

SEQ ID NO: 18517 - DNA, 40 bp, Artificial Sequence
  Description of Artificial Sequence: Synthetic primer
attggaagctgccagatgcaggggtgtgttgccccagatg

SEQ ID NO: 18518 - DNA, 40 bp, Artificial Sequence
  Description of Artificial Sequence: Synthetic primer
acaacaaggccattttctcaaacgagagtcagcctttaac

SEQ ID NO: 18519 - DNA, 40 bp, Artificial Sequence
  Description of Artificial Sequence: Synthetic primer
cagcctggccagccgccgcagcagcctcagctcccactcg

SEQ ID NO: 18520 - DNA, 40 bp, Artificial Sequence
  Description of Artificial Sequence: Synthetic primer
ctcctccttggccatcatctcctcctcctgccggctcacc

SEQ ID NO: 18521 - DNA, 40 bp, Artificial Sequence
  Description of Artificial Sequence: Synthetic primer
gactggggtcgaaactggaggagaggctgttgaaccagtg

SEQ ID NO: 18522 - DNA, 40 bp, Artificial Sequence
  Description of Artificial Sequence: Synthetic primer
tggttccaacggtttgcctttgtgggggctcctgctgtgc

SEQ ID NO: 18523 - DNA, 40 bp, Artificial Sequence
  Description of Artificial Sequence: Synthetic primer
gacccctgctgaagggcctcccactcctgcctcgcactcc

SEQ ID NO: 18524 - DNA, 40 bp, Artificial Sequence
  Description of Artificial Sequence: Synthetic primer
gtcttcaatagtccaggaaatttcattgttcttcagatcc

SEQ ID NO: 18525 - DNA, 40 bp, Artificial Sequence
  Description of Artificial Sequence: Synthetic primer
gaaacatctcactagagtttgcacaagttccttcttcttc

SEQ ID NO: 18526 - DNA, 40 bp, Artificial Sequence
  Description of Artificial Sequence: Synthetic primer
atgtgcaatatttcttactgtgccgagaagccgcaatgag

SEQ ID NO: 18527 - DNA, 40 bp, Artificial Sequence
  Description of Artificial Sequence: Synthetic primer
atccagagtcctctgtctagtatctgtgatggctccatag

SEQ ID NO: 18528 - DNA, 40 bp, Artificial Sequence
  Description of Artificial Sequence: Synthetic primer
aaacgacctccagtcccccacggagcacatctcggattac

SEQ ID NO: 18529 - DNA, 40 bp, Artificial Sequence
  Description of Artificial Sequence: Synthetic primer
ttgcacttggtacaaaagtctttgctaaagcaagaatcac

SEQ ID NO: 18530 - DNA, 40 bp, Artificial Sequence
  Description of Artificial Sequence: Synthetic primer
ataactactttgatattttaactcaggtactccagtcttc

SEQ ID NO: 18531 - DNA, 40 bp, Artificial Sequence
  Description of Artificial Sequence: Synthetic primer
ccatacggcctggtgtccattgacacagtgactgtgctag

SEQ ID NO: 18532 - DNA, 40 bp, Artificial Sequence
  Description of Artificial Sequence: Synthetic primer
cttggagccccctatcactccaggccggatgctgccagtc

SEQ ID NO: 18533 - DNA, 40 bp, Artificial Sequence
  Description of Artificial Sequence: Synthetic primer
tccaggtgtaactgttgaggaggctgtggagcaaattgac

SEQ ID NO: 18534 - DNA, 40 bp, Artificial Sequence
  Description of Artificial Sequence: Synthetic primer
accctagctcccacagtcccacagagcccgagccctcgac

SEQ ID NO: 18535 - DNA, 40 bp, Artificial Sequence
  Description of Artificial Sequence: Synthetic primer
aggcctgcgaccctgggggcacaggaggcaggcatggccc

SEQ ID NO: 18536 - DNA, 40 bp, Artificial Sequence
  Description of Artificial Sequence: Synthetic primer
acatcttggggaacaagtggtcaaccaagtccttcctatg

SEQ ID NO: 18537 - DNA, 40 bp, Artificial Sequence
  Description of Artificial Sequence: Synthetic primer
ggcaagcctttagtactatttccataattggtatttattt

SEQ ID NO: 18538 - DNA, 40 bp, Artificial Sequence
  Description of Artificial Sequence: Synthetic primer
agagaaaaacaatcctgtggaagaatgggattctgaaatg

SEQ ID NO: 18539 - DNA, 40 bp, Artificial Sequence
  Description of Artificial Sequence: Synthetic primer
gttcgcggatctggtacttggtatagggacagcgcttttt

SEQ ID NO: 18540 - DNA, 40 bp, Artificial Sequence
  Description of Artificial Sequence: Synthetic primer
caagagtaacaaggtggccggaaactgcatagtaggtgag

SEQ ID NO: 18541 - DNA, 40 bp, Artificial Sequence
  Description of Artificial Sequence: Synthetic primer
ttcgaaaagacatctttttgggagaagggcagtggaatgt

SEQ ID NO: 18542 - DNA, 40 bp, Artificial Sequence
  Description of Artificial Sequence: Synthetic primer
taacacaaaattaatagcaatgaaaactgagaaggaggag

SEQ ID NO: 18543 - DNA, 40 bp, Artificial Sequence
  Description of Artificial Sequence: Synthetic primer
tgccatcatgtccaggaacccagggaagtccagggctttg

SEQ ID NO: 18544 - DNA, 40 bp, Artificial Sequence
  Description of Artificial Sequence: Synthetic primer
gcgagcgggcgctgcaggggccaggggtcgcccgcagggg

SEQ ID NO: 18545 - DNA, 40 bp, Artificial Sequence
  Description of Artificial Sequence: Synthetic primer
ttcattatagctatggtttgttctacaaattgagtattgg

SEQ ID NO: 18546 - DNA, 40 bp, Artificial Sequence
  Description of Artificial Sequence: Synthetic primer
gtcgtggaggctttcaagggagaggtggagaccccaaaag

SEQ ID NO: 18547 - DNA, 40 bp, Artificial Sequence
  Description of Artificial Sequence: Synthetic primer
tcagcaccatggacagttggctcaacctggagctctcaac

SEQ ID NO: 18548 - DNA, 40 bp, Artificial Sequence
  Description of Artificial Sequence: Synthetic primer
gtaacaggaaccctgcaggaggacggcaagagctgcagag

SEQ ID NO: 18549 - DNA, 40 bp, Artificial Sequence
  Description of Artificial Sequence: Synthetic primer
ggctgtgctgcagctccaggactgcagcatcttcatcaag

SEQ ID NO: 18550 - DNA, 40 bp, Artificial Sequence
  Description of Artificial Sequence: Synthetic primer
atgcaatgcaacttcttatagtcatctgaacaagttttgc

SEQ ID NO: 18551 - DNA, 40 bp, Artificial Sequence
  Description of Artificial Sequence: Synthetic primer
cagaacaagctcttacaaggccatggaggcagcctcctcg

SEQ ID NO: 18552 - DNA, 40 bp, Artificial Sequence
  Description of Artificial Sequence: Synthetic primer
agcagcccccgcatcgtagcaaacgcgctccgcgcctcag

SEQ ID NO: 18553 - DNA, 40 bp, Artificial Sequence
  Description of Artificial Sequence: Synthetic primer
gagagcagccaagacagtgacaatccctgcggggcagagc

SEQ ID NO: 18554 - DNA, 40 bp, Artificial Sequence
  Description of Artificial Sequence: Synthetic primer
tgaataaaaccattgaagatacattaatgactgtgaaaca

SEQ ID NO: 18555 - DNA, 40 bp, Artificial Sequence
  Description of Artificial Sequence: Synthetic primer
acggcgccagctacctgggagggccccccgggggccgtcc

SEQ ID NO: 18556 - DNA, 40 bp, Artificial Sequence
  Description of Artificial Sequence: Synthetic primer
gggcaaggttataatttcaccatatgcatatattccactc

SEQ ID NO: 18557 - DNA, 40 bp, Artificial Sequence
  Description of Artificial Sequence: Synthetic primer
cttgttatttctatggcttcatgacagtgatctaatgctg

SEQ ID NO: 18558 - DNA, 40 bp, Artificial Sequence
  Description of Artificial Sequence: Synthetic primer
gcattggattctatgcacgagtcaatagtcaatactgaag

SEQ ID NO: 18559 - DNA, 40 bp, Artificial Sequence
  Description of Artificial Sequence: Synthetic primer
atcccctggaatcctctcatagatacttatgttcccagtg

SEQ ID NO: 18560 - DNA, 40 bp, Artificial Sequence
  Description of Artificial Sequence: Synthetic primer
actgccaaccttaacctttctaattccatgacctcacttg

SEQ ID NO: 18561 - DNA, 40 bp, Artificial Sequence
  Description of Artificial Sequence: Synthetic primer
ggactgacctgggcttgggggaagggacgtcagcaaggtg

SEQ ID NO: 18562 - DNA, 40 bp, Artificial Sequence
  Description of Artificial Sequence: Synthetic primer
cagcgacttgagttcctgccagagacagcaggcagcctgg

SEQ ID NO: 18563 - DNA, 40 bp, Artificial Sequence
  Description of Artificial Sequence: Synthetic primer
gtgaaggggaccttctctttggggaccgggatcttgaacg

SEQ ID NO: 18564 - DNA, 40 bp, Artificial Sequence
  Description of Artificial Sequence: Synthetic primer
gaagtgcggggtggtcattaagtccatgcaggccgtggag

SEQ ID NO: 18565 - DNA, 40 bp, Artificial Sequence
  Description of Artificial Sequence: Synthetic primer
tattttttgggggggcaaaactttttgggggtgatttttt

SEQ ID NO: 18566 - DNA, 40 bp, Artificial Sequence
  Description of Artificial Sequence: Synthetic primer
attgatgaagacccctcccagctgattgacccggccttgg

SEQ ID NO: 18567 - DNA, 40 bp, Artificial Sequence
  Description of Artificial Sequence: Synthetic primer
taggtggttcagttcatcatttctggagtaagcactggtc

SEQ ID NO: 18568 - DNA, 40 bp, Artificial Sequence
  Description of Artificial Sequence: Synthetic primer
ctttggcccagaggaaatgaagtacagctctcgggcattg

SEQ ID NO: 18569 - DNA, 40 bp, Artificial Sequence
  Description of Artificial Sequence: Synthetic primer
caaaaacacttgaaatatcattactttactttagtgttcc

SEQ ID NO: 18570 - DNA, 40 bp, Artificial Sequence
  Description of Artificial Sequence: Synthetic primer
caggaaatcatgactgagaaagatatggaattatttcgtg

SEQ ID NO: 18571 - DNA, 40 bp, Artificial Sequence
  Description of Artificial Sequence: Synthetic primer
atcccggctgctgcagggtgcatgtcatcatcatcattgg

SEQ ID NO: 18572 - DNA, 40 bp, Artificial Sequence
  Description of Artificial Sequence: Synthetic primer
aagtacactcagtctaactctgtgtgctacgccaagaacg

SEQ ID NO: 18573 - DNA, 40 bp, Artificial Sequence
  Description of Artificial Sequence: Synthetic primer
gagatgctggttttctacccaacggccctgcagccagctc

SEQ ID NO: 18574 - DNA, 40 bp, Artificial Sequence
  Description of Artificial Sequence: Synthetic primer
gatagctgcttttatgtgtattttatattgcatgcttttg

SEQ ID NO: 18575 - DNA, 40 bp, Artificial Sequence
  Description of Artificial Sequence: Synthetic primer
cgcagcaccactggcttcttcactttacaagtcagcatac

SEQ ID NO: 18576 - DNA, 40 bp, Artificial Sequence
  Description of Artificial Sequence: Synthetic primer
cttccttttgaattaactggcttcttggctggatgttttc

SEQ ID NO: 18577 - DNA, 40 bp, Artificial Sequence
  Description of Artificial Sequence: Synthetic primer
ggccccacctgaacgtggtcaacctgttgggggcctgcac

SEQ ID NO: 18578 - DNA, 40 bp, Artificial Sequence
  Description of Artificial Sequence: Synthetic primer
ataatacttgaccagcttatctaaaatgtacataattttg

SEQ ID NO: 18579 - DNA, 40 bp, Artificial Sequence
  Description of Artificial Sequence: Synthetic primer
tgtgggtccctgctctggggactcttgcggcagggtttgc

SEQ ID NO: 18580 - DNA, 40 bp, Artificial Sequence
  Description of Artificial Sequence: Synthetic primer
gctaggcggtcaatgcgctgctgcatcatggctatctgtg

SEQ ID NO: 18581 - DNA, 40 bp, Artificial Sequence
  Description of Artificial Sequence: Synthetic primer
tttcaagacctgcattaccagattttgctgacattgatcc

SEQ ID NO: 18582 - DNA, 40 bp, Artificial Sequence
  Description of Artificial Sequence: Synthetic primer
acatctgaagcaggggacaaagcttccaggcatgactcag

SEQ ID NO: 18583 - DNA, 40 bp, Artificial Sequence
  Description of Artificial Sequence: Synthetic primer
ctgggcatcgctcagcctggcagcgacaagaggaaaatgg

SEQ ID NO: 18584 - DNA, 40 bp, Artificial Sequence
  Description of Artificial Sequence: Synthetic primer
ctggagttctcgtttcaagctctccacttcaaccttcagc

SEQ ID NO: 18585 - DNA, 40 bp, Artificial Sequence
  Description of Artificial Sequence: Synthetic primer
ttggaatgcagaatacttggaacttgtacatggggaaaaa

SEQ ID NO: 18586 - DNA, 40 bp, Artificial Sequence
  Description of Artificial Sequence: Synthetic primer
tgcagtcctaaggactttaataaatattttttgacttttg

SEQ ID NO: 18587 - DNA, 40 bp, Artificial Sequence
  Description of Artificial Sequence: Synthetic primer
tctccaggtccttcttgcctcccctcctgtcttttatttc

SEQ ID NO: 18588 - DNA, 40 bp, Artificial Sequence
  Description of Artificial Sequence: Synthetic primer
tgacatgatggggcgcatgtcctatgagccaaataaggat

SEQ ID NO: 18589 - DNA, 40 bp, Artificial Sequence
  Description of Artificial Sequence: Synthetic primer
atgtgcaatcttaaaagaaactgtgaagcaaattcgtcag

SEQ ID NO: 18590 - DNA, 40 bp, Artificial Sequence
  Description of Artificial Sequence: Synthetic primer
caatgcaaaatttaagtacggtcgttgcccatggtgatta

SEQ ID NO: 18591 - DNA, 40 bp, Artificial Sequence
  Description of Artificial Sequence: Synthetic primer
cgcgccggtagctgctcacctcgggctgcaggggaaccac

SEQ ID NO: 18592 - DNA, 40 bp, Artificial Sequence
  Description of Artificial Sequence: Synthetic primer
gaagctcgatcaaatgcccgcctaaagcagctctcatttg

SEQ ID NO: 18593 - DNA, 40 bp, Artificial Sequence
  Description of Artificial Sequence: Synthetic primer
ttgagcaagggtctgctctttttgtacctccagttctaag

SEQ ID NO: 18594 - DNA, 40 bp, Artificial Sequence
  Description of Artificial Sequence: Synthetic primer
taagagagaacccagcttggttcttttttgctccaagtgc

SEQ ID NO: 18595 - DNA, 40 bp, Artificial Sequence
  Description of Artificial Sequence: Synthetic primer
gaatgtctgtgttggtgatattatcaagctagaaaataac

SEQ ID NO: 18596 - DNA, 40 bp, Artificial Sequence
  Description of Artificial Sequence: Synthetic primer
aggaaacaagaggggagcggccaagtgccccgaccaggag

SEQ ID NO: 18597 - DNA, 40 bp, Artificial Sequence
  Description of Artificial Sequence: Synthetic primer
caaatcccaagcatgaggggacgggctaggcgtcgcagtg

SEQ ID NO: 18598 - DNA, 40 bp, Artificial Sequence
  Description of Artificial Sequence: Synthetic primer
tcttctaaacttttcagaaaaattgcatcatgttcagaag

SEQ ID NO: 18599 - DNA, 40 bp, Artificial Sequence
  Description of Artificial Sequence: Synthetic primer
ctcttttctgttttagctcttctctcacatattctagttc

SEQ ID NO: 18600 - DNA, 40 bp, Artificial Sequence
  Description of Artificial Sequence: Synthetic primer
tcagctcccaatgtgcatataaacacaatagaacctgtca

SEQ ID NO: 18601 - DNA, 40 bp, Artificial Sequence
  Description of Artificial Sequence: Synthetic primer
gtgttgcagctctccatgcttgaccacagcgtttacagag

SEQ ID NO: 18602 - DNA, 40 bp, Artificial Sequence
  Description of Artificial Sequence: Synthetic primer
cagccggagcctgggtatgggtatgcccccaaccagggac

SEQ ID NO: 18603 - DNA, 40 bp, Artificial Sequence
  Description of Artificial Sequence: Synthetic primer
tcctagaacataggagccggctgcctggcctcctttctcc

SEQ ID NO: 18604 - DNA, 40 bp, Artificial Sequence
  Description of Artificial Sequence: Synthetic primer
cagtcagctgctcccgaatcccctgcccagtctccgcttc

SEQ ID NO: 18605 - DNA, 40 bp, Artificial Sequence
  Description of Artificial Sequence: Synthetic primer
tgcgtcttcacctccgctggggagtccggcatcgctgagg

SEQ ID NO: 18606 - DNA, 40 bp, Artificial Sequence
  Description of Artificial Sequence: Synthetic primer
agcgaaggccgccgaacctgcctggctagccggcgacttg

SEQ ID NO: 18607 - DNA, 40 bp, Artificial Sequence
  Description of Artificial Sequence: Synthetic primer
tgtagggtagccctgggggccacagctgcttggcagagtc

SEQ ID NO: 18608 - DNA, 40 bp, Artificial Sequence
  Description of Artificial Sequence: Synthetic primer
gtgtgtagaaatggaaccacttgctgaatatgtagttagg

SEQ ID NO: 18609 - DNA, 40 bp, Artificial Sequence
  Description of Artificial Sequence: Synthetic primer
accctggagggcgagttctcggtcaccatgtggtcctcag

SEQ ID NO: 18610 - DNA, 40 bp, Artificial Sequence
  Description of Artificial Sequence: Synthetic primer
atggcatctttactaaaagaccttgcagaaataggaattg

SEQ ID NO: 18611 - DNA, 40 bp, Artificial Sequence
  Description of Artificial Sequence: Synthetic primer
ggcaacagttcaagtattaagatttatgttccttaatttc

SEQ ID NO: 18612 - DNA, 40 bp, Artificial Sequence
  Description of Artificial Sequence: Synthetic primer
tacatctgagaacaatgaactgtggaagaaggtggagacc

SEQ ID NO: 18613 - DNA, 40 bp, Artificial Sequence
  Description of Artificial Sequence: Synthetic primer
aagatccaggagagtgaagaaactgttgagccaaaagaag

SEQ ID NO: 18614 - DNA, 40 bp, Artificial Sequence
  Description of Artificial Sequence: Synthetic primer
ctggagaacccgctgaagctcccccttcaccacgaagacg

SEQ ID NO: 18615 - DNA, 40 bp, Artificial Sequence
  Description of Artificial Sequence: Synthetic primer
ttcaattgtctcataattgagagcttcaaaaaatatatcc

SEQ ID NO: 18616 - DNA, 40 bp, Artificial Sequence
  Description of Artificial Sequence: Synthetic primer
tgagccggcgccgcagccgctcccctttagacaaagatac

SEQ ID NO: 18617 - DNA, 40 bp, Artificial Sequence
  Description of Artificial Sequence: Synthetic primer
ttccatgtaaaataatcaggagaaggagaaggcatgtttg

SEQ ID NO: 18618 - DNA, 40 bp, Artificial Sequence
  Description of Artificial Sequence: Synthetic primer
ctcgtcatgctaaaagaaatggacaaagatcttaactcag

SEQ ID NO: 18619 - DNA, 40 bp, Artificial Sequence
  Description of Artificial Sequence: Synthetic primer
ccctgagaaagcgcgacgtcccatttccgggcccaaccag

SEQ ID NO: 18620 - DNA, 40 bp, Artificial Sequence
  Description of Artificial Sequence: Synthetic primer
gaaacaacaggttaagtgctttggaattaagagttaaagg

SEQ ID NO: 18621 - DNA, 40 bp, Artificial Sequence
  Description of Artificial Sequence: Synthetic primer
ggtagtatcctgccttccctcccctgaccccacatggtct

SEQ ID NO: 18622 - DNA, 40 bp, Artificial Sequence
  Description of Artificial Sequence: Synthetic primer
ccccctgttccgaagggatacggctgggctggttgataag

SEQ ID NO: 18623 - DNA, 40 bp, Artificial Sequence
  Description of Artificial Sequence: Synthetic primer
atgattgcactggttttgaagtcagttgcttaatgatgag

SEQ ID NO: 18624 - DNA, 40 bp, Artificial Sequence
  Description of Artificial Sequence: Synthetic primer
ccgcgagtttccgcagggaggcggcggcagctgcggcggg

SEQ ID NO: 18625 - DNA, 40 bp, Artificial Sequence
  Description of Artificial Sequence: Synthetic primer
tgatgcagactcagcaccacgcgcagcaggttggctacac

SEQ ID NO: 18626 - DNA, 40 bp, Artificial Sequence
  Description of Artificial Sequence: Synthetic primer
gtaggtggttctccatgactgcaaataataataataatga

SEQ ID NO: 18627 - DNA, 40 bp, Artificial Sequence
  Description of Artificial Sequence: Synthetic primer
agccttttaatgtgggcagtggaggggcctctgtttcagg

SEQ ID NO: 18628 - DNA, 40 bp, Artificial Sequence
  Description of Artificial Sequence: Synthetic primer
ggcgaacggcaaagagggagccgctcccgctcggggggcc

SEQ ID NO: 18629 - DNA, 40 bp, Artificial Sequence
  Description of Artificial Sequence: Synthetic primer
gtagacatttttatttatataccttgggagctttattacc

SEQ ID NO: 18630 - DNA, 40 bp, Artificial Sequence
  Description of Artificial Sequence: Synthetic primer
gcttttcccaagactacaaaaacttcttgaaagtgactac

SEQ ID NO: 18631 - DNA, 40 bp, Artificial Sequence
  Description of Artificial Sequence: Synthetic primer
acacgccaatgtcaagatcttctccgagaagctgttgttg

SEQ ID NO: 18632 - DNA, 40 bp, Artificial Sequence
  Description of Artificial Sequence: Synthetic primer
ctcatctaatagatcaccttaaagaacaagagaagtcata

SEQ ID NO: 18633 - DNA, 40 bp, Artificial Sequence
  Description of Artificial Sequence: Synthetic primer
agccaccacctgtctccccgcgcccacgtcccaccctgac

SEQ ID NO: 18634 - DNA, 40 bp, Artificial Sequence
  Description of Artificial Sequence: Synthetic primer
ttaccactgtccaacttcgaagggtctgtcaggctctcat

SEQ ID NO: 18635 - DNA, 40 bp, Artificial Sequence
  Description of Artificial Sequence: Synthetic primer
taactttcagcttgaatttccagaggcagaacaggaaatg

SEQ ID NO: 18636 - DNA, 40 bp, Artificial Sequence
  Description of Artificial Sequence: Synthetic primer
tggagatgaaacacaaaacaccacttcttaccacccgtag

SEQ ID NO: 18637 - DNA, 40 bp, Artificial Sequence
  Description of Artificial Sequence: Synthetic primer
aacaaattcatcaaggagctcatcaaggacgggaagtcac

SEQ ID NO: 18638 - DNA, 40 bp, Artificial Sequence
  Description of Artificial Sequence: Synthetic primer
agtgcacaggtgagctcaatggtttccagtcttggtttgg

SEQ ID NO: 18639 - DNA, 40 bp, Artificial Sequence
  Description of Artificial Sequence: Synthetic primer
ccacgtgattgggaagagaaagggggcttgctctacttgg

SEQ ID NO: 18640 - DNA, 40 bp, Artificial Sequence
  Description of Artificial Sequence: Synthetic primer
ttgatttgggtgctgtattctgcaggatcttgtcctctcc

SEQ ID NO: 18641 - DNA, 40 bp, Artificial Sequence
  Description of Artificial Sequence: Synthetic primer
tcctctgcctgacattgaccctgtccctgaggaggaggac

SEQ ID NO: 18642 - DNA, 40 bp, Artificial Sequence
  Description of Artificial Sequence: Synthetic primer
ggagttccactcttagaggtagatttggattcttttgaag

SEQ ID NO: 18643 - DNA, 40 bp, Artificial Sequence
  Description of Artificial Sequence: Synthetic primer
agttgatgaaattacctatgattccttcttcgtcagcttc

SEQ ID NO: 18644 - DNA, 40 bp, Artificial Sequence
  Description of Artificial Sequence: Synthetic primer
ctggaggctcattctccgcattgcctggggtgggggcatc

SEQ ID NO: 18645 - DNA, 40 bp, Artificial Sequence
  Description of Artificial Sequence: Synthetic primer
atccacttgggtcaagtatttccttcttaattcatttttc

SEQ ID NO: 18646 - DNA, 40 bp, Artificial Sequence
  Description of Artificial Sequence: Synthetic primer
agaaatacttggggagagccccagtgcctggacccctttg

SEQ ID NO: 18647 - DNA, 40 bp, Artificial Sequence
  Description of Artificial Sequence: Synthetic primer
gaaggaaagaaacacagaccaggcgtccatgccagataac

SEQ ID NO: 18648 - DNA, 40 bp, Artificial Sequence
  Description of Artificial Sequence: Synthetic primer
ttttgtaatactgcaataaaggctgcttgtttttgtggac

SEQ ID NO: 18649 - DNA, 40 bp, Artificial Sequence
  Description of Artificial Sequence: Synthetic primer
acccaggttcagctgacaacaaacaaagctgcagtaaaac

SEQ ID NO: 18650 - DNA, 40 bp, Artificial Sequence
  Description of Artificial Sequence: Synthetic primer
gctggctcagggtactgggggccatctgctgctggtgttg

SEQ ID NO: 18651 - DNA, 40 bp, Artificial Sequence
  Description of Artificial Sequence: Synthetic primer
tctgctgcaaagatgcattcacctcatgctgctcttggag

SEQ ID NO: 18652 - DNA, 40 bp, Artificial Sequence
  Description of Artificial Sequence: Synthetic primer
gttaccttggggtgaagtggagaaggtcccaggtgaattg

SEQ ID NO: 18653 - DNA, 40 bp, Artificial Sequence
  Description of Artificial Sequence: Synthetic primer
cttccaatcaccagctcctgccaaattatgcattagtaac

SEQ ID NO: 18654 - DNA, 40 bp, Artificial Sequence
  Description of Artificial Sequence: Synthetic primer
agcatcactgagaatgctgccatggatgctagagggctac

SEQ ID NO: 18655 - DNA, 40 bp, Artificial Sequence
  Description of Artificial Sequence: Synthetic primer
tatcccttgtccattgcctgcagccaacattccaggattc

SEQ ID NO: 18656 - DNA, 40 bp, Artificial Sequence
  Description of Artificial Sequence: Synthetic primer
ttcatcttttaaagaaataaccactgcaagtccttttgta

SEQ ID NO: 18657 - DNA, 40 bp, Artificial Sequence
  Description of Artificial Sequence: Synthetic primer
acagaagcaacaaagttgcagttactaggaagaaggaatg

SEQ ID NO: 18658 - DNA, 40 bp, Artificial Sequence
  Description of Artificial Sequence: Synthetic primer
tatcattttggttccaccactcctggcactaacatcaagc

SEQ ID NO: 18659 - DNA, 40 bp, Artificial Sequence
  Description of Artificial Sequence: Synthetic primer
gtaagggagaaaataaaatcctcaaagcactaaggacagg

SEQ ID NO: 18660 - DNA, 40 bp, Artificial Sequence
  Description of Artificial Sequence: Synthetic primer
ttagatgaaacatcagttggtgaagcagaggacgcaaatg

SEQ ID NO: 18661 - DNA, 40 bp, Artificial Sequence
  Description of Artificial Sequence: Synthetic primer
tgtgttgtacactttttattggtatggataacctttatta

SEQ ID NO: 18662 - DNA, 40 bp, Artificial Sequence
  Description of Artificial Sequence: Synthetic primer
ccttggggtcatatgcttctgtggacagctgtgctattcc

SEQ ID NO: 18663 - DNA, 40 bp, Artificial Sequence
  Description of Artificial Sequence: Synthetic primer
aggagactcaaggggaaggcacctccagcgccggggactc

SEQ ID NO: 18664 - DNA, 40 bp, Artificial Sequence
  Description of Artificial Sequence: Synthetic primer
cagcctttctagatgaccctgaagagaacagtctgcaacg

SEQ ID NO: 18665 - DNA, 40 bp, Artificial Sequence
  Description of Artificial Sequence: Synthetic primer
tagtccccaaacagaagctacatattggaatgggatcagc

SEQ ID NO: 18666 - DNA, 40 bp, Artificial Sequence
  Description of Artificial Sequence: Synthetic primer
caacaactttttagtcttccgtgtgtcatcagccaagctc

SEQ ID NO: 18667 - DNA, 40 bp, Artificial Sequence
  Description of Artificial Sequence: Synthetic primer
atcctgcaatggaaaagttagaacttgttagaaaatggag

SEQ ID NO: 18668 - DNA, 40 bp, Artificial Sequence
  Description of Artificial Sequence: Synthetic primer
cctccttctcgggggtcaggcggggcggggagaatcagtg

SEQ ID NO: 18669 - DNA, 40 bp, Artificial Sequence
  Description of Artificial Sequence: Synthetic primer
attctgcattaattttttccaattctgctacccgttgctg

SEQ ID NO: 18670 - DNA, 40 bp, Artificial Sequence
  Description of Artificial Sequence: Synthetic primer
tctgcacatgataataatgcaacagtcccccattgctgag

SEQ ID NO: 18671 - DNA, 40 bp, Artificial Sequence
  Description of Artificial Sequence: Synthetic primer
ttgcaggtctctgtacgggccagtttctctgccttcttcc

SEQ ID NO: 18672 - DNA, 40 bp, Artificial Sequence
  Description of Artificial Sequence: Synthetic primer
ctggactgcggtcaggagaaggagcgcagtgacgttttcg

SEQ ID NO: 18673 - DNA, 40 bp, Artificial Sequence
  Description of Artificial Sequence: Synthetic primer
gttctctgttccattttctttaccatttctttttggaatc

SEQ ID NO: 18674 - DNA, 40 bp, Artificial Sequence
  Description of Artificial Sequence: Synthetic primer
caccgggggcacaccaagctcgcattccccagccccttcg

SEQ ID NO: 18675 - DNA, 40 bp, Artificial Sequence
  Description of Artificial Sequence: Synthetic primer
gccgtggaggagctggcggagcagctggagcagacgaagc

SEQ ID NO: 18676 - DNA, 40 bp, Artificial Sequence
  Description of Artificial Sequence: Synthetic primer
ttaaagaagagacgtcgggcccagggggaacaggcacgag

SEQ ID NO: 18677 - DNA, 40 bp, Artificial Sequence
  Description of Artificial Sequence: Synthetic primer
agatagtgtagacaaagtagctgatggattcaaggttgtg

SEQ ID NO: 18678 - DNA, 40 bp, Artificial Sequence
  Description of Artificial Sequence: Synthetic primer
acgatgtaaattattaagcattttggttggatttcttttg

SEQ ID NO: 18679 - DNA, 40 bp, Artificial Sequence
  Description of Artificial Sequence: Synthetic primer
agtctttaaccacacaagtgttctttggttcaccttaaaa

SEQ ID NO: 18680 - DNA, 40 bp, Artificial Sequence
  Description of Artificial Sequence: Synthetic primer
ctttgctacttccagtgtcaccacagagcttgttcttgtc

SEQ ID NO: 18681 - DNA, 40 bp, Artificial Sequence
  Description of Artificial Sequence: Synthetic primer
aggtactctgtctgatcttctttaagatggaggatcactt

SEQ ID NO: 18682 - DNA, 40 bp, Artificial Sequence
  Description of Artificial Sequence: Synthetic primer
ttagatccaaacatatttaagctttactagtcacatattc

SEQ ID NO: 18683 - DNA, 40 bp, Artificial Sequence
  Description of Artificial Sequence: Synthetic primer
ttggcacctaaacagaatcagtgacccgggtgctttgtgg

SEQ ID NO: 18684 - DNA, 40 bp, Artificial Sequence
  Description of Artificial Sequence: Synthetic primer
cagatggcctggcagggctcaaaggccgagaccggagctg

SEQ ID NO: 18685 - DNA, 40 bp, Artificial Sequence
  Description of Artificial Sequence: Synthetic primer
cgctccgggctctgctcgccctcctacgttgcggtcacac

SEQ ID NO: 18686 - DNA, 40 bp, Artificial Sequence
  Description of Artificial Sequence: Synthetic primer
agcccaccactccagcacctgtgccgaggtctgcgtcgaa

SEQ ID NO: 18687 - DNA, 40 bp, Artificial Sequence
  Description of Artificial Sequence: Synthetic primer
tttgttttactttggaaaaggagaaagagacacatctaag

SEQ ID NO: 18688 - DNA, 40 bp, Artificial Sequence
  Description of Artificial Sequence: Synthetic primer
ctgatttccagaggaaagctagaggatctagttcaagagg

SEQ ID NO: 18689 - DNA, 40 bp, Artificial Sequence
  Description of Artificial Sequence: Synthetic primer
accgttcaacagcattctgaagaaggggaaggtacgttgg

SEQ ID NO: 18690 - DNA, 40 bp, Artificial Sequence
  Description of Artificial Sequence: Synthetic primer
tttcaccagctgcatcacaaaagccacttctgagctctct

SEQ ID NO: 18691 - DNA, 40 bp, Artificial Sequence
  Description of Artificial Sequence: Synthetic primer
ggagcggcaattcactaacaagaaaacagggaatttttgg

SEQ ID NO: 18692 - DNA, 40 bp, Artificial Sequence
  Description of Artificial Sequence: Synthetic primer
tggagctttggagtgttgatgtgggaagcattctcctatg

SEQ ID NO: 18693 - DNA, 40 bp, Artificial Sequence
  Description of Artificial Sequence: Synthetic primer
gaggtgcgggacccactggttacctacgaaggctccaatc

SEQ ID NO: 18694 - DNA, 40 bp, Artificial Sequence
  Description of Artificial Sequence: Synthetic primer
cctgtgcatgattgccttagtaacaatttaagaattttgg

SEQ ID NO: 18695 - DNA, 40 bp, Artificial Sequence
  Description of Artificial Sequence: Synthetic primer
ttgaattgtgtatatgctttatcttgaatataaaataaaa

SEQ ID NO: 18696 - DNA, 40 bp, Artificial Sequence
  Description of Artificial Sequence: Synthetic primer
gagtcccccatgccctgcctgaaatgacttcactggacac

SEQ ID NO: 18697 - DNA, 40 bp, Artificial Sequence
  Description of Artificial Sequence: Synthetic primer
cgcctgccttgggctttcccggaggccagaagggaggttc

SEQ ID NO: 18698 - DNA, 40 bp, Artificial Sequence
  Description of Artificial Sequence: Synthetic primer
gttggtggtgaactcagctattctgtcttccagcagtttc

SEQ ID NO: 18699 - DNA, 40 bp, Artificial Sequence
  Description of Artificial Sequence: Synthetic primer
taaaaagatttttacatgactactattgctgttcccatga

SEQ ID NO: 18700 - DNA, 40 bp, Artificial Sequence
  Description of Artificial Sequence: Synthetic primer
ccctgtccacccacaggccccgcacctccctgcccaaagc

SEQ ID NO: 18701 - DNA, 40 bp, Artificial Sequence
  Description of Artificial Sequence: Synthetic primer
tgatccagtgtctgatgtaagcccacgttctcttctttgg

SEQ ID NO: 18702 - DNA, 40 bp, Artificial Sequence
  Description of Artificial Sequence: Synthetic primer
cgcgcccaccgaggttggcgacagccccctgcaggcccag

SEQ ID NO: 18703 - DNA, 40 bp, Artificial Sequence
  Description of Artificial Sequence: Synthetic primer
ctcagagcgagcatggggtcagtggttttgaccaagtctc

SEQ ID NO: 18704 - DNA, 40 bp, Artificial Sequence
  Description of Artificial Sequence: Synthetic primer
atggtccagagtttacctgggaattgtgaaacattctgtc

SEQ ID NO: 18705 - DNA, 40 bp, Artificial Sequence
  Description of Artificial Sequence: Synthetic primer
tgtttgcttatacttcgggtaaccttgatatttgtatttt

SEQ ID NO: 18706 - DNA, 40 bp, Artificial Sequence
  Description of Artificial Sequence: Synthetic primer
tatagcaaagttttcaacttgtctaccgagagactttctt

SEQ ID NO: 18707 - DNA, 40 bp, Artificial Sequence
  Description of Artificial Sequence: Synthetic primer
agttccaattgctagttgagaatcacctcaagaaaaatag

SEQ ID NO: 18708 - DNA, 40 bp, Artificial Sequence
  Description of Artificial Sequence: Synthetic primer
tcgtcattgacactggcttccgagctccggccaggttgac

SEQ ID NO: 18709 - DNA, 40 bp, Artificial Sequence
  Description of Artificial Sequence: Synthetic primer
ccacttggcagaactccaggaaaaaatccagcaaacagag

SEQ ID NO: 18710 - DNA, 40 bp, Artificial Sequence; identical to SEQ ID NO: 7027
  Description of Artificial Sequence: Synthetic primer

SEQ ID NO: 18711 - DNA, 40 bp, Artificial Sequence
  Description of Artificial Sequence: Synthetic primer
aaatgatcctagtaattgcctagaaatatctttctcttac

SEQ ID NO: 18712 - DNA, 40 bp, Artificial Sequence
  Description of Artificial Sequence: Synthetic primer
tttgtgcacccctggagccgcaaggtagccttcgtgttgg

SEQ ID NO: 18713 - DNA, 40 bp, Artificial Sequence
  Description of Artificial Sequence: Synthetic primer
tttttaagggaaagattttaatattaaacctggtgcttct

SEQ ID NO: 18714 - DNA, 40 bp, Artificial Sequence
  Description of Artificial Sequence: Synthetic primer
accggtgctccctctgagccctcaggctacaagtaaattc

SEQ ID NO: 18715 - DNA, 40 bp, Artificial Sequence
  Description of Artificial Sequence: Synthetic primer
aatagcagattctaatcaaaatatgcagtctcttttacca

SEQ ID NO: 18716 - DNA, 40 bp, Artificial Sequence
  Description of Artificial Sequence: Synthetic primer
cttctgggcgtgaatcccagcccccgcgctgcgcaagttt

SEQ ID NO: 18717 - DNA, 40 bp, Artificial Sequence
  Description of Artificial Sequence: Synthetic primer
tgagtgaactggaatcgcctgttctgcgttgctgcatctg

SEQ ID NO: 18718 - DNA, 40 bp, Artificial Sequence
  Description of Artificial Sequence: Synthetic primer
ttttgagtatgatgaaactatatcatgtctgtttgatttc

SEQ ID NO: 18719 - DNA, 40 bp, Artificial Sequence
  Description of Artificial Sequence: Synthetic primer
gttcctgctttaccttctccatggccatcagtaactcctc

SEQ ID NO: 18720 - DNA, 40 bp, Artificial Sequence
  Description of Artificial Sequence: Synthetic primer
cgaaacaccgagtggtgcttcgggctggtcatctttgcag

SEQ ID NO: 18721 - DNA, 40 bp, Artificial Sequence
  Description of Artificial Sequence: Synthetic primer
ttcatgaaaagagtattaacttggctgtccaaatccactg

SEQ ID NO: 18722 - DNA, 40 bp, Artificial Sequence
  Description of Artificial Sequence: Synthetic primer
cagattttgaagatggaatccgtagcgcccagctcattgc

SEQ ID NO: 18723 - DNA, 40 bp, Artificial Sequence
  Description of Artificial Sequence: Synthetic primer
tcatacgggcctgagtgggacggcagctgccagtccaggg

SEQ ID NO: 18724 - DNA, 40 bp, Artificial Sequence; identical to SEQ ID NO: 16418
  Description of Artificial Sequence: Synthetic primer

SEQ ID NO: 18725 - DNA, 40 bp, Artificial Sequence
  Description of Artificial Sequence: Synthetic primer
gcattcgggtgaagaacatctttaactgggaaatcaagac

SEQ ID NO: 18726 - DNA, 40 bp, Artificial Sequence
  Description of Artificial Sequence: Synthetic primer
ggcttccaatggaagaagcaaagggagcagttggtaggtc

SEQ ID NO: 18727 - DNA, 40 bp, Artificial Sequence
  Description of Artificial Sequence: Synthetic primer
tggcttggggtggagctcgagggcaggggaggaggaagtc

SEQ ID NO: 18728 - DNA, 40 bp, Artificial Sequence
  Description of Artificial Sequence: Synthetic primer
agtcctggagatacccttggagcccaaaaacaacatgagg

SEQ ID NO: 18729 - DNA, 40 bp, Artificial Sequence
  Description of Artificial Sequence: Synthetic primer
gctctaaaaataaataccagcccttttttggtcacaaatc

SEQ ID NO: 18730 - DNA, 40 bp, Artificial Sequence
  Description of Artificial Sequence: Synthetic primer
gcggcgatgagacagagcggcgcctcccagcccctgctga

SEQ ID NO: 18731 - DNA, 40 bp, Artificial Sequence
  Description of Artificial Sequence: Synthetic primer
ggtgtcctgctcgggcgtgtaccgcgtgcagatccgcagg

SEQ ID NO: 18732 - DNA, 40 bp, Artificial Sequence
  Description of Artificial Sequence: Synthetic primer
ttgtgatgtgaattgatctgatcagactgtattaaaaatg

SEQ ID NO: 18733 - DNA, 40 bp, Artificial Sequence
  Description of Artificial Sequence: Synthetic primer
cgcagtatcgacgccggctccagctccagcctcggctccc

SEQ ID NO: 18734 - DNA, 40 bp, Artificial Sequence
  Description of Artificial Sequence: Synthetic primer
ctccttgcccaggccgcccacgtacagacgctcgtccttc

SEQ ID NO: 18735 - DNA, 40 bp, Artificial Sequence
  Description of Artificial Sequence: Synthetic primer
cttttgaaataatacttagcctttttcatttagacctttg

SEQ ID NO: 18736 - DNA, 40 bp, Artificial Sequence
  Description of Artificial Sequence: Synthetic primer
ttccctcttttaccataaaggactgcaaggttattcaaag

SEQ ID NO: 18737 - DNA, 40 bp, Artificial Sequence
  Description of Artificial Sequence: Synthetic primer
ttctcctccattgggtatcagctcatcaggaagatcattt

SEQ ID NO: 18738 - DNA, 40 bp, Artificial Sequence
  Description of Artificial Sequence: Synthetic primer
gaacgacgccacctgcctggaccagattggggagttccag

SEQ ID NO: 18739 - DNA, 40 bp, Artificial Sequence
  Description of Artificial Sequence: Synthetic primer
atgcctcagttgactccacagatacctctcacaggcttcg

SEQ ID NO: 18740 - DNA, 40 bp, Artificial Sequence
  Description of Artificial Sequence: Synthetic primer
gactgatctctgtggtttggtttagaaaattcccctgtgc

SEQ ID NO: 18741 - DNA, 40 bp, Artificial Sequence
  Description of Artificial Sequence: Synthetic primer
ggcgcaccgcggctcctggctgggcgggcggggtgggtgt

SEQ ID NO: 18742 - DNA, 40 bp, Artificial Sequence
  Description of Artificial Sequence: Synthetic primer
atggccaaggggaagcctcagcaaagcccctctcaagctg

SEQ ID NO: 18743 - DNA, 40 bp, Artificial Sequence
  Description of Artificial Sequence: Synthetic primer
cagggtaggagtagggaagctggttggcatggagggtcac

SEQ ID NO: 18744 - DNA, 40 bp, Artificial Sequence
  Description of Artificial Sequence: Synthetic primer
tctcgcggaggaagccccgcagggagccgtatttggcgta

SEQ ID NO: 18745 - DNA, 40 bp, Artificial Sequence
  Description of Artificial Sequence: Synthetic primer
tggctgatgctaaaatatgctgaacttgtctgttccatgc

SEQ ID NO: 18746 - DNA, 40 bp, Artificial Sequence
  Description of Artificial Sequence: Synthetic primer
gaggccgcgccgggagtgcgcgggtccgcgggaggggaag

SEQ ID NO: 18747 - DNA, 40 bp, Artificial Sequence
  Description of Artificial Sequence: Synthetic primer
tctagaaggtacttagtgttaccctaagaaggttctaggg

SEQ ID NO: 18748 - DNA, 40 bp, Artificial Sequence
  Description of Artificial Sequence: Synthetic primer
ttcttcaagacttcagaaccggccaacacatacaccaaag

SEQ ID NO: 18749 - DNA, 40 bp, Artificial Sequence
  Description of Artificial Sequence: Synthetic primer
tggaagtaagaagaattaaaaatttgtcctaattacaatg

SEQ ID NO: 18750 - DNA, 40 bp, Artificial Sequence
  Description of Artificial Sequence: Synthetic primer
tgggccttgggggccactaagctgtaggtcatggaacctg

SEQ ID NO: 18751 - DNA, 40 bp, Artificial Sequence
  Description of Artificial Sequence: Synthetic primer
caaacaacatgtcatttgcaaccaaaaaatatatgaagag

SEQ ID NO: 18752 - DNA, 40 bp, Artificial Sequence
  Description of Artificial Sequence: Synthetic primer
taaaggttattacaagaaaaatgatgaagagcaaaaggag

SEQ ID NO: 18753 - DNA, 40 bp, Artificial Sequence
  Description of Artificial Sequence: Synthetic primer
ctccctgtaaccagagtgaacacaggtcatagcagccttc

SEQ ID NO: 18754 - DNA, 40 bp, Artificial Sequence
  Description of Artificial Sequence: Synthetic primer
ggtatgaagccagacctccccggcgggcctcagggaacag

SEQ ID NO: 18755 - DNA, 40 bp, Artificial Sequence
  Description of Artificial Sequence: Synthetic primer
atgtgcaaacaggagggagactggagccaccaagaaattg

SEQ ID NO: 18756 - DNA, 40 bp, Artificial Sequence
  Description of Artificial Sequence: Synthetic primer
acctggactttttgacactgaaccatggaaaaacacgttc

SEQ ID NO: 18757 - DNA, 40 bp, Artificial Sequence
  Description of Artificial Sequence: Synthetic primer
cctgaaggtccgactgagaagactgctccacccatgatgc

SEQ ID NO: 18758 - DNA, 40 bp, Artificial Sequence
  Description of Artificial Sequence: Synthetic primer
tcgcagccccctcgggaggcccgacgcgactgggcccctc

SEQ ID NO: 18759 - DNA, 40 bp, Artificial Sequence
  Description of Artificial Sequence: Synthetic primer
ccattttgtcaccctatcttatctcggggaaattgcagac

SEQ ID NO: 18760 - DNA, 40 bp, Artificial Sequence
  Description of Artificial Sequence: Synthetic primer
attttaagctgttcttctttttgtgcctgtgctgcattag

SEQ ID NO: 18761 - DNA, 40 bp, Artificial Sequence
  Description of Artificial Sequence: Synthetic primer
gatacattttggtaacagctatgtacatatacaaaatatg

SEQ ID NO: 18762 - DNA, 40 bp, Artificial Sequence
  Description of Artificial Sequence: Synthetic primer
cctgtgtcccagttctggtatatcactggtgttccatctc

SEQ ID NO: 18763 - DNA, 40 bp, Artificial Sequence
  Description of Artificial Sequence: Synthetic primer
actggccagtcctacaaccagtattctcagagataccatc

SEQ ID NO: 18764 - DNA, 40 bp, Artificial Sequence
  Description of Artificial Sequence: Synthetic primer
gttttcctttgaacacattggtcttttctcaaagttcctg

SEQ ID NO: 18765 - DNA, 40 bp, Artificial Sequence
  Description of Artificial Sequence: Synthetic primer
ggggttctggggccaactgggggggtgctaaaccccaccg

SEQ ID NO: 18766 - DNA, 40 bp, Artificial Sequence
  Description of Artificial Sequence: Synthetic primer
ggaagtaactgatatcacttcacccaaatatataaccgtg

SEQ ID NO: 18767 - DNA, 40 bp, Artificial Sequence
  Description of Artificial Sequence: Synthetic primer
gtactaccacagcctttaagtgacattgatttataacttg

SEQ ID NO: 18768 - DNA, 40 bp, Artificial Sequence
  Description of Artificial Sequence: Synthetic primer
cagaacggaactgcctcctgagaagctcaaactggagtgg

SEQ ID NO: 18769 - DNA, 40 bp, Artificial Sequence
  Description of Artificial Sequence: Synthetic primer
acaaggagattttccttcgggagttgatctctaatgcttc

SEQ ID NO: 18770 - DNA, 40 bp, Artificial Sequence
  Description of Artificial Sequence: Synthetic primer
agccttaagatctcggcgtattaatatggtccagacagag

SEQ ID NO: 18771 - DNA, 40 bp, Artificial Sequence
  Description of Artificial Sequence: Synthetic primer
aggctgtctgaaggtcaagaggaggaaaatttagaaaatg

SEQ ID NO: 18772 - DNA, 40 bp, Artificial Sequence
  Description of Artificial Sequence: Synthetic primer
cttcactcaccaaggaaaagtggctctgtatggcaagctg

SEQ ID NO: 18773 - DNA, 40 bp, Artificial Sequence
  Description of Artificial Sequence: Synthetic primer
atgtaccgggagcgcgggggtgagctcctggtccacactg

SEQ ID NO: 18774 - DNA, 40 bp, Artificial Sequence
  Description of Artificial Sequence: Synthetic primer
gagccttctagggccccaggctgggaggctcagaggactg

SEQ ID NO: 18775 - DNA, 40 bp, Artificial Sequence
  Description of Artificial Sequence: Synthetic primer
acagaacagttagatgtaaaagaagaacaaattgaagaac

SEQ ID NO: 18776 - DNA, 40 bp, Artificial Sequence
  Description of Artificial Sequence: Synthetic primer
accagctattttgcatttaaagtgaacattgtgtttggaa

SEQ ID NO: 18777 - DNA, 40 bp, Artificial Sequence
  Description of Artificial Sequence: Synthetic primer
gtcctggtagaccagtgcccgtggccaccgagaccagcag

SEQ ID NO: 18778 - DNA, 40 bp, Artificial Sequence
  Description of Artificial Sequence: Synthetic primer
tgaaacagggacacaggcttcgccttgcctctcgcctctc

SEQ ID NO: 18779 - DNA, 40 bp, Artificial Sequence
  Description of Artificial Sequence: Synthetic primer
gcaattatattttttctgaaaaggatttcaatttaggtag

SEQ ID NO: 18780 - DNA, 40 bp, Artificial Sequence
  Description of Artificial Sequence: Synthetic primer
ataccgacctttacaatgaaagcactcaggcaggttgatg

SEQ ID NO: 18781 - DNA, 40 bp, Artificial Sequence
  Description of Artificial Sequence: Synthetic primer
caaaagccccctccagtctgtggtggtgaggcggcggtca

SEQ ID NO: 18782 - DNA, 40 bp, Artificial Sequence
  Description of Artificial Sequence: Synthetic primer
tctctcttccttcactcagtgcattggtgcagcaattttg

SEQ ID NO: 18783 - DNA, 40 bp, Artificial Sequence
  Description of Artificial Sequence: Synthetic primer
ctgggctgcgtaccgtacacgggtgacatcgccaatttcc

SEQ ID NO: 18784 - DNA, 40 bp, Artificial Sequence
  Description of Artificial Sequence: Synthetic primer
agtattttttaaatggttatgtaagcaaagctgaactgta

SEQ ID NO: 18785 - DNA, 40 bp, Artificial Sequence
  Description of Artificial Sequence: Synthetic primer
atacagatgctcaattcgacccgtattaaatgaactggac

SEQ ID NO: 18786 - DNA, 40 bp, Artificial Sequence
  Description of Artificial Sequence: Synthetic primer
ggggaatgattttgataatgaccataaccgcaggattcag

SEQ ID NO: 18787 - DNA, 40 bp, Artificial Sequence
  Description of Artificial Sequence: Synthetic primer
ctgcaggaatcttctcactgctgtccaatggagcaggcag

SEQ ID NO: 18788 - DNA, 40 bp, Artificial Sequence
  Description of Artificial Sequence: Synthetic primer
tctaaccagtgaagctgctttagcaataacaccatttgag

SEQ ID NO: 18789 - DNA, 40 bp, Artificial Sequence
  Description of Artificial Sequence: Synthetic primer
gatgagcttttgcataccaatatgaatttgtcagcacttc

SEQ ID NO: 18790 - DNA, 40 bp, Artificial Sequence
  Description of Artificial Sequence: Synthetic primer
ccaggagatattatactgtcctgagaaggtcacagtcacg

SEQ ID NO: 18791 - DNA, 40 bp, Artificial Sequence
  Description of Artificial Sequence: Synthetic primer
cagtatgctctggcttcttcaacaggagatggtcacatgg

SEQ ID NO: 18792 - DNA, 40 bp, Artificial Sequence
  Description of Artificial Sequence: Synthetic primer
taaccagggctacaactttgctgaagctgtgaacttctgt

SEQ ID NO: 18793 - DNA, 40 bp, Artificial Sequence
  Description of Artificial Sequence: Synthetic primer
tgtgaatatatgtgttggcatcctcaggacaatcaaactg

SEQ ID NO: 18794 - DNA, 40 bp, Artificial Sequence
  Description of Artificial Sequence: Synthetic primer
tgagtaattttggagatctatctcaggaggtcattaaaac

SEQ ID NO: 18795 - DNA, 40 bp, Artificial Sequence
  Description of Artificial Sequence: Synthetic primer
gcacccacgtgcgcccgtagtccatggacttgtagatggc

SEQ ID NO: 18796 - DNA, 40 bp, Artificial Sequence
  Description of Artificial Sequence: Synthetic primer
accagaggaatgactctctagttgtggaatttcagtcatc

SEQ ID NO: 18797 - DNA, 40 bp, Artificial Sequence
  Description of Artificial Sequence: Synthetic primer
acctgaagtcgctgagactatgattgtcactgatgccaag

SEQ ID NO: 18798 - DNA, 40 bp, Artificial Sequence
  Description of Artificial Sequence: Synthetic primer
tctgattctgtgcggttgaagtgtagggagatgcttgctg

SEQ ID NO: 18799 - DNA, 40 bp, Artificial Sequence
  Description of Artificial Sequence: Synthetic primer
cttactggagaagaattgcatgtggaagtgttggagaatg

SEQ ID NO: 18800 - DNA, 40 bp, Artificial Sequence
  Description of Artificial Sequence: Synthetic primer
aggtccgcggccaggtgctggcgccgctgcccctccacgg

SEQ ID NO: 18801 - DNA, 40 bp, Artificial Sequence
  Description of Artificial Sequence: Synthetic primer
gccagaggaggtgacaggctgcaaaacagtttctttggtg

SEQ ID NO: 18802 - DNA, 40 bp, Artificial Sequence
  Description of Artificial Sequence: Synthetic primer
gtgtctcgtacaagtcacaaagtgtatccaacttccattc

SEQ ID NO: 18803 - DNA, 40 bp, Artificial Sequence
  Description of Artificial Sequence: Synthetic primer
gcctggactggtcgaggcatggaatttaaactgattgagc

SEQ ID NO: 18804 - DNA, 40 bp, Artificial Sequence
  Description of Artificial Sequence: Synthetic primer
ggaaggcagggcacgagggagcccagcaccagaacaaagc

SEQ ID NO: 18805 - DNA, 40 bp, Artificial Sequence
  Description of Artificial Sequence: Synthetic primer
tagacactccacatactccttcttcttacgacggctctcc

SEQ ID NO: 18806 - DNA, 40 bp, Artificial Sequence
  Description of Artificial Sequence: Synthetic primer
cctgaggagtgaccagctctggttggctgcccccccgcat

SEQ ID NO: 18807 - DNA, 40 bp, Artificial Sequence
  Description of Artificial Sequence: Synthetic primer
aatttgaggagatgattgaccgcctagaaaaaggcagtgg

SEQ ID NO: 18808 - DNA, 40 bp, Artificial Sequence
  Description of Artificial Sequence: Synthetic primer
atttttataaaacttgattaaaaaatagtatttcaaactg

SEQ ID NO: 18809 - DNA, 40 bp, Artificial Sequence
  Description of Artificial Sequence: Synthetic primer
gcatttgccatccagaaggcaagtgcccctgcaatattct

SEQ ID NO: 18810 - DNA, 40 bp, Artificial Sequence
  Description of Artificial Sequence: Synthetic primer
aatggccagaggatcagtgtccgatgaggaaatgatggag

SEQ ID NO: 18811 - DNA, 40 bp, Artificial Sequence
  Description of Artificial Sequence: Synthetic primer
ttcggttggctaaacagggtcagagctgagagcgaagcag

SEQ ID NO: 18812 - DNA, 40 bp, Artificial Sequence
  Description of Artificial Sequence: Synthetic primer
acatggttaccccacgatcaacttgggtattgtaggagac

SEQ ID NO: 18813 - DNA, 40 bp, Artificial Sequence
  Description of Artificial Sequence: Synthetic primer
ggagaaatttgataatgacactgtttcctgataataaagg

SEQ ID NO: 18814 - DNA, 40 bp, Artificial Sequence
  Description of Artificial Sequence: Synthetic primer
acttcttgcaccacaaaaattagcatttggattaatttac

SEQ ID NO: 18815 - DNA, 40 bp, Artificial Sequence
  Description of Artificial Sequence: Synthetic primer
cccccaccagtgaagcgccgagaccgcgaggccctgatgg

SEQ ID NO: 18816 - DNA, 40 bp, Artificial Sequence
  Description of Artificial Sequence: Synthetic primer
tctggagatcttgttggtgaccagagtctggagtttctgc

SEQ ID NO: 18817 - DNA, 40 bp, Artificial Sequence
  Description of Artificial Sequence: Synthetic primer
gatgcagacttcaggaagcttgcaaagatattctcctttt

SEQ ID NO: 18818 - DNA, 40 bp, Artificial Sequence
  Description of Artificial Sequence: Synthetic primer
ccaataagaatgcagacagccctggcctgtccagtgggag

SEQ ID NO: 18819 - DNA, 40 bp, Artificial Sequence
  Description of Artificial Sequence: Synthetic primer
ctttatcggcaacagccaggacgcgcagccacgcggccag

SEQ ID NO: 18820 - DNA, 40 bp, Artificial Sequence
  Description of Artificial Sequence: Synthetic primer
ctgctatctcaaccagatgcccaggacaggtgctctagcc

SEQ ID NO: 18821 - DNA, 40 bp, Artificial Sequence
  Description of Artificial Sequence: Synthetic primer
ctcagagtatctttaccaaaggtttttaaagtaaatctct

SEQ ID NO: 18822 - DNA, 40 bp, Artificial Sequence
  Description of Artificial Sequence: Synthetic primer
ctgggacctgtctgtgcacagggcgggaagacacttgctg

SEQ ID NO: 18823 - DNA, 40 bp, Artificial Sequence
  Description of Artificial Sequence: Synthetic primer
agtcctcatcgctccccctccccaccccgcgcaggccact

SEQ ID NO: 18824 - DNA, 40 bp, Artificial Sequence
  Description of Artificial Sequence: Synthetic primer
tgaaatatctacacacaggtctacaaggtcaaccaaggtg

SEQ ID NO: 18825 - DNA, 40 bp, Artificial Sequence
  Description of Artificial Sequence: Synthetic primer
gtcccatcgcaataaagtctccaacgcgccgcgccacagc

SEQ ID NO: 18826 - DNA, 40 bp, Artificial Sequence
  Description of Artificial Sequence: Synthetic primer
cgaaactttattttacgaggaacatttaatgatggcttcc

SEQ ID NO: 18827 - DNA, 40 bp, Artificial Sequence
  Description of Artificial Sequence: Synthetic primer
gactattgcaagagcctgccagctgctttgagtgctacgg

SEQ ID NO: 18828 - DNA, 40 bp, Artificial Sequence
  Description of Artificial Sequence: Synthetic primer
actggatgacgggatttaggaagcgtgagctgccccgatg

SEQ ID NO: 18829 - DNA, 40 bp, Artificial Sequence
  Description of Artificial Sequence: Synthetic primer
cgggtctgttggggattgatgttcatgggtgtttgtcctg

SEQ ID NO: 18830 - DNA, 40 bp, Artificial Sequence
  Description of Artificial Sequence: Synthetic primer
ttcagtgtcaaaaagtccaggttttgggagccaaataaag

SEQ ID NO: 18831 - DNA, 40 bp, Artificial Sequence
  Description of Artificial Sequence: Synthetic primer
taaacggtaaacaggatacagaattaccagggcacaaaag

SEQ ID NO: 18832 - DNA, 40 bp, Artificial Sequence
  Description of Artificial Sequence: Synthetic primer
gcttctagaagtggatctacgagatccagtacttcaagtg

SEQ ID NO: 18833 - DNA, 40 bp, Artificial Sequence
  Description of Artificial Sequence: Synthetic primer
tcaagcaattaatcccaagttgcttcagttggtcgaagac

SEQ ID NO: 18834 - DNA, 40 bp, Artificial Sequence
  Description of Artificial Sequence: Synthetic primer
gtgagggttgacatttcacatttagcatgctgtttcatag

SEQ ID NO: 18835 - DNA, 40 bp, Artificial Sequence
  Description of Artificial Sequence: Synthetic primer
gagacgatagtttcaacctggcccttcaaaacagcttctg

SEQ ID NO: 18836 - DNA, 40 bp, Artificial Sequence
  Description of Artificial Sequence: Synthetic primer
gcccgagttccgcgaggacttcgtgctgaccatcacgggc

SEQ ID NO: 18837 - DNA, 40 bp, Artificial Sequence
  Description of Artificial Sequence: Synthetic primer
taaacctatccacacactggtggtctggccaaaaagattc

SEQ ID NO: 18838 - DNA, 40 bp, Artificial Sequence
  Description of Artificial Sequence: Synthetic primer
cctgcgccgtggcctccaacaccgcccgcgggttcatctg

SEQ ID NO: 18839 - DNA, 40 bp, Artificial Sequence
  Description of Artificial Sequence: Synthetic primer
catttcatcataattgcctaaagtgttctggatccggttg

SEQ ID NO: 18840 - DNA, 40 bp, Artificial Sequence
  Description of Artificial Sequence: Synthetic primer
ctattgggaaatggaggataagaacattattcaatttgtg

SEQ ID NO: 18841 - DNA, 40 bp, Artificial Sequence
  Description of Artificial Sequence: Synthetic primer
cctgccccttctccagcccccaacatctgtgggcttttac

SEQ ID NO: 18842 - DNA, 40 bp, Artificial Sequence
  Description of Artificial Sequence: Synthetic primer
gttttctaagccctttaggtttcccccgacattattgaag

SEQ ID NO: 18843 - DNA, 40 bp, Artificial Sequence
  Description of Artificial Sequence: Synthetic primer
accaaggcattttctttcttattaaacataatcttcactc

SEQ ID NO: 18844 - DNA, 40 bp, Artificial Sequence
  Description of Artificial Sequence: Synthetic primer
gcagggaagatgaattgtgggagagccgtcatggcttttt

SEQ ID NO: 18845 - DNA, 40 bp, Artificial Sequence
  Description of Artificial Sequence: Synthetic primer
ttacaaaaggttggtttcccgctgcaggctgtccaacttc

SEQ ID NO: 18846 - DNA, 40 bp, Artificial Sequence
  Description of Artificial Sequence: Synthetic primer
cacagaggttgaagttaataagtttccagtggttgcagtc

SEQ ID NO: 18847 - DNA, 40 bp, Artificial Sequence
  Description of Artificial Sequence: Synthetic primer
tacacaaaacccattggcttctgcgttgtcctcacagctt

SEQ ID NO: 18848 - DNA, 40 bp, Artificial Sequence
  Description of Artificial Sequence: Synthetic primer
gtcttttacagtgtttggcagagggtattgtgtgacgatg

SEQ ID NO: 18849 - DNA, 40 bp, Artificial Sequence
  Description of Artificial Sequence: Synthetic primer
cactgacacggccggggggttagaatggaacaaactgaag

SEQ ID NO: 18850 - DNA, 40 bp, Artificial Sequence
  Description of Artificial Sequence: Synthetic primer
cagcctgcacctgcccagtacctactccctctccgtgagc

SEQ ID NO: 18851 - DNA, 40 bp, Artificial Sequence
  Description of Artificial Sequence: Synthetic primer
ttcttcagttacagcagcactggtatcatcagcagtaggg

SEQ ID NO: 18852 - DNA, 40 bp, Artificial Sequence
  Description of Artificial Sequence: Synthetic primer
ttctcctcgttggttcatgtgttgttgtttttgataatcc

SEQ ID NO: 18853 - DNA, 40 bp, Artificial Sequence
  Description of Artificial Sequence: Synthetic primer
ctcgtcgcagcttaagcattttttcgtaagaggcttcatc

SEQ ID NO: 18854 - DNA, 40 bp, Artificial Sequence
  Description of Artificial Sequence: Synthetic primer
gcaaacagaatccgtatcatagttctgtttgttgaatagg

SEQ ID NO: 18855 - DNA, 40 bp, Artificial Sequence
  Description of Artificial Sequence: Synthetic primer
tatgattagaatagactcccagactaactcttcacatctc

SEQ ID NO: 18856 - DNA, 40 bp, Artificial Sequence
  Description of Artificial Sequence: Synthetic primer
ttccctcccccttcacccactccctccagaacatttagtg

SEQ ID NO: 18857 - DNA, 40 bp, Artificial Sequence
  Description of Artificial Sequence: Synthetic primer
tcccattagctgtttccctgctaagggctggtgcatctgg

SEQ ID NO: 18858 - DNA, 40 bp, Artificial Sequence
  Description of Artificial Sequence: Synthetic primer
aaatgaggaatggagcacacataggcatgaagaaagaacg

SEQ ID NO: 18859 - DNA, 40 bp, Artificial Sequence
  Description of Artificial Sequence: Synthetic primer
ctaaccagctattggtgggaatgacggaactggggattgc

SEQ ID NO: 18860 - DNA, 40 bp, Artificial Sequence
  Description of Artificial Sequence: Synthetic primer
gcatgctggaggacctcatcaactcacacgccgacgtcaa

SEQ ID NO: 18861 - DNA, 40 bp, Artificial Sequence
  Description of Artificial Sequence: Synthetic primer
ccctccaggtcgggccgggctgtggagaaggggtgtaagc

SEQ ID NO: 18862 - DNA, 40 bp, Artificial Sequence
  Description of Artificial Sequence: Synthetic primer
gaatgggcaggaggtggggaactcccgaatcaagctgcac

SEQ ID NO: 18863 - DNA, 40 bp, Artificial Sequence
  Description of Artificial Sequence: Synthetic primer
ttcatgaagaagcttgattggagcccaagttgttttctgc

SEQ ID NO: 18864 - DNA, 40 bp, Artificial Sequence
  Description of Artificial Sequence: Synthetic primer
agggcctttaaatattttcatcatctcttttcccctctac

SEQ ID NO: 18865 - DNA, 40 bp, Artificial Sequence
  Description of Artificial Sequence: Synthetic primer
taaagaggcacacgccatctctgctgctgccttccagttg

SEQ ID NO: 18866 - DNA, 40 bp, Artificial Sequence
  Description of Artificial Sequence: Synthetic primer
ttccagtgtcctgtctcatgtagaatgtgcttttggtcag

SEQ ID NO: 18867 - DNA, 40 bp, Artificial Sequence
  Description of Artificial Sequence: Synthetic primer
ttcgcagataacccgcctacaaatattttctttgttcttg

SEQ ID NO: 18868 - DNA, 40 bp, Artificial Sequence
  Description of Artificial Sequence: Synthetic primer
cagtccctatgtagagatgagtacataacacttccaattc

SEQ ID NO: 18869 - DNA, 40 bp, Artificial Sequence
  Description of Artificial Sequence: Synthetic primer
ttgagagaggcatcaactccttcatagtcaggtaaagttg

SEQ ID NO: 18870 - DNA, 40 bp, Artificial Sequence
  Description of Artificial Sequence: Synthetic primer
tccttatgtgttatgtttcacttttaattttctaatttgg

SEQ ID NO: 18871 - DNA, 40 bp, Artificial Sequence
  Description of Artificial Sequence: Synthetic primer
cactgcaaagaaactcacttcccgaccccactgcagagtc

SEQ ID NO: 18872 - DNA, 40 bp, Artificial Sequence
  Description of Artificial Sequence: Synthetic primer
gcaaagcgacccccttggtctctggaagaagtagcgtcac

SEQ ID NO: 18873 - DNA, 40 bp, Artificial Sequence
  Description of Artificial Sequence: Synthetic primer
aagaaggtatggaaagagtctgggagtgactaaactatcc

SEQ ID NO: 18874 - DNA, 40 bp, Artificial Sequence
  Description of Artificial Sequence: Synthetic primer
actagattctagcaccgctgtcccctttgcactatccttc

SEQ ID NO: 18875 - DNA, 40 bp, Artificial Sequence
  Description of Artificial Sequence: Synthetic primer
attcagcagttacagacgtctcttcatgataggaacaaag

SEQ ID NO: 18876 - DNA, 40 bp, Artificial Sequence
  Description of Artificial Sequence: Synthetic primer
tatcactgtcaaccaaaacctgtgcttgaagttggtgaag

SEQ ID NO: 18877 - DNA, 40 bp, Artificial Sequence
  Description of Artificial Sequence: Synthetic primer
taagtatttgtcgttgctggtcagaaagtaatcctagtcc

SEQ ID NO: 18878 - DNA, 40 bp, Artificial Sequence
  Description of Artificial Sequence: Synthetic primer
tcaaaacagaactgtccttcgctcttgtgaataggaaacc

SEQ ID NO: 18879 - DNA, 40 bp, Artificial Sequence
  Description of Artificial Sequence: Synthetic primer
ttttgtttacaataggcactctctctaccccacctctcag

SEQ ID NO: 18880 - DNA, 40 bp, Artificial Sequence
  Description of Artificial Sequence: Synthetic primer
aagagagaagacagaatcattataaatcccagtagcagtc

SEQ ID NO: 18881 - DNA, 40 bp, Artificial Sequence
  Description of Artificial Sequence: Synthetic primer
cgcaggccaaggaaaatgcctatgatctggaagccaacct

SEQ ID NO: 18882 - DNA, 40 bp, Artificial Sequence
  Description of Artificial Sequence: Synthetic primer
tcaaagaaacctgtgctagatctgcagaaaagacaaagaa

SEQ ID NO: 18883 - DNA, 40 bp, Artificial Sequence
  Description of Artificial Sequence: Synthetic primer
cttacaaatatttttcatggtcacatttattaaatgttac

SEQ ID NO: 18884 - DNA, 40 bp, Artificial Sequence
  Description of Artificial Sequence: Synthetic primer
tggcaggccctggtgaaggaagacactttcagggaagagg

SEQ ID NO: 18885 - DNA, 40 bp, Artificial Sequence
  Description of Artificial Sequence: Synthetic primer
gggccagcaagtaggcacaggagccttggaagtggaagag

SEQ ID NO: 18886 - DNA, 40 bp, Artificial Sequence
  Description of Artificial Sequence: Synthetic primer
gtctttcactttcctgaaggcaggaaccattccccagtcc

SEQ ID NO: 18887 - DNA, 40 bp, Artificial Sequence
  Description of Artificial Sequence: Synthetic primer
cagttgcctaataatgcaataaaaaatgctttgagatagc

SEQ ID NO: 18888 - DNA, 40 bp, Artificial Sequence
  Description of Artificial Sequence: Synthetic primer
cgaaggtggtgttggtgacattgaagtggccagtctcctc

SEQ ID NO: 18889 - DNA, 40 bp, Artificial Sequence
  Description of Artificial Sequence: Synthetic primer
gttctgtctctttttctgtcctccatcagcaaacttacac

SEQ ID NO: 18890 - DNA, 40 bp, Artificial Sequence
  Description of Artificial Sequence: Synthetic primer
tcgtctgctggtgcatcgggacgtgtgccaccatgttctc

SEQ ID NO: 18891 - DNA, 40 bp, Artificial Sequence
  Description of Artificial Sequence: Synthetic primer
cttcaaaggcaacaatcgctggaaacagagtgtagagctg

SEQ ID NO: 18892 - DNA, 40 bp, Artificial Sequence
  Description of Artificial Sequence: Synthetic primer
ggaaatgctgggagaatgggagacatataagcacagtagc

SEQ ID NO: 18893 - DNA, 40 bp, Artificial Sequence
  Description of Artificial Sequence: Synthetic primer
agagctgtgtccctatgcgtgggtggccttgcagctgttg

SEQ ID NO: 18894 - DNA, 40 bp, Artificial Sequence
  Description of Artificial Sequence: Synthetic primer
cttcttgttcactttgcgctcctttgcccgccggttttgg

SEQ ID NO: 18895 - DNA, 40 bp, Artificial Sequence
  Description of Artificial Sequence: Synthetic primer
ggaactgcctattaggtagcattttcctccaagagctcca

SEQ ID NO: 18896 - DNA, 40 bp, Artificial Sequence
  Description of Artificial Sequence: Synthetic primer
cggcggccgccgcgcgctcaggctcagcttcgctgcccgc

SEQ ID NO: 18897 - DNA, 40 bp, Artificial Sequence
  Description of Artificial Sequence: Synthetic primer
aaagtgcacggcaaaagatatgcttacaaatttgacttcc

SEQ ID NO: 18898 - DNA, 40 bp, Artificial Sequence
  Description of Artificial Sequence: Synthetic primer
acggaccgacgccccccctcaacctaaccccggacgaccg

SEQ ID NO: 18899 - DNA, 40 bp, Artificial Sequence
  Description of Artificial Sequence: Synthetic primer
agccgtagccacatagccccaagcaggtggcagcaaggac

SEQ ID NO: 18900 - DNA, 40 bp, Artificial Sequence
  Description of Artificial Sequence: Synthetic primer
cctgagcccattgttctcatggaggttttgtgatattaac

SEQ ID NO: 18901 - DNA, 40 bp, Artificial Sequence
  Description of Artificial Sequence: Synthetic primer
gtagcatagcattctgccaaaagggccccagattcttaat

SEQ ID NO: 18902 - DNA, 40 bp, Artificial Sequence
  Description of Artificial Sequence: Synthetic primer
gaggcacgagatgccgcctcacatctacgccatcgcagac

SEQ ID NO: 18903 - DNA, 40 bp, Artificial Sequence
  Description of Artificial Sequence: Synthetic primer
tgagaggtaactttgggggttgctctttggggaaaaggag

SEQ ID NO: 18904 - DNA, 40 bp, Artificial Sequence
  Description of Artificial Sequence: Synthetic primer
cacaaaactgtcccgggtgggaagaggaacagcctatgtg

SEQ ID NO: 18905 - DNA, 40 bp, Artificial Sequence
  Description of Artificial Sequence: Synthetic primer
tttcagacctggagattactctggaagggggtaaaacgtc

SEQ ID NO: 18906 - DNA, 40 bp, Artificial Sequence
  Description of Artificial Sequence: Synthetic primer
tatatggagaatggtcattagacgtctcgacagccacctg

SEQ ID NO: 18907 - DNA, 40 bp, Artificial Sequence
  Description of Artificial Sequence: Synthetic primer
gacggcttccaggtacttaaaagcctttccaaccctgtcc

SEQ ID NO: 18908 - DNA, 40 bp, Artificial Sequence
  Description of Artificial Sequence: Synthetic primer
accatgtccacaggcagggccccaatattcttcagcagag

SEQ ID NO: 18909 - DNA, 40 bp, Artificial Sequence
  Description of Artificial Sequence: Synthetic primer
gtttggcgccagagtccaaaattgtgcccctcatttacag

SEQ ID NO: 18910 - DNA, 40 bp, Artificial Sequence
  Description of Artificial Sequence: Synthetic primer
tgctgcttaccagccgccaaaattccttttctactagttc

SEQ ID NO: 18911 - DNA, 40 bp, Artificial Sequence
  Description of Artificial Sequence: Synthetic primer
tttcatgtaatgaaaagaaatacataattttaattcaacc

SEQ ID NO: 18912 - DNA, 40 bp, Artificial Sequence
  Description of Artificial Sequence: Synthetic primer
aactgaagaagctggtggaacagaatggaacagatgactg

SEQ ID NO: 18913 - DNA, 40 bp, Artificial Sequence
  Description of Artificial Sequence: Synthetic primer
tcgacagtgcctgaacaggtacaagaaaatgcaagacacg

SEQ ID NO: 18914 - DNA, 40 bp, Artificial Sequence
  Description of Artificial Sequence: Synthetic primer
cctgtcccacctggtggccgttcatgagcaacagctgccg

SEQ ID NO: 18915 - DNA, 40 bp, Artificial Sequence
  Description of Artificial Sequence: Synthetic primer
ttattaccacctgtttttggcgaagaatatgaggaacagc

SEQ ID NO: 18916 - DNA, 40 bp, Artificial Sequence
  Description of Artificial Sequence: Synthetic primer
gactgtggaagaattacttgaaactggacttattcaggtg

SEQ ID NO: 18917 - DNA, 40 bp, Artificial Sequence
  Description of Artificial Sequence: Synthetic primer
acaaagctcagcctattcacagaaactgggtccacagagc

SEQ ID NO: 18918 - DNA, 40 bp, Artificial Sequence
  Description of Artificial Sequence: Synthetic primer
cagacatttgttatcgctgtggtgagtctggtcatcttgc

SEQ ID NO: 18919 - DNA, 40 bp, Artificial Sequence
  Description of Artificial Sequence: Synthetic primer
gtcattggacaggagatggaggctcacacactgaagactc

SEQ ID NO: 18920 - DNA, 40 bp, Artificial Sequence
  Description of Artificial Sequence: Synthetic primer
cgcttctgaggaatgcgggctcgggcgcggcgccgccacc

SEQ ID NO: 18921 - DNA, 40 bp, Artificial Sequence
  Description of Artificial Sequence: Synthetic primer
tggagtataaagaaaggttgtgctgttccggagagagctc

SEQ ID NO: 18922 - DNA, 40 bp, Artificial Sequence
  Description of Artificial Sequence: Synthetic primer
ccaggagggtacacaggagacccaccctgaaggatccaag

SEQ ID NO: 18923 - DNA, 40 bp, Artificial Sequence
  Description of Artificial Sequence: Synthetic primer
cttcatctgtagccaagaagagagcattaaacccaagaac

SEQ ID NO: 18924 - DNA, 40 bp, Artificial Sequence
  Description of Artificial Sequence: Synthetic primer
gggtaacagaattttgttcattttctgagtttggtgatgg

SEQ ID NO: 18925 - DNA, 40 bp, Artificial Sequence
  Description of Artificial Sequence: Synthetic primer
ccactcactgatcaatttgttatgcgccgtgactgaaatc

SEQ ID NO: 18926 - DNA, 40 bp, Artificial Sequence
  Description of Artificial Sequence: Synthetic primer
gaattgtccctagaagtacaattgcaggctgaacgagatg

SEQ ID NO: 18927 - DNA, 40 bp, Artificial Sequence
  Description of Artificial Sequence: Synthetic primer
catcgccaagcaaaaagcagagcaaggaaaacaccatcac

SEQ ID NO: 18928 - DNA, 40 bp, Artificial Sequence
  Description of Artificial Sequence: Synthetic primer
tcagggactggggaacaagacggggtggggtggggagatg

SEQ ID NO: 18929 - DNA, 40 bp, Artificial Sequence
  Description of Artificial Sequence: Synthetic primer
gtgatgtacttggacgttttggagttgatgcaagagaaac

SEQ ID NO: 18930 - DNA, 40 bp, Artificial Sequence
  Description of Artificial Sequence: Synthetic primer
agctgaaacagagagaaagcacaagacaggcatcaacaag

SEQ ID NO: 18931 - DNA, 40 bp, Artificial Sequence
  Description of Artificial Sequence: Synthetic primer
aggtgagttctctccaatgatctgttcttcaaccactgtc

SEQ ID NO: 18932 - DNA, 40 bp, Artificial Sequence
  Description of Artificial Sequence: Synthetic primer
agcttctgtgggcagaaaggaaagttggcttcggtctgag

SEQ ID NO: 18933 - DNA, 40 bp, Artificial Sequence
  Description of Artificial Sequence: Synthetic primer
accatgaagctgttcccaaaattttcataaccatgtcctg

SEQ ID NO: 18934 - DNA, 40 bp, Artificial Sequence
  Description of Artificial Sequence: Synthetic primer
ccatctctttccatctgtctcttcttcattaaacacttac

SEQ ID NO: 18935 - DNA, 40 bp, Artificial Sequence
  Description of Artificial Sequence: Synthetic primer
acagcctgggagtccccaggcgccggcccctcagccccag

SEQ ID NO: 18936 - DNA, 40 bp, Artificial Sequence
  Description of Artificial Sequence: Synthetic primer
atgcttaatttgaggtaagtggtattcaggtctttcatgg

SEQ ID NO: 18937 - DNA, 40 bp, Artificial Sequence
  Description of Artificial Sequence: Synthetic primer
actcgttcttttgaactttgttctgccgctgttttgcatc

SEQ ID NO: 18938 - DNA, 40 bp, Artificial Sequence
  Description of Artificial Sequence: Synthetic primer
ggagggggtggaggggggtgctcctcaggtggaggaggcg

SEQ ID NO: 18939 - DNA, 40 bp, Artificial Sequence
  Description of Artificial Sequence: Synthetic primer
tgctgcagaggtcacatcggccctcatgttcctccaccag

SEQ ID NO: 18940 - DNA, 40 bp, Artificial Sequence
  Description of Artificial Sequence: Synthetic primer
gccgaccgtacaagagtcggggctactccaggcacacgtc

SEQ ID NO: 18941 - DNA, 40 bp, Artificial Sequence
  Description of Artificial Sequence: Synthetic primer
tataaatatgactgtagtcttctggacccattacccaaac

SEQ ID NO: 18942 - DNA, 40 bp, Artificial Sequence
  Description of Artificial Sequence: Synthetic primer
aaggggaagtggcacaaggcaccattggaatttcctcctc

SEQ ID NO: 18943 - DNA, 40 bp, Artificial Sequence
  Description of Artificial Sequence: Synthetic primer
attccaaatggtttacaagaatttttagaccctctgtgcc

SEQ ID NO: 18944 - DNA, 40 bp, Artificial Sequence
  Description of Artificial Sequence: Synthetic primer
caggaggtgaagaatgtacacatgtacagttgaggattag

SEQ ID NO: 18945 - DNA, 40 bp, Artificial Sequence
  Description of Artificial Sequence: Synthetic primer
caatcagtataaaacggaagcagcctctcgatataacctg

SEQ ID NO: 18946 - DNA, 40 bp, Artificial Sequence
  Description of Artificial Sequence: Synthetic primer
tggtggagctacaccggaggctgatggcgctgcgggagcg

SEQ ID NO: 18947 - DNA, 40 bp, Artificial Sequence
  Description of Artificial Sequence: Synthetic primer
tcccaagaagagctgcccttgccctggggggcagatctgg

SEQ ID NO: 18948 - DNA, 40 bp, Artificial Sequence
  Description of Artificial Sequence: Synthetic primer
aagataaacagtgtgcaacagaagaaattaaaactggaag

SEQ ID NO: 18949 - DNA, 40 bp, Artificial Sequence
  Description of Artificial Sequence: Synthetic primer
agaaccaaaggcacaatggtggtgaaccaggacagggaag

SEQ ID NO: 18950 - DNA, 40 bp, Artificial Sequence
  Description of Artificial Sequence: Synthetic primer
caatttcaagtgtggaaaccatctgtaggcaagctctttt

SEQ ID NO: 18951 - DNA, 40 bp, Artificial Sequence
  Description of Artificial Sequence: Synthetic primer
tcaaattgaggaagcaggattctcctcagtgtcccacatc

SEQ ID NO: 18952 - DNA, 40 bp, Artificial Sequence
  Description of Artificial Sequence: Synthetic primer
aactttacaaaggatatgctgatggagggcacggaggaag

SEQ ID NO: 18953 - DNA, 40 bp, Artificial Sequence
  Description of Artificial Sequence: Synthetic primer
gccacccacagcggcccacactgcaaacttcctcctcaac

SEQ ID NO: 18954 - DNA, 40 bp, Artificial Sequence
  Description of Artificial Sequence: Synthetic primer
acttcttcagaaaataaaatagatttcaatgacttcataa

SEQ ID NO: 18955 - DNA, 40 bp, Artificial Sequence
  Description of Artificial Sequence: Synthetic primer
ttagacttgagaggagagagtttacctgctcttaattttt

SEQ ID NO: 18956 - DNA, 40 bp, Artificial Sequence
  Description of Artificial Sequence: Synthetic primer
tcccttcccactctgggctgtacccaggccccaaggctct

SEQ ID NO: 18957 - DNA, 40 bp, Artificial Sequence
  Description of Artificial Sequence: Synthetic primer
ccttttgctaaatctcacctggttcatggttcttcacctg

SEQ ID NO: 18958 - DNA, 40 bp, Artificial Sequence
  Description of Artificial Sequence: Synthetic primer
atgtgctggggagccagcggtggcgcattcccagtgatac

SEQ ID NO: 18959 - DNA, 40 bp, Artificial Sequence
  Description of Artificial Sequence: Synthetic primer
tcgggggacagtctgtcccccgacccgtggaagcgggacg

SEQ ID NO: 18960 - DNA, 40 bp, Artificial Sequence
  Description of Artificial Sequence: Synthetic primer
gaatataatttttgactaacctgtgactggaaaataagtc

SEQ ID NO: 18961 - DNA, 40 bp, Artificial Sequence
  Description of Artificial Sequence: Synthetic primer
aatgttactaacaatctgaaatctctggaggctgcatctg

SEQ ID NO: 18962 - DNA, 40 bp, Artificial Sequence
  Description of Artificial Sequence: Synthetic primer
gtgttggtgccatagccagatgaagggagcgaggccagag

SEQ ID NO: 18963 - DNA, 40 bp, Artificial Sequence
  Description of Artificial Sequence: Synthetic primer
tttcactagaaaagctttccagtttgtatatttatgctga

SEQ ID NO: 18964 - DNA, 40 bp, Artificial Sequence
  Description of Artificial Sequence: Synthetic primer
caactactcccaggagtgtggcagctttctcctggctgag

SEQ ID NO: 18965 - DNA, 40 bp, Artificial Sequence
  Description of Artificial Sequence: Synthetic primer
aggaactggcagaggagctggccagtagcctgtcgggaag

SEQ ID NO: 18966 - DNA, 40 bp, Artificial Sequence
  Description of Artificial Sequence: Synthetic primer
cctcgctgtggtcttcacttggctccacagtttgttccag

SEQ ID NO: 18967 - DNA, 40 bp, Artificial Sequence
  Description of Artificial Sequence: Synthetic primer
cagagttagatgagcctctgaagacatctcatatactctg

SEQ ID NO: 18968 - DNA, 40 bp, Artificial Sequence
  Description of Artificial Sequence: Synthetic primer
tggtccacactccaattctgatcagccagccatcaagcag

SEQ ID NO: 18969 - DNA, 40 bp, Artificial Sequence
  Description of Artificial Sequence: Synthetic primer
gtggcatcatctcattttttaggaagacatgataatactg

SEQ ID NO: 18970 - DNA, 40 bp, Artificial Sequence
  Description of Artificial Sequence: Synthetic primer
cggtattgctgaaggaaaggggcagctctctgggaagtgg

SEQ ID NO: 18971 - DNA, 40 bp, Artificial Sequence
  Description of Artificial Sequence: Synthetic primer
ctctctcttttaataaggtgtttctgtctaccagtttcac

SEQ ID NO: 18972 - DNA, 40 bp, Artificial Sequence
  Description of Artificial Sequence: Synthetic primer
gatgatcaaaatgtctctcagctatgattttctcacacag

SEQ ID NO: 18973 - DNA, 40 bp, Artificial Sequence
  Description of Artificial Sequence: Synthetic primer
agaagaggacagcggctgcgatcaccgtgcggcacagctc

SEQ ID NO: 18974 - DNA, 40 bp, Artificial Sequence
  Description of Artificial Sequence: Synthetic primer
gccggcggccccggcccgctgcgccctcgctccccgcctc

SEQ ID NO: 18975 - DNA, 40 bp, Artificial Sequence
  Description of Artificial Sequence: Synthetic primer
gcctgccatagccaggagcgcatctcaatggaaacatcac

SEQ ID NO: 18976 - DNA, 40 bp, Artificial Sequence
  Description of Artificial Sequence: Synthetic primer
aaaattgaattttgctctacacagttaacatatagtggcc

SEQ ID NO: 18977 - DNA, 40 bp, Artificial Sequence
  Description of Artificial Sequence: Synthetic primer
caggttctctgggtccagggtgactctccaaagaaattgg

SEQ ID NO: 18978 - DNA, 40 bp, Artificial Sequence
  Description of Artificial Sequence: Synthetic primer
agctgtggtgggctccagatggcggtggcaggcagccaag

SEQ ID NO: 18979 - DNA, 40 bp, Artificial Sequence
  Description of Artificial Sequence: Synthetic primer
acatgctgacacaggtgtccacggccaggtggtgagtttg

SEQ ID NO: 18980 - DNA, 40 bp, Artificial Sequence
  Description of Artificial Sequence: Synthetic primer
gattcagtacttcaagtttaacacatttttccaaattctc

SEQ ID NO: 18981 - DNA, 40 bp, Artificial Sequence
  Description of Artificial Sequence: Synthetic primer
aagaaagaaagtcacagtattggaggaaaagctagtttca

SEQ ID NO: 18982 - DNA, 40 bp, Artificial Sequence
  Description of Artificial Sequence: Synthetic primer
cctttttatgccctaactgcctgtccaagacagccatctc

SEQ ID NO: 18983 - DNA, 40 bp, Artificial Sequence
  Description of Artificial Sequence: Synthetic primer
tcaccgtgctggcccagggcttccaggactgaggaagagc

SEQ ID NO: 18984 - DNA, 40 bp, Artificial Sequence
  Description of Artificial Sequence: Synthetic primer
agaagatcccatggttggaggtgttgggggagatgtccag

SEQ ID NO: 18985 - DNA, 40 bp, Artificial Sequence
  Description of Artificial Sequence: Synthetic primer
agggaagaagatctagcgcccttctccctccggaagaggt

SEQ ID NO: 18986 - DNA, 40 bp, Artificial Sequence
  Description of Artificial Sequence: Synthetic primer
agaagtctccacgagcagaatacagccactgtaaactcag

SEQ ID NO: 18987 - DNA, 40 bp, Artificial Sequence
  Description of Artificial Sequence: Synthetic primer
ttactgttgggagcttaatggtagaaacttccttggtttc

SEQ ID NO: 18988 - DNA, 40 bp, Artificial Sequence
  Description of Artificial Sequence: Synthetic primer
ctctgaggaggagcgagcccagcggctggctgagctccag

SEQ ID NO: 18989 - DNA, 40 bp, Artificial Sequence
  Description of Artificial Sequence: Synthetic primer
cacttgttactctatgatattcccagacattgcttgcttg

SEQ ID NO: 18990 - DNA, 40 bp, Artificial Sequence
  Description of Artificial Sequence: Synthetic primer
tagctgtaacaatgtgtgcatttcatcagcttctttcaac

SEQ ID NO: 18991 - DNA, 40 bp, Artificial Sequence
  Description of Artificial Sequence: Synthetic primer
cagagaatctaaagtcatacaatgggcaccctaccgacag

SEQ ID NO: 18992 - DNA, 40 bp, Artificial Sequence
  Description of Artificial Sequence: Synthetic primer
tgcttcaacagtgactacgcatgcagctgtgagacgaagg

SEQ ID NO: 18993 - DNA, 40 bp, Artificial Sequence
  Description of Artificial Sequence: Synthetic primer
aagcaacatgattgtgattataagatactccctgctttgg

SEQ ID NO: 18994 - DNA, 40 bp, Artificial Sequence
  Description of Artificial Sequence: Synthetic primer
acaagggttcacgttgataaggacaaggccctccaccatc

SEQ ID NO: 18995 - DNA, 40 bp, Artificial Sequence
  Description of Artificial Sequence: Synthetic primer
ttgcacgacatggtgcctggtgggagaatggggttggttg

SEQ ID NO: 18996 - DNA, 40 bp, Artificial Sequence
  Description of Artificial Sequence: Synthetic primer
aaaaaatgactgtctggtcatttgcatgtttcctttcacg

SEQ ID NO: 18997 - DNA, 40 bp, Artificial Sequence
  Description of Artificial Sequence: Synthetic primer
ctgcaagttcaaagggcaggagtgcggccaccaagacttc

SEQ ID NO: 18998 - DNA, 40 bp, Artificial Sequence
  Description of Artificial Sequence: Synthetic primer
cgtactttgctctccttgcgggtggttgccgagccgagag

SEQ ID NO: 18999 - DNA, 40 bp, Artificial Sequence
  Description of Artificial Sequence: Synthetic primer
ctcaatataagacccagtttgatgaaggacgggttgatgg

SEQ ID NO: 19000 - DNA, 40 bp, Artificial Sequence
  Description of Artificial Sequence: Synthetic primer
gtgagaggaccaacagttccgacagcgagcgctccccaga

SEQ ID NO: 19001 - DNA, 40 bp, Artificial Sequence
  Description of Artificial Sequence: Synthetic primer
taagccggtaccacccctatggcaagagccacttatccac

SEQ ID NO: 19002 - DNA, 40 bp, Artificial Sequence
  Description of Artificial Sequence: Synthetic primer
gaaggagaagtacctgcggccgtccccgctgctcttccac

SEQ ID NO: 19003 - DNA, 40 bp, Artificial Sequence
  Description of Artificial Sequence: Synthetic primer
gaggcaaatcattttgtttaactttttattaaagtgtaac

SEQ ID NO: 19004 - DNA, 40 bp, Artificial Sequence
  Description of Artificial Sequence: Synthetic primer
acgaattctttatgaatacttagcagaggccagtgttgtg

SEQ ID NO: 19005 - DNA, 40 bp, Artificial Sequence
  Description of Artificial Sequence: Synthetic primer
tatttttaaatacagtaagtaaaaaagcccccaaataacc

SEQ ID NO: 19006 - DNA, 40 bp, Artificial Sequence
  Description of Artificial Sequence: Synthetic primer
cccgggatccggcttttgtcccggcccagccggacttttc

SEQ ID NO: 19007 - DNA, 40 bp, Artificial Sequence
  Description of Artificial Sequence: Synthetic primer
cttgctttttgacaggccagaagaagcggtacatgaagac

SEQ ID NO: 19008 - DNA, 40 bp, Artificial Sequence
  Description of Artificial Sequence: Synthetic primer
cccaaaatgaggagagtagcagaaactgattatgaaatgg

SEQ ID NO: 19009 - DNA, 40 bp, Artificial Sequence
  Description of Artificial Sequence: Synthetic primer
cacccagtgttgaccccagtggctgctaaccaagccaagc

SEQ ID NO: 19010 - DNA, 40 bp, Artificial Sequence
  Description of Artificial Sequence: Synthetic primer
gcttcgacgagttcaaggtgcgcctgcaggacctcagctc

SEQ ID NO: 19011 - DNA, 40 bp, Artificial Sequence
  Description of Artificial Sequence: Synthetic primer
ccccatcagttctcgggaaggggagaagcagatccagatg

SEQ ID NO: 19012 - DNA, 40 bp, Artificial Sequence
  Description of Artificial Sequence: Synthetic primer
gcatgagagatttacagaggtggaaattctcatgcttaac

SEQ ID NO: 19013 - DNA, 40 bp, Artificial Sequence
  Description of Artificial Sequence: Synthetic primer
tttagttggacaactggagctgattataaagcacaagaat

SEQ ID NO: 19014 - DNA, 40 bp, Artificial Sequence
  Description of Artificial Sequence: Synthetic primer
tcgcagtagcgtaggtgctccgacagcttgcccttcttgc

SEQ ID NO: 19015 - DNA, 40 bp, Artificial Sequence
  Description of Artificial Sequence: Synthetic primer
tggccaagaggaagaccccaccagtgagatccactgctcc

SEQ ID NO: 19016 - DNA, 40 bp, Artificial Sequence
  Description of Artificial Sequence: Synthetic primer
tgttcccctaaatacagaatatggctttaagaagaaaatg

SEQ ID NO: 19017 - DNA, 40 bp, Artificial Sequence
  Description of Artificial Sequence: Synthetic primer
gctaggttgaggcctcttctctcagcagatgggaactgat

SEQ ID NO: 19018 - DNA, 40 bp, Artificial Sequence
  Description of Artificial Sequence: Synthetic primer
catagctttaatatctagttcaaagctaaccatagtataa

SEQ ID NO: 19019 - DNA, 40 bp, Artificial Sequence
  Description of Artificial Sequence: Synthetic primer
tgaagtggggtgacatcgagttccctccccccttcgggcg

SEQ ID NO: 19020 - DNA, 40 bp, Artificial Sequence
  Description of Artificial Sequence: Synthetic primer
cagccagaagtacaacgaagtgaccgccacctacctcctg

SEQ ID NO: 19021 - DNA, 40 bp, Artificial Sequence
  Description of Artificial Sequence: Synthetic primer
agacggaggtaggacacggactttgcacacctaacaccag

SEQ ID NO: 19022 - DNA, 40 bp, Artificial Sequence
  Description of Artificial Sequence: Synthetic primer
cctagacagtatgagttttgaggctgctcatgaattttgc

SEQ ID NO: 19023 - DNA, 40 bp, Artificial Sequence
  Description of Artificial Sequence: Synthetic primer
gagggcagagcagctaagtcaagaaaatgagaagctgatg

SEQ ID NO: 19024 - DNA, 40 bp, Artificial Sequence
  Description of Artificial Sequence: Synthetic primer
accattatttggaaagtgggggaaatgtttacatcaggag

SEQ ID NO: 19025 - DNA, 40 bp, Artificial Sequence
  Description of Artificial Sequence: Synthetic primer
gtagttcatgcttctgacaaaaccgtggaagtaaaaccag

SEQ ID NO: 19026 - DNA, 40 bp, Artificial Sequence
  Description of Artificial Sequence: Synthetic primer
ttacagtctcatggttttccttttggttcaagattagaag

SEQ ID NO: 19027 - DNA, 40 bp, Artificial Sequence
  Description of Artificial Sequence: Synthetic primer
ctctaagcccggagcccggcgctttccccgcaagatggac

SEQ ID NO: 19028 - DNA, 40 bp, Artificial Sequence
  Description of Artificial Sequence: Synthetic primer
tggcttcctttgtacatgcggcttttagaggcatctggag

SEQ ID NO: 19029 - DNA, 40 bp, Artificial Sequence
  Description of Artificial Sequence: Synthetic primer
gcttattggggttcagcctcctccggatccccaacttttg

SEQ ID NO: 19030 - DNA, 40 bp, Artificial Sequence
  Description of Artificial Sequence: Synthetic primer
ggagatcatgctggacattcagcaggatgagtacctgccc

SEQ ID NO: 19031 - DNA, 40 bp, Artificial Sequence
  Description of Artificial Sequence: Synthetic primer
tagactgtctgcagagggtcgttgattgggaggctgttag

SEQ ID NO: 19032 - DNA, 40 bp, Artificial Sequence
  Description of Artificial Sequence: Synthetic primer
gctttccactgagatctactggataaagaataaagttcta

SEQ ID NO: 19033 - DNA, 40 bp, Artificial Sequence
  Description of Artificial Sequence: Synthetic primer
ctgaaacccactaaaacttctacttctccttcccagttcc

SEQ ID NO: 19034 - DNA, 40 bp, Artificial Sequence
  Description of Artificial Sequence: Synthetic primer
agacttctcagagaatagagactgtgacaagctggaagat

SEQ ID NO: 19035 - DNA, 40 bp, Artificial Sequence
  Description of Artificial Sequence: Synthetic primer
tggaagttgtagtgctacagatagacgagggctggttctg

SEQ ID NO: 19036 - DNA, 40 bp, Artificial Sequence
  Description of Artificial Sequence: Synthetic primer
agtgttatgatatcttccagtttttgctttcataggtcag

SEQ ID NO: 19037 - DNA, 40 bp, Artificial Sequence
  Description of Artificial Sequence: Synthetic primer
aaaaagcggtggcagcgtttaaaccaaaggcgcactaaac

SEQ ID NO: 19038 - DNA, 40 bp, Artificial Sequence
  Description of Artificial Sequence: Synthetic primer
agccggcagcagaacgaactagctgagctccatgccaacc

SEQ ID NO: 19039 - DNA, 40 bp, Artificial Sequence
  Description of Artificial Sequence: Synthetic primer
tcttgagaagaagaattatgttcattttgcagctactcag

SEQ ID NO: 19040 - DNA, 40 bp, Artificial Sequence
  Description of Artificial Sequence: Synthetic primer
gagtgtgattatcctaattcaagagtcactaaaactcatc

SEQ ID NO: 19041 - DNA, 40 bp, Artificial Sequence
  Description of Artificial Sequence: Synthetic primer
cttataaattggagctaatcgtgtagccaaactctgtaag

SEQ ID NO: 19042 - DNA, 40 bp, Artificial Sequence
  Description of Artificial Sequence: Synthetic primer
ggactctttgagggcctggagctgctcctggagctggtcc

SEQ ID NO: 19043 - DNA, 40 bp, Artificial Sequence
  Description of Artificial Sequence: Synthetic primer
caaatagaacatggggaagttcgctcccagttcaaattac

SEQ ID NO: 19044 - DNA, 40 bp, Artificial Sequence
  Description of Artificial Sequence: Synthetic primer
aaaatcaattctccttgagagactgtacttgcactaactg

SEQ ID NO: 19045 - DNA, 40 bp, Artificial Sequence
  Description of Artificial Sequence: Synthetic primer
ataaacaatgtaggccctaatctccccaagccaaataata

SEQ ID NO: 19046 - DNA, 40 bp, Artificial Sequence
  Description of Artificial Sequence: Synthetic primer
gttatcgaggtgtccatgaacttctatgtatggtcagcag

SEQ ID NO: 19047 - DNA, 40 bp, Artificial Sequence
  Description of Artificial Sequence: Synthetic primer
aacccccagtacttccgtcagggacacaactgccacaagc

SEQ ID NO: 19048 - DNA, 40 bp, Artificial Sequence
  Description of Artificial Sequence: Synthetic primer
tgacctactttagtatgtgttctgtagcgattcatattag

SEQ ID NO: 19049 - DNA, 40 bp, Artificial Sequence
  Description of Artificial Sequence: Synthetic primer
tgaagacgatatttccaagctgcaggaccgatgataccac

SEQ ID NO: 19050 - DNA, 40 bp, Artificial Sequence
  Description of Artificial Sequence: Synthetic primer
ggacttttgtaatgttgtttaaatgaggaaaaatttctgt

SEQ ID NO: 19051 - DNA, 40 bp, Artificial Sequence
  Description of Artificial Sequence: Synthetic primer
gcaagaattgaataaaatactgcgaagctggcaaccaagc

SEQ ID NO: 19052 - DNA, 40 bp, Artificial Sequence
  Description of Artificial Sequence: Synthetic primer
caaaaggaactcaagctacaagggggcaggtgctcctcag

SEQ ID NO: 19053 - DNA, 40 bp, Artificial Sequence
  Description of Artificial Sequence: Synthetic primer
cttgccccggccctgccgcgccgaggatctgtccgcctgc

SEQ ID NO: 19054 - DNA, 40 bp, Artificial Sequence
  Description of Artificial Sequence: Synthetic primer
gctggatcctcacagagctggagcagtcagccacggtgat

SEQ ID NO: 19055 - DNA, 40 bp, Artificial Sequence
  Description of Artificial Sequence: Synthetic primer
accactgaggatcagattttgaagagagatatgccaccag

SEQ ID NO: 19056 - DNA, 40 bp, Artificial Sequence
  Description of Artificial Sequence: Synthetic primer
gtttgctggcagaagtgaatgtttggtgaggttattttgg

SEQ ID NO: 19057 - DNA, 40 bp, Artificial Sequence
  Description of Artificial Sequence: Synthetic primer
tacagctctgccctgaccccagcccctgcccctggacacc

SEQ ID NO: 19058 - DNA, 40 bp, Artificial Sequence
  Description of Artificial Sequence: Synthetic primer
ctaccttcaagctataggctcttttggtttcaaaatctac

SEQ ID NO: 19059 - DNA, 40 bp, Artificial Sequence
  Description of Artificial Sequence: Synthetic primer
aaccattaatcttcatcagaagttcgtctaacagatttgc

SEQ ID NO: 19060 - DNA, 40 bp, Artificial Sequence
  Description of Artificial Sequence: Synthetic primer
tgtttttgggaatgaatcatttggaggtggatttgctgac

SEQ ID NO: 19061 - DNA, 40 bp, Artificial Sequence
  Description of Artificial Sequence: Synthetic primer
tgagacttgactcactgatctacctttaggcatgtcttcc

SEQ ID NO: 19062 - DNA, 40 bp, Artificial Sequence
  Description of Artificial Sequence: Synthetic primer
gttcgaaagaggctcaatgggaggagctgaaaaagaaagc

SEQ ID NO: 19063 - DNA, 40 bp, Artificial Sequence
  Description of Artificial Sequence: Synthetic primer
gggccactcgaaatgggttgtctggacgcccgattcttcc

SEQ ID NO: 19064 - DNA, 40 bp, Artificial Sequence
  Description of Artificial Sequence: Synthetic primer
tgaaatggaaaaaaggaagaattaacaagctagtttgtac

SEQ ID NO: 19065 - DNA, 40 bp, Artificial Sequence
  Description of Artificial Sequence: Synthetic primer
tcctttgaagattcctcttgaccttcatggctagaatctg

SEQ ID NO: 19066 - DNA, 40 bp, Artificial Sequence
  Description of Artificial Sequence: Synthetic primer
aagtggtaaattctggtttggcaataacctgcccagttgc

SEQ ID NO: 19067 - DNA, 40 bp, Artificial Sequence
  Description of Artificial Sequence: Synthetic primer
ttcttcttttccgttccttttatttaagtctttttattta

SEQ ID NO: 19068 - DNA, 40 bp, Artificial Sequence
  Description of Artificial Sequence: Synthetic primer
cggcccagccgactggccatctcctcgtagtcgcgctggt

SEQ ID NO: 19069 - DNA, 40 bp, Artificial Sequence
  Description of Artificial Sequence: Synthetic primer
ctaccaggtggccaatggcatggagtttctggcctccaag

SEQ ID NO: 19070 - DNA, 40 bp, Artificial Sequence
  Description of Artificial Sequence: Synthetic primer
tggcaccttctttcaatttatgttttattttgctatggtg

SEQ ID NO: 19071 - DNA, 40 bp, Artificial Sequence
  Description of Artificial Sequence: Synthetic primer
attttgagaccatgaagaaccagtggatcgataatgttga

SEQ ID NO: 19072 - DNA, 40 bp, Artificial Sequence
  Description of Artificial Sequence: Synthetic primer
gatcgtggaggcatgagcagaggtgggcggggaggaggac

SEQ ID NO: 19073 - DNA, 40 bp, Artificial Sequence
  Description of Artificial Sequence: Synthetic primer
ataggagagttcaccgggcaggaagaactagacatttgtg

SEQ ID NO: 19074 - DNA, 40 bp, Artificial Sequence
  Description of Artificial Sequence: Synthetic primer
atataaaggtgccttagcattgggatacaaggaatttcag

SEQ ID NO: 19075 - DNA, 40 bp, Artificial Sequence
  Description of Artificial Sequence: Synthetic primer
aagaaaaggatactccaaatgaaaaccgacaaaaattaag

SEQ ID NO: 19076 - DNA, 40 bp, Artificial Sequence
  Description of Artificial Sequence: Synthetic primer
ctcagttccgaacccaggcaggtgaagaggaggccaggag

SEQ ID NO: 19077 - DNA, 40 bp, Artificial Sequence
  Description of Artificial Sequence: Synthetic primer
tcaagtatttctcccagcacagccggagtccccacagaag

SEQ ID NO: 19078 - DNA, 40 bp, Artificial Sequence
  Description of Artificial Sequence: Synthetic primer
ccggccaggggcggctgctccaccaggaggcccgcgtctc

SEQ ID NO: 19079 - DNA, 40 bp, Artificial Sequence
  Description of Artificial Sequence: Synthetic primer
ttgcagtccttggcaatgtggccacctctaccgcagttat

SEQ ID NO: 19080 - DNA, 40 bp, Artificial Sequence
  Description of Artificial Sequence: Synthetic primer
gctggggaatggggagccatgccccggcgccaggggttcg

SEQ ID NO: 19081 - DNA, 40 bp, Artificial Sequence
  Description of Artificial Sequence: Synthetic primer
ttggaagtttcactaagtagtttgaacctggctgttcctc

SEQ ID NO: 19082 - DNA, 40 bp, Artificial Sequence
  Description of Artificial Sequence: Synthetic primer
aagtcaactgccagactcttcctctgcaggcgcgagtagc

SEQ ID NO: 19083 - DNA, 40 bp, Artificial Sequence
  Description of Artificial Sequence: Synthetic primer
gaaaataactgaaaagattaaaagtgagagctgaaaagag

SEQ ID NO: 19084 - DNA, 40 bp, Artificial Sequence
  Description of Artificial Sequence: Synthetic primer
aatatccgtgtctggcacctgccccaggacagagtagtgg

SEQ ID NO: 19085 - DNA, 40 bp, Artificial Sequence
  Description of Artificial Sequence: Synthetic primer
aattggaagctatagacccattaaatctttctacaatatg

SEQ ID NO: 19086 - DNA, 40 bp, Artificial Sequence
  Description of Artificial Sequence: Synthetic primer
cagctcccgtttgatcttggttggaggtggggcatgaagc

SEQ ID NO: 19087 - DNA, 40 bp, Artificial Sequence
  Description of Artificial Sequence: Synthetic primer
aatttctatgcaatttactattctctgaagcctatgaatg

SEQ ID NO: 19088 - DNA, 40 bp, Artificial Sequence
  Description of Artificial Sequence: Synthetic primer
cacctccaggcccacacagtagttgctgtacaccacactg

SEQ ID NO: 19089 - DNA, 40 bp, Artificial Sequence
  Description of Artificial Sequence: Synthetic primer
ctgggtgcaaatgtacgatccaccattccgtgtgctactg

SEQ ID NO: 19090 - DNA, 40 bp, Artificial Sequence
  Description of Artificial Sequence: Synthetic primer
tttcatttgagaccaagcccgtattccaactgcgggagtc

SEQ ID NO: 19091 - DNA, 40 bp, Artificial Sequence
  Description of Artificial Sequence: Synthetic primer
accctgggccctggggctatccgctacatcatcaatacag

SEQ ID NO: 19092 - DNA, 40 bp, Artificial Sequence
  Description of Artificial Sequence: Synthetic primer
ataagactatcttccatggtcataatcatcagattgaaac

SEQ ID NO: 19093 - DNA, 40 bp, Artificial Sequence
  Description of Artificial Sequence: Synthetic primer
accactccgaacttgagttgggtgaagagtcgcacaaaaa

SEQ ID NO: 19094 - DNA, 40 bp, Artificial Sequence
  Description of Artificial Sequence: Synthetic primer
gttcttatttgccagagccaaattttatctggaagttgag

SEQ ID NO: 19095 - DNA, 40 bp, Artificial Sequence
  Description of Artificial Sequence: Synthetic primer
gatggtgtccccacccaccccacagctctgaatcgtgtcc

SEQ ID NO: 19096 - DNA, 40 bp, Artificial Sequence
  Description of Artificial Sequence: Synthetic primer
ccatcaggaatctcccaatcatcactcgagtcccgtctac

SEQ ID NO: 19097 - DNA, 40 bp, Artificial Sequence
  Description of Artificial Sequence: Synthetic primer
gatcaaaatcaaatgttgtgtttgtgatatgaaagtgtcc

SEQ ID NO: 19098 - DNA, 40 bp, Artificial Sequence
  Description of Artificial Sequence: Synthetic primer
ggcggaggcgcacgtcggcctccacactctcactgatcca

SEQ ID NO: 19099 - DNA, 40 bp, Artificial Sequence
  Description of Artificial Sequence: Synthetic primer
ggcagaccctttccaactcacaaccaataaaggggcttgg

SEQ ID NO: 19100 - DNA, 40 bp, Artificial Sequence
  Description of Artificial Sequence: Synthetic primer
gctccgcggggaattggatttccaccagccgcctccagac

SEQ ID NO: 19101 - DNA, 40 bp, Artificial Sequence
  Description of Artificial Sequence: Synthetic primer
caaagctaaatacttcctgcgcctgccttctccttgaaac

SEQ ID NO: 19102 - DNA, 40 bp, Artificial Sequence
  Description of Artificial Sequence: Synthetic primer
tctgtcaactaccaaatgtgtaaaattttctgtatttcac

SEQ ID NO: 19103 - DNA, 40 bp, Artificial Sequence
  Description of Artificial Sequence: Synthetic primer
actgtctttgatttcccaccacctccattagaccaagtgc

SEQ ID NO: 19104 - DNA, 40 bp, Artificial Sequence
  Description of Artificial Sequence: Synthetic primer
ttcgtttataagcactgtcaccccttccttggcacttttt

SEQ ID NO: 19105 - DNA, 40 bp, Artificial Sequence
  Description of Artificial Sequence: Synthetic primer
ttccgggtggaaggaagctgggcacgattcacagcagagc

SEQ ID NO: 19106 - DNA, 40 bp, Artificial Sequence
  Description of Artificial Sequence: Synthetic primer
tgtggtagtaagaacatgtcaagagtgctttcttcaaacc

SEQ ID NO: 19107 - DNA, 40 bp, Artificial Sequence
  Description of Artificial Sequence: Synthetic primer
gaaaaccctttgacctaacgggggcggtaaataagaaaac

SEQ ID NO: 19108 - DNA, 40 bp, Artificial Sequence
  Description of Artificial Sequence: Synthetic primer
ttacttagcacagcacgcaacaccctagtaaatgctcaag

SEQ ID NO: 19109 - DNA, 40 bp, Artificial Sequence
  Description of Artificial Sequence: Synthetic primer
aggcttcaaggaatgcctgttaagccccagggaggaagtg

SEQ ID NO: 19110 - DNA, 40 bp, Artificial Sequence
  Description of Artificial Sequence: Synthetic primer
ttggccccccagggccacctgaactctctgaccctgaaca

SEQ ID NO: 19111 - DNA, 40 bp, Artificial Sequence
  Description of Artificial Sequence: Synthetic primer
cgcgccagccgcgcaaaggggcggggcacccggggggcgg

SEQ ID NO: 19112 - DNA, 40 bp, Artificial Sequence
  Description of Artificial Sequence: Synthetic primer
ctggaaatattagcaagcaactaaacaggtattgaaccac

SEQ ID NO: 19113 - DNA, 40 bp, Artificial Sequence
  Description of Artificial Sequence: Synthetic primer
tgtccccaagtctaaggtgacaggcaaagaagtcactagg

SEQ ID NO: 19114 - DNA, 40 bp, Artificial Sequence
  Description of Artificial Sequence: Synthetic primer
tcagctgcccccccacgtagcctggacatcgtcttatccc

SEQ ID NO: 19115 - DNA, 40 bp, Artificial Sequence
  Description of Artificial Sequence: Synthetic primer
acagctacggccctgtccagagcatggtgctgaatgtcac

SEQ ID NO: 19116 - DNA, 40 bp, Artificial Sequence
  Description of Artificial Sequence: Synthetic primer
ctgccgccttcctgtcggctaaggctgcagcctcctcctc

SEQ ID NO: 19117 - DNA, 40 bp, Artificial Sequence
  Description of Artificial Sequence: Synthetic primer
gtcttatacggggtcaggtcaaaggaacactggggtggag

SEQ ID NO: 19118 - DNA, 40 bp, Artificial Sequence
  Description of Artificial Sequence: Synthetic primer
ttcaaatgactttaaatcattaaaagaatcagcaaattac

SEQ ID NO: 19119 - DNA, 40 bp, Artificial Sequence
  Description of Artificial Sequence: Synthetic primer
atgaaaacagactacttacaaatgtgcttaatatctcagg

SEQ ID NO: 19120 - DNA, 40 bp, Artificial Sequence
  Description of Artificial Sequence: Synthetic primer
ttccaagaactaccaagaaaatacaagagatatccaatgc

SEQ ID NO: 19121 - DNA, 40 bp, Artificial Sequence
  Description of Artificial Sequence: Synthetic primer
aggaagcctagttccactgttttgttttgtttttcctacc

SEQ ID NO: 19122 - DNA, 40 bp, Artificial Sequence
  Description of Artificial Sequence: Synthetic primer
aatgtcaccttaaatatcagttgagagcccagaacctgtg

SEQ ID NO: 19123 - DNA, 40 bp, Artificial Sequence
  Description of Artificial Sequence: Synthetic primer
ggtgactgtccagagcctggaactgtgcccacaccagaag

SEQ ID NO: 19124 - DNA, 40 bp, Artificial Sequence
  Description of Artificial Sequence: Synthetic primer
gggtcaaagaagtagtgaagaagcattctcagttcatagg

SEQ ID NO: 19125 - DNA, 40 bp, Artificial Sequence
  Description of Artificial Sequence: Synthetic primer
tttctctttggcttcttaaagctcacaaccaattcagacc

SEQ ID NO: 19126 - DNA, 40 bp, Artificial Sequence
  Description of Artificial Sequence: Synthetic primer
cattctttatttgcttatctgatttgctttgctttattgg

SEQ ID NO: 19127 - DNA, 40 bp, Artificial Sequence
  Description of Artificial Sequence: Synthetic primer
cagcctttcctcagaacagactcaggcatgcacgcgatgg

SEQ ID NO: 19128 - DNA, 40 bp, Artificial Sequence
  Description of Artificial Sequence: Synthetic primer
caacagctgttatcttcagcttcttcaaggtatcactgag

SEQ ID NO: 19129 - DNA, 40 bp, Artificial Sequence
  Description of Artificial Sequence: Synthetic primer
ctaaatgagaattgttacattgcaaattgttgaataaaat

SEQ ID NO: 19130 - DNA, 40 bp, Artificial Sequence
  Description of Artificial Sequence: Synthetic primer
tgcacaaaagtgagctctgaggggtcgatcacccatttcc

SEQ ID NO: 19131 - DNA, 40 bp, Artificial Sequence
  Description of Artificial Sequence: Synthetic primer
acagcggccaagagccgcggcggagggcacggcccgagcc

SEQ ID NO: 19132 - DNA, 40 bp, Artificial Sequence
  Description of Artificial Sequence: Synthetic primer
ggagaaggagggggagagcaaggagttgaagcggctggtg

SEQ ID NO: 19133 - DNA, 40 bp, Artificial Sequence
  Description of Artificial Sequence: Synthetic primer
tgggggggtcccgctgcttcccagggcctcgcctgctgac

SEQ ID NO: 19134 - DNA, 40 bp, Artificial Sequence
  Description of Artificial Sequence: Synthetic primer
ttttcatgcagtgctaaaaagacattctttggaattgatg

SEQ ID NO: 19135 - DNA, 40 bp, Artificial Sequence
  Description of Artificial Sequence: Synthetic primer
cagagctgaggcccgggcgctggctgcagctcacgtccag

SEQ ID NO: 19136 - DNA, 40 bp, Artificial Sequence
  Description of Artificial Sequence: Synthetic primer
ctgccctgatgctggtcagcaggctggacaggtggggttc

SEQ ID NO: 19137 - DNA, 40 bp, Artificial Sequence
  Description of Artificial Sequence: Synthetic primer
gtgggtgctacctgtgtgtgtgtagatgagtgtgctgaag

SEQ ID NO: 19138 - DNA, 40 bp, Artificial Sequence
  Description of Artificial Sequence: Synthetic primer
tctcaagccctataaatggcttgtattgaacttttacatt

SEQ ID NO: 19139 - DNA, 40 bp, Artificial Sequence
  Description of Artificial Sequence: Synthetic primer
tatcacaaagtcccagggaaaacctgggaataaaatctcc

SEQ ID NO: 19140 - DNA, 40 bp, Artificial Sequence
  Description of Artificial Sequence: Synthetic primer
tctcacctgcaaacacaggcataggtagggtcttcttctg

SEQ ID NO: 19141 - DNA, 40 bp, Artificial Sequence
  Description of Artificial Sequence: Synthetic primer
cctcaccatagctaatcttgggacatcagagggtcgcttc

SEQ ID NO: 19142 - DNA, 40 bp, Artificial Sequence
  Description of Artificial Sequence: Synthetic primer
tctcttcttgcaggaagaactcagcactgctaggatcgag

SEQ ID NO: 19143 - DNA, 40 bp, Artificial Sequence
  Description of Artificial Sequence: Synthetic primer
ctgtgcccaacaacagcttctgtgccgtgggcgtggccta

SEQ ID NO: 19144 - DNA, 40 bp, Artificial Sequence
  Description of Artificial Sequence: Synthetic primer
atctttttttctaggtctctttccagtctttctacctctt

SEQ ID NO: 19145 - DNA, 40 bp, Artificial Sequence
  Description of Artificial Sequence: Synthetic primer
ttgggaagataactctgtcattttcctacttgttcagtcc

SEQ ID NO: 19146 - DNA, 40 bp, Artificial Sequence
  Description of Artificial Sequence: Synthetic primer
agtggtttgtaatccaaatagaactgcagggctctgtaac

SEQ ID NO: 19147 - DNA, 40 bp, Artificial Sequence
  Description of Artificial Sequence: Synthetic primer
ttttaaattttcctgtgccatgtggcagatgtttattctc

SEQ ID NO: 19148 - DNA, 40 bp, Artificial Sequence
  Description of Artificial Sequence: Synthetic primer
ctggcccaggcaagactactgtgacaactgcaaccactgc

SEQ ID NO: 19149 - DNA, 40 bp, Artificial Sequence
  Description of Artificial Sequence: Synthetic primer
ctatgtcatctcctacctggtggatttggacatggtcctc

SEQ ID NO: 19150 - DNA, 40 bp, Artificial Sequence
  Description of Artificial Sequence: Synthetic primer
acaggacgcaaaggggcacacagaggcagtggggaagctg

SEQ ID NO: 19151 - DNA, 40 bp, Artificial Sequence
  Description of Artificial Sequence: Synthetic primer
aaatgaacatcttcaaaagcatgtggaggatctgttgacc

SEQ ID NO: 19152 - DNA, 40 bp, Artificial Sequence
  Description of Artificial Sequence: Synthetic primer
agagaaatgatagttcacagtgtagatgacttcagttcag

SEQ ID NO: 19153 - DNA, 40 bp, Artificial Sequence
  Description of Artificial Sequence: Synthetic primer
gacagcaatggtggctacgatgaggtctcggagggcagac

SEQ ID NO: 19154 - DNA, 40 bp, Artificial Sequence
  Description of Artificial Sequence: Synthetic primer
tccagtgggaactccagggagcacccccacaccggggaac

SEQ ID NO: 19155 - DNA, 40 bp, Artificial Sequence
  Description of Artificial Sequence: Synthetic primer
gggaggaggagcgggcgagaagctgccgccgaacgacagg

SEQ ID NO: 19156 - DNA, 40 bp, Artificial Sequence
  Description of Artificial Sequence: Synthetic primer
cccagtatgtcctctcctctagacccagacatacagttat

SEQ ID NO: 19157 - DNA, 40 bp, Artificial Sequence
  Description of Artificial Sequence: Synthetic primer
ccatcactccccacttctgcacagaccagaccaagctgtc

SEQ ID NO: 19158 - DNA, 40 bp, Artificial Sequence
  Description of Artificial Sequence: Synthetic primer
cttttgaaataaaattggtgctgtgtagacacttgtaacc

SEQ ID NO: 19159 - DNA, 40 bp, Artificial Sequence
  Description of Artificial Sequence: Synthetic primer
aacatgttctgtattcgactagacagctcatcaccttttg

SEQ ID NO: 19160 - DNA, 40 bp, Artificial Sequence
  Description of Artificial Sequence: Synthetic primer
catagcacaggtagaggtacgtcttctctatcctccagtc

SEQ ID NO: 19161 - DNA, 40 bp, Artificial Sequence
  Description of Artificial Sequence: Synthetic primer
ctttggtagacggctgctcagtttccttggaggaactatt

SEQ ID NO: 19162 - DNA, 40 bp, Artificial Sequence
  Description of Artificial Sequence: Synthetic primer
cagatggtggacagcacgaaggcgcagttggctgggaagc

SEQ ID NO: 19163 - DNA, 40 bp, Artificial Sequence
  Description of Artificial Sequence: Synthetic primer
ggagcaggttgcccttctgggtgaatgaggccccgcactg

SEQ ID NO: 19164 - DNA, 40 bp, Artificial Sequence
  Description of Artificial Sequence: Synthetic primer
catctaaaggcatgaagcactcaattgggcaattaacatt

SEQ ID NO: 19165 - DNA, 40 bp, Artificial Sequence
  Description of Artificial Sequence: Synthetic primer
attctgcttcagggccccaggtatccaactttacccagac

SEQ ID NO: 19166 - DNA, 40 bp, Artificial Sequence
  Description of Artificial Sequence: Synthetic primer
tttttgaaatttccagtgatgatggctttcagatctgtgc

SEQ ID NO: 19167 - DNA, 40 bp, Artificial Sequence
  Description of Artificial Sequence: Synthetic primer
gccttctttctccggaccacactcgcttctccctccacac

SEQ ID NO: 19168 - DNA, 40 bp, Artificial Sequence
  Description of Artificial Sequence: Synthetic primer
cacggccaccactggctcctcaggctcgtccggcatcttg

SEQ ID NO: 19169 - DNA, 40 bp, Artificial Sequence
  Description of Artificial Sequence: Synthetic primer
ccacacatctgagcaagacggaattctttcccatctacac

SEQ ID NO: 19170 - DNA, 40 bp, Artificial Sequence
  Description of Artificial Sequence: Synthetic primer
ggaaagggggtgaagggaagtgtctgatgcacggcgagtg

SEQ ID NO: 19171 - DNA, 40 bp, Artificial Sequence
  Description of Artificial Sequence: Synthetic primer
gatggctgtccaaagcttgaataggcatctaggtgaggtc

SEQ ID NO: 19172 - DNA, 40 bp, Artificial Sequence
  Description of Artificial Sequence: Synthetic primer
gagagaactcaagtggaagggaactgaaggctgagcactg

SEQ ID NO: 19173 - DNA, 40 bp, Artificial Sequence
  Description of Artificial Sequence: Synthetic primer
ctactgcaccgatgctgttctgagggaaacgctggctaac

SEQ ID NO: 19174 - DNA, 40 bp, Artificial Sequence
  Description of Artificial Sequence: Synthetic primer
acagtgggaattctagacacatttcaattggtggaaaaac

SEQ ID NO: 19175 - DNA, 40 bp, Artificial Sequence
  Description of Artificial Sequence: Synthetic primer
aacttctctgcattttctagaagctcattttccagacgac

SEQ ID NO: 19176 - DNA, 40 bp, Artificial Sequence
  Description of Artificial Sequence: Synthetic primer
tcctgaccagcacttcacccacgctaccgagaccccactc

SEQ ID NO: 19177 - DNA, 40 bp, Artificial Sequence
  Description of Artificial Sequence: Synthetic primer
actgttagggtgtcccctaaaggtctggagggtgtaacta

SEQ ID NO: 19178 - DNA, 40 bp, Artificial Sequence
  Description of Artificial Sequence: Synthetic primer
acagagcccgaggaggacttcggggacaccaagagaattg

SEQ ID NO: 19179 - DNA, 40 bp, Artificial Sequence
  Description of Artificial Sequence: Synthetic primer
ttgtggcatatcttcaggtggcccaaaccggaatctaggg

SEQ ID NO: 19180 - DNA, 40 bp, Artificial Sequence
  Description of Artificial Sequence: Synthetic primer
cggattaccccgttggtctccggctgcaggtagtgctcag

SEQ ID NO: 19181 - DNA, 40 bp, Artificial Sequence
  Description of Artificial Sequence: Synthetic primer
tccattctgggaggccccagtgtgatccctgtcaataggc

SEQ ID NO: 19182 - DNA, 40 bp, Artificial Sequence
  Description of Artificial Sequence: Synthetic primer
agacatgcatatatgggactgctaatatctaaacatggtg

SEQ ID NO: 19183 - DNA, 40 bp, Artificial Sequence
  Description of Artificial Sequence: Synthetic primer
tggaccttcccagggaagctgaaggccgtggggtgggtgg

SEQ ID NO: 19184 - DNA, 40 bp, Artificial Sequence
  Description of Artificial Sequence: Synthetic primer
agcatgacgaagagatcatcaggggccaggttttcttcag

SEQ ID NO: 19185 - DNA, 40 bp, Artificial Sequence
  Description of Artificial Sequence: Synthetic primer
agttgtcatgcaagttctatattagaactgtcaaactgcc

SEQ ID NO: 19186 - DNA, 40 bp, Artificial Sequence
  Description of Artificial Sequence: Synthetic primer
tgtgccccggagaggcaggatcgcagtggtcagaatccac

SEQ ID NO: 19187 - DNA, 40 bp, Artificial Sequence
  Description of Artificial Sequence: Synthetic primer
caataatggtctttaattttcagaaataactgttttgcac

SEQ ID NO: 19188 - DNA, 40 bp, Artificial Sequence
  Description of Artificial Sequence: Synthetic primer
gaatctagaagaaatgaaattttaccaagttatataaaga

SEQ ID NO: 19189 - DNA, 40 bp, Artificial Sequence
  Description of Artificial Sequence: Synthetic primer
tttgactcctggagtgtcctgatagcgtaacacatgatcc

SEQ ID NO: 19190 - DNA, 40 bp, Artificial Sequence
  Description of Artificial Sequence: Synthetic primer
ctggtcctgctggtcctccaggtgaagcaggcaaacctgg

SEQ ID NO: 19191 - DNA, 40 bp, Artificial Sequence
  Description of Artificial Sequence: Synthetic primer
atcatgttgtttcttcaaattttctatctcttccataggc

SEQ ID NO: 19192 - DNA, 40 bp, Artificial Sequence
  Description of Artificial Sequence: Synthetic primer
gtcttacaacctattagaagatttacccagtttttcagtc

SEQ ID NO: 19193 - DNA, 40 bp, Artificial Sequence
  Description of Artificial Sequence: Synthetic primer
ggtttagagttaccatttggcaaagaaggcactggaaaag

SEQ ID NO: 19194 - DNA, 40 bp, Artificial Sequence
  Description of Artificial Sequence: Synthetic primer
ctgcagatgatctttgcacggtgcagattccaacaacttg

SEQ ID NO: 19195 - DNA, 40 bp, Artificial Sequence
  Description of Artificial Sequence: Synthetic primer
cacaccttttctgtcaaaataaaatgtcttggaggttatg

SEQ ID NO: 19196 - DNA, 40 bp, Artificial Sequence
  Description of Artificial Sequence: Synthetic primer
gcatggtagcagcagagggcaatgagctgcttgcagatgg

SEQ ID NO: 19197 - DNA, 40 bp, Artificial Sequence
  Description of Artificial Sequence: Synthetic primer
gaccccagccggaagccgctggacagccgggtcctgaacg

SEQ ID NO: 19198 - DNA, 40 bp, Artificial Sequence
  Description of Artificial Sequence: Synthetic primer
ctgtgatgtaggctgtcatcttgttccgtcgccgccgttc

SEQ ID NO: 19199 - DNA, 40 bp, Artificial Sequence
  Description of Artificial Sequence: Synthetic primer
tcaagactttacattcttttgtctttatttgtttatttta

SEQ ID NO: 19200 - DNA, 40 bp, Artificial Sequence
  Description of Artificial Sequence: Synthetic primer
cgcgggaatggttttggaggcctctcgggaacttgggaac

SEQ ID NO: 19201 - DNA, 40 bp, Artificial Sequence
  Description of Artificial Sequence: Synthetic primer
ctgttggagcagatcctgggaagtgcttgatggctaccac

SEQ ID NO: 19202 - DNA, 40 bp, Artificial Sequence
  Description of Artificial Sequence: Synthetic primer
accgtcccccttccccaccagcgaggacttcacccccaag

SEQ ID NO: 19203 - DNA, 40 bp, Artificial Sequence
  Description of Artificial Sequence: Synthetic primer
ctttcactcgggaccgcgcgccagccgcgcgcgacttcgg

SEQ ID NO: 19204 - DNA, 40 bp, Artificial Sequence
  Description of Artificial Sequence: Synthetic primer
ctgggtagaaacgtgttactgggagactgggaataatctg

SEQ ID NO: 19205 - DNA, 40 bp, Artificial Sequence
  Description of Artificial Sequence: Synthetic primer
aatccaccacttcagatccttatgaaacccaggaaaaggt

SEQ ID NO: 19206 - DNA, 40 bp, Artificial Sequence
  Description of Artificial Sequence: Synthetic primer
cctaagtatcaaagcagattttgtaaagaaaaaaggcaac

SEQ ID NO: 19207 - DNA, 40 bp, Artificial Sequence
  Description of Artificial Sequence: Synthetic primer
accgccgtcgcgcttctagcccttgatggccgccggcgcg

SEQ ID NO: 19208 - DNA, 40 bp, Artificial Sequence
  Description of Artificial Sequence: Synthetic primer
ctgctacaggctctccttgtgctctacaaagtctgtcacg

SEQ ID NO: 19209 - DNA, 40 bp, Artificial Sequence
  Description of Artificial Sequence: Synthetic primer
tgcagcctacctaccaaagtcttctggattgctggaattg

SEQ ID NO: 19210 - DNA, 40 bp, Artificial Sequence
  Description of Artificial Sequence: Synthetic primer
gagtgcataccttctgtatgccaatcattgtctttaaaat

SEQ ID NO: 19211 - DNA, 40 bp, Artificial Sequence
  Description of Artificial Sequence: Synthetic primer
gaatgaggacccgtaaaaacgtcctgcctccttcatcgtc

SEQ ID NO: 19212 - DNA, 40 bp, Artificial Sequence
  Description of Artificial Sequence: Synthetic primer
ccaaaagtttaccacgcagactgtctcaatctgaccaagc

SEQ ID NO: 19213 - DNA, 40 bp, Artificial Sequence
  Description of Artificial Sequence: Synthetic primer
tcccgtgtctctcgctatttctgctgctgttcctagactg

SEQ ID NO: 19214 - DNA, 40 bp, Artificial Sequence
  Description of Artificial Sequence: Synthetic primer
acatgagtctgatctgtgtagagtagtatcatcaaaaatg

SEQ ID NO: 19215 - DNA, 40 bp, Artificial Sequence
  Description of Artificial Sequence: Synthetic primer
tggtagagggcatgaaaaaccacaaccaggaaaggtatgg

SEQ ID NO: 19216 - DNA, 40 bp, Artificial Sequence
  Description of Artificial Sequence: Synthetic primer
catctaaggaatgaactgagccacgggtgctgtctaaatg

SEQ ID NO: 19217 - DNA, 40 bp, Artificial Sequence
  Description of Artificial Sequence: Synthetic primer
gatgaggaagctgttggccggagcagtggttccagtccag

SEQ ID NO: 19218 - DNA, 40 bp, Artificial Sequence
  Description of Artificial Sequence: Synthetic primer
tgcagcctggggtcctgagcttccctcgcaccgcacagtc

SEQ ID NO: 19219 - DNA, 40 bp, Artificial Sequence
  Description of Artificial Sequence: Synthetic primer
tgaaaaggaaacactgatagctgagatagaagaattggac

SEQ ID NO: 19220 - DNA, 40 bp, Artificial Sequence
  Description of Artificial Sequence: Synthetic primer
gctgaggaggaagcgaggccacgccagcagtggggcagca

SEQ ID NO: 19221 - DNA, 40 bp, Artificial Sequence
  Description of Artificial Sequence: Synthetic primer
agaaaagccaaacaccatttggcactctcatacacaggtc

SEQ ID NO: 19222 - DNA, 40 bp, Artificial Sequence
  Description of Artificial Sequence: Synthetic primer
tcctgatacagaagattacagatgaagtgctgaaacttag

SEQ ID NO: 19223 - DNA, 40 bp, Artificial Sequence
  Description of Artificial Sequence: Synthetic primer
aagaaaccgagatcatgatagtccaggcaaaaggaagagg

SEQ ID NO: 19224 - DNA, 40 bp, Artificial Sequence
  Description of Artificial Sequence: Synthetic primer
agaaattaaccagcaaagtcaactggtagagaaactgaag

SEQ ID NO: 19225 - DNA, 40 bp, Artificial Sequence
  Description of Artificial Sequence: Synthetic primer
ggggcttctaggagccaggcggaaatgcactggagtggtg

SEQ ID NO: 19226 - DNA, 40 bp, Artificial Sequence
  Description of Artificial Sequence: Synthetic primer
agaactattttgtttcctacagccagtgcttgtttttcag

SEQ ID NO: 19227 - DNA, 40 bp, Artificial Sequence
  Description of Artificial Sequence: Synthetic primer
gcctgggggccggctggtgggtgggatagacctgcgttcc

SEQ ID NO: 19228 - DNA, 40 bp, Artificial Sequence
  Description of Artificial Sequence: Synthetic primer
aaaaaaacggagtcagttgcattttgccggagtctattac

SEQ ID NO: 19229 - DNA, 40 bp, Artificial Sequence
  Description of Artificial Sequence: Synthetic primer
caaagtttaagtgattcttcctctcactctcaggataaac

SEQ ID NO: 19230 - DNA, 40 bp, Artificial Sequence
  Description of Artificial Sequence: Synthetic primer
gcccacaccaaactgggaagtacgagtcttagcagtagcc

SEQ ID NO: 19231 - DNA, 40 bp, Artificial Sequence
  Description of Artificial Sequence: Synthetic primer
tcccagcctcaccaatggaaccactatccccactgccaag

SEQ ID NO: 19232 - DNA, 40 bp, Artificial Sequence
  Description of Artificial Sequence: Synthetic primer
ctcgaatgatacgtgataaattctgaatagtttctctaaa

SEQ ID NO: 19233 - DNA, 40 bp, Artificial Sequence
  Description of Artificial Sequence: Synthetic primer
tgaagagcggtgtgtatccaaggcatagaatttccactac

SEQ ID NO: 19234 - DNA, 40 bp, Artificial Sequence
  Description of Artificial Sequence: Synthetic primer
agacataatgaaatctacgaaattaaagttgacactttcc

SEQ ID NO: 19235 - DNA, 40 bp, Artificial Sequence
  Description of Artificial Sequence: Synthetic primer
cttgtcaacttcgatgttcttctaatactcctcctctaac

SEQ ID NO: 19236 - DNA, 40 bp, Artificial Sequence
  Description of Artificial Sequence: Synthetic primer
caacctggaccggcacctcaagaagcacgagcacgagaac

SEQ ID NO: 19237 - DNA, 40 bp, Artificial Sequence
  Description of Artificial Sequence: Synthetic primer
agacgaacccctatctgatgaccccctgtcacctgctgag

SEQ ID NO: 19238 - DNA, 40 bp, Artificial Sequence
  Description of Artificial Sequence: Synthetic primer
aactttttcttcttcccttctcttaaggcaggctgctttg

SEQ ID NO: 19239 - DNA, 40 bp, Artificial Sequence
  Description of Artificial Sequence: Synthetic primer
ctttaaatttccagatagaccagacaacatcacgaatctc

SEQ ID NO: 19240 - DNA, 40 bp, Artificial Sequence
  Description of Artificial Sequence: Synthetic primer
tataaatagggtaattgctgaggtgtgcggtttatctttg

SEQ ID NO: 19241 - DNA, 40 bp, Artificial Sequence
  Description of Artificial Sequence: Synthetic primer
atgctggcgccagcctttcccccgccgctgttgcttcccc

SEQ ID NO: 19242 - DNA, 40 bp, Artificial Sequence
  Description of Artificial Sequence: Synthetic primer
gtaatacccagcgtgggtacactgctacaaaactcaaaac

SEQ ID NO: 19243 - DNA, 40 bp, Artificial Sequence
  Description of Artificial Sequence: Synthetic primer
ccatgggaaaagatccttctaagggtgatgggcaggagtg

SEQ ID NO: 19244 - DNA, 40 bp, Artificial Sequence
  Description of Artificial Sequence: Synthetic primer
ccgcttctttggcctgcagtttggggacaggatttctagc

SEQ ID NO: 19245 - DNA, 40 bp, Artificial Sequence
  Description of Artificial Sequence: Synthetic primer
ggcgggttatctgcgaacacagtagtggaagatgtaaagc

SEQ ID NO: 19246 - DNA, 40 bp, Artificial Sequence
  Description of Artificial Sequence: Synthetic primer
tcctttctcccgcttcacagtctgcttatggtatatgtgg

SEQ ID NO: 19247 - DNA, 40 bp, Artificial Sequence
  Description of Artificial Sequence: Synthetic primer
gttcaaatgattctctgatgtcatgattgacagcttattg

SEQ ID NO: 19248 - DNA, 40 bp, Artificial Sequence
  Description of Artificial Sequence: Synthetic primer
gtcggcgcggtgtcttctgcccttctgcagccgtcgacat

SEQ ID NO: 19249 - DNA, 40 bp, Artificial Sequence
  Description of Artificial Sequence: Synthetic primer
actacggtccaatgaagagtggaaactttggtggtagcag

SEQ ID NO: 19250 - DNA, 40 bp, Artificial Sequence
  Description of Artificial Sequence: Synthetic primer
atggacgcttccccctcacctttctctctccccaagaaac

SEQ ID NO: 19251 - DNA, 40 bp, Artificial Sequence
  Description of Artificial Sequence: Synthetic primer
aaaacagccctgtcacacctgttggagcccagaaaacagc

SEQ ID NO: 19252 - DNA, 40 bp, Artificial Sequence
  Description of Artificial Sequence: Synthetic primer
ctgggtaggtgctctccgtgtttttcgaaggtggcagtag

SEQ ID NO: 19253 - DNA, 40 bp, Artificial Sequence
  Description of Artificial Sequence: Synthetic primer
gtttgttggggtggtggtcacaggcgcaaaggacatgcac

SEQ ID NO: 19254 - DNA, 40 bp, Artificial Sequence
  Description of Artificial Sequence: Synthetic primer
atgtgtttctggtatgaaacaaactactgtgtcactgtcc

SEQ ID NO: 19255 - DNA, 40 bp, Artificial Sequence
  Description of Artificial Sequence: Synthetic primer
ctggttggtcttgcggccgggcttgctggggttggagacc

SEQ ID NO: 19256 - DNA, 40 bp, Artificial Sequence
  Description of Artificial Sequence: Synthetic primer
aagtatgcaaaataaagaatatgccgtttttatacagttc

SEQ ID NO: 19257 - DNA, 40 bp, Artificial Sequence
  Description of Artificial Sequence: Synthetic primer
atattctacttcattcagaagatcaggtacacaaatgcac

SEQ ID NO: 19258 - DNA, 40 bp, Artificial Sequence
  Description of Artificial Sequence: Synthetic primer
ggggctcctgcagcatgagcaccttgttgaacgtgtagtg

SEQ ID NO: 19259 - DNA, 40 bp, Artificial Sequence
  Description of Artificial Sequence: Synthetic primer
cacaggccaggcctttgctgctgggcttgcggaccttctt

SEQ ID NO: 19260 - DNA, 40 bp, Artificial Sequence
  Description of Artificial Sequence: Synthetic primer
ctccatacgtcctggtgccatcggcggcagcaagcccaag

SEQ ID NO: 19261 - DNA, 40 bp, Artificial Sequence
  Description of Artificial Sequence: Synthetic primer
tgacaagcttgtgtgttcattaagattcttctctttttag

SEQ ID NO: 19262 - DNA, 40 bp, Artificial Sequence
  Description of Artificial Sequence: Synthetic primer
ataccagcgtaagggctatggcaggtttctcatcgatttc

SEQ ID NO: 19263 - DNA, 40 bp, Artificial Sequence
  Description of Artificial Sequence: Synthetic primer
ctgtagtagaacatctggtagccaaaattggaaacttctg

SEQ ID NO: 19264 - DNA, 40 bp, Artificial Sequence
  Description of Artificial Sequence: Synthetic primer
tgttttttcagccacatgtcataggtctgctgcatgtcca

SEQ ID NO: 19265 - DNA, 40 bp, Artificial Sequence
  Description of Artificial Sequence: Synthetic primer
ttaaagaagtagttctggaaaaaggtaagttagagaaaat

SEQ ID NO: 19266 - DNA, 40 bp, Artificial Sequence
  Description of Artificial Sequence: Synthetic primer
tggcagcaaagaaacacctggagataaaccctgaccattc

SEQ ID NO: 19267 - DNA, 40 bp, Artificial Sequence
  Description of Artificial Sequence: Synthetic primer
ccgattctgaacagttttaataccattgctatttttgtgt

SEQ ID NO: 19268 - DNA, 40 bp, Artificial Sequence
  Description of Artificial Sequence: Synthetic primer
ggtgacattgcaacttgttacagtccacggacttcaactg

SEQ ID NO: 19269 - DNA, 40 bp, Artificial Sequence
  Description of Artificial Sequence: Synthetic primer
gagatgacatagggcttgccattgtccagggtctccaagg

SEQ ID NO: 19270 - DNA, 40 bp, Artificial Sequence
  Description of Artificial Sequence: Synthetic primer
ttgtaggttaagatgtctctgcggtggtgtggggctggag

SEQ ID NO: 19271 - DNA, 40 bp, Artificial Sequence
  Description of Artificial Sequence: Synthetic primer
tatgattatggctgtacctccattgtgatgttaaacgaag

SEQ ID NO: 19272 - DNA, 40 bp, Artificial Sequence
  Description of Artificial Sequence: Synthetic primer
ctactgtgaaattcatgccggacttgctccatcttacttg

SEQ ID NO: 19273 - DNA, 40 bp, Artificial Sequence
  Description of Artificial Sequence: Synthetic primer
ccagaaggtctgtgcccctttctcatggtgggtgcccagt

SEQ ID NO: 19274 - DNA, 40 bp, Artificial Sequence
  Description of Artificial Sequence: Synthetic primer
gaaagaaacaaccgccccctaaaatgttgctgagcttttc

SEQ ID NO: 19275 - DNA, 40 bp, Artificial Sequence
  Description of Artificial Sequence: Synthetic primer
cttgcatacctttcttttggagattaaagagaccacagag

SEQ ID NO: 19276 - DNA, 40 bp, Artificial Sequence
  Description of Artificial Sequence: Synthetic primer
ccacctgaagaagcacagcgaggggcccagcaacttctgc

SEQ ID NO: 19277 - DNA, 40 bp, Artificial Sequence
  Description of Artificial Sequence: Synthetic primer
ttttacacatattcacatttgacctcactgcccaaagatg

SEQ ID NO: 19278 - DNA, 40 bp, Artificial Sequence
  Description of Artificial Sequence: Synthetic primer
attacaagcagattgtttgggtcaaattgggaaattacag

SEQ ID NO: 19279 - DNA, 40 bp, Artificial Sequence
  Description of Artificial Sequence: Synthetic primer
ggggttcctggtcatacaccagtactaccaaggacagctt

SEQ ID NO: 19280 - DNA, 40 bp, Artificial Sequence
  Description of Artificial Sequence: Synthetic primer
ctcctacttgagagaaagaagactaccaaagcatgttgag

SEQ ID NO: 19281 - DNA, 40 bp, Artificial Sequence
  Description of Artificial Sequence: Synthetic primer
aattcatttacttcagaggactgttctggaccttcattag

SEQ ID NO: 19282 - DNA, 40 bp, Artificial Sequence
  Description of Artificial Sequence: Synthetic primer
tccttctttaagaccttcacagcatatacttcatctttgc

SEQ ID NO: 19283 - DNA, 40 bp, Artificial Sequence
  Description of Artificial Sequence: Synthetic primer
gtagagaatgcagatagtttgcaggcacaggagcggaagg

SEQ ID NO: 19284 - DNA, 40 bp, Artificial Sequence
  Description of Artificial Sequence: Synthetic primer
ggtgagtcccgagaccagttgggtacctctctatgcgaac

SEQ ID NO: 19285 - DNA, 40 bp, Artificial Sequence
  Description of Artificial Sequence: Synthetic primer
ttggcaaggaaagttttttcttggtttggtttcaccacgc

SEQ ID NO: 19286 - DNA, 40 bp, Artificial Sequence
  Description of Artificial Sequence: Synthetic primer
attcatgcagatgagctggaggagctgatgtgctattacc

SEQ ID NO: 19287 - DNA, 40 bp, Artificial Sequence
  Description of Artificial Sequence: Synthetic primer
actctgactgtgccctagctcctgggccttctcctctaac

SEQ ID NO: 19288 - DNA, 40 bp, Artificial Sequence
  Description of Artificial Sequence: Synthetic primer
atctttctcttcttcgccgccaccatgggcactttgcttc

SEQ ID NO: 19289 - DNA, 40 bp, Artificial Sequence
  Description of Artificial Sequence: Synthetic primer
ttggagtctatggaggccaatgctctcttcatggcttcag

SEQ ID NO: 19290 - DNA, 40 bp, Artificial Sequence
  Description of Artificial Sequence: Synthetic primer
aagatcaatcaaatgtgcaaatagcagctgcaccaacacc

SEQ ID NO: 19291 - DNA, 40 bp, Artificial Sequence
  Description of Artificial Sequence: Synthetic primer
ggatctcctggtgaagctggtcgtcccggtgaagctggtc

SEQ ID NO: 19292 - DNA, 40 bp, Artificial Sequence
  Description of Artificial Sequence: Synthetic primer
cgaggtggaaagctccgcagcagggtccttcacagagcag

SEQ ID NO: 19293 - DNA, 40 bp, Artificial Sequence
  Description of Artificial Sequence: Synthetic primer
tgtacatgcttcggtcagggtcggggcaggtggaagtgtg

SEQ ID NO: 19294 - DNA, 40 bp, Artificial Sequence
  Description of Artificial Sequence: Synthetic primer
cagacattacgagaaatgttagagaagaaagacagctttg

SEQ ID NO: 19295 - DNA, 40 bp, Artificial Sequence
  Description of Artificial Sequence: Synthetic primer
gagggggccaggttaagtagattaacattaaggataaaaa

SEQ ID NO: 19296 - DNA, 40 bp, Artificial Sequence
  Description of Artificial Sequence: Synthetic primer
ggtggtgggcagcgtgttaggcgccgtctgctgcatggac

SEQ ID NO: 19297 - DNA, 40 bp, Artificial Sequence
  Description of Artificial Sequence: Synthetic primer
gaggattttcactacgcggcacacacccagctgcctcttc

SEQ ID NO: 19298 - DNA, 40 bp, Artificial Sequence
  Description of Artificial Sequence: Synthetic primer
cccaaaagacaaagatagtcagatagtgtttatatagctc

SEQ ID NO: 19299 - DNA, 40 bp, Artificial Sequence
  Description of Artificial Sequence: Synthetic primer
ctctgtaatactgcaggcaggacccagggcagcggctaga

SEQ ID NO: 19300 - DNA, 40 bp, Artificial Sequence
  Description of Artificial Sequence: Synthetic primer
cctggctgtgcaggcgtgggctggttctggacagcttgac

SEQ ID NO: 19301 - DNA, 40 bp, Artificial Sequence
  Description of Artificial Sequence: Synthetic primer
tagcaggggcctggaatgtaaacagccactggggtacagg

SEQ ID NO: 19302 - DNA, 40 bp, Artificial Sequence
  Description of Artificial Sequence: Synthetic primer
caaagatctcaatcaggcatcgtcggaaatattctacaag

SEQ ID NO: 19303 - DNA, 40 bp, Artificial Sequence
  Description of Artificial Sequence: Synthetic primer
ccagccttcgccacaccacgtctcaccccagactggttcc

SEQ ID NO: 19304 - DNA, 40 bp, Artificial Sequence
  Description of Artificial Sequence: Synthetic primer
cgccccccggccaggccgcgatggagccgcgagcgaatcg

SEQ ID NO: 19305 - DNA, 40 bp, Artificial Sequence
  Description of Artificial Sequence: Synthetic primer
agactgcgcgatgtcctctcctccaatgaagctactatgc

SEQ ID NO: 19306 - DNA, 40 bp, Artificial Sequence
  Description of Artificial Sequence: Synthetic primer
atctgaacagaagtgcacaggctacttgtacagagaaaaa

SEQ ID NO: 19307 - DNA, 40 bp, Artificial Sequence
  Description of Artificial Sequence: Synthetic primer
aggatgatgatgaccatcagaaagacggcaagacctacag

SEQ ID NO: 19308 - DNA, 40 bp, Artificial Sequence
  Description of Artificial Sequence: Synthetic primer
ctggctactgcctgcacatcatgaagctgcctggaaaagt

SEQ ID NO: 19309 - DNA, 40 bp, Artificial Sequence
  Description of Artificial Sequence: Synthetic primer
aggcaacggccgaggagagtggaagtgtgagaggcacacc

SEQ ID NO: 19310 - DNA, 40 bp, Artificial Sequence
  Description of Artificial Sequence: Synthetic primer
caggagactgaacagcaaaaacttggttctggaaaaagac

SEQ ID NO: 19311 - DNA, 40 bp, Artificial Sequence
  Description of Artificial Sequence: Synthetic primer
tgcaggctcccgaggccgccttgctctcccggccctgctc

SEQ ID NO: 19312 - DNA, 40 bp, Artificial Sequence
  Description of Artificial Sequence: Synthetic primer
aacagaacaagaactaattggtcttctccaagccagagag

SEQ ID NO: 19313 - DNA, 40 bp, Artificial Sequence
  Description of Artificial Sequence: Synthetic primer
ccactgcaggcagctccggcactgcagcattttcaggttc

SEQ ID NO: 19314 - DNA, 40 bp, Artificial Sequence
  Description of Artificial Sequence: Synthetic primer
aaaaaataaaaattttgcttccaaataaaaattttgcaag

SEQ ID NO: 19315 - DNA, 40 bp, Artificial Sequence
  Description of Artificial Sequence: Synthetic primer
ttcaacatacaagtccttcaccattgcgtctgccttagtg

SEQ ID NO: 19316 - DNA, 40 bp, Artificial Sequence
  Description of Artificial Sequence: Synthetic primer
gtgaacggcattctcttcaatcatgagagtcccagaagag

SEQ ID NO: 19317 - DNA, 40 bp, Artificial Sequence
  Description of Artificial Sequence: Synthetic primer
ttactcaacgaacacgcaagcctttttctatagacctttg

SEQ ID NO: 19318 - DNA, 40 bp, Artificial Sequence
  Description of Artificial Sequence: Synthetic primer
ggtgcatcaagctgctcatgaagaatcttcccccagccac

SEQ ID NO: 19319 - DNA, 40 bp, Artificial Sequence
  Description of Artificial Sequence: Synthetic primer
ggtatttggtttgagtttcatacacactgattgatgatgg

SEQ ID NO: 19320 - DNA, 40 bp, Artificial Sequence
  Description of Artificial Sequence: Synthetic primer
aaaaacaaccctacctggtgtttttattgtaattcaagtt

SEQ ID NO: 19321 - DNA, 40 bp, Artificial Sequence
  Description of Artificial Sequence: Synthetic primer
tgttcaagccaggtacccatgcttgatctgtcttcacacc

SEQ ID NO: 19322 - DNA, 40 bp, Artificial Sequence
  Description of Artificial Sequence: Synthetic primer
tccgggaactcacccaggagcaagcgagacactaccattg

SEQ ID NO: 19323 - DNA, 40 bp, Artificial Sequence
  Description of Artificial Sequence: Synthetic primer
ggccaggaggtagtttctcatgacggcttttgtcagtatg

SEQ ID NO: 19324 - DNA, 40 bp, Artificial Sequence
  Description of Artificial Sequence: Synthetic primer
caccaccacctaaattggaaccaggactagggtcttgttg

SEQ ID NO: 19325 - DNA, 40 bp, Artificial Sequence
  Description of Artificial Sequence: Synthetic primer
tcatgatgaaatgaaaagtccccgggaacctggctacaag

SEQ ID NO: 19326 - DNA, 40 bp, Artificial Sequence
  Description of Artificial Sequence: Synthetic primer
agctgtcggtgggggtgtggcagccatagaccgggggcgg

SEQ ID NO: 19327 - DNA, 40 bp, Artificial Sequence
  Description of Artificial Sequence: Synthetic primer
accccctctgccaagcaacctgttacgaagaacaacaagg

SEQ ID NO: 19328 - DNA, 40 bp, Artificial Sequence
  Description of Artificial Sequence: Synthetic primer
gttgtccgggccggtgctgttcgggacctgcatcctggag

SEQ ID NO: 19329 - DNA, 40 bp, Artificial Sequence
  Description of Artificial Sequence: Synthetic primer
gacttggattaaacatgtctgcctttctaaggttgcaaat

SEQ ID NO: 19330 - DNA, 40 bp, Artificial Sequence
  Description of Artificial Sequence: Synthetic primer
tggacaagatctcaatgaaggaaaccgcactctcacactg

SEQ ID NO: 19331 - DNA, 40 bp, Artificial Sequence
  Description of Artificial Sequence: Synthetic primer
ccatttccagccccattcttcagccccatgctcccacctg

SEQ ID NO: 19332 - DNA, 40 bp, Artificial Sequence
  Description of Artificial Sequence: Synthetic primer
gcgtgcccccggcggctggactgctccggccgcgggtctc

SEQ ID NO: 19333 - DNA, 40 bp, Artificial Sequence
  Description of Artificial Sequence: Synthetic primer
cctttcttccctacagttgaaaaacagctgagggtgagtg

SEQ ID NO: 19334 - DNA, 40 bp, Artificial Sequence
  Description of Artificial Sequence: Synthetic primer
tttcctcacaagagctcacgactaacgtcgctttgctatc

SEQ ID NO: 19335 - DNA, 40 bp, Artificial Sequence
  Description of Artificial Sequence: Synthetic primer
gttcaatgaccagctctgcctcaatgctcatattcaatgg

SEQ ID NO: 19336 - DNA, 40 bp, Artificial Sequence
  Description of Artificial Sequence: Synthetic primer
cctgggaaagcagctgtccacacccccaaataaaagtgac

SEQ ID NO: 19337 - DNA, 40 bp, Artificial Sequence
  Description of Artificial Sequence: Synthetic primer
gttgttgttcaaacgggattcacagagtatttgaaaaatg

SEQ ID NO: 19338 - DNA, 40 bp, Artificial Sequence
  Description of Artificial Sequence: Synthetic primer
ggataatgttaagaacctcttagaatttgcagaaacactc

SEQ ID NO: 19339 - DNA, 40 bp, Artificial Sequence
  Description of Artificial Sequence: Synthetic primer
cgtgccgcagatgcccaccggaatggagaaggaagaggag

SEQ ID NO: 19340 - DNA, 40 bp, Artificial Sequence
  Description of Artificial Sequence: Synthetic primer
ctgttaaaatgcagaggtgctataacattcaaagtgtcag

SEQ ID NO: 19341 - DNA, 40 bp, Artificial Sequence
  Description of Artificial Sequence: Synthetic primer
caaggcccctgtcctccaccagtaacccctttaagagttc

SEQ ID NO: 19342 - DNA, 40 bp, Artificial Sequence
  Description of Artificial Sequence: Synthetic primer
actactttatcaaaacatgtcccttaggtgtgtaggattc

SEQ ID NO: 19343 - DNA, 40 bp, Artificial Sequence
  Description of Artificial Sequence: Synthetic primer
cttgatactggaaactgccggatttgcaagatgcctctcc

SEQ ID NO: 19344 - DNA, 40 bp, Artificial Sequence
  Description of Artificial Sequence: Synthetic primer
cctaatgaatcttgaaggattcttgtcattttactatctc

SEQ ID NO: 19345 - DNA, 40 bp, Artificial Sequence
  Description of Artificial Sequence: Synthetic primer
attgttagcttttctgttttatttcttttgagaacctttg

SEQ ID NO: 19346 - DNA, 40 bp, Artificial Sequence
  Description of Artificial Sequence: Synthetic primer
cattaaataagtagatatagatggttgatttaactagatg

SEQ ID NO: 19347 - DNA, 40 bp, Artificial Sequence
  Description of Artificial Sequence: Synthetic primer
ataatgggaaactgtgtaggggtcaaagcacgagtcatcc

SEQ ID NO: 19348 - DNA, 40 bp, Artificial Sequence
  Description of Artificial Sequence: Synthetic primer
atacattagtagcactacctttggaagtctcagctcttgc

SEQ ID NO: 19349 - DNA, 40 bp, Artificial Sequence
  Description of Artificial Sequence: Synthetic primer
tttgtaaatgtgacttttatgtcagccatcgtcagtttca

SEQ ID NO: 19350 - DNA, 40 bp, Artificial Sequence
  Description of Artificial Sequence: Synthetic primer
ttaaaagaaaatatggcagtcccaggaaaattaggttatg

SEQ ID NO: 19351 - DNA, 40 bp, Artificial Sequence
  Description of Artificial Sequence: Synthetic primer
caagctcagattcattcacagttaatggggtacactgagc

SEQ ID NO: 19352 - DNA, 40 bp, Artificial Sequence
  Description of Artificial Sequence: Synthetic primer
actcgctttgacttcaccaccaccagcaccagcacacctg

SEQ ID NO: 19353 - DNA, 40 bp, Artificial Sequence
  Description of Artificial Sequence: Synthetic primer
acacttcctagaatctgatgcaaccgccgccccggaagtc

SEQ ID NO: 19354 - DNA, 40 bp, Artificial Sequence
  Description of Artificial Sequence: Synthetic primer
ctgcttccccgctccggctgctcgctcgctgttgactctg

SEQ ID NO: 19355 - DNA, 40 bp, Artificial Sequence
  Description of Artificial Sequence: Synthetic primer
aaaataaattagatatttgtttactcttttactgaataat

SEQ ID NO: 19356 - DNA, 40 bp, Artificial Sequence
  Description of Artificial Sequence: Synthetic primer
attactatgaaaattccaatgccatgataatccataccac

SEQ ID NO: 19357 - DNA, 40 bp, Artificial Sequence
  Description of Artificial Sequence: Synthetic primer
gtcccacactgctatgtacactgctggacaaagggagcag

SEQ ID NO: 19358 - DNA, 40 bp, Artificial Sequence
  Description of Artificial Sequence: Synthetic primer
ctactgtgtggaactgccataagcgaccgtgcagccagag

SEQ ID NO: 19359 - DNA, 40 bp, Artificial Sequence
  Description of Artificial Sequence: Synthetic primer
agcaaagacaaatgtgaaattgtggggcatcgaccgagac

SEQ ID NO: 19360 - DNA, 40 bp, Artificial Sequence
  Description of Artificial Sequence: Synthetic primer
tagcttcacgtgggtaacaatgtctgtgtgtcccgtcaac

SEQ ID NO: 19361 - DNA, 40 bp, Artificial Sequence
  Description of Artificial Sequence: Synthetic primer
tggagatactccggaggagctctttgggcaggtgatcagt

SEQ ID NO: 19362 - DNA, 40 bp, Artificial Sequence
  Description of Artificial Sequence: Synthetic primer
gcgaggagctggaccacgccctcaatgacatgacctctat

SEQ ID NO: 19363 - DNA, 40 bp, Artificial Sequence
  Description of Artificial Sequence: Synthetic primer
agtccggcagacttgtggctacacttctggccagtttgac

SEQ ID NO: 19364 - DNA, 40 bp, Artificial Sequence
  Description of Artificial Sequence: Synthetic primer
ggaggccgcgtagccggcgagccactgcgagtacacgttc

SEQ ID NO: 19365 - DNA, 40 bp, Artificial Sequence
  Description of Artificial Sequence: Synthetic primer
aatttaactgactattatgattttccaaatctttcatttc

SEQ ID NO: 19366 - DNA, 40 bp, Artificial Sequence
  Description of Artificial Sequence: Synthetic primer
tgagtaatgccaaagaggaacttgaactcatggctaaaaa

SEQ ID NO: 19367 - DNA, 40 bp, Artificial Sequence
  Description of Artificial Sequence: Synthetic primer
tctaaagcaaaagcctcacctcaagggctgctcagaagag

SEQ ID NO: 19368 - DNA, 40 bp, Artificial Sequence
  Description of Artificial Sequence: Synthetic primer
gtggaaataaaggaaaagtgattctagctggggcatattg

SEQ ID NO: 19369 - DNA, 40 bp, Artificial Sequence
  Description of Artificial Sequence: Synthetic primer
aagacagtcaatgtattcacctgtacacagctgttcttcg

SEQ ID NO: 19370 - DNA, 40 bp, Artificial Sequence
  Description of Artificial Sequence: Synthetic primer
catcattgcttactccccagtctgcagagtgtcttagagc

SEQ ID NO: 19371 - DNA, 40 bp, Artificial Sequence
  Description of Artificial Sequence: Synthetic primer
atcagtttttgtagcaactgatttagaaaatcttgtactg

SEQ ID NO: 19372 - DNA, 40 bp, Artificial Sequence
  Description of Artificial Sequence: Synthetic primer
gacttggatctgtcaggtgaagtcctaaagcttgcattcc

SEQ ID NO: 19373 - DNA, 40 bp, Artificial Sequence
  Description of Artificial Sequence: Synthetic primer
tctgcagggcgagtagttctgtgtcctttctggacagctc

SEQ ID NO: 19374 - DNA, 40 bp, Artificial Sequence
  Description of Artificial Sequence: Synthetic primer
tgagaggagttccagctgttctggccacactgggctggtg

SEQ ID NO: 19375 - DNA, 40 bp, Artificial Sequence
  Description of Artificial Sequence: Synthetic primer
agttatagtggtctcatgtgaattcagcttttgttgtttc

SEQ ID NO: 19376 - DNA, 40 bp, Artificial Sequence
  Description of Artificial Sequence: Synthetic primer
ttctgactttctcactattttcatatgagactccgtctgg

SEQ ID NO: 19377 - DNA, 40 bp, Artificial Sequence
  Description of Artificial Sequence: Synthetic primer
aacccgatcccttgcatggcttttctgggaaccagtgatg

SEQ ID NO: 19378 - DNA, 40 bp, Artificial Sequence
  Description of Artificial Sequence: Synthetic primer
taggcattaacacaaaggaggcgtctcgggagaggattag

SEQ ID NO: 19379 - DNA, 40 bp, Artificial Sequence
  Description of Artificial Sequence: Synthetic primer
ccatgagccacccctacaccatgacaacgccttacccttc

SEQ ID NO: 19380 - DNA, 40 bp, Artificial Sequence
  Description of Artificial Sequence: Synthetic primer
ccacaggttcttatttatatcaaccaacagcttatcttgg

SEQ ID NO: 19381 - DNA, 40 bp, Artificial Sequence
  Description of Artificial Sequence: Synthetic primer
aatgaaacagaggtgaccaacatcattactagtaaagaac

SEQ ID NO: 19382 - DNA, 40 bp, Artificial Sequence
  Description of Artificial Sequence: Synthetic primer
tgccatagtatgagccttcattttactcttcatctcaata

SEQ ID NO: 19383 - DNA, 40 bp, Artificial Sequence
  Description of Artificial Sequence: Synthetic primer
attcactcactcaaccacccagcaacatcaaactggaaac

SEQ ID NO: 19384 - DNA, 40 bp, Artificial Sequence
  Description of Artificial Sequence: Synthetic primer
taccaagtcccaaagtgatggtatatatacccttaactct

SEQ ID NO: 19385 - DNA, 40 bp, Artificial Sequence
  Description of Artificial Sequence: Synthetic primer
tttaatgacagttcttacatggtatatgtttaatgttgag

SEQ ID NO: 19386 - DNA, 40 bp, Artificial Sequence
  Description of Artificial Sequence: Synthetic primer
ttcatatattttagacaaaattcacaaagatacaatttgg

SEQ ID NO: 19387 - DNA, 40 bp, Artificial Sequence
  Description of Artificial Sequence: Synthetic primer
tcataatcgtagaggacataatgatggtgaagattctttg

SEQ ID NO: 19388 - DNA, 40 bp, Artificial Sequence
  Description of Artificial Sequence: Synthetic primer
ataccttgtatttctgaatcacaacaaaaaaataaatggg

SEQ ID NO: 19389 - DNA, 40 bp, Artificial Sequence
  Description of Artificial Sequence: Synthetic primer
atttgtggtctttagaaagcagttaaactaattgaccatc

SEQ ID NO: 19390 - DNA, 40 bp, Artificial Sequence
  Description of Artificial Sequence: Synthetic primer
attgaaggttgtcctattccttcgctgctttctcttcttt

SEQ ID NO: 19391 - DNA, 40 bp, Artificial Sequence
  Description of Artificial Sequence: Synthetic primer
ttaaacggagttcttgatttgtttgtcttagatgatacag

SEQ ID NO: 19392 - DNA, 40 bp, Artificial Sequence
  Description of Artificial Sequence: Synthetic primer
tacccgcccaatccctgtgcaggctgggagggtgctcttg

SEQ ID NO: 19393 - DNA, 40 bp, Artificial Sequence
  Description of Artificial Sequence: Synthetic primer
agaacctatgtaaaatttcatcatacaatttctatgcaag

SEQ ID NO: 19394 - DNA, 40 bp, Artificial Sequence
  Description of Artificial Sequence: Synthetic primer
acatcatcagagttaattgacatcaagcttgggtgttttg

SEQ ID NO: 19395 - DNA, 40 bp, Artificial Sequence
  Description of Artificial Sequence: Synthetic primer
tcgaggacaccggagaggggcgccacgccgccgtggccgc

SEQ ID NO: 19396 - DNA, 40 bp, Artificial Sequence
  Description of Artificial Sequence: Synthetic primer
tctctacagctaagtaagggaatatgtgcaattatgagac

SEQ ID NO: 19397 - DNA, 40 bp, Artificial Sequence
  Description of Artificial Sequence: Synthetic primer
tgagatcctccccttcacttctgagaattgggacagtttg

SEQ ID NO: 19398 - DNA, 40 bp, Artificial Sequence
  Description of Artificial Sequence: Synthetic primer
ccatgcttacagttgctggcaataatgaagggatggaaac

SEQ ID NO: 19399 - DNA, 40 bp, Artificial Sequence
  Description of Artificial Sequence: Synthetic primer
ggtagaaacgcagaattccacatcttcccgctctcagctc

SEQ ID NO: 19400 - DNA, 40 bp, Artificial Sequence
  Description of Artificial Sequence: Synthetic primer
gccttgggcgtgtgggctgtggctcagcgggactccatcg

SEQ ID NO: 19401 - DNA, 40 bp, Artificial Sequence
  Description of Artificial Sequence: Synthetic primer
agttatgcaaaatatttcgcttttataatcattttagtta

SEQ ID NO: 19402 - DNA, 40 bp, Artificial Sequence
  Description of Artificial Sequence: Synthetic primer
aactagcacctactgtgttctcaacaccgtgccacctata

SEQ ID NO: 19403 - DNA, 40 bp, Artificial Sequence
  Description of Artificial Sequence: Synthetic primer
tctcagacactgaagaactctgctgtgaagcaaaacactc

SEQ ID NO: 19404 - DNA, 40 bp, Artificial Sequence
  Description of Artificial Sequence: Synthetic primer
ttaacaccctacctaaacagtgttccaaagatctgtagtt

SEQ ID NO: 19405 - DNA, 40 bp, Artificial Sequence
  Description of Artificial Sequence: Synthetic primer
cgctgatggctcccagcttcctctcttccgcatgaacatc

SEQ ID NO: 19406 - DNA, 40 bp, Artificial Sequence
  Description of Artificial Sequence: Synthetic primer
tgactctggaggcctcctggagcctgctcggcccttcccc

SEQ ID NO: 19407 - DNA, 40 bp, Artificial Sequence
  Description of Artificial Sequence: Synthetic primer
tcacgccctgcaaagtcactcctttcgccatggagctcag

SEQ ID NO: 19408 - DNA, 40 bp, Artificial Sequence
  Description of Artificial Sequence: Synthetic primer
aaagtgaaaccagtgttgctcaactctaagttacctgtgg

SEQ ID NO: 19409 - DNA, 40 bp, Artificial Sequence
  Description of Artificial Sequence: Synthetic primer
accattgccctctggcagttcctgtctgctcataagtctg

SEQ ID NO: 19410 - DNA, 40 bp, Artificial Sequence
  Description of Artificial Sequence: Synthetic primer
ttcccctgggtctcttaggagagggctcaccggttggttc

SEQ ID NO: 19411 - DNA, 40 bp, Artificial Sequence
  Description of Artificial Sequence: Synthetic primer
atcggcagcttgctgtgccatggtgacttatagccaggac

SEQ ID NO: 19412 - DNA, 40 bp, Artificial Sequence
  Description of Artificial Sequence: Synthetic primer
cgcccaggaagcccctctgaagcctcctcgccgccgtttc

SEQ ID NO: 19413 - DNA, 40 bp, Artificial Sequence
  Description of Artificial Sequence: Synthetic primer
aaggaccagtgggaggagcggatccaggtgtggcatgagg

SEQ ID NO: 19414 - DNA, 40 bp, Artificial Sequence
  Description of Artificial Sequence: Synthetic primer
cagttttctttgagttctttgatctggaaaagagctgctg

SEQ ID NO: 19415 - DNA, 40 bp, Artificial Sequence
  Description of Artificial Sequence: Synthetic primer
ttgcagctccggcagcttgtcgccccacgcttgggaggcc

SEQ ID NO: 19416 - DNA, 40 bp, Artificial Sequence
  Description of Artificial Sequence: Synthetic primer
ctgtcataaaatgaaactttctttctaaagaaagatactc

SEQ ID NO: 19417 - DNA, 40 bp, Artificial Sequence
  Description of Artificial Sequence: Synthetic primer
caccacctcctagaggtggaaatttctggcctcctgaacc

SEQ ID NO: 19418 - DNA, 40 bp, Artificial Sequence
  Description of Artificial Sequence: Synthetic primer
caactaagatgattccaggtactccaaagctacatcatag

SEQ ID NO: 19419 - DNA, 40 bp, Artificial Sequence
  Description of Artificial Sequence: Synthetic primer
gcagctgcctcagctcctgcgcctcccggtcgtggttgtc

SEQ ID NO: 19420 - DNA, 40 bp, Artificial Sequence
  Description of Artificial Sequence: Synthetic primer
ctgcgggggagtgtggcaccaggccccctgagcacacagg

SEQ ID NO: 19421 - DNA, 40 bp, Artificial Sequence
  Description of Artificial Sequence: Synthetic primer
agtgaaaaaatcttgtggctttgagggcttttggttggcc

SEQ ID NO: 19422 - DNA, 40 bp, Artificial Sequence
  Description of Artificial Sequence: Synthetic primer
aggcagctgccttcaccttgtatgtagcgaacgcactttt

SEQ ID NO: 19423 - DNA, 40 bp, Artificial Sequence
  Description of Artificial Sequence: Synthetic primer
cctggcggcggcggcgcgggctcagagcccggcaacgggc

SEQ ID NO: 19424 - DNA, 40 bp, Artificial Sequence
  Description of Artificial Sequence: Synthetic primer
gggcgagtacgggctgcaggcatacactgaagtgaaaact

SEQ ID NO: 19425 - DNA, 40 bp, Artificial Sequence
  Description of Artificial Sequence: Synthetic primer
cattgaccatataaccaaagccatcaaatcgaaaaatgtg

SEQ ID NO: 19426 - DNA, 40 bp, Artificial Sequence
  Description of Artificial Sequence: Synthetic primer
ggaaataaagatcagtttggaagagcagttaaagaaagag

SEQ ID NO: 19427 - DNA, 40 bp, Artificial Sequence
  Description of Artificial Sequence: Synthetic primer
ttgctgatcgtcttccaagctccctgtatgtgctccattg

SEQ ID NO: 19428 - DNA, 40 bp, Artificial Sequence
  Description of Artificial Sequence: Synthetic primer
ggctttgagccagccagcctcaaggaggaggtgggcgaag

SEQ ID NO: 19429 - DNA, 40 bp, Artificial Sequence
  Description of Artificial Sequence: Synthetic primer
tcagattccatggtcagtgtgctgaatccaatgttagctg

SEQ ID NO: 19430 - DNA, 40 bp, Artificial Sequence
  Description of Artificial Sequence: Synthetic primer
ctcccattatcccctgttgtctcctgtagctttgataatg

SEQ ID NO: 19431 - DNA, 40 bp, Artificial Sequence
  Description of Artificial Sequence: Synthetic primer
atttttaaaaactggtttaacagaaatcaagcaaagtcac

SEQ ID NO: 19432 - DNA, 40 bp, Artificial Sequence
  Description of Artificial Sequence: Synthetic primer
tcgtgcctccctgaaccactccactgcctttaaccctcag

SEQ ID NO: 19433 - DNA, 40 bp, Artificial Sequence
  Description of Artificial Sequence: Synthetic primer
ctgtcttttcttttgttccacattttgaaggtattcagtc

SEQ ID NO: 19434 - DNA, 40 bp, Artificial Sequence
  Description of Artificial Sequence: Synthetic primer
tgctttaatatgagcttcaatataagaagcaatctttgaa

SEQ ID NO: 19435 - DNA, 40 bp, Artificial Sequence
  Description of Artificial Sequence: Synthetic primer
gcccgctgaccgcggagaagctgtgcatttacaccgacaa

SEQ ID NO: 19436 - DNA, 40 bp, Artificial Sequence
  Description of Artificial Sequence: Synthetic primer
tggccttcatacacctccccaaaggcgccatggcccagac

SEQ ID NO: 19437 - DNA, 40 bp, Artificial Sequence
  Description of Artificial Sequence: Synthetic primer
tcaggttttgtagccctactgaaaatttagcacgatcagc

SEQ ID NO: 19438 - DNA, 40 bp, Artificial Sequence
  Description of Artificial Sequence: Synthetic primer
tgtcctttgtcatgtaccccatgaaaagcagaatgttcac

SEQ ID NO: 19439 - DNA, 40 bp, Artificial Sequence
  Description of Artificial Sequence: Synthetic primer
caagagggtgcagcagagacacgtcctggagtcggagaag

SEQ ID NO: 19440 - DNA, 40 bp, Artificial Sequence
  Description of Artificial Sequence: Synthetic primer
aggctataactacaaagcaaaatctgctggaaacctggac

SEQ ID NO: 19441 - DNA, 40 bp, Artificial Sequence
  Description of Artificial Sequence: Synthetic primer
aacgtcggtcagaaaatgaagagtttgttgaagtgggaag

SEQ ID NO: 19442 - DNA, 40 bp, Artificial Sequence
  Description of Artificial Sequence: Synthetic primer
tagatgaaaacagttatctcagagggtcaaccacacaatg

SEQ ID NO: 19443 - DNA, 40 bp, Artificial Sequence
  Description of Artificial Sequence: Synthetic primer
ggtttatcacaagagctgtgtgaccgtctgagtagacatc

SEQ ID NO: 19444 - DNA, 40 bp, Artificial Sequence
  Description of Artificial Sequence: Synthetic primer
tctttggactgcttctctcagttcctgctgtcagacaatc

SEQ ID NO: 19445 - DNA, 40 bp, Artificial Sequence
  Description of Artificial Sequence: Synthetic primer
ggagctcagacaatttctgtccagcaacatgacagcaagc

SEQ ID NO: 19446 - DNA, 40 bp, Artificial Sequence
  Description of Artificial Sequence: Synthetic primer
agaggaccaagagctccaggaacagctggaactgatagac

SEQ ID NO: 19447 - DNA, 40 bp, Artificial Sequence
  Description of Artificial Sequence: Synthetic primer
caggctgagttcagaaagctccagggaaaactgaagaatg

SEQ ID NO: 19448 - DNA, 40 bp, Artificial Sequence
  Description of Artificial Sequence: Synthetic primer
tctagtcctgctgatcctcccagcaacggggtggaaactg

SEQ ID NO: 19449 - DNA, 40 bp, Artificial Sequence
  Description of Artificial Sequence: Synthetic primer
gttttagttttgcagaagaacactgttgtagtttagaagg

SEQ ID NO: 19450 - DNA, 40 bp, Artificial Sequence
  Description of Artificial Sequence: Synthetic primer
agctaattccctcttccatgttgggccggcagctctcagg

SEQ ID NO: 19451 - DNA, 40 bp, Artificial Sequence
  Description of Artificial Sequence: Synthetic primer
gtttaagggagtggttggggggaagatgaaggcatggagg

SEQ ID NO: 19452 - DNA, 40 bp, Artificial Sequence
  Description of Artificial Sequence: Synthetic primer
tgtcatgagcctgaggtgaacttgagggtgcctcctcagc

SEQ ID NO: 19453 - DNA, 40 bp, Artificial Sequence
  Description of Artificial Sequence: Synthetic primer
cagctggagggtagaaaggtttttcaggctggaattatac

SEQ ID NO: 19454 - DNA, 40 bp, Artificial Sequence
  Description of Artificial Sequence: Synthetic primer
actccaaactccattcccaagggtttcatggacgggaagc

SEQ ID NO: 19455 - DNA, 40 bp, Artificial Sequence
  Description of Artificial Sequence: Synthetic primer
cgtttgctgaggtgctcggggtgcagcgggtcgcggtctg

SEQ ID NO: 19456 - DNA, 40 bp, Artificial Sequence
  Description of Artificial Sequence: Synthetic primer
attcttgagtcatggatttctctgctcacagaagggtgtg

SEQ ID NO: 19457 - DNA, 40 bp, Artificial Sequence
  Description of Artificial Sequence: Synthetic primer
acatgttttcctctcgaaagccagctttacctctccacag

SEQ ID NO: 19458 - DNA, 40 bp, Artificial Sequence
  Description of Artificial Sequence: Synthetic primer
atcccagctcagaaagggagcctctgcgactcattcatcg

SEQ ID NO: 19459 - DNA, 40 bp, Artificial Sequence
  Description of Artificial Sequence: Synthetic primer
tgctgaacagacccccccacacgagagaaaataaaggagc

SEQ ID NO: 19460 - DNA, 40 bp, Artificial Sequence
  Description of Artificial Sequence: Synthetic primer
cctggcattgctggcagcgcagaaactggaactcctcctc

SEQ ID NO: 19461 - DNA, 40 bp, Artificial Sequence
  Description of Artificial Sequence: Synthetic primer
agtaacctcaagaatagaattccttttggggaagaaagag

SEQ ID NO: 19462 - DNA, 40 bp, Artificial Sequence
  Description of Artificial Sequence: Synthetic primer
ggcgtccgccccgggctggccatggcccttgcggatccgc

SEQ ID NO: 19463 - DNA, 40 bp, Artificial Sequence
  Description of Artificial Sequence: Synthetic primer
gcgaccgaagcattttttcatttttatttattggtattgc

SEQ ID NO: 19464 - DNA, 40 bp, Artificial Sequence
  Description of Artificial Sequence: Synthetic primer
cttcagcagctccagctagcacaaagagttggcgtgcatc

SEQ ID NO: 19465 - DNA, 40 bp, Artificial Sequence
  Description of Artificial Sequence: Synthetic primer
aaggtgacaaaaggcagaaggagggagaccccaaaaagag

SEQ ID NO: 19466 - DNA, 40 bp, Artificial Sequence
  Description of Artificial Sequence: Synthetic primer
gattaaagataaaactgaagattaaagagactgtgagtag

SEQ ID NO: 19467 - DNA, 40 bp, Artificial Sequence
  Description of Artificial Sequence: Synthetic primer
tgctttgtgtaattaaatgaattgacctaaacatgagctg

SEQ ID NO: 19468 - DNA, 40 bp, Artificial Sequence
  Description of Artificial Sequence: Synthetic primer
atttcaatttccagtgtgtaagagtcaaggattcctccat

SEQ ID NO: 19469 - DNA, 40 bp, Artificial Sequence
  Description of Artificial Sequence: Synthetic primer
gttataccaacagctccctcaatgcacttcaggccctcag

SEQ ID NO: 19470 - DNA, 40 bp, Artificial Sequence
  Description of Artificial Sequence: Synthetic primer
actgctccaatatccgttattttccaaaggattttgtatc

SEQ ID NO: 19471 - DNA, 40 bp, Artificial Sequence
  Description of Artificial Sequence: Synthetic primer
agacggagctgtcactgaatctgacagagccctgcactcc

SEQ ID NO: 19472 - DNA, 40 bp, Artificial Sequence
  Description of Artificial Sequence: Synthetic primer
aggcttggagctgcctgtacaaatagaggaggtcatagag

SEQ ID NO: 19473 - DNA, 40 bp, Artificial Sequence
  Description of Artificial Sequence: Synthetic primer
gagcggcgactcagcgccccagagcccccttgtgcccatc

SEQ ID NO: 19474 - DNA, 40 bp, Artificial Sequence
  Description of Artificial Sequence: Synthetic primer
aatcaaaaggaggaatttcagtgggtctctgtgtgtgtat

SEQ ID NO: 19475 - DNA, 40 bp, Artificial Sequence
  Description of Artificial Sequence: Synthetic primer
ccaccccaggagaagggcgaggtgctgggtgatgtcttgc

SEQ ID NO: 19476 - DNA, 40 bp, Artificial Sequence
  Description of Artificial Sequence: Synthetic primer
aacgacatagagaaagacgacacagggagaaagaggaaac

SEQ ID NO: 19477 - DNA, 40 bp, Artificial Sequence
  Description of Artificial Sequence: Synthetic primer
cagcgggggtttctggccacggcagtgactgtgatgttgg

SEQ ID NO: 19478 - DNA, 40 bp, Artificial Sequence
  Description of Artificial Sequence: Synthetic primer
acaaaactgttggtttctaataggaaacaaaaatccaagc

SEQ ID NO: 19479 - DNA, 40 bp, Artificial Sequence
  Description of Artificial Sequence: Synthetic primer
gttcattagtacatgtaggtcattaatttataaataaaag

SEQ ID NO: 19480 - DNA, 40 bp, Artificial Sequence
  Description of Artificial Sequence: Synthetic primer
gctcgaatttgtggactttgatcattagaatgagattcct

SEQ ID NO: 19481 - DNA, 40 bp, Artificial Sequence
  Description of Artificial Sequence: Synthetic primer
cacagtgatcaccagcgtgagtggtggaggaggacacttg

SEQ ID NO: 19482 - DNA, 40 bp, Artificial Sequence
  Description of Artificial Sequence: Synthetic primer
ggggcctaagtgaaggtgaatttgtctgactgggttacgg

SEQ ID NO: 19483 - DNA, 40 bp, Artificial Sequence
  Description of Artificial Sequence: Synthetic primer
caagagggacaccgctgccggcaccgccggcctcttcccg

SEQ ID NO: 19484 - DNA, 40 bp, Artificial Sequence
  Description of Artificial Sequence: Synthetic primer
tgatccctcttgcttcttttccctcctgcaccgcagcttg

SEQ ID NO: 19485 - DNA, 40 bp, Artificial Sequence
  Description of Artificial Sequence: Synthetic primer
tctggttggtagggacatctgtttctaaatgtttattatg

SEQ ID NO: 19486 - DNA, 40 bp, Artificial Sequence
  Description of Artificial Sequence: Synthetic primer
gtcaaagaacaagaagactggagatgaagaggtcaaccag

SEQ ID NO: 19487 - DNA, 40 bp, Artificial Sequence
  Description of Artificial Sequence: Synthetic primer
cagggaccaagtatgtacaaggcaacatattgggttcaag

SEQ ID NO: 19488 - DNA, 40 bp, Artificial Sequence
  Description of Artificial Sequence: Synthetic primer
gcgaagcccaccgggtccaccatggcgcggccggccttac

SEQ ID NO: 19489 - DNA, 40 bp, Artificial Sequence
  Description of Artificial Sequence: Synthetic primer
ttactgtacatgctggtgtttgcttgctgcccaaagtgtg

SEQ ID NO: 19490 - DNA, 40 bp, Artificial Sequence
  Description of Artificial Sequence: Synthetic primer
ggggagggctggggagccccctcccagccaggctgtccag

SEQ ID NO: 19491 - DNA, 40 bp, Artificial Sequence
  Description of Artificial Sequence: Synthetic primer
tcctcgtgccctcagcttccccaaggatgccttcggatgc

SEQ ID NO: 19492 - DNA, 40 bp, Artificial Sequence
  Description of Artificial Sequence: Synthetic primer
atgcacctaccagctctgctatgatggaaatagcttgtgc

SEQ ID NO: 19493 - DNA, 40 bp, Artificial Sequence
  Description of Artificial Sequence: Synthetic primer
ttagatgctcccaattgggcttgcctctattttgctcctc

SEQ ID NO: 19494 - DNA, 40 bp, Artificial Sequence
  Description of Artificial Sequence: Synthetic primer
gctcaccttcaacaaccccaccacggagttccggtacaag

SEQ ID NO: 19495 - DNA, 40 bp, Artificial Sequence
  Description of Artificial Sequence: Synthetic primer
ttttaccaatgcatttacctccatttcgacagggttgtgg

SEQ ID NO: 19496 - DNA, 40 bp, Artificial Sequence
  Description of Artificial Sequence: Synthetic primer
cacaatggccgtcatgtgagtctctgtgccaaagacatgg

SEQ ID NO: 19497 - DNA, 40 bp, Artificial Sequence
  Description of Artificial Sequence: Synthetic primer
aggccaagaaacacattcctcagctgcaagagcagttatc

SEQ ID NO: 19498 - DNA, 40 bp, Artificial Sequence
  Description of Artificial Sequence: Synthetic primer
aagcagatagcagcaccaccaagaagaatcaaaacagttc

SEQ ID NO: 19499 - DNA, 40 bp, Artificial Sequence
  Description of Artificial Sequence: Synthetic primer
ccatactcgtctgggtaagatttgggaaacataacctctg

SEQ ID NO: 19500 - DNA, 40 bp, Artificial Sequence
  Description of Artificial Sequence: Synthetic primer
tgactagttccttatgtcctcgatcacaggcccagtgaag

SEQ ID NO: 19501 - DNA, 40 bp, Artificial Sequence
  Description of Artificial Sequence: Synthetic primer
tgttcacaagtgaatcacacgtttggaaactcaagctgcc

SEQ ID NO: 19502 - DNA, 40 bp, Artificial Sequence
  Description of Artificial Sequence: Synthetic primer
gatggggcttgagatccttttgcttttgccagtttctctt

SEQ ID NO: 19503 - DNA, 40 bp, Artificial Sequence
  Description of Artificial Sequence: Synthetic primer
acagattttttccttcttcaatgaaaaggcttttaaatta

SEQ ID NO: 19504 - DNA, 40 bp, Artificial Sequence
  Description of Artificial Sequence: Synthetic primer
cctgcgctttccctgttgcttcttcttgaatttctttgac

SEQ ID NO: 19505 - DNA, 40 bp, Artificial Sequence
  Description of Artificial Sequence: Synthetic primer
ccacttcatggatttatagctatagtctatgcagtcgtta

SEQ ID NO: 19506 - DNA, 40 bp, Artificial Sequence
  Description of Artificial Sequence: Synthetic primer
ggtgccctctgcgctctgcagtgtctttctttctgcctgg

SEQ ID NO: 19507 - DNA, 40 bp, Artificial Sequence
  Description of Artificial Sequence: Synthetic primer
cctccgggtcttcttcactttccggagatcttcgtcttcg

SEQ ID NO: 19508 - DNA, 40 bp, Artificial Sequence
  Description of Artificial Sequence: Synthetic primer
gtgagtgtagactcggtcaaacaaggcctcaggcgccatc

SEQ ID NO: 19509 - DNA, 40 bp, Artificial Sequence
  Description of Artificial Sequence: Synthetic primer
ctgggagctaccccatgcagccagtcactgcacctccatc

SEQ ID NO: 19510 - DNA, 40 bp, Artificial Sequence
  Description of Artificial Sequence: Synthetic primer
aaactgaatgggttgttatcctgcattcggatcacctctg

SEQ ID NO: 19511 - DNA, 40 bp, Artificial Sequence
  Description of Artificial Sequence: Synthetic primer
gttccagaagcccaagcagctgaaggacaaagctgatttc

SEQ ID NO: 19512 - DNA, 40 bp, Artificial Sequence
  Description of Artificial Sequence: Synthetic primer
ttttcattatatctaattattttgcagttgggcaacagag

SEQ ID NO: 19513 - DNA, 40 bp, Artificial Sequence
  Description of Artificial Sequence: Synthetic primer
aaatatctcaagggaagcattcgtactaaatgttgcatcc

SEQ ID NO: 19514 - DNA, 40 bp, Artificial Sequence
  Description of Artificial Sequence: Synthetic primer
ctgtgccccgccaaattcaacgggctcttgtgccacatcc

SEQ ID NO: 19515 - DNA, 40 bp, Artificial Sequence
  Description of Artificial Sequence: Synthetic primer
ggccttccagctggaggtcactggactcactgctgctgtc

SEQ ID NO: 19516 - DNA, 40 bp, Artificial Sequence
  Description of Artificial Sequence: Synthetic primer
tttctgctttgtcgtggcccttcctgactctcctccgaac

SEQ ID NO: 19517 - DNA, 40 bp, Artificial Sequence
  Description of Artificial Sequence: Synthetic primer
cctggaacctacccactcttcaggactcggggatcaagtg

SEQ ID NO: 19518 - DNA, 40 bp, Artificial Sequence
  Description of Artificial Sequence: Synthetic primer
ccggatacttggaccagcaagtgccctacaccttcagcag

SEQ ID NO: 19519 - DNA, 40 bp, Artificial Sequence
  Description of Artificial Sequence: Synthetic primer
tagatatgccatgacagttacttagccaccccatgccatc

SEQ ID NO: 19520 - DNA, 40 bp, Artificial Sequence
  Description of Artificial Sequence: Synthetic primer
ggcttagtgaaactaccaaccctatgggtcatatgtaaac

SEQ ID NO: 19521 - DNA, 40 bp, Artificial Sequence
  Description of Artificial Sequence: Synthetic primer
tcatctcggccatcctcctctccatctgctccagtcgttc

SEQ ID NO: 19522 - DNA, 40 bp, Artificial Sequence
  Description of Artificial Sequence: Synthetic primer
cacaaattctaatgtctggccctcagaacatccttcagac

SEQ ID NO: 19523 - DNA, 40 bp, Artificial Sequence
  Description of Artificial Sequence: Synthetic primer
gctcacgcttctcctctctctcgaggtcctcccgcccatc

SEQ ID NO: 19524 - DNA, 40 bp, Artificial Sequence
  Description of Artificial Sequence: Synthetic primer
cagctgccagcccccgcctgatttgcatccacgcagaact

SEQ ID NO: 19525 - DNA, 40 bp, Artificial Sequence
  Description of Artificial Sequence: Synthetic primer
gggacactggtcgcatttgtactcgcgctcctccgtgtgg

SEQ ID NO: 19526 - DNA, 40 bp, Artificial Sequence
  Description of Artificial Sequence: Synthetic primer
tgccatgcacagcaatgggctcttcgacatgtttcccaac

SEQ ID NO: 19527 - DNA, 40 bp, Artificial Sequence
  Description of Artificial Sequence: Synthetic primer
tttcaagtcaagatttcatcccatacatgcatgactcaat

SEQ ID NO: 19528 - DNA, 40 bp, Artificial Sequence
  Description of Artificial Sequence: Synthetic primer
tggtggaatggatggatgagattctgtttctagaaattta

SEQ ID NO: 19529 - DNA, 40 bp, Artificial Sequence
  Description of Artificial Sequence: Synthetic primer
cggagcctgccagagccaaggccaagctctccaagttcag

SEQ ID NO: 19530 - DNA, 40 bp, Artificial Sequence
  Description of Artificial Sequence: Synthetic primer
atgctggacatctgagcaaccgacagcagagttactgtta

SEQ ID NO: 19531 - DNA, 40 bp, Artificial Sequence
  Description of Artificial Sequence: Synthetic primer
aataaggtgcgcattcgcagctggatggacactatagcaa

SEQ ID NO: 19532 - DNA, 40 bp, Artificial Sequence
  Description of Artificial Sequence: Synthetic primer
gtcaggggaggactgtctgatatcctgacttgctgggatg

SEQ ID NO: 19533 - DNA, 40 bp, Artificial Sequence
  Description of Artificial Sequence: Synthetic primer
aatgcatagtacaatatgcatcctcctcctacttcaatgt

SEQ ID NO: 19534 - DNA, 40 bp, Artificial Sequence
  Description of Artificial Sequence: Synthetic primer
gaacctacaactatttatggagaacaagcagcccgaggat

SEQ ID NO: 19535 - DNA, 40 bp, Artificial Sequence
  Description of Artificial Sequence: Synthetic primer
gaaagtctcacttctgaggagaatctggatgcactgctct

SEQ ID NO: 19536 - DNA, 40 bp, Artificial Sequence
  Description of Artificial Sequence: Synthetic primer
cgccccgccaggtggcggggcctactaggcctccgggcat

SEQ ID NO: 19537 - DNA, 40 bp, Artificial Sequence
  Description of Artificial Sequence: Synthetic primer
tggaagcagcatcctgaccacagctggcagtcaagccaca

SEQ ID NO: 19538 - DNA, 40 bp, Artificial Sequence
  Description of Artificial Sequence: Synthetic primer
cctggagatgctcttcccatctccaaatccaaagcccaag

SEQ ID NO: 19539 - DNA, 40 bp, Artificial Sequence
  Description of Artificial Sequence: Synthetic primer
ccagatgaagaagtggttgatggccgtccagtagcctgtg

SEQ ID NO: 19540 - DNA, 40 bp, Artificial Sequence
  Description of Artificial Sequence: Synthetic primer
cccgacattgtccttgataacagaactctgcatcccctaa

SEQ ID NO: 19541 - DNA, 40 bp, Artificial Sequence
  Description of Artificial Sequence: Synthetic primer
cacattcttctgcatagaaaggcatgcgtccctcctcatc

SEQ ID NO: 19542 - DNA, 40 bp, Artificial Sequence
  Description of Artificial Sequence: Synthetic primer
tgtgctcccagcctgcagtctttggagcaaggctgctgcc

SEQ ID NO: 19543 - DNA, 40 bp, Artificial Sequence
  Description of Artificial Sequence: Synthetic primer
caccggatactacacttgttcctcttcaaagcatcccagt

SEQ ID NO: 19544 - DNA, 40 bp, Artificial Sequence
  Description of Artificial Sequence: Synthetic primer
ctggtgaaaatcggggactttgggatgtcccgggacgtgt

SEQ ID NO: 19545 - DNA, 40 bp, Artificial Sequence
  Description of Artificial Sequence: Synthetic primer
cttttcttcattagcctctgaagacaccccatccattttt

SEQ ID NO: 19546 - DNA, 40 bp, Artificial Sequence
  Description of Artificial Sequence: Synthetic primer
tgtttgaatcatttattgagtctgtgcccctccttaaatc

SEQ ID NO: 19547 - DNA, 40 bp, Artificial Sequence
  Description of Artificial Sequence: Synthetic primer
ccactgtgggagatggggtccttattactggtgtagatgc

SEQ ID NO: 19548 - DNA, 40 bp, Artificial Sequence
  Description of Artificial Sequence: Synthetic primer
tcttcatacgctcatattctctcattctggctaatgcttg

SEQ ID NO: 19549 - DNA, 40 bp, Artificial Sequence
  Description of Artificial Sequence: Synthetic primer
gataggactagcaccattttaagtccctgtcacctcttcc

SEQ ID NO: 19550 - DNA, 40 bp, Artificial Sequence
  Description of Artificial Sequence: Synthetic primer
gagcgtcagcatctgaagaaagtgctaactgtggatgtgt

SEQ ID NO: 19551 - DNA, 40 bp, Artificial Sequence
  Description of Artificial Sequence: Synthetic primer
atctcccatatattacacacaaaagcagaagcagcatgag

SEQ ID NO: 19552 - DNA, 40 bp, Artificial Sequence
  Description of Artificial Sequence: Synthetic primer
gtaaatgcattggtaaaagcaaatgtaagtgttccaaagg

SEQ ID NO: 19553 - DNA, 40 bp, Artificial Sequence
  Description of Artificial Sequence: Synthetic primer
taagccatctgggcctacaccagcatccggtcagttatca

SEQ ID NO: 19554 - DNA, 40 bp, Artificial Sequence
  Description of Artificial Sequence: Synthetic primer
tctcctttgaagaatgtggtccatggaggatggacggaaa

SEQ ID NO: 19555 - DNA, 40 bp, Artificial Sequence
  Description of Artificial Sequence: Synthetic primer
ctaagatgtttaacgattcgtcttcctcctcggggatgct

SEQ ID NO: 19556 - DNA, 40 bp, Artificial Sequence
  Description of Artificial Sequence: Synthetic primer
gaaagaagctgcagtaatgaaggaaatcaagcatcctaat

SEQ ID NO: 19557 - DNA, 40 bp, Artificial Sequence
  Description of Artificial Sequence: Synthetic primer
cacacgcatgcgtgccacagcaggatggtcactcttcagg

SEQ ID NO: 19558 - DNA, 40 bp, Artificial Sequence
  Description of Artificial Sequence: Synthetic primer
ccccggatttccgtctggcatagtaaaccccctgccactc

SEQ ID NO: 19559 - DNA, 40 bp, Artificial Sequence
  Description of Artificial Sequence: Synthetic primer
agtttaaaagagagggatgggtcagtggaggcccatggtt

SEQ ID NO: 19560 - DNA, 40 bp, Artificial Sequence
  Description of Artificial Sequence: Synthetic primer
tgccggtggtagtccagctgtgcatccaccagggccgaga

SEQ ID NO: 19561 - DNA, 40 bp, Artificial Sequence
  Description of Artificial Sequence: Synthetic primer
gatgtagacctcgctgaggtgaagcctttggtggagaaag

SEQ ID NO: 19562 - DNA, 40 bp, Artificial Sequence
  Description of Artificial Sequence: Synthetic primer
cgcgggctacgctggggggtcccgacgcgcggctcggggg

SEQ ID NO: 19563 - DNA, 40 bp, Artificial Sequence
  Description of Artificial Sequence: Synthetic primer
ctccgagacagataatgaggatgtgtacaccttcaagacg

SEQ ID NO: 19564 - DNA, 40 bp, Artificial Sequence
  Description of Artificial Sequence: Synthetic primer
tgagtgcgttcctatggccaccactgtgccacttggatga

SEQ ID NO: 19565 - DNA, 40 bp, Artificial Sequence
  Description of Artificial Sequence: Synthetic primer
agactttggaagtggatttccggtgaaggatgggcggaga

SEQ ID NO: 19566 - DNA, 40 bp, Artificial Sequence
  Description of Artificial Sequence: Synthetic primer
aaaaagaagactctgcacgtttggatgatcacgaagagga

SEQ ID NO: 19567 - DNA, 40 bp, Artificial Sequence
  Description of Artificial Sequence: Synthetic primer
agcggctgaccactcggaggaggagaagaaggagctgaag

SEQ ID NO: 19568 - DNA, 40 bp, Artificial Sequence
  Description of Artificial Sequence: Synthetic primer
acccaaagctgggctggctgggatgcctctggctggtgaa

SEQ ID NO: 19569 - DNA, 40 bp, Artificial Sequence
  Description of Artificial Sequence: Synthetic primer
ttctttcagcagaaagtggggtacgggggatgctgaagag

SEQ ID NO: 19570 - DNA, 40 bp, Artificial Sequence
  Description of Artificial Sequence: Synthetic primer
aatacatttctaataaaattccctacattctagaaacatc

SEQ ID NO: 19571 - DNA, 40 bp, Artificial Sequence
  Description of Artificial Sequence: Synthetic primer
atatacacaatcagggcttaaggtactggatgatattgta

SEQ ID NO: 19572 - DNA, 40 bp, Artificial Sequence
  Description of Artificial Sequence: Synthetic primer
aaaatcactttattcatgaaatatagttcctatcgagagg

SEQ ID NO: 19573 - DNA, 40 bp, Artificial Sequence
  Description of Artificial Sequence: Synthetic primer
gattgctccttcactgatgcagccatccgacagattaggt

SEQ ID NO: 19574 - DNA, 40 bp, Artificial Sequence
  Description of Artificial Sequence: Synthetic primer
ccaattgtgttttgaattccactagctggagaccccagga

SEQ ID NO: 19575 - DNA, 40 bp, Artificial Sequence
  Description of Artificial Sequence: Synthetic primer
agttgaagaagcaaggcatcctgatttacaaggaataact

SEQ ID NO: 19576 - DNA, 40 bp, Artificial Sequence
  Description of Artificial Sequence: Synthetic primer
gaagctgttctgttacctctgggctctcatcctctcctat

SEQ ID NO: 19577 - DNA, 40 bp, Artificial Sequence
  Description of Artificial Sequence: Synthetic primer
atccaactgatctgtgcccctgccccatgcagaagaaatg

SEQ ID NO: 19578 - DNA, 40 bp, Artificial Sequence
  Description of Artificial Sequence: Synthetic primer
ggaagttctggagtttgtcaccagtggaggccggatggac

SEQ ID NO: 19579 - DNA, 40 bp, Artificial Sequence
  Description of Artificial Sequence: Synthetic primer
gtggtgctgaaacagtgaggggtaacatccacaagcacag

SEQ ID NO: 19580 - DNA, 40 bp, Artificial Sequence
  Description of Artificial Sequence: Synthetic primer
ctccacttcggcagactccatgtggctgtcatcctcgtca

SEQ ID NO: 19581 - DNA, 40 bp, Artificial Sequence
  Description of Artificial Sequence: Synthetic primer
gaggccaaggcttggatgcgtgtgtaatagagccttgtgg

SEQ ID NO: 19582 - DNA, 40 bp, Artificial Sequence
  Description of Artificial Sequence: Synthetic primer
ctaccagttgtggttaagctcttacacccaccatcccact

SEQ ID NO: 19583 - DNA, 40 bp, Artificial Sequence
  Description of Artificial Sequence: Synthetic primer
tactgaatatgagatgcgtaatgctgtggatgagttttta

SEQ ID NO: 19584 - DNA, 40 bp, Artificial Sequence
  Description of Artificial Sequence: Synthetic primer
actagagcattctggttgcaaataaaaaacatccatcctc

SEQ ID NO: 19585 - DNA, 40 bp, Artificial Sequence
  Description of Artificial Sequence: Synthetic primer
gaaaggaactgtactggctactcacagggtccctcatagc

SEQ ID NO: 19586 - DNA, 40 bp, Artificial Sequence
  Description of Artificial Sequence: Synthetic primer
ggacactgtcagagtttggccacagcctgtcctttacttc

SEQ ID NO: 19587 - DNA, 40 bp, Artificial Sequence
  Description of Artificial Sequence: Synthetic primer
cggcggaacctgtgcgagtggatgcggaagccggcgcagc

SEQ ID NO: 19588 - DNA, 40 bp, Artificial Sequence
  Description of Artificial Sequence: Synthetic primer
cgttaataagtcaatacctgttgttcctgggatgttcttt

SEQ ID NO: 19589 - DNA, 40 bp, Artificial Sequence
  Description of Artificial Sequence: Synthetic primer
agcacgtcgtcccccacatccaccgaggcattgggcacct

SEQ ID NO: 19590 - DNA, 40 bp, Artificial Sequence
  Description of Artificial Sequence: Synthetic primer
gtgagctctacctcatctgtttctggaacctttaggatgt

SEQ ID NO: 19591 - DNA, 40 bp, Artificial Sequence
  Description of Artificial Sequence: Synthetic primer
gatgtcaacgagtgtggccagaagcccgggctttgccgcc

SEQ ID NO: 19592 - DNA, 40 bp, Artificial Sequence
  Description of Artificial Sequence: Synthetic primer
gatcccttctctgatttgctgtcagccatgaacggatgga

SEQ ID NO: 19593 - DNA, 40 bp, Artificial Sequence
  Description of Artificial Sequence: Synthetic primer
ggaagagttccccaagtttgacaatgatgaggaggatgaa

SEQ ID NO: 19594 - DNA, 40 bp, Artificial Sequence
  Description of Artificial Sequence: Synthetic primer
ccttctgtggttttcccttcttcatcctacagagtaaagt

SEQ ID NO: 19595 - DNA, 40 bp, Artificial Sequence
  Description of Artificial Sequence: Synthetic primer
gctcctttcgggcgcacgcttccctggcgcgggctgcgcg

SEQ ID NO: 19596 - DNA, 40 bp, Artificial Sequence
  Description of Artificial Sequence: Synthetic primer
tgtgaaaaaatgtggcatccaagatacaaactcaaagaag

SEQ ID NO: 19597 - DNA, 40 bp, Artificial Sequence
  Description of Artificial Sequence: Synthetic primer
cagtctcttctcatcccaaaacaatgcctttgcacaaaat

SEQ ID NO: 19598 - DNA, 40 bp, Artificial Sequence
  Description of Artificial Sequence: Synthetic primer
tagggctgaatatggatggcatctactgtaaaacaagtct

SEQ ID NO: 19599 - DNA, 40 bp, Artificial Sequence
  Description of Artificial Sequence: Synthetic primer
aggtgaatggctacaagattctcatccccaaaggaagcta

SEQ ID NO: 19600 - DNA, 40 bp, Artificial Sequence
  Description of Artificial Sequence: Synthetic primer
gggggtgttttcctcctcactttctgccaaggatgcacca

SEQ ID NO: 19601 - DNA, 40 bp, Artificial Sequence
  Description of Artificial Sequence: Synthetic primer
cccccaagacgagcttgacttctccatcctcttcgactat

SEQ ID NO: 19602 - DNA, 40 bp, Artificial Sequence
  Description of Artificial Sequence: Synthetic primer
tagcaccttctgtgcagataccaggcattctggggaagag

SEQ ID NO: 19603 - DNA, 40 bp, Artificial Sequence
  Description of Artificial Sequence: Synthetic primer
gcaaggcggtggacttgaactttcctggatgtctgaactt

SEQ ID NO: 19604 - DNA, 40 bp, Artificial Sequence
  Description of Artificial Sequence: Synthetic primer
ccacacacacccagctctttttagagaaggatgaggaaat

SEQ ID NO: 19605 - DNA, 40 bp, Artificial Sequence
  Description of Artificial Sequence: Synthetic primer
gatgagaaaatgtcagaatctacaatggatgccttccaaa

SEQ ID NO: 19606 - DNA, 40 bp, Artificial Sequence
  Description of Artificial Sequence: Synthetic primer
gagctggccatccgatccatgtcgccgcgaggagccgagt

SEQ ID NO: 19607 - DNA, 40 bp, Artificial Sequence
  Description of Artificial Sequence: Synthetic primer
ggagctcctaggtgggaagggatggggtggggggccagga

SEQ ID NO: 19608 - DNA, 40 bp, Artificial Sequence
  Description of Artificial Sequence: Synthetic primer
acaccaaagtcctggagatcccactcctgccggagaacag

SEQ ID NO: 19609 - DNA, 40 bp, Artificial Sequence
  Description of Artificial Sequence: Synthetic primer
ccaggcccagaggatgcgccctggcagtcccggaagacac

SEQ ID NO: 19610 - DNA, 40 bp, Artificial Sequence
  Description of Artificial Sequence: Synthetic primer
tcccgccgccgccaccgcccggtccctctcgcgcgctgtc

SEQ ID NO: 19611 - DNA, 40 bp, Artificial Sequence
  Description of Artificial Sequence: Synthetic primer
tcaacatctctcatcctatccccgaccccctccggggaac

SEQ ID NO: 19612 - DNA, 40 bp, Artificial Sequence
  Description of Artificial Sequence: Synthetic primer
atccagacatcagtagcaactctggatgaaactgaagaac

SEQ ID NO: 19613 - DNA, 40 bp, Artificial Sequence
  Description of Artificial Sequence: Synthetic primer
cacctgaagctgctggggcagcgtgggcaggatgtactgt

SEQ ID NO: 19614 - DNA, 40 bp, Artificial Sequence
  Description of Artificial Sequence: Synthetic primer
ctggcatcacttggcctttctggatgctggacacctgaag

SEQ ID NO: 19615 - DNA, 40 bp, Artificial Sequence
  Description of Artificial Sequence: Synthetic primer
cgaggccagtgctttgccgagggcatccccggagctgcca

SEQ ID NO: 19616 - DNA, 40 bp, Artificial Sequence
  Description of Artificial Sequence: Synthetic primer
agaattaccaaaaacttctgcatccatattctggtgtaac

SEQ ID NO: 19617 - DNA, 40 bp, Artificial Sequence
  Description of Artificial Sequence: Synthetic primer
agaaagcactgatgatgagaggtctaatcccagagtgctg

SEQ ID NO: 19618 - DNA, 40 bp, Artificial Sequence
  Description of Artificial Sequence: Synthetic primer
ccatttctcaccatccatggagataatgcaagtcagaaag

SEQ ID NO: 19619 - DNA, 40 bp, Artificial Sequence
  Description of Artificial Sequence: Synthetic primer
atggggaccctcgatcccatcctgttaaggctgcgggact

SEQ ID NO: 19620 - DNA, 40 bp, Artificial Sequence
  Description of Artificial Sequence: Synthetic primer
gaaggaactctcttacagatccttaggtgaggatgtcagt

SEQ ID NO: 19621 - DNA, 40 bp, Artificial Sequence
  Description of Artificial Sequence: Synthetic primer
taaataagatcaaatgctcttaaatgttcctgttaccatc

SEQ ID NO: 19622 - DNA, 40 bp, Artificial Sequence
  Description of Artificial Sequence: Synthetic primer
gataactaggagattcacggttgaaatcatctgaatttgg

SEQ ID NO: 19623 - DNA, 40 bp, Artificial Sequence
  Description of Artificial Sequence: Synthetic primer
tgtctcatcttatcaatgttggaaggaacagctcgaggat

SEQ ID NO: 19624 - DNA, 40 bp, Artificial Sequence
  Description of Artificial Sequence: Synthetic primer
ctttctctgggtcatccactgctgagccccctccccagga

SEQ ID NO: 19625 - DNA, 40 bp, Artificial Sequence
  Description of Artificial Sequence: Synthetic primer
gctgctttacgtttggtgctttcagcaaaaccatccacca

SEQ ID NO: 19626 - DNA, 40 bp, Artificial Sequence
  Description of Artificial Sequence: Synthetic primer
tgccaaacgagattggggccatgccaaggactatgtggag

SEQ ID NO: 19627 - DNA, 40 bp, Artificial Sequence
  Description of Artificial Sequence: Synthetic primer
ctgggcagcggcggcttcggctcggtctactcaggcatcc

SEQ ID NO: 19628 - DNA, 40 bp, Artificial Sequence
  Description of Artificial Sequence: Synthetic primer
tctttctcaggatgttgagtgaactctgctttcccggttc

SEQ ID NO: 19629 - DNA, 40 bp, Artificial Sequence
  Description of Artificial Sequence: Synthetic primer
cctggccatatccaccagagtgaaaagaacgatagctagg

SEQ ID NO: 19630 - DNA, 40 bp, Artificial Sequence
  Description of Artificial Sequence: Synthetic primer
gggtttcagtggtttggatggtgccaagggagatgctggt

SEQ ID NO: 19631 - DNA, 40 bp, Artificial Sequence
  Description of Artificial Sequence: Synthetic primer
tggtggtatactccatcacctcgccaccttgggcccggag

SEQ ID NO: 19632 - DNA, 40 bp, Artificial Sequence
  Description of Artificial Sequence: Synthetic primer
tcacagacttgtaatcaggatgccagaatattagccatga

SEQ ID NO: 19633 - DNA, 40 bp, Artificial Sequence
  Description of Artificial Sequence: Synthetic primer
gaccgtcagcccaaatccattgtcatctttctggatgatt

SEQ ID NO: 19634 - DNA, 40 bp, Artificial Sequence
  Description of Artificial Sequence: Synthetic primer
gtatcgggagaagaggcctgaagcggcacagctcttggag

SEQ ID NO: 19635 - DNA, 40 bp, Artificial Sequence
  Description of Artificial Sequence: Synthetic primer
tgttggtgtcagcaagccattttgaactgagaacatgtca

SEQ ID NO: 19636 - DNA, 40 bp, Artificial Sequence
  Description of Artificial Sequence: Synthetic primer
gatattacaaagaaacaggatggacattttgatacaccac

SEQ ID NO: 19637 - DNA, 40 bp, Artificial Sequence
  Description of Artificial Sequence: Synthetic primer
ggcctttggggacttctctcccacagatgtgcataaacag

SEQ ID NO: 19638 - DNA, 40 bp, Artificial Sequence
  Description of Artificial Sequence: Synthetic primer
gctcaaattggcagacacaaaagcaaacaaacctgggatg

SEQ ID NO: 19639 - DNA, 40 bp, Artificial Sequence
  Description of Artificial Sequence: Synthetic primer
ggcaaagcgcgcaagacaacgtggccgcgtccgagcggat

SEQ ID NO: 19640 - DNA, 40 bp, Artificial Sequence
  Description of Artificial Sequence: Synthetic primer
aaaagtttcatccggttaactgtctctttcgctccgctac

SEQ ID NO: 19641 - DNA, 40 bp, Artificial Sequence
  Description of Artificial Sequence: Synthetic primer
cagtttattgcgacgtagcatccaggcctaggcctccccg

SEQ ID NO: 19642 - DNA, 40 bp, Artificial Sequence
  Description of Artificial Sequence: Synthetic primer
cctcccctattccgacgaggatggtggaccccaggaccaa

SEQ ID NO: 19643 - DNA, 40 bp, Artificial Sequence
  Description of Artificial Sequence: Synthetic primer
ggtaggctgagagtggggtggccggaacatccatattgtc

SEQ ID NO: 19644 - DNA, 40 bp, Artificial Sequence
  Description of Artificial Sequence: Synthetic primer
cagttgctcgatgcagctggaaatggatgtgaccgtggag

SEQ ID NO: 19645 - DNA, 40 bp, Artificial Sequence
  Description of Artificial Sequence: Synthetic primer
ggccttctgtaggggaggtcactgatgaaggggtagtagc

SEQ ID NO: 19646 - DNA, 40 bp, Artificial Sequence
  Description of Artificial Sequence: Synthetic primer
ctgcaggaccgcagctgtggggaggagctgccctgggatg

SEQ ID NO: 19647 - DNA, 40 bp, Artificial Sequence
  Description of Artificial Sequence: Synthetic primer
atggctgggtggtcactcctcagaaactcctcatccacct

SEQ ID NO: 19648 - DNA, 40 bp, Artificial Sequence
  Description of Artificial Sequence: Synthetic primer
ctgctaagatgggatgtgccgatccttgtcaaaatgagat

SEQ ID NO: 19649 - DNA, 40 bp, Artificial Sequence
  Description of Artificial Sequence: Synthetic primer
cattgtggaacagaaaaatggcaaagaaagagtgcccatc

SEQ ID NO: 19650 - DNA, 40 bp, Artificial Sequence
  Description of Artificial Sequence: Synthetic primer
catgaagtgttacggttaatggggagcatcctgggcgtca

SEQ ID NO: 19651 - DNA, 40 bp, Artificial Sequence
  Description of Artificial Sequence: Synthetic primer
gcaagtggtttctgtccaacctgcttcctggcagggatgt

SEQ ID NO: 19652 - DNA, 40 bp, Artificial Sequence
  Description of Artificial Sequence: Synthetic primer
caggctacatctcgcctctctacagcttcctgcccaacac

SEQ ID NO: 19653 - DNA, 40 bp, Artificial Sequence
  Description of Artificial Sequence: Synthetic primer
gcgggcggtgtagaggcggcggacgggccggagggaggat

SEQ ID NO: 19654 - DNA, 40 bp, Artificial Sequence
  Description of Artificial Sequence: Synthetic primer
caggtgaggccagtgaaggcagcggagtcacacgtacatc

SEQ ID NO: 19655 - DNA, 40 bp, Artificial Sequence
  Description of Artificial Sequence: Synthetic primer
acggaagtattctctagggaaaagttcattttcatcctct

SEQ ID NO: 19656 - DNA, 40 bp, Artificial Sequence
  Description of Artificial Sequence: Synthetic primer
agtggaggtgaagctttcagggctgctctcagctggatgt

SEQ ID NO: 19657 - DNA, 40 bp, Artificial Sequence
  Description of Artificial Sequence: Synthetic primer
atccttgtcctccagagactgcaccacctgtagcatagaa

SEQ ID NO: 19658 - DNA, 40 bp, Artificial Sequence
  Description of Artificial Sequence: Synthetic primer
gtcaccactccaacaatgacagccactgccactgggatga

SEQ ID NO: 19659 - DNA, 40 bp, Artificial Sequence
  Description of Artificial Sequence: Synthetic primer
ctgcacccactcctggcatccccatcctgcagtctgtacc

SEQ ID NO: 19660 - DNA, 40 bp, Artificial Sequence
  Description of Artificial Sequence: Synthetic primer
agaagctgccagaacacctgcccagcagcagtgcatcctc

SEQ ID NO: 19661 - DNA, 40 bp, Artificial Sequence
  Description of Artificial Sequence: Synthetic primer
gcccaagacggttgcacaggatgcagactccaaagaggat

SEQ ID NO: 19662 - DNA, 40 bp, Artificial Sequence
  Description of Artificial Sequence: Synthetic primer
ctgcattccaattaaatgcttaagaaaaagcagcatccta

SEQ ID NO: 19663 - DNA, 40 bp, Artificial Sequence
  Description of Artificial Sequence: Synthetic primer
tggactggaaaactcacacccggtctggacacagaaagag

SEQ ID NO: 19664 - DNA, 40 bp, Artificial Sequence
  Description of Artificial Sequence: Synthetic primer
tgctgaggaatgagatccaggaatcgtacttgtttaaaat

SEQ ID NO: 19665 - DNA, 40 bp, Artificial Sequence
  Description of Artificial Sequence: Synthetic primer
aagagaaagagaaatccattgttctgctccagcatcctta

SEQ ID NO: 19666 - DNA, 40 bp, Artificial Sequence
  Description of Artificial Sequence: Synthetic primer
gaggcaccagagcggctcagccgggggggctgcgccattg

SEQ ID NO: 19667 - DNA, 40 bp, Artificial Sequence
  Description of Artificial Sequence: Synthetic primer
gcagcagcctccttggaaagacgaaaagcatcctgggttc

SEQ ID NO: 19668 - DNA, 40 bp, Artificial Sequence
  Description of Artificial Sequence: Synthetic primer
ccgtccatgaagcctttggggatggcattcgccgccagga

SEQ ID NO: 19669 - DNA, 40 bp, Artificial Sequence
  Description of Artificial Sequence: Synthetic primer
ttccgcggggaaactgtgtaaagggtggggaaacttgaaa

SEQ ID NO: 19670 - DNA, 40 bp, Artificial Sequence
  Description of Artificial Sequence: Synthetic primer
tgcttcatatagtgcttctcacactcctccttggtcttgg

SEQ ID NO: 19671 - DNA, 40 bp, Artificial Sequence
  Description of Artificial Sequence: Synthetic primer
caagaaaaaagtaaataagaagggggatgaaagagcaaac

SEQ ID NO: 19672 - DNA, 40 bp, Artificial Sequence
  Description of Artificial Sequence: Synthetic primer
tgcctcaggccgctccaggcgtcgtggatgacacagtgat

SEQ ID NO: 19673 - DNA, 40 bp, Artificial Sequence
  Description of Artificial Sequence: Synthetic primer
actgtggatgctggcgggctcattcactgcattgaggact

SEQ ID NO: 19674 - DNA, 40 bp, Artificial Sequence
  Description of Artificial Sequence: Synthetic primer
ggctcgggcctctgcggaaggctttgggcaaaatctcaac

SEQ ID NO: 19675 - DNA, 40 bp, Artificial Sequence
  Description of Artificial Sequence: Synthetic primer
atggtgtaccccattttttaacagcaaagcaaatgtgaga

SEQ ID NO: 19676 - DNA, 40 bp, Artificial Sequence
  Description of Artificial Sequence: Synthetic primer
ttctactatcttctgcacatccacgtcattaaaaaatgaa

SEQ ID NO: 19677 - DNA, 40 bp, Artificial Sequence
  Description of Artificial Sequence: Synthetic primer
attctgctggtatacagctacatccaggagagaatgctga

SEQ ID NO: 19678 - DNA, 40 bp, Artificial Sequence
  Description of Artificial Sequence: Synthetic primer
gtgtgtgtcgcccccgcttcggcgtctggggatggctgct

SEQ ID NO: 19679 - DNA, 40 bp, Artificial Sequence
  Description of Artificial Sequence: Synthetic primer
gcaggaaatgaagggtcttggttttatattcatccgttct

SEQ ID NO: 19680 - DNA, 40 bp, Artificial Sequence
  Description of Artificial Sequence: Synthetic primer
gtcttattgggtgggatgttcaataactgagccattgttt

SEQ ID NO: 19681 - DNA, 40 bp, Artificial Sequence
  Description of Artificial Sequence: Synthetic primer
aggtgctatcagcgctgaggtctacacggaggaagatgcg

SEQ ID NO: 19682 - DNA, 40 bp, Artificial Sequence
  Description of Artificial Sequence: Synthetic primer
gaatgaagattgtggatgtaataggagagaagatctataa

SEQ ID NO: 19683 - DNA, 40 bp, Artificial Sequence
  Description of Artificial Sequence: Synthetic primer
tgtcactcaattcatttctgtatctcagagagtccttcag

SEQ ID NO: 19684 - DNA, 40 bp, Artificial Sequence
  Description of Artificial Sequence: Synthetic primer
tttatctcacacacattatgagcttgaattcttaattcat

SEQ ID NO: 19685 - DNA, 40 bp, Artificial Sequence
  Description of Artificial Sequence: Synthetic primer
tcattcagacaacaccctgatgagcatccattgatgtcat

SEQ ID NO: 19686 - DNA, 40 bp, Artificial Sequence
  Description of Artificial Sequence: Synthetic primer
gataacatctatctcgccagcatccaggacgacgacctac

SEQ ID NO: 19687 - DNA, 40 bp, Artificial Sequence
  Description of Artificial Sequence: Synthetic primer
tgctgcaggtggatgacgagcggaggaacgccgagcagta

SEQ ID NO: 19688 - DNA, 40 bp, Artificial Sequence
  Description of Artificial Sequence: Synthetic primer
gatgacaaggaaagtgtccctatctctgataccatcatcc

SEQ ID NO: 19689 - DNA, 40 bp, Artificial Sequence
  Description of Artificial Sequence: Synthetic primer
catctactggggatgactgttaggcagcttgtgatgatgt

SEQ ID NO: 19690 - DNA, 40 bp, Artificial Sequence
  Description of Artificial Sequence: Synthetic primer
gatgaggccagtctttccgttcagagtcccctccaaccag

SEQ ID NO: 19691 - DNA, 40 bp, Artificial Sequence
  Description of Artificial Sequence: Synthetic primer
gcctacaaactcgccgaggccctgccttcgctcgctgcat

SEQ ID NO: 19692 - DNA, 40 bp, Artificial Sequence
  Description of Artificial Sequence: Synthetic primer
gctgcagaggagcgagaggcctccttaagggagcgggatg

SEQ ID NO: 19693 - DNA, 40 bp, Artificial Sequence
  Description of Artificial Sequence: Synthetic primer
ctctcatttcagaatcccattcttccacaggattgttttt

SEQ ID NO: 19694 - DNA, 40 bp, Artificial Sequence
  Description of Artificial Sequence: Synthetic primer
ccctgcgctgagaaaaggctgcgctggatgcttgattttt

SEQ ID NO: 19695 - DNA, 40 bp, Artificial Sequence
  Description of Artificial Sequence: Synthetic primer
ctcagaatgtggagacttgtgatcctcagtttggacgaat

SEQ ID NO: 19696 - DNA, 40 bp, Artificial Sequence
  Description of Artificial Sequence: Synthetic primer
gtttcatgagtcacaggtacttttatccatccgtgcacaa

SEQ ID NO: 19697 - DNA, 40 bp, Artificial Sequence
  Description of Artificial Sequence: Synthetic primer
ggtttctgtagaattccatgagtagttttggcatccactt

SEQ ID NO: 19698 - DNA, 40 bp, Artificial Sequence
  Description of Artificial Sequence: Synthetic primer
ctatggaagttgataggctgaaaaaccgaactcctgttac

SEQ ID NO: 19699 - DNA, 40 bp, Artificial Sequence
  Description of Artificial Sequence: Synthetic primer
gctttcaagctggaaatgaatgaaatcagggatgcatttt

SEQ ID NO: 19700 - DNA, 40 bp, Artificial Sequence
  Description of Artificial Sequence: Synthetic primer
aggggctggctgcacgaccaaagaggcgccgcgcctctcg

SEQ ID NO: 19701 - DNA, 40 bp, Artificial Sequence
  Description of Artificial Sequence: Synthetic primer
catggagctctaatccccacgcctgggatgagtgcagaat

SEQ ID NO: 19702 - DNA, 40 bp, Artificial Sequence
  Description of Artificial Sequence: Synthetic primer
tgctgggcctggcgcttggcacgctccgcggctgccagtt

SEQ ID NO: 19703 - DNA, 40 bp, Artificial Sequence
  Description of Artificial Sequence: Synthetic primer
ttaaaatagaattctggacctttttaaaaagtttttggat

SEQ ID NO: 19704 - DNA, 40 bp, Artificial Sequence
  Description of Artificial Sequence: Synthetic primer
acacacacacacggccacatccttaacccaggaagtctta

SEQ ID NO: 19705 - DNA, 40 bp, Artificial Sequence
  Description of Artificial Sequence: Synthetic primer
cttcttggtgatggatgcatcgaagaagtgcccagcctca

SEQ ID NO: 19706 - DNA, 40 bp, Artificial Sequence
  Description of Artificial Sequence: Synthetic primer
gtgggctgcacgctcccctccatccccatcggccctgtcc

SEQ ID NO: 19707 - DNA, 40 bp, Artificial Sequence
  Description of Artificial Sequence: Synthetic primer
aaacatgttatcagagactgccaggacatggccatccaca

SEQ ID NO: 19708 - DNA, 40 bp, Artificial Sequence
  Description of Artificial Sequence: Synthetic primer
aactcctagctcatctgtcaccgagcttcatccgaatgtg

SEQ ID NO: 19709 - DNA, 40 bp, Artificial Sequence
  Description of Artificial Sequence: Synthetic primer
gggattaactttgtttagccatttatccagctgccacttg

SEQ ID NO: 19710 - DNA, 40 bp, Artificial Sequence
  Description of Artificial Sequence: Synthetic primer
tttcagagattaattatttggccattaacaatgaatccaa

SEQ ID NO: 19711 - DNA, 40 bp, Artificial Sequence
  Description of Artificial Sequence: Synthetic primer
gctccttgaaggaaattataatcctctccatccagcaact

SEQ ID NO: 19712 - DNA, 40 bp, Artificial Sequence
  Description of Artificial Sequence: Synthetic primer
ggaggccatctcgggcttcctggctgccctgcctctcatc

SEQ ID NO: 19713 - DNA, 40 bp, Artificial Sequence
  Description of Artificial Sequence: Synthetic primer
ctggtcgaaaaatcggtgtctttggtaaaaattctatgag

SEQ ID NO: 19714 - DNA, 40 bp, Artificial Sequence
  Description of Artificial Sequence: Synthetic primer
aaaatcatggtccgaggcaaaggctcaatgagggataaaa

SEQ ID NO: 19715 - DNA, 40 bp, Artificial Sequence
  Description of Artificial Sequence: Synthetic primer
gctcttggcccagtgtgaatgtgtctgggatgtaaatctg

SEQ ID NO: 19716 - DNA, 40 bp, Artificial Sequence
  Description of Artificial Sequence: Synthetic primer
gttccagaagcccaagcagctcaaggacaagactgagttc

SEQ ID NO: 19717 - DNA, 40 bp, Artificial Sequence
  Description of Artificial Sequence: Synthetic primer
atgaagcagcgctggtcaagaggggtcaatttagaatagt

SEQ ID NO: 19718 - DNA, 40 bp, Artificial Sequence
  Description of Artificial Sequence: Synthetic primer
atccagcccactgtgtttggagatgtgcaggatggcatga

SEQ ID NO: 19719 - DNA, 40 bp, Artificial Sequence
  Description of Artificial Sequence: Synthetic primer
tccaaaaactggtacatgtatgttctgcttttataatgta

SEQ ID NO: 19720 - DNA, 40 bp, Artificial Sequence
  Description of Artificial Sequence: Synthetic primer
ctcttatctttggctctacctaaaagttggttaaaaatgc

SEQ ID NO: 19721 - DNA, 40 bp, Artificial Sequence
  Description of Artificial Sequence: Synthetic primer
tacttttagcttgtagttccatgtactgtaaatatttttc

SEQ ID NO: 19722 - DNA, 40 bp, Artificial Sequence
  Description of Artificial Sequence: Synthetic primer
gtttaaaactcaatttcagatgctcataaaagttacttag

SEQ ID NO: 19723 - DNA, 40 bp, Artificial Sequence
  Description of Artificial Sequence: Synthetic primer
aagcagagcaattgagtattcttttttaaattattaagcc

SEQ ID NO: 19724 - DNA, 40 bp, Artificial Sequence
  Description of Artificial Sequence: Synthetic primer
ttctcagatgcagtcaccactttaccaaacttggcacatc

SEQ ID NO: 19725 - DNA, 40 bp, Artificial Sequence
  Description of Artificial Sequence: Synthetic primer
tttctcaagtatattctaggcccaaagaattcaacatcag

SEQ ID NO: 19726 - DNA, 40 bp, Artificial Sequence
  Description of Artificial Sequence: Synthetic primer
acagccaaactggagagtacccttggatgtcctgtgcttc

SEQ ID NO: 19727 - DNA, 40 bp, Artificial Sequence
  Description of Artificial Sequence: Synthetic primer
tccccagtcggaaatccggtccttctccacgtgtttgatg

SEQ ID NO: 19728 - DNA, 40 bp, Artificial Sequence
  Description of Artificial Sequence: Synthetic primer
gggcccaaagggatagaaaagaaggcaacatgaagttaag

SEQ ID NO: 19729 - DNA, 40 bp, Artificial Sequence
  Description of Artificial Sequence: Synthetic primer
ccggggcctgctgcatctgctgatggtggtgatgatggtg

SEQ ID NO: 19730 - DNA, 40 bp, Artificial Sequence
  Description of Artificial Sequence: Synthetic primer
ggtggacacgggtttgggaatgataattcattactaaacc

SEQ ID NO: 19731 - DNA, 40 bp, Artificial Sequence
  Description of Artificial Sequence: Synthetic primer
ttgtttcaacattacagagggaggcactacttaaatttgg

SEQ ID NO: 19732 - DNA, 40 bp, Artificial Sequence
  Description of Artificial Sequence: Synthetic primer
gagagacccttagattgttttccgtcttcaaccctcatac

SEQ ID NO: 19733 - DNA, 40 bp, Artificial Sequence
  Description of Artificial Sequence: Synthetic primer
ggcgcatttcggctttagggtgccagcattttagcattac

SEQ ID NO: 19734 - DNA, 40 bp, Artificial Sequence
  Description of Artificial Sequence: Synthetic primer
aatggccacgggacaacacaatacagtacattctcctatg

SEQ ID NO: 19735 - DNA, 40 bp, Artificial Sequence
  Description of Artificial Sequence: Synthetic primer
cgtggtggtctgcaggcttagatagcggctgtacttcttc

SEQ ID NO: 19736 - DNA, 40 bp, Artificial Sequence
  Description of Artificial Sequence: Synthetic primer
aggcccaagcaactgactcttcctggtctgacgtggcatc

SEQ ID NO: 19737 - DNA, 40 bp, Artificial Sequence
  Description of Artificial Sequence: Synthetic primer
cccacacacagcgcaactcgcccgcagcagacatctgacc

SEQ ID NO: 19738 - DNA, 40 bp, Artificial Sequence
  Description of Artificial Sequence: Synthetic primer
caagccttctatggtgacgttgcaggtattttcctgtttg

SEQ ID NO: 19739 - DNA, 40 bp, Artificial Sequence
  Description of Artificial Sequence: Synthetic primer
ctggcacagaccactgtggttgatggcatggccctccaac

SEQ ID NO: 19740 - DNA, 40 bp, Artificial Sequence
  Description of Artificial Sequence: Synthetic primer
cctccgccatgaccacctggccgaagcagccctccccaag

SEQ ID NO: 19741 - DNA, 40 bp, Artificial Sequence
  Description of Artificial Sequence: Synthetic primer
gaaaacagtgtgttcagtggtgaaaatcgttgcatgcatg

SEQ ID NO: 19742 - DNA, 40 bp, Artificial Sequence
  Description of Artificial Sequence: Synthetic primer
ctgtaaatcctggatatactgtagatgagtactgcgtttt

SEQ ID NO: 19743 - DNA, 40 bp, Artificial Sequence
  Description of Artificial Sequence: Synthetic primer
tcttgtacattaacaatgtaaatttaaatgattaaattac

SEQ ID NO: 19744 - DNA, 40 bp, Artificial Sequence
  Description of Artificial Sequence: Synthetic primer
tttcatatttgacattgtagtaatccaccttgcattttag

SEQ ID NO: 19745 - DNA, 40 bp, Artificial Sequence
  Description of Artificial Sequence: Synthetic primer
tgccacctcccttcaacacttcctaaataaaaattacaag

SEQ ID NO: 19746 - DNA, 40 bp, Artificial Sequence
  Description of Artificial Sequence: Synthetic primer
ttggctagtgactccccaggaatcccataagctgcggaag

SEQ ID NO: 19747 - DNA, 40 bp, Artificial Sequence
  Description of Artificial Sequence: Synthetic primer
aatcaatttttaaaataagttaaataaagtatttcaactg

SEQ ID NO: 19748 - DNA, 40 bp, Artificial Sequence
  Description of Artificial Sequence: Synthetic primer
tagaatacaaaatgaaaattatgaatgctgccccaaatac

SEQ ID NO: 19749 - DNA, 40 bp, Artificial Sequence
  Description of Artificial Sequence: Synthetic primer
ccgcgcaccagcggctggactctgcgccgcagctgccaac

SEQ ID NO: 19750 - DNA, 40 bp, Artificial Sequence
  Description of Artificial Sequence: Synthetic primer
ctgaagagtcctttcctttcacttttagtggtttctcttc

SEQ ID NO: 19751 - DNA, 40 bp, Artificial Sequence
  Description of Artificial Sequence: Synthetic primer
tagtgcaggaactctggagtggaactcagaagagtgttgc

SEQ ID NO: 19752 - DNA, 40 bp, Artificial Sequence
  Description of Artificial Sequence: Synthetic primer
cctgcggccgcgtctgctcggggcctgaggcctcgaagac

SEQ ID NO: 19753 - DNA, 40 bp, Artificial Sequence
  Description of Artificial Sequence: Synthetic primer
tatctcctgctggaaatcagaaaatataataaaattgcac

SEQ ID NO: 19754 - DNA, 40 bp, Artificial Sequence
  Description of Artificial Sequence: Synthetic primer
caaaggtcaataacatggcaagataaaattatttgtatag

SEQ ID NO: 19755 - DNA, 40 bp, Artificial Sequence
  Description of Artificial Sequence: Synthetic primer
aaaaagtcctcttctaaggatagccggccatctcaggctg

SEQ ID NO: 19756 - DNA, 40 bp, Artificial Sequence
  Description of Artificial Sequence: Synthetic primer
ttgtgtccatgcatctttggcacaggttcaccaggtacag

SEQ ID NO: 19757 - DNA, 40 bp, Artificial Sequence
  Description of Artificial Sequence: Synthetic primer
actacacggtatgctagaatcctactatggtcttaaaatg

SEQ ID NO: 19758 - DNA, 40 bp, Artificial Sequence
  Description of Artificial Sequence: Synthetic primer
ccagtttgttttgggaggcagaaagccccagttacagcag

SEQ ID NO: 19759 - DNA, 40 bp, Artificial Sequence
  Description of Artificial Sequence: Synthetic primer
ggggcgcggcccaggacggcggctaggccgtagtgcagcc

SEQ ID NO: 19760 - DNA, 40 bp, Artificial Sequence
  Description of Artificial Sequence: Synthetic primer
cttcaaagaagcctcttcctcctactcctgaagacaacag

SEQ ID NO: 19761 - DNA, 40 bp, Artificial Sequence
  Description of Artificial Sequence: Synthetic primer
tggataatctcaaccttctctcatcaccaacatcattaac

SEQ ID NO: 19762 - DNA, 40 bp, Artificial Sequence
  Description of Artificial Sequence: Synthetic primer
tctcactctcctgactctgctcctctgtgtaactgccatc

SEQ ID NO: 19763 - DNA, 40 bp, Artificial Sequence
  Description of Artificial Sequence: Synthetic primer
agcgctatgtcacctcctgtttgcggaagaaaaggaaacc

SEQ ID NO: 19764 - DNA, 40 bp, Artificial Sequence
  Description of Artificial Sequence: Synthetic primer
caggtaaacaagtctaccgttcttatcaactatgatcacc

SEQ ID NO: 19765 - DNA, 40 bp, Artificial Sequence
  Description of Artificial Sequence: Synthetic primer
atgatccgaaaaaccactcagcgcccgactgaaaagacag

SEQ ID NO: 19766 - DNA, 40 bp, Artificial Sequence
  Description of Artificial Sequence: Synthetic primer
gcagatgcgccggaaggccatgaagcagggcttcgagttc

SEQ ID NO: 19767 - DNA, 40 bp, Artificial Sequence
  Description of Artificial Sequence: Synthetic primer
gcggctgagcttgttctctgaccaggtgttcttcagttcc

SEQ ID NO: 19768 - DNA, 40 bp, Artificial Sequence
  Description of Artificial Sequence: Synthetic primer
caatggcccttcatgaatcatcttcctttttgttaaatcc

SEQ ID NO: 19769 - DNA, 40 bp, Artificial Sequence
  Description of Artificial Sequence: Synthetic primer
aagggctgagaacagcctcctccaactccagcacccaagg

SEQ ID NO: 19770 - DNA, 40 bp, Artificial Sequence
  Description of Artificial Sequence: Synthetic primer
taatctatgtttataatactactactgttatcagtaatgc

SEQ ID NO: 19771 - DNA, 40 bp, Artificial Sequence
  Description of Artificial Sequence: Synthetic primer
tctccgcatggcggcgaccgcggctcctcctccactcaag

SEQ ID NO: 19772 - DNA, 40 bp, Artificial Sequence
  Description of Artificial Sequence: Synthetic primer
aaccagagagaggcaaatgcgttgggcttccatctgtagc

SEQ ID NO: 19773 - DNA, 40 bp, Artificial Sequence
  Description of Artificial Sequence: Synthetic primer
cccaggacctggtggaaggcctcgctgaagtgctgcatgg

SEQ ID NO: 19774 - DNA, 40 bp, Artificial Sequence
  Description of Artificial Sequence: Synthetic primer
aaccaatgttcccttaagtcatgccatgataatgtctccc

SEQ ID NO: 19775 - DNA, 40 bp, Artificial Sequence
  Description of Artificial Sequence: Synthetic primer
cagacctggacacagagtcaagggcccaagaggaaaacac

SEQ ID NO: 19776 - DNA, 40 bp, Artificial Sequence
  Description of Artificial Sequence: Synthetic primer
gagctccagtgagtccagctcctctgacagcgaagactcc

SEQ ID NO: 19777 - DNA, 40 bp, Artificial Sequence
  Description of Artificial Sequence: Synthetic primer
gctgcatgcggctgtgtctgccgacgcacaaggtgtcttc

SEQ ID NO: 19778 - DNA, 40 bp, Artificial Sequence
  Description of Artificial Sequence: Synthetic primer
ctgatgatactctcttcatgatgaaggaattggctggtgc

SEQ ID NO: 19779 - DNA, 40 bp, Artificial Sequence
  Description of Artificial Sequence: Synthetic primer
tctctagaaactcgctctaaagacggaaccgccacagcac

SEQ ID NO: 19780 - DNA, 40 bp, Artificial Sequence
  Description of Artificial Sequence: Synthetic primer
cttgcgggtggacatgcctgctccctgccagcctccagtg

SEQ ID NO: 19781 - DNA, 40 bp, Artificial Sequence
  Description of Artificial Sequence: Synthetic primer
tttttatttaagtgatagtttaattaataaacatgtcaag

SEQ ID NO: 19782 - DNA, 40 bp, Artificial Sequence
  Description of Artificial Sequence: Synthetic primer
gacctgttcacgttgccacagaattcacatgagaaccaag

SEQ ID NO: 19783 - DNA, 40 bp, Artificial Sequence
  Description of Artificial Sequence: Synthetic primer
gttgaaggcagaacactaatcagatttcaaggcccacaac

SEQ ID NO: 19784 - DNA, 40 bp, Artificial Sequence
  Description of Artificial Sequence: Synthetic primer
tgctttttaggttgtttttcctcttgcccctttttcttac

SEQ ID NO: 19785 - DNA, 40 bp, Artificial Sequence
  Description of Artificial Sequence: Synthetic primer
caagcagtgtgtcgcttctgcacaatcagagactgtctcg

SEQ ID NO: 19786 - DNA, 40 bp, Artificial Sequence
  Description of Artificial Sequence: Synthetic primer
cccagctctgcccatgggtccctggggcctccctgacccc

SEQ ID NO: 19787 - DNA, 40 bp, Artificial Sequence
  Description of Artificial Sequence: Synthetic primer
atcccagagcctagggtgccctcctagctctgaaggctcg

SEQ ID NO: 19788 - DNA, 40 bp, Artificial Sequence
  Description of Artificial Sequence: Synthetic primer
atggtcagcattccacttttcaactcttgctcttgctttg

SEQ ID NO: 19789 - DNA, 40 bp, Artificial Sequence
  Description of Artificial Sequence: Synthetic primer
catatagaaaaacaaacagaaataatatgttgggcaggag

SEQ ID NO: 19790 - DNA, 40 bp, Artificial Sequence
  Description of Artificial Sequence: Synthetic primer
cttcatcatcaatctctccagcaggtgagccatgatcttc

SEQ ID NO: 19791 - DNA, 40 bp, Artificial Sequence
  Description of Artificial Sequence: Synthetic primer
tttgctggtggctttagaagaataagccaggtttccacag

SEQ ID NO: 19792 - DNA, 40 bp, Artificial Sequence
  Description of Artificial Sequence: Synthetic primer
gtccctgccactgctggtttctttgttaaatgtttagttg

SEQ ID NO: 19793 - DNA, 40 bp, Artificial Sequence
  Description of Artificial Sequence: Synthetic primer
gggctgctggtgtctgcaacccgcagtctccacagaaaag

SEQ ID NO: 19794 - DNA, 40 bp, Artificial Sequence
  Description of Artificial Sequence: Synthetic primer
aagacagcacaccagagagtagacacggtgcagtcaaatc

SEQ ID NO: 19795 - DNA, 40 bp, Artificial Sequence
  Description of Artificial Sequence: Synthetic primer
ggcctccgaagcccatttctcttgtttgctgctcctgaag

SEQ ID NO: 19796 - DNA, 40 bp, Artificial Sequence
  Description of Artificial Sequence: Synthetic primer
ggagacccagggatgatgctcaaatatcagagaagttacg

SEQ ID NO: 19797 - DNA, 40 bp, Artificial Sequence
  Description of Artificial Sequence: Synthetic primer
caaaacctgtcctatgaatgctttgcatttggaatttttg

SEQ ID NO: 19798 - DNA, 40 bp, Artificial Sequence
  Description of Artificial Sequence: Synthetic primer
ccaagaaatgccggaagttcctaaactaaagctgctcttc

SEQ ID NO: 19799 - DNA, 40 bp, Artificial Sequence
  Description of Artificial Sequence: Synthetic primer
aggcattagggaggcatgaaaggaagaggaatgaggattg

SEQ ID NO: 19800 - DNA, 40 bp, Artificial Sequence
  Description of Artificial Sequence: Synthetic primer
caagattttgaagaaaacagtcgatcagatacagctaatg

SEQ ID NO: 19801 - DNA, 40 bp, Artificial Sequence
  Description of Artificial Sequence: Synthetic primer
caaagcaaatcagataagcaaataaagaatggtgaatgtg

SEQ ID NO: 19802 - DNA, 40 bp, Artificial Sequence
  Description of Artificial Sequence: Synthetic primer
ctctacaagcctgtggaccgtgtgacgaggagcacgctgg

SEQ ID NO: 19803 - DNA, 40 bp, Artificial Sequence
  Description of Artificial Sequence: Synthetic primer
gccactctgaggctggcggcctcgattccggccgcgttcc

SEQ ID NO: 19804 - DNA, 40 bp, Artificial Sequence
  Description of Artificial Sequence: Synthetic primer
accagctctctcttcagaacagagccaatggcttggaatg

SEQ ID NO: 19805 - DNA, 40 bp, Artificial Sequence
  Description of Artificial Sequence: Synthetic primer
tgtgttccggagaaaagtctttttaagtccttacaggaag

SEQ ID NO: 19806 - DNA, 40 bp, Artificial Sequence
  Description of Artificial Sequence: Synthetic primer
catctcaaagtcctgaagtttgctatgaaacagttactac

SEQ ID NO: 19807 - DNA, 40 bp, Artificial Sequence
  Description of Artificial Sequence: Synthetic primer
tcagcagttcagggagctcacatttctcatattgctcaac

SEQ ID NO: 19808 - DNA, 40 bp, Artificial Sequence
  Description of Artificial Sequence: Synthetic primer
ctgctgtttctcttcacactgttgctgcaggagaaccagc

SEQ ID NO: 19809 - DNA, 40 bp, Artificial Sequence
  Description of Artificial Sequence: Synthetic primer
cgggctcgagggcgcgctctggtcgcccgatctgtgtagc

SEQ ID NO: 19810 - DNA, 40 bp, Artificial Sequence
  Description of Artificial Sequence: Synthetic primer
ttagaattctggcctagtacagatttcactgtatgactac

SEQ ID NO: 19811 - DNA, 40 bp, Artificial Sequence
  Description of Artificial Sequence: Synthetic primer
gggaaaggggcgaggggactcgaggagcggcgggtggctg

SEQ ID NO: 19812 - DNA, 40 bp, Artificial Sequence
  Description of Artificial Sequence: Synthetic primer
cctgaaattcctgctcttgttcaagatgctgttctagttc

SEQ ID NO: 19813 - DNA, 40 bp, Artificial Sequence
  Description of Artificial Sequence: Synthetic primer
aatactataacattgatgtgcctagtagaacagcaagagc

SEQ ID NO: 19814 - DNA, 40 bp, Artificial Sequence
  Description of Artificial Sequence: Synthetic primer
aggggaggtcaccatggagacctcgcaggcggcggaaggg

SEQ ID NO: 19815 - DNA, 40 bp, Artificial Sequence
  Description of Artificial Sequence: Synthetic primer
ctgcaggtggtagcgcgttgggttctccagatgggtctgc

SEQ ID NO: 19816 - DNA, 40 bp, Artificial Sequence
  Description of Artificial Sequence: Synthetic primer
accaggttgaggtgctgtctctgacgtggtactcttgtgg

SEQ ID NO: 19817 - DNA, 40 bp, Artificial Sequence
  Description of Artificial Sequence: Synthetic primer
ctaggaagaggttccaggggcggcaggccgctgctgctcc

SEQ ID NO: 19818 - DNA, 40 bp, Artificial Sequence
  Description of Artificial Sequence: Synthetic primer
gtaaaatttactaaagatcacttgatcaggaagaaagaag

SEQ ID NO: 19819 - DNA, 40 bp, Artificial Sequence
  Description of Artificial Sequence: Synthetic primer
ttgagagacttcctcttgggtcccaggaagagggattccc

SEQ ID NO: 19820 - DNA, 40 bp, Artificial Sequence
  Description of Artificial Sequence: Synthetic primer
ttttctttccctgcagggctgaagccgtcttcgcgcggag

SEQ ID NO: 19821 - DNA, 40 bp, Artificial Sequence
  Description of Artificial Sequence: Synthetic primer
ttcagggtgtttcttgtcagcatctccgtgcaggccattg

SEQ ID NO: 19822 - DNA, 40 bp, Artificial Sequence
  Description of Artificial Sequence: Synthetic primer
ccagtactgccgactgcagaagtgctttgaagtgggcatg

SEQ ID NO: 19823 - DNA, 40 bp, Artificial Sequence
  Description of Artificial Sequence: Synthetic primer
ctaatacaatgaaaacttgcattatctaaacagatgttcc

SEQ ID NO: 19824 - DNA, 40 bp, Artificial Sequence
  Description of Artificial Sequence: Synthetic primer
tgggacccaaaacaaaagagacaactggctcaagaacagg

SEQ ID NO: 19825 - DNA, 40 bp, Artificial Sequence
  Description of Artificial Sequence: Synthetic primer
aaaaaaatgccgtttattattgtagattattcttttcttg

SEQ ID NO: 19826 - DNA, 40 bp, Artificial Sequence
  Description of Artificial Sequence: Synthetic primer
gggcccagagactcctccacccctggggagggcagacagg

SEQ ID NO: 19827 - DNA, 40 bp, Artificial Sequence
  Description of Artificial Sequence: Synthetic primer
ctacacctcagcagttacaagccttcaaaaatgaagtagg

SEQ ID NO: 19828 - DNA, 40 bp, Artificial Sequence
  Description of Artificial Sequence: Synthetic primer
ggccgaggtgcctgtcttctattcccagcactcattcttc

SEQ ID NO: 19829 - DNA, 40 bp, Artificial Sequence
  Description of Artificial Sequence: Synthetic primer
gcgccgtctgcccagcagcagcggccctacggctatgaac

SEQ ID NO: 19830 - DNA, 40 bp, Artificial Sequence
  Description of Artificial Sequence: Synthetic primer
agaaattttaaagtgaataagaagataacatttactgatg

SEQ ID NO: 19831 - DNA, 40 bp, Artificial Sequence
  Description of Artificial Sequence: Synthetic primer
ccaggctgtcccgctccttctctagctcggcgaactcggc

SEQ ID NO: 19832 - DNA, 40 bp, Artificial Sequence
  Description of Artificial Sequence: Synthetic primer
tcgaggattgcccggaacagctggcctccctggaatgaag

SEQ ID NO: 19833 - DNA, 40 bp, Artificial Sequence
  Description of Artificial Sequence: Synthetic primer
actgtttctcttctgcagaaaaagaggctcttcctcctcc

SEQ ID NO: 19834 - DNA, 40 bp, Artificial Sequence
  Description of Artificial Sequence: Synthetic primer
ctatgaagtcattcagtgtaggcatttgatcatctagacc

SEQ ID NO: 19835 - DNA, 40 bp, Artificial Sequence
  Description of Artificial Sequence: Synthetic primer
aagagatgatgactggctttaaagaaaaataaagctgaag

SEQ ID NO: 19836 - DNA, 40 bp, Artificial Sequence
  Description of Artificial Sequence: Synthetic primer
ttaagtcagtcttgacttttaaaatctgtaatatagtatg

SEQ ID NO: 19837 - DNA, 40 bp, Artificial Sequence
  Description of Artificial Sequence: Synthetic primer
gaatttatacatgagattgatatgcaataaatctgtgtgc

SEQ ID NO: 19838 - DNA, 40 bp, Artificial Sequence
  Description of Artificial Sequence: Synthetic primer
acaagtgttcctgataagatttcctacagtaagccagctc

SEQ ID NO: 19839 - DNA, 40 bp, Artificial Sequence
  Description of Artificial Sequence: Synthetic primer
ttcaaaatgcttttcataggcttagagaagggctctatgg

SEQ ID NO: 19840 - DNA, 40 bp, Artificial Sequence
  Description of Artificial Sequence: Synthetic primer
ctgttctcagaggtggagaagagaagggagtcaatcaagg

SEQ ID NO: 19841 - DNA, 40 bp, Artificial Sequence
  Description of Artificial Sequence: Synthetic primer
gcttctcccatcgcccacgatggaatgtaaaataaattgg

SEQ ID NO: 19842 - DNA, 40 bp, Artificial Sequence
  Description of Artificial Sequence: Synthetic primer
aagcgacgtctcctaacctgtgtcgtttctccatacactg

SEQ ID NO: 19843 - DNA, 40 bp, Artificial Sequence
  Description of Artificial Sequence: Synthetic primer
agcagtacagccacagccagggcgccgcggagcccatggg

SEQ ID NO: 19844 - DNA, 40 bp, Artificial Sequence
  Description of Artificial Sequence: Synthetic primer
acaccagcaaagccctcaagtaaagttgttttcaggctac

SEQ ID NO: 19845 - DNA, 40 bp, Artificial Sequence
  Description of Artificial Sequence: Synthetic primer
acttggtacggcccaggcattcatgccaagtagctttcac

SEQ ID NO: 19846 - DNA, 40 bp, Artificial Sequence
  Description of Artificial Sequence: Synthetic primer
ccgagtggtggccagctcagacaagacggtggaggtcaag

SEQ ID NO: 19847 - DNA, 40 bp, Artificial Sequence
  Description of Artificial Sequence: Synthetic primer
gcgtgtgtgaacaaatggaaataaagcagggactgtgaac

SEQ ID NO: 19848 - DNA, 40 bp, Artificial Sequence
  Description of Artificial Sequence: Synthetic primer
tcaatacatcagtatatatgcatacacatacatttactag

SEQ ID NO: 19849 - DNA, 40 bp, Artificial Sequence
  Description of Artificial Sequence: Synthetic primer
ggttttttggctgcttggaatttacttctgccacctgctg

SEQ ID NO: 19850 - DNA, 40 bp, Artificial Sequence
  Description of Artificial Sequence: Synthetic primer
cttgatatgggctttgaaccccaaataaggaagattgtgg

SEQ ID NO: 19851 - DNA, 40 bp, Artificial Sequence
  Description of Artificial Sequence: Synthetic primer
tgttcaaatactggctcatcatcttcatgttttctttttc

SEQ ID NO: 19852 - DNA, 40 bp, Artificial Sequence
  Description of Artificial Sequence: Synthetic primer
aaaaaatacaaaaagtacagtcctataaggtacagttagc

SEQ ID NO: 19853 - DNA, 40 bp, Artificial Sequence
  Description of Artificial Sequence: Synthetic primer
tgcgcaggcttctccaagagcagcaccagctctctagcag

SEQ ID NO: 19854 - DNA, 40 bp, Artificial Sequence
  Description of Artificial Sequence: Synthetic primer
gacagcaaagtgcctcccagttccctctaacctcgacttc

SEQ ID NO: 19855 - DNA, 40 bp, Artificial Sequence
  Description of Artificial Sequence: Synthetic primer
cttgttttctagtaagaaaatgctaccttgctgtacatac

SEQ ID NO: 19856 - DNA, 40 bp, Artificial Sequence
  Description of Artificial Sequence: Synthetic primer
ggcatatatccaagagaaaagatttcccatagcagcactc

SEQ ID NO: 19857 - DNA, 40 bp, Artificial Sequence
  Description of Artificial Sequence: Synthetic primer
acaaagtgcggcaagcccagctggtcaggaaagagaatac

SEQ ID NO: 19858 - DNA, 40 bp, Artificial Sequence
  Description of Artificial Sequence: Synthetic primer
ctgtggacagtgagattgctacagttcttgaagactttcc

SEQ ID NO: 19859 - DNA, 40 bp, Artificial Sequence
  Description of Artificial Sequence: Synthetic primer
tgctcctggcagcaaaggagacactggtgctaagggagag

SEQ ID NO: 19860 - DNA, 40 bp, Artificial Sequence
  Description of Artificial Sequence: Synthetic primer
ttaaatcttccacacatgggctcaaataggaagtattttg

SEQ ID NO: 19861 - DNA, 40 bp, Artificial Sequence
  Description of Artificial Sequence: Synthetic primer
ctgtgcctgtaaacagtgcagaagatctataagtgtgtag

SEQ ID NO: 19862 - DNA, 40 bp, Artificial Sequence
  Description of Artificial Sequence: Synthetic primer
tatttttacatctaacaaagtaaaaaaattaaaaagaggg

SEQ ID NO: 19863 - DNA, 40 bp, Artificial Sequence
  Description of Artificial Sequence: Synthetic primer
cataattatggtcaagtgaaggtggaagcactgcgtttgg

SEQ ID NO: 19864 - DNA, 40 bp, Artificial Sequence
  Description of Artificial Sequence: Synthetic primer
cattcacaagtcagcggcggctgcgagcggcccccgcggc

SEQ ID NO: 19865 - DNA, 40 bp, Artificial Sequence
  Description of Artificial Sequence: Synthetic primer
aaaacttccaaggtaaaacaaagcaatagtgcggaaaagg

SEQ ID NO: 19866 - DNA, 40 bp, Artificial Sequence
  Description of Artificial Sequence: Synthetic primer
cgtgtgtggggtcgagcttcctgataacgaggctgtggag

SEQ ID NO: 19867 - DNA, 40 bp, Artificial Sequence
  Description of Artificial Sequence: Synthetic primer
tgcggtggctgaaaatcgtgaccaacttggtgttatctag

SEQ ID NO: 19868 - DNA, 40 bp, Artificial Sequence
  Description of Artificial Sequence: Synthetic primer
gcacggtgcttgggagctgcaagaatggagggaggactgg

SEQ ID NO: 19869 - DNA, 40 bp, Artificial Sequence
  Description of Artificial Sequence: Synthetic primer
cctgagcaatttcaagttctttgtttttctcagttagtgc

SEQ ID NO: 19870 - DNA, 40 bp, Artificial Sequence
  Description of Artificial Sequence: Synthetic primer
ctctggggcaaaggcatggctgtggcacagcatgcccagg

SEQ ID NO: 19871 - DNA, 40 bp, Artificial Sequence
  Description of Artificial Sequence: Synthetic primer
gagttagaaattaaataattgtgtggctctatgtgtgctg

SEQ ID NO: 19872 - DNA, 40 bp, Artificial Sequence
  Description of Artificial Sequence: Synthetic primer
tactcaaaagggctgcggatctggtagaagcactgtatgg

SEQ ID NO: 19873 - DNA, 40 bp, Artificial Sequence
  Description of Artificial Sequence: Synthetic primer
aatctatttagtaacaaattcctggactagcagatagatg

SEQ ID NO: 19874 - DNA, 40 bp, Artificial Sequence
  Description of Artificial Sequence: Synthetic primer
cttgcagggcttgcctttgcagccattgatgacggactcg

SEQ ID NO: 19875 - DNA, 40 bp, Artificial Sequence
  Description of Artificial Sequence: Synthetic primer
catacgtatgtgtaagagaacaatatggtacagaaaaatc

SEQ ID NO: 19876 - DNA, 40 bp, Artificial Sequence
  Description of Artificial Sequence: Synthetic primer
tgatgcttcatgtttctcttctagatcagtacaaagtttc

SEQ ID NO: 19877 - DNA, 40 bp, Artificial Sequence
  Description of Artificial Sequence: Synthetic primer
atggctttggctaaagcggccattgtcttgtaatcttttg

SEQ ID NO: 19878 - DNA, 40 bp, Artificial Sequence
  Description of Artificial Sequence: Synthetic primer
gagagatgaatgcaaaggaaaaaaatattttccaaagtcc

SEQ ID NO: 19879 - DNA, 40 bp, Artificial Sequence
  Description of Artificial Sequence: Synthetic primer
aaggctcgccctcctccaggctccactgctggtagtattc

SEQ ID NO: 19880 - DNA, 40 bp, Artificial Sequence
  Description of Artificial Sequence: Synthetic primer
attctccagatggcatagtaggccgagaagcactgttacc

SEQ ID NO: 19881 - DNA, 40 bp, Artificial Sequence
  Description of Artificial Sequence: Synthetic primer
tgtctgtgaaaacaaatcaatggcttttctcctttaattc

SEQ ID NO: 19882 - DNA, 40 bp, Artificial Sequence
  Description of Artificial Sequence: Synthetic primer
ttcctttaaaaaacttagtgacaaaatagacaatttgcac

SEQ ID NO: 19883 - DNA, 40 bp, Artificial Sequence
  Description of Artificial Sequence: Synthetic primer
caaagaagccgtgcacaggctgcgcttgcagcccccctgc

SEQ ID NO: 19884 - DNA, 40 bp, Artificial Sequence
  Description of Artificial Sequence: Synthetic primer
gagcagtaagggagtgagtgggcaactcggcgcatgaagg

SEQ ID NO: 19885 - DNA, 40 bp, Artificial Sequence
  Description of Artificial Sequence: Synthetic primer
agtccatttgaaacacagttccaaaatcattacaaattgg

SEQ ID NO: 19886 - DNA, 40 bp, Artificial Sequence
  Description of Artificial Sequence: Synthetic primer
ctcagaggtgaccactccggagaacagttcctccccaggg

SEQ ID NO: 19887 - DNA, 40 bp, Artificial Sequence
  Description of Artificial Sequence: Synthetic primer
gttacaatattaggtgaatatggaagtaaaggcattccac

SEQ ID NO: 19888 - DNA, 40 bp, Artificial Sequence
  Description of Artificial Sequence: Synthetic primer
ttctcgttgccagatccctgtggatatacctttttgtacc

SEQ ID NO: 19889 - DNA, 40 bp, Artificial Sequence
  Description of Artificial Sequence: Synthetic primer
tctgttaattagaacaacttcattatgctatcaagattcc

SEQ ID NO: 19890 - DNA, 40 bp, Artificial Sequence
  Description of Artificial Sequence: Synthetic primer
tttcttcctctttctttcgtaaagcttcttgtaattcttc

SEQ ID NO: 19891 - DNA, 40 bp, Artificial Sequence
  Description of Artificial Sequence: Synthetic primer
gttcgagcctctggggatgcaaaaataaagaaggagaagg

SEQ ID NO: 19892 - DNA, 40 bp, Artificial Sequence
  Description of Artificial Sequence: Synthetic primer
ttcaatgaatcttcaaaaaaatgatcatcacagtgggaag

SEQ ID NO: 19893 - DNA, 40 bp, Artificial Sequence
  Description of Artificial Sequence: Synthetic primer
tatttaaactttgggaaatgtacttttagtctgtcatatc

SEQ ID NO: 19894 - DNA, 40 bp, Artificial Sequence
  Description of Artificial Sequence: Synthetic primer
agtgaaggggcttttcattgtttgcacagtgcctgtgcag

SEQ ID NO: 19895 - DNA, 40 bp, Artificial Sequence
  Description of Artificial Sequence: Synthetic primer
taagtttgtaagacagtgccctgagacctctagagaaaag

SEQ ID NO: 19896 - DNA, 40 bp, Artificial Sequence
  Description of Artificial Sequence: Synthetic primer
taatctgcactcatttttagaaattcttggtaaacattgc

SEQ ID NO: 19897 - DNA, 40 bp, Artificial Sequence
  Description of Artificial Sequence: Synthetic primer
tggctcccatatagtctccaagtgccagaattaccttttg

SEQ ID NO: 19898 - DNA, 40 bp, Artificial Sequence
  Description of Artificial Sequence: Synthetic primer
gaaagctgtatggatttttatcttgcattctgatgacttc

SEQ ID NO: 19899 - DNA, 40 bp, Artificial Sequence
  Description of Artificial Sequence: Synthetic primer
gcgttcatgtaatgtcattcctgaggacccaaagtgatgc

SEQ ID NO: 19900 - DNA, 40 bp, Artificial Sequence
  Description of Artificial Sequence: Synthetic primer
ccgcagcagcactcaggcggcagatggccagtcaggcacc

SEQ ID NO: 19901 - DNA, 40 bp, Artificial Sequence
  Description of Artificial Sequence: Synthetic primer
tacttttccttattttctgagtaaggaaatatatcctttg

SEQ ID NO: 19902 - DNA, 40 bp, Artificial Sequence
  Description of Artificial Sequence: Synthetic primer
gcgaagagagagctctgctccctgcttttttagaaaatgg

SEQ ID NO: 19903 - DNA, 40 bp, Artificial Sequence
  Description of Artificial Sequence: Synthetic primer
aaagaaaaaataaaagccctaaaatcttgattatttttcc

SEQ ID NO: 19904 - DNA, 40 bp, Artificial Sequence
  Description of Artificial Sequence: Synthetic primer
ccctgtcaaaatcagaggagaaggccctgaagaaaattcg

SEQ ID NO: 19905 - DNA, 40 bp, Artificial Sequence
  Description of Artificial Sequence: Synthetic primer
tagctaacttagtagtagtagagggaacatattcagtgag

SEQ ID NO: 19906 - DNA, 40 bp, Artificial Sequence
  Description of Artificial Sequence: Synthetic primer
agatactttatagataagtccaaactttatttaaaactac

SEQ ID NO: 19907 - DNA, 40 bp, Artificial Sequence
  Description of Artificial Sequence: Synthetic primer
agcgtagcccctcagaactgtttgcccaacatatagtgac

SEQ ID NO: 19908 - DNA, 40 bp, Artificial Sequence
  Description of Artificial Sequence: Synthetic primer
ttcagaacaaatcctactagcagaagtacatgattccaac

SEQ ID NO: 19909 - DNA, 40 bp, Artificial Sequence
  Description of Artificial Sequence: Synthetic primer
gccgccgctcctggcgcccctgctctgcctggcgctgctg

SEQ ID NO: 19910 - DNA, 40 bp, Artificial Sequence
  Description of Artificial Sequence: Synthetic primer
atattctgagaaaaatctccaaaattagaaggaaataaag

SEQ ID NO: 19911 - DNA, 40 bp, Artificial Sequence
  Description of Artificial Sequence: Synthetic primer
gatggagtcagtgaccccgtccagcaagccagccctgttc

SEQ ID NO: 19912 - DNA, 40 bp, Artificial Sequence
  Description of Artificial Sequence: Synthetic primer
ccactcccgctcggcaccctcggtcctttattgttgactc

SEQ ID NO: 19913 - DNA, 40 bp, Artificial Sequence
  Description of Artificial Sequence: Synthetic primer
ccatgaggacgggctaaaccttaatgaggacctagagaac

SEQ ID NO: 19914 - DNA, 40 bp, Artificial Sequence
  Description of Artificial Sequence: Synthetic primer
ccacaaagatgctcccaaagccctggcgaccagcaatcac

SEQ ID NO: 19915 - DNA, 40 bp, Artificial Sequence
  Description of Artificial Sequence: Synthetic primer
atgacgctgatttttcggtgtgtggaaatgaccaatgaag

SEQ ID NO: 19916 - DNA, 40 bp, Artificial Sequence
  Description of Artificial Sequence: Synthetic primer
atgaatgcttatttcaaataaagattgatagatttaatga

SEQ ID NO: 19917 - DNA, 40 bp, Artificial Sequence
  Description of Artificial Sequence: Synthetic primer
aagttcatagggtctcttcaggttcttagtgtcacttacc

SEQ ID NO: 19918 - DNA, 40 bp, Artificial Sequence
  Description of Artificial Sequence: Synthetic primer
acaccccacagccaagtagaggcgaaagcagtggctcatc

SEQ ID NO: 19919 - DNA, 40 bp, Artificial Sequence
  Description of Artificial Sequence: Synthetic primer
actcttgatttcacatttctactctagatggcaacattgg

SEQ ID NO: 19920 - DNA, 40 bp, Artificial Sequence
  Description of Artificial Sequence: Synthetic primer
acaacatcgaggcaatccggtatccattaaagatataagc

SEQ ID NO: 19921 - DNA, 40 bp, Artificial Sequence
  Description of Artificial Sequence: Synthetic primer
aaccttcaactgataaccacaaatgaaccagtaacaagtc

SEQ ID NO: 19922 - DNA, 40 bp, Artificial Sequence
  Description of Artificial Sequence: Synthetic primer
ggaatctactacccgcctacaagaacttgaacaggaaaac

SEQ ID NO: 19923 - DNA, 40 bp, Artificial Sequence
  Description of Artificial Sequence: Synthetic primer
tgcttacatgtgacatactctaaacaaagtcatagtaaac

SEQ ID NO: 19924 - DNA, 40 bp, Artificial Sequence
  Description of Artificial Sequence: Synthetic primer
tgtgatcctttctcttattgagtctttgttgttcatcatc

SEQ ID NO: 19925 - DNA, 40 bp, Artificial Sequence
  Description of Artificial Sequence: Synthetic primer
tgggcttgtctggccatggacacctgtttggtcacctctg

SEQ ID NO: 19926 - DNA, 40 bp, Artificial Sequence
  Description of Artificial Sequence: Synthetic primer
gctcagacaatataattttccagtttactaaatgctgtcc

SEQ ID NO: 19927 - DNA, 40 bp, Artificial Sequence
  Description of Artificial Sequence: Synthetic primer
atgccgagcgcgctttggccttgatcaacagaataactgg

SEQ ID NO: 19928 - DNA, 40 bp, Artificial Sequence
  Description of Artificial Sequence: Synthetic primer
taatggagaaagaggggcgtgcagaagccgagtcacttcc

SEQ ID NO: 19929 - DNA, 40 bp, Artificial Sequence
  Description of Artificial Sequence: Synthetic primer
tgacggagatactttccagttggaatacatggacctggag

SEQ ID NO: 19930 - DNA, 40 bp, Artificial Sequence
  Description of Artificial Sequence: Synthetic primer
gaaattcccttaagggcctgacttcagcacccgtctctgc

SEQ ID NO: 19931 - DNA, 40 bp, Artificial Sequence
  Description of Artificial Sequence: Synthetic primer
atgtagtctaaactggtacagcagctggaggagacaactg

SEQ ID NO: 19932 - DNA, 40 bp, Artificial Sequence
  Description of Artificial Sequence: Synthetic primer
ttatatagaaataatcttcaaaagtatatagagatatatg

SEQ ID NO: 19933 - DNA, 40 bp, Artificial Sequence
  Description of Artificial Sequence: Synthetic primer
agaaggtaaacattagctctacagtcctttcctcgataac

SEQ ID NO: 19934 - DNA, 40 bp, Artificial Sequence
  Description of Artificial Sequence: Synthetic primer
tggagcatttactgctggatttacagatgattttgaatgg

SEQ ID NO: 19935 - DNA, 40 bp, Artificial Sequence
  Description of Artificial Sequence: Synthetic primer
ttaaaaagccctctaacaagcttgagttatatctgaattc

SEQ ID NO: 19936 - DNA, 40 bp, Artificial Sequence
  Description of Artificial Sequence: Synthetic primer
tactctgctgcgctgcagctccctcagccagggctgttcc

SEQ ID NO: 19937 - DNA, 40 bp, Artificial Sequence
  Description of Artificial Sequence: Synthetic primer
gacgacacctttgcaaagagacccagggatgatgctaaag

SEQ ID NO: 19938 - DNA, 40 bp, Artificial Sequence
  Description of Artificial Sequence: Synthetic primer
acttgtatagaagtaacattttatctaccataaaaatgtg

SEQ ID NO: 19939 - DNA, 40 bp, Artificial Sequence
  Description of Artificial Sequence: Synthetic primer
gtctgggaaaataaaagcacagaccatttctaatgactgg

SEQ ID NO: 19940 - DNA, 40 bp, Artificial Sequence
  Description of Artificial Sequence: Synthetic primer
aatattaaagatttccttggagtcagaggaaaaaacaaac

SEQ ID NO: 19941 - DNA, 40 bp, Artificial Sequence
  Description of Artificial Sequence: Synthetic primer
ctttcaaaccagcttcatgtggcttcccttttctttgttc

SEQ ID NO: 19942 - DNA, 40 bp, Artificial Sequence
  Description of Artificial Sequence: Synthetic primer
tgtagtcaaagtccaggcggcggccctccagtttcttcag

SEQ ID NO: 19943 - DNA, 40 bp, Artificial Sequence
  Description of Artificial Sequence: Synthetic primer
ggggttaggacttggactggggcctgtgttctggcctacc

SEQ ID NO: 19944 - DNA, 40 bp, Artificial Sequence
  Description of Artificial Sequence: Synthetic primer
ttgggtcaggctcttttggaactgtttataagggtaaatg

SEQ ID NO: 19945 - DNA, 40 bp, Artificial Sequence
  Description of Artificial Sequence: Synthetic primer
ctatcctcttcctcttcacgtgtacgctttggcaaagaag

SEQ ID NO: 19946 - DNA, 40 bp, Artificial Sequence
  Description of Artificial Sequence: Synthetic primer
acccactcaggccccaatgccacaccagaagacaaacaac

SEQ ID NO: 19947 - DNA, 40 bp, Artificial Sequence
  Description of Artificial Sequence: Synthetic primer
tctaaggctgttggtgtcagccaggagggtcctccaggcc

SEQ ID NO: 19948 - DNA, 40 bp, Artificial Sequence
  Description of Artificial Sequence: Synthetic primer
ataaacaggaagatcattttctgttttccttctaaccagg

SEQ ID NO: 19949 - DNA, 40 bp, Artificial Sequence
  Description of Artificial Sequence: Synthetic primer
aatatgtatataacatttatgtagcaataaatgtgccatc

SEQ ID NO: 19950 - DNA, 40 bp, Artificial Sequence
  Description of Artificial Sequence: Synthetic primer
ctgaccctttcagtgcagccaacaatagcagtattacatc

SEQ ID NO: 19951 - DNA, 40 bp, Artificial Sequence
  Description of Artificial Sequence: Synthetic primer
gtgagaagacagcctaagaccaggaacgccggatgggaag

SEQ ID NO: 19952 - DNA, 40 bp, Artificial Sequence
  Description of Artificial Sequence: Synthetic primer
gaaaaaatgagattaagtttagtgatacgacacaagatcg

SEQ ID NO: 19953 - DNA, 40 bp, Artificial Sequence
  Description of Artificial Sequence: Synthetic primer
ggtaacaggctgctcagaggacttccgtggcctggagagc

SEQ ID NO: 19954 - DNA, 40 bp, Artificial Sequence
  Description of Artificial Sequence: Synthetic primer
gcttgatttggaatgtttttattagaggaaaaaagaaagc

SEQ ID NO: 19955 - DNA, 40 bp, Artificial Sequence
  Description of Artificial Sequence: Synthetic primer
cagttttgaaagatctgaaattgatcagtgataaaattgg

SEQ ID NO: 19956 - DNA, 40 bp, Artificial Sequence
  Description of Artificial Sequence: Synthetic primer
tcttcttcatgagctaggaacaggggtgtttcatacattc

SEQ ID NO: 19957 - DNA, 40 bp, Artificial Sequence
  Description of Artificial Sequence: Synthetic primer
cacttgagtaataactcccaactcactggtcctctaaacc

SEQ ID NO: 19958 - DNA, 40 bp, Artificial Sequence
  Description of Artificial Sequence: Synthetic primer
gaatcatcatctcttcctctcttctacgtcgttcctcctc

SEQ ID NO: 19959 - DNA, 40 bp, Artificial Sequence
  Description of Artificial Sequence: Synthetic primer
cgcaaagtaataaacaaacgggtccagacagttgttgagg

SEQ ID NO: 19960 - DNA, 40 bp, Artificial Sequence
  Description of Artificial Sequence: Synthetic primer
tcttccaatttcctttaaatggtaagagtttctaaaacag

SEQ ID NO: 19961 - DNA, 40 bp, Artificial Sequence
  Description of Artificial Sequence: Synthetic primer
cagaaccagccaaatcaactaagacttcaacttcagcatc

SEQ ID NO: 19962 - DNA, 40 bp, Artificial Sequence
  Description of Artificial Sequence: Synthetic primer
ccctccagtggctcccgcggcgacaaggccatctctgttg

SEQ ID NO: 19963 - DNA, 40 bp, Artificial Sequence
  Description of Artificial Sequence: Synthetic primer
agcaccgctcttttttcaacaacaggacctagataataag

SEQ ID NO: 19964 - DNA, 40 bp, Artificial Sequence
  Description of Artificial Sequence: Synthetic primer
ttgcttagataagcccaagtttggtggtcgcaatataaag

SEQ ID NO: 19965 - DNA, 40 bp, Artificial Sequence
  Description of Artificial Sequence: Synthetic primer
tcttataaaccttgtcaataaaaataaatctaaatcactg

SEQ ID NO: 19966 - DNA, 40 bp, Artificial Sequence
  Description of Artificial Sequence: Synthetic primer
gaaaagaaccatcaagatactttttaaaaacctaacattg

SEQ ID NO: 19967 - DNA, 40 bp, Artificial Sequence
  Description of Artificial Sequence: Synthetic primer
tatcatgagggaattccggtcagggtcaagtcgtgttctg

SEQ ID NO: 19968 - DNA, 40 bp, Artificial Sequence
  Description of Artificial Sequence: Synthetic primer
cttctttaccggtgtacactactatttctatccttattgc

SEQ ID NO: 19969 - DNA, 40 bp, Artificial Sequence
  Description of Artificial Sequence: Synthetic primer
gtgagaagtttccctctggccccgttacattctgaggaag

SEQ ID NO: 19970 - DNA, 40 bp, Artificial Sequence
  Description of Artificial Sequence: Synthetic primer
gggcccagtctcccttcctccttccatctgcatcaatctg

SEQ ID NO: 19971 - DNA, 40 bp, Artificial Sequence
  Description of Artificial Sequence: Synthetic primer
catagagatatctgcaccagcctgcaaagcttccatgaac

SEQ ID NO: 19972 - DNA, 40 bp, Artificial Sequence
  Description of Artificial Sequence: Synthetic primer
ctgtgacaaatgcttacctgtttctcatcttcagacttgg

SEQ ID NO: 19973 - DNA, 40 bp, Artificial Sequence
  Description of Artificial Sequence: Synthetic primer
cgaaccctgggaacccgagctcagaggctatccctgatcc

SEQ ID NO: 19974 - DNA, 40 bp, Artificial Sequence
  Description of Artificial Sequence: Synthetic primer
gctgatggtggtggtaaggcccggctgcgtagccctggtg

SEQ ID NO: 19975 - DNA, 40 bp, Artificial Sequence
  Description of Artificial Sequence: Synthetic primer
ttctcttgtgtgccaggagaggtttcagaaacctacctcg

SEQ ID NO: 19976 - DNA, 40 bp, Artificial Sequence
  Description of Artificial Sequence: Synthetic primer
actttcagcctgatagtctggtacaaactgctcatcattg

SEQ ID NO: 19977 - DNA, 40 bp, Artificial Sequence
  Description of Artificial Sequence: Synthetic primer
ctctttggaactaggtaagagtggtctcttcttattgaac

SEQ ID NO: 19978 - DNA, 40 bp, Artificial Sequence
  Description of Artificial Sequence: Synthetic primer
tctgagcagcctgttaccttctgcctcagtgccagagtcc

SEQ ID NO: 19979 - DNA, 40 bp, Artificial Sequence
  Description of Artificial Sequence: Synthetic primer
agatgaggaaggctggtatctttcagagtgtaaagtaatc

SEQ ID NO: 19980 - DNA, 40 bp, Artificial Sequence
  Description of Artificial Sequence: Synthetic primer
tattgtctgtgctgtggtgtatgagcattgccaactttat

SEQ ID NO: 19981 - DNA, 40 bp, Artificial Sequence
  Description of Artificial Sequence: Synthetic primer
agaactcacattggcaagtgtaaaaagatgacttaaggtg

SEQ ID NO: 19982 - DNA, 40 bp, Artificial Sequence
  Description of Artificial Sequence: Synthetic primer
ctggatttgcaaggcggctacttgttggtccaagaatctg

SEQ ID NO: 19983 - DNA, 40 bp, Artificial Sequence
  Description of Artificial Sequence: Synthetic primer
ccctgaaatcattcacaatccaaatttcacagtcagagac

SEQ ID NO: 19984 - DNA, 40 bp, Artificial Sequence
  Description of Artificial Sequence: Synthetic primer
tggcagaacagtagaagacaatgtctcttctgaacacttc

SEQ ID NO: 19985 - DNA, 40 bp, Artificial Sequence
  Description of Artificial Sequence: Synthetic primer
tttgatttggcacaacaaatccaatgacataagaatgata

SEQ ID NO: 19986 - DNA, 40 bp, Artificial Sequence
  Description of Artificial Sequence: Synthetic primer
tttgcaacaggcagagctgtgtcgcacagcagtgctgtgc

SEQ ID NO: 19987 - DNA, 40 bp, Artificial Sequence
  Description of Artificial Sequence: Synthetic primer
ggcattgatagagatgagaaggccacaatagctctaaagg

SEQ ID NO: 19988 - DNA, 40 bp, Artificial Sequence
  Description of Artificial Sequence: Synthetic primer
agttgcagcacaggcagctagtgattgggttcatctcctc

SEQ ID NO: 19989 - DNA, 40 bp, Artificial Sequence
  Description of Artificial Sequence: Synthetic primer
aactcaggcgtaactgttatacattaaaagaaattaaaag

SEQ ID NO: 19990 - DNA, 40 bp, Artificial Sequence
  Description of Artificial Sequence: Synthetic primer
tcgtcggcgcaccacgcagatcatcaacatcaccatgacc

SEQ ID NO: 19991 - DNA, 40 bp, Artificial Sequence
  Description of Artificial Sequence: Synthetic primer
ggccaagaaaataatttatctaatgattattagtgacttg

SEQ ID NO: 19992 - DNA, 40 bp, Artificial Sequence
  Description of Artificial Sequence: Synthetic primer
gagcctctacgacgcactcaaccagtactacgtccacctc

SEQ ID NO: 19993 - DNA, 40 bp, Artificial Sequence
  Description of Artificial Sequence: Synthetic primer
atttctgcttgttgaatatgtaaaatagggtaattcattg

SEQ ID NO: 19994 - DNA, 40 bp, Artificial Sequence
  Description of Artificial Sequence: Synthetic primer
aatgatgagagcaaagagtttgtaaagttctttcataaac

SEQ ID NO: 19995 - DNA, 40 bp, Artificial Sequence
  Description of Artificial Sequence: Synthetic primer
tccacccaaggtctcctcggatcgcctggagaggcactcg

SEQ ID NO: 19996 - DNA, 40 bp, Artificial Sequence
  Description of Artificial Sequence: Synthetic primer
actggtccgtactatctttggaatataattagaagctttg

SEQ ID NO: 19997 - DNA, 40 bp, Artificial Sequence
  Description of Artificial Sequence: Synthetic primer
aaagctgtcctcgagtgcaagccactgggcattaagactg

SEQ ID NO: 19998 - DNA, 40 bp, Artificial Sequence
  Description of Artificial Sequence: Synthetic primer
ggcgtgcacagtgcaggagctcccgctgcagcaagggcag

SEQ ID NO: 19999 - DNA, 40 bp, Artificial Sequence
  Description of Artificial Sequence: Synthetic primer
ctcagccagttatcttctggagaagacaagtggctgcttc

SEQ ID NO: 20000 - DNA, 40 bp, Artificial Sequence
  Description of Artificial Sequence: Synthetic primer
atgtgatatgtgtcaagttactcaaagttattgctgttgg

SEQ ID NO: 20001 - DNA, 40 bp, Artificial Sequence
  Description of Artificial Sequence: Synthetic primer
ggggtcatctgcatctgaagctgtcacctggattactgac

SEQ ID NO: 20002 - DNA, 40 bp, Artificial Sequence
  Description of Artificial Sequence: Synthetic primer
tactcgatggtcctggccagcacttctgtcaccgccttgc

SEQ ID NO: 20003 - DNA, 40 bp, Artificial Sequence
  Description of Artificial Sequence: Synthetic primer
cagtataaagggacttgaagtattttttaataatccgccc

SEQ ID NO: 20004 - DNA, 40 bp, Artificial Sequence
  Description of Artificial Sequence: Synthetic primer
cagcgctgccgcgagcacctttggctccaggagcaccaac

SEQ ID NO: 20005 - DNA, 40 bp, Artificial Sequence
  Description of Artificial Sequence: Synthetic primer
atctgccctgcccaggtggagcttcagtcgttgtatgttg

SEQ ID NO: 20006 - DNA, 40 bp, Artificial Sequence
  Description of Artificial Sequence: Synthetic primer
ccatggcaccgcggactggagaaggcgcgcaggctgcggc

SEQ ID NO: 20007 - DNA, 40 bp, Artificial Sequence
  Description of Artificial Sequence: Synthetic primer
ggaccacctgctacgcctcaggctggggcagcatcgaacc

SEQ ID NO: 20008 - DNA, 40 bp, Artificial Sequence
  Description of Artificial Sequence: Synthetic primer
aaaaaggaagaattgacccttgaaggaatcaaacagtttt

SEQ ID NO: 20009 - DNA, 40 bp, Artificial Sequence
  Description of Artificial Sequence: Synthetic primer
cagctcggtggtgggcacccgatggcgcgcttcggccgtc

SEQ ID NO: 20010 - DNA, 40 bp, Artificial Sequence
  Description of Artificial Sequence: Synthetic primer
cagaaacacctgctggacatgcacacctttgtcttctttc

SEQ ID NO: 20011 - DNA, 40 bp, Artificial Sequence
  Description of Artificial Sequence: Synthetic primer
gatccccgagatgcagctgatgcagtccgagagctagatg

SEQ ID NO: 20012 - DNA, 40 bp, Artificial Sequence
  Description of Artificial Sequence: Synthetic primer
atcccaaaatgcttatggacaagattctccatcttgttac

SEQ ID NO: 20013 - DNA, 40 bp, Artificial Sequence
  Description of Artificial Sequence: Synthetic primer
cggggagcggagcttcagctttaccaccgtcctcaccaag

SEQ ID NO: 20014 - DNA, 40 bp, Artificial Sequence
  Description of Artificial Sequence: Synthetic primer
ggaaccacggggtttggacctgaaattcgaggattctgtg

SEQ ID NO: 20015 - DNA, 40 bp, Artificial Sequence
  Description of Artificial Sequence: Synthetic primer
agcgccgcgggccccgacgagctctgcgccgctgccgagc

SEQ ID NO: 20016 - DNA, 40 bp, Artificial Sequence
  Description of Artificial Sequence: Synthetic primer
attaagaatgccaggaatattgtcatcctttgagctgctg

SEQ ID NO: 20017 - DNA, 40 bp, Artificial Sequence
  Description of Artificial Sequence: Synthetic primer
ctgcgccgcgcgccggaagccccatcgctgccggtcatag

SEQ ID NO: 20018 - DNA, 40 bp, Artificial Sequence
  Description of Artificial Sequence: Synthetic primer
ggcccatgataaacatctcaccattcctgctcagtcagtc

SEQ ID NO: 20019 - DNA, 40 bp, Artificial Sequence
  Description of Artificial Sequence: Synthetic primer
agagggcccgactgcgtcacacgccgcccggcgtcagagg

SEQ ID NO: 20020 - DNA, 40 bp, Artificial Sequence
  Description of Artificial Sequence: Synthetic primer
tctagttgttcaagtggttccacaatgactggacgaggag

SEQ ID NO: 20021 - DNA, 40 bp, Artificial Sequence
  Description of Artificial Sequence: Synthetic primer
ttactgaagtatagcctctaatgaggagtggcacttaaac

SEQ ID NO: 20022 - DNA, 40 bp, Artificial Sequence
  Description of Artificial Sequence: Synthetic primer
aatactttatttttcaagtgataaaatcattttataaatc

SEQ ID NO: 20023 - DNA, 40 bp, Artificial Sequence
  Description of Artificial Sequence: Synthetic primer
cacggcctcaaaaggcccgtgcgtcttcacgtcagagttc

SEQ ID NO: 20024 - DNA, 40 bp, Artificial Sequence
  Description of Artificial Sequence: Synthetic primer
ggctggaggctcacagactctgaagagagacaaagagaag

SEQ ID NO: 20025 - DNA, 40 bp, Artificial Sequence
  Description of Artificial Sequence: Synthetic primer
tttgcagaaacaggtcaagtccaaaagattgttttatatg

SEQ ID NO: 20026 - DNA, 40 bp, Artificial Sequence
  Description of Artificial Sequence: Synthetic primer
cctccaattgaagtgatgaagcccaaataattcatatagc

SEQ ID NO: 20027 - DNA, 40 bp, Artificial Sequence
  Description of Artificial Sequence: Synthetic primer
ccagagacatcatgcatgattcgaactatgtgtcgaaagg

SEQ ID NO: 20028 - DNA, 40 bp, Artificial Sequence
  Description of Artificial Sequence: Synthetic primer
gtgggatatgaatatgggtctgtgttgccatcaccttctc

SEQ ID NO: 20029 - DNA, 40 bp, Artificial Sequence
  Description of Artificial Sequence: Synthetic primer
ccggttggtatccatggttttcatagtaaggtccaatagc

SEQ ID NO: 20030 - DNA, 40 bp, Artificial Sequence
  Description of Artificial Sequence: Synthetic primer
gaagtgaaagctcggctccagaaattcattcacaaacctg

SEQ ID NO: 20031 - DNA, 40 bp, Artificial Sequence
  Description of Artificial Sequence: Synthetic primer
aacttctttgaaactggtacatcatgagtggtcctggaag

SEQ ID NO: 20032 - DNA, 40 bp, Artificial Sequence
  Description of Artificial Sequence: Synthetic primer
tttaagttcttgctttgttagtgtagaactgtcacctctg

SEQ ID NO: 20033 - DNA, 40 bp, Artificial Sequence
  Description of Artificial Sequence: Synthetic primer
ttactccactacctggcaccagactggagacataaggaag

SEQ ID NO: 20034 - DNA, 40 bp, Artificial Sequence
  Description of Artificial Sequence: Synthetic primer
tcccaatgtctagaggaggaaagggctgtggttctgacac

SEQ ID NO: 20035 - DNA, 40 bp, Artificial Sequence
  Description of Artificial Sequence: Synthetic primer
gaatcttccactagtagataacatttgtgcatatgcaaac

SEQ ID NO: 20036 - DNA, 40 bp, Artificial Sequence
  Description of Artificial Sequence: Synthetic primer
ccaaatatccttgaacgcctgccttcgcgagacaggatac

SEQ ID NO: 20037 - DNA, 40 bp, Artificial Sequence
  Description of Artificial Sequence: Synthetic primer
ttttatagcaggtccttaagtactccttttgaaattcctc

SEQ ID NO: 20038 - DNA, 40 bp, Artificial Sequence
  Description of Artificial Sequence: Synthetic primer
acatgtaaatatctacatacagggatatttgtatgtgtgg

SEQ ID NO: 20039 - DNA, 40 bp, Artificial Sequence
  Description of Artificial Sequence: Synthetic primer
caggatatgagcacctccggaaggtaccgaaggacacagg

SEQ ID NO: 20040 - DNA, 40 bp, Artificial Sequence
  Description of Artificial Sequence: Synthetic primer
gagcgcctgagcctcgcctggaaattcaccagcaagaagg

SEQ ID NO: 20041 - DNA, 40 bp, Artificial Sequence
  Description of Artificial Sequence: Synthetic primer
ggggaaatctcaacagacatttctagaagaaaaactgtcc

SEQ ID NO: 20042 - DNA, 40 bp, Artificial Sequence
  Description of Artificial Sequence: Synthetic primer
aaaagggttctcttggaaacaagaagagtgactccagatg

SEQ ID NO: 20043 - DNA, 40 bp, Artificial Sequence
  Description of Artificial Sequence: Synthetic primer
gattcactgtacactggacgtcagcaaacacctgaacctg

SEQ ID NO: 20044 - DNA, 40 bp, Artificial Sequence
  Description of Artificial Sequence: Synthetic primer
ctcggagactagaggctggataccaaatagcagtggaaac

SEQ ID NO: 20045 - DNA, 40 bp, Artificial Sequence
  Description of Artificial Sequence: Synthetic primer
cgctccaagctccttctctgctcatgaaatgcggctggac

SEQ ID NO: 20046 - DNA, 40 bp, Artificial Sequence
  Description of Artificial Sequence: Synthetic primer
cgacagcgccatggcccagattctgccaattcgttttcag

SEQ ID NO: 20047 - DNA, 40 bp, Artificial Sequence
  Description of Artificial Sequence: Synthetic primer
tccagggcagagacaagaaagcgcaaggaatgtcctgacc

SEQ ID NO: 20048 - DNA, 40 bp, Artificial Sequence
  Description of Artificial Sequence: Synthetic primer
gatctggcccaacgatggcgagggcgccttccatggagac

SEQ ID NO: 20049 - DNA, 40 bp, Artificial Sequence
  Description of Artificial Sequence: Synthetic primer
ccctcctataggagctggcatccgagggatgggagaccac

SEQ ID NO: 20050 - DNA, 40 bp, Artificial Sequence
  Description of Artificial Sequence: Synthetic primer
gagctgcacgactaccacgacatcatcaagcacccgatgg

SEQ ID NO: 20051 - DNA, 40 bp, Artificial Sequence
  Description of Artificial Sequence: Synthetic primer
tggagatgccagcagaagttgggcagaaaagtcagaaaag

SEQ ID NO: 20052 - DNA, 40 bp, Artificial Sequence
  Description of Artificial Sequence: Synthetic primer
ttttactgcaaaatttgtagcactttactaatattagatc

SEQ ID NO: 20053 - DNA, 40 bp, Artificial Sequence
  Description of Artificial Sequence: Synthetic primer
tgattgggtcttatggcatttcatatcctctatcttcaac

SEQ ID NO: 20054 - DNA, 40 bp, Artificial Sequence
  Description of Artificial Sequence: Synthetic primer
gtctttttctgggttgggttcttttgttttgttaatgatg

SEQ ID NO: 20055 - DNA, 40 bp, Artificial Sequence
  Description of Artificial Sequence: Synthetic primer
taactgattcccaaaagcgaagggaaattctttcaaggag

SEQ ID NO: 20056 - DNA, 40 bp, Artificial Sequence
  Description of Artificial Sequence: Synthetic primer
attcacaggggttgaagtcctgccgccggcacgtgtcctc

SEQ ID NO: 20057 - DNA, 40 bp, Artificial Sequence
  Description of Artificial Sequence: Synthetic primer
tagccacagcgatgtcatgatgacacagtcggaccccttg

SEQ ID NO: 20058 - DNA, 40 bp, Artificial Sequence
  Description of Artificial Sequence: Synthetic primer
catctcttcctgacagcccctttacaggttacatcattgc

SEQ ID NO: 20059 - DNA, 40 bp, Artificial Sequence
  Description of Artificial Sequence: Synthetic primer
attcgatcacctgtctgtactccagcccgcatggctgctc

SEQ ID NO: 20060 - DNA, 40 bp, Artificial Sequence
  Description of Artificial Sequence: Synthetic primer
caaaagcggggcttcatctgcaaagggccctttcatcttg

SEQ ID NO: 20061 - DNA, 40 bp, Artificial Sequence
  Description of Artificial Sequence: Synthetic primer
tgggcaaggaaaacctcctctggtttcaagttcatttctc

SEQ ID NO: 20062 - DNA, 40 bp, Artificial Sequence
  Description of Artificial Sequence: Synthetic primer
ccttgttatctgaacatgttttcttcaggaacaaccagag

SEQ ID NO: 20063 - DNA, 40 bp, Artificial Sequence
  Description of Artificial Sequence: Synthetic primer
gaagtgatggatctgagaacctatgtactcctcagcaaag

SEQ ID NO: 20064 - DNA, 40 bp, Artificial Sequence
  Description of Artificial Sequence: Synthetic primer
ctggtaatgcatattccaaataaatagtttcttttgttgc

SEQ ID NO: 20065 - DNA, 40 bp, Artificial Sequence
  Description of Artificial Sequence: Synthetic primer
ggccataaaaccagtgcactttgggaattacttttctagg

SEQ ID NO: 20066 - DNA, 40 bp, Artificial Sequence
  Description of Artificial Sequence: Synthetic primer
agatcaccagcaagattgcgagggtcccacgactcccgcc

SEQ ID NO: 20067 - DNA, 40 bp, Artificial Sequence
  Description of Artificial Sequence: Synthetic primer
gaagaaaacaagggaggagaagacaagctaaaaatgattc

SEQ ID NO: 20068 - DNA, 40 bp, Artificial Sequence
  Description of Artificial Sequence: Synthetic primer
caggcacagctgtggaccgatttgcagtacagggagaaag

SEQ ID NO: 20069 - DNA, 40 bp, Artificial Sequence
  Description of Artificial Sequence: Synthetic primer
aaagtgtacagttgttaaacaagttgtaaataaagacttg

SEQ ID NO: 20070 - DNA, 40 bp, Artificial Sequence
  Description of Artificial Sequence: Synthetic primer
gattctttagcaagtgaacgtgatcgtttaacaagtaaag

SEQ ID NO: 20071 - DNA, 40 bp, Artificial Sequence
  Description of Artificial Sequence: Synthetic primer
tgcttccaggaccactcatgatgtaccagtttcaaagaag

SEQ ID NO: 20072 - DNA, 40 bp, Artificial Sequence
  Description of Artificial Sequence: Synthetic primer
acagaccaacaacccaaacagcagcaacaacaacacaaac

SEQ ID NO: 20073 - DNA, 40 bp, Artificial Sequence
  Description of Artificial Sequence: Synthetic primer
gcatttctaattttttaagcatgtagccagtaataatttg

SEQ ID NO: 20074 - DNA, 40 bp, Artificial Sequence
  Description of Artificial Sequence: Synthetic primer
attcctatatatacccagtcagttgtctgcaaagaagtcc

SEQ ID NO: 20075 - DNA, 40 bp, Artificial Sequence
  Description of Artificial Sequence: Synthetic primer
gttttaacagtccatgacaaaaatggagattatccaggtc

SEQ ID NO: 20076 - DNA, 40 bp, Artificial Sequence
  Description of Artificial Sequence: Synthetic primer
ctaatactttatctacacttgctgggtctgcgaacgtgac

SEQ ID NO: 20077 - DNA, 40 bp, Artificial Sequence
  Description of Artificial Sequence: Synthetic primer
aagcagggactgctcaggaagcgcagggagggccgaggtg

SEQ ID NO: 20078 - DNA, 40 bp, Artificial Sequence
  Description of Artificial Sequence: Synthetic primer
atactcagagtacgcacggtctgattttctctttggattc

SEQ ID NO: 20079 - DNA, 40 bp, Artificial Sequence
  Description of Artificial Sequence: Synthetic primer
gtgtcttttagatcatttcaaaacactggcttattctttc

SEQ ID NO: 20080 - DNA, 40 bp, Artificial Sequence
  Description of Artificial Sequence: Synthetic primer
tgacacaccagggttcggggaccacatcaacaacgagaac

SEQ ID NO: 20081 - DNA, 40 bp, Artificial Sequence
  Description of Artificial Sequence: Synthetic primer
ggtttgttctcaggagggtaagaactccaggtctaaacag

SEQ ID NO: 20082 - DNA, 40 bp, Artificial Sequence
  Description of Artificial Sequence: Synthetic primer
cttggtctccggcaacaggaagcgcccgtccagcgtgaag

SEQ ID NO: 20083 - DNA, 40 bp, Artificial Sequence
  Description of Artificial Sequence: Synthetic primer
tgaccaagagttaaaatctcccaaatcagaattccaaaag

SEQ ID NO: 20084 - DNA, 40 bp, Artificial Sequence
  Description of Artificial Sequence: Synthetic primer
tcactcagaaattttaaatttgaaaaagaaatcgattttc

SEQ ID NO: 20085 - DNA, 40 bp, Artificial Sequence
  Description of Artificial Sequence: Synthetic primer
tcgccttgttttttctaccatgtccattatgcagtttaac

SEQ ID NO: 20086 - DNA, 40 bp, Artificial Sequence
  Description of Artificial Sequence: Synthetic primer
ttggtacatcagaaacaccattcgttctgaagactagaag

SEQ ID NO: 20087 - DNA, 40 bp, Artificial Sequence
  Description of Artificial Sequence: Synthetic primer
ccactgtggtgtaggtcgccaggggctgatggggcagcac

SEQ ID NO: 20088 - DNA, 40 bp, Artificial Sequence
  Description of Artificial Sequence: Synthetic primer
ctgagctgatactacctgcaagcattgaattcagggaaag

SEQ ID NO: 20089 - DNA, 40 bp, Artificial Sequence
  Description of Artificial Sequence: Synthetic primer
gggccccggggccacagcacaagggtctatgtggttggtg

SEQ ID NO: 20090 - DNA, 40 bp, Artificial Sequence
  Description of Artificial Sequence: Synthetic primer
caaagggcttcccttggttcgccactcatttatttgtaac

SEQ ID NO: 20091 - DNA, 40 bp, Artificial Sequence
  Description of Artificial Sequence: Synthetic primer
aaaactggggaaggggtttaatgaaagagaacaaagaaag

SEQ ID NO: 20092 - DNA, 40 bp, Artificial Sequence
  Description of Artificial Sequence: Synthetic primer
tgccgataggctctgttgctgccactgcaataccaacgag

SEQ ID NO: 20093 - DNA, 40 bp, Artificial Sequence
  Description of Artificial Sequence: Synthetic primer
ctgaaagtcatcactaagcccttcacaaagctcattgtcc

SEQ ID NO: 20094 - DNA, 40 bp, Artificial Sequence
  Description of Artificial Sequence: Synthetic primer
tcgatatataggtagatctctttagtcttttccacctttc

SEQ ID NO: 20095 - DNA, 40 bp, Artificial Sequence
  Description of Artificial Sequence: Synthetic primer
tgttgaattccagcttatgtgatttttatgtacatcttgc

SEQ ID NO: 20096 - DNA, 40 bp, Artificial Sequence
  Description of Artificial Sequence: Synthetic primer
ctgttgtaagtgtcaggtccttttaagcaactctcaagtg

SEQ ID NO: 20097 - DNA, 40 bp, Artificial Sequence
  Description of Artificial Sequence: Synthetic primer
gctctgcaagaagccattctttccaaagccatttcttctc

SEQ ID NO: 20098 - DNA, 40 bp, Artificial Sequence
  Description of Artificial Sequence: Synthetic primer
ccaagtctgctatagatgagtgtgtggttaggcagccttc

SEQ ID NO: 20099 - DNA, 40 bp, Artificial Sequence
  Description of Artificial Sequence: Synthetic primer
tcatcgatgaactccccttcaagtcacctatcaccaagtc

SEQ ID NO: 20100 - DNA, 40 bp, Artificial Sequence
  Description of Artificial Sequence: Synthetic primer
cccaggcactcagggtgatagctgtttcggcacttattac

SEQ ID NO: 20101 - DNA, 40 bp, Artificial Sequence
  Description of Artificial Sequence: Synthetic primer
catcagctacagctggtatggttatccatcctcctaatcc

SEQ ID NO: 20102 - DNA, 40 bp, Artificial Sequence
  Description of Artificial Sequence: Synthetic primer
gattccgacactttttattctgcacacagagtttacttag

SEQ ID NO: 20103 - DNA, 40 bp, Artificial Sequence
  Description of Artificial Sequence: Synthetic primer
agtagatgagaaccagttcaccttaaccattgcaaaccag

SEQ ID NO: 20104 - DNA, 40 bp, Artificial Sequence
  Description of Artificial Sequence: Synthetic primer
ccctctctctgcaggccaggagggcctccttcctgccacg

SEQ ID NO: 20105 - DNA, 40 bp, Artificial Sequence
  Description of Artificial Sequence: Synthetic primer
ctttgttttcacccagcataaggagagttaaaggtgagac

SEQ ID NO: 20106 - DNA, 40 bp, Artificial Sequence
  Description of Artificial Sequence: Synthetic primer
ttgaaaatacttaccatggagcttcaaaagaaatcaagtg

SEQ ID NO: 20107 - DNA, 40 bp, Artificial Sequence
  Description of Artificial Sequence: Synthetic primer
cacatagcacaaacccgcccatctctaccctacctacaac

SEQ ID NO: 20108 - DNA, 40 bp, Artificial Sequence
  Description of Artificial Sequence: Synthetic primer
aggaaaccttccctgccctctgccagctgggcaaatacac

SEQ ID NO: 20109 - DNA, 40 bp, Artificial Sequence
  Description of Artificial Sequence: Synthetic primer
cagttttttaaccttgactttactttggctgtttttcaac

SEQ ID NO: 20110 - DNA, 40 bp, Artificial Sequence
  Description of Artificial Sequence: Synthetic primer
ttgtacatttttttaaattaaaagtttatatgccttatgc

SEQ ID NO: 20111 - DNA, 40 bp, Artificial Sequence
  Description of Artificial Sequence: Synthetic primer
agagtatacctaccctgagaattatacacaatactaatag

SEQ ID NO: 20112 - DNA, 40 bp, Artificial Sequence
  Description of Artificial Sequence: Synthetic primer
tcgagggcgaaatgtactccagttatcaaagtcatcattg

SEQ ID NO: 20113 - DNA, 40 bp, Artificial Sequence
  Description of Artificial Sequence: Synthetic primer
atcggatcggggtttcagcttcaggagtctcaaaattacc

SEQ ID NO: 20114 - DNA, 40 bp, Artificial Sequence
  Description of Artificial Sequence: Synthetic primer
ttttagctaaattcagggagattgcgtggggcaggaaagc

SEQ ID NO: 20115 - DNA, 40 bp, Artificial Sequence
  Description of Artificial Sequence: Synthetic primer
ccgcaaagggttgtctgactcgcccgctggctcgatgatg

SEQ ID NO: 20116 - DNA, 40 bp, Artificial Sequence
  Description of Artificial Sequence: Synthetic primer
aatatccaaattattagcattaatttaatacaattataac

SEQ ID NO: 20117 - DNA, 40 bp, Artificial Sequence
  Description of Artificial Sequence: Synthetic primer
ttttaccaatatgcatttatcataattggtgcttaggctg

SEQ ID NO: 20118 - DNA, 40 bp, Artificial Sequence
  Description of Artificial Sequence: Synthetic primer
ctcctaaaaactgtaccaattattcagaatcagatggatg

SEQ ID NO: 20119 - DNA, 40 bp, Artificial Sequence
  Description of Artificial Sequence: Synthetic primer
aaaaggtacagcagaaagcaagcaactgaatgtttatgag

SEQ ID NO: 20120 - DNA, 40 bp, Artificial Sequence
  Description of Artificial Sequence: Synthetic primer
caaagcttcgaaggactgtgtcaattttgtaacagaatcc

SEQ ID NO: 20121 - DNA, 40 bp, Artificial Sequence
  Description of Artificial Sequence: Synthetic primer
ttggccacatttccagtgtatgtgccctctctaaggaaag

SEQ ID NO: 20122 - DNA, 40 bp, Artificial Sequence
  Description of Artificial Sequence: Synthetic primer
actatctgtggacatctgccaaaaatactttatctacacc

SEQ ID NO: 20123 - DNA, 40 bp, Artificial Sequence
  Description of Artificial Sequence: Synthetic primer
ggccacatcgagaaggacgcccgagagttcctggacaaac

SEQ ID NO: 20124 - DNA, 40 bp, Artificial Sequence
  Description of Artificial Sequence: Synthetic primer
gagagaatgaacgtctggatagttggactgaaggaggttc

SEQ ID NO: 20125 - DNA, 40 bp, Artificial Sequence
  Description of Artificial Sequence: Synthetic primer
atatgcatggacacctatcgattcaaagtacaccataaac

SEQ ID NO: 20126 - DNA, 40 bp, Artificial Sequence
  Description of Artificial Sequence: Synthetic primer
agcttaaaggaaccaagcatgtgactttttatttgtattc

SEQ ID NO: 20127 - DNA, 40 bp, Artificial Sequence
  Description of Artificial Sequence: Synthetic primer
ttttccaaaaagatgtctgcatgtttcctgtctgtagttg

SEQ ID NO: 20128 - DNA, 40 bp, Artificial Sequence
  Description of Artificial Sequence: Synthetic primer
gcagccactacatgccagcaacatagagcttcttgataac

SEQ ID NO: 20129 - DNA, 40 bp, Artificial Sequence
  Description of Artificial Sequence: Synthetic primer
gcagcaccccggcggggccaccccagtctgcgtgtacacg

SEQ ID NO: 20130 - DNA, 40 bp, Artificial Sequence
  Description of Artificial Sequence: Synthetic primer
ggctgagcgcccgtcactgttgccaaatgggaaagaaaac

SEQ ID NO: 20131 - DNA, 40 bp, Artificial Sequence
  Description of Artificial Sequence: Synthetic primer
accagcacagactcaggagacagcgaagagaactatgtcc

SEQ ID NO: 20132 - DNA, 40 bp, Artificial Sequence
  Description of Artificial Sequence: Synthetic primer
ggttgcaggttttgccagcagcacccacagggtggcaatc

SEQ ID NO: 20133 - DNA, 40 bp, Artificial Sequence
  Description of Artificial Sequence: Synthetic primer
agtatattataaatataaaagctcaaagtccaaaaggttc

SEQ ID NO: 20134 - DNA, 40 bp, Artificial Sequence
  Description of Artificial Sequence: Synthetic primer
aactgcaattcctgcctccccatttatttaaacataacac

SEQ ID NO: 20135 - DNA, 40 bp, Artificial Sequence
  Description of Artificial Sequence: Synthetic primer
aacttaattttttaaggggtagaaaatatgataaattttg

SEQ ID NO: 20136 - DNA, 40 bp, Artificial Sequence
  Description of Artificial Sequence: Synthetic primer
gaggtccacctggatctgcttgctgtcctgcttcaccaag

SEQ ID NO: 20137 - DNA, 40 bp, Artificial Sequence
  Description of Artificial Sequence: Synthetic primer
ttctttatgttttcgaatttctcgaactaatgtatagaag

SEQ ID NO: 20138 - DNA, 40 bp, Artificial Sequence
  Description of Artificial Sequence: Synthetic primer
taactaggactactcctggtaacagtaatacattccattg

SEQ ID NO: 20139 - DNA, 40 bp, Artificial Sequence
  Description of Artificial Sequence: Synthetic primer
ttctggctgcttcttgtgtttctgtttgtgtttgtccttc

SEQ ID NO: 20140 - DNA, 40 bp, Artificial Sequence
  Description of Artificial Sequence: Synthetic primer
ttaaagaatagctattgttttctctactgaaatttctagg

SEQ ID NO: 20141 - DNA, 40 bp, Artificial Sequence
  Description of Artificial Sequence: Synthetic primer
gcgatctgtactgaaatctgagatttcagtctggcaactg

SEQ ID NO: 20142 - DNA, 40 bp, Artificial Sequence
  Description of Artificial Sequence: Synthetic primer
ttggttcatagaggacggagagggcggactgttgctattc

SEQ ID NO: 20143 - DNA, 40 bp, Artificial Sequence
  Description of Artificial Sequence: Synthetic primer
atacaggaagacttgcaaactttggaaatatactacattc

SEQ ID NO: 20144 - DNA, 40 bp, Artificial Sequence
  Description of Artificial Sequence: Synthetic primer
acctatagcccacccatgggtccagtcagtgaacgtaagg

SEQ ID NO: 20145 - DNA, 40 bp, Artificial Sequence
  Description of Artificial Sequence: Synthetic primer
atgaaatgctttatcacatttgctacattcatagggcttc

SEQ ID NO: 20146 - DNA, 40 bp, Artificial Sequence
  Description of Artificial Sequence: Synthetic primer
tgggttttgctttagagtgcaagtatcataattccgtatg

SEQ ID NO: 20147 - DNA, 40 bp, Artificial Sequence
  Description of Artificial Sequence: Synthetic primer
atttgcttcagttaaaatggcagcaatgacaaagaggtag

SEQ ID NO: 20148 - DNA, 40 bp, Artificial Sequence
  Description of Artificial Sequence: Synthetic primer
cggacagtaactatcttgagcccattagagagtctgtgtc

SEQ ID NO: 20149 - DNA, 40 bp, Artificial Sequence
  Description of Artificial Sequence: Synthetic primer
caagctattgttcttggagcatcatcttctttaatttttc

SEQ ID NO: 20150 - DNA, 40 bp, Artificial Sequence
  Description of Artificial Sequence: Synthetic primer
ccccatttccgccaggcggcaggagtagatgaacttaaac

SEQ ID NO: 20151 - DNA, 40 bp, Artificial Sequence
  Description of Artificial Sequence: Synthetic primer
accagctctcctccattttgacagcaatttctcactgtgg

SEQ ID NO: 20152 - DNA, 40 bp, Artificial Sequence
  Description of Artificial Sequence: Synthetic primer
ggttgttgctgaagaagacgccgggacccgcctgctcgtc

SEQ ID NO: 20153 - DNA, 40 bp, Artificial Sequence
  Description of Artificial Sequence: Synthetic primer
tgtattctttgatgttaacacattttgtataattgtatcg

SEQ ID NO: 20154 - DNA, 40 bp, Artificial Sequence
  Description of Artificial Sequence: Synthetic primer
taaagctattgctattgatgtagttaccccagctgaaacc

SEQ ID NO: 20155 - DNA, 40 bp, Artificial Sequence
  Description of Artificial Sequence: Synthetic primer
agcacatcacctacactaccacggccacactcaccactcc

SEQ ID NO: 20156 - DNA, 40 bp, Artificial Sequence
  Description of Artificial Sequence: Synthetic primer
caaacgactatacaaggcagctaaattttattcacaaagc

SEQ ID NO: 20157 - DNA, 40 bp, Artificial Sequence
  Description of Artificial Sequence: Synthetic primer
gaattttttatacttgttaaaatcttttcaattattataa

SEQ ID NO: 20158 - DNA, 40 bp, Artificial Sequence
  Description of Artificial Sequence: Synthetic primer
ccaccttctctcaccaactccccagcctccccactcattc

SEQ ID NO: 20159 - DNA, 40 bp, Artificial Sequence
  Description of Artificial Sequence: Synthetic primer
tgtgtctttctaacttctaataaactcactccgactgacc

SEQ ID NO: 20160 - DNA, 40 bp, Artificial Sequence
  Description of Artificial Sequence: Synthetic primer
taaaactttagtctatgaaagaataattataataatgtcc

SEQ ID NO: 20161 - DNA, 40 bp, Artificial Sequence
  Description of Artificial Sequence: Synthetic primer
ttttctgactttttttgttcatgcaactgctggtagaaag

SEQ ID NO: 20162 - DNA, 40 bp, Artificial Sequence
  Description of Artificial Sequence: Synthetic primer
tcatgcgctttgtgctcttctgagcaccatatatactttc

SEQ ID NO: 20163 - DNA, 40 bp, Artificial Sequence
  Description of Artificial Sequence: Synthetic primer
acaaaatgtgcatgtttcagtttacactatacaaaaatag

SEQ ID NO: 20164 - DNA, 40 bp, Artificial Sequence
  Description of Artificial Sequence: Synthetic primer
ctcacattttctgagatatcaccccagcaggtccccatag

SEQ ID NO: 20165 - DNA, 40 bp, Artificial Sequence
  Description of Artificial Sequence: Synthetic primer
atctgaaagtcccagccagccaagtgacgctgacattaag

SEQ ID NO: 20166 - DNA, 40 bp, Artificial Sequence
  Description of Artificial Sequence: Synthetic primer
tcacctactgtgactatttcatgagtggttggggtaggac

SEQ ID NO: 20167 - DNA, 40 bp, Artificial Sequence
  Description of Artificial Sequence: Synthetic primer
aggagcttgtggagcttttgttcatgggttggaagatgag

SEQ ID NO: 20168 - DNA, 40 bp, Artificial Sequence
  Description of Artificial Sequence: Synthetic primer
cagttgtaaatggcacagaggctgaagttaaagagacagc

SEQ ID NO: 20169 - DNA, 40 bp, Artificial Sequence
  Description of Artificial Sequence: Synthetic primer
tcatcaacgaagatgatgttgaagcttatgtgggactgag

SEQ ID NO: 20170 - DNA, 40 bp, Artificial Sequence
  Description of Artificial Sequence: Synthetic primer
ggggcggcgcctctactacaaactgggccggaagctctgc

SEQ ID NO: 20171 - DNA, 40 bp, Artificial Sequence
  Description of Artificial Sequence: Synthetic primer
taaaatctgtggtctccataaatactgggaaaataaatag

SEQ ID NO: 20172 - DNA, 40 bp, Artificial Sequence
  Description of Artificial Sequence: Synthetic primer
tacgacaatgggtaccaggggtgtgcccgcctcgccagag

SEQ ID NO: 20173 - DNA, 40 bp, Artificial Sequence
  Description of Artificial Sequence: Synthetic primer
ccatacattcttacactataaagtaacaaattttacttcc

SEQ ID NO: 20174 - DNA, 40 bp, Artificial Sequence
  Description of Artificial Sequence: Synthetic primer
cctgtttcttctgttattacagaacacagtgtttatcaac

SEQ ID NO: 20175 - DNA, 40 bp, Artificial Sequence
  Description of Artificial Sequence: Synthetic primer
gcctgggccctggcgctggccactcatttccttcaaaatc

SEQ ID NO: 20176 - DNA, 40 bp, Artificial Sequence
  Description of Artificial Sequence: Synthetic primer
gggtgagaaggagagaagggaccaccccattcttctcaag

SEQ ID NO: 20177 - DNA, 40 bp, Artificial Sequence
  Description of Artificial Sequence: Synthetic primer
aggattgataactaaataaatttcctctgttttcccatgc

SEQ ID NO: 20178 - DNA, 40 bp, Artificial Sequence
  Description of Artificial Sequence: Synthetic primer
ggcggggcggctgcgctcaccgccacggccacggccgcgg

SEQ ID NO: 20179 - DNA, 40 bp, Artificial Sequence
  Description of Artificial Sequence: Synthetic primer
ttggacactcacacggacactcaaaagctgggcaggttgg

SEQ ID NO: 20180 - DNA, 40 bp, Artificial Sequence
  Description of Artificial Sequence: Synthetic primer
gatccatataaacttgcctggtttcttcccgttcatattc

SEQ ID NO: 20181 - DNA, 40 bp, Artificial Sequence
  Description of Artificial Sequence: Synthetic primer
ggctttggcggctgctttagcagctgcagctgctggggtc

SEQ ID NO: 20182 - DNA, 40 bp, Artificial Sequence
  Description of Artificial Sequence: Synthetic primer
attgcagactttggcctagcacgcctcattgaggacaacg

SEQ ID NO: 20183 - DNA, 40 bp, Artificial Sequence
  Description of Artificial Sequence: Synthetic primer
ctgacttgatcaataaccttggtactatcgccaagtctgg

SEQ ID NO: 20184 - DNA, 40 bp, Artificial Sequence
  Description of Artificial Sequence: Synthetic primer
attatgttataaatgcaaagagaagataaaatattaaaaa

SEQ ID NO: 20185 - DNA, 40 bp, Artificial Sequence
  Description of Artificial Sequence: Synthetic primer
gcttggcctgcaggacttcaatcactttctccttctcctg

SEQ ID NO: 20186 - DNA, 40 bp, Artificial Sequence
  Description of Artificial Sequence: Synthetic primer
ggtaggttgaaagggtaactggctggaaagaaaattcaac

SEQ ID NO: 20187 - DNA, 40 bp, Artificial Sequence
  Description of Artificial Sequence: Synthetic primer
ggcccagttttcttctttctatggtcttcatattataatc

SEQ ID NO: 20188 - DNA, 40 bp, Artificial Sequence
  Description of Artificial Sequence: Synthetic primer
ccaagaaaaattaaagaagatgatgctccaagaacaatag

SEQ ID NO: 20189 - DNA, 40 bp, Artificial Sequence
  Description of Artificial Sequence: Synthetic primer
cacaaacccaaactcagcagcctaagggaaccttcatagg

SEQ ID NO: 20190 - DNA, 40 bp, Artificial Sequence
  Description of Artificial Sequence: Synthetic primer
ggttttggtactcatattcaatgttctggtcactccattt

SEQ ID NO: 20191 - DNA, 40 bp, Artificial Sequence
  Description of Artificial Sequence: Synthetic primer
gtgctgagcttgacaaataagtgtatccttatgtaaatgg

SEQ ID NO: 20192 - DNA, 40 bp, Artificial Sequence
  Description of Artificial Sequence: Synthetic primer
atttgaaaaatatattttcaaattcactttctaattggcc

SEQ ID NO: 20193 - DNA, 40 bp, Artificial Sequence
  Description of Artificial Sequence: Synthetic primer
tagaatttcctaattcatgaagtgtttcttgtcttgatcc

SEQ ID NO: 20194 - DNA, 40 bp, Artificial Sequence
  Description of Artificial Sequence: Synthetic primer
tctccaagcaatgttcattttactccgcccagaagacaac

SEQ ID NO: 20195 - DNA, 40 bp, Artificial Sequence
  Description of Artificial Sequence: Synthetic primer
gtatcacagcatattggaatgggtctgtaggtaggaatag

SEQ ID NO: 20196 - DNA, 40 bp, Artificial Sequence
  Description of Artificial Sequence: Synthetic primer
atttacctgcttgaatgcatttcttgagactctcactttg

SEQ ID NO: 20197 - DNA, 40 bp, Artificial Sequence
  Description of Artificial Sequence: Synthetic primer
gctgcgggaaggtatactctcctctgtctcgggatttaag

SEQ ID NO: 20198 - DNA, 40 bp, Artificial Sequence
  Description of Artificial Sequence: Synthetic primer
taaaaggtgactatccctagagttccatgttaaaatgtag

SEQ ID NO: 20199 - DNA, 40 bp, Artificial Sequence
  Description of Artificial Sequence: Synthetic primer
tttttttctttaagagtagctgtgttttcttttgcctctc

SEQ ID NO: 20200 - DNA, 40 bp, Artificial Sequence
  Description of Artificial Sequence: Synthetic primer
cgcgcccgtggccgccgtgcaggcggccgtcagcaacctc

SEQ ID NO: 20201 - DNA, 40 bp, Artificial Sequence
  Description of Artificial Sequence: Synthetic primer
cggagagcggctgggctcggctgcacgggagggtggtttc

SEQ ID NO: 20202 - DNA, 40 bp, Artificial Sequence
  Description of Artificial Sequence: Synthetic primer
tgttcttacctttggtttgcctgcctcctgaaacacaaac

SEQ ID NO: 20203 - DNA, 40 bp, Artificial Sequence
  Description of Artificial Sequence: Synthetic primer
attacttttaaaaattctcttaactctgcatttagtctcc

SEQ ID NO: 20204 - DNA, 40 bp, Artificial Sequence
  Description of Artificial Sequence: Synthetic primer
actgcctatgtgctcactgctgtttctcaaaggcaaacac

SEQ ID NO: 20205 - DNA, 40 bp, Artificial Sequence
  Description of Artificial Sequence: Synthetic primer
atatagctgtacaaatataagaataaaatgttgaaaagtc

SEQ ID NO: 20206 - DNA, 40 bp, Artificial Sequence
  Description of Artificial Sequence: Synthetic primer
taaactcttcaacttaggtcgtgtctcaagttactttttc

SEQ ID NO: 20207 - DNA, 40 bp, Artificial Sequence
  Description of Artificial Sequence: Synthetic primer
caaacatgttaatgcctaagtctatgtaatttagcttttt

SEQ ID NO: 20208 - DNA, 40 bp, Artificial Sequence
  Description of Artificial Sequence: Synthetic primer
actctacaggccaatcacaatgcaagttcagacaatacag

SEQ ID NO: 20209 - DNA, 40 bp, Artificial Sequence
  Description of Artificial Sequence: Synthetic primer
ctgaagaacggcagggagttccgcggcgagcaccgcattg

SEQ ID NO: 20210 - DNA, 40 bp, Artificial Sequence
  Description of Artificial Sequence: Synthetic primer
tggaatttgttcaagttttgggtatgtttaatctgttatg

SEQ ID NO: 20211 - DNA, 40 bp, Artificial Sequence
  Description of Artificial Sequence: Synthetic primer
gggcgatctgggactgcatgctggtgggagggctggagac

SEQ ID NO: 20212 - DNA, 40 bp, Artificial Sequence
  Description of Artificial Sequence: Synthetic primer
tgaatattaatatactcaagttacaaatgtagaagtcctg

SEQ ID NO: 20213 - DNA, 40 bp, Artificial Sequence
  Description of Artificial Sequence: Synthetic primer
gtgggcacgctctttactccatgtgtgggacattcattgc

SEQ ID NO: 20214 - DNA, 40 bp, Artificial Sequence
  Description of Artificial Sequence: Synthetic primer
tgacagggtctatggccatcgggtcgtctccgaagatttg

SEQ ID NO: 20215 - DNA, 40 bp, Artificial Sequence
  Description of Artificial Sequence: Synthetic primer
gtcagagcccacaaagccactgtcaaacgtgtccatatcc

SEQ ID NO: 20216 - DNA, 40 bp, Artificial Sequence
  Description of Artificial Sequence: Synthetic primer
cagcgacagcccctcctctcccgagttctttctgtgagtc

SEQ ID NO: 20217 - DNA, 40 bp, Artificial Sequence
  Description of Artificial Sequence: Synthetic primer
taacaatttggaaaatgtggatgtcttttatttccttgaa

SEQ ID NO: 20218 - DNA, 40 bp, Artificial Sequence
  Description of Artificial Sequence: Synthetic primer
tcttttttgccctcccagacctaaaaacagaagcaaatta

SEQ ID NO: 20219 - DNA, 40 bp, Artificial Sequence
  Description of Artificial Sequence: Synthetic primer
gtctacgtcacgatggccctctggtgtaatggggacatgg

SEQ ID NO: 20220 - DNA, 40 bp, Artificial Sequence
  Description of Artificial Sequence: Synthetic primer
accaattgagaagtttgtaacagatatcgatgaactaggc

SEQ ID NO: 20221 - DNA, 40 bp, Artificial Sequence
  Description of Artificial Sequence: Synthetic primer
caggagttgaggttactgtgagtagtgattaaagagagtg

SEQ ID NO: 20222 - DNA, 40 bp, Artificial Sequence
  Description of Artificial Sequence: Synthetic primer
attattagtaagtattgttaatatcagtctacttcctctg

SEQ ID NO: 20223 - DNA, 40 bp, Artificial Sequence
  Description of Artificial Sequence: Synthetic primer
gcgcgggcagcagcgccaggcagagcaggggcgccaggag

SEQ ID NO: 20224 - DNA, 40 bp, Artificial Sequence
  Description of Artificial Sequence: Synthetic primer
ggaaataaagtgccttactgactgtagccattacagtatc

SEQ ID NO: 20225 - DNA, 40 bp, Artificial Sequence
  Description of Artificial Sequence: Synthetic primer
aaatgatctccttgctttgggatccaagtcagtaacagtc

SEQ ID NO: 20226 - DNA, 40 bp, Artificial Sequence
  Description of Artificial Sequence: Synthetic primer
aactgaaatgtgaaagagtctgttataagtttgagacaac

SEQ ID NO: 20227 - DNA, 40 bp, Artificial Sequence
  Description of Artificial Sequence: Synthetic primer
cagcgtgatgctgtcagggttgtcttctcctctggctttg

SEQ ID NO: 20228 - DNA, 40 bp, Artificial Sequence
  Description of Artificial Sequence: Synthetic primer
ccctggtgctccatgaggagacaccgcccaccaccagcag

SEQ ID NO: 20229 - DNA, 40 bp, Artificial Sequence
  Description of Artificial Sequence: Synthetic primer
ggacatgcttctcgagctgctgccagatgactgatgtatg

SEQ ID NO: 20230 - DNA, 40 bp, Artificial Sequence
  Description of Artificial Sequence: Synthetic primer
gtcacacccagcccagaagacgggtcctccagttccagtg

SEQ ID NO: 20231 - DNA, 40 bp, Artificial Sequence
  Description of Artificial Sequence: Synthetic primer
gcccgtggggctcggcgggaatgcaggctgcgctgtgaac

SEQ ID NO: 20232 - DNA, 40 bp, Artificial Sequence
  Description of Artificial Sequence: Synthetic primer
gctccccgctgccaccatggagggcggattggaaatgaac

SEQ ID NO: 20233 - DNA, 40 bp, Artificial Sequence
  Description of Artificial Sequence: Synthetic primer
atacaaagtccctctgctttaagtcaaaaggtcaattctg

SEQ ID NO: 20234 - DNA, 40 bp, Artificial Sequence
  Description of Artificial Sequence: Synthetic primer
cctctccactagctactgcaagttcaggttgaaaaatatc

SEQ ID NO: 20235 - DNA, 40 bp, Artificial Sequence
  Description of Artificial Sequence: Synthetic primer
ttgagggccagagctggcatcgcacccggaagccgcatgg

SEQ ID NO: 20236 - DNA, 40 bp, Artificial Sequence
  Description of Artificial Sequence: Synthetic primer
ctaatatcaattttaaaagagtttacataaaaagggaaaa

SEQ ID NO: 20237 - DNA, 40 bp, Artificial Sequence
  Description of Artificial Sequence: Synthetic primer
gaatgcttttgaagaatcaagagataaaaatctcaaacag

SEQ ID NO: 20238 - DNA, 40 bp, Artificial Sequence
  Description of Artificial Sequence: Synthetic primer
ttaggagggaaaggcactcactctccttctgctttttgag

SEQ ID NO: 20239 - DNA, 40 bp, Artificial Sequence
  Description of Artificial Sequence: Synthetic primer
gggcccgcggacagcgagccggagcgggagccgcgcgtag

SEQ ID NO: 20240 - DNA, 40 bp, Artificial Sequence
  Description of Artificial Sequence: Synthetic primer
aagacaaacatgaaagtctagaaataaaactggtaaaacc

SEQ ID NO: 20241 - DNA, 40 bp, Artificial Sequence
  Description of Artificial Sequence: Synthetic primer
tcagtgttgacctatgcctctccgccactcatcaccaatg

SEQ ID NO: 20242 - DNA, 40 bp, Artificial Sequence
  Description of Artificial Sequence: Synthetic primer
ctccccaccaaccaagatttctttttctaacttctgctac

SEQ ID NO: 20243 - DNA, 40 bp, Artificial Sequence
  Description of Artificial Sequence: Synthetic primer
tttgcttaaggtggcatcaccaatgttccaaatcctttag

SEQ ID NO: 20244 - DNA, 40 bp, Artificial Sequence
  Description of Artificial Sequence: Synthetic primer
agatggatagtacattctggagagtcaaactatacatttc

SEQ ID NO: 20245 - DNA, 40 bp, Artificial Sequence
  Description of Artificial Sequence: Synthetic primer
ggaaaatatttcctgacttgagtgttcctttttaaatgtg

SEQ ID NO: 20246 - DNA, 40 bp, Artificial Sequence
  Description of Artificial Sequence: Synthetic primer
caccccagaggagtgttctggactacagccttgtcttatg

SEQ ID NO: 20247 - DNA, 40 bp, Artificial Sequence
  Description of Artificial Sequence: Synthetic primer
gcaaatctgcacacacaacgaacagttgcatttcagagag

SEQ ID NO: 20248 - DNA, 40 bp, Artificial Sequence
  Description of Artificial Sequence: Synthetic primer
ggcccaccttcaagcagctggtggaggacctggaccgtgt

SEQ ID NO: 20249 - DNA, 40 bp, Artificial Sequence
  Description of Artificial Sequence: Synthetic primer
atagaggccctattggacaaatttggtggggagcataatc

SEQ ID NO: 20250 - DNA, 40 bp, Artificial Sequence
  Description of Artificial Sequence: Synthetic primer
ggggttgttaggcttttctgcctgctcctgcttaaacaca

SEQ ID NO: 20251 - DNA, 40 bp, Artificial Sequence
  Description of Artificial Sequence: Synthetic primer
ccaggttaggccaggaggaccatgtgaatggggccagagg

SEQ ID NO: 20252 - DNA, 40 bp, Artificial Sequence
  Description of Artificial Sequence: Synthetic primer
gagaggagggtgcagcccctgagggaagagggtcctgagc

SEQ ID NO: 20253 - DNA, 40 bp, Artificial Sequence
  Description of Artificial Sequence: Synthetic primer
gtttacttttgcatctttacttgtggagctgtggcaagtc

SEQ ID NO: 20254 - DNA, 40 bp, Artificial Sequence
  Description of Artificial Sequence: Synthetic primer
taacttaatcatttggggtataagaagtctttaagtagac

SEQ ID NO: 20255 - DNA, 40 bp, Artificial Sequence
  Description of Artificial Sequence: Synthetic primer
aggggttctccctgggcaccaatatcaagtccaagatcag

SEQ ID NO: 20256 - DNA, 40 bp, Artificial Sequence
  Description of Artificial Sequence: Synthetic primer
tcctttctctaacatagcggtgacttcacttcctttcatc

SEQ ID NO: 20257 - DNA, 40 bp, Artificial Sequence
  Description of Artificial Sequence: Synthetic primer
atagtaactgacatgattagcagaagaaaggaacatttag

SEQ ID NO: 20258 - DNA, 40 bp, Artificial Sequence
  Description of Artificial Sequence: Synthetic primer
cttatttgaagtctccaaactcatttattttcctattcag

SEQ ID NO: 20259 - DNA, 40 bp, Artificial Sequence
  Description of Artificial Sequence: Synthetic primer
aactgtagtgagtaaaattcattaaattccaagttttagc

SEQ ID NO: 20260 - DNA, 40 bp, Artificial Sequence
  Description of Artificial Sequence: Synthetic primer
atccccgtcgcagtgcccgtgcacgttctaacatgttttt

SEQ ID NO: 20261 - DNA, 40 bp, Artificial Sequence
  Description of Artificial Sequence: Synthetic primer
caagagttggagtacttggaactgttctgtcttcatcatc

SEQ ID NO: 20262 - DNA, 40 bp, Artificial Sequence
  Description of Artificial Sequence: Synthetic primer
atggttagtcctctacttcatggctggaggaggtatacag

SEQ ID NO: 20263 - DNA, 40 bp, Artificial Sequence
  Description of Artificial Sequence: Synthetic primer
gcccctgcaaaggccggagctccaagcgagccctgccaag

SEQ ID NO: 20264 - DNA, 40 bp, Artificial Sequence
  Description of Artificial Sequence: Synthetic primer
cctgtaaagaaactttcaaagaaaagcattccagtaaatc

SEQ ID NO: 20265 - DNA, 40 bp, Artificial Sequence
  Description of Artificial Sequence: Synthetic primer
tagaggcaactggatctcaggagacatgatggagaggaag

SEQ ID NO: 20266 - DNA, 40 bp, Artificial Sequence
  Description of Artificial Sequence: Synthetic primer
gtctcccacgaccgcgtgggccgcctcagcccctgtgtgc

SEQ ID NO: 20267 - DNA, 40 bp, Artificial Sequence
  Description of Artificial Sequence: Synthetic primer
tctgtgactttggcctggctcgagacatcatgcgggactc

SEQ ID NO: 20268 - DNA, 40 bp, Artificial Sequence
  Description of Artificial Sequence: Synthetic primer
aatgcagggtgaacgcggtggaggagctgcactcaaggag

SEQ ID NO: 20269 - DNA, 40 bp, Artificial Sequence
  Description of Artificial Sequence: Synthetic primer
actatcttgttaccaagaagagttatgaggtgaggaaatg

SEQ ID NO: 20270 - DNA, 40 bp, Artificial Sequence
  Description of Artificial Sequence: Synthetic primer
agctttctcacaagcatttggttttaaattatggagtatg

SEQ ID NO: 20271 - DNA, 40 bp, Artificial Sequence
  Description of Artificial Sequence: Synthetic primer
gacctgcaatgattatatttcggtttttgaatttgacatc

SEQ ID NO: 20272 - DNA, 40 bp, Artificial Sequence
  Description of Artificial Sequence: Synthetic primer
ctcctctgactatgagcgtgcagagtggagggagaacatc

SEQ ID NO: 20273 - DNA, 40 bp, Artificial Sequence
  Description of Artificial Sequence: Synthetic primer
ccctccagcttgactaaagggctgtccaaatggacttgtg

SEQ ID NO: 20274 - DNA, 40 bp, Artificial Sequence
  Description of Artificial Sequence: Synthetic primer
gtgcggggtcattgcggccaggttccacttgagcttgttc

SEQ ID NO: 20275 - DNA, 40 bp, Artificial Sequence
  Description of Artificial Sequence: Synthetic primer
ggtcttggtgctgggagagcaggtggagaagttcctggtg

SEQ ID NO: 20276 - DNA, 40 bp, Artificial Sequence
  Description of Artificial Sequence: Synthetic primer
tagaaggagtcaagaggaagatggaccaagggaattacac

SEQ ID NO: 20277 - DNA, 40 bp, Artificial Sequence
  Description of Artificial Sequence: Synthetic primer
ctctgcccttctgtccatttcactgagctggagctcccag

SEQ ID NO: 20278 - DNA, 40 bp, Artificial Sequence
  Description of Artificial Sequence: Synthetic primer
ggacttcggagcattcagcccagagcctttgccaagaacc

SEQ ID NO: 20279 - DNA, 40 bp, Artificial Sequence
  Description of Artificial Sequence: Synthetic primer
gctggtagggcggcccctctcgaaatgcaccgaccccttc

SEQ ID NO: 20280 - DNA, 40 bp, Artificial Sequence
  Description of Artificial Sequence: Synthetic primer
agggccccccgggagaggcgggggccgagaagagcagcag

SEQ ID NO: 20281 - DNA, 40 bp, Artificial Sequence
  Description of Artificial Sequence: Synthetic primer
gttgcagattacaagtatgacctgaaacttcaagagtacc

SEQ ID NO: 20282 - DNA, 40 bp, Artificial Sequence
  Description of Artificial Sequence: Synthetic primer
ccccaggcgctctatgcggtgggggtccaagtgatgtctc

SEQ ID NO: 20283 - DNA, 40 bp, Artificial Sequence
  Description of Artificial Sequence: Synthetic primer
aggttcttttacttcaaatttctctgtgtagaaggcagac

SEQ ID NO: 20284 - DNA, 40 bp, Artificial Sequence
  Description of Artificial Sequence: Synthetic primer
gggagccgcggcggcctgttcccgacgctcacgcctctcc

SEQ ID NO: 20285 - DNA, 40 bp, Artificial Sequence
  Description of Artificial Sequence: Synthetic primer
gccatcatgcatgcgggcatccaggtctgtggctcggttc

SEQ ID NO: 20286 - DNA, 40 bp, Artificial Sequence
  Description of Artificial Sequence: Synthetic primer
ttttcgtggaagttcagatgttgatcaactaggaaaaatc

SEQ ID NO: 20287 - DNA, 40 bp, Artificial Sequence
  Description of Artificial Sequence: Synthetic primer
gctggtgtaggcccagatggcttaagggaatttattagag

SEQ ID NO: 20288 - DNA, 40 bp, Artificial Sequence
  Description of Artificial Sequence: Synthetic primer
aagccagtgatgatctcaatgggcaatgaaaatgtactgg

SEQ ID NO: 20289 - DNA, 40 bp, Artificial Sequence
  Description of Artificial Sequence: Synthetic primer
aatcctggctagcgaggagacttacctgagccacctggag

SEQ ID NO: 20290 - DNA, 40 bp, Artificial Sequence
  Description of Artificial Sequence: Synthetic primer
cgcctccaacttctacagcgcggtgggccgcaatggcatc

SEQ ID NO: 20291 - DNA, 40 bp, Artificial Sequence
  Description of Artificial Sequence: Synthetic primer
gttaaatatgaccacaagtcctgaagagaaaagaaaaatc

SEQ ID NO: 20292 - DNA, 40 bp, Artificial Sequence
  Description of Artificial Sequence: Synthetic primer
ttgtctacacctgcaatgaatgcaagcaccatgtggagac

SEQ ID NO: 20293 - DNA, 40 bp, Artificial Sequence
  Description of Artificial Sequence: Synthetic primer
tcctggaggccttcgggaacgccaagaccgtgaagaatga

SEQ ID NO: 20294 - DNA, 40 bp, Artificial Sequence
  Description of Artificial Sequence: Synthetic primer
tttcctagttcgtgcacttttctttaaacagccatcacag

SEQ ID NO: 20295 - DNA, 40 bp, Artificial Sequence
  Description of Artificial Sequence: Synthetic primer
ggggttggaggcgcacgggtcagcctgctggcacgatttc

SEQ ID NO: 20296 - DNA, 40 bp, Artificial Sequence
  Description of Artificial Sequence: Synthetic primer
tgttgatggggctaggaaagctaacagtactcgaacatgg

SEQ ID NO: 20297 - DNA, 40 bp, Artificial Sequence
  Description of Artificial Sequence: Synthetic primer
tgcaacttcttcttgttgattttcctctcctttgctctgc

SEQ ID NO: 20298 - DNA, 40 bp, Artificial Sequence
  Description of Artificial Sequence: Synthetic primer
gtctcggtcatggtacctgaggccgttctgtacgcaggtg

SEQ ID NO: 20299 - DNA, 40 bp, Artificial Sequence
  Description of Artificial Sequence: Synthetic primer
ccaccacgggggtccctgatgccaggacggaggcagtacc

SEQ ID NO: 20300 - DNA, 40 bp, Artificial Sequence
  Description of Artificial Sequence: Synthetic primer
aataggaattcaacaataatttctttttctgtatatcctc

SEQ ID NO: 20301 - DNA, 40 bp, Artificial Sequence
  Description of Artificial Sequence: Synthetic primer
cgctcccggctgttggtgaagatacgccgcacaactttgg

SEQ ID NO: 20302 - DNA, 40 bp, Artificial Sequence
  Description of Artificial Sequence: Synthetic primer
atccaagagacaggtttctccatcaattactacttgcttc

SEQ ID NO: 20303 - DNA, 40 bp, Artificial Sequence
  Description of Artificial Sequence: Synthetic primer
atggctgagaagtgctgtcaggccaatgctcagtttgcag

SEQ ID NO: 20304 - DNA, 40 bp, Artificial Sequence
  Description of Artificial Sequence: Synthetic primer
ctcaggcacgtagccggtgagggtcctcggcaggaactcg

SEQ ID NO: 20305 - DNA, 40 bp, Artificial Sequence
  Description of Artificial Sequence: Synthetic primer
gcaggggggccgggagctcgacatctacaacaacctacgg

SEQ ID NO: 20306 - DNA, 40 bp, Artificial Sequence
  Description of Artificial Sequence: Synthetic primer
cttctcattggtgtaattgatgcacagctgctcaaacgag

SEQ ID NO: 20307 - DNA, 40 bp, Artificial Sequence
  Description of Artificial Sequence: Synthetic primer
caagaggtcctgtcttcagatgaaaatgggggtacctatg

SEQ ID NO: 20308 - DNA, 40 bp, Artificial Sequence
  Description of Artificial Sequence: Synthetic primer
agaaggaagtttctcaatggcttggaaccagaaaatatcc

SEQ ID NO: 20309 - DNA, 40 bp, Artificial Sequence
  Description of Artificial Sequence: Synthetic primer
cagagtcaagttcacattggaaacattgctgatttgattc

SEQ ID NO: 20310 - DNA, 40 bp, Artificial Sequence
  Description of Artificial Sequence: Synthetic primer
catccacgccgtggaaaacaacagccttagcatggtgcag

SEQ ID NO: 20311 - DNA, 40 bp, Artificial Sequence
  Description of Artificial Sequence: Synthetic primer
ttaggttgtgattgtctttcttctgccgttccttcaaaag

SEQ ID NO: 20312 - DNA, 40 bp, Artificial Sequence
  Description of Artificial Sequence: Synthetic primer
cttgttcagaactgtctttggactctcaggaatctttcag

SEQ ID NO: 20313 - DNA, 40 bp, Artificial Sequence
  Description of Artificial Sequence: Synthetic primer
tcggcgagcagtgctgcaagtgtcttttccttcagtcagc

SEQ ID NO: 20314 - DNA, 40 bp, Artificial Sequence
  Description of Artificial Sequence: Synthetic primer
acaccatctgcgccagggaaaccacggctaccaggtccac

SEQ ID NO: 20315 - DNA, 40 bp, Artificial Sequence
  Description of Artificial Sequence: Synthetic primer
gtagatggaggatttgatacctgtccttcaatgcttacag

SEQ ID NO: 20316 - DNA, 40 bp, Artificial Sequence
  Description of Artificial Sequence: Synthetic primer
tgcccaatgtatctaacgacctctcacagaaactatatgc

SEQ ID NO: 20317 - DNA, 40 bp, Artificial Sequence
  Description of Artificial Sequence: Synthetic primer
cttggaaacaccagcatttgctataaaggaacaaggattc

SEQ ID NO: 20318 - DNA, 40 bp, Artificial Sequence
  Description of Artificial Sequence: Synthetic primer
gttgtgcacaatacctcgtgatgccacttattacagttac

SEQ ID NO: 20319 - DNA, 40 bp, Artificial Sequence
  Description of Artificial Sequence: Synthetic primer
gctccagaggggccaggggcgccaaggtctccaggaacac

SEQ ID NO: 20320 - DNA, 40 bp, Artificial Sequence
  Description of Artificial Sequence: Synthetic primer
ctgtaggcagatattcttttggctgggttaaatgtcaaac

SEQ ID NO: 20321 - DNA, 40 bp, Artificial Sequence
  Description of Artificial Sequence: Synthetic primer
ccgacagtcctcccaccaccccctcctcctcctccatcag

SEQ ID NO: 20322 - DNA, 40 bp, Artificial Sequence
  Description of Artificial Sequence: Synthetic primer
ccaggagaaccgtctcgtccaggggaaccttcggcaccag

SEQ ID NO: 20323 - DNA, 40 bp, Artificial Sequence
  Description of Artificial Sequence: Synthetic primer
ggagttttgaggattgcggaggcggctataccccggactg

SEQ ID NO: 20324 - DNA, 40 bp, Artificial Sequence
  Description of Artificial Sequence: Synthetic primer
gctggactttgcgcccccgggcgcttcggcttacgggtcg

SEQ ID NO: 20325 - DNA, 40 bp, Artificial Sequence
  Description of Artificial Sequence: Synthetic primer
aacgtagtgcagatatatttttgcctgtgctgctcaactg

SEQ ID NO: 20326 - DNA, 40 bp, Artificial Sequence
  Description of Artificial Sequence: Synthetic primer
aatgaaatcacaagattttcagattttcccttgtccaaaa

SEQ ID NO: 20327 - DNA, 40 bp, Artificial Sequence
  Description of Artificial Sequence: Synthetic primer
caggtacgagcgtcattctcacacgtggcgccctcgaagc

SEQ ID NO: 20328 - DNA, 40 bp, Artificial Sequence
  Description of Artificial Sequence: Synthetic primer
tggtctaccacacatctccctccctactatctcttcattg

SEQ ID NO: 20329 - DNA, 40 bp, Artificial Sequence
  Description of Artificial Sequence: Synthetic primer
ggaagcaatgtttcagcctcaagttctgaggtttgacagg

SEQ ID NO: 20330 - DNA, 40 bp, Artificial Sequence
  Description of Artificial Sequence: Synthetic primer
ggtcctgatggaaacaatggtgctcagggacctcctggac

SEQ ID NO: 20331 - DNA, 40 bp, Artificial Sequence
  Description of Artificial Sequence: Synthetic primer
ggagaatgtgtcaccgcgctgggaaagttcaaggttacag

SEQ ID NO: 20332 - DNA, 40 bp, Artificial Sequence
  Description of Artificial Sequence: Synthetic primer
acatatattaaatttgacaagaaactgtattttatgttcc

SEQ ID NO: 20333 - DNA, 40 bp, Artificial Sequence
  Description of Artificial Sequence: Synthetic primer
ctacgcccatgtttcctccaaaaaccaacctcaggataac

SEQ ID NO: 20334 - DNA, 40 bp, Artificial Sequence
  Description of Artificial Sequence: Synthetic primer
aggcgcctgctcctgttcccatgccaataatgcttttcag

SEQ ID NO: 20335 - DNA, 40 bp, Artificial Sequence
  Description of Artificial Sequence: Synthetic primer
atgtaacctttcccaatctcagcctcataggatactacac

SEQ ID NO: 20336 - DNA, 40 bp, Artificial Sequence
  Description of Artificial Sequence: Synthetic primer
cccccgggcgccacctctgtacacttccctgacaccttcc

SEQ ID NO: 20337 - DNA, 40 bp, Artificial Sequence
  Description of Artificial Sequence: Synthetic primer
tggtccagcccctgtgaccgtgggtggcgccgggttggtc

SEQ ID NO: 20338 - DNA, 40 bp, Artificial Sequence
  Description of Artificial Sequence: Synthetic primer
gacattttcaatttcttaaggacatccgaaagcagtagcc

SEQ ID NO: 20339 - DNA, 40 bp, Artificial Sequence
  Description of Artificial Sequence: Synthetic primer
gcttatttgttttgtattcaatgattgtctttccccattc

SEQ ID NO: 20340 - DNA, 40 bp, Artificial Sequence
  Description of Artificial Sequence: Synthetic primer
ttgaataatttgcatagcagtaaaatgtgttttgtgtaac

SEQ ID NO: 20341 - DNA, 40 bp, Artificial Sequence
  Description of Artificial Sequence: Synthetic primer
tctccatggatactccacagtgagctcgatcctccttttc

SEQ ID NO: 20342 - DNA, 40 bp, Artificial Sequence
  Description of Artificial Sequence: Synthetic primer
cactttaaatcgaaatggcttatccccaccgccatgtaag

SEQ ID NO: 20343 - DNA, 40 bp, Artificial Sequence
  Description of Artificial Sequence: Synthetic primer
aatcctggagcaaacggccttactggtgccaagggtgctg

SEQ ID NO: 20344 - DNA, 40 bp, Artificial Sequence
  Description of Artificial Sequence: Synthetic primer
ccaaatggtccccccggtcctgctggaagtcgtggtgatg

SEQ ID NO: 20345 - DNA, 40 bp, Artificial Sequence
  Description of Artificial Sequence: Synthetic primer
ccggtcctactggtcctattggaagccgaggtccttctgg

SEQ ID NO: 20346 - DNA, 40 bp, Artificial Sequence
  Description of Artificial Sequence: Synthetic primer
tatggtgtggtttgatttcataaaacagatgcttaaaaag

SEQ ID NO: 20347 - DNA, 40 bp, Artificial Sequence
  Description of Artificial Sequence: Synthetic primer
tggatttgatgagacagattccaaactggagttgatgatg

SEQ ID NO: 20348 - DNA, 40 bp, Artificial Sequence
  Description of Artificial Sequence: Synthetic primer
ccttcacaccaggagcaccgggctgtcccttcaatccatc

SEQ ID NO: 20349 - DNA, 40 bp, Artificial Sequence
  Description of Artificial Sequence: Synthetic primer
ggcaccacagagtccattatgatgctccaggtggcataac

SEQ ID NO: 20350 - DNA, 40 bp, Artificial Sequence
  Description of Artificial Sequence: Synthetic primer
ggccccgggccggaccgcggagatgccccaaactgacacg

SEQ ID NO: 20351 - DNA, 40 bp, Artificial Sequence
  Description of Artificial Sequence: Synthetic primer
agacccacggttggtgctcaaataccagagaagatccaaa

SEQ ID NO: 20352 - DNA, 40 bp, Artificial Sequence
  Description of Artificial Sequence: Synthetic primer
cgtggtttccctggaactcctggacttcctggcttcaaag

SEQ ID NO: 20353 - DNA, 40 bp, Artificial Sequence
  Description of Artificial Sequence: Synthetic primer
tctcgcttgaggactgagaaaaaccaagtaatcctgagac

SEQ ID NO: 20354 - DNA, 40 bp, Artificial Sequence
  Description of Artificial Sequence: Synthetic primer
aatcttgtaggagaagatcaagattctgtcaacctcactg

SEQ ID NO: 20355 - DNA, 40 bp, Artificial Sequence
  Description of Artificial Sequence: Synthetic primer
cttgtgtccgggttgaccatcgcgacctgggggaccatcg

SEQ ID NO: 20356 - DNA, 40 bp, Artificial Sequence
  Description of Artificial Sequence: Synthetic primer
ctcccctcaacagccacagcccacttcgtccttgtcttac

SEQ ID NO: 20357 - DNA, 40 bp, Artificial Sequence
  Description of Artificial Sequence: Synthetic primer
aggtgccaggtcttccaagaaccccttcaggtagtcatag

SEQ ID NO: 20358 - DNA, 40 bp, Artificial Sequence
  Description of Artificial Sequence: Synthetic primer
gtaatttctagtttgaactgtaattgaatattgtggcttc

SEQ ID NO: 20359 - DNA, 40 bp, Artificial Sequence
  Description of Artificial Sequence: Synthetic primer
actttttcaagtggggataaataatacaactaaatttctg

SEQ ID NO: 20360 - DNA, 40 bp, Artificial Sequence
  Description of Artificial Sequence: Synthetic primer
gcgcagcttcccgaggctccgcaccagccgcgcttctgtc

SEQ ID NO: 20361 - DNA, 40 bp, Artificial Sequence
  Description of Artificial Sequence: Synthetic primer
tgaagatatggggaatataattttagcaatgatttcagag

SEQ ID NO: 20362 - DNA, 40 bp, Artificial Sequence
  Description of Artificial Sequence: Synthetic primer
gacgagcagggtctagatgagtggcgcggtgtggaaaagc

SEQ ID NO: 20363 - DNA, 40 bp, Artificial Sequence
  Description of Artificial Sequence: Synthetic primer
aaacttgttatacaacattgtagacttttccatgattacc

SEQ ID NO: 20364 - DNA, 40 bp, Artificial Sequence
  Description of Artificial Sequence: Synthetic primer
atgttggaaaaccttagtcatgacagagaaaagatacagc

SEQ ID NO: 20365 - DNA, 40 bp, Artificial Sequence
  Description of Artificial Sequence: Synthetic primer
aacttgatgaaatggctctagcatatttaaaaagaatttg

SEQ ID NO: 20366 - DNA, 40 bp, Artificial Sequence
  Description of Artificial Sequence: Synthetic primer
attcaccaacagtctcccagtacataaaataggcttaatg

SEQ ID NO: 20367 - DNA, 40 bp, Artificial Sequence
  Description of Artificial Sequence: Synthetic primer
gctggttatggagatggcagaacttggtcccctcaataag

SEQ ID NO: 20368 - DNA, 40 bp, Artificial Sequence
  Description of Artificial Sequence: Synthetic primer
ctgggggagttcgccacagatattcgtactcatggggttc

SEQ ID NO: 20369 - DNA, 40 bp, Artificial Sequence
  Description of Artificial Sequence: Synthetic primer
ttgatgaatctttattactataaaagggttcgatttaggc

SEQ ID NO: 20370 - DNA, 40 bp, Artificial Sequence
  Description of Artificial Sequence: Synthetic primer
aaatattaattggaagatgaaaaacatgaaaggttaatag

SEQ ID NO: 20371 - DNA, 40 bp, Artificial Sequence; identical to SEQ ID NO: 16978
  Description of Artificial Sequence: Synthetic primer

SEQ ID NO: 20372 - DNA, 40 bp, Artificial Sequence
  Description of Artificial Sequence: Synthetic primer
taaaaattgaactttgattttaatctatcagtccaaatac

SEQ ID NO: 20373 - DNA, 40 bp, Artificial Sequence
  Description of Artificial Sequence: Synthetic primer
ggcctgaattgcttcttccacagatcccaattgaatgagc

SEQ ID NO: 20374 - DNA, 40 bp, Artificial Sequence
  Description of Artificial Sequence: Synthetic primer
aaatgccagtaggtcatgaatataaagacagcaaatatcc

SEQ ID NO: 20375 - DNA, 40 bp, Artificial Sequence
  Description of Artificial Sequence: Synthetic primer
ggcggatcttgttgcgatggtgctcgatctcagacttgtg

SEQ ID NO: 20376 - DNA, 40 bp, Artificial Sequence
  Description of Artificial Sequence: Synthetic primer
gcaggttaattatgagcgttttccctctgattccacatac

SEQ ID NO: 20377 - DNA, 40 bp, Artificial Sequence
  Description of Artificial Sequence: Synthetic primer
tatcctgccaaattaaaaaaatatactgtggcagcctgtc

SEQ ID NO: 20378 - DNA, 40 bp, Artificial Sequence
  Description of Artificial Sequence: Synthetic primer
tggatggattgaagggacagcccggtgctcctggtgtgaa

SEQ ID NO: 20379 - DNA, 40 bp, Artificial Sequence
  Description of Artificial Sequence: Synthetic primer
cctctgccagtgtgctcgtcgcctgcgtgccctagtggag

SEQ ID NO: 20380 - DNA, 40 bp, Artificial Sequence
  Description of Artificial Sequence: Synthetic primer
ttattgtaaaataactgtaactaaccaaaacacatacagg

SEQ ID NO: 20381 - DNA, 40 bp, Artificial Sequence
  Description of Artificial Sequence: Synthetic primer
tttgcactgctggtgttaactggttaggaggagccactgc

SEQ ID NO: 20382 - DNA, 40 bp, Artificial Sequence
  Description of Artificial Sequence: Synthetic primer
ttaaatgtttatatagtttagtaaaatttgcatctcaaag

SEQ ID NO: 20383 - DNA, 40 bp, Artificial Sequence
  Description of Artificial Sequence: Synthetic primer
acgccagtggtcactggctgagcctaggagcgggacacag

SEQ ID NO: 20384 - DNA, 40 bp, Artificial Sequence
  Description of Artificial Sequence: Synthetic primer
gagcatttgcaagatgcaatgtccttcttaaaggatgtct

SEQ ID NO: 20385 - DNA, 40 bp, Artificial Sequence
  Description of Artificial Sequence: Synthetic primer
gttatatctggcacgtattagtttaagatgaaagtagaag

SEQ ID NO: 20386 - DNA, 40 bp, Artificial Sequence
  Description of Artificial Sequence: Synthetic primer
aggagcatgtggtacccaagtcacaacccaagaccatgtg

SEQ ID NO: 20387 - DNA, 40 bp, Artificial Sequence
  Description of Artificial Sequence: Synthetic primer
agagtcattttcaaatccttcatatcttaaaagggcattg

SEQ ID NO: 20388 - DNA, 40 bp, Artificial Sequence
  Description of Artificial Sequence: Synthetic primer
agctggactggggtacccgaccctcacccgcctccttctg

SEQ ID NO: 20389 - DNA, 40 bp, Artificial Sequence
  Description of Artificial Sequence: Synthetic primer
taactttttctagtagagcaagaaatcatttacaacaatg

SEQ ID NO: 20390 - DNA, 40 bp, Artificial Sequence
  Description of Artificial Sequence: Synthetic primer
tgaattttgatgcatttaaaataagattctgatgccagac

SEQ ID NO: 20391 - DNA, 40 bp, Artificial Sequence
  Description of Artificial Sequence: Synthetic primer
gatggtttatttgcccaggatagagatccaagattttcag

SEQ ID NO: 20392 - DNA, 40 bp, Artificial Sequence
  Description of Artificial Sequence: Synthetic primer
cagacatcatctgggaatggtcgcagaggtttctcatagc

SEQ ID NO: 20393 - DNA, 40 bp, Artificial Sequence
  Description of Artificial Sequence: Synthetic primer
ttaaaattaagcataaaccctaggtagtaaccttctgcac

SEQ ID NO: 20394 - DNA, 40 bp, Artificial Sequence
  Description of Artificial Sequence: Synthetic primer
taacactcattgatagaaacatctatcctagcaccttttg

SEQ ID NO: 20395 - DNA, 40 bp, Artificial Sequence
  Description of Artificial Sequence: Synthetic primer
gcttctccagctcctgtcggctcttctcttccttctttag

SEQ ID NO: 20396 - DNA, 40 bp, Artificial Sequence
  Description of Artificial Sequence: Synthetic primer
acgctttgttttagagtaaaaagcatctcggacgccaacc

SEQ ID NO: 20397 - DNA, 40 bp, Artificial Sequence
  Description of Artificial Sequence: Synthetic primer
gccgctcagccgcctgcccggcctccctcccaggcagcag

SEQ ID NO: 20398 - DNA, 40 bp, Artificial Sequence
  Description of Artificial Sequence: Synthetic primer
tgtggctgagactctttatgttttcactactagagctatg

SEQ ID NO: 20399 - DNA, 40 bp, Artificial Sequence
  Description of Artificial Sequence: Synthetic primer
gccagccctggctctcacaggagctctctgcctccaacag

SEQ ID NO: 20400 - DNA, 40 bp, Artificial Sequence
  Description of Artificial Sequence: Synthetic primer
tctcctgctaccaattaaataaagcttactttgccataac

SEQ ID NO: 20401 - DNA, 40 bp, Artificial Sequence
  Description of Artificial Sequence: Synthetic primer
cattgaaaaatagttttctgactattggtctggctctaac

SEQ ID NO: 20402 - DNA, 40 bp, Artificial Sequence
  Description of Artificial Sequence: Synthetic primer
cgccatgttttcctctttgaacccgccggaccgccccgcg

SEQ ID NO: 20403 - DNA, 40 bp, Artificial Sequence
  Description of Artificial Sequence: Synthetic primer
ctaaccaagcctcttgaagttgactgagatcctgaaatag

SEQ ID NO: 20404 - DNA, 40 bp, Artificial Sequence
  Description of Artificial Sequence: Synthetic primer
ctagtgtagaatccttcagagatatttcagtctctctctc

SEQ ID NO: 20405 - DNA, 40 bp, Artificial Sequence
  Description of Artificial Sequence: Synthetic primer
actcaggtgggagccacgcctaaaagccttccacagagag

SEQ ID NO: 20406 - DNA, 40 bp, Artificial Sequence
  Description of Artificial Sequence: Synthetic primer
aaagtgctttatgaattataggaaaataaacacattttag

SEQ ID NO: 20407 - DNA, 40 bp, Artificial Sequence
  Description of Artificial Sequence: Synthetic primer
ctttttaattgccaaactgctctcttcatcagctcagcac

SEQ ID NO: 20408 - DNA, 40 bp, Artificial Sequence
  Description of Artificial Sequence: Synthetic primer
tttccctctgtctctgggccagcatctgtgcattaatagg

SEQ ID NO: 20409 - DNA, 40 bp, Artificial Sequence
  Description of Artificial Sequence: Synthetic primer
agtttgtacatttatttcctaatttatacatgatttttgg

SEQ ID NO: 20410 - DNA, 40 bp, Artificial Sequence
  Description of Artificial Sequence: Synthetic primer
gcatatgaaggtaagatgctggaatgtagggtgatagaag

SEQ ID NO: 20411 - DNA, 40 bp, Artificial Sequence
  Description of Artificial Sequence: Synthetic primer
ctcagtagttgtaagaccaactaaacaattcacttctgtc

SEQ ID NO: 20412 - DNA, 40 bp, Artificial Sequence
  Description of Artificial Sequence: Synthetic primer
cctgtgcaatgctttgttgaaaaccaccatagaatctcac

SEQ ID NO: 20413 - DNA, 40 bp, Artificial Sequence
  Description of Artificial Sequence: Synthetic primer
ctcagggccctgctgcgagcacactcaggagaagcagagc

SEQ ID NO: 20414 - DNA, 40 bp, Artificial Sequence
  Description of Artificial Sequence: Synthetic primer
gagggaagaggagggagtgacgggaggggaggaggtcagc

SEQ ID NO: 20415 - DNA, 40 bp, Artificial Sequence
  Description of Artificial Sequence: Synthetic primer
tgtcctgtactatttggaattggttttccagtctttcaac

SEQ ID NO: 20416 - DNA, 40 bp, Artificial Sequence
  Description of Artificial Sequence: Synthetic primer
catgatctacctgcagacgttgctggccaaggaaaagaag

SEQ ID NO: 20417 - DNA, 40 bp, Artificial Sequence
  Description of Artificial Sequence: Synthetic primer
ccaacaggccagcagcggcggaaacaccagatcacatatc

SEQ ID NO: 20418 - DNA, 40 bp, Artificial Sequence
  Description of Artificial Sequence: Synthetic primer
gaggattcctctggtgaaatcggtcacattgatacccaag

SEQ ID NO: 20419 - DNA, 40 bp, Artificial Sequence
  Description of Artificial Sequence: Synthetic primer
aatcaggatcattttccagggctttgtttatccagttgac

SEQ ID NO: 20420 - DNA, 40 bp, Artificial Sequence
  Description of Artificial Sequence: Synthetic primer
ctgcaaactccaggagccagcgctttaatggtgtgtttgc

SEQ ID NO: 20421 - DNA, 40 bp, Artificial Sequence
  Description of Artificial Sequence: Synthetic primer
gggagtaataaacttcttgttctattaaagtaccgtgtgc

SEQ ID NO: 20422 - DNA, 40 bp, Artificial Sequence
  Description of Artificial Sequence: Synthetic primer
gaacatgatcttcctcctgctaatgttgagcctggaattg

SEQ ID NO: 20423 - DNA, 40 bp, Artificial Sequence
  Description of Artificial Sequence: Synthetic primer
gtcccgggggcgcagcttggagagccgggggcgcagcttg

SEQ ID NO: 20424 - DNA, 40 bp, Artificial Sequence
  Description of Artificial Sequence: Synthetic primer
ggcgacctatggccgtggctaccccggatttgctccaagc

SEQ ID NO: 20425 - DNA, 40 bp, Artificial Sequence
  Description of Artificial Sequence: Synthetic primer
ttgcttgtgacatgaccaattcaatgtccttaacttctac

SEQ ID NO: 20426 - DNA, 40 bp, Artificial Sequence
  Description of Artificial Sequence: Synthetic primer
agacgcccaggacctcacctccaaactgctccaccagaac

SEQ ID NO: 20427 - DNA, 40 bp, Artificial Sequence
  Description of Artificial Sequence: Synthetic primer
ccgacgaccctgagagatcgatgatcacatacactcttcc

SEQ ID NO: 20428 - DNA, 40 bp, Artificial Sequence
  Description of Artificial Sequence: Synthetic primer
ctggcctgaggccccagcatgttgagagggttaggaagag

SEQ ID NO: 20429 - DNA, 40 bp, Artificial Sequence
  Description of Artificial Sequence: Synthetic primer
tttggagtaattccattttcttccatcaagttacataaac

SEQ ID NO: 20430 - DNA, 40 bp, Artificial Sequence
  Description of Artificial Sequence: Synthetic primer
acctttcaataaccatcaattacataaagaaaagaatacc

SEQ ID NO: 20431 - DNA, 40 bp, Artificial Sequence
  Description of Artificial Sequence: Synthetic primer
gtctcacctttaactctccttatgctgggtgaaaacaaag

SEQ ID NO: 20432 - DNA, 40 bp, Artificial Sequence
  Description of Artificial Sequence: Synthetic primer
ttacttattctgctgtgctttaatagaatggaatgtttac

SEQ ID NO: 20433 - DNA, 40 bp, Artificial Sequence
  Description of Artificial Sequence: Synthetic primer
cacaccactgtacatgaattccattttgtaggtctcttcc

SEQ ID NO: 20434 - DNA, 40 bp, Artificial Sequence
  Description of Artificial Sequence: Synthetic primer
gattgccaaatactgaacagaacaaaggagcatatcttcg

SEQ ID NO: 20435 - DNA, 40 bp, Artificial Sequence
  Description of Artificial Sequence: Synthetic primer
ttccccgaggagtaaagggggcagatccagaacagagcag

SEQ ID NO: 20436 - DNA, 40 bp, Artificial Sequence
  Description of Artificial Sequence: Synthetic primer
agtgcgaagatgaaagagacccaaattctaaggaatgatg

SEQ ID NO: 20437 - DNA, 40 bp, Artificial Sequence
  Description of Artificial Sequence: Synthetic primer
gctcagcttgcatattgtcttgatcccttctggtagatgc

SEQ ID NO: 20438 - DNA, 40 bp, Artificial Sequence
  Description of Artificial Sequence: Synthetic primer
tcaaactttgatccttgtttttgaaatcatttgtcaattc

SEQ ID NO: 20439 - DNA, 40 bp, Artificial Sequence
  Description of Artificial Sequence: Synthetic primer
tgcttagtaatccaaggcaagattagttgtggtaaaaatg

SEQ ID NO: 20440 - DNA, 40 bp, Artificial Sequence
  Description of Artificial Sequence: Synthetic primer
gcagctgataacattcgaaatcaaaaagccaccatcttag

SEQ ID NO: 20441 - DNA, 40 bp, Artificial Sequence
  Description of Artificial Sequence: Synthetic primer
atgcgcctcagcagtgccatcactcttttctgaagtgctg

SEQ ID NO: 20442 - DNA, 40 bp, Artificial Sequence
  Description of Artificial Sequence: Synthetic primer
gggcctggcgcaggcttgactccagcagggcttcgatctg

SEQ ID NO: 20443 - DNA, 40 bp, Artificial Sequence
  Description of Artificial Sequence: Synthetic primer
gtgtgtaagtcaacagaacaatcatgacccagaggtgaag

SEQ ID NO: 20444 - DNA, 40 bp, Artificial Sequence
  Description of Artificial Sequence: Synthetic primer
gatttgagtcaaacgtccgaagaccagagtttgtcggatt

SEQ ID NO: 20445 - DNA, 40 bp, Artificial Sequence
  Description of Artificial Sequence: Synthetic primer
ctcaaaatttcttaagttaggttcaagtttctgacatagg

SEQ ID NO: 20446 - DNA, 40 bp, Artificial Sequence
  Description of Artificial Sequence: Synthetic primer
cagcaatctacaagttaccgaaatcaacttcaacaaaaag

SEQ ID NO: 20447 - DNA, 40 bp, Artificial Sequence
  Description of Artificial Sequence: Synthetic primer
tgttatgtagttcggatagcttagttttaaaagactgatt

SEQ ID NO: 20448 - DNA, 40 bp, Artificial Sequence
  Description of Artificial Sequence: Synthetic primer
caagttctcttctctcatgtgacgttcctcctccagatac

SEQ ID NO: 20449 - DNA, 40 bp, Artificial Sequence
  Description of Artificial Sequence: Synthetic primer
ccccgaggttggtggagtggcgggcggggccgagctggag

SEQ ID NO: 20450 - DNA, 40 bp, Artificial Sequence
  Description of Artificial Sequence: Synthetic primer
gaagatcatggctcacctgctggagagattgatgatgaag

SEQ ID NO: 20451 - DNA, 40 bp, Artificial Sequence
  Description of Artificial Sequence: Synthetic primer
gcgcgggcccggggctgccggggctgccggggtgcgtgtc

SEQ ID NO: 20452 - DNA, 40 bp, Artificial Sequence
  Description of Artificial Sequence: Synthetic primer
tcgagggcagattttgcaggaatatcgaaaaatcaaaaag

SEQ ID NO: 20453 - DNA, 40 bp, Artificial Sequence
  Description of Artificial Sequence: Synthetic primer
atcgagttttgatcatattttctattaaagtggctaacac

SEQ ID NO: 20454 - DNA, 40 bp, Artificial Sequence
  Description of Artificial Sequence: Synthetic primer
agactttaaaactccctccaaaggatctaagaatcaaaac

SEQ ID NO: 20455 - DNA, 40 bp, Artificial Sequence
  Description of Artificial Sequence: Synthetic primer
ccttgctggaaggcaccgaggttctgcagttgggctgctg

SEQ ID NO: 20456 - DNA, 40 bp, Artificial Sequence
  Description of Artificial Sequence: Synthetic primer
gctcaccaactcgctggaggagatgaagcgactggtgagc

SEQ ID NO: 20457 - DNA, 40 bp, Artificial Sequence
  Description of Artificial Sequence: Synthetic primer
agctgggactggttggttgggtggctgctgtacttttgtc

SEQ ID NO: 20458 - DNA, 40 bp, Artificial Sequence
  Description of Artificial Sequence: Synthetic primer
ggcctgggctgggagggagagaccggagcagcgccaggag

SEQ ID NO: 20459 - DNA, 40 bp, Artificial Sequence
  Description of Artificial Sequence: Synthetic primer
ttccgaagcatcagaggtggtgctctcagtaaatacagtc

SEQ ID NO: 20460 - DNA, 40 bp, Artificial Sequence
  Description of Artificial Sequence: Synthetic primer
cagaaattgtttggtgggagaaaaccaagtcatcaaggtg

SEQ ID NO: 20461 - DNA, 40 bp, Artificial Sequence
  Description of Artificial Sequence: Synthetic primer
tctgtaatctctgagctttattcttctcttcaaacattag

SEQ ID NO: 20462 - DNA, 40 bp, Artificial Sequence
  Description of Artificial Sequence: Synthetic primer
ggaggaggcagccgccgccgaggtggacgaggacgacgag

SEQ ID NO: 20463 - DNA, 40 bp, Artificial Sequence
  Description of Artificial Sequence: Synthetic primer
tgagatcttaaatatcttgcagccttaaatcactacaaac

SEQ ID NO: 20464 - DNA, 40 bp, Artificial Sequence
  Description of Artificial Sequence: Synthetic primer
ggtgtgcaatgtgaagagtccttcaaaaatgccagaaatc

SEQ ID NO: 20465 - DNA, 40 bp, Artificial Sequence
  Description of Artificial Sequence: Synthetic primer
caaaaattcacattatcaattatttctggttgaattctgt

SEQ ID NO: 20466 - DNA, 40 bp, Artificial Sequence
  Description of Artificial Sequence: Synthetic primer
cttccaccatggttgagctgtccactgagaggttggaatc

SEQ ID NO: 20467 - DNA, 40 bp, Artificial Sequence
  Description of Artificial Sequence: Synthetic primer
caacagccgggccctctgtctgtagctactatgctgaacc

SEQ ID NO: 20468 - DNA, 40 bp, Artificial Sequence
  Description of Artificial Sequence: Synthetic primer
agccggtagtgaattccgttattggtcttttcgctgttgg

SEQ ID NO: 20469 - DNA, 40 bp, Artificial Sequence
  Description of Artificial Sequence: Synthetic primer
acattgttggccaaaatagtccaggaagtttcattattac

SEQ ID NO: 20470 - DNA, 40 bp, Artificial Sequence
  Description of Artificial Sequence: Synthetic primer
atgggctgcagctgtggaggagggtttcagaggagagagg

SEQ ID NO: 20471 - DNA, 40 bp, Artificial Sequence
  Description of Artificial Sequence: Synthetic primer
gtggcaaagatgaaactgagctagctgaactagacagagc

SEQ ID NO: 20472 - DNA, 40 bp, Artificial Sequence
  Description of Artificial Sequence: Synthetic primer
tgctgatgcagtagtacaagtggaagataccgaacttatc

SEQ ID NO: 20473 - DNA, 40 bp, Artificial Sequence
  Description of Artificial Sequence: Synthetic primer
tcgcactcttgacagcctagtgaaaaccattgcaaaatcc

SEQ ID NO: 20474 - DNA, 40 bp, Artificial Sequence
  Description of Artificial Sequence: Synthetic primer
ccagggggaccttgcacaccacgctcgccagggaaacctc

SEQ ID NO: 20475 - DNA, 40 bp, Artificial Sequence
  Description of Artificial Sequence: Synthetic primer
atattctatattttgatctattaagggattagtatttttc

SEQ ID NO: 20476 - DNA, 40 bp, Artificial Sequence
  Description of Artificial Sequence: Synthetic primer
tgacactttcaacatgtagggatatcagcgtttctctgtg

SEQ ID NO: 20477 - DNA, 40 bp, Artificial Sequence
  Description of Artificial Sequence: Synthetic primer
ggatctcttccccggcttccttccccagccccagtaaagc

SEQ ID NO: 20478 - DNA, 40 bp, Artificial Sequence
  Description of Artificial Sequence: Synthetic primer
tatagcaatgggcactgtgcacggcctgggacagccaagc

SEQ ID NO: 20479 - DNA, 40 bp, Artificial Sequence
  Description of Artificial Sequence: Synthetic primer
tctttctctgggggccgtggggtgggagctggggcgagag

SEQ ID NO: 20480 - DNA, 40 bp, Artificial Sequence
  Description of Artificial Sequence: Synthetic primer
tgactgtcttgtccccagtgagatccggaagctgaaggag

SEQ ID NO: 20481 - DNA, 40 bp, Artificial Sequence
  Description of Artificial Sequence: Synthetic primer
gaggtgcttcttcaggccaaaagagccgagctggaaaagc

SEQ ID NO: 20482 - DNA, 40 bp, Artificial Sequence
  Description of Artificial Sequence: Synthetic primer
agagctccgagagtaaggacacctccttggagactagacg

SEQ ID NO: 20483 - DNA, 40 bp, Artificial Sequence
  Description of Artificial Sequence: Synthetic primer
gcgtctggaagaaatacagccttacagttgctgtgaaaac

SEQ ID NO: 20484 - DNA, 40 bp, Artificial Sequence
  Description of Artificial Sequence: Synthetic primer
ctctggttctggacacaaaatctgtactggagaggaaatg

SEQ ID NO: 20485 - DNA, 40 bp, Artificial Sequence
  Description of Artificial Sequence: Synthetic primer
ggtaaccagtactagtatccccatagacacagatgaagag

SEQ ID NO: 20486 - DNA, 40 bp, Artificial Sequence
  Description of Artificial Sequence: Synthetic primer
tccatcatcatacaatgagtctgaaacaaaatctacactc

SEQ ID NO: 20487 - DNA, 40 bp, Artificial Sequence
  Description of Artificial Sequence: Synthetic primer
atactggtactttggggattggccggggcagccatgagtc

SEQ ID NO: 20488 - DNA, 40 bp, Artificial Sequence
  Description of Artificial Sequence: Synthetic primer
ctatgctgtggaaaagaaagcatactgcgagccctgctac

SEQ ID NO: 20489 - DNA, 40 bp, Artificial Sequence
  Description of Artificial Sequence: Synthetic primer
cagttcagtaaattaggtaatcaaatgacctctgggaaac

SEQ ID NO: 20490 - DNA, 40 bp, Artificial Sequence
  Description of Artificial Sequence: Synthetic primer
ggtaggaggcggcggcatccttggaacggcaaagggagaa

SEQ ID NO: 20491 - DNA, 40 bp, Artificial Sequence
  Description of Artificial Sequence: Synthetic primer
atttttagcctttggtccatttttctccatcattctatac

SEQ ID NO: 20492 - DNA, 40 bp, Artificial Sequence
  Description of Artificial Sequence: Synthetic primer
tgcaccacgcttaggtcacccgttgcagggaccggaagtc

SEQ ID NO: 20493 - DNA, 40 bp, Artificial Sequence
  Description of Artificial Sequence: Synthetic primer
cctcagctgaccctggagaggccattaagacctggctgtc

SEQ ID NO: 20494 - DNA, 40 bp, Artificial Sequence
  Description of Artificial Sequence: Synthetic primer
ataaacactatttattttctgcagcagtgtgttatttttg

SEQ ID NO: 20495 - DNA, 40 bp, Artificial Sequence
  Description of Artificial Sequence: Synthetic primer
atcaaaaagtgttcccaacacacctttgagaccaaatcag

SEQ ID NO: 20496 - DNA, 40 bp, Artificial Sequence
  Description of Artificial Sequence: Synthetic primer
cccagggacggcccagcccgtgaagaggagcctgggcaag

SEQ ID NO: 20497 - DNA, 40 bp, Artificial Sequence
  Description of Artificial Sequence: Synthetic primer
atgccttggagagtctgcgcaagcaagaggagcatgtgac

SEQ ID NO: 20498 - DNA, 40 bp, Artificial Sequence
  Description of Artificial Sequence: Synthetic primer
gactggaaacaatggcatttacagaaagagtcaacagcag

SEQ ID NO: 20499 - DNA, 40 bp, Artificial Sequence
  Description of Artificial Sequence: Synthetic primer
acatggaccacattgagaccttagtcatcaagtagagtgg

SEQ ID NO: 20500 - DNA, 40 bp, Artificial Sequence
  Description of Artificial Sequence: Synthetic primer
agctgagaactagctcctgcacagggtcgaggggccaaag

SEQ ID NO: 20501 - DNA, 40 bp, Artificial Sequence
  Description of Artificial Sequence: Synthetic primer
gggggtgggaaggtaaggatggtcgtggaagaaggcagga

SEQ ID NO: 20502 - DNA, 40 bp, Artificial Sequence
  Description of Artificial Sequence: Synthetic primer
tctggccgcggctcagtccttgcatcgggaagctaccaag

SEQ ID NO: 20503 - DNA, 40 bp, Artificial Sequence
  Description of Artificial Sequence: Synthetic primer
cgaaataaggcaattcctttgcacttgttaatctatcttc

SEQ ID NO: 20504 - DNA, 40 bp, Artificial Sequence
  Description of Artificial Sequence: Synthetic primer
taaagccaagtagctttaagataaagtggtggtcttttgg

SEQ ID NO: 20505 - DNA, 40 bp, Artificial Sequence
  Description of Artificial Sequence: Synthetic primer
tttctctgccagtttctcggctggattctcagtctttatc

SEQ ID NO: 20506 - DNA, 40 bp, Artificial Sequence
  Description of Artificial Sequence: Synthetic primer
gcagttgtggaaagtgaaggagccctggagagctggctga

SEQ ID NO: 20507 - DNA, 40 bp, Artificial Sequence
  Description of Artificial Sequence: Synthetic primer
tccacctataccctggaggagctggagcacatcacgtctg

SEQ ID NO: 20508 - DNA, 40 bp, Artificial Sequence
  Description of Artificial Sequence: Synthetic primer
gtcactataggagacattaaaacgggagcaccacagtatg

SEQ ID NO: 20509 - DNA, 40 bp, Artificial Sequence
  Description of Artificial Sequence: Synthetic primer
gccggcgttcgcgcggtcagccagcagctccagcagaaac

SEQ ID NO: 20510 - DNA, 40 bp, Artificial Sequence
  Description of Artificial Sequence: Synthetic primer
tcttaaatctaagtacaatttcatatcctacacccaaagc

SEQ ID NO: 20511 - DNA, 40 bp, Artificial Sequence
  Description of Artificial Sequence: Synthetic primer
gaggtgactaacaggctctgagtgggggttttattatatg

SEQ ID NO: 20512 - DNA, 40 bp, Artificial Sequence
  Description of Artificial Sequence: Synthetic primer
tcggttttccaggcatttcacatattctttcttctttctg

SEQ ID NO: 20513 - DNA, 40 bp, Artificial Sequence
  Description of Artificial Sequence: Synthetic primer
cagcagtcagaagaaagtgctttagggaaccaagagattg

SEQ ID NO: 20514 - DNA, 40 bp, Artificial Sequence
  Description of Artificial Sequence: Synthetic primer
tccccgcaataaataagtgcagccccaaccctcaagagtc

SEQ ID NO: 20515 - DNA, 40 bp, Artificial Sequence
  Description of Artificial Sequence: Synthetic primer
caaagatctcatctctggaggcacgggcatcttccagctc

SEQ ID NO: 20516 - DNA, 40 bp, Artificial Sequence
  Description of Artificial Sequence: Synthetic primer
tccaggttcaggaacaggtcgtaggtgaagcagaccttcc

SEQ ID NO: 20517 - DNA, 40 bp, Artificial Sequence
  Description of Artificial Sequence: Synthetic primer
gggcctgcttgggattacagaaatattattgaaaagttac

SEQ ID NO: 20518 - DNA, 40 bp, Artificial Sequence
  Description of Artificial Sequence: Synthetic primer
tgaagtttcttcagttccgtgtttctactcacatctccag

SEQ ID NO: 20519 - DNA, 40 bp, Artificial Sequence
  Description of Artificial Sequence: Synthetic primer
tttttaatggtcaagttactaacacttgaaaatcagatac

SEQ ID NO: 20520 - DNA, 40 bp, Artificial Sequence
  Description of Artificial Sequence: Synthetic primer
attacaggagggaacatttccgaataaagtattgtctacc

SEQ ID NO: 20521 - DNA, 40 bp, Artificial Sequence
  Description of Artificial Sequence: Synthetic primer
gatggcccgacagaagaaggagagtgaggctgtggagtgg

SEQ ID NO: 20522 - DNA, 40 bp, Artificial Sequence
  Description of Artificial Sequence: Synthetic primer
ggcccagcagctcgctgccagccttcggaggtgtcctcat

SEQ ID NO: 20523 - DNA, 40 bp, Artificial Sequence
  Description of Artificial Sequence: Synthetic primer
cattcactgtcagtgtaggtaagacagaggatgcccttgc

SEQ ID NO: 20524 - DNA, 40 bp, Artificial Sequence
  Description of Artificial Sequence: Synthetic primer
cgtcatctagaggaatttgccccaaacaggaacacatagc

SEQ ID NO: 20525 - DNA, 40 bp, Artificial Sequence
  Description of Artificial Sequence: Synthetic primer
taaacggaacctgcagcgtttccagtgttcccacgtccac

SEQ ID NO: 20526 - DNA, 40 bp, Artificial Sequence
  Description of Artificial Sequence: Synthetic primer
gttaaagaggtatgaggtttctttgcaagttcttttaggc

SEQ ID NO: 20527 - DNA, 40 bp, Artificial Sequence
  Description of Artificial Sequence: Synthetic primer
gcccggagagctgcactgatggggggagccgggggagggg

SEQ ID NO: 20528 - DNA, 40 bp, Artificial Sequence
  Description of Artificial Sequence: Synthetic primer
ctaactaaccacgcgtgttgttcctatgtgcttttctttc

SEQ ID NO: 20529 - DNA, 40 bp, Artificial Sequence
  Description of Artificial Sequence: Synthetic primer
caaacttcagagaaatttggaaaatgtgttagcagaaaag

SEQ ID NO: 20530 - DNA, 40 bp, Artificial Sequence
  Description of Artificial Sequence: Synthetic primer
aattggctgcgtctggctaattctaagcactaaagtctac

SEQ ID NO: 20531 - DNA, 40 bp, Artificial Sequence
  Description of Artificial Sequence: Synthetic primer
ggagtcggcgctgttgtcactctcgctgtcgctgaagctc

SEQ ID NO: 20532 - DNA, 40 bp, Artificial Sequence
  Description of Artificial Sequence: Synthetic primer
ataataaagcacaaagatatgctaataacgttaacaaaag

SEQ ID NO: 20533 - DNA, 40 bp, Artificial Sequence
  Description of Artificial Sequence: Synthetic primer
gccttaatgttgactttgaatctgtgtttggaaataaatc

SEQ ID NO: 20534 - DNA, 40 bp, Artificial Sequence
  Description of Artificial Sequence: Synthetic primer
cgatctcccactcaaggctaccgggtgacccccgatgctg

SEQ ID NO: 20535 - DNA, 40 bp, Artificial Sequence
  Description of Artificial Sequence: Synthetic primer
gccttgtgtttgggagtctctggtgttgtagaggagtgtg

SEQ ID NO: 20536 - DNA, 40 bp, Artificial Sequence
  Description of Artificial Sequence: Synthetic primer
gggagctgaaattactttcctcttcttccactgttttagg

SEQ ID NO: 20537 - DNA, 40 bp, Artificial Sequence
  Description of Artificial Sequence: Synthetic primer
ctccaaaaaagaagaaaataacatatattggacttaaaaa

SEQ ID NO: 20538 - DNA, 40 bp, Artificial Sequence
  Description of Artificial Sequence: Synthetic primer
gctgagccacccgggggcggggcctgcacgggagaaactg

SEQ ID NO: 20539 - DNA, 40 bp, Artificial Sequence
  Description of Artificial Sequence: Synthetic primer
gagcaggagacacaggagtcaaattggaggtgaatgaaag

SEQ ID NO: 20540 - DNA, 40 bp, Artificial Sequence
  Description of Artificial Sequence: Synthetic primer
gctccagtgtgcattgttacgaggcaaagtaaggagactg

SEQ ID NO: 20541 - DNA, 40 bp, Artificial Sequence
  Description of Artificial Sequence: Synthetic primer
ccagcatggtacaggtcattggtggtgagcctggagaacc

SEQ ID NO: 20542 - DNA, 40 bp, Artificial Sequence
  Description of Artificial Sequence: Synthetic primer
aagttcaggtgacccaaaatccagcaaatgaacaagaaag

SEQ ID NO: 20543 - DNA, 40 bp, Artificial Sequence
  Description of Artificial Sequence: Synthetic primer
ataacactgcacaaagatcaagatctgattaaggatccac

SEQ ID NO: 20544 - DNA, 40 bp, Artificial Sequence
  Description of Artificial Sequence: Synthetic primer
ttgatttcttctatttcatctggtactatcttgtatgctg

SEQ ID NO: 20545 - DNA, 40 bp, Artificial Sequence
  Description of Artificial Sequence: Synthetic primer
atttgaaattatccagcacggaggcagaatctgttaactc

SEQ ID NO: 20546 - DNA, 40 bp, Artificial Sequence
  Description of Artificial Sequence: Synthetic primer
ttctagcaacagacaccctatgaagcccctagcagggaag

SEQ ID NO: 20547 - DNA, 40 bp, Artificial Sequence
  Description of Artificial Sequence: Synthetic primer
cacctaaatactagaaacaatctctcaaaatttcacttgc

SEQ ID NO: 20548 - DNA, 40 bp, Artificial Sequence
  Description of Artificial Sequence: Synthetic primer
aagaggctactgctggctattgcaggcaagtctgtttttg

SEQ ID NO: 20549 - DNA, 40 bp, Artificial Sequence
  Description of Artificial Sequence: Synthetic primer
gctttcttgtataacatcaaccagaggaaattcttaattg

SEQ ID NO: 20550 - DNA, 40 bp, Artificial Sequence
  Description of Artificial Sequence: Synthetic primer
gcttctataattaagtggtcactgtaaaaaggcgaataac

SEQ ID NO: 20551 - DNA, 40 bp, Artificial Sequence
  Description of Artificial Sequence: Synthetic primer
tggtagatatctatcattccaggttaaaggagagacaaag

SEQ ID NO: 20552 - DNA, 40 bp, Artificial Sequence
  Description of Artificial Sequence: Synthetic primer
tcaccgccgcggctccggccctggccccgatggctctgtg

SEQ ID NO: 20553 - DNA, 40 bp, Artificial Sequence
  Description of Artificial Sequence: Synthetic primer
cccacatctctttcgtgccttaaggatagtgagatgcaca

SEQ ID NO: 20554 - DNA, 40 bp, Artificial Sequence
  Description of Artificial Sequence: Synthetic primer
tgcataattcacaatgttatcttcctcaacacaaactgac

SEQ ID NO: 20555 - DNA, 40 bp, Artificial Sequence
  Description of Artificial Sequence: Synthetic primer
tttttctttttccaaatactctgcagaatggcggctccag

SEQ ID NO: 20556 - DNA, 40 bp, Artificial Sequence
  Description of Artificial Sequence: Synthetic primer
gtatttttgaattgagatgatcaataataaacatatttcc

SEQ ID NO: 20557 - DNA, 40 bp, Artificial Sequence
  Description of Artificial Sequence: Synthetic primer
gagtgaatggtggagggtgggaagggacccagatttgtag

SEQ ID NO: 20558 - DNA, 40 bp, Artificial Sequence
  Description of Artificial Sequence: Synthetic primer
ggaccacgttcaccacttgctccagagggaccttgtttgc

SEQ ID NO: 20559 - DNA, 40 bp, Artificial Sequence
  Description of Artificial Sequence: Synthetic primer
tgcacagtttttcttctttctccattagtttctttgtatg

SEQ ID NO: 20560 - DNA, 40 bp, Artificial Sequence
  Description of Artificial Sequence: Synthetic primer
gtgtgtggagaaggggagttgtattgttttctcacaagag

SEQ ID NO: 20561 - DNA, 40 bp, Artificial Sequence
  Description of Artificial Sequence: Synthetic primer
cagaggaggcagagacaaggctggatttggcttttctaag

SEQ ID NO: 20562 - DNA, 40 bp, Artificial Sequence
  Description of Artificial Sequence: Synthetic primer
ctcgtcctcccgacctgcgacgccaccggctctccgattc

SEQ ID NO: 20563 - DNA, 40 bp, Artificial Sequence
  Description of Artificial Sequence: Synthetic primer
gcaggctgttgtgtgacatggaaggtgatgaagagaccag

SEQ ID NO: 20564 - DNA, 40 bp, Artificial Sequence
  Description of Artificial Sequence: Synthetic primer
gaaaattataaatgtaaacatcaaaataatagcatacaac

SEQ ID NO: 20565 - DNA, 40 bp, Artificial Sequence
  Description of Artificial Sequence: Synthetic primer
agaatattctgctgaatctcttgtgcggaatctacagtgg

SEQ ID NO: 20566 - DNA, 40 bp, Artificial Sequence
  Description of Artificial Sequence: Synthetic primer
gcatggagagctgcaacacttgaaggctggaaactgtacc

SEQ ID NO: 20567 - DNA, 40 bp, Artificial Sequence
  Description of Artificial Sequence: Synthetic primer
gttagaccatatttaatcagctagaactttgtccaccaac

SEQ ID NO: 20568 - DNA, 40 bp, Artificial Sequence
  Description of Artificial Sequence: Synthetic primer
gttcaaacacaagcgcagccgagatcgccacataaaactc

SEQ ID NO: 20569 - DNA, 40 bp, Artificial Sequence
  Description of Artificial Sequence: Synthetic primer
tccgacaattgaaggtatggctgttccgcctcggaggttc

SEQ ID NO: 20570 - DNA, 40 bp, Artificial Sequence
  Description of Artificial Sequence: Synthetic primer
cttccttgcagaggccatggaggacgaggagagacagaag

SEQ ID NO: 20571 - DNA, 40 bp, Artificial Sequence
  Description of Artificial Sequence: Synthetic primer
aacacacagagacagactattctctaagaatgtgagaaac

SEQ ID NO: 20572 - DNA, 40 bp, Artificial Sequence
  Description of Artificial Sequence: Synthetic primer
ttaaaaatcactttttactcctagggagatgccaataaac

SEQ ID NO: 20573 - DNA, 40 bp, Artificial Sequence
  Description of Artificial Sequence: Synthetic primer
gttagaccattaaggttatattaaagtactcttgtgtgtg

SEQ ID NO: 20574 - DNA, 40 bp, Artificial Sequence
  Description of Artificial Sequence: Synthetic primer
gaaaaactcaaaagagaggcaaaagaaaacacagctactc

SEQ ID NO: 20575 - DNA, 40 bp, Artificial Sequence
  Description of Artificial Sequence: Synthetic primer
atccaacaccttgaacaagaatacaagaaggaaataaatg

SEQ ID NO: 20576 - DNA, 40 bp, Artificial Sequence
  Description of Artificial Sequence: Synthetic primer
ggctcccagactgtgaaggaagaccccctggccgcagacg

SEQ ID NO: 20577 - DNA, 40 bp, Artificial Sequence
  Description of Artificial Sequence: Synthetic primer
agcaatcaagatatccttaccaacactgaaatacctttac

SEQ ID NO: 20578 - DNA, 40 bp, Artificial Sequence
  Description of Artificial Sequence: Synthetic primer
aagcagggacatcagtggaaagattcagatcctgtaatgg

SEQ ID NO: 20579 - DNA, 40 bp, Artificial Sequence
  Description of Artificial Sequence: Synthetic primer
taatgcatcattttacatcttttgtaattaaaagcatcac

SEQ ID NO: 20580 - DNA, 40 bp, Artificial Sequence
  Description of Artificial Sequence: Synthetic primer
ccagctggaaaaacaagcgccaggaaagtgcatttccccc

SEQ ID NO: 20581 - DNA, 40 bp, Artificial Sequence
  Description of Artificial Sequence: Synthetic primer
ccccggagctcccgaggcactccctccatctttggaacac

SEQ ID NO: 20582 - DNA, 40 bp, Artificial Sequence
  Description of Artificial Sequence: Synthetic primer
gtgcttcagaaacctaatggaaggagtggagcagaacctg

SEQ ID NO: 20583 - DNA, 40 bp, Artificial Sequence
  Description of Artificial Sequence: Synthetic primer
ctgagtagtctactctctgaactgcttaaatgaattttta

SEQ ID NO: 20584 - DNA, 40 bp, Artificial Sequence
  Description of Artificial Sequence: Synthetic primer
cagaggtttgagttcttcttctagacactgaagatgtttc

SEQ ID NO: 20585 - DNA, 40 bp, Artificial Sequence
  Description of Artificial Sequence: Synthetic primer
gagtcctctaagcaggaattaattgactacaagcaaaaag

SEQ ID NO: 20586 - DNA, 40 bp, Artificial Sequence
  Description of Artificial Sequence: Synthetic primer
acacaaattgtgacattttataaattagatacttcagtgg

SEQ ID NO: 20587 - DNA, 40 bp, Artificial Sequence
  Description of Artificial Sequence: Synthetic primer
actgttgcacatctgccggaagcgggcatgcttttcaatg

SEQ ID NO: 20588 - DNA, 40 bp, Artificial Sequence
  Description of Artificial Sequence: Synthetic primer
gcaaaacattcttagggccaagcccctgagtcccctgcac

SEQ ID NO: 20589 - DNA, 40 bp, Artificial Sequence
  Description of Artificial Sequence: Synthetic primer
tggcgctggcgctggcactgcgcggcggatccccagcccg

SEQ ID NO: 20590 - DNA, 40 bp, Artificial Sequence
  Description of Artificial Sequence: Synthetic primer
cgatgtcagtactgtcgatttcagaagtgtctcagtgttg

SEQ ID NO: 20591 - DNA, 40 bp, Artificial Sequence
  Description of Artificial Sequence: Synthetic primer
tttccgtgagaaagatgaatagttcctcggcatcattagg

SEQ ID NO: 20592 - DNA, 40 bp, Artificial Sequence
  Description of Artificial Sequence: Synthetic primer
ttctcttgtttgacattaataagaaatatactgtgactcc

SEQ ID NO: 20593 - DNA, 40 bp, Artificial Sequence
  Description of Artificial Sequence: Synthetic primer
ggcccccacaccgccccagggtgaggttgacgccgactgc

SEQ ID NO: 20594 - DNA, 40 bp, Artificial Sequence
  Description of Artificial Sequence: Synthetic primer
cagtctgttcctggagatttcttgcttctgtctctttttc

SEQ ID NO: 20595 - DNA, 40 bp, Artificial Sequence
  Description of Artificial Sequence: Synthetic primer
cctcgaattttatctgtggagttcctgctccgtggactgc

SEQ ID NO: 20596 - DNA, 40 bp, Artificial Sequence
  Description of Artificial Sequence: Synthetic primer
atacaaaagcagtctcacctacttttgtgcctcagaattg

SEQ ID NO: 20597 - DNA, 40 bp, Artificial Sequence
  Description of Artificial Sequence: Synthetic primer
caaggatttcggggacttcaagacacagttaaccattagc

SEQ ID NO: 20598 - DNA, 40 bp, Artificial Sequence
  Description of Artificial Sequence: Synthetic primer
actctatgatcgtccagcctcatataagaagaaatctatg

SEQ ID NO: 20599 - DNA, 40 bp, Artificial Sequence
  Description of Artificial Sequence: Synthetic primer
actgagaaagtggctcatgaacacaaagaaaagaaatatg

SEQ ID NO: 20600 - DNA, 40 bp, Artificial Sequence
  Description of Artificial Sequence: Synthetic primer
ggcatcatttccagcagagacaggagattctttactcatc

SEQ ID NO: 20601 - DNA, 40 bp, Artificial Sequence
  Description of Artificial Sequence: Synthetic primer
ggggcaaagtcatcaaatcagcctcagccactgccttatc

SEQ ID NO: 20602 - DNA, 40 bp, Artificial Sequence
  Description of Artificial Sequence: Synthetic primer
tgcacatgtcttaatgaagtttgaatgttaaataaattgt

SEQ ID NO: 20603 - DNA, 40 bp, Artificial Sequence
  Description of Artificial Sequence: Synthetic primer
gtttttctgaaaaatggagcagtaatgcagcatcaaccta

SEQ ID NO: 20604 - DNA, 40 bp, Artificial Sequence
  Description of Artificial Sequence: Synthetic primer
gaaggggagagtcctcaggcacgagcacttgcatctcagc

SEQ ID NO: 20605 - DNA, 40 bp, Artificial Sequence
  Description of Artificial Sequence: Synthetic primer
gttggaaaggccccaggcttttagaggggagttttacttc

SEQ ID NO: 20606 - DNA, 40 bp, Artificial Sequence
  Description of Artificial Sequence: Synthetic primer
cacaatgactatcagtgtcagtacaaccgcaagaggaatg

SEQ ID NO: 20607 - DNA, 40 bp, Artificial Sequence
  Description of Artificial Sequence: Synthetic primer
aaatgctatgccacacccacccgagatagcaatgataagc

SEQ ID NO: 20608 - DNA, 40 bp, Artificial Sequence
  Description of Artificial Sequence: Synthetic primer
gctcctgctgtgccccagctgttgcatatgcctgactttg

SEQ ID NO: 20609 - DNA, 40 bp, Artificial Sequence
  Description of Artificial Sequence: Synthetic primer
cctgccaccctcctccctcctgcagggccagattggcaac

SEQ ID NO: 20610 - DNA, 40 bp, Artificial Sequence
  Description of Artificial Sequence: Synthetic primer
ggacatgacgagtgatgaggagcgcatggtcatctgtgag

SEQ ID NO: 20611 - DNA, 40 bp, Artificial Sequence
  Description of Artificial Sequence: Synthetic primer
taaagtttataacaaccattctcatcagatctcaaacttc

SEQ ID NO: 20612 - DNA, 40 bp, Artificial Sequence
  Description of Artificial Sequence: Synthetic primer
gcttcacatctttaccagacactttacacgaaaaacatgg

SEQ ID NO: 20613 - DNA, 40 bp, Artificial Sequence
  Description of Artificial Sequence: Synthetic primer
agctaacacccaattacttgcaaacactggtataaaacac

SEQ ID NO: 20614 - DNA, 40 bp, Artificial Sequence
  Description of Artificial Sequence: Synthetic primer
ctgcttcaaatacaaaggggcagctacattccacaacttt

SEQ ID NO: 20615 - DNA, 40 bp, Artificial Sequence
  Description of Artificial Sequence: Synthetic primer
tcccttggctcaccagttcttcccgggtccggcgctgctg

SEQ ID NO: 20616 - DNA, 40 bp, Artificial Sequence
  Description of Artificial Sequence: Synthetic primer
aagaaaagaaactgaacagagaccgtctgcagtatttcac

SEQ ID NO: 20617 - DNA, 40 bp, Artificial Sequence
  Description of Artificial Sequence: Synthetic primer
caagaaacctgcccagaggagtctgctgaaagatgtccac

SEQ ID NO: 20618 - DNA, 40 bp, Artificial Sequence
  Description of Artificial Sequence: Synthetic primer
agggccgggccgccgcgagtacagcgtgcaaccgccacac

SEQ ID NO: 20619 - DNA, 40 bp, Artificial Sequence
  Description of Artificial Sequence: Synthetic primer
aaaaaacttgtgaagatagatgctgtgaaattcatgctaa

SEQ ID NO: 20620 - DNA, 40 bp, Artificial Sequence
  Description of Artificial Sequence: Synthetic primer
agttacttttatttcaggttctgtattatttctcttagcc

SEQ ID NO: 20621 - DNA, 40 bp, Artificial Sequence
  Description of Artificial Sequence: Synthetic primer
actgccgggccacacggtgggcagctcgcacactactcag

SEQ ID NO: 20622 - DNA, 40 bp, Artificial Sequence
  Description of Artificial Sequence: Synthetic primer
gattttttaaaaagctgttggccaattgcaggcttcttgg

SEQ ID NO: 20623 - DNA, 40 bp, Artificial Sequence
  Description of Artificial Sequence: Synthetic primer
ggcttgggcacctccttcttcttcttgtttcggtcgtttc

SEQ ID NO: 20624 - DNA, 40 bp, Artificial Sequence
  Description of Artificial Sequence: Synthetic primer
aacagcggcagcgccgcgtgcagtcgctgttccaaaatag

SEQ ID NO: 20625 - DNA, 40 bp, Artificial Sequence
  Description of Artificial Sequence: Synthetic primer
atgcttactgtatgggactggcagaagaaagcaaaaggag

SEQ ID NO: 20626 - DNA, 40 bp, Artificial Sequence
  Description of Artificial Sequence: Synthetic primer
aaagagagaatttatctagaggaaaacccagagaaaagtg

SEQ ID NO: 20627 - DNA, 40 bp, Artificial Sequence
  Description of Artificial Sequence: Synthetic primer
ggaactgtggccctccgtaagttattgccatagtgtatgc

SEQ ID NO: 20628 - DNA, 40 bp, Artificial Sequence
  Description of Artificial Sequence: Synthetic primer
cagaagtaaagttttccatcttaaaacatgtgtgtgagtc

SEQ ID NO: 20629 - DNA, 40 bp, Artificial Sequence
  Description of Artificial Sequence: Synthetic primer
ctgcaaaaggatgtccttggcggagagcggcggcggcttg

SEQ ID NO: 20630 - DNA, 40 bp, Artificial Sequence
  Description of Artificial Sequence: Synthetic primer
gcaagaatgaaatgaatgattctacagctaggacttaacc

SEQ ID NO: 20631 - DNA, 40 bp, Artificial Sequence
  Description of Artificial Sequence: Synthetic primer
ggacatgcttcgttttgccattatgaatctttatgcattg

SEQ ID NO: 20632 - DNA, 40 bp, Artificial Sequence
  Description of Artificial Sequence: Synthetic primer
aaggcagattgcagtagctgaataaaaactggctgatgtg

SEQ ID NO: 20633 - DNA, 40 bp, Artificial Sequence
  Description of Artificial Sequence: Synthetic primer
gccctgtcaacaaagtgatcaagtccgcctcagccacagc

SEQ ID NO: 20634 - DNA, 40 bp, Artificial Sequence
  Description of Artificial Sequence: Synthetic primer
ggccaccatgagcacaggcctgcggtacaagagcaagctg

SEQ ID NO: 20635 - DNA, 40 bp, Artificial Sequence
  Description of Artificial Sequence: Synthetic primer
ctgcgctgcgccaggccgaacaggcgcgcgttgtactctc

SEQ ID NO: 20636 - DNA, 40 bp, Artificial Sequence
  Description of Artificial Sequence: Synthetic primer
actgagcggccgcctcccgcccctcctcaggacccacagc

SEQ ID NO: 20637 - DNA, 40 bp, Artificial Sequence
  Description of Artificial Sequence: Synthetic primer
agaaaatttgaagaaggatcttgtgaggaggatcaaaatg

SEQ ID NO: 20638 - DNA, 40 bp, Artificial Sequence
  Description of Artificial Sequence: Synthetic primer
cccatatgagagttccttcagagaaataaacaatttgctg

SEQ ID NO: 20639 - DNA, 40 bp, Artificial Sequence
  Description of Artificial Sequence: Synthetic primer
aataaagtcgtgaggtgactaattagagaataaaaattac

SEQ ID NO: 20640 - DNA, 40 bp, Artificial Sequence
  Description of Artificial Sequence: Synthetic primer
gcagcccctcagcaacgccgtgcagctgcccatcgaccag

SEQ ID NO: 20641 - DNA, 40 bp, Artificial Sequence
  Description of Artificial Sequence: Synthetic primer
ctatgcacatgtacagtcagaatattcctgttcctactac

SEQ ID NO: 20642 - DNA, 40 bp, Artificial Sequence
  Description of Artificial Sequence: Synthetic primer
tacatagccctggtgctcctgcccagccacccctcagatg

SEQ ID NO: 20643 - DNA, 40 bp, Artificial Sequence
  Description of Artificial Sequence: Synthetic primer
actctcaagttcttaaaacgctagtcaaacactattatcc

SEQ ID NO: 20644 - DNA, 40 bp, Artificial Sequence
  Description of Artificial Sequence: Synthetic primer
aatgaaagactttctgcctgtcttctattgtctggaacag

SEQ ID NO: 20645 - DNA, 40 bp, Artificial Sequence
  Description of Artificial Sequence: Synthetic primer
ggacagaacagctggtgtcaagacctgggttagaggtttg

SEQ ID NO: 20646 - DNA, 40 bp, Artificial Sequence
  Description of Artificial Sequence: Synthetic primer
catgaggtctccaccatttacatattccatgacgaaaaag

SEQ ID NO: 20647 - DNA, 40 bp, Artificial Sequence
  Description of Artificial Sequence: Synthetic primer
atccgctccaatgtcaccttctctttatttccaacctcag

SEQ ID NO: 20648 - DNA, 40 bp, Artificial Sequence
  Description of Artificial Sequence: Synthetic primer
ttgtataatttttgtgaggtatacatattgtggaattgac

SEQ ID NO: 20649 - DNA, 40 bp, Artificial Sequence
  Description of Artificial Sequence: Synthetic primer
caattctgctctaaccttcatgagattacgataaaacatc

SEQ ID NO: 20650 - DNA, 40 bp, Artificial Sequence
  Description of Artificial Sequence: Synthetic primer
agccctgtcattaagttgagtacagtgttggttcgacaag

SEQ ID NO: 20651 - DNA, 40 bp, Artificial Sequence
  Description of Artificial Sequence: Synthetic primer
ctcaaggggaggtctccatggaatgaccatgattcccaac

SEQ ID NO: 20652 - DNA, 40 bp, Artificial Sequence
  Description of Artificial Sequence: Synthetic primer
tgcactttagccaatttgcaccaatcataaaagaaataag

SEQ ID NO: 20653 - DNA, 40 bp, Artificial Sequence
  Description of Artificial Sequence: Synthetic primer
tgtcaaatgacaaggctttccgaatgttgttctcaagttc

SEQ ID NO: 20654 - DNA, 40 bp, Artificial Sequence
  Description of Artificial Sequence: Synthetic primer
gtattgtaatcaaatcataatatcagacagtcaaattctc

SEQ ID NO: 20655 - DNA, 40 bp, Artificial Sequence
  Description of Artificial Sequence: Synthetic primer
tacccttaattttggtttcacgtacttccaaattgttctc

SEQ ID NO: 20656 - DNA, 40 bp, Artificial Sequence
  Description of Artificial Sequence: Synthetic primer
tgagctagaagtacttgtcatgttctctgttctctcaatg

SEQ ID NO: 20657 - DNA, 40 bp, Artificial Sequence
  Description of Artificial Sequence: Synthetic primer
tcctctgtcaatatcatgtccgcctttgaaagccccttcg

SEQ ID NO: 20658 - DNA, 40 bp, Artificial Sequence
  Description of Artificial Sequence: Synthetic primer
tgctgaaaccaaccgagtggagctactgcgactacttctg

SEQ ID NO: 20659 - DNA, 40 bp, Artificial Sequence
  Description of Artificial Sequence: Synthetic primer
caaagagggtgagggccttcttaagatacaaatggtggag

SEQ ID NO: 20660 - DNA, 40 bp, Artificial Sequence
  Description of Artificial Sequence: Synthetic primer
tcattgacttccacctgagatcctggcactctgaagatcc

SEQ ID NO: 20661 - DNA, 40 bp, Artificial Sequence
  Description of Artificial Sequence: Synthetic primer
gccaaacagcagaaaattaaagaaaaccagaagacagatg

SEQ ID NO: 20662 - DNA, 40 bp, Artificial Sequence
  Description of Artificial Sequence: Synthetic primer
gaggagccatctagactattccccctcatatgtgtctatc

SEQ ID NO: 20663 - DNA, 40 bp, Artificial Sequence
  Description of Artificial Sequence: Synthetic primer
agcagtccatgaggtgccttcctgccttcctgcccgactg

SEQ ID NO: 20664 - DNA, 40 bp, Artificial Sequence
  Description of Artificial Sequence: Synthetic primer
ttcttaagatttgaaatacaagttaagaactatggaaagc

SEQ ID NO: 20665 - DNA, 40 bp, Artificial Sequence
  Description of Artificial Sequence: Synthetic primer
tccttaaaatggcattataaacggtatgttaggtcaaaac

SEQ ID NO: 20666 - DNA, 40 bp, Artificial Sequence
  Description of Artificial Sequence: Synthetic primer
gggggtcactgttcatcactcttaaaatatgtgttttctc

SEQ ID NO: 20667 - DNA, 40 bp, Artificial Sequence
  Description of Artificial Sequence: Synthetic primer
atgagttctttgagctgacggtggacgacgtgagaagacg

SEQ ID NO: 20668 - DNA, 40 bp, Artificial Sequence
  Description of Artificial Sequence: Synthetic primer
gccaccgtggacattatccccactccttaaagggcaaagg

SEQ ID NO: 20669 - DNA, 40 bp, Artificial Sequence
  Description of Artificial Sequence: Synthetic primer
acggcctttacaaatggataccattgagcaggtgctttcg

SEQ ID NO: 20670 - DNA, 40 bp, Artificial Sequence
  Description of Artificial Sequence: Synthetic primer
cttcctgatagcaagttcatctgcatggaatgtaaaactg

SEQ ID NO: 20671 - DNA, 40 bp, Artificial Sequence
  Description of Artificial Sequence: Synthetic primer
aagattacaatgctgcatgctagttggttacataagatac

SEQ ID NO: 20672 - DNA, 40 bp, Artificial Sequence
  Description of Artificial Sequence: Synthetic primer
aagcaccagccagatctaggtgctctgctgtctctttttc

SEQ ID NO: 20673 - DNA, 40 bp, Artificial Sequence
  Description of Artificial Sequence: Synthetic primer
cttggtgaccaaggccttcagggaggcgcagataaaggag

SEQ ID NO: 20674 - DNA, 40 bp, Artificial Sequence
  Description of Artificial Sequence: Synthetic primer
cggggggcctttctccgtgtcccccgcccgccccgtccac

SEQ ID NO: 20675 - DNA, 40 bp, Artificial Sequence
  Description of Artificial Sequence: Synthetic primer
ggttcttcacctggccccggatcttggacaccgtgttgag

SEQ ID NO: 20676 - DNA, 40 bp, Artificial Sequence
  Description of Artificial Sequence: Synthetic primer
ggggcagtgggcagctgttaggggtgggggacattctgtg

SEQ ID NO: 20677 - DNA, 40 bp, Artificial Sequence
  Description of Artificial Sequence: Synthetic primer
tgcctccaggaaagaggacgaaatgagtatattcacagag

SEQ ID NO: 20678 - DNA, 40 bp, Artificial Sequence
  Description of Artificial Sequence: Synthetic primer
atgatgctctatcattgtaaaatatcagcacgtcttcacc

SEQ ID NO: 20679 - DNA, 40 bp, Artificial Sequence
  Description of Artificial Sequence: Synthetic primer
tgggctctccgggagccccttgtcccgggagccccttatc

SEQ ID NO: 20680 - DNA, 40 bp, Artificial Sequence
  Description of Artificial Sequence: Synthetic primer
ggccctttggcaccatcagtgcaaaaattagagtcaaacc

SEQ ID NO: 20681 - DNA, 40 bp, Artificial Sequence
  Description of Artificial Sequence: Synthetic primer
ccccctctcatcactgtcattcagcccaggtttggacaag

SEQ ID NO: 20682 - DNA, 40 bp, Artificial Sequence
  Description of Artificial Sequence: Synthetic primer
ggcggaagaagccctgtaggacgtagcggtcggggaacag

SEQ ID NO: 20683 - DNA, 40 bp, Artificial Sequence
  Description of Artificial Sequence: Synthetic primer
aagctttatcttctcgaagttcttcttgggaacgtgtaac

SEQ ID NO: 20684 - DNA, 40 bp, Artificial Sequence
  Description of Artificial Sequence: Synthetic primer
cgccttctcctcgcctttatttatacgccatactggaatc

SEQ ID NO: 20685 - DNA, 40 bp, Artificial Sequence
  Description of Artificial Sequence: Synthetic primer
ccgggacttggccgagcggatcctaataaggggaaaatgg

SEQ ID NO: 20686 - DNA, 40 bp, Artificial Sequence
  Description of Artificial Sequence: Synthetic primer
ctatcgtagccttgttcaggatacgacggttgctgataac

SEQ ID NO: 20687 - DNA, 40 bp, Artificial Sequence
  Description of Artificial Sequence: Synthetic primer
ggcggcgggcggcagcatgtcggtggcggggctgaagaag

SEQ ID NO: 20688 - DNA, 40 bp, Artificial Sequence
  Description of Artificial Sequence: Synthetic primer
acaccatatagcagagaagggaggtcttctaatgggtagc

SEQ ID NO: 20689 - DNA, 40 bp, Artificial Sequence
  Description of Artificial Sequence: Synthetic primer
ggcgacttcggcggcgccacgagagcgggcagcggaggag

SEQ ID NO: 20690 - DNA, 40 bp, Artificial Sequence
  Description of Artificial Sequence: Synthetic primer
atctcctttcttgaaaataatcttgaacagctcactaaag

SEQ ID NO: 20691 - DNA, 40 bp, Artificial Sequence
  Description of Artificial Sequence: Synthetic primer
gatctgtatgcagaatcaggttttgaatttacaggctttg

SEQ ID NO: 20692 - DNA, 40 bp, Artificial Sequence
  Description of Artificial Sequence: Synthetic primer
aggcaagtcaggtcagcattctctcggttggcaacggttc

SEQ ID NO: 20693 - DNA, 40 bp, Artificial Sequence
  Description of Artificial Sequence: Synthetic primer
tttggatcctccaattaccccaggcttgatgcttcctgtc

SEQ ID NO: 20694 - DNA, 40 bp, Artificial Sequence
  Description of Artificial Sequence: Synthetic primer
cagactgttctcagtggatttctcttctttcctgagcttc

SEQ ID NO: 20695 - DNA, 40 bp, Artificial Sequence
  Description of Artificial Sequence: Synthetic primer
catgtggaattcgttgagtttgcttttagagccaagtttc

SEQ ID NO: 20696 - DNA, 40 bp, Artificial Sequence
  Description of Artificial Sequence: Synthetic primer
tacccccaccctgcgcgctctgggcgggagccgcgtgcac

SEQ ID NO: 20697 - DNA, 40 bp, Artificial Sequence
  Description of Artificial Sequence: Synthetic primer
tggggatagaaggccagaagtacgggttagaattgaagtg

SEQ ID NO: 20698 - DNA, 40 bp, Artificial Sequence
  Description of Artificial Sequence: Synthetic primer
aatgaatggtaggaaaattactctgaaaagagaacaagag

SEQ ID NO: 20699 - DNA, 40 bp, Artificial Sequence
  Description of Artificial Sequence: Synthetic primer
aacatagtctgatttggggcttttgggggaggagttgtag

SEQ ID NO: 20700 - DNA, 40 bp, Artificial Sequence
  Description of Artificial Sequence: Synthetic primer
gggtttggtgtggccgggggatgtagctcgggcgcctcct

SEQ ID NO: 20701 - DNA, 40 bp, Artificial Sequence
  Description of Artificial Sequence: Synthetic primer
gtctccgcttcaaccggctgctagggaagatgctaaaagg

SEQ ID NO: 20702 - DNA, 40 bp, Artificial Sequence
  Description of Artificial Sequence: Synthetic primer
cggccactgactgtgctggcgttagaattggtgcgtgaac

SEQ ID NO: 20703 - DNA, 40 bp, Artificial Sequence
  Description of Artificial Sequence: Synthetic primer
ccgttctctgtatgtttacgtcctttggactggcttctcc

SEQ ID NO: 20704 - DNA, 40 bp, Artificial Sequence
  Description of Artificial Sequence: Synthetic primer
ggaagaataactcaacaacaacaaacaacagtaagccttc

SEQ ID NO: 20705 - DNA, 40 bp, Artificial Sequence
  Description of Artificial Sequence: Synthetic primer
catcttagggcctctacgaagaaactaacaaggaagcaag

SEQ ID NO: 20706 - DNA, 40 bp, Artificial Sequence
  Description of Artificial Sequence: Synthetic primer
ccattcaccccggcaccacaagtcggacccctactcaacc

SEQ ID NO: 20707 - DNA, 40 bp, Artificial Sequence
  Description of Artificial Sequence: Synthetic primer
ggcggaaggggagaggtgattatccagagcgccgttgtgc

SEQ ID NO: 20708 - DNA, 40 bp, Artificial Sequence
  Description of Artificial Sequence: Synthetic primer
agagcctgcaaaactcccactggaagaggagaaataaagg

SEQ ID NO: 20709 - DNA, 40 bp, Artificial Sequence
  Description of Artificial Sequence: Synthetic primer
cagcaccagtcaaatgcctcttaagggatcttcaaggtga

SEQ ID NO: 20710 - DNA, 40 bp, Artificial Sequence
  Description of Artificial Sequence: Synthetic primer
gaaggagttcaaaagacctctagtgcgcccaccgcaggtg

SEQ ID NO: 20711 - DNA, 40 bp, Artificial Sequence
  Description of Artificial Sequence: Synthetic primer
acatattgttgttggtacacccgggagagtgtttgatatg

SEQ ID NO: 20712 - DNA, 40 bp, Artificial Sequence
  Description of Artificial Sequence: Synthetic primer
ctccgggaatttgtttccatttcttctcctgcccatgtag

SEQ ID NO: 20713 - DNA, 40 bp, Artificial Sequence
  Description of Artificial Sequence: Synthetic primer
ccgtcctctcctgggctggtgttggaatcaccctctaaac

SEQ ID NO: 20714 - DNA, 40 bp, Artificial Sequence
  Description of Artificial Sequence: Synthetic primer
ggtgtgtaacagtccatagcccattacacaactgtacaac

SEQ ID NO: 20715 - DNA, 40 bp, Artificial Sequence
  Description of Artificial Sequence: Synthetic primer
agctgcaaggcaaactccattcctcatattaaactattac

SEQ ID NO: 20716 - DNA, 40 bp, Artificial Sequence
  Description of Artificial Sequence: Synthetic primer
ttgaagcggcagcgccgggcatgcaggttgcagttacagg

SEQ ID NO: 20717 - DNA, 40 bp, Artificial Sequence
  Description of Artificial Sequence: Synthetic primer
ggctgcggcgggtaggcacccccgccaccgccgccaccag

SEQ ID NO: 20718 - DNA, 40 bp, Artificial Sequence
  Description of Artificial Sequence: Synthetic primer
ttattatttaactcttaactgaagaaagagaagtcacaac

SEQ ID NO: 20719 - DNA, 40 bp, Artificial Sequence
  Description of Artificial Sequence: Synthetic primer
tggacgtgctgggtcagcggcgcccgtccctcgccaagag

SEQ ID NO: 20720 - DNA, 40 bp, Artificial Sequence
  Description of Artificial Sequence: Synthetic primer
cagcaatattcactattggcaagcctgttcttggaatttg

SEQ ID NO: 20721 - DNA, 40 bp, Artificial Sequence
  Description of Artificial Sequence: Synthetic primer
gtacttggtataggggcagcgctttttgcgggtgcgttgg

SEQ ID NO: 20722 - DNA, 40 bp, Artificial Sequence
  Description of Artificial Sequence: Synthetic primer
tcactggcaatgggtccaactcatcttgaataaaatacac

SEQ ID NO: 20723 - DNA, 40 bp, Artificial Sequence
  Description of Artificial Sequence: Synthetic primer
gcgggctgggtaactacaggactgtgctctgtgtgataag

SEQ ID NO: 20724 - DNA, 40 bp, Artificial Sequence
  Description of Artificial Sequence: Synthetic primer
gctccccgcccaagtatccctgtaaaacaaaaaccaaaag

SEQ ID NO: 20725 - DNA, 40 bp, Artificial Sequence
  Description of Artificial Sequence: Synthetic primer
agacccaaaggcagcaaaaacaagagtccctctaaagcag

SEQ ID NO: 20726 - DNA, 40 bp, Artificial Sequence
  Description of Artificial Sequence: Synthetic primer
atcctctgcacagatgaacattttctctctaaaactaatc

SEQ ID NO: 20727 - DNA, 40 bp, Artificial Sequence
  Description of Artificial Sequence: Synthetic primer
ctcctttgatcagagagatcctgggactccaaacgatgac

SEQ ID NO: 20728 - DNA, 40 bp, Artificial Sequence
  Description of Artificial Sequence: Synthetic primer
catgaagaagagtcaggtggccgaagtgttcccactactc

SEQ ID NO: 20729 - DNA, 40 bp, Artificial Sequence
  Description of Artificial Sequence: Synthetic primer
tataaaagtaggaggcagtttctcccaccagttcaatacc

SEQ ID NO: 20730 - DNA, 40 bp, Artificial Sequence
  Description of Artificial Sequence: Synthetic primer
agtagcttgaagttcctcaaaaaccttttctaacgtccag

SEQ ID NO: 20731 - DNA, 40 bp, Artificial Sequence
  Description of Artificial Sequence: Synthetic primer
aaatccaaacaaaataaaacacacacacacacagaaaatg

SEQ ID NO: 20732 - DNA, 40 bp, Artificial Sequence
  Description of Artificial Sequence: Synthetic primer
aaagggctcccggggcttgggcttatactcccgcttaggg

SEQ ID NO: 20733 - DNA, 40 bp, Artificial Sequence
  Description of Artificial Sequence: Synthetic primer
actatatcagcatacaagatagtaccagatgaaatagaag

SEQ ID NO: 20734 - DNA, 40 bp, Artificial Sequence
  Description of Artificial Sequence: Synthetic primer
cgggaagcatcttccagaagtgtgattgggaataaatatg

SEQ ID NO: 20735 - DNA, 40 bp, Artificial Sequence
  Description of Artificial Sequence: Synthetic primer
tcccctcacctttatctttatagcacaccattttgagacc

SEQ ID NO: 20736 - DNA, 40 bp, Artificial Sequence
  Description of Artificial Sequence: Synthetic primer
tcctccacctgcgcctcccttgtctgaacttcccaacgcc

SEQ ID NO: 20737 - DNA, 40 bp, Artificial Sequence
  Description of Artificial Sequence: Synthetic primer
aagcaattcgtctgagcattttaaagtttctcacgtactc

SEQ ID NO: 20738 - DNA, 40 bp, Artificial Sequence
  Description of Artificial Sequence: Synthetic primer
ccttggggggccggcggactcgcaccgtccgaatggtcac

SEQ ID NO: 20739 - DNA, 40 bp, Artificial Sequence
  Description of Artificial Sequence: Synthetic primer
tttttaaaaggaataaccccaagtaaattatttttcaaac

SEQ ID NO: 20740 - DNA, 40 bp, Artificial Sequence
  Description of Artificial Sequence: Synthetic primer
ggggtgtttgggaggctgcgtgccagtcaagaagaaaaag

SEQ ID NO: 20741 - DNA, 40 bp, Artificial Sequence
  Description of Artificial Sequence: Synthetic primer
ctgcattcacaggcatcaaaacaactttatctcctacaac

SEQ ID NO: 20742 - DNA, 40 bp, Artificial Sequence
  Description of Artificial Sequence: Synthetic primer
tgctcctggagcagaagaagatcaagccacccttcaaacc

SEQ ID NO: 20743 - DNA, 40 bp, Artificial Sequence
  Description of Artificial Sequence: Synthetic primer
agaatggatcttcagtcttactgggcatcaactttccatc

SEQ ID NO: 20744 - DNA, 40 bp, Artificial Sequence
  Description of Artificial Sequence: Synthetic primer
ggacaatgaaatgatagcaatttccttttgcttctaggtg

SEQ ID NO: 20745 - DNA, 40 bp, Artificial Sequence
  Description of Artificial Sequence: Synthetic primer
acagcatgacaacattgtaaagtacaagggagtgtgctac

SEQ ID NO: 20746 - DNA, 40 bp, Artificial Sequence
  Description of Artificial Sequence: Synthetic primer
gttgctgcctggaccctgagacatgggaaggaatggtctg

SEQ ID NO: 20747 - DNA, 40 bp, Artificial Sequence
  Description of Artificial Sequence: Synthetic primer
tctcctctatgaggttcagtaccggagccccttcgacacc

SEQ ID NO: 20748 - DNA, 40 bp, Artificial Sequence
  Description of Artificial Sequence: Synthetic primer
ggttttcctcccttgcttagtattgttagcagaatgaatc

SEQ ID NO: 20749 - DNA, 40 bp, Artificial Sequence
  Description of Artificial Sequence: Synthetic primer
actgcgaggaggcctgcacacactgccggttgtcaatctc

SEQ ID NO: 20750 - DNA, 40 bp, Artificial Sequence
  Description of Artificial Sequence: Synthetic primer
tgtccctcccgcactccttaggcaagatttcccagtaaag

SEQ ID NO: 20751 - DNA, 40 bp, Artificial Sequence
  Description of Artificial Sequence: Synthetic primer
ctgtgactccaggtatttcctagtgcggctatcacacagc

SEQ ID NO: 20752 - DNA, 40 bp, Artificial Sequence
  Description of Artificial Sequence: Synthetic primer
ggcaagcttcacacgcatggtttgtgtcttcgttggatag

SEQ ID NO: 20753 - DNA, 40 bp, Artificial Sequence
  Description of Artificial Sequence: Synthetic primer
gattaatataagtgaaagcctttaaatgcagggacgaaag

SEQ ID NO: 20754 - DNA, 40 bp, Artificial Sequence
  Description of Artificial Sequence: Synthetic primer
gggggaggctcccagctagcaccttgctgtcctcccttcc

SEQ ID NO: 20755 - DNA, 40 bp, Artificial Sequence
  Description of Artificial Sequence: Synthetic primer
caccttgtgtggcttggaggtcttgctgctctccttgttg

SEQ ID NO: 20756 - DNA, 40 bp, Artificial Sequence
  Description of Artificial Sequence: Synthetic primer
cacaccctctgctgtccgtgtctggaattgtcctgcagtc

SEQ ID NO: 20757 - DNA, 40 bp, Artificial Sequence
  Description of Artificial Sequence: Synthetic primer
aaaaagattgggttcaagactactagaggacttcacactg

SEQ ID NO: 20758 - DNA, 40 bp, Artificial Sequence
  Description of Artificial Sequence: Synthetic primer
aaagaaaggaaaagcaactgtctttctctccctctctttc

SEQ ID NO: 20759 - DNA, 40 bp, Artificial Sequence
  Description of Artificial Sequence: Synthetic primer
tcgatgatactcgttttccctgatccgtggtgttgcagtc

SEQ ID NO: 20760 - DNA, 40 bp, Artificial Sequence
  Description of Artificial Sequence: Synthetic primer
tcgccctggaaatgatcaaatctcgtcagaaaaaggattc

SEQ ID NO: 20761 - DNA, 40 bp, Artificial Sequence
  Description of Artificial Sequence: Synthetic primer
cgggggccccttctcggcgctcttgtccccggggtagtcg

SEQ ID NO: 20762 - DNA, 40 bp, Artificial Sequence
  Description of Artificial Sequence: Synthetic primer
cgccccaccttgcagctaaatgtgatcctgccttgctgtg

SEQ ID NO: 20763 - DNA, 40 bp, Artificial Sequence
  Description of Artificial Sequence: Synthetic primer
tcttcaaggacgggaagaacccgagctgggggccgctgag

SEQ ID NO: 20764 - DNA, 40 bp, Artificial Sequence
  Description of Artificial Sequence: Synthetic primer
gcacatcgtgagccgcctgttctacggcaagagctactac

SEQ ID NO: 20765 - DNA, 40 bp, Artificial Sequence
  Description of Artificial Sequence: Synthetic primer
atcagcttcttgtcaagggtctgctccaagaaatgagaac

SEQ ID NO: 20766 - DNA, 40 bp, Artificial Sequence
  Description of Artificial Sequence: Synthetic primer
ctgcagctcccgtttctgctggatctgctggatcatctgg

SEQ ID NO: 20767 - DNA, 40 bp, Artificial Sequence
  Description of Artificial Sequence: Synthetic primer
acctctgatggacagcagatacttgtgcccagcaatcagg

SEQ ID NO: 20768 - DNA, 40 bp, Artificial Sequence
  Description of Artificial Sequence: Synthetic primer
ggaaggcacttgggtaaaacattcagataactgaggaaag

SEQ ID NO: 20769 - DNA, 40 bp, Artificial Sequence
  Description of Artificial Sequence: Synthetic primer
gggtctgaagagtgtctacattgttaaaaaaatcttgctt

SEQ ID NO: 20770 - DNA, 40 bp, Artificial Sequence
  Description of Artificial Sequence: Synthetic primer
cgccgctggcaggggtgcgcgctggacgtgggtgcagaag

SEQ ID NO: 20771 - DNA, 40 bp, Artificial Sequence
  Description of Artificial Sequence: Synthetic primer
ctgcggaagccaaaggcagctaagatagaaagctggactg

SEQ ID NO: 20772 - DNA, 40 bp, Artificial Sequence
  Description of Artificial Sequence: Synthetic primer
ctcttgttttgatttgtgaactgcagccctattagttttc

SEQ ID NO: 20773 - DNA, 40 bp, Artificial Sequence
  Description of Artificial Sequence: Synthetic primer
gagcaagtagtcattccgggcctttgtgcatttcagcttg

SEQ ID NO: 20774 - DNA, 40 bp, Artificial Sequence
  Description of Artificial Sequence: Synthetic primer
ctcgaggctttgagtacaagaaacatcaaagcgatcatac

SEQ ID NO: 20775 - DNA, 40 bp, Artificial Sequence
  Description of Artificial Sequence: Synthetic primer
tgggccccgaggctgaacagtgaagctcatgggtactatc

SEQ ID NO: 20776 - DNA, 40 bp, Artificial Sequence
  Description of Artificial Sequence: Synthetic primer
agcgagcgcactcggcggacgcaagggcggcggggagcac

SEQ ID NO: 20777 - DNA, 40 bp, Artificial Sequence
  Description of Artificial Sequence: Synthetic primer
ggctcttcgcttgcaggacagtggattctggggttctgtc

SEQ ID NO: 20778 - DNA, 40 bp, Artificial Sequence
  Description of Artificial Sequence: Synthetic primer
cccctgcccagcgtggggctggcccatccggaaggcagtg

SEQ ID NO: 20779 - DNA, 40 bp, Artificial Sequence
  Description of Artificial Sequence: Synthetic primer
gggcttcagtggcagctgcttttgtctatgggactcaatg

SEQ ID NO: 20780 - DNA, 40 bp, Artificial Sequence
  Description of Artificial Sequence: Synthetic primer
ttgggaattgccaggtcacggggtcatgtgaaattagcag

SEQ ID NO: 20781 - DNA, 40 bp, Artificial Sequence
  Description of Artificial Sequence: Synthetic primer
ttgttaattaccaagtgaccctgttgagatgggtgtccag

SEQ ID NO: 20782 - DNA, 40 bp, Artificial Sequence
  Description of Artificial Sequence: Synthetic primer
agttggaaaggtttgcaggttagggaatgaattgggagtg

SEQ ID NO: 20783 - DNA, 40 bp, Artificial Sequence
  Description of Artificial Sequence: Synthetic primer
caggctctgtcacatgctcctcttgcttgcgcagactctc

SEQ ID NO: 20784 - DNA, 40 bp, Artificial Sequence
  Description of Artificial Sequence: Synthetic primer
gatttttgagactaggttaattatttttgaggtcttatcc

SEQ ID NO: 20785 - DNA, 40 bp, Artificial Sequence
  Description of Artificial Sequence: Synthetic primer
ccctttaactcgggtggccccaggatatcaacaacattag

SEQ ID NO: 20786 - DNA, 40 bp, Artificial Sequence
  Description of Artificial Sequence: Synthetic primer
ccacggccgttttcatggctgcttaaaatggtctatggtc

SEQ ID NO: 20787 - DNA, 40 bp, Artificial Sequence
  Description of Artificial Sequence: Synthetic primer
gacccgaaacaagaaattcacctttgatgctggtgccaag

SEQ ID NO: 20788 - DNA, 40 bp, Artificial Sequence
  Description of Artificial Sequence: Synthetic primer
gcctggaatgaatagggcaatgtggagtattcctgctaag

SEQ ID NO: 20789 - DNA, 40 bp, Artificial Sequence
  Description of Artificial Sequence: Synthetic primer
taaacataataatgtgttaggttgtacctattatgctcac

SEQ ID NO: 20790 - DNA, 40 bp, Artificial Sequence
  Description of Artificial Sequence: Synthetic primer
ctttggataaagcatacaggagttatctaccaggatttag

SEQ ID NO: 20791 - DNA, 40 bp, Artificial Sequence
  Description of Artificial Sequence: Synthetic primer
tgcttttgattctcataaccaccataggactgtgaataac

SEQ ID NO: 20792 - DNA, 40 bp, Artificial Sequence
  Description of Artificial Sequence: Synthetic primer
ttggggaaaccagagaaagagaagaacaagaaacaacttc

SEQ ID NO: 20793 - DNA, 40 bp, Artificial Sequence
  Description of Artificial Sequence: Synthetic primer
cccccaaacacttgattcttttgacagctcagttttccag

SEQ ID NO: 20794 - DNA, 40 bp, Artificial Sequence
  Description of Artificial Sequence: Synthetic primer
ccgcagacggagggtgcggagcgccagagccgcgactacc

SEQ ID NO: 20795 - DNA, 40 bp, Artificial Sequence
  Description of Artificial Sequence: Synthetic primer
tctgcaaaagcagctgcgtgaagttaaccatactctttgg

SEQ ID NO: 20796 - DNA, 40 bp, Artificial Sequence
  Description of Artificial Sequence: Synthetic primer
ctgattttttcaggaaagcagcagcatcagaagccaacac

SEQ ID NO: 20797 - DNA, 40 bp, Artificial Sequence
  Description of Artificial Sequence: Synthetic primer
agcttctaggatcttccttggtgtgcaatgggccagttag

SEQ ID NO: 20798 - DNA, 40 bp, Artificial Sequence
  Description of Artificial Sequence: Synthetic primer
tggtgatggtccagcagaagagggcaaggctgaccagttg

SEQ ID NO: 20799 - DNA, 40 bp, Artificial Sequence
  Description of Artificial Sequence: Synthetic primer
ggtgggggctacggaggtggttatgacaactatggaggag

SEQ ID NO: 20800 - DNA, 40 bp, Artificial Sequence
  Description of Artificial Sequence: Synthetic primer
ctggccctccgggtgacccctgcattggggttgtatcctg

SEQ ID NO: 20801 - DNA, 40 bp, Artificial Sequence
  Description of Artificial Sequence: Synthetic primer
gcctgggaataaccccattttccctcgaataccagttgag

SEQ ID NO: 20802 - DNA, 40 bp, Artificial Sequence
  Description of Artificial Sequence: Synthetic primer
actatatttcatgaataaagtgattttccagctggtgttg

SEQ ID NO: 20803 - DNA, 40 bp, Artificial Sequence
  Description of Artificial Sequence: Synthetic primer
ccctcttccagtgtttccagacccaaacacgctaccactg

SEQ ID NO: 20804 - DNA, 40 bp, Artificial Sequence
  Description of Artificial Sequence: Synthetic primer
ggacaaatatccacaatatttaaaactgcaagcaccatgc

SEQ ID NO: 20805 - DNA, 40 bp, Artificial Sequence
  Description of Artificial Sequence: Synthetic primer
aatactataatcacctttaaagtatcgattcagaagtatc

SEQ ID NO: 20806 - DNA, 40 bp, Artificial Sequence
  Description of Artificial Sequence: Synthetic primer
aattaactttgcaagtatgtgcaagctaaaggtagtgagc

SEQ ID NO: 20807 - DNA, 40 bp, Artificial Sequence
  Description of Artificial Sequence: Synthetic primer
taggctcccagtagagggagggtgtggtggggttagtctc

SEQ ID NO: 20808 - DNA, 40 bp, Artificial Sequence
  Description of Artificial Sequence: Synthetic primer
agcggatcgagtggtcactcagcatctcataaagctcctc

SEQ ID NO: 20809 - DNA, 40 bp, Artificial Sequence
  Description of Artificial Sequence: Synthetic primer
tggccaggcactttccctactacttgaccactgccgttag

SEQ ID NO: 20810 - DNA, 40 bp, Artificial Sequence
  Description of Artificial Sequence: Synthetic primer
aacgcctgcccagcaacagcacaacgcgggccacagttag

SEQ ID NO: 20811 - DNA, 40 bp, Artificial Sequence
  Description of Artificial Sequence: Synthetic primer
cagattgttgttgggcaagaaaaccagggagcctaaatac

SEQ ID NO: 20812 - DNA, 40 bp, Artificial Sequence
  Description of Artificial Sequence: Synthetic primer
tgtgtttgtttgtttaatttactttcacaataaacttctg

SEQ ID NO: 20813 - DNA, 40 bp, Artificial Sequence
  Description of Artificial Sequence: Synthetic primer
ctgccccgggagctgctgtgcaagctgcatgtcaataggg

SEQ ID NO: 20814 - DNA, 40 bp, Artificial Sequence
  Description of Artificial Sequence: Synthetic primer
ccagcgacgaactttccgaaaaataaagacacctggttgc

SEQ ID NO: 20815 - DNA, 40 bp, Artificial Sequence
  Description of Artificial Sequence: Synthetic primer
attaaaagttgcattgttaagctgtgtcccctgtgtttac

SEQ ID NO: 20816 - DNA, 40 bp, Artificial Sequence
  Description of Artificial Sequence: Synthetic primer
tctgtccccacgaggggacccatgggggctgtctttgcag

SEQ ID NO: 20817 - DNA, 40 bp, Artificial Sequence
  Description of Artificial Sequence: Synthetic primer
gttttcccgggtgaaaccacgaattctttctggaggttgc

SEQ ID NO: 20818 - DNA, 40 bp, Artificial Sequence
  Description of Artificial Sequence: Synthetic primer
cagccgagcctcagataccctccgcagccgccgccaaacc

SEQ ID NO: 20819 - DNA, 40 bp, Artificial Sequence
  Description of Artificial Sequence: Synthetic primer
gaaatgaatctcacagactttctccacaacatcttcattc

SEQ ID NO: 20820 - DNA, 40 bp, Artificial Sequence
  Description of Artificial Sequence: Synthetic primer
gcctcctgaagcttggaatgaaactcctcgatcgtcaatg

SEQ ID NO: 20821 - DNA, 40 bp, Artificial Sequence
  Description of Artificial Sequence: Synthetic primer
cctggccgctgcccagggctatgccaccctaatccagacc

SEQ ID NO: 20822 - DNA, 40 bp, Artificial Sequence
  Description of Artificial Sequence: Synthetic primer
ccaggcgataaggagggctggttttatttagggagacacc

SEQ ID NO: 20823 - DNA, 40 bp, Artificial Sequence
  Description of Artificial Sequence: Synthetic primer
ggaggtgttaaaggtgaaggcgtgaggtgtagaatatctg

SEQ ID NO: 20824 - DNA, 40 bp, Artificial Sequence
  Description of Artificial Sequence: Synthetic primer
atgcctgaagacttgctggctcaagctcggaggtggaagg

SEQ ID NO: 20825 - DNA, 40 bp, Artificial Sequence
  Description of Artificial Sequence: Synthetic primer
ttatttcataagtatgatcgctttgatgtttcttgtactc

SEQ ID NO: 20826 - DNA, 40 bp, Artificial Sequence
  Description of Artificial Sequence: Synthetic primer
ccctgctgtgtgatgctcatcgcttcccttcgtgctggag

SEQ ID NO: 20827 - DNA, 40 bp, Artificial Sequence
  Description of Artificial Sequence: Synthetic primer
tgtgcttcaaataaatagaaaaatagttataatattgatc

SEQ ID NO: 20828 - DNA, 40 bp, Artificial Sequence
  Description of Artificial Sequence: Synthetic primer
ggggattagagctccatgtgcagaacgaggggaggagagg

SEQ ID NO: 20829 - DNA, 40 bp, Artificial Sequence
  Description of Artificial Sequence: Synthetic primer
gtcaaaaaagaaggggcaccccgggagggagcagaagaag

SEQ ID NO: 20830 - DNA, 40 bp, Artificial Sequence
  Description of Artificial Sequence: Synthetic primer
tttaactgcatttaaaagctgatttaactctccagtcttg

SEQ ID NO: 20831 - DNA, 40 bp, Artificial Sequence
  Description of Artificial Sequence: Synthetic primer
atgtctgtcctggatctgggagagagctggcgtgtgtacc

SEQ ID NO: 20832 - DNA, 40 bp, Artificial Sequence
  Description of Artificial Sequence: Synthetic primer
cacatgaatgcatgtgttggggattgtcatcaccctccag

SEQ ID NO: 20833 - DNA, 40 bp, Artificial Sequence
  Description of Artificial Sequence: Synthetic primer
ggaggaatacctggcattgacctctcagatcccaaacaac

SEQ ID NO: 20834 - DNA, 40 bp, Artificial Sequence
  Description of Artificial Sequence: Synthetic primer
ctgagccaggctgatgttgtcaaagttgtcataggcatcg

SEQ ID NO: 20835 - DNA, 40 bp, Artificial Sequence
  Description of Artificial Sequence: Synthetic primer
acagccctgggtcctccagtgatagcaacgggggtgatgc

SEQ ID NO: 20836 - DNA, 40 bp, Artificial Sequence
  Description of Artificial Sequence: Synthetic primer
ctctccaggctgagacacgactggctggcacgagttgctc

SEQ ID NO: 20837 - DNA, 40 bp, Artificial Sequence
  Description of Artificial Sequence: Synthetic primer
tttccagtgccttctttgccaaatggtaactctaaaccag

SEQ ID NO: 20838 - DNA, 40 bp, Artificial Sequence
  Description of Artificial Sequence: Synthetic primer
cattgatctgaagcacccggcaaagcccaacgcccgattc

SEQ ID NO: 20839 - DNA, 40 bp, Artificial Sequence
  Description of Artificial Sequence: Synthetic primer
ccccagatggtactgggcccaactcaactcccaacaatag

SEQ ID NO: 20840 - DNA, 40 bp, Artificial Sequence
  Description of Artificial Sequence: Synthetic primer
ctcgcgcccgcgccccggggtgaccgcgcacttgcagctc

SEQ ID NO: 20841 - DNA, 40 bp, Artificial Sequence
  Description of Artificial Sequence: Synthetic primer
ccatctcctcggcactgaggcggtgcgggtccaggtggtg

SEQ ID NO: 20842 - DNA, 40 bp, Artificial Sequence
  Description of Artificial Sequence: Synthetic primer
gccatgtccatcaagagttttcccttgccataggtgacag

SEQ ID NO: 20843 - DNA, 40 bp, Artificial Sequence
  Description of Artificial Sequence: Synthetic primer
gaatcttcatattgttcagtatttaggcttgatgttgtcc

SEQ ID NO: 20844 - DNA, 40 bp, Artificial Sequence
  Description of Artificial Sequence: Synthetic primer
gcactagtcaccgacagcggccttgaagacagagcaaagc

SEQ ID NO: 20845 - DNA, 40 bp, Artificial Sequence
  Description of Artificial Sequence: Synthetic primer
gaagaagaaaccagggcagaagaagtctaaaaatggaagc

SEQ ID NO: 20846 - DNA, 40 bp, Artificial Sequence
  Description of Artificial Sequence: Synthetic primer
agggagagagaagtataagcatttgggtcttttgaataac

SEQ ID NO: 20847 - DNA, 40 bp, Artificial Sequence
  Description of Artificial Sequence: Synthetic primer
ctgtgtccggcggagccaagtccactctgggggagctctg

SEQ ID NO: 20848 - DNA, 40 bp, Artificial Sequence
  Description of Artificial Sequence: Synthetic primer
atcttgtgttaacttgcctccatctttttcttgggtgagg

SEQ ID NO: 20849 - DNA, 40 bp, Artificial Sequence
  Description of Artificial Sequence: Synthetic primer
gcggggggaggaggcaggaaccgcgatggcgcctcagaag

SEQ ID NO: 20850 - DNA, 40 bp, Artificial Sequence
  Description of Artificial Sequence: Synthetic primer
gcacaataattattgaattacctgtatatttgtggaatgc

SEQ ID NO: 20851 - DNA, 40 bp, Artificial Sequence
  Description of Artificial Sequence: Synthetic primer
aacacaccactctgaggctaattacctaatggaatacaag

SEQ ID NO: 20852 - DNA, 40 bp, Artificial Sequence
  Description of Artificial Sequence: Synthetic primer
agggctgtggccaaggcggcgctgagcccggtgcaggaac

SEQ ID NO: 20853 - DNA, 40 bp, Artificial Sequence
  Description of Artificial Sequence: Synthetic primer
ccaggactcccagctggagggcctgagcaaggacattttc

SEQ ID NO: 20854 - DNA, 40 bp, Artificial Sequence
  Description of Artificial Sequence: Synthetic primer
ggagatgttcgagtgggactatttgctctctgtgatattc

SEQ ID NO: 20855 - DNA, 40 bp, Artificial Sequence
  Description of Artificial Sequence: Synthetic primer
ggggggccgaatctcaaacttctcttcccagcacttctgc

SEQ ID NO: 20856 - DNA, 40 bp, Artificial Sequence
  Description of Artificial Sequence: Synthetic primer
ttttttcctgatatttccaccacttttcagagtcatctac

SEQ ID NO: 20857 - DNA, 40 bp, Artificial Sequence
  Description of Artificial Sequence: Synthetic primer
aaagattgttatccgctgtacatccacaccccccacccca

SEQ ID NO: 20858 - DNA, 40 bp, Artificial Sequence
  Description of Artificial Sequence: Synthetic primer
gcaggaataagtcataatcaaagcggactttcctaggttc

SEQ ID NO: 20859 - DNA, 40 bp, Artificial Sequence
  Description of Artificial Sequence: Synthetic primer
agatgaaagacgactcaggaacggtagggctgggcagagg

SEQ ID NO: 20860 - DNA, 40 bp, Artificial Sequence
  Description of Artificial Sequence: Synthetic primer
ttcccatagaacagaaaactatgttttggaggtctcaacc

SEQ ID NO: 20861 - DNA, 40 bp, Artificial Sequence
  Description of Artificial Sequence: Synthetic primer
cccctggccatgctgtacaaggctcaggagctgcaaggtg

SEQ ID NO: 20862 - DNA, 40 bp, Artificial Sequence
  Description of Artificial Sequence: Synthetic primer
agcccaaggagaatgcagtgcccggcttcactgtgatttg

SEQ ID NO: 20863 - DNA, 40 bp, Artificial Sequence
  Description of Artificial Sequence: Synthetic primer
gagcgcttggctttggatcggcagtggtgtcggcggcttg

SEQ ID NO: 20864 - DNA, 40 bp, Artificial Sequence
  Description of Artificial Sequence: Synthetic primer
cgcgcgaccggcggctctttggcgcggattagggggtctc

SEQ ID NO: 20865 - DNA, 40 bp, Artificial Sequence
  Description of Artificial Sequence: Synthetic primer
ctccaactatcccaatgaaggagatccaagcaattagcac

SEQ ID NO: 20866 - DNA, 40 bp, Artificial Sequence
  Description of Artificial Sequence: Synthetic primer
tctttttttcttaatgagcaaactttataccatcatcagc

SEQ ID NO: 20867 - DNA, 40 bp, Artificial Sequence
  Description of Artificial Sequence: Synthetic primer
ggaaaaggaaaaagaaaagttaaagcaagaaagactagag

SEQ ID NO: 20868 - DNA, 40 bp, Artificial Sequence
  Description of Artificial Sequence: Synthetic primer
tcccgtttcaaacagtaatcttcaaactcatttccttttg

SEQ ID NO: 20869 - DNA, 40 bp, Artificial Sequence
  Description of Artificial Sequence: Synthetic primer
cacccagggagttcatccagttcctaaatgtccgctcttc

SEQ ID NO: 20870 - DNA, 40 bp, Artificial Sequence
  Description of Artificial Sequence: Synthetic primer
agtcttttttgaatggaggagcgatggtaaccccactagg

SEQ ID NO: 20871 - DNA, 40 bp, Artificial Sequence
  Description of Artificial Sequence: Synthetic primer
ggaatttttctccgaagataccccatagcgcgagtttttg

SEQ ID NO: 20872 - DNA, 40 bp, Artificial Sequence
  Description of Artificial Sequence: Synthetic primer
gttggaatatttctggttgttacaatcccactgacctttg

SEQ ID NO: 20873 - DNA, 40 bp, Artificial Sequence
  Description of Artificial Sequence: Synthetic primer
aacaaatttgatttccggagtcagtcattttactgtcaag

SEQ ID NO: 20874 - DNA, 40 bp, Artificial Sequence
  Description of Artificial Sequence: Synthetic primer
ctctagcctctagatggcagctttgtaacccacatctctc

SEQ ID NO: 20875 - DNA, 40 bp, Artificial Sequence
  Description of Artificial Sequence: Synthetic primer
ctagctaagatatccctaccagataaagcaatgggaatgc

SEQ ID NO: 20876 - DNA, 40 bp, Artificial Sequence
  Description of Artificial Sequence: Synthetic primer
gctgaagtcccttcatggaactgttatgaaaattaaccag

SEQ ID NO: 20877 - DNA, 40 bp, Artificial Sequence
  Description of Artificial Sequence: Synthetic primer
aagctctgacatgtctacacatcaagtgccatactactac

SEQ ID NO: 20878 - DNA, 40 bp, Artificial Sequence
  Description of Artificial Sequence: Synthetic primer
gagaagtgctcctgaaatcaaatataattccatggtcctg

SEQ ID NO: 20879 - DNA, 40 bp, Artificial Sequence
  Description of Artificial Sequence: Synthetic primer
cactcattctggttgtcgtccatgagggcaccgtctgaag

SEQ ID NO: 20880 - DNA, 40 bp, Artificial Sequence
  Description of Artificial Sequence: Synthetic primer
ctgaatcacagtctctcctgcgataaaggagaccgaaaac

SEQ ID NO: 20881 - DNA, 40 bp, Artificial Sequence
  Description of Artificial Sequence: Synthetic primer
ggtttgtgtcacgtgtggacatctcctcaggctttgtgtc

SEQ ID NO: 20882 - DNA, 40 bp, Artificial Sequence
  Description of Artificial Sequence: Synthetic primer
gctgaagagacgaatcatgcccgaggatataatcatcaac

SEQ ID NO: 20883 - DNA, 40 bp, Artificial Sequence
  Description of Artificial Sequence: Synthetic primer
atggcccaggagatcgtttcatcattggggaatcccaagc

SEQ ID NO: 20884 - DNA, 40 bp, Artificial Sequence
  Description of Artificial Sequence: Synthetic primer
tgaatttcacgtcatctcagtagccacgctagtccattcc

SEQ ID NO: 20885 - DNA, 40 bp, Artificial Sequence
  Description of Artificial Sequence: Synthetic primer
gcctcttggcaatcataaatattaaagtcggtttatccag

SEQ ID NO: 20886 - DNA, 40 bp, Artificial Sequence
  Description of Artificial Sequence: Synthetic primer
actgccagaatccagtgtttcaagatggagttggtgaagc

SEQ ID NO: 20887 - DNA, 40 bp, Artificial Sequence
  Description of Artificial Sequence: Synthetic primer
acactgttacaggccgctcaatcttcatcttgtgataggg

SEQ ID NO: 20888 - DNA, 40 bp, Artificial Sequence
  Description of Artificial Sequence: Synthetic primer
ccagcacattaagtgttctttctaatcttcatgtttactc

SEQ ID NO: 20889 - DNA, 40 bp, Artificial Sequence
  Description of Artificial Sequence: Synthetic primer
attgtgatcactggccccagtacttgttagttgcatcagc

SEQ ID NO: 20890 - DNA, 40 bp, Artificial Sequence
  Description of Artificial Sequence: Synthetic primer
ccaggccactgtggccatgatgaacaggaaggatgagctg

SEQ ID NO: 20891 - DNA, 40 bp, Artificial Sequence
  Description of Artificial Sequence: Synthetic primer
gccaagtgtagaatccagccagtcagagagcaaatccttg

SEQ ID NO: 20892 - DNA, 40 bp, Artificial Sequence
  Description of Artificial Sequence: Synthetic primer
ccgaccagcaggcggcccccagaaccaatttccattccag

SEQ ID NO: 20893 - DNA, 40 bp, Artificial Sequence
  Description of Artificial Sequence: Synthetic primer
agcgtcccggagcgcccaatcctgggctggaacgagtagc

SEQ ID NO: 20894 - DNA, 40 bp, Artificial Sequence
  Description of Artificial Sequence: Synthetic primer
aggaggttgccaagcagtgcacagataaacggattagaac

SEQ ID NO: 20895 - DNA, 40 bp, Artificial Sequence
  Description of Artificial Sequence: Synthetic primer
acagattaggggacctcaggttttcctcaaaaacccacac

SEQ ID NO: 20896 - DNA, 40 bp, Artificial Sequence
  Description of Artificial Sequence: Synthetic primer
catcttctccacttccataattagttaaagcctgagtttc

SEQ ID NO: 20897 - DNA, 40 bp, Artificial Sequence; identical to SEQ ID NO: 14871
  Description of Artificial Sequence: Synthetic primer

SEQ ID NO: 20898 - DNA, 40 bp, Artificial Sequence
  Description of Artificial Sequence: Synthetic primer
cccggccccagggctcctggcgatggagcggggagagtgg

SEQ ID NO: 20899 - DNA, 40 bp, Artificial Sequence
  Description of Artificial Sequence: Synthetic primer
gagatttttggtgctgaacccagctaaacgctgtactctc

SEQ ID NO: 20900 - DNA, 40 bp, Artificial Sequence
  Description of Artificial Sequence: Synthetic primer
actcacgtgagggaacttactttggccagcattgaccttc

SEQ ID NO: 20901 - DNA, 40 bp, Artificial Sequence
  Description of Artificial Sequence: Synthetic primer
gcttgctgcaacaactgttccaccaggagcaaaaggatca

SEQ ID NO: 20902 - DNA, 40 bp, Artificial Sequence
  Description of Artificial Sequence: Synthetic primer
tgcaggtgatcagctcctcagtgtggatggacgaagtctg

SEQ ID NO: 20903 - DNA, 40 bp, Artificial Sequence
  Description of Artificial Sequence: Synthetic primer
tggcacgctatgttcaggaactgaaacaggagaggaaatc

SEQ ID NO: 20904 - DNA, 40 bp, Artificial Sequence
  Description of Artificial Sequence: Synthetic primer
gttgggctcagattgttggggctactggacagggctgaag

SEQ ID NO: 20905 - DNA, 40 bp, Artificial Sequence
  Description of Artificial Sequence: Synthetic primer
atgcccggcgcccggcactacttctggaggggtcccactg

SEQ ID NO: 20906 - DNA, 40 bp, Artificial Sequence
  Description of Artificial Sequence: Synthetic primer
ctgtggagaaattcaggcccaatctcccaacataaccaac

SEQ ID NO: 20907 - DNA, 40 bp, Artificial Sequence
  Description of Artificial Sequence: Synthetic primer
aggaagagggagaatatttaccagccatggaacatctgct

SEQ ID NO: 20908 - DNA, 40 bp, Artificial Sequence
  Description of Artificial Sequence: Synthetic primer
tttcctaccaagcatgtttcacattttcctattagtggag

SEQ ID NO: 20909 - DNA, 40 bp, Artificial Sequence
  Description of Artificial Sequence: Synthetic primer
cgcagtgaggaggaacgtaccactgaggcagagaagaatg

SEQ ID NO: 20910 - DNA, 40 bp, Artificial Sequence
  Description of Artificial Sequence: Synthetic primer
aacaagatgactaaatctagggcataagacactacaaaag

SEQ ID NO: 20911 - DNA, 40 bp, Artificial Sequence
  Description of Artificial Sequence: Synthetic primer
agctcttcaatggtttccttcagagaatccctttctgttc

SEQ ID NO: 20912 - DNA, 40 bp, Artificial Sequence
  Description of Artificial Sequence: Synthetic primer
gaatgaactcttggagcccctaaagaatctggccttctcc

SEQ ID NO: 20913 - DNA, 40 bp, Artificial Sequence
  Description of Artificial Sequence: Synthetic primer
tgaggtccctgtgtggccctcagtgcagccagtgcccttc

SEQ ID NO: 20914 - DNA, 40 bp, Artificial Sequence
  Description of Artificial Sequence: Synthetic primer
agtgcctcagaggtccatggcagtatcccagccaaatctc

SEQ ID NO: 20915 - DNA, 40 bp, Artificial Sequence
  Description of Artificial Sequence: Synthetic primer
cagactctgtacttcattttctttggccacaaatttactc

SEQ ID NO: 20916 - DNA, 40 bp, Artificial Sequence
  Description of Artificial Sequence: Synthetic primer
atcctcgggctgcttgttctccataaatagttgtaggttc

SEQ ID NO: 20917 - DNA, 40 bp, Artificial Sequence
  Description of Artificial Sequence: Synthetic primer
cggctccgcgccgccccagctcggctcctgtttgatgaag

SEQ ID NO: 20918 - DNA, 40 bp, Artificial Sequence
  Description of Artificial Sequence: Synthetic primer
cagttagttaactaaagagctttttcaagcacccatgtct

SEQ ID NO: 20919 - DNA, 40 bp, Artificial Sequence
  Description of Artificial Sequence: Synthetic primer
tgcttttagtcgcaacggaccagttaagagaacacctatc

SEQ ID NO: 20920 - DNA, 40 bp, Artificial Sequence
  Description of Artificial Sequence: Synthetic primer
aagatggcagtgccatcttgtacacaccaccatccattat

SEQ ID NO: 20921 - DNA, 40 bp, Artificial Sequence
  Description of Artificial Sequence: Synthetic primer
gcgcagccgctcctcgccgcgctcgctcaccacgcagtag

SEQ ID NO: 20922 - DNA, 40 bp, Artificial Sequence
  Description of Artificial Sequence: Synthetic primer
tgcttgattcggtcaggtgtggcttcaataatgtgttctg

SEQ ID NO: 20923 - DNA, 40 bp, Artificial Sequence
  Description of Artificial Sequence: Synthetic primer
ggagcgcagccactccatcactcgatggttagtccacttc

SEQ ID NO: 20924 - DNA, 40 bp, Artificial Sequence
  Description of Artificial Sequence: Synthetic primer
caaccgaaatgagactccctcagatccagtgataattgac

SEQ ID NO: 20925 - DNA, 40 bp, Artificial Sequence
  Description of Artificial Sequence: Synthetic primer
cgaggaatactgagggtggctgtagggactcccggaaaac

SEQ ID NO: 20926 - DNA, 40 bp, Artificial Sequence
  Description of Artificial Sequence: Synthetic primer
cacaatcagtaattaagactggttcattaattttggactc

SEQ ID NO: 20927 - DNA, 40 bp, Artificial Sequence
  Description of Artificial Sequence: Synthetic primer
atcggtatttgtttgtttctgttccttatcttttccattc

SEQ ID NO: 20928 - DNA, 40 bp, Artificial Sequence
  Description of Artificial Sequence: Synthetic primer
tgagccggctcgcctgctgccgctccgcctcccgctcctc

SEQ ID NO: 20929 - DNA, 40 bp, Artificial Sequence
  Description of Artificial Sequence: Synthetic primer
gcgggaggtcttggtggttttgtattcaatcactgtcttg

SEQ ID NO: 20930 - DNA, 40 bp, Artificial Sequence
  Description of Artificial Sequence: Synthetic primer
cttgggtagtgaaattaagtgacatttggatttttatttg

SEQ ID NO: 20931 - DNA, 40 bp, Artificial Sequence
  Description of Artificial Sequence: Synthetic primer
gggggaggagaggcgcagccagaggagccgccgcagtagc

SEQ ID NO: 20932 - DNA, 40 bp, Artificial Sequence
  Description of Artificial Sequence: Synthetic primer
cacttctatgtctgttccaactcccatctatcagactagc

SEQ ID NO: 20933 - DNA, 40 bp, Artificial Sequence
  Description of Artificial Sequence: Synthetic primer
tacctgagaaagcatttgtaggcaacccttctcttattac

SEQ ID NO: 20934 - DNA, 40 bp, Artificial Sequence
  Description of Artificial Sequence: Synthetic primer
caccgtggaggtccaggccgtgctgtccgccctgctcacc

SEQ ID NO: 20935 - DNA, 40 bp, Artificial Sequence
  Description of Artificial Sequence: Synthetic primer
ggctgctgtaattcttgtttttctaaaacccgtggatctg

SEQ ID NO: 20936 - DNA, 40 bp, Artificial Sequence
  Description of Artificial Sequence: Synthetic primer
ccactggtgagcccgcccttctcagtacctgtgcagaatg

SEQ ID NO: 20937 - DNA, 40 bp, Artificial Sequence
  Description of Artificial Sequence: Synthetic primer
gcagccctcaacaccccgtgcacctgcaccctagggactc

SEQ ID NO: 20938 - DNA, 40 bp, Artificial Sequence
  Description of Artificial Sequence: Synthetic primer
gagcaggacgactgcatggcggccgagctgctgctgttgc

SEQ ID NO: 20939 - DNA, 40 bp, Artificial Sequence
  Description of Artificial Sequence: Synthetic primer
tgtgcatgaaattctacaggcatatggggtcgtgatctgc

SEQ ID NO: 20940 - DNA, 40 bp, Artificial Sequence
  Description of Artificial Sequence: Synthetic primer
ttctggtgtggcattggggcctgagtgggtttttagtctc

SEQ ID NO: 20941 - DNA, 40 bp, Artificial Sequence
  Description of Artificial Sequence: Synthetic primer
tcacatctatgccatcacagacaccgcctacaggagtatg

SEQ ID NO: 20942 - DNA, 40 bp, Artificial Sequence
  Description of Artificial Sequence: Synthetic primer
aggcagattttactatattccgctactttccctcttagtg

SEQ ID NO: 20943 - DNA, 40 bp, Artificial Sequence
  Description of Artificial Sequence: Synthetic primer
gaaagatgtgacgcacatgcattcccgaggctctaaaatc

SEQ ID NO: 20944 - DNA, 40 bp, Artificial Sequence
  Description of Artificial Sequence: Synthetic primer
tgggctcagccgtttccggagtctgcgctgcgcccggttc

SEQ ID NO: 20945 - DNA, 40 bp, Artificial Sequence
  Description of Artificial Sequence: Synthetic primer
tccaggggccaagccggtcctccttcccggcccactcttc

SEQ ID NO: 20946 - DNA, 40 bp, Artificial Sequence
  Description of Artificial Sequence: Synthetic primer
tcggttattattaaaataaatcctgaatacaattaaagac

SEQ ID NO: 20947 - DNA, 40 bp, Artificial Sequence
  Description of Artificial Sequence: Synthetic primer
cgagaatcacgcgcggcgggcgggcgcctggagtgtttgg

SEQ ID NO: 20948 - DNA, 40 bp, Artificial Sequence
  Description of Artificial Sequence: Synthetic primer
gggatgtgcagggccacggcagggtggtcaccagcagagc

SEQ ID NO: 20949 - DNA, 40 bp, Artificial Sequence
  Description of Artificial Sequence: Synthetic primer
tgtggtaaatcctttacttattctgctacccttcaaatac

SEQ ID NO: 20950 - DNA, 40 bp, Artificial Sequence
  Description of Artificial Sequence: Synthetic primer
atttgtcttcagattattaaaattagtgctgtaaatcagg

SEQ ID NO: 20951 - DNA, 40 bp, Artificial Sequence
  Description of Artificial Sequence: Synthetic primer
gaaacaaaaacaaatggaaaatactgccctacagaatgag

SEQ ID NO: 20952 - DNA, 40 bp, Artificial Sequence
  Description of Artificial Sequence: Synthetic primer
tgctcaaagatcaagaaatcgagttatacttttcataagg

SEQ ID NO: 20953 - DNA, 40 bp, Artificial Sequence
  Description of Artificial Sequence: Synthetic primer
gagcaaatccaagtttcattacgtgtggtggagagtttgc

SEQ ID NO: 20954 - DNA, 40 bp, Artificial Sequence
  Description of Artificial Sequence: Synthetic primer
gggaggagatggaggttctgagtatacatcaacagctaag

SEQ ID NO: 20955 - DNA, 40 bp, Artificial Sequence
  Description of Artificial Sequence: Synthetic primer
ccacagctgtgtgagctgccatgcttccaacccttcaaac

SEQ ID NO: 20956 - DNA, 40 bp, Artificial Sequence
  Description of Artificial Sequence: Synthetic primer
gactcactgaaggagtttgtgcagtttgtgtgctcggatg

SEQ ID NO: 20957 - DNA, 40 bp, Artificial Sequence
  Description of Artificial Sequence: Synthetic primer
ccactcacgctctgtgagcttgtggtcgatcacttcttcc

SEQ ID NO: 20958 - DNA, 40 bp, Artificial Sequence
  Description of Artificial Sequence: Synthetic primer
ttttaattaaaggttcatcatctgaactatcctcagactc

SEQ ID NO: 20959 - DNA, 40 bp, Artificial Sequence
  Description of Artificial Sequence: Synthetic primer
cgcgcctgctcgctgcgtgctgggagccggccttcaacct

SEQ ID NO: 20960 - DNA, 40 bp, Artificial Sequence
  Description of Artificial Sequence: Synthetic primer
ggccacatctgtagcaatcagaataggagcttttccatgt

SEQ ID NO: 20961 - DNA, 40 bp, Artificial Sequence
  Description of Artificial Sequence: Synthetic primer
agtttctgcttctcggactccacagcattcaggtgatttg

SEQ ID NO: 20962 - DNA, 40 bp, Artificial Sequence
  Description of Artificial Sequence: Synthetic primer
acgcctcctgcatcgtctcaggctacggccactacctcac

SEQ ID NO: 20963 - DNA, 40 bp, Artificial Sequence
  Description of Artificial Sequence: Synthetic primer
tctgggcgcgcgccgtctctggggtgcgcgggggtcctca

SEQ ID NO: 20964 - DNA, 40 bp, Artificial Sequence
  Description of Artificial Sequence: Synthetic primer
tctagctcttggtttgaacgaaattctttgtcacgtaaac

SEQ ID NO: 20965 - DNA, 40 bp, Artificial Sequence
  Description of Artificial Sequence: Synthetic primer
gctgggatatctgctgcaaattctctaactccagtttctc

SEQ ID NO: 20966 - DNA, 40 bp, Artificial Sequence
  Description of Artificial Sequence: Synthetic primer
accagccactacccccttcccagcggttgtccagccctac

SEQ ID NO: 20967 - DNA, 40 bp, Artificial Sequence
  Description of Artificial Sequence: Synthetic primer
ccactgcccccacctgctgaggagcggaccagcgccaagg

SEQ ID NO: 20968 - DNA, 40 bp, Artificial Sequence
  Description of Artificial Sequence: Synthetic primer
atttgagaaacacgaagaatggctaaccacctcccctaag

SEQ ID NO: 20969 - DNA, 40 bp, Artificial Sequence
  Description of Artificial Sequence: Synthetic primer
actactatttgctgtaaaagacatctcctcaggccaactc

SEQ ID NO: 20970 - DNA, 40 bp, Artificial Sequence
  Description of Artificial Sequence: Synthetic primer
gccgctgtcctatgcccagtgacagcacaggtcacgtaag

SEQ ID NO: 20971 - DNA, 40 bp, Artificial Sequence
  Description of Artificial Sequence: Synthetic primer
aaaacctgtgcaataaattaccagtaataaagtcagaaac

SEQ ID NO: 20972 - DNA, 40 bp, Artificial Sequence
  Description of Artificial Sequence: Synthetic primer
aaggactatattaatcaccttctttgtaatcccttcacag

SEQ ID NO: 20973 - DNA, 40 bp, Artificial Sequence
  Description of Artificial Sequence: Synthetic primer
tgcgtctccctccgcacgtcttctgtcactttcctctctg

SEQ ID NO: 20974 - DNA, 40 bp, Artificial Sequence
  Description of Artificial Sequence: Synthetic primer
tttatcagcttttaagtttcagtattattaaaccattttc

SEQ ID NO: 20975 - DNA, 40 bp, Artificial Sequence
  Description of Artificial Sequence: Synthetic primer
agggccttcttcagcaccgtcacctcctgctccctcttgg

SEQ ID NO: 20976 - DNA, 40 bp, Artificial Sequence
  Description of Artificial Sequence: Synthetic primer
cccggaaaaccttcgcctcaagcaacagagtgagctccag

SEQ ID NO: 20977 - DNA, 40 bp, Artificial Sequence
  Description of Artificial Sequence: Synthetic primer
agtccaggctgtccagggatgccatctcggccaggggggc

SEQ ID NO: 20978 - DNA, 40 bp, Artificial Sequence
  Description of Artificial Sequence: Synthetic primer
gaggtctcagaggggcagccagatcggccgggagcccatt

SEQ ID NO: 20979 - DNA, 40 bp, Artificial Sequence
  Description of Artificial Sequence: Synthetic primer
caagtttagcagttgatcccaatggcctttacttgatgtc

SEQ ID NO: 20980 - DNA, 40 bp, Artificial Sequence
  Description of Artificial Sequence: Synthetic primer
aagttttaacatgtttatgaagtacccattacatgccttc

SEQ ID NO: 20981 - DNA, 40 bp, Artificial Sequence
  Description of Artificial Sequence: Synthetic primer
cgtggtactcctccttggcctccctgtccatgttgggtag

SEQ ID NO: 20982 - DNA, 40 bp, Artificial Sequence
  Description of Artificial Sequence: Synthetic primer
gctctttgttacagttccattaaatgagtaataaagtttg

SEQ ID NO: 20983 - DNA, 40 bp, Artificial Sequence
  Description of Artificial Sequence: Synthetic primer
agactttctgcagagttcacaccttctcatcaagtctaac

SEQ ID NO: 20984 - DNA, 40 bp, Artificial Sequence
  Description of Artificial Sequence: Synthetic primer
agaagaattccattaggagatgatacatcaaaattcaaac

SEQ ID NO: 20985 - DNA, 40 bp, Artificial Sequence
  Description of Artificial Sequence: Synthetic primer
ccttaaaaatactttatcttaagccattttggtcatagtc

SEQ ID NO: 20986 - DNA, 40 bp, Artificial Sequence
  Description of Artificial Sequence: Synthetic primer
gcagcacgttaccaaccagcctgcgtgaagacctgtcaac

SEQ ID NO: 20987 - DNA, 40 bp, Artificial Sequence
  Description of Artificial Sequence: Synthetic primer
gtaaaatgtttcaacagtttggtatattttcaacggctta

SEQ ID NO: 20988 - DNA, 40 bp, Artificial Sequence
  Description of Artificial Sequence: Synthetic primer
ttggtaataccagcaccataggacagccaagcaccaacac

SEQ ID NO: 20989 - DNA, 40 bp, Artificial Sequence
  Description of Artificial Sequence: Synthetic primer
taaagaggatataaagccattaaagagacctcgagatgag

SEQ ID NO: 20990 - DNA, 40 bp, Artificial Sequence
  Description of Artificial Sequence: Synthetic primer
ccagtggcagcggccgacggggtagaagcggagaagaaag

SEQ ID NO: 20991 - DNA, 40 bp, Artificial Sequence
  Description of Artificial Sequence: Synthetic primer
aaatgcatttaaatctgttttattcaaagaaaagctaaag

SEQ ID NO: 20992 - DNA, 40 bp, Artificial Sequence
  Description of Artificial Sequence: Synthetic primer
aagaaagacaaaagtagtcgtccgcccctcacgccctctc

SEQ ID NO: 20993 - DNA, 40 bp, Artificial Sequence
  Description of Artificial Sequence: Synthetic primer
ccctgaacaaaatacaccacataccagactatgcctttgg

SEQ ID NO: 20994 - DNA, 40 bp, Artificial Sequence
  Description of Artificial Sequence: Synthetic primer
gcagaacagagaacttgagtgtattcgagagatcaaagag

SEQ ID NO: 20995 - DNA, 40 bp, Artificial Sequence
  Description of Artificial Sequence: Synthetic primer
aggtgccaacgggaccctggttctgccggaaatgtgaatc

SEQ ID NO: 20996 - DNA, 40 bp, Artificial Sequence
  Description of Artificial Sequence: Synthetic primer
gacgagtttgtctaggaaacatttccgtcaccttgacttg

SEQ ID NO: 20997 - DNA, 40 bp, Artificial Sequence
  Description of Artificial Sequence: Synthetic primer
gacccgaatatcgagaggattttgttcttacagttacagg

SEQ ID NO: 20998 - DNA, 40 bp, Artificial Sequence
  Description of Artificial Sequence: Synthetic primer
gagtcttccctcacagaggactctcaacttggacaaaatc

SEQ ID NO: 20999 - DNA, 40 bp, Artificial Sequence
  Description of Artificial Sequence: Synthetic primer
agtgagattcagccaccccctgtcaaccgcaacctcaaac

SEQ ID NO: 21000 - DNA, 40 bp, Artificial Sequence
  Description of Artificial Sequence: Synthetic primer
aacaatgcactatgtacacgggcagggggcaagtcttcag

SEQ ID NO: 21001 - DNA, 40 bp, Artificial Sequence
  Description of Artificial Sequence: Synthetic primer
cggaccaaacaaagaactttttcttcatcactgcttcttc

SEQ ID NO: 21002 - DNA, 40 bp, Artificial Sequence
  Description of Artificial Sequence: Synthetic primer
agcaatttcttctaaaacattttcaaagcctcctttgttg

SEQ ID NO: 21003 - DNA, 40 bp, Artificial Sequence
  Description of Artificial Sequence: Synthetic primer
atagggaactcggtttttgtcttcatgaactgaaaggttg

SEQ ID NO: 21004 - DNA, 40 bp, Artificial Sequence
  Description of Artificial Sequence: Synthetic primer
ccttgggggatcaggagcgaagttgggcgggacttcagag

SEQ ID NO: 21005 - DNA, 40 bp, Artificial Sequence
  Description of Artificial Sequence: Synthetic primer
ggtatcattctaaagtttagctatcaagcactcaccattg

SEQ ID NO: 21006 - DNA, 40 bp, Artificial Sequence
  Description of Artificial Sequence: Synthetic primer
ccctctgctgggtacatcggtcccctacggcgaagttcag

SEQ ID NO: 21007 - DNA, 40 bp, Artificial Sequence
  Description of Artificial Sequence: Synthetic primer
ccgacgagcacctggcccagaccaagagccccgggaacag

SEQ ID NO: 21008 - DNA, 40 bp, Artificial Sequence
  Description of Artificial Sequence: Synthetic primer
gcaatgaacatttacttggcacattagtataatgggtatc

SEQ ID NO: 21009 - DNA, 40 bp, Artificial Sequence
  Description of Artificial Sequence: Synthetic primer
gaagaagctcacgctgtcattggtgatgaggtctgtgagg

SEQ ID NO: 21010 - DNA, 40 bp, Artificial Sequence
  Description of Artificial Sequence: Synthetic primer
cgcccaggagcctgcccacgcccaggagaactggctgctc

SEQ ID NO: 21011 - DNA, 40 bp, Artificial Sequence
  Description of Artificial Sequence: Synthetic primer
cctcgcctgggccttcccacactctgatattccacattcg

SEQ ID NO: 21012 - DNA, 40 bp, Artificial Sequence
  Description of Artificial Sequence: Synthetic primer
ggtgacctcggacttccctcaggttcttaattttgttctg

SEQ ID NO: 21013 - DNA, 40 bp, Artificial Sequence
  Description of Artificial Sequence: Synthetic primer
gctcgccaaggccctgcacgcccgggtctttgatttcttg

SEQ ID NO: 21014 - DNA, 40 bp, Artificial Sequence
  Description of Artificial Sequence: Synthetic primer
gagatggtcaagtccattcaatttaagacacctatttatg

SEQ ID NO: 21015 - DNA, 40 bp, Artificial Sequence
  Description of Artificial Sequence: Synthetic primer
ggtggcacgtaggagccgttgtattcattaagatacttcc

SEQ ID NO: 21016 - DNA, 40 bp, Artificial Sequence
  Description of Artificial Sequence: Synthetic primer
tctgcctttacgttgacagtgttgaagcagggtgaataac

SEQ ID NO: 21017 - DNA, 40 bp, Artificial Sequence
  Description of Artificial Sequence: Synthetic primer
cagctgagatcctttttctaaagcttcgggatccttcaac

SEQ ID NO: 21018 - DNA, 40 bp, Artificial Sequence
  Description of Artificial Sequence: Synthetic primer
ccttcgggaacgccaagaccgtccggaacaacaactccag

SEQ ID NO: 21019 - DNA, 40 bp, Artificial Sequence
  Description of Artificial Sequence: Synthetic primer
acagctatcaaaggcagcaattttctcctgcaagactacg

SEQ ID NO: 21020 - DNA, 40 bp, Artificial Sequence
  Description of Artificial Sequence: Synthetic primer
tgtcagaatccccacaagtaccacttacaaaagaccagag

SEQ ID NO: 21021 - DNA, 40 bp, Artificial Sequence
  Description of Artificial Sequence: Synthetic primer
ccacaatgccatcactgtcagaatcctcactcacaagcac

SEQ ID NO: 21022 - DNA, 40 bp, Artificial Sequence
  Description of Artificial Sequence: Synthetic primer
acaggcttggcagctgcggctctgctgtcccgagccactc

SEQ ID NO: 21023 - DNA, 40 bp, Artificial Sequence
  Description of Artificial Sequence: Synthetic primer
caacacccccaagagtgccaagtgcgagggggacatcttc

SEQ ID NO: 21024 - DNA, 40 bp, Artificial Sequence
  Description of Artificial Sequence: Synthetic primer
ctgtctttgataataaacccaacaatgatgcaattttcag

SEQ ID NO: 21025 - DNA, 40 bp, Artificial Sequence
  Description of Artificial Sequence: Synthetic primer
tgcctgcagtctgggtcactctgcccttcatcagacactg

SEQ ID NO: 21026 - DNA, 40 bp, Artificial Sequence
  Description of Artificial Sequence: Synthetic primer
gcacagatatactctgggggctgagatggacaaaggcttg

SEQ ID NO: 21027 - DNA, 40 bp, Artificial Sequence
  Description of Artificial Sequence: Synthetic primer
agctatggtggtgccgactacaagcgaattactgtgaaag

SEQ ID NO: 21028 - DNA, 40 bp, Artificial Sequence
  Description of Artificial Sequence: Synthetic primer
tgaggaggagaagtgcttctgcgagcccgaagacatccag

SEQ ID NO: 21029 - DNA, 40 bp, Artificial Sequence
  Description of Artificial Sequence: Synthetic primer
tcccttaatttggttttaattagcctttctgttcgttcac

SEQ ID NO: 21030 - DNA, 40 bp, Artificial Sequence
  Description of Artificial Sequence: Synthetic primer
aatcgacaaaattcatgataattacctggatcagacaaac

SEQ ID NO: 21031 - DNA, 40 bp, Artificial Sequence
  Description of Artificial Sequence: Synthetic primer
ttgcaagatttaatgacctcaggtttgtcggtcgaagtgg

SEQ ID NO: 21032 - DNA, 40 bp, Artificial Sequence
  Description of Artificial Sequence: Synthetic primer
cgggacattgcctgtggctgtcagtatttggaggaaaacc

SEQ ID NO: 21033 - DNA, 40 bp, Artificial Sequence
  Description of Artificial Sequence: Synthetic primer
aagctcatctagaagagagcaacgctggaatagagaagtc

SEQ ID NO: 21034 - DNA, 40 bp, Artificial Sequence
  Description of Artificial Sequence: Synthetic primer
ggggctgcaggctctgtccctgagaaaggagttcatctgc

SEQ ID NO: 21035 - DNA, 40 bp, Artificial Sequence
  Description of Artificial Sequence: Synthetic primer
tgacgaccaccacgttctgtgggactcctgactacatagc

SEQ ID NO: 21036 - DNA, 40 bp, Artificial Sequence
  Description of Artificial Sequence: Synthetic primer
agggagaaacccctagctctgggagtagttcgaccctcac

SEQ ID NO: 21037 - DNA, 40 bp, Artificial Sequence
  Description of Artificial Sequence: Synthetic primer
gtttctgttaaggaactcgatttatatttggcatactttg

SEQ ID NO: 21038 - DNA, 40 bp, Artificial Sequence
  Description of Artificial Sequence: Synthetic primer
ctttttgtggaaaacgacagcagcagcagtggcctggaag

SEQ ID NO: 21039 - DNA, 40 bp, Artificial Sequence
  Description of Artificial Sequence: Synthetic primer
gcacacgcataccccagcgcccggcagttatgtattctcc

SEQ ID NO: 21040 - DNA, 40 bp, Artificial Sequence
  Description of Artificial Sequence: Synthetic primer
caactgggagcacacgtttatttgcttcttttctgagagc

SEQ ID NO: 21041 - DNA, 40 bp, Artificial Sequence
  Description of Artificial Sequence: Synthetic primer
ccaagtctcgggtggtcgggaacccctttgatagcaagac

SEQ ID NO: 21042 - DNA, 40 bp, Artificial Sequence
  Description of Artificial Sequence: Synthetic primer
cctgggcaagggctgcaggctgggggtgtcctgtacttgg

SEQ ID NO: 21043 - DNA, 40 bp, Artificial Sequence
  Description of Artificial Sequence: Synthetic primer
actccttttggtactgtttcccagagatgttttcttcttg

SEQ ID NO: 21044 - DNA, 40 bp, Artificial Sequence
  Description of Artificial Sequence: Synthetic primer
cggggcccgatcccagctcggtctccggctctggcctctc

SEQ ID NO: 21045 - DNA, 40 bp, Artificial Sequence
  Description of Artificial Sequence: Synthetic primer
ctgtcaccaggaggaggaggttactgttgggaatctgctg

SEQ ID NO: 21046 - DNA, 40 bp, Artificial Sequence
  Description of Artificial Sequence: Synthetic primer
gccgctagaaccttcctccggagcccaagacgcgaagagg

SEQ ID NO: 21047 - DNA, 40 bp, Artificial Sequence
  Description of Artificial Sequence: Synthetic primer
ccaaagccccaaattcctgttagccaggtggaggcttctg

SEQ ID NO: 21048 - DNA, 40 bp, Artificial Sequence
  Description of Artificial Sequence: Synthetic primer
tgctaaacataaaatattgcagtgtattagccggctgtgg

SEQ ID NO: 21049 - DNA, 40 bp, Artificial Sequence
  Description of Artificial Sequence: Synthetic primer
cagtacaaagtttacagtagaaacagcttgcaaagaatac

SEQ ID NO: 21050 - DNA, 40 bp, Artificial Sequence
  Description of Artificial Sequence: Synthetic primer
cctttctcctggtttgccaacttcaccagcgggacctgag

SEQ ID NO: 21051 - DNA, 40 bp, Artificial Sequence
  Description of Artificial Sequence: Synthetic primer
acaaagatgttagcagggagaatttgcttaataaaatgag

SEQ ID NO: 21052 - DNA, 40 bp, Artificial Sequence
  Description of Artificial Sequence: Synthetic primer
tagaacattttacaatacacataaaattacgaaagaaaac

SEQ ID NO: 21053 - DNA, 40 bp, Artificial Sequence
  Description of Artificial Sequence: Synthetic primer
gggtgtggtgggctcagatgtggccctgagagagctgatg

SEQ ID NO: 21054 - DNA, 40 bp, Artificial Sequence
  Description of Artificial Sequence: Synthetic primer
ccgattaatggagaagtttgccgcaagatacatagaatgc

SEQ ID NO: 21055 - DNA, 40 bp, Artificial Sequence
  Description of Artificial Sequence: Synthetic primer
gttccactttcaaacttgtaattcactctctctggatctg

SEQ ID NO: 21056 - DNA, 40 bp, Artificial Sequence
  Description of Artificial Sequence: Synthetic primer
atatttgtagtggacagaaacacagtagaaattacagagc

SEQ ID NO: 21057 - DNA, 40 bp, Artificial Sequence
  Description of Artificial Sequence: Synthetic primer
gattccctttctctccagaagaaccaggcaatcctttgtc

SEQ ID NO: 21058 - DNA, 40 bp, Artificial Sequence
  Description of Artificial Sequence: Synthetic primer
gcaagcctgtcttaaacttgagttcttcctgcttccagtg

SEQ ID NO: 21059 - DNA, 40 bp, Artificial Sequence
  Description of Artificial Sequence: Synthetic primer
tttgtagatttatctcgtgatctagacaaagtgactactg

SEQ ID NO: 21060 - DNA, 40 bp, Artificial Sequence
  Description of Artificial Sequence: Synthetic primer
caatgacttgattttccttggagagaaactgggctacctc

SEQ ID NO: 21061 - DNA, 40 bp, Artificial Sequence
  Description of Artificial Sequence: Synthetic primer
agatcatcagttcttatccagatgatgagtctgtttactg

SEQ ID NO: 21062 - DNA, 40 bp, Artificial Sequence
  Description of Artificial Sequence: Synthetic primer
tctgctgttgaataagatcttccacatctgccagcaagac

SEQ ID NO: 21063 - DNA, 40 bp, Artificial Sequence
  Description of Artificial Sequence: Synthetic primer
ctgcttctgtatgtctcttgtggtattggaacaataaacc

SEQ ID NO: 21064 - DNA, 40 bp, Artificial Sequence
  Description of Artificial Sequence: Synthetic primer
agcatctggcttaggcgctgcagcaacttcaggagtggac

SEQ ID NO: 21065 - DNA, 40 bp, Artificial Sequence
  Description of Artificial Sequence: Synthetic primer
cagatccagagagagtgaattacaagtttgaaagtggaac

SEQ ID NO: 21066 - DNA, 40 bp, Artificial Sequence
  Description of Artificial Sequence: Synthetic primer
aagagttgtagctactctaaactgagtaaattagcgattg

SEQ ID NO: 21067 - DNA, 40 bp, Artificial Sequence
  Description of Artificial Sequence: Synthetic primer
acttggcccagtcccattagcaggagtttctatcaagctg

SEQ ID NO: 21068 - DNA, 40 bp, Artificial Sequence
  Description of Artificial Sequence: Synthetic primer
ttaatgttgttgttagcagcagacatgttccacagagacc

SEQ ID NO: 21069 - DNA, 40 bp, Artificial Sequence
  Description of Artificial Sequence: Synthetic primer
ggctctagttgggagagtggtttcattccaagtgtactcc

SEQ ID NO: 21070 - DNA, 40 bp, Artificial Sequence
  Description of Artificial Sequence: Synthetic primer
ttcattcaaatatctactatagcgccttatgaaggtagac

SEQ ID NO: 21071 - DNA, 40 bp, Artificial Sequence
  Description of Artificial Sequence: Synthetic primer
cgccggctaccttagcttagcgtgtcagcgggcgccacag

SEQ ID NO: 21072 - DNA, 40 bp, Artificial Sequence
  Description of Artificial Sequence: Synthetic primer
acccagctgcggcgacgccaggagaccccaagctgcatcg

SEQ ID NO: 21073 - DNA, 40 bp, Artificial Sequence
  Description of Artificial Sequence: Synthetic primer
accaggcactggccgttgccccacgctgcgcttcctctgc

SEQ ID NO: 21074 - DNA, 40 bp, Artificial Sequence
  Description of Artificial Sequence: Synthetic primer
agagtacgcacacgccgatttgcccttttgattcttccac

SEQ ID NO: 21075 - DNA, 40 bp, Artificial Sequence
  Description of Artificial Sequence: Synthetic primer
ttgttggtcttcctcttcactttcgtcttctttgcttctg

SEQ ID NO: 21076 - DNA, 40 bp, Artificial Sequence
  Description of Artificial Sequence: Synthetic primer
gcctctgagcttgtcataatgggcttgctttcaggtaagg

SEQ ID NO: 21077 - DNA, 40 bp, Artificial Sequence
  Description of Artificial Sequence: Synthetic primer
taaatgctgcatttatgacaccatttgttagttcatttgg

SEQ ID NO: 21078 - DNA, 40 bp, Artificial Sequence
  Description of Artificial Sequence: Synthetic primer
ctatgactggaatgccaagcagtttgaactgtacgatgag

SEQ ID NO: 21079 - DNA, 40 bp, Artificial Sequence
  Description of Artificial Sequence: Synthetic primer
cttggctgctccgtgatctcaaactcccccatgattcgag

SEQ ID NO: 21080 - DNA, 40 bp, Artificial Sequence
  Description of Artificial Sequence: Synthetic primer
tgtcagtgtctctgtagacaaactccactgtacatcttgg

SEQ ID NO: 21081 - DNA, 40 bp, Artificial Sequence
  Description of Artificial Sequence: Synthetic primer
gcctaagccaggctcaaggctgcattctgggctggaccaa

SEQ ID NO: 21082 - DNA, 40 bp, Artificial Sequence
  Description of Artificial Sequence: Synthetic primer
gccgctgcgcaagtgccgcccgggcttcggcgtggccaga

SEQ ID NO: 21083 - DNA, 40 bp, Artificial Sequence
  Description of Artificial Sequence: Synthetic primer
cgaccgttattattctgaactttgtcctttagaaacatgg

SEQ ID NO: 21084 - DNA, 40 bp, Artificial Sequence
  Description of Artificial Sequence: Synthetic primer
gtgatgaagctgggctctgagaactccgatggtggaacac

SEQ ID NO: 21085 - DNA, 40 bp, Artificial Sequence
  Description of Artificial Sequence: Synthetic primer
caatttgaggtcatcaagcaacaaaaagaaatcattgaac

SEQ ID NO: 21086 - DNA, 40 bp, Artificial Sequence
  Description of Artificial Sequence: Synthetic primer
ggaggtaatcaaaggcctgtagatgcgagactttatggtg

SEQ ID NO: 21087 - DNA, 40 bp, Artificial Sequence
  Description of Artificial Sequence: Synthetic primer
aacatgttgggctccctcgtctcctcctacccggtcacag

SEQ ID NO: 21088 - DNA, 40 bp, Artificial Sequence
  Description of Artificial Sequence: Synthetic primer
ttactttaatggatacagatttaataaggaagaaatagag

SEQ ID NO: 21089 - DNA, 40 bp, Artificial Sequence
  Description of Artificial Sequence: Synthetic primer
acagacaacaaatgttgtcattggttcatcagcactacgg

SEQ ID NO: 21090 - DNA, 40 bp, Artificial Sequence
  Description of Artificial Sequence: Synthetic primer
catatactctccagaatcagccagtgatgctttgttaatg

SEQ ID NO: 21091 - DNA, 40 bp, Artificial Sequence
  Description of Artificial Sequence: Synthetic primer
cccccaagcacagctggcgggctctgactcggacctggac

SEQ ID NO: 21092 - DNA, 40 bp, Artificial Sequence
  Description of Artificial Sequence: Synthetic primer
cctcctaggaagtaagatgagggcgttcaagaataataac

SEQ ID NO: 21093 - DNA, 40 bp, Artificial Sequence
  Description of Artificial Sequence: Synthetic primer
accaccaatgccaaagttaagtgcatgcagaggagagaag

SEQ ID NO: 21094 - DNA, 40 bp, Artificial Sequence
  Description of Artificial Sequence: Synthetic primer
ttttatctatgctgcttaaagactggcggtccagatccac

SEQ ID NO: 21095 - DNA, 40 bp, Artificial Sequence
  Description of Artificial Sequence: Synthetic primer
caagttggtattgataaaggtgacattcctgacctcacac

SEQ ID NO: 21096 - DNA, 40 bp, Artificial Sequence
  Description of Artificial Sequence: Synthetic primer
agccatgatcatgtgccaaggctgcggtgcgttctgtcac

SEQ ID NO: 21097 - DNA, 40 bp, Artificial Sequence
  Description of Artificial Sequence: Synthetic primer
ctctcggccagatctccgaaccagagccagaaggaatctg

SEQ ID NO: 21098 - DNA, 40 bp, Artificial Sequence
  Description of Artificial Sequence: Synthetic primer
aactagtagcacagaaaacacctgattggtattcaaagtg

SEQ ID NO: 21099 - DNA, 40 bp, Artificial Sequence
  Description of Artificial Sequence: Synthetic primer
tgccaggcagagacagatggagagctgacactccggattg

SEQ ID NO: 21100 - DNA, 40 bp, Artificial Sequence
  Description of Artificial Sequence: Synthetic primer
ggtctgttccgatgcaatgattgttcgcatagaaagaacg

SEQ ID NO: 21101 - DNA, 40 bp, Artificial Sequence
  Description of Artificial Sequence: Synthetic primer
gatgctgcctcgagttgtcctgactcctctgaaggtaaac

SEQ ID NO: 21102 - DNA, 40 bp, Artificial Sequence
  Description of Artificial Sequence: Synthetic primer
gaccaggcgcagccggcgcggccgctcatgttccttggac

SEQ ID NO: 21103 - DNA, 40 bp, Artificial Sequence
  Description of Artificial Sequence: Synthetic primer
tggacccgtcttcttccatcttctggcacgtctccttctc

SEQ ID NO: 21104 - DNA, 40 bp, Artificial Sequence
  Description of Artificial Sequence: Synthetic primer
gaagaaaatgcaccggttccaaattctcttcgatgtgagc

SEQ ID NO: 21105 - DNA, 40 bp, Artificial Sequence
  Description of Artificial Sequence: Synthetic primer
ctgcatcatctttgaatactatgtgggattcaccctcttc

SEQ ID NO: 21106 - DNA, 40 bp, Artificial Sequence
  Description of Artificial Sequence: Synthetic primer
tctgtggcttctcggatccaggctgagccagacaacttgg

SEQ ID NO: 21107 - DNA, 40 bp, Artificial Sequence
  Description of Artificial Sequence: Synthetic primer
cagcttcaggcattcaacacttaccgcactgtggagaaac

SEQ ID NO: 21108 - DNA, 40 bp, Artificial Sequence
  Description of Artificial Sequence: Synthetic primer
ttcaggataaacgtcttgccgtgaaagggaacttcaatgg

SEQ ID NO: 21109 - DNA, 40 bp, Artificial Sequence
  Description of Artificial Sequence: Synthetic primer
ctctgcaccgctaggccgtccccgaccttgcctgaacaag

SEQ ID NO: 21110 - DNA, 40 bp, Artificial Sequence
  Description of Artificial Sequence: Synthetic primer
cttaacaatcaagcccgtttcattttagagaagatacaag

SEQ ID NO: 21111 - DNA, 40 bp, Artificial Sequence
  Description of Artificial Sequence: Synthetic primer
tgcaggcaggacaagcgcatgccccactgctgtgttattg

SEQ ID NO: 21112 - DNA, 40 bp, Artificial Sequence
  Description of Artificial Sequence: Synthetic primer
ggcctttgtgtccctgaggagcgcatcttccccaatgtgc

SEQ ID NO: 21113 - DNA, 40 bp, Artificial Sequence
  Description of Artificial Sequence: Synthetic primer
cgaaagtggccagaaatgaagagaccttcttccaaatcac

SEQ ID NO: 21114 - DNA, 40 bp, Artificial Sequence
  Description of Artificial Sequence: Synthetic primer
ccccgagcctccgcatcgtactatgaacagtatcactcac

SEQ ID NO: 21115 - DNA, 40 bp, Artificial Sequence
  Description of Artificial Sequence: Synthetic primer
ttggcttaaaagattaagcgagtcatctacaaccaaaatg

SEQ ID NO: 21116 - DNA, 40 bp, Artificial Sequence
  Description of Artificial Sequence: Synthetic primer
gatcagcagcaagtccagcaggttgtagtcagcgaaggag

SEQ ID NO: 21117 - DNA, 40 bp, Artificial Sequence
  Description of Artificial Sequence: Synthetic primer
ttttagacttagcattaaatgatctcctggtggtctgatg

SEQ ID NO: 21118 - DNA, 40 bp, Artificial Sequence
  Description of Artificial Sequence: Synthetic primer
cgcctggtctcctatcacttcttgtcttaggtagtacagc

SEQ ID NO: 21119 - DNA, 40 bp, Artificial Sequence
  Description of Artificial Sequence: Synthetic primer
ttatgagctcattccgcaaagccagttctctttcgtgttc

SEQ ID NO: 21120 - DNA, 40 bp, Artificial Sequence
  Description of Artificial Sequence: Synthetic primer
cgcccagaatttgcgctggaggaattccagcttcatttgg

SEQ ID NO: 21121 - DNA, 40 bp, Artificial Sequence
  Description of Artificial Sequence: Synthetic primer
cagcatcttcccaccagtgctgcaggaggcgacagaagtc

SEQ ID NO: 21122 - DNA, 40 bp, Artificial Sequence
  Description of Artificial Sequence: Synthetic primer
ctcggccgaaggtcccctctcctaaggtgctaacgatttc

SEQ ID NO: 21123 - DNA, 40 bp, Artificial Sequence
  Description of Artificial Sequence: Synthetic primer
gacctccgaggttttcccttggccattcccttccgcgtag

SEQ ID NO: 21124 - DNA, 40 bp, Artificial Sequence
  Description of Artificial Sequence: Synthetic primer
gtctgttttccaatgctgccatttttgtggcttcttttgc

SEQ ID NO: 21125 - DNA, 40 bp, Artificial Sequence
  Description of Artificial Sequence: Synthetic primer
ctgctcattgaagaattcataaaatgtagccatgtaggac

SEQ ID NO: 21126 - DNA, 40 bp, Artificial Sequence
  Description of Artificial Sequence: Synthetic primer
ggggcggctgggaggagacaaagtctggttgcccagaagg

SEQ ID NO: 21127 - DNA, 40 bp, Artificial Sequence
  Description of Artificial Sequence: Synthetic primer
agaaaaacagttttcaactcctcctttccattcattgctc

SEQ ID NO: 21128 - DNA, 40 bp, Artificial Sequence
  Description of Artificial Sequence: Synthetic primer
cctggcaaaaacggtgataaaggtcatgctggtcttgctg

SEQ ID NO: 21129 - DNA, 40 bp, Artificial Sequence
  Description of Artificial Sequence: Synthetic primer
cagcagcctgtacgacacgtcctcgctgctccagttctgc

SEQ ID NO: 21130 - DNA, 40 bp, Artificial Sequence
  Description of Artificial Sequence: Synthetic primer
ttggcatgccactagtgatacttagggtcatgggtgttgg

SEQ ID NO: 21131 - DNA, 40 bp, Artificial Sequence
  Description of Artificial Sequence: Synthetic primer
gaggtcacccaggaccctgccccgctcctgagaggcttcc

SEQ ID NO: 21132 - DNA, 40 bp, Artificial Sequence
  Description of Artificial Sequence: Synthetic primer
ggggacagagctacccaggggccagccatggggtgaccag

SEQ ID NO: 21133 - DNA, 40 bp, Artificial Sequence
  Description of Artificial Sequence: Synthetic primer
agtgtttccatattcctatacacgaagtaaaagcaaagac

SEQ ID NO: 21134 - DNA, 40 bp, Artificial Sequence
  Description of Artificial Sequence: Synthetic primer
ccactagaaatattatatcagcagccgcaccatttttgac

SEQ ID NO: 21135 - DNA, 40 bp, Artificial Sequence
  Description of Artificial Sequence: Synthetic primer
aaggtacttccttcctcgccctctctaatgatgtaatctc

SEQ ID NO: 21136 - DNA, 40 bp, Artificial Sequence
  Description of Artificial Sequence: Synthetic primer
acagacactcgggcacccgtgtcaggtcattgcaggacag

SEQ ID NO: 21137 - DNA, 40 bp, Artificial Sequence
  Description of Artificial Sequence: Synthetic primer
gctgcatcaagccaaacgaaaccaagaagcccagagactg

SEQ ID NO: 21138 - DNA, 40 bp, Artificial Sequence
  Description of Artificial Sequence: Synthetic primer
aactggaacctggaggggaagggctatattgggcttggac

SEQ ID NO: 21139 - DNA, 40 bp, Artificial Sequence
  Description of Artificial Sequence: Synthetic primer
ttttctgagagtaggaaatttggatacaaaagcataagtc

SEQ ID NO: 21140 - DNA, 40 bp, Artificial Sequence
  Description of Artificial Sequence: Synthetic primer
tttcaaagctaacataagaaaattctggttctggagtgat

SEQ ID NO: 21141 - DNA, 40 bp, Artificial Sequence
  Description of Artificial Sequence: Synthetic primer
tcatttctgaaatttattcaggaaagtgaagagaaagaag

SEQ ID NO: 21142 - DNA, 40 bp, Artificial Sequence
  Description of Artificial Sequence: Synthetic primer
cacggagagcttgtagttgatctgtggcagctccaggtag

SEQ ID NO: 21143 - DNA, 40 bp, Artificial Sequence
  Description of Artificial Sequence: Synthetic primer
ccaagatcctttccatcatggctagatgctctctgttgtc

SEQ ID NO: 21144 - DNA, 40 bp, Artificial Sequence
  Description of Artificial Sequence: Synthetic primer
gaagatacacaatatgttctgatgcattcttgttgcttgc

SEQ ID NO: 21145 - DNA, 40 bp, Artificial Sequence
  Description of Artificial Sequence: Synthetic primer
ctggagggcccggcggaccaagccttcctggtgttgatgg

SEQ ID NO: 21146 - DNA, 40 bp, Artificial Sequence
  Description of Artificial Sequence: Synthetic primer
aggtgcggcattatttatcccagtggattgaaagccaagc

SEQ ID NO: 21147 - DNA, 40 bp, Artificial Sequence
  Description of Artificial Sequence: Synthetic primer
accttcacaggtggcatgctggcattgtccacggactcag

SEQ ID NO: 21148 - DNA, 40 bp, Artificial Sequence
  Description of Artificial Sequence: Synthetic primer
cactccaaatggatcaggtaagcccagattacatttcaac

SEQ ID NO: 21149 - DNA, 40 bp, Artificial Sequence
  Description of Artificial Sequence: Synthetic primer
aacattactgaggaacagcaggccgtgcttaacaggaaag

SEQ ID NO: 21150 - DNA, 40 bp, Artificial Sequence
  Description of Artificial Sequence: Synthetic primer
aacagaacggtccagtcaccaaattcatcagtgccatctc

SEQ ID NO: 21151 - DNA, 40 bp, Artificial Sequence
  Description of Artificial Sequence: Synthetic primer
tggaggaagcggggcctcgtaggaaccggcagccacattg

SEQ ID NO: 21152 - DNA, 40 bp, Artificial Sequence
  Description of Artificial Sequence: Synthetic primer
ctatcttctccaaaccattccttgactcttctctgcatac

SEQ ID NO: 21153 - DNA, 40 bp, Artificial Sequence
  Description of Artificial Sequence: Synthetic primer
ttcacaaacagaatattttcaggcttgaggtctgtatgtg

SEQ ID NO: 21154 - DNA, 40 bp, Artificial Sequence
  Description of Artificial Sequence: Synthetic primer
tttcttaactgatgagagaggcttagacatgagtgtgtag

SEQ ID NO: 21155 - DNA, 40 bp, Artificial Sequence
  Description of Artificial Sequence: Synthetic primer
cctttgtaatgaaacgtaataaaaatccaacgttttcgtc

SEQ ID NO: 21156 - DNA, 40 bp, Artificial Sequence
  Description of Artificial Sequence: Synthetic primer
cgggctcacctgggaattagaaaacaaagcactcgaggag

SEQ ID NO: 21157 - DNA, 40 bp, Artificial Sequence
  Description of Artificial Sequence: Synthetic primer
aggaatggaagtttacagagcctcagtgttggctcatctc

SEQ ID NO: 21158 - DNA, 40 bp, Artificial Sequence
  Description of Artificial Sequence: Synthetic primer
cccagtgaggaagccaaagaggagttagccaagaagtgtg

SEQ ID NO: 21159 - DNA, 40 bp, Artificial Sequence
  Description of Artificial Sequence: Synthetic primer
tgcctgcctcaaaagttcgttttcatttactttgttagtg

SEQ ID NO: 21160 - DNA, 40 bp, Artificial Sequence
  Description of Artificial Sequence: Synthetic primer
gtcttgcttgttaaaaggctgaccaaaaagaaagtaagtc

SEQ ID NO: 21161 - DNA, 40 bp, Artificial Sequence
  Description of Artificial Sequence: Synthetic primer
cagactgttccaggacaggcatgttattcaaattccaacc

SEQ ID NO: 21162 - DNA, 40 bp, Artificial Sequence
  Description of Artificial Sequence: Synthetic primer
ccaatttgtcttcagagaaattattgctgatgtgaagaag

SEQ ID NO: 21163 - DNA, 40 bp, Artificial Sequence
  Description of Artificial Sequence: Synthetic primer
ccactccagccactgccgcacatggtctgtactccatagc

SEQ ID NO: 21164 - DNA, 40 bp, Artificial Sequence
  Description of Artificial Sequence: Synthetic primer
tgtttccagcacatctaggcgaatatgaatcagagaatcc

SEQ ID NO: 21165 - DNA, 40 bp, Artificial Sequence
  Description of Artificial Sequence: Synthetic primer
ggcgaagttgggagcagaggcatatccataggggaagctg

SEQ ID NO: 21166 - DNA, 40 bp, Artificial Sequence
  Description of Artificial Sequence: Synthetic primer
aggctggccaggctcaggccctggggtgaaaggagacagg

SEQ ID NO: 21167 - DNA, 40 bp, Artificial Sequence
  Description of Artificial Sequence: Synthetic primer
gttcatctaccaccccttccagagcaattacttgaattag

SEQ ID NO: 21168 - DNA, 40 bp, Artificial Sequence
  Description of Artificial Sequence: Synthetic primer
gctgggtcccagcaggaggggaccactggggctgcacacg

SEQ ID NO: 21169 - DNA, 40 bp, Artificial Sequence
  Description of Artificial Sequence: Synthetic primer
tgacacaggaaatcaatgaaggggcagtggttcattctac

SEQ ID NO: 21170 - DNA, 40 bp, Artificial Sequence
  Description of Artificial Sequence: Synthetic primer
tctgtcagattctcttgagccctgaggaaataagatgtag

SEQ ID NO: 21171 - DNA, 40 bp, Artificial Sequence
  Description of Artificial Sequence: Synthetic primer
tttgccgtaggtaagacagttcccgggcctgatcctgaat

SEQ ID NO: 21172 - DNA, 40 bp, Artificial Sequence
  Description of Artificial Sequence: Synthetic primer
tggactggctgactgagaagatgcatgccagagacttcac

SEQ ID NO: 21173 - DNA, 40 bp, Artificial Sequence
  Description of Artificial Sequence: Synthetic primer
tcacataaacacactcaagtatgagtctttcattttctga

SEQ ID NO: 21174 - DNA, 40 bp, Artificial Sequence
  Description of Artificial Sequence: Synthetic primer
agatataaaactatggtaaataaaacatttcagccaagac

SEQ ID NO: 21175 - DNA, 40 bp, Artificial Sequence
  Description of Artificial Sequence: Synthetic primer
tcctgggctgtgaccggcattcttcctccccactgtctgc

SEQ ID NO: 21176 - DNA, 40 bp, Artificial Sequence
  Description of Artificial Sequence: Synthetic primer
tgaacgtctttcttctgaggctgagcgtggagctctcttc

SEQ ID NO: 21177 - DNA, 40 bp, Artificial Sequence
  Description of Artificial Sequence: Synthetic primer
tctcagctggagaagcttgcaacaggctgtgcccaatatg

SEQ ID NO: 21178 - DNA, 40 bp, Artificial Sequence
  Description of Artificial Sequence: Synthetic primer
gtcttctgtggctgagcttgggtactgattgtctttctcc

SEQ ID NO: 21179 - DNA, 40 bp, Artificial Sequence
  Description of Artificial Sequence: Synthetic primer
gtcatcatgacctggccccagccctagatactggcactac

SEQ ID NO: 21180 - DNA, 40 bp, Artificial Sequence
  Description of Artificial Sequence: Synthetic primer
ccctcgcctgccagtgctgctgcaggagacgagacgatcc

SEQ ID NO: 21181 - DNA, 40 bp, Artificial Sequence
  Description of Artificial Sequence: Synthetic primer
agatctgtgactgcactggagggcctcgatctttagtgtc

SEQ ID NO: 21182 - DNA, 40 bp, Artificial Sequence
  Description of Artificial Sequence: Synthetic primer
ggctacggaggagaccgaggtggctatggaggcaaaatgg

SEQ ID NO: 21183 - DNA, 40 bp, Artificial Sequence
  Description of Artificial Sequence: Synthetic primer
ccacaagctcacagagcgtgagtgggcagaagagtggaag

SEQ ID NO: 21184 - DNA, 40 bp, Artificial Sequence
  Description of Artificial Sequence: Synthetic primer
aacctacaaagtgttaaaaacaaacaattaaaacagcaag

SEQ ID NO: 21185 - DNA, 40 bp, Artificial Sequence
  Description of Artificial Sequence: Synthetic primer
agtccattcatgatgttaactacaacaacggaatggaaac

SEQ ID NO: 21186 - DNA, 40 bp, Artificial Sequence
  Description of Artificial Sequence: Synthetic primer
cgcagttccgctggaggaccttcatggcggtaagctgctg

SEQ ID NO: 21187 - DNA, 40 bp, Artificial Sequence
  Description of Artificial Sequence: Synthetic primer
aatgtcatcattgaccttctggccaccaccaatttcttcg

SEQ ID NO: 21188 - DNA, 40 bp, Artificial Sequence
  Description of Artificial Sequence: Synthetic primer
gcagcgagaggcccctgacgctcttccacaccgttcagtc

SEQ ID NO: 21189 - DNA, 40 bp, Artificial Sequence
  Description of Artificial Sequence: Synthetic primer
tattttaaaacatagacttaaaaaatcatattagcttctc

SEQ ID NO: 21190 - DNA, 40 bp, Artificial Sequence
  Description of Artificial Sequence: Synthetic primer
cagtgtgcctcgttaggctgccttctccggaacctgattg

SEQ ID NO: 21191 - DNA, 40 bp, Artificial Sequence
  Description of Artificial Sequence: Synthetic primer
tgggcagcaattctttgatgtattactacaatgggaaaac

SEQ ID NO: 21192 - DNA, 40 bp, Artificial Sequence
  Description of Artificial Sequence: Synthetic primer
gaacaaaattctgttaccctggaagtcctgcttgtgaaag

SEQ ID NO: 21193 - DNA, 40 bp, Artificial Sequence
  Description of Artificial Sequence: Synthetic primer
ttggggggatcttccaggagaatggatagagacacctagc

SEQ ID NO: 21194 - DNA, 40 bp, Artificial Sequence
  Description of Artificial Sequence: Synthetic primer
tatgagaatcgtttttacagagtgagttctcttttgaatg

SEQ ID NO: 21195 - DNA, 40 bp, Artificial Sequence
  Description of Artificial Sequence: Synthetic primer
gcgcctgcgccgccggggccgctgcaaggggaggagagag

SEQ ID NO: 21196 - DNA, 40 bp, Artificial Sequence
  Description of Artificial Sequence: Synthetic primer
ggagtgagagctcgggtgctgagtattgggagcgggaagg

SEQ ID NO: 21197 - DNA, 40 bp, Artificial Sequence
  Description of Artificial Sequence: Synthetic primer
gtttaactgccttgccagacgaattctctccagctgtttc

SEQ ID NO: 21198 - DNA, 40 bp, Artificial Sequence
  Description of Artificial Sequence: Synthetic primer
cgcagtccataccagatagcagctaccccatggaccacag

SEQ ID NO: 21199 - DNA, 40 bp, Artificial Sequence
  Description of Artificial Sequence: Synthetic primer
gcatttctctggaatcccggcccatcggaagttgagacac

SEQ ID NO: 21200 - DNA, 40 bp, Artificial Sequence
  Description of Artificial Sequence: Synthetic primer
cttggcttccttgaaatcggatagatggcctcagtgaaac

SEQ ID NO: 21201 - DNA, 40 bp, Artificial Sequence
  Description of Artificial Sequence: Synthetic primer
ttacagtttaacccacctctgggccaaagagaagaatatg

SEQ ID NO: 21202 - DNA, 40 bp, Artificial Sequence
  Description of Artificial Sequence: Synthetic primer
ctcctgtggctgcagcagtttgacaccgagtactcattcc

SEQ ID NO: 21203 - DNA, 40 bp, Artificial Sequence
  Description of Artificial Sequence: Synthetic primer
ccagaacattgaatatgagtaccaaaaccccagaagaagc

SEQ ID NO: 21204 - DNA, 40 bp, Artificial Sequence
  Description of Artificial Sequence: Synthetic primer
gacttgcggtgggtttgtgaagacagtgatggtcagagtg

SEQ ID NO: 21205 - DNA, 40 bp, Artificial Sequence
  Description of Artificial Sequence: Synthetic primer
ccgaaatcaccaccagatggcagcatggaaagcagttcag

SEQ ID NO: 21206 - DNA, 40 bp, Artificial Sequence
  Description of Artificial Sequence: Synthetic primer
acacacggcgcaggtgtccaggagcgaggctggcggtcca

SEQ ID NO: 21207 - DNA, 40 bp, Artificial Sequence
  Description of Artificial Sequence: Synthetic primer
gtacaatgctggaacaactagtgtttgtatttttggaatc

SEQ ID NO: 21208 - DNA, 40 bp, Artificial Sequence
  Description of Artificial Sequence: Synthetic primer
gggataattactcttgacaattgttccaatgatttgcatc

SEQ ID NO: 21209 - DNA, 40 bp, Artificial Sequence
  Description of Artificial Sequence: Synthetic primer
atggtctttgtcccattccacggccaccttgtccccactg

SEQ ID NO: 21210 - DNA, 40 bp, Artificial Sequence
  Description of Artificial Sequence: Synthetic primer
tcaggagctgacccaagacgttctgggaaaactcatccag

SEQ ID NO: 21211 - DNA, 40 bp, Artificial Sequence
  Description of Artificial Sequence: Synthetic primer
atatcccttccaggcagggcggctccagtgcagatttaag

SEQ ID NO: 21212 - DNA, 40 bp, Artificial Sequence
  Description of Artificial Sequence: Synthetic primer
caaaggcctagacactctcatgctttcaatgtggaatacg

SEQ ID NO: 21213 - DNA, 40 bp, Artificial Sequence
  Description of Artificial Sequence: Synthetic primer
agggcggaggtgacgagggcgcccgacccgggactagagg

SEQ ID NO: 21214 - DNA, 40 bp, Artificial Sequence
  Description of Artificial Sequence: Synthetic primer
cgcgcaggtcaagacctggttccaaaaccggaggaccaag

SEQ ID NO: 21215 - DNA, 40 bp, Artificial Sequence
  Description of Artificial Sequence: Synthetic primer
gctatttcagccaatctggacacttctttatactctcttc

SEQ ID NO: 21216 - DNA, 40 bp, Artificial Sequence
  Description of Artificial Sequence: Synthetic primer
acagcacatctggagacccggtggagaagaaggacgaaac

SEQ ID NO: 21217 - DNA, 40 bp, Artificial Sequence
  Description of Artificial Sequence: Synthetic primer
tctccgagagtgagtccagcttagaaatggacgacgaaag

SEQ ID NO: 21218 - DNA, 40 bp, Artificial Sequence
  Description of Artificial Sequence: Synthetic primer
ttgcttgttaactatattacttataactggctgcaccaac

SEQ ID NO: 21219 - DNA, 40 bp, Artificial Sequence
  Description of Artificial Sequence: Synthetic primer
cacgatggctctggatccttgtccccaccatgcgaccatc

SEQ ID NO: 21220 - DNA, 40 bp, Artificial Sequence
  Description of Artificial Sequence: Synthetic primer
tttctatagcaccagtgattccctccccaccccacccatc

SEQ ID NO: 21221 - DNA, 40 bp, Artificial Sequence
  Description of Artificial Sequence: Synthetic primer
tctgctgggggccacacattgagccgtccaccccctgctc

SEQ ID NO: 21222 - DNA, 40 bp, Artificial Sequence
  Description of Artificial Sequence: Synthetic primer
tcgaagggcgcgccgaggcccgcaaaggaggcgggcagag

SEQ ID NO: 21223 - DNA, 40 bp, Artificial Sequence
  Description of Artificial Sequence: Synthetic primer
gagggctagaggacagagaaagagaatagaatgaaatgac

SEQ ID NO: 21224 - DNA, 40 bp, Artificial Sequence
  Description of Artificial Sequence: Synthetic primer
gctcctccaggaaggctcacccgaggctcgcaggcactcc

SEQ ID NO: 21225 - DNA, 40 bp, Artificial Sequence
  Description of Artificial Sequence: Synthetic primer
gttcaggttctctccagggctccaggtgtgtgtttatctc

SEQ ID NO: 21226 - DNA, 40 bp, Artificial Sequence
  Description of Artificial Sequence: Synthetic primer
ttcggcttgtcccgagatgtttatgaagaggattcctacg

SEQ ID NO: 21227 - DNA, 40 bp, Artificial Sequence
  Description of Artificial Sequence: Synthetic primer
gagccctgacgctcctccgggaccggccacttcttctcag

SEQ ID NO: 21228 - DNA, 40 bp, Artificial Sequence
  Description of Artificial Sequence: Synthetic primer
gaacgttaaggattcatcagccactacctttcacatactc

SEQ ID NO: 21229 - DNA, 40 bp, Artificial Sequence
  Description of Artificial Sequence: Synthetic primer
aatttttttctgaaggctcaaaagtggtttcctaaaagtg

SEQ ID NO: 21230 - DNA, 40 bp, Artificial Sequence
  Description of Artificial Sequence: Synthetic primer
atgtctcgccgcaagcaagcgaaaccgagatccctcaaag

SEQ ID NO: 21231 - DNA, 40 bp, Artificial Sequence
  Description of Artificial Sequence: Synthetic primer
tccagcgggggccccactgcgggcgtggcggagcttcttg

SEQ ID NO: 21232 - DNA, 40 bp, Artificial Sequence
  Description of Artificial Sequence: Synthetic primer
tgcaaggcactgcaggaggagaaccgcgacctgcgcaaag

SEQ ID NO: 21233 - DNA, 40 bp, Artificial Sequence
  Description of Artificial Sequence: Synthetic primer
ctcaggccggaggccaagtggtggagaaggaaaggaaatg

SEQ ID NO: 21234 - DNA, 40 bp, Artificial Sequence
  Description of Artificial Sequence: Synthetic primer
agtgctaagaatattttcactttgctgcggattattgagg

SEQ ID NO: 21235 - DNA, 40 bp, Artificial Sequence
  Description of Artificial Sequence: Synthetic primer
tgagcagcgctgcctccggtgtcatcagaatcaatctcag

SEQ ID NO: 21236 - DNA, 40 bp, Artificial Sequence
  Description of Artificial Sequence: Synthetic primer
gctaacatttgttagttaaaaacccaagccattccttttg

SEQ ID NO: 21237 - DNA, 40 bp, Artificial Sequence
  Description of Artificial Sequence: Synthetic primer
gcagaccacatctctagccctccttgtggttcagtagagc

SEQ ID NO: 21238 - DNA, 40 bp, Artificial Sequence
  Description of Artificial Sequence: Synthetic primer
gcgcgcctcaccgcacccagctcggctcctcgccgccttc

SEQ ID NO: 21239 - DNA, 40 bp, Artificial Sequence
  Description of Artificial Sequence: Synthetic primer
tgtttgcttttcactggcataaatctgaagtggttcagtc

SEQ ID NO: 21240 - DNA, 40 bp, Artificial Sequence
  Description of Artificial Sequence: Synthetic primer
catgcagcatcaattctctctcatacttattctgagcttc

SEQ ID NO: 21241 - DNA, 40 bp, Artificial Sequence
  Description of Artificial Sequence: Synthetic primer
gcaaaggccctctgcctgcccctaacgcccaactccatgc

SEQ ID NO: 21242 - DNA, 40 bp, Artificial Sequence
  Description of Artificial Sequence: Synthetic primer
attccaaatctgggaccagtctcggcaaatattacacttc

SEQ ID NO: 21243 - DNA, 40 bp, Artificial Sequence
  Description of Artificial Sequence: Synthetic primer
gcatgttcaagagtatggctctgactgccctccacccaac

SEQ ID NO: 21244 - DNA, 40 bp, Artificial Sequence
  Description of Artificial Sequence: Synthetic primer
gcagctggaccggcaaattaaagcaattatgaaagaagtc

SEQ ID NO: 21245 - DNA, 40 bp, Artificial Sequence
  Description of Artificial Sequence: Synthetic primer
agatgtgcctaggctcggaagcacgttcagtctggatacc

SEQ ID NO: 21246 - DNA, 40 bp, Artificial Sequence
  Description of Artificial Sequence: Synthetic primer
ggcagtagcggcttctaagggcaagccctgttgctggtag

SEQ ID NO: 21247 - DNA, 40 bp, Artificial Sequence
  Description of Artificial Sequence: Synthetic primer
catttataacactaaaatgactagtaagtcagatggcaag

SEQ ID NO: 21248 - DNA, 40 bp, Artificial Sequence
  Description of Artificial Sequence: Synthetic primer
ccaagctgactcaaaaggattatggttagtcccttatttc

SEQ ID NO: 21249 - DNA, 40 bp, Artificial Sequence
  Description of Artificial Sequence: Synthetic primer
ggcctgaaggtggctctccctccccgggcccaagacgatg

SEQ ID NO: 21250 - DNA, 40 bp, Artificial Sequence
  Description of Artificial Sequence: Synthetic primer
gcgagctttgtgcgcatgtgcggggaggtgagggggcttg

SEQ ID NO: 21251 - DNA, 40 bp, Artificial Sequence
  Description of Artificial Sequence: Synthetic primer
tctatactgcccagcgcctgggattccagatctgcgtttg

SEQ ID NO: 21252 - DNA, 40 bp, Artificial Sequence
  Description of Artificial Sequence: Synthetic primer
ccgcgctcactggcggatcgtcctcagccgcacgggaagc

SEQ ID NO: 21253 - DNA, 40 bp, Artificial Sequence
  Description of Artificial Sequence: Synthetic primer
tccttatacctactggggaaagggccccaaaacatctctg

SEQ ID NO: 21254 - DNA, 40 bp, Artificial Sequence
  Description of Artificial Sequence: Synthetic primer
gttcactcagattatgtggtgtgccaaggtcaagctgctg

SEQ ID NO: 21255 - DNA, 40 bp, Artificial Sequence
  Description of Artificial Sequence: Synthetic primer
actaagatctggggaggcatatcctcggcccaccatgaag

SEQ ID NO: 21256 - DNA, 40 bp, Artificial Sequence
  Description of Artificial Sequence: Synthetic primer
ttcagggaagtgatgctggaaactttcaggaacctgacct

SEQ ID NO: 21257 - DNA, 40 bp, Artificial Sequence
  Description of Artificial Sequence: Synthetic primer
gatggagcaacatcctgacatctccctttcccaggagacc

SEQ ID NO: 21258 - DNA, 40 bp, Artificial Sequence
  Description of Artificial Sequence: Synthetic primer
ctgcagatccgcctggaaccgcctccattcctcggtctcc

SEQ ID NO: 21259 - DNA, 40 bp, Artificial Sequence
  Description of Artificial Sequence: Synthetic primer
gtgtctcaatgagaagcaccttggcagcgttcagcacttc

SEQ ID NO: 21260 - DNA, 40 bp, Artificial Sequence
  Description of Artificial Sequence: Synthetic primer
tcaggtggctcaggggtattgttaaaatgacctgaagatg

SEQ ID NO: 21261 - DNA, 40 bp, Artificial Sequence
  Description of Artificial Sequence: Synthetic primer
caggatttctgtcgcttgcttgttgaaattccgtctcttc

SEQ ID NO: 21262 - DNA, 40 bp, Artificial Sequence
  Description of Artificial Sequence: Synthetic primer
tgacataactactccaaaagctgccagaagggggagaaag

SEQ ID NO: 21263 - DNA, 40 bp, Artificial Sequence
  Description of Artificial Sequence: Synthetic primer
gggtttgccaaagcctggttagagtttaagcttattgtgg

SEQ ID NO: 21264 - DNA, 40 bp, Artificial Sequence
  Description of Artificial Sequence: Synthetic primer
catcgaaggaagagctgtctgctactttgggatagttcac

SEQ ID NO: 21265 - DNA, 40 bp, Artificial Sequence
  Description of Artificial Sequence: Synthetic primer
taactccacattgacacaaactgtgttcttaattgttttg

SEQ ID NO: 21266 - DNA, 40 bp, Artificial Sequence
  Description of Artificial Sequence: Synthetic primer
ttggggggctgacccaggctgcagagagcaagcacctgtc

SEQ ID NO: 21267 - DNA, 40 bp, Artificial Sequence
  Description of Artificial Sequence: Synthetic primer
tagtttacttaaccaatggtgcccatcataccagcatctc

SEQ ID NO: 21268 - DNA, 40 bp, Artificial Sequence
  Description of Artificial Sequence: Synthetic primer
ggacgtccggtgttgatggtggcagcggcggcagcctaag

SEQ ID NO: 21269 - DNA, 40 bp, Artificial Sequence
  Description of Artificial Sequence: Synthetic primer
gggccctggggccacaggtggaaaggaggacagtgggatg

SEQ ID NO: 21270 - DNA, 40 bp, Artificial Sequence
  Description of Artificial Sequence: Synthetic primer
tagaatctgctattgtagcaaggtataccaagtttgtgtg

SEQ ID NO: 21271 - DNA, 40 bp, Artificial Sequence
  Description of Artificial Sequence: Synthetic primer
tctccaacagctggcagtgccgggtaagcagctctcgaac

SEQ ID NO: 21272 - DNA, 40 bp, Artificial Sequence
  Description of Artificial Sequence: Synthetic primer
aactcttacttacatgtctcatcgaaactccagaacaaac

SEQ ID NO: 21273 - DNA, 40 bp, Artificial Sequence
  Description of Artificial Sequence: Synthetic primer
atattcaaaatctagtttatctgctttctttgattcttcg

SEQ ID NO: 21274 - DNA, 40 bp, Artificial Sequence
  Description of Artificial Sequence: Synthetic primer
gtgttaaacgtggcaaaaataaaccaaaatagaggaaagc

SEQ ID NO: 21275 - DNA, 40 bp, Artificial Sequence
  Description of Artificial Sequence: Synthetic primer
tggccgacttccgccccgcgcgcgctcgccccgcctctgg

SEQ ID NO: 21276 - DNA, 40 bp, Artificial Sequence
  Description of Artificial Sequence: Synthetic primer
tccagctctacgtgatttggctgcacttgaacactgattg

SEQ ID NO: 21277 - DNA, 40 bp, Artificial Sequence
  Description of Artificial Sequence: Synthetic primer
caaatgggaacatgggaagaaactttataagcaatttgag

SEQ ID NO: 21278 - DNA, 40 bp, Artificial Sequence
  Description of Artificial Sequence: Synthetic primer
caagataaactaggaatctatgtgaagtcggttgtgaaag

SEQ ID NO: 21279 - DNA, 40 bp, Artificial Sequence
  Description of Artificial Sequence: Synthetic primer
aaagaaatcgttcttttccttttcttatgttgttgaatac

SEQ ID NO: 21280 - DNA, 40 bp, Artificial Sequence
  Description of Artificial Sequence: Synthetic primer
cttcctcatactacagtaggagataccacttgggacattc

SEQ ID NO: 21281 - DNA, 40 bp, Artificial Sequence
  Description of Artificial Sequence: Synthetic primer
gactcgcagccagtcagatgtacagtccgcagggcatcag

SEQ ID NO: 21282 - DNA, 40 bp, Artificial Sequence
  Description of Artificial Sequence: Synthetic primer
ctgcacacggcagacctggagcgccacgccatcttcacag

SEQ ID NO: 21283 - DNA, 40 bp, Artificial Sequence
  Description of Artificial Sequence: Synthetic primer
ctcatgatcttcagctccgacataagggcttgcttctcac

SEQ ID NO: 21284 - DNA, 40 bp, Artificial Sequence
  Description of Artificial Sequence: Synthetic primer
gggggacaccaccaagaactcttcctactatctcaaaagc

SEQ ID NO: 21285 - DNA, 40 bp, Artificial Sequence
  Description of Artificial Sequence: Synthetic primer
tggctgggaattacctcctgtccccgaccaaccagtccag

SEQ ID NO: 21286 - DNA, 40 bp, Artificial Sequence
  Description of Artificial Sequence: Synthetic primer
gtcccaaagcactgaaacaagaaaatctataccatcatgc

SEQ ID NO: 21287 - DNA, 40 bp, Artificial Sequence
  Description of Artificial Sequence: Synthetic primer
tgcccacttcaccgggaatttggtgcctgtggaactggtg

SEQ ID NO: 21288 - DNA, 40 bp, Artificial Sequence
  Description of Artificial Sequence: Synthetic primer
tggaatccgggggagccagcagggccttgttcacctctct

SEQ ID NO: 21289 - DNA, 40 bp, Artificial Sequence
  Description of Artificial Sequence: Synthetic primer
tccagaacttgccagtaagacaaaggcagtgtttccaatg

SEQ ID NO: 21290 - DNA, 40 bp, Artificial Sequence
  Description of Artificial Sequence: Synthetic primer
aactgaagaaattctgcaacaagactagccactaaacgac

SEQ ID NO: 21291 - DNA, 40 bp, Artificial Sequence
  Description of Artificial Sequence: Synthetic primer
aataggaatgattcttcttcttccactgcttaggaacagc

SEQ ID NO: 21292 - DNA, 40 bp, Artificial Sequence
  Description of Artificial Sequence: Synthetic primer
ggaaggaatgaacatggtaattggccgaccgcgcataaac

SEQ ID NO: 21293 - DNA, 40 bp, Artificial Sequence
  Description of Artificial Sequence: Synthetic primer
agcgtggagcagtcctcccagaaggagtgtgggcaacctg

SEQ ID NO: 21294 - DNA, 40 bp, Artificial Sequence
  Description of Artificial Sequence: Synthetic primer
agatacgagagagcaatttatgcagctttaagtgggaatc

SEQ ID NO: 21295 - DNA, 40 bp, Artificial Sequence
  Description of Artificial Sequence: Synthetic primer
cgagtggaagctccaccgggcgggcggggaggcgggttgc

SEQ ID NO: 21296 - DNA, 40 bp, Artificial Sequence
  Description of Artificial Sequence: Synthetic primer
atggaatgccagcaaatactccaggaccaacctgactttc

SEQ ID NO: 21297 - DNA, 40 bp, Artificial Sequence
  Description of Artificial Sequence: Synthetic primer
atatggaggctccaatgtgaaacccggggtccttctgttc

SEQ ID NO: 21298 - DNA, 40 bp, Artificial Sequence
  Description of Artificial Sequence: Synthetic primer
ctgatgaagactcctatcagaagtttattcccttcattgg

SEQ ID NO: 21299 - DNA, 40 bp, Artificial Sequence
  Description of Artificial Sequence: Synthetic primer
attggctgcaaccccttccccctcttatcacttatcattc

SEQ ID NO: 21300 - DNA, 40 bp, Artificial Sequence
  Description of Artificial Sequence: Synthetic primer
gactgccttacaccatggacgcgttcatgcttggcatggg

SEQ ID NO: 21301 - DNA, 40 bp, Artificial Sequence
  Description of Artificial Sequence: Synthetic primer
gcgttccagagccgatcgtggaatgggtgctttgcgattc

SEQ ID NO: 21302 - DNA, 40 bp, Artificial Sequence
  Description of Artificial Sequence: Synthetic primer
gttccagatttttcaggtgggtgggggagctattttagtc

SEQ ID NO: 21303 - DNA, 40 bp, Artificial Sequence
  Description of Artificial Sequence: Synthetic primer
aatgtgtagcttcaaaactacaggttctaccccagaaagc

SEQ ID NO: 21304 - DNA, 40 bp, Artificial Sequence
  Description of Artificial Sequence: Synthetic primer
aacagaagtttgtggccctcctgaagcggtttaaagtttc

SEQ ID NO: 21305 - DNA, 40 bp, Artificial Sequence
  Description of Artificial Sequence: Synthetic primer
ttgtcttacacccattccacaatcttaatacatattcctg

SEQ ID NO: 21306 - DNA, 40 bp, Artificial Sequence
  Description of Artificial Sequence: Synthetic primer
cggggggtggctgcagcggagcgagccccggcaaagcccc

SEQ ID NO: 21307 - DNA, 40 bp, Artificial Sequence
  Description of Artificial Sequence: Synthetic primer
taaggggtggcatgttaagttagatattgaaaatgcactg

SEQ ID NO: 21308 - DNA, 40 bp, Artificial Sequence
  Description of Artificial Sequence: Synthetic primer
gacctgtgtgtagatatttcaaaaggctgtgtctacttgg

SEQ ID NO: 21309 - DNA, 40 bp, Artificial Sequence
  Description of Artificial Sequence: Synthetic primer
cagggtgtgagggaaggggaacaacaaaaccgaacacatc

SEQ ID NO: 21310 - DNA, 40 bp, Artificial Sequence
  Description of Artificial Sequence: Synthetic primer
ctccaaatcagagtcttttagtccttcctgatagtgacag

SEQ ID NO: 21311 - DNA, 40 bp, Artificial Sequence
  Description of Artificial Sequence: Synthetic primer
ttcttcctcgaataaaatacaaagaattagttccaataag

SEQ ID NO: 21312 - DNA, 40 bp, Artificial Sequence
  Description of Artificial Sequence: Synthetic primer
gcttgacaaggctgtatcagagcgtattgtccatgactac

SEQ ID NO: 21313 - DNA, 40 bp, Artificial Sequence
  Description of Artificial Sequence: Synthetic primer
acgccccccaccccaaatttattgtgctctacccaaaatg

SEQ ID NO: 21314 - DNA, 40 bp, Artificial Sequence
  Description of Artificial Sequence: Synthetic primer
ctggttttccatttttctaaagtaaggtcttcttaatgtg

SEQ ID NO: 21315 - DNA, 40 bp, Artificial Sequence
  Description of Artificial Sequence: Synthetic primer
ctgcgcgccgcgccctgcaacgacctgcacgccaccaagc

SEQ ID NO: 21316 - DNA, 40 bp, Artificial Sequence
  Description of Artificial Sequence: Synthetic primer
ttttgttaactgatttgcaataaaaatgatactgatggtg

SEQ ID NO: 21317 - DNA, 40 bp, Artificial Sequence
  Description of Artificial Sequence: Synthetic primer
ctgctccttcgcacacagcccggaggagagggacatgtgg

SEQ ID NO: 21318 - DNA, 40 bp, Artificial Sequence
  Description of Artificial Sequence: Synthetic primer
tatcatatagttcaaaagtttcttatcctgggagacattg

SEQ ID NO: 21319 - DNA, 40 bp, Artificial Sequence
  Description of Artificial Sequence: Synthetic primer
ttttttaaagaatgtaatttttgacagtctgaaaagacag

SEQ ID NO: 21320 - DNA, 40 bp, Artificial Sequence
  Description of Artificial Sequence: Synthetic primer
ggaggatcactcaaagtaagcgaccacttacaaccttcag

SEQ ID NO: 21321 - DNA, 40 bp, Artificial Sequence
  Description of Artificial Sequence: Synthetic primer
ggccaaggttggcccgctcacccagcccccggttctcctc

SEQ ID NO: 21322 - DNA, 40 bp, Artificial Sequence
  Description of Artificial Sequence: Synthetic primer
ccaggcagtaatgttcccgaagttttctcttcgttctatg

SEQ ID NO: 21323 - DNA, 40 bp, Artificial Sequence
  Description of Artificial Sequence: Synthetic primer
tgtgtgcagaaggaggtcctgccgtccatgcggaagatcg

SEQ ID NO: 21324 - DNA, 40 bp, Artificial Sequence
  Description of Artificial Sequence: Synthetic primer
ataacagtttgtctgagctgagaaggctggtacccagtgc

SEQ ID NO: 21325 - DNA, 40 bp, Artificial Sequence
  Description of Artificial Sequence: Synthetic primer
ccttcctccggagaagctgccctatttagtagagttaagc

SEQ ID NO: 21326 - DNA, 40 bp, Artificial Sequence
  Description of Artificial Sequence: Synthetic primer
tccagaagtggatactggagagcaaggggcttggagtcag

SEQ ID NO: 21327 - DNA, 40 bp, Artificial Sequence
  Description of Artificial Sequence: Synthetic primer
atgtgctgctgccactgcttcttgctgttgctgttcttgc

SEQ ID NO: 21328 - DNA, 40 bp, Artificial Sequence
  Description of Artificial Sequence: Synthetic primer
aaatctaagagcctcgccaagctcaagaacaagcatgagg

SEQ ID NO: 21329 - DNA, 40 bp, Artificial Sequence
  Description of Artificial Sequence: Synthetic primer
ctggactgttccacccagaggagcaaggctgtacaatgag

SEQ ID NO: 21330 - DNA, 40 bp, Artificial Sequence
  Description of Artificial Sequence: Synthetic primer
tttcctcctatttttgccactcccatatacaccaatgtcg

SEQ ID NO: 21331 - DNA, 40 bp, Artificial Sequence
  Description of Artificial Sequence: Synthetic primer
gggcaatttctatatcaggacagcaactgggccagcaaag

SEQ ID NO: 21332 - DNA, 40 bp, Artificial Sequence
  Description of Artificial Sequence: Synthetic primer
attaggtagtaaaaaatgtagggttatttaccataacctg

SEQ ID NO: 21333 - DNA, 40 bp, Artificial Sequence
  Description of Artificial Sequence: Synthetic primer
ctaaaaaagcagaatggaatgggccttagcattgttgcag

SEQ ID NO: 21334 - DNA, 40 bp, Artificial Sequence
  Description of Artificial Sequence: Synthetic primer
tgtccagcactgtgcagggcagcaacatctttgagagaac

SEQ ID NO: 21335 - DNA, 40 bp, Artificial Sequence
  Description of Artificial Sequence: Synthetic primer
tatcaaagtgatttcactgccctcagtggccaccgtgata

SEQ ID NO: 21336 - DNA, 40 bp, Artificial Sequence
  Description of Artificial Sequence: Synthetic primer
ttcttcttcctccttcgagttctttttaggttggtacttc

SEQ ID NO: 21337 - DNA, 40 bp, Artificial Sequence
  Description of Artificial Sequence: Synthetic primer
gaaatgtatgggctagattcattacttcattcatcttttc

SEQ ID NO: 21338 - DNA, 40 bp, Artificial Sequence
  Description of Artificial Sequence: Synthetic primer
gcccccttgtttagacagtcaagttcttcattgggttctg

SEQ ID NO: 21339 - DNA, 40 bp, Artificial Sequence
  Description of Artificial Sequence: Synthetic primer
gggaggcgccacccgtcatgcaggagacagtgtgagagtc

SEQ ID NO: 21340 - DNA, 40 bp, Artificial Sequence
  Description of Artificial Sequence: Synthetic primer
atggcagctgcacggagagacagcatcattactacctcag

SEQ ID NO: 21341 - DNA, 40 bp, Artificial Sequence
  Description of Artificial Sequence: Synthetic primer
ctgtcgccttcattgctaacgagggacatggctcgcatcc

SEQ ID NO: 21342 - DNA, 40 bp, Artificial Sequence
  Description of Artificial Sequence: Synthetic primer
actttgccaaagtcaagctggctcggcacatcctcactgg

SEQ ID NO: 21343 - DNA, 40 bp, Artificial Sequence
  Description of Artificial Sequence: Synthetic primer
cttagcaaataaatgtggtggtgtatcaaaatgtccatcc

SEQ ID NO: 21344 - DNA, 40 bp, Artificial Sequence
  Description of Artificial Sequence: Synthetic primer
attcagtccctgtcaggacgccctcgatcctgtgatgttg

SEQ ID NO: 21345 - DNA, 40 bp, Artificial Sequence
  Description of Artificial Sequence: Synthetic primer
gatgtacgtgtgactccgctgccttcactggcctcacctg

SEQ ID NO: 21346 - DNA, 40 bp, Artificial Sequence
  Description of Artificial Sequence: Synthetic primer
tattccggatagtggatcccaacggactggctcgactgtg

SEQ ID NO: 21347 - DNA, 40 bp, Artificial Sequence
  Description of Artificial Sequence: Synthetic primer
tagaatggccaatgcccttctagtatgtttggtgaaggtc

SEQ ID NO: 21348 - DNA, 40 bp, Artificial Sequence
  Description of Artificial Sequence: Synthetic primer
aacaggtcccttatcttatccaaatatatttcaaaatatg

SEQ ID NO: 21349 - DNA, 40 bp, Artificial Sequence
  Description of Artificial Sequence: Synthetic primer
ggttccaaagtgcacattttgatggaggaaagtggaaagg

SEQ ID NO: 21350 - DNA, 40 bp, Artificial Sequence
  Description of Artificial Sequence: Synthetic primer
agcagcctttaagctccctcccttagaagcttttgttgtc

SEQ ID NO: 21351 - DNA, 40 bp, Artificial Sequence
  Description of Artificial Sequence: Synthetic primer
aatgggagtcagttgtgtttatgcctctggtaaagtgctg

SEQ ID NO: 21352 - DNA, 40 bp, Artificial Sequence
  Description of Artificial Sequence: Synthetic primer
aacaatgtgagatgtctccagcatttttacggacccaatc

SEQ ID NO: 21353 - DNA, 40 bp, Artificial Sequence
  Description of Artificial Sequence: Synthetic primer
ctgtggcgatggggcaaagatcgtgggttctgaggaagtg

SEQ ID NO: 21354 - DNA, 40 bp, Artificial Sequence
  Description of Artificial Sequence: Synthetic primer
acaacacgtcaggagcagaaagcttccagaaggggacagc

SEQ ID NO: 21355 - DNA, 40 bp, Artificial Sequence
  Description of Artificial Sequence: Synthetic primer
tcactttgatcagagttatctgttccttgtgctttggaag

SEQ ID NO: 21356 - DNA, 40 bp, Artificial Sequence
  Description of Artificial Sequence: Synthetic primer
tgatagtctactgaatgtaaaatataatgcttggtatatg

SEQ ID NO: 21357 - DNA, 40 bp, Artificial Sequence
  Description of Artificial Sequence: Synthetic primer
ggccccctccccagctgtgtgtccccaggctcactataac

SEQ ID NO: 21358 - DNA, 40 bp, Artificial Sequence
  Description of Artificial Sequence: Synthetic primer
caggggtcacttctttctcttcctcctcgtcctcggtctc

SEQ ID NO: 21359 - DNA, 40 bp, Artificial Sequence
  Description of Artificial Sequence: Synthetic primer
tgctcaaaatctttgtggtagtttccttagtttttgtaac

SEQ ID NO: 21360 - DNA, 40 bp, Artificial Sequence
  Description of Artificial Sequence: Synthetic primer
caaaagtacagcagccacccaaccaaccagtcccagcttc

SEQ ID NO: 21361 - DNA, 40 bp, Artificial Sequence
  Description of Artificial Sequence: Synthetic primer
gtgcctccaaagttggcatcagtgcctgtcgtagttcttc

SEQ ID NO: 21362 - DNA, 40 bp, Artificial Sequence
  Description of Artificial Sequence: Synthetic primer
cagtttataaagccaagaattgctatgatttaagactaag

SEQ ID NO: 21363 - DNA, 40 bp, Artificial Sequence
  Description of Artificial Sequence: Synthetic primer
gcaccaggggggccagggagaccacgaggaccagagggac

SEQ ID NO: 21364 - DNA, 40 bp, Artificial Sequence
  Description of Artificial Sequence: Synthetic primer
gccggaagcgcatgggcattggcagatccatgctagttgc

SEQ ID NO: 21365 - DNA, 40 bp, Artificial Sequence
  Description of Artificial Sequence: Synthetic primer
aaaggatcttgcattcgccaatgaatttgctcacagcttc

SEQ ID NO: 21366 - DNA, 40 bp, Artificial Sequence
  Description of Artificial Sequence: Synthetic primer
atgataagtactacatacctcatctcttgggttattattg

SEQ ID NO: 21367 - DNA, 40 bp, Artificial Sequence
  Description of Artificial Sequence: Synthetic primer
aagttatttaactgcttggcaacatcggggtgatccttcc

SEQ ID NO: 21368 - DNA, 40 bp, Artificial Sequence
  Description of Artificial Sequence: Synthetic primer
cctgggacttttggagctcatggtagagtggtataagagc

SEQ ID NO: 21369 - DNA, 40 bp, Artificial Sequence
  Description of Artificial Sequence: Synthetic primer
gggtcttggcatggcctaggagagtttgatggtggtgttg

SEQ ID NO: 21370 - DNA, 40 bp, Artificial Sequence
  Description of Artificial Sequence: Synthetic primer
ggctgactctgaccaagccagcaaggtgcagcagcagaag

SEQ ID NO: 21371 - DNA, 40 bp, Artificial Sequence
  Description of Artificial Sequence: Synthetic primer
gagtgatattgaccatgatggaatgcttgacagagatgag

SEQ ID NO: 21372 - DNA, 40 bp, Artificial Sequence
  Description of Artificial Sequence: Synthetic primer
cagggagcatcaagagagacaccttgagcagagagatgag

SEQ ID NO: 21373 - DNA, 40 bp, Artificial Sequence
  Description of Artificial Sequence: Synthetic primer
caaagagtcagagagagatggaagagaaatatattgttag

SEQ ID NO: 21374 - DNA, 40 bp, Artificial Sequence
  Description of Artificial Sequence: Synthetic primer
ctccttcagctgaatcatttccagagagagtgctttggac

SEQ ID NO: 21375 - DNA, 40 bp, Artificial Sequence
  Description of Artificial Sequence: Synthetic primer
ctggggagtggtgctcggcacgtacccgtgtggtgatacg

SEQ ID NO: 21376 - DNA, 40 bp, Artificial Sequence
  Description of Artificial Sequence: Synthetic primer
cacacctaatgtccacatggtcagcaccaccctgcctgtg

SEQ ID NO: 21377 - DNA, 40 bp, Artificial Sequence
  Description of Artificial Sequence: Synthetic primer
ttgtcccgctgggaccagatggagcccaggcagtggtagg

SEQ ID NO: 21378 - DNA, 40 bp, Artificial Sequence
  Description of Artificial Sequence: Synthetic primer
cctcagacccactgtatttccctttgcctttgctcatttc

SEQ ID NO: 21379 - DNA, 40 bp, Artificial Sequence
  Description of Artificial Sequence: Synthetic primer
gggcccagctaccgggcccgcgggcgggggaggatgcctc

SEQ ID NO: 21380 - DNA, 40 bp, Artificial Sequence
  Description of Artificial Sequence: Synthetic primer
aaaacaaactgccatactggaacatttttcttttaaactg

SEQ ID NO: 21381 - DNA, 40 bp, Artificial Sequence
  Description of Artificial Sequence: Synthetic primer
tcacggggcccaccctgggcaaggcggtaccagttacatc

SEQ ID NO: 21382 - DNA, 40 bp, Artificial Sequence
  Description of Artificial Sequence: Synthetic primer
gtggcccaaaggcacattgtcttgaaaccgccaaccattg

SEQ ID NO: 21383 - DNA, 40 bp, Artificial Sequence
  Description of Artificial Sequence: Synthetic primer
ccaggccgggccacagcaataggaaagccagggccagagc

SEQ ID NO: 21384 - DNA, 40 bp, Artificial Sequence
  Description of Artificial Sequence: Synthetic primer
tccccgcactacaggcccagtgagaaggcggtcaaacatc

SEQ ID NO: 21385 - DNA, 40 bp, Artificial Sequence
  Description of Artificial Sequence: Synthetic primer
tgaaataagttttgacctagacacaaggggtatatgaagg

SEQ ID NO: 21386 - DNA, 40 bp, Artificial Sequence
  Description of Artificial Sequence: Synthetic primer
ttgttgaccgtggttcttaaaggcagggtctgcatcagtg

SEQ ID NO: 21387 - DNA, 40 bp, Artificial Sequence
  Description of Artificial Sequence: Synthetic primer
tttagaaacactaaaaaaaggtgtttcatttataaatacg

SEQ ID NO: 21388 - DNA, 40 bp, Artificial Sequence
  Description of Artificial Sequence: Synthetic primer
aaagcacatgtgctccagtgagtcttcgtcactctgtctg

SEQ ID NO: 21389 - DNA, 40 bp, Artificial Sequence
  Description of Artificial Sequence: Synthetic primer
ccggcgcgacctggagattgagcgaccaatgccgggaacc

SEQ ID NO: 21390 - DNA, 40 bp, Artificial Sequence
  Description of Artificial Sequence: Synthetic primer
agggcaggcctggctcagccccagcccctccatcttccag

SEQ ID NO: 21391 - DNA, 40 bp, Artificial Sequence
  Description of Artificial Sequence: Synthetic primer
agaagcacagcaggaaggtcacgcacaggggcagcaggtc

SEQ ID NO: 21392 - DNA, 40 bp, Artificial Sequence
  Description of Artificial Sequence: Synthetic primer
ccacgggcaacagcaacctgggcggcaagataccctggag

SEQ ID NO: 21393 - DNA, 40 bp, Artificial Sequence
  Description of Artificial Sequence: Synthetic primer
acgttctcttctccgacctcatagagctgatgcagaccag

SEQ ID NO: 21394 - DNA, 40 bp, Artificial Sequence
  Description of Artificial Sequence: Synthetic primer
caggaacttgccacaagccaacgggagcttcaggttctgc

SEQ ID NO: 21395 - DNA, 40 bp, Artificial Sequence
  Description of Artificial Sequence: Synthetic primer
gcagatgcacgaggagctcctgaaggtgaccaatgagctc

SEQ ID NO: 21396 - DNA, 40 bp, Artificial Sequence
  Description of Artificial Sequence: Synthetic primer
cagctcgctgctcgctctcccgagccgcctcctcctccac

SEQ ID NO: 21397 - DNA, 40 bp, Artificial Sequence
  Description of Artificial Sequence: Synthetic primer
aggaagcctctttcaattcctcctgggtgtcttgatttcc

SEQ ID NO: 21398 - DNA, 40 bp, Artificial Sequence
  Description of Artificial Sequence: Synthetic primer
atacccagcgccgtacgtccatgggtgggacacagcagca

SEQ ID NO: 21399 - DNA, 40 bp, Artificial Sequence
  Description of Artificial Sequence: Synthetic primer
gcaccaggtgggcctgggggtccggggcgaccatcttgac

SEQ ID NO: 21400 - DNA, 40 bp, Artificial Sequence
  Description of Artificial Sequence: Synthetic primer
aatttttgaaggtaatttagttttgtggctgggcattcag

SEQ ID NO: 21401 - DNA, 40 bp, Artificial Sequence
  Description of Artificial Sequence: Synthetic primer
ccatgccgcagcaggcagccccggcgatgaagtcctcgcc

SEQ ID NO: 21402 - DNA, 40 bp, Artificial Sequence
  Description of Artificial Sequence: Synthetic primer
tacttttcaattaaatctaccaattagaaatattacaaat

SEQ ID NO: 21403 - DNA, 40 bp, Artificial Sequence
  Description of Artificial Sequence: Synthetic primer
tgaccgccagctggacgaggctggagaaagtgacgtgaac

SEQ ID NO: 21404 - DNA, 40 bp, Artificial Sequence
  Description of Artificial Sequence: Synthetic primer
ttttttaagcaagggctctattttcccttgagagttctgg

SEQ ID NO: 21405 - DNA, 40 bp, Artificial Sequence
  Description of Artificial Sequence: Synthetic primer
gctatgccaggctctggacagaaatccccacaaagatcac

SEQ ID NO: 21406 - DNA, 40 bp, Artificial Sequence
  Description of Artificial Sequence: Synthetic primer
gaggtgcctccagagaatgtctgctccttggcctcatctc

SEQ ID NO: 21407 - DNA, 40 bp, Artificial Sequence
  Description of Artificial Sequence: Synthetic primer
ttgcagctgcggtctgagcagcaaaaagcaactgagaaag

SEQ ID NO: 21408 - DNA, 40 bp, Artificial Sequence
  Description of Artificial Sequence: Synthetic primer
tttttttaaaaatccatttaccctacaggtttgcatttgt

SEQ ID NO: 21409 - DNA, 40 bp, Artificial Sequence
  Description of Artificial Sequence: Synthetic primer
ccttcgtaagtgtgatagttgtagtaggcaaagtgattcc

SEQ ID NO: 21410 - DNA, 40 bp, Artificial Sequence
  Description of Artificial Sequence: Synthetic primer
ctacttacccttctcctgtccacaataaagttgagaaaac

SEQ ID NO: 21411 - DNA, 40 bp, Artificial Sequence
  Description of Artificial Sequence: Synthetic primer
agctacaggcagggctggctgatagggagtatgggagaag

SEQ ID NO: 21412 - DNA, 40 bp, Artificial Sequence
  Description of Artificial Sequence: Synthetic primer
cgcttggcaccccctttccccaggcccttacctcctttgc

SEQ ID NO: 21413 - DNA, 40 bp, Artificial Sequence
  Description of Artificial Sequence: Synthetic primer
gaggccaacacaacgacaactgcaactacgatggctacgc

SEQ ID NO: 21414 - DNA, 40 bp, Artificial Sequence
  Description of Artificial Sequence: Synthetic primer
cccagaaatatatgtacagtactcagaatttaagggaatg

SEQ ID NO: 21415 - DNA, 40 bp, Artificial Sequence
  Description of Artificial Sequence: Synthetic primer
tcctccacgctgctggctgcagtcgtcggcggcgctacag

SEQ ID NO: 21416 - DNA, 40 bp, Artificial Sequence
  Description of Artificial Sequence: Synthetic primer
gaggggagagggaacggaaataaaggagttatttgtaatg

SEQ ID NO: 21417 - DNA, 40 bp, Artificial Sequence
  Description of Artificial Sequence: Synthetic primer
tcacaaccgacttcacatagattcctagtttatcttgacc

SEQ ID NO: 21418 - DNA, 40 bp, Artificial Sequence
  Description of Artificial Sequence: Synthetic primer
caagcgcttcaatgatccagatatagagttgttgctagtg

SEQ ID NO: 21419 - DNA, 40 bp, Artificial Sequence
  Description of Artificial Sequence: Synthetic primer
aggcaaagccccacgggcccttcttcctgggcagggttgg

SEQ ID NO: 21420 - DNA, 40 bp, Artificial Sequence
  Description of Artificial Sequence: Synthetic primer
agcaaaatcactgaacatgccacttcctgcctccgtctgc

SEQ ID NO: 21421 - DNA, 40 bp, Artificial Sequence
  Description of Artificial Sequence: Synthetic primer
tttgagaagccttccgctattcagcagagagctattattc

SEQ ID NO: 21422 - DNA, 40 bp, Artificial Sequence
  Description of Artificial Sequence: Synthetic primer
tttgcttaggttggtgataatattcttctcttcattagtc

SEQ ID NO: 21423 - DNA, 40 bp, Artificial Sequence
  Description of Artificial Sequence: Synthetic primer
atgctcagtatcaagctaccttgcaaaatcaagcaaagac

SEQ ID NO: 21424 - DNA, 40 bp, Artificial Sequence
  Description of Artificial Sequence: Synthetic primer
tagggtctgtgaacgaggcctgtctcttccctggggtttc

SEQ ID NO: 21425 - DNA, 40 bp, Artificial Sequence
  Description of Artificial Sequence: Synthetic primer
ctcaaggaactaaataaaaagaggaaggcaccgaggtaag

SEQ ID NO: 21426 - DNA, 40 bp, Artificial Sequence
  Description of Artificial Sequence: Synthetic primer
acagaagtttaatttcttcttcatatttgtcctccttttc

SEQ ID NO: 21427 - DNA, 40 bp, Artificial Sequence
  Description of Artificial Sequence: Synthetic primer
ggcgcccaaagggggactggcctctccctccaggaaactg

SEQ ID NO: 21428 - DNA, 40 bp, Artificial Sequence
  Description of Artificial Sequence: Synthetic primer
tccaccaccctctaggcattaagccgttctatgtatttcc

SEQ ID NO: 21429 - DNA, 40 bp, Artificial Sequence
  Description of Artificial Sequence: Synthetic primer
gggccccctggtcctcgcggtcgcactggtgatgctggtc

SEQ ID NO: 21430 - DNA, 40 bp, Artificial Sequence
  Description of Artificial Sequence: Synthetic primer
agcggtgaggtcgatgccacgtcagaccaggaagagtcag

SEQ ID NO: 21431 - DNA, 40 bp, Artificial Sequence
  Description of Artificial Sequence: Synthetic primer
actgccttctttggaaagggctggttccctgtaggtggtg

SEQ ID NO: 21432 - DNA, 40 bp, Artificial Sequence
  Description of Artificial Sequence: Synthetic primer
tctcaacttggagcacagaaacacagtggcccccgacagc

SEQ ID NO: 21433 - DNA, 40 bp, Artificial Sequence
  Description of Artificial Sequence: Synthetic primer
tatcaaattaagttccttttcatcacaccaatctatcagg

SEQ ID NO: 21434 - DNA, 40 bp, Artificial Sequence
  Description of Artificial Sequence: Synthetic primer
caatgggaacgccagtatcaacatcacggacatctcaagg

SEQ ID NO: 21435 - DNA, 40 bp, Artificial Sequence
  Description of Artificial Sequence: Synthetic primer
gtgctgccacctcctgcgtggggttctttatgccttactg

SEQ ID NO: 21436 - DNA, 40 bp, Artificial Sequence
  Description of Artificial Sequence: Synthetic primer
ttagtggcattaagtatagttggttccacagtgtctgaag

SEQ ID NO: 21437 - DNA, 40 bp, Artificial Sequence
  Description of Artificial Sequence: Synthetic primer
ggcgtgctccgtgtaggtcacggcgtcccggatcacgttc

SEQ ID NO: 21438 - DNA, 40 bp, Artificial Sequence
  Description of Artificial Sequence: Synthetic primer
caatgctttcttgtctttagactcaaatgcttagggaacg

SEQ ID NO: 21439 - DNA, 40 bp, Artificial Sequence
  Description of Artificial Sequence: Synthetic primer
gatgcttgtccatagccttggctgcctggatttccatagg

SEQ ID NO: 21440 - DNA, 40 bp, Artificial Sequence
  Description of Artificial Sequence: Synthetic primer
gcaggctcttggtgctaactatggagaaaagtgcctctac

SEQ ID NO: 21441 - DNA, 40 bp, Artificial Sequence
  Description of Artificial Sequence: Synthetic primer
ggagcagccggcagcggagaggagccagccgccagaaaag

SEQ ID NO: 21442 - DNA, 40 bp, Artificial Sequence
  Description of Artificial Sequence: Synthetic primer
gaggaaacggggagcccatggcccgagtggggtacaaagg

SEQ ID NO: 21443 - DNA, 40 bp, Artificial Sequence
  Description of Artificial Sequence: Synthetic primer
tttcttgtattccttcttctaatttcaaacttactttttc

SEQ ID NO: 21444 - DNA, 40 bp, Artificial Sequence
  Description of Artificial Sequence: Synthetic primer
cgggcaggcccagctcaaaagagggcagacgcagcgacac

SEQ ID NO: 21445 - DNA, 40 bp, Artificial Sequence
  Description of Artificial Sequence: Synthetic primer
gcttaatcctgattatcgagatgcccaaaatgaaggaaaa

SEQ ID NO: 21446 - DNA, 40 bp, Artificial Sequence
  Description of Artificial Sequence: Synthetic primer
ctgcagataccccaggacaagcgggggattcatttttcag

SEQ ID NO: 21447 - DNA, 40 bp, Artificial Sequence
  Description of Artificial Sequence: Synthetic primer
cgtggtgtggtcggcctgcctggtcagagaggagagagag

SEQ ID NO: 21448 - DNA, 40 bp, Artificial Sequence
  Description of Artificial Sequence: Synthetic primer
atggggccggcacggcgtggctggaggcacctgaactgtg

SEQ ID NO: 21449 - DNA, 40 bp, Artificial Sequence
  Description of Artificial Sequence: Synthetic primer
gctggagtttgcaatccagccaaatacaactggaaaacag

SEQ ID NO: 21450 - DNA, 40 bp, Artificial Sequence
  Description of Artificial Sequence: Synthetic primer
gcgtgctgtggaaggacagcgacgagctgctgcggctcgg

SEQ ID NO: 21451 - DNA, 40 bp, Artificial Sequence
  Description of Artificial Sequence: Synthetic primer
ctcttccaggatctaagtcacttccaggagacgtggctcg

SEQ ID NO: 21452 - DNA, 40 bp, Artificial Sequence
  Description of Artificial Sequence: Synthetic primer
cttgctgagacggatcccttaagctgacaggaaaattagc

SEQ ID NO: 21453 - DNA, 40 bp, Artificial Sequence
  Description of Artificial Sequence: Synthetic primer
cctccagctggtgagccctgggccagattgtttgatcttc

SEQ ID NO: 21454 - DNA, 40 bp, Artificial Sequence
  Description of Artificial Sequence: Synthetic primer
aggcagctcagagaacggctctccgcgctctctctgacag

SEQ ID NO: 21455 - DNA, 40 bp, Artificial Sequence
  Description of Artificial Sequence: Synthetic primer
tttgagggatctcggtttcgcttgcttgcggcgagacatc

SEQ ID NO: 21456 - DNA, 40 bp, Artificial Sequence
  Description of Artificial Sequence: Synthetic primer
ccctgttgtcttcaggagtaggaggaagaggcttctttga

SEQ ID NO: 21457 - DNA, 40 bp, Artificial Sequence
  Description of Artificial Sequence: Synthetic primer
ttatcaagtgggaatcctgtatatgaaaaatactatagac

SEQ ID NO: 21458 - DNA, 40 bp, Artificial Sequence
  Description of Artificial Sequence: Synthetic primer
cggccttgcccgcatctatagtttccagatggctctaacc

SEQ ID NO: 21459 - DNA, 40 bp, Artificial Sequence
  Description of Artificial Sequence: Synthetic primer
ccctcacccgcgggccaacaacagagagggcgtccacacg

SEQ ID NO: 21460 - DNA, 40 bp, Artificial Sequence
  Description of Artificial Sequence: Synthetic primer
ggcccctgacaggaaggggtgcgaaggccctgtgatcgtc

SEQ ID NO: 21461 - DNA, 40 bp, Artificial Sequence
  Description of Artificial Sequence: Synthetic primer
gaggacgccaaagtcaagcagaggattgattacgccaacc

SEQ ID NO: 21462 - DNA, 40 bp, Artificial Sequence
  Description of Artificial Sequence: Synthetic primer
tgtgcctgtcagctgagtcaccactttccctaccattgtc

SEQ ID NO: 21463 - DNA, 40 bp, Artificial Sequence
  Description of Artificial Sequence: Synthetic primer
atgtgtaacaccccttcttgctgtctcttagtaaataaac

SEQ ID NO: 21464 - DNA, 40 bp, Artificial Sequence
  Description of Artificial Sequence: Synthetic primer
gtgccaaattacatttgagtttgtagaccaggaacagttg

SEQ ID NO: 21465 - DNA, 40 bp, Artificial Sequence
  Description of Artificial Sequence: Synthetic primer
ggcgtccaccttgtcattgtctctcttgtgtagcagcttg

SEQ ID NO: 21466 - DNA, 40 bp, Artificial Sequence
  Description of Artificial Sequence: Synthetic primer
ggaagtaccccggagagtactgaccacaacccagcgacag

SEQ ID NO: 21467 - DNA, 40 bp, Artificial Sequence
  Description of Artificial Sequence: Synthetic primer
gaggccgccggaggacgccctgtctggggactcggacgtg

SEQ ID NO: 21468 - DNA, 40 bp, Artificial Sequence
  Description of Artificial Sequence: Synthetic primer
ccctggtgctgctggacggactggtcccccaggaccctct

SEQ ID NO: 21469 - DNA, 40 bp, Artificial Sequence
  Description of Artificial Sequence: Synthetic primer
cagccccgctcccccggacccatcggcgcgctgcccacac

SEQ ID NO: 21470 - DNA, 40 bp, Artificial Sequence
  Description of Artificial Sequence: Synthetic primer
cctcgggataaaatgacagtgaggttgaaaagtgaaaacc

SEQ ID NO: 21471 - DNA, 40 bp, Artificial Sequence
  Description of Artificial Sequence: Synthetic primer
gtggcccttgattacaaaaagaagaaacacgtattcaagc

SEQ ID NO: 21472 - DNA, 40 bp, Artificial Sequence
  Description of Artificial Sequence: Synthetic primer
ttcttttcctgaccaatgactacttcttcacggacatcag

SEQ ID NO: 21473 - DNA, 40 bp, Artificial Sequence
  Description of Artificial Sequence: Synthetic primer
gcatcaacaagtatgggtctccgtacaccaaaaactcagg

SEQ ID NO: 21474 - DNA, 40 bp, Artificial Sequence
  Description of Artificial Sequence: Synthetic primer
gaatcagcctgtggaaactcatgtgtctggatcatcaaag

SEQ ID NO: 21475 - DNA, 40 bp, Artificial Sequence
  Description of Artificial Sequence: Synthetic primer
tgcagggtctgccgtgctggagggaaggctgctgttggag

SEQ ID NO: 21476 - DNA, 40 bp, Artificial Sequence
  Description of Artificial Sequence: Synthetic primer
aacttgctccacacagtgtagtcaagccgactctccatac

SEQ ID NO: 21477 - DNA, 40 bp, Artificial Sequence
  Description of Artificial Sequence: Synthetic primer
aatctaatctgctgtgcccctaaaatagcatttagaagtt

SEQ ID NO: 21478 - DNA, 40 bp, Artificial Sequence
  Description of Artificial Sequence: Synthetic primer
ggctgtgtacagccgcacttttacctggctcgtcgggaag

SEQ ID NO: 21479 - DNA, 40 bp, Artificial Sequence
  Description of Artificial Sequence: Synthetic primer
cagggagtgacttccgctccaccgggtccctcagccttgg

SEQ ID NO: 21480 - DNA, 40 bp, Artificial Sequence
  Description of Artificial Sequence: Synthetic primer
ccctcatcttctggtagtcctcctcgtagttgtcgatctc

SEQ ID NO: 21481 - DNA, 40 bp, Artificial Sequence
  Description of Artificial Sequence: Synthetic primer
gaactacatcatgcccgttcagtacgaagggagacagagc

SEQ ID NO: 21482 - DNA, 40 bp, Artificial Sequence
  Description of Artificial Sequence: Synthetic primer
ttaaaaatcgtcttaagctctaaggtggtctcagtattgc

SEQ ID NO: 21483 - DNA, 40 bp, Artificial Sequence
  Description of Artificial Sequence: Synthetic primer
cctgtggtccaggaggtccctgagcaccattgtttccatc

SEQ ID NO: 21484 - DNA, 40 bp, Artificial Sequence
  Description of Artificial Sequence: Synthetic primer
gcaaaaaatggagaaaacacagcaaatggggaggagaatg

SEQ ID NO: 21485 - DNA, 40 bp, Artificial Sequence
  Description of Artificial Sequence: Synthetic primer
gaacgctcagtcgggggtgtgcaccccggcggggggcctg

SEQ ID NO: 21486 - DNA, 40 bp, Artificial Sequence
  Description of Artificial Sequence: Synthetic primer
ttttacacaaagaaacttaatgctgtattaataaattcag

SEQ ID NO: 21487 - DNA, 40 bp, Artificial Sequence
  Description of Artificial Sequence: Synthetic primer
aacgtgtcatttgctaacatgactgcctcctttttatttc

SEQ ID NO: 21488 - DNA, 40 bp, Artificial Sequence
  Description of Artificial Sequence: Synthetic primer
tggctttctataccaaaggtaaatgctgaatgagaaaatc

SEQ ID NO: 21489 - DNA, 40 bp, Artificial Sequence
  Description of Artificial Sequence: Synthetic primer
gaagcagaagggtgccgagacagaactcgtcagattcttg

SEQ ID NO: 21490 - DNA, 40 bp, Artificial Sequence
  Description of Artificial Sequence: Synthetic primer
cggcgatccgatccgtgagcgtttggcccgacatcttctg

SEQ ID NO: 21491 - DNA, 40 bp, Artificial Sequence
  Description of Artificial Sequence: Synthetic primer
gccttggcttggtttcatacactgatttatttttctatgc

SEQ ID NO: 21492 - DNA, 40 bp, Artificial Sequence
  Description of Artificial Sequence: Synthetic primer
agttcatgttcagaggtgactggatccacaaccaaaattc

SEQ ID NO: 21493 - DNA, 40 bp, Artificial Sequence
  Description of Artificial Sequence: Synthetic primer
ttacttttttggcacattcttcttttaggacctattgtga

SEQ ID NO: 21494 - DNA, 40 bp, Artificial Sequence
  Description of Artificial Sequence: Synthetic primer
attccacctgttcccctatagctgtgaactagagcacctg

SEQ ID NO: 21495 - DNA, 40 bp, Artificial Sequence
  Description of Artificial Sequence: Synthetic primer
ctgggccaggggcaccaacacgtcctctctcaccaggaag

SEQ ID NO: 21496 - DNA, 40 bp, Artificial Sequence
  Description of Artificial Sequence: Synthetic primer
accccggcaacctgcacctgttcatcaatgcctacaacag

SEQ ID NO: 21497 - DNA, 40 bp, Artificial Sequence
  Description of Artificial Sequence: Synthetic primer
acgccatatatatagatgcagttgtcatgtgagcctatgg

SEQ ID NO: 21498 - DNA, 40 bp, Artificial Sequence
  Description of Artificial Sequence: Synthetic primer
tcctggacctcaccaaacgctgtctccggagctactggtc

SEQ ID NO: 21499 - DNA, 40 bp, Artificial Sequence
  Description of Artificial Sequence: Synthetic primer
ttgaaaaaataaatttttaaaaggcatgtgtttcctatgc

SEQ ID NO: 21500 - DNA, 40 bp, Artificial Sequence
  Description of Artificial Sequence: Synthetic primer
ttagtgtgaggcctccagcgacccagcccacgaacagagc

SEQ ID NO: 21501 - DNA, 40 bp, Artificial Sequence
  Description of Artificial Sequence: Synthetic primer
gtggctcgggacagcagagccgcagctgccaagcctgtga

SEQ ID NO: 21502 - DNA, 40 bp, Artificial Sequence
  Description of Artificial Sequence: Synthetic primer
aaagaaaaaccagtgggtgaatttaaatgagccagaagag

SEQ ID NO: 21503 - DNA, 40 bp, Artificial Sequence
  Description of Artificial Sequence: Synthetic primer
cccagccaatgaccagcagttggtatgaagaacctttgac

SEQ ID NO: 21504 - DNA, 40 bp, Artificial Sequence
  Description of Artificial Sequence: Synthetic primer
cactactcatgaagtaatgggccccaagaaaaagcacctg

SEQ ID NO: 21505 - DNA, 40 bp, Artificial Sequence
  Description of Artificial Sequence: Synthetic primer
tgtgccaccagcgttcctcatttccccaccccgtccatcc

SEQ ID NO: 21506 - DNA, 40 bp, Artificial Sequence
  Description of Artificial Sequence: Synthetic primer
ccagctggtcttctcccaagaggtcgaaggtcaccagagg

SEQ ID NO: 21507 - DNA, 40 bp, Artificial Sequence
  Description of Artificial Sequence: Synthetic primer
accccgattcattttaatatactgctctttcgtcatttta

SEQ ID NO: 21508 - DNA, 40 bp, Artificial Sequence
  Description of Artificial Sequence: Synthetic primer
ccttggcagatttcttctctttgttgtcttcagtttccac

SEQ ID NO: 21509 - DNA, 40 bp, Artificial Sequence
  Description of Artificial Sequence: Synthetic primer
ggatcacaggggactggggttttgactggattggtttttc

SEQ ID NO: 21510 - DNA, 40 bp, Artificial Sequence
  Description of Artificial Sequence: Synthetic primer
gagactaaatgtaaaactccaatcagataaattacaacac

SEQ ID NO: 21511 - DNA, 40 bp, Artificial Sequence
  Description of Artificial Sequence: Synthetic primer
gttcagcaatgatgtcttcccagaattctatctgaaaacc

SEQ ID NO: 21512 - DNA, 40 bp, Artificial Sequence
  Description of Artificial Sequence: Synthetic primer
gctcttcgatctccttcttccgcacttccatctgattctc

SEQ ID NO: 21513 - DNA, 40 bp, Artificial Sequence
  Description of Artificial Sequence: Synthetic primer
acaccgctaagattagcagctgtagggaagtagccaagac

SEQ ID NO: 21514 - DNA, 40 bp, Artificial Sequence
  Description of Artificial Sequence: Synthetic primer
tggttatgtttaaaagcctgattttatatagatgaagttg

SEQ ID NO: 21515 - DNA, 40 bp, Artificial Sequence
  Description of Artificial Sequence: Synthetic primer
gctctgaaaatgaaggcgattataaccctggcaggaaaac

SEQ ID NO: 21516 - DNA, 40 bp, Artificial Sequence
  Description of Artificial Sequence: Synthetic primer
gatgaagtgcagaacgcggtgcagcggctgaggcccaagg

SEQ ID NO: 21517 - DNA, 40 bp, Artificial Sequence
  Description of Artificial Sequence: Synthetic primer
taaactgtgtgaaattaaaaacaaagaatttcattcataa

SEQ ID NO: 21518 - DNA, 40 bp, Artificial Sequence
  Description of Artificial Sequence: Synthetic primer
tgggagtgaggacatcactacgtctcctcagttgtcaaag

SEQ ID NO: 21519 - DNA, 40 bp, Artificial Sequence
  Description of Artificial Sequence: Synthetic primer
atcattaggtctaccatttggcaaagtaactaatcttttg

SEQ ID NO: 21520 - DNA, 40 bp, Artificial Sequence
  Description of Artificial Sequence: Synthetic primer
ggctgtggcaacatgaaaccctttaatccgctggcctctc

SEQ ID NO: 21521 - DNA, 40 bp, Artificial Sequence
  Description of Artificial Sequence: Synthetic primer
catggagcccgaccagtaccagatggggagcaccaaggtc

SEQ ID NO: 21522 - DNA, 40 bp, Artificial Sequence
  Description of Artificial Sequence: Synthetic primer
gcgcctctgccagagtccaggccttgggatgacagacagc

SEQ ID NO: 21523 - DNA, 40 bp, Artificial Sequence
  Description of Artificial Sequence: Synthetic primer
atgaaaatggcggcggaggtggcggctgcagcggaagaac

SEQ ID NO: 21524 - DNA, 40 bp, Artificial Sequence
  Description of Artificial Sequence: Synthetic primer
ttattgttttgagtgatgacgcagagactcagtgaacttg

SEQ ID NO: 21525 - DNA, 40 bp, Artificial Sequence
  Description of Artificial Sequence: Synthetic primer
agggtgggcaggagccaccatgtgaggagagaaccgactg

SEQ ID NO: 21526 - DNA, 40 bp, Artificial Sequence
  Description of Artificial Sequence: Synthetic primer
attattgctgaagaaaatgatgttgcatgcctggttatag

SEQ ID NO: 21527 - DNA, 40 bp, Artificial Sequence
  Description of Artificial Sequence: Synthetic primer
cagccagttccggaagtgccatcagaagatgcatcccaac

SEQ ID NO: 21528 - DNA, 40 bp, Artificial Sequence
  Description of Artificial Sequence: Synthetic primer
ctctctgtatgggactggcagaaagaagaaaaactagcag

SEQ ID NO: 21529 - DNA, 40 bp, Artificial Sequence
  Description of Artificial Sequence: Synthetic primer
atgggcgacccattacagtatgagataagattgagttctg

SEQ ID NO: 21530 - DNA, 40 bp, Artificial Sequence
  Description of Artificial Sequence: Synthetic primer
ctgggggagggcgctggcttgttcgtgcagcgtgtcaagg

SEQ ID NO: 21531 - DNA, 40 bp, Artificial Sequence
  Description of Artificial Sequence: Synthetic primer
gccctgttccaggaggacagctacaagaaacacctgaagc

SEQ ID NO: 21532 - DNA, 40 bp, Artificial Sequence
  Description of Artificial Sequence: Synthetic primer
ggggtcgtggaccaagccctgagagaagccttccagatcc

SEQ ID NO: 21533 - DNA, 40 bp, Artificial Sequence
  Description of Artificial Sequence: Synthetic primer
attatccagctggaggcagccgtggtactccgtgtgattg

SEQ ID NO: 21534 - DNA, 40 bp, Artificial Sequence
  Description of Artificial Sequence: Synthetic primer
ctcagttcctctgggtgtgcacatatgtttggagaaatag

SEQ ID NO: 21535 - DNA, 40 bp, Artificial Sequence
  Description of Artificial Sequence: Synthetic primer
tggctgctgctgctggcccggccggcctcgtgcgccccag

SEQ ID NO: 21536 - DNA, 40 bp, Artificial Sequence
  Description of Artificial Sequence: Synthetic primer
cttgaaggggtttacagagatgagcacagagccgatgtag

SEQ ID NO: 21537 - DNA, 40 bp, Artificial Sequence
  Description of Artificial Sequence: Synthetic primer
gggaagcggctgctgcaagcccgcccttcacctgggagtc

SEQ ID NO: 21538 - DNA, 40 bp, Artificial Sequence
  Description of Artificial Sequence: Synthetic primer
gctcagccctcccaggccacctgcagctcccagcctgtgc

SEQ ID NO: 21539 - DNA, 40 bp, Artificial Sequence
  Description of Artificial Sequence: Synthetic primer
cccccaaatactctgaatttggagtctgactgtgcccaag

SEQ ID NO: 21540 - DNA, 40 bp, Artificial Sequence
  Description of Artificial Sequence: Synthetic primer
gaaaaactgcagcagatttttattgaactgacattaaagg

SEQ ID NO: 21541 - DNA, 40 bp, Artificial Sequence
  Description of Artificial Sequence: Synthetic primer
tctgcaatcccagataatggaagaaggtcctgtctaaagc

SEQ ID NO: 21542 - DNA, 40 bp, Artificial Sequence
  Description of Artificial Sequence: Synthetic primer
caccaggagggctgcccatacaggggtgtgcggtaagagg

SEQ ID NO: 21543 - DNA, 40 bp, Artificial Sequence
  Description of Artificial Sequence: Synthetic primer
ggcagtgcttatgaagaaaaattaaagcacaaacattctg

SEQ ID NO: 21544 - DNA, 40 bp, Artificial Sequence
  Description of Artificial Sequence: Synthetic primer
ttaggagaggggaccttcggccgagttgtacaatgtgttg

SEQ ID NO: 21545 - DNA, 40 bp, Artificial Sequence
  Description of Artificial Sequence: Synthetic primer
cgccccgcccccgaggagcctaataaagatctcgttgtgg

SEQ ID NO: 21546 - DNA, 40 bp, Artificial Sequence
  Description of Artificial Sequence: Synthetic primer
agacccttcaggctgtcagtgcagaccagcaggtccagag

SEQ ID NO: 21547 - DNA, 40 bp, Artificial Sequence
  Description of Artificial Sequence: Synthetic primer
gctgccgccgccgctgcggattgttccagctgtgttacta

SEQ ID NO: 21548 - DNA, 40 bp, Artificial Sequence
  Description of Artificial Sequence: Synthetic primer
ggccctcctggtgacaggtgccagattgagtggtgggttg

SEQ ID NO: 21549 - DNA, 40 bp, Artificial Sequence
  Description of Artificial Sequence: Synthetic primer
gcccagagatttcctggtccgctggtcagccagcttgtgc

SEQ ID NO: 21550 - DNA, 40 bp, Artificial Sequence
  Description of Artificial Sequence: Synthetic primer
cgccccgcaggctcccgcccgcgggtccgtcccggctgag

SEQ ID NO: 21551 - DNA, 40 bp, Artificial Sequence
  Description of Artificial Sequence: Synthetic primer
ctcaacactcttggggtctcttctccccgaggacgaaatc

SEQ ID NO: 21552 - DNA, 40 bp, Artificial Sequence
  Description of Artificial Sequence: Synthetic primer
tgtttgaagatccagaaactacaaggcaaatgcagtcaac

SEQ ID NO: 21553 - DNA, 40 bp, Artificial Sequence
  Description of Artificial Sequence: Synthetic primer
gagccagtgattattcttgttcagggagaagatcatttag

SEQ ID NO: 21554 - DNA, 40 bp, Artificial Sequence
  Description of Artificial Sequence: Synthetic primer
ttcattatagaatatatttgacaaggatacatacaaacag

SEQ ID NO: 21555 - DNA, 40 bp, Artificial Sequence
  Description of Artificial Sequence: Synthetic primer
ccaacatgctccagcggaagcgcttgcagaccctcatgtc

SEQ ID NO: 21556 - DNA, 40 bp, Artificial Sequence
  Description of Artificial Sequence: Synthetic primer
tttggaacctgcagccgattcctggcttttcatctctttc

SEQ ID NO: 21557 - DNA, 40 bp, Artificial Sequence
  Description of Artificial Sequence: Synthetic primer
attttccccacaaaagaaacacttaacagaggcaagtgca

SEQ ID NO: 21558 - DNA, 40 bp, Artificial Sequence
  Description of Artificial Sequence: Synthetic primer
gctggatccagcttgtttgaagcccttgagctgatcttag

SEQ ID NO: 21559 - DNA, 40 bp, Artificial Sequence
  Description of Artificial Sequence: Synthetic primer
tctctgtctcagacttttgtacatctggcttattttaatg

SEQ ID NO: 21560 - DNA, 40 bp, Artificial Sequence
  Description of Artificial Sequence: Synthetic primer
cccggtgtctcgggcaaactcccggaatcgttcttgtaac

SEQ ID NO: 21561 - DNA, 40 bp, Artificial Sequence
  Description of Artificial Sequence: Synthetic primer
ctcaaaattaggaagcacttgttgaaagaaggtttgtagg

SEQ ID NO: 21562 - DNA, 40 bp, Artificial Sequence
  Description of Artificial Sequence: Synthetic primer
cgtccgggcgcgggggaaagaaaggcagcgggaatttgag

SEQ ID NO: 21563 - DNA, 40 bp, Artificial Sequence
  Description of Artificial Sequence: Synthetic primer
gatctcctgcatgtcctcgtagttgaagagggggttgtag

SEQ ID NO: 21564 - DNA, 40 bp, Artificial Sequence
  Description of Artificial Sequence: Synthetic primer
cagactattttctccttttcttctgttagaggtgttccac

SEQ ID NO: 21565 - DNA, 40 bp, Artificial Sequence
  Description of Artificial Sequence: Synthetic primer
tgggggttgcatacacagtctcaaactccttctcctgatg

SEQ ID NO: 21566 - DNA, 40 bp, Artificial Sequence
  Description of Artificial Sequence: Synthetic primer
cctgaagttcagactctgccatatcttcctcactacattc

SEQ ID NO: 21567 - DNA, 40 bp, Artificial Sequence
  Description of Artificial Sequence: Synthetic primer
tgctttagcaatatagctgaatgacagggctgccaagaac

SEQ ID NO: 21568 - DNA, 40 bp, Artificial Sequence
  Description of Artificial Sequence: Synthetic primer
ccgcagggctgcctcccagcgctctatgtcctcagacgtg

SEQ ID NO: 21569 - DNA, 40 bp, Artificial Sequence
  Description of Artificial Sequence: Synthetic primer
ttcccctggaagtcttcggcccgtttattacacatgaaag

SEQ ID NO: 21570 - DNA, 40 bp, Artificial Sequence
  Description of Artificial Sequence: Synthetic primer
tgcgaatcggaactgcatggaaaacccaattactcagcag

SEQ ID NO: 21571 - DNA, 40 bp, Artificial Sequence
  Description of Artificial Sequence: Synthetic primer
cttcaagcagatgccctacttcaccgaccgtgagatcgac

SEQ ID NO: 21572 - DNA, 40 bp, Artificial Sequence
  Description of Artificial Sequence: Synthetic primer
ccttgactttgaatgctacagcaactgcaacaagtccatc

SEQ ID NO: 21573 - DNA, 40 bp, Artificial Sequence
  Description of Artificial Sequence: Synthetic primer
ctgccatcagctccaggaagaccacgagaaccaggactac

SEQ ID NO: 21574 - DNA, 40 bp, Artificial Sequence
  Description of Artificial Sequence: Synthetic primer
aaactgtacaaaagccagaatgctgtatttgcatctattg

SEQ ID NO: 21575 - DNA, 40 bp, Artificial Sequence
  Description of Artificial Sequence: Synthetic primer
atattaaacatggaataaattgtctttttatgaattaggc

SEQ ID NO: 21576 - DNA, 40 bp, Artificial Sequence
  Description of Artificial Sequence: Synthetic primer
ttgtcctgaacaagaaccacctggtgaccctcccagaagc

SEQ ID NO: 21577 - DNA, 40 bp, Artificial Sequence
  Description of Artificial Sequence: Synthetic primer
tgtgccattacaagacatactgatcgggtgctactacaag

SEQ ID NO: 21578 - DNA, 40 bp, Artificial Sequence
  Description of Artificial Sequence: Synthetic primer
gctccagctgcaccaggtgggcctctaggtcccattaagc

SEQ ID NO: 21579 - DNA, 40 bp, Artificial Sequence
  Description of Artificial Sequence: Synthetic primer
acttcagtcctgaagagttggatgagaacacaagtccttt

SEQ ID NO: 21580 - DNA, 40 bp, Artificial Sequence
  Description of Artificial Sequence: Synthetic primer
gtcctggccagccgggctttgagggagagcaggggaccag

SEQ ID NO: 21581 - DNA, 40 bp, Artificial Sequence
  Description of Artificial Sequence: Synthetic primer
tttagtaataagagcttggagctgtcaagttgtaataaat

SEQ ID NO: 21582 - DNA, 40 bp, Artificial Sequence
  Description of Artificial Sequence: Synthetic primer
tccctcatgataacatctctctccttctggtccatgtcac

SEQ ID NO: 21583 - DNA, 40 bp, Artificial Sequence
  Description of Artificial Sequence: Synthetic primer
gcgtggggctgctggacttctgtggccaggtgtgcttcac

SEQ ID NO: 21584 - DNA, 40 bp, Artificial Sequence
  Description of Artificial Sequence: Synthetic primer
aacagcttatggaattagcaaaacaggagtctcaatccag

SEQ ID NO: 21585 - DNA, 40 bp, Artificial Sequence
  Description of Artificial Sequence: Synthetic primer
acacagtttcacaaactgtccagccaagactgcctttgac

SEQ ID NO: 21586 - DNA, 40 bp, Artificial Sequence
  Description of Artificial Sequence: Synthetic primer
gaaatccactgaggttgtgccaaagaagaagatcaaaaag

SEQ ID NO: 21587 - DNA, 40 bp, Artificial Sequence
  Description of Artificial Sequence: Synthetic primer
ctgtgcctaccacgtaaccaaaaatgaaggagaactactg

SEQ ID NO: 21588 - DNA, 40 bp, Artificial Sequence
  Description of Artificial Sequence: Synthetic primer
cccccgctgagatggaggccaggtccacaaacaccttcag

SEQ ID NO: 21589 - DNA, 40 bp, Artificial Sequence
  Description of Artificial Sequence: Synthetic primer
cgtcctctgactgtgagagcgccgtgctgtcccccgacac

SEQ ID NO: 21590 - DNA, 40 bp, Artificial Sequence
  Description of Artificial Sequence: Synthetic primer
tgccatcatgagctttgatttgtttgctgatttgatatac

SEQ ID NO: 21591 - DNA, 40 bp, Artificial Sequence
  Description of Artificial Sequence: Synthetic primer
agagttcaggagagtagcaacaaaaggaaaataaatgaac

SEQ ID NO: 21592 - DNA, 40 bp, Artificial Sequence
  Description of Artificial Sequence: Synthetic primer
agtagtttaaaaaggaccagggctttgctttataacatga

SEQ ID NO: 21593 - DNA, 40 bp, Artificial Sequence
  Description of Artificial Sequence: Synthetic primer
agcgcgtgcaacctggagaagaagcagaagaagtttgacc

SEQ ID NO: 21594 - DNA, 40 bp, Artificial Sequence
  Description of Artificial Sequence: Synthetic primer
cgccaccttccacattcctcctcctcccttccacgagcag

SEQ ID NO: 21595 - DNA, 40 bp, Artificial Sequence
  Description of Artificial Sequence: Synthetic primer
gtctctgttctcctattgcatgaccaatagtaagtactcc

SEQ ID NO: 21596 - DNA, 40 bp, Artificial Sequence
  Description of Artificial Sequence: Synthetic primer
acacagcgcttgcgagcatctgtggtgctccagtataccc

SEQ ID NO: 21597 - DNA, 40 bp, Artificial Sequence
  Description of Artificial Sequence: Synthetic primer
cggtcttcccggtgacgcagtttctcccggagtgcttctc

SEQ ID NO: 21598 - DNA, 40 bp, Artificial Sequence
  Description of Artificial Sequence: Synthetic primer
gaagtgaaaaagttttacaatctctaggtttggctagttc

SEQ ID NO: 21599 - DNA, 40 bp, Artificial Sequence
  Description of Artificial Sequence: Synthetic primer
cttctcctcaatgtccaccgtgtgttttagaatctctacc

SEQ ID NO: 21600 - DNA, 40 bp, Artificial Sequence
  Description of Artificial Sequence: Synthetic primer
aagggggttatatttctaagtgatttacaatttctgtttc

SEQ ID NO: 21601 - DNA, 40 bp, Artificial Sequence
  Description of Artificial Sequence: Synthetic primer
ccaaagaggccaggcccctggtcagagccctcagtgggta

SEQ ID NO: 21602 - DNA, 40 bp, Artificial Sequence
  Description of Artificial Sequence: Synthetic primer
ataagtgacatgtataacaatacattttggaaataactgg

SEQ ID NO: 21603 - DNA, 40 bp, Artificial Sequence
  Description of Artificial Sequence: Synthetic primer
ggaacaatatcaagcaatggttactagtttagaagaatcc

SEQ ID NO: 21604 - DNA, 40 bp, Artificial Sequence
  Description of Artificial Sequence: Synthetic primer
ggagctttatgaaaatgtttccaaattctgtctggttatg

SEQ ID NO: 21605 - DNA, 40 bp, Artificial Sequence
  Description of Artificial Sequence: Synthetic primer
atatcatgctcgccagcagaggggtgacagcaccttggac

SEQ ID NO: 21606 - DNA, 40 bp, Artificial Sequence
  Description of Artificial Sequence: Synthetic primer
cctttgtgatgcagccttcctggggcgacacttccacgtc

SEQ ID NO: 21607 - DNA, 40 bp, Artificial Sequence
  Description of Artificial Sequence: Synthetic primer
caaggggagggaggaagccatcaagcagctacgcaaactg

SEQ ID NO: 21608 - DNA, 40 bp, Artificial Sequence
  Description of Artificial Sequence: Synthetic primer
gcgaaaacagcttttggagaaatggttaaaagaagataag

SEQ ID NO: 21609 - DNA, 40 bp, Artificial Sequence
  Description of Artificial Sequence: Synthetic primer
gtacatggttcagaaacagctcggctttcaaaaagctgtc

SEQ ID NO: 21610 - DNA, 40 bp, Artificial Sequence
  Description of Artificial Sequence: Synthetic primer
attgagggataattggttattaaactgaatagttcaggag

SEQ ID NO: 21611 - DNA, 40 bp, Artificial Sequence
  Description of Artificial Sequence: Synthetic primer
gtggagtgcaactcaaaattggacccaacaaagaccactc

SEQ ID NO: 21612 - DNA, 40 bp, Artificial Sequence
  Description of Artificial Sequence: Synthetic primer
gaattttggttaaagcaaagaaaattgagaaaattgaatc

SEQ ID NO: 21613 - DNA, 40 bp, Artificial Sequence
  Description of Artificial Sequence: Synthetic primer
ggggccctgtcttctagccttgggctggattcagggaagc

SEQ ID NO: 21614 - DNA, 40 bp, Artificial Sequence
  Description of Artificial Sequence: Synthetic primer
aaagttccctcaaacagcactgaaactgtaatagaatctg

SEQ ID NO: 21615 - DNA, 40 bp, Artificial Sequence
  Description of Artificial Sequence: Synthetic primer
gggacattcttatttttatcgagcacaaacggaaacaatg

SEQ ID NO: 21616 - DNA, 40 bp, Artificial Sequence
  Description of Artificial Sequence: Synthetic primer
caggcagatagttcctatgtattcacctgtatctggtatc

SEQ ID NO: 21617 - DNA, 40 bp, Artificial Sequence
  Description of Artificial Sequence: Synthetic primer
cacgttggtctcacatcgacggtgaacattcattttgcag

SEQ ID NO: 21618 - DNA, 40 bp, Artificial Sequence
  Description of Artificial Sequence: Synthetic primer
tggcgcgccctcccgccgccagtcccggcagcgccctcag

SEQ ID NO: 21619 - DNA, 40 bp, Artificial Sequence
  Description of Artificial Sequence: Synthetic primer
cggcgccgaagtccccgagggcgagtgctgtcccgtctgc

SEQ ID NO: 21620 - DNA, 40 bp, Artificial Sequence
  Description of Artificial Sequence: Synthetic primer
atgagattccgagttcgaagaaatctatagatctgtgttg

SEQ ID NO: 21621 - DNA, 40 bp, Artificial Sequence
  Description of Artificial Sequence: Synthetic primer
gctcaggccctccagctgggagtcctggaagacatactgg

SEQ ID NO: 21622 - DNA, 40 bp, Artificial Sequence
  Description of Artificial Sequence: Synthetic primer
ctacagttgaaactccagcagcgccggacccgggaagaac

SEQ ID NO: 21623 - DNA, 40 bp, Artificial Sequence
  Description of Artificial Sequence: Synthetic primer
gcccgcgttctcgcgcatgtgcacgaaggcgaactgtttc

SEQ ID NO: 21624 - DNA, 40 bp, Artificial Sequence
  Description of Artificial Sequence: Synthetic primer
ctggtgactttggtggagaatgtacatcagatagatcaag

SEQ ID NO: 21625 - DNA, 40 bp, Artificial Sequence
  Description of Artificial Sequence: Synthetic primer
aatggaatgcctccaacttagaggacttacagaaccgagg

SEQ ID NO: 21626 - DNA, 40 bp, Artificial Sequence
  Description of Artificial Sequence: Synthetic primer
gtattggttataactaacaaacctgaacaaactgctttac

SEQ ID NO: 21627 - DNA, 40 bp, Artificial Sequence
  Description of Artificial Sequence: Synthetic primer
ttgggcttaatttacatgtagtgcccaggactgttcaatg

SEQ ID NO: 21628 - DNA, 40 bp, Artificial Sequence
  Description of Artificial Sequence: Synthetic primer
atgaaggggataacttctatgtgattgatcaaggagagac

SEQ ID NO: 21629 - DNA, 40 bp, Artificial Sequence
  Description of Artificial Sequence: Synthetic primer
atcatcaaatgagattatgttggtcactttctttttcttc

SEQ ID NO: 21630 - DNA, 40 bp, Artificial Sequence
  Description of Artificial Sequence: Synthetic primer
tcacttcatctttatgaaaatctttcagaggttctattac

SEQ ID NO: 21631 - DNA, 40 bp, Artificial Sequence
  Description of Artificial Sequence: Synthetic primer
tgatattgtggatcccaatgattcagatgtggaggagaat

SEQ ID NO: 21632 - DNA, 40 bp, Artificial Sequence
  Description of Artificial Sequence: Synthetic primer
ctcggccccggccccggctcacccacttgtcactgccttc

SEQ ID NO: 21633 - DNA, 40 bp, Artificial Sequence
  Description of Artificial Sequence: Synthetic primer
caacagccgacgcctgtgcacgcccagcctcctggcacac

SEQ ID NO: 21634 - DNA, 40 bp, Artificial Sequence
  Description of Artificial Sequence: Synthetic primer
cagggacttcctcaaacagtgccttccactttatcaaatc

SEQ ID NO: 21635 - DNA, 40 bp, Artificial Sequence
  Description of Artificial Sequence: Synthetic primer
ggagtatgatttgattcttgagattattccacccgctgac

SEQ ID NO: 21636 - DNA, 40 bp, Artificial Sequence
  Description of Artificial Sequence: Synthetic primer
cctctcagcctcagaaggtcctgttgccctcctccaccag

SEQ ID NO: 21637 - DNA, 40 bp, Artificial Sequence
  Description of Artificial Sequence: Synthetic primer
caggagctgttgcttaagcttttgcctgatgactaacctg

SEQ ID NO: 21638 - DNA, 40 bp, Artificial Sequence
  Description of Artificial Sequence: Synthetic primer
cgtggcttttgacaatatctccatcagcctggactgctac

SEQ ID NO: 21639 - DNA, 40 bp, Artificial Sequence
  Description of Artificial Sequence: Synthetic primer
cttgggctctccgcagtagccgagcttaacatgattctcc

SEQ ID NO: 21640 - DNA, 40 bp, Artificial Sequence
  Description of Artificial Sequence: Synthetic primer
tgcccaactccatcctctgttactagatcccttaccagtc

SEQ ID NO: 21641 - DNA, 40 bp, Artificial Sequence
  Description of Artificial Sequence: Synthetic primer
aaatgttactatttgtagctaatgcacacagcctctctcc

SEQ ID NO: 21642 - DNA, 40 bp, Artificial Sequence
  Description of Artificial Sequence: Synthetic primer
ggtttctgtttcttgaagattttctatttgtttcaacatc

SEQ ID NO: 21643 - DNA, 40 bp, Artificial Sequence
  Description of Artificial Sequence: Synthetic primer
tttcacaatctcaacacatttgattcgggagagctcaatg

SEQ ID NO: 21644 - DNA, 40 bp, Artificial Sequence
  Description of Artificial Sequence: Synthetic primer
ctcttaagagctagttgataaaaattatgtcttgtgaaac

SEQ ID NO: 21645 - DNA, 40 bp, Artificial Sequence
  Description of Artificial Sequence: Synthetic primer
gatatcaattattacgctccatgattggatatatagaaga

SEQ ID NO: 21646 - DNA, 40 bp, Artificial Sequence
  Description of Artificial Sequence: Synthetic primer
gaaatctgtgagcttgatgtgacccatggaggtgataagg

SEQ ID NO: 21647 - DNA, 40 bp, Artificial Sequence
  Description of Artificial Sequence: Synthetic primer
ggatagttttcttctttgtgggttcatcttcctcagaatc

SEQ ID NO: 21648 - DNA, 40 bp, Artificial Sequence
  Description of Artificial Sequence: Synthetic primer
ccaactacaacaacaacaacacaacagcatcctagacaag

SEQ ID NO: 21649 - DNA, 40 bp, Artificial Sequence
  Description of Artificial Sequence: Synthetic primer
ggccagatgcctctggcacttccttcaaaccattttcttc

SEQ ID NO: 21650 - DNA, 40 bp, Artificial Sequence
  Description of Artificial Sequence: Synthetic primer
gcgggacagcgccacctgctgacggcgcaggacgagaacg

SEQ ID NO: 21651 - DNA, 40 bp, Artificial Sequence
  Description of Artificial Sequence: Synthetic primer
aagtgactatgaagaacgaattgaagaacttgaaaatctg

SEQ ID NO: 21652 - DNA, 40 bp, Artificial Sequence
  Description of Artificial Sequence: Synthetic primer
gtcttcccgacgcaagagcacccgtaactgtaacctatcc

SEQ ID NO: 21653 - DNA, 40 bp, Artificial Sequence
  Description of Artificial Sequence: Synthetic primer
ctgctgcttcttggcatcataatgtgttttggctttctcc

SEQ ID NO: 21654 - DNA, 40 bp, Artificial Sequence
  Description of Artificial Sequence: Synthetic primer
cagctcctccctcaacatttcatgtcttctcatttctgac

SEQ ID NO: 21655 - DNA, 40 bp, Artificial Sequence
  Description of Artificial Sequence: Synthetic primer
cacacagcttctcagcagcctggtggtgtccaggatcgac

SEQ ID NO: 21656 - DNA, 40 bp, Artificial Sequence
  Description of Artificial Sequence: Synthetic primer
gaaggtgtagttcggatctgatatgtttgcatatctcctg

SEQ ID NO: 21657 - DNA, 40 bp, Artificial Sequence
  Description of Artificial Sequence: Synthetic primer
aagtatttgggggatatatttattctgtattgacaaaagc

SEQ ID NO: 21658 - DNA, 40 bp, Artificial Sequence
  Description of Artificial Sequence: Synthetic primer
aggggtgttggaaccaccactgtcctgttcctccagatgc

SEQ ID NO: 21659 - DNA, 40 bp, Artificial Sequence
  Description of Artificial Sequence: Synthetic primer
gtggcttgccaacagaacacgcacatgctctggcacaatc

SEQ ID NO: 21660 - DNA, 40 bp, Artificial Sequence
  Description of Artificial Sequence: Synthetic primer
cgctttgaattaagtttagtcatctcccccagatcttgac

SEQ ID NO: 21661 - DNA, 40 bp, Artificial Sequence
  Description of Artificial Sequence: Synthetic primer
acacaggcagcagcgacggcggctggagctggggaactgg

SEQ ID NO: 21662 - DNA, 40 bp, Artificial Sequence
  Description of Artificial Sequence: Synthetic primer
ggcaaaagaaggcaccaaagctgacttagaagttcttacc

SEQ ID NO: 21663 - DNA, 40 bp, Artificial Sequence
  Description of Artificial Sequence: Synthetic primer
cagccttttcagggagggagaaaaagttttcgggggctac

SEQ ID NO: 21664 - DNA, 40 bp, Artificial Sequence
  Description of Artificial Sequence: Synthetic primer
agtgcatttcaatttctttctttgcctgcagcagcttatc

SEQ ID NO: 21665 - DNA, 40 bp, Artificial Sequence
  Description of Artificial Sequence: Synthetic primer
gttcagcaaactcatatgcccgatccaagtttccaatatg

SEQ ID NO: 21666 - DNA, 40 bp, Artificial Sequence
  Description of Artificial Sequence: Synthetic primer
tcaactctgaagagtatttgaaagcaggacttcagaacag

SEQ ID NO: 21667 - DNA, 40 bp, Artificial Sequence
  Description of Artificial Sequence: Synthetic primer
ttatttacacgtttgggcaaaagtacaaagtataatacag

SEQ ID NO: 21668 - DNA, 40 bp, Artificial Sequence
  Description of Artificial Sequence: Synthetic primer
acaatgatgaaatgctcagctatctgcccggaggcaccac

SEQ ID NO: 21669 - DNA, 40 bp, Artificial Sequence
  Description of Artificial Sequence: Synthetic primer
cttctccttctttttctttctctcttcttcttttgctagt

SEQ ID NO: 21670 - DNA, 40 bp, Artificial Sequence
  Description of Artificial Sequence: Synthetic primer
tcgtgttctgggaatcggctccggatccacacgctacaag

SEQ ID NO: 21671 - DNA, 40 bp, Artificial Sequence
  Description of Artificial Sequence: Synthetic primer
atgtgaaattgaaattaagaaatctaattcagtacaagag

SEQ ID NO: 21672 - DNA, 40 bp, Artificial Sequence
  Description of Artificial Sequence: Synthetic primer
gattttcaagtcctaacatatgctgctccaatttcataac

SEQ ID NO: 21673 - DNA, 40 bp, Artificial Sequence
  Description of Artificial Sequence: Synthetic primer
gtctgcgcctctcggcttccaggcggctgtaatacccttc

SEQ ID NO: 21674 - DNA, 40 bp, Artificial Sequence
  Description of Artificial Sequence: Synthetic primer
acaggagtcttatccacaacatcattgaatggagagagag

SEQ ID NO: 21675 - DNA, 40 bp, Artificial Sequence
  Description of Artificial Sequence: Synthetic primer
tgcaggttcgagaaaccttgcccatcaccaaagtctgaag

SEQ ID NO: 21676 - DNA, 40 bp, Artificial Sequence
  Description of Artificial Sequence: Synthetic primer
tgtccagtaactggttgcaatactccacttcattatttct

SEQ ID NO: 21677 - DNA, 40 bp, Artificial Sequence
  Description of Artificial Sequence: Synthetic primer
gtggctgcttaggtccactgtgcgcttcacgtcctcattg

SEQ ID NO: 21678 - DNA, 40 bp, Artificial Sequence
  Description of Artificial Sequence: Synthetic primer
atattgaaacccccaaggagtcctcttcaggacctcagag

SEQ ID NO: 21679 - DNA, 40 bp, Artificial Sequence
  Description of Artificial Sequence: Synthetic primer
ttctccaatccagtgcttcctccacagcacattgttcatc

SEQ ID NO: 21680 - DNA, 40 bp, Artificial Sequence
  Description of Artificial Sequence: Synthetic primer
cacacactagaacagggtgatctccagcagtctggcttag

SEQ ID NO: 21681 - DNA, 40 bp, Artificial Sequence
  Description of Artificial Sequence: Synthetic primer
attggtgacatggctgctgtgggcactgtacttgtgactg

SEQ ID NO: 21682 - DNA, 40 bp, Artificial Sequence
  Description of Artificial Sequence: Synthetic primer
gagcagtcggaggaggcggcgtggacgctggcgccgttgc

SEQ ID NO: 21683 - DNA, 40 bp, Artificial Sequence
  Description of Artificial Sequence: Synthetic primer
tgaagatcaccgacgtcatcatagggttccaggcctgctg

SEQ ID NO: 21684 - DNA, 40 bp, Artificial Sequence
  Description of Artificial Sequence: Synthetic primer
agaggaacaagtattgcttatttctgaagtgggtacatgg

SEQ ID NO: 21685 - DNA, 40 bp, Artificial Sequence
  Description of Artificial Sequence: Synthetic primer
tctaagttagtccttgccttctttaaaacatcatgtgttc

SEQ ID NO: 21686 - DNA, 40 bp, Artificial Sequence
  Description of Artificial Sequence: Synthetic primer
acgagttcatgacctccaaacccaaaatccactgcttcag

SEQ ID NO: 21687 - DNA, 40 bp, Artificial Sequence
  Description of Artificial Sequence: Synthetic primer
ggggcacctgcgacctgctcacgctgacggagtacaagtg

SEQ ID NO: 21688 - DNA, 40 bp, Artificial Sequence
  Description of Artificial Sequence: Synthetic primer
cctggactaatccccaaccttaccacctagagagagagag

SEQ ID NO: 21689 - DNA, 40 bp, Artificial Sequence
  Description of Artificial Sequence: Synthetic primer
aagaattgactctcatgactgaagaagaaacacgattaag

SEQ ID NO: 21690 - DNA, 40 bp, Artificial Sequence
  Description of Artificial Sequence: Synthetic primer
tgggagcccagagaacatggctggacctccctgtgaggag

SEQ ID NO: 21691 - DNA, 40 bp, Artificial Sequence
  Description of Artificial Sequence: Synthetic primer
tgccaatgtaagggctttcatctggggctttatcaatttc

SEQ ID NO: 21692 - DNA, 40 bp, Artificial Sequence
  Description of Artificial Sequence: Synthetic primer
gaaaataccttcaacacccaaattaataccaaaagttacc

SEQ ID NO: 21693 - DNA, 40 bp, Artificial Sequence
  Description of Artificial Sequence: Synthetic primer
gctcccaggttgagggcatagtgaaagggtcaatgtttag

SEQ ID NO: 21694 - DNA, 40 bp, Artificial Sequence
  Description of Artificial Sequence: Synthetic primer
ggggaagatagtcgtcgcagctttcgcagggtcctccttc

SEQ ID NO: 21695 - DNA, 40 bp, Artificial Sequence
  Description of Artificial Sequence: Synthetic primer
attctgtcacgtttgtggaaggcaacatcaggctacaaag

SEQ ID NO: 21696 - DNA, 40 bp, Artificial Sequence
  Description of Artificial Sequence: Synthetic primer
ccagaatgaaggagaaccagaaacatatctattatatcac

SEQ ID NO: 21697 - DNA, 40 bp, Artificial Sequence
  Description of Artificial Sequence: Synthetic primer
cttactaaaatgagttttaggttctgtaagtggaaaaatg

SEQ ID NO: 21698 - DNA, 40 bp, Artificial Sequence
  Description of Artificial Sequence: Synthetic primer
tccggagtggtcacctctgagccacacttctcgtccttgc

SEQ ID NO: 21699 - DNA, 40 bp, Artificial Sequence
  Description of Artificial Sequence: Synthetic primer
tagccgtggagtaggacggcagaagttcaatcttggttac

SEQ ID NO: 21700 - DNA, 40 bp, Artificial Sequence
  Description of Artificial Sequence: Synthetic primer
gcgcagcttgcgggccccctccaccagctccaccatgaag

SEQ ID NO: 21701 - DNA, 40 bp, Artificial Sequence
  Description of Artificial Sequence: Synthetic primer
ttgaggaattcttgtggtttctttgtcatttagtgagagc

SEQ ID NO: 21702 - DNA, 40 bp, Artificial Sequence
  Description of Artificial Sequence: Synthetic primer
actaagggtcggcttttgcgccttaaagcatatcaaatgg

SEQ ID NO: 21703 - DNA, 40 bp, Artificial Sequence
  Description of Artificial Sequence: Synthetic primer
tcccggcgggcatgcctggccctccgcagcctggcccata

SEQ ID NO: 21704 - DNA, 40 bp, Artificial Sequence
  Description of Artificial Sequence: Synthetic primer
ccatctccccaagtcaggctggagagaaagggggagaacc

SEQ ID NO: 21705 - DNA, 40 bp, Artificial Sequence
  Description of Artificial Sequence: Synthetic primer
tgaatcataactcctacaatggaaaggaaactaaaaatag

SEQ ID NO: 21706 - DNA, 40 bp, Artificial Sequence
  Description of Artificial Sequence: Synthetic primer
cctggaaacgtctccagatgtggtgatggctctactaccg

SEQ ID NO: 21707 - DNA, 40 bp, Artificial Sequence
  Description of Artificial Sequence: Synthetic primer
ctttgccaagaagatggacaagatggtgcagaagaagaac

SEQ ID NO: 21708 - DNA, 40 bp, Artificial Sequence
  Description of Artificial Sequence: Synthetic primer
cgtgagagccggcagcgctgggtgctggcccttaaagaag

SEQ ID NO: 21709 - DNA, 40 bp, Artificial Sequence
  Description of Artificial Sequence: Synthetic primer
agttcgctcacctccctttctaactccgctgccgccatgg

SEQ ID NO: 21710 - DNA, 40 bp, Artificial Sequence
  Description of Artificial Sequence: Synthetic primer
tttaccagcacatagtgaaatgtagaaggtgaattctgag

SEQ ID NO: 21711 - DNA, 40 bp, Artificial Sequence
  Description of Artificial Sequence: Synthetic primer
ttggcttggagttgatgcccttggactgaatatttatgag

SEQ ID NO: 21712 - DNA, 40 bp, Artificial Sequence
  Description of Artificial Sequence: Synthetic primer
tgaatagttcaagggtcagctaatgctctgagcttcatgg

SEQ ID NO: 21713 - DNA, 40 bp, Artificial Sequence
  Description of Artificial Sequence: Synthetic primer
ctgtacacaatgtccacagaagtttttcttccaaacagag

SEQ ID NO: 21714 - DNA, 40 bp, Artificial Sequence
  Description of Artificial Sequence: Synthetic primer
catggcccccgcccgtctgttcgcgctgctgctgttcttc

SEQ ID NO: 21715 - DNA, 40 bp, Artificial Sequence
  Description of Artificial Sequence: Synthetic primer
ttccaacaaaactcaccagaaaaacaattttattacaaag

SEQ ID NO: 21716 - DNA, 40 bp, Artificial Sequence
  Description of Artificial Sequence: Synthetic primer
ttttaagagtagcagtatatatgtctgtgctccctaaaag

SEQ ID NO: 21717 - DNA, 40 bp, Artificial Sequence
  Description of Artificial Sequence: Synthetic primer
gcctggcagcttcctcctcctccagctgttcttcaaggtc

SEQ ID NO: 21718 - DNA, 40 bp, Artificial Sequence
  Description of Artificial Sequence: Synthetic primer
attggcgtcgatcaggttgtccttcaggaagcgggggttc

SEQ ID NO: 21719 - DNA, 40 bp, Artificial Sequence
  Description of Artificial Sequence: Synthetic primer
gcatcaagccactcggcggcagcatggagctataactaag

SEQ ID NO: 21720 - DNA, 40 bp, Artificial Sequence
  Description of Artificial Sequence: Synthetic primer
ttagaaagactacatgttactaagcaggccacttttatgg

SEQ ID NO: 21721 - DNA, 40 bp, Artificial Sequence
  Description of Artificial Sequence: Synthetic primer
cacggagccatctgtcctgtccgcgggcttcatggaggag

SEQ ID NO: 21722 - DNA, 40 bp, Artificial Sequence
  Description of Artificial Sequence: Synthetic primer
actaggaccataggtacatcttcagagtccttaactcttt

SEQ ID NO: 21723 - DNA, 40 bp, Artificial Sequence
  Description of Artificial Sequence: Synthetic primer
ggaggagtaaggcacagaaagacaagccagaggggccaag

SEQ ID NO: 21724 - DNA, 40 bp, Artificial Sequence
  Description of Artificial Sequence: Synthetic primer
ccgcggggtccctgcgccgctcgtccttcgcagcctcagc

SEQ ID NO: 21725 - DNA, 40 bp, Artificial Sequence
  Description of Artificial Sequence: Synthetic primer
ttcaaacatggaaaagctcctattctgattgctacagatg

SEQ ID NO: 21726 - DNA, 40 bp, Artificial Sequence
  Description of Artificial Sequence: Synthetic primer
aaactgtattaaatctgtaacatcaaaggcagaaggtttg

SEQ ID NO: 21727 - DNA, 40 bp, Artificial Sequence
  Description of Artificial Sequence: Synthetic primer
cagctgggattttaaactttcccctccctcattctacatc

SEQ ID NO: 21728 - DNA, 40 bp, Artificial Sequence
  Description of Artificial Sequence: Synthetic primer
aactgggccccacagatgttgcaacgatagggtttctcac

SEQ ID NO: 21729 - DNA, 40 bp, Artificial Sequence
  Description of Artificial Sequence: Synthetic primer
cgccagggactggcggctcggaggttgcgtccaccctcaa

SEQ ID NO: 21730 - DNA, 40 bp, Artificial Sequence
  Description of Artificial Sequence: Synthetic primer
gttcctcacagaacaagacagacagctaagactacttcag

SEQ ID NO: 21731 - DNA, 40 bp, Artificial Sequence
  Description of Artificial Sequence: Synthetic primer
tgtcagtaattactcttaaagtaggaaatgtactgaaaac

SEQ ID NO: 21732 - DNA, 40 bp, Artificial Sequence
  Description of Artificial Sequence: Synthetic primer
atcttaatgaatgagtctgttgtgtgtcatgccagtgagg

SEQ ID NO: 21733 - DNA, 40 bp, Artificial Sequence
  Description of Artificial Sequence: Synthetic primer
ttacattattaaattgattataaaatcttcttggaaaaac

SEQ ID NO: 21734 - DNA, 40 bp, Artificial Sequence
  Description of Artificial Sequence: Synthetic primer
tgctgccgccattggtgccacccctcgagccaagggcaag

SEQ ID NO: 21735 - DNA, 40 bp, Artificial Sequence
  Description of Artificial Sequence: Synthetic primer
atggggcccggttgactgcccaggtggcctctctgacctc

SEQ ID NO: 21736 - DNA, 40 bp, Artificial Sequence
  Description of Artificial Sequence: Synthetic primer
tatgaatatctcctcccaaatcaaaagttgtctcctgaac

SEQ ID NO: 21737 - DNA, 40 bp, Artificial Sequence
  Description of Artificial Sequence: Synthetic primer
gggacttaccagaatggttatgatagcactcagcaatacg

SEQ ID NO: 21738 - DNA, 40 bp, Artificial Sequence
  Description of Artificial Sequence: Synthetic primer
ggccagatgcttctgacactcccttcgaatcattttcgtc

SEQ ID NO: 21739 - DNA, 40 bp, Artificial Sequence
  Description of Artificial Sequence: Synthetic primer
ccccaaagaaacgctctccccttggatctcattgaaacac

SEQ ID NO: 21740 - DNA, 40 bp, Artificial Sequence
  Description of Artificial Sequence: Synthetic primer
gggctcggcaccatacgtgtcctgcagtgagcggtagaac

SEQ ID NO: 21741 - DNA, 40 bp, Artificial Sequence
  Description of Artificial Sequence: Synthetic primer
aaaaaagccttcacagaaagagactgacactcgactcccc

SEQ ID NO: 21742 - DNA, 40 bp, Artificial Sequence
  Description of Artificial Sequence: Synthetic primer
caaccacatggttaaggtgattctggaaatctttaagttg

SEQ ID NO: 21743 - DNA, 40 bp, Artificial Sequence
  Description of Artificial Sequence: Synthetic primer
cctcctctccatggtgcacttcctcaggcatctaaaataa

SEQ ID NO: 21744 - DNA, 40 bp, Artificial Sequence
  Description of Artificial Sequence: Synthetic primer
agccttctttggacttgatttggaacttagcctggaaagc

SEQ ID NO: 21745 - DNA, 40 bp, Artificial Sequence
  Description of Artificial Sequence: Synthetic primer
cctggagccgtggcattgcttccttctatgtcaagataac

SEQ ID NO: 21746 - DNA, 40 bp, Artificial Sequence
  Description of Artificial Sequence: Synthetic primer
agagcgcgtgcgcacagagctggccgacaaggtcaccaag

SEQ ID NO: 21747 - DNA, 40 bp, Artificial Sequence
  Description of Artificial Sequence: Synthetic primer
gcttggaaatggaatggttttagaatatgaagaagaacac

SEQ ID NO: 21748 - DNA, 40 bp, Artificial Sequence
  Description of Artificial Sequence: Synthetic primer
cagtagctgaagggctatctacttgctttccaaagcctac

SEQ ID NO: 21749 - DNA, 40 bp, Artificial Sequence
  Description of Artificial Sequence: Synthetic primer
tgtagcagcgcggaaggtgcatatgaagaggaagtactgg

SEQ ID NO: 21750 - DNA, 40 bp, Artificial Sequence
  Description of Artificial Sequence: Synthetic primer
attttcttgttagcaaggcctgacaagatttaacataaac

SEQ ID NO: 21751 - DNA, 40 bp, Artificial Sequence
  Description of Artificial Sequence: Synthetic primer
caaaaagatacacttgaagtttcttaaggtggcaagtcca

SEQ ID NO: 21752 - DNA, 40 bp, Artificial Sequence
  Description of Artificial Sequence: Synthetic primer
tagaaaaaaagtgcttaatattgttattgctttgcagaaa

SEQ ID NO: 21753 - DNA, 40 bp, Artificial Sequence
  Description of Artificial Sequence: Synthetic primer
gccgaggaaacggtagcttaggacagttggctgttaagtg

SEQ ID NO: 21754 - DNA, 40 bp, Artificial Sequence
  Description of Artificial Sequence: Synthetic primer
ttccttcaggctccagtaccttaagagaacactgctccag

SEQ ID NO: 21755 - DNA, 40 bp, Artificial Sequence
  Description of Artificial Sequence: Synthetic primer
cgggcgctgctctccgctccgccaggccgccgccagactc

SEQ ID NO: 21756 - DNA, 40 bp, Artificial Sequence
  Description of Artificial Sequence: Synthetic primer
gaaagacaaggatgactggtttttagagtaggagaattag

SEQ ID NO: 21757 - DNA, 40 bp, Artificial Sequence
  Description of Artificial Sequence: Synthetic primer
aacccagcagctattccgcatgcagcagaagatattcaag

SEQ ID NO: 21758 - DNA, 40 bp, Artificial Sequence
  Description of Artificial Sequence: Synthetic primer
cagtgtgccaagttactcgagtctatatctttgactatgg

SEQ ID NO: 21759 - DNA, 40 bp, Artificial Sequence
  Description of Artificial Sequence: Synthetic primer
tgacttttaaagttgtttactttttcattccttccttttt

SEQ ID NO: 21760 - DNA, 40 bp, Artificial Sequence
  Description of Artificial Sequence: Synthetic primer
gttcatgattccttagaattactacagcttccaaggttac

SEQ ID NO: 21761 - DNA, 40 bp, Artificial Sequence
  Description of Artificial Sequence: Synthetic primer
tttcacccctggggtgtggcttatcagtattaaagtatcc

SEQ ID NO: 21762 - DNA, 40 bp, Artificial Sequence
  Description of Artificial Sequence: Synthetic primer
cagggccagcatggagcacctgggtccgcaccacctccac

SEQ ID NO: 21763 - DNA, 40 bp, Artificial Sequence
  Description of Artificial Sequence: Synthetic primer
atatttacatgtaacgctacagggtatggaacatgactgg

SEQ ID NO: 21764 - DNA, 40 bp, Artificial Sequence
  Description of Artificial Sequence: Synthetic primer
tttgagcttggggtgctcccggtaattcatatttcctatc

SEQ ID NO: 21765 - DNA, 40 bp, Artificial Sequence
  Description of Artificial Sequence: Synthetic primer
aacttcctgaagttcattgtaatgggcagccactgttgag

SEQ ID NO: 21766 - DNA, 40 bp, Artificial Sequence
  Description of Artificial Sequence: Synthetic primer
gaacaaaatagccatcatcttcaggttcatctttaatttg

SEQ ID NO: 21767 - DNA, 40 bp, Artificial Sequence
  Description of Artificial Sequence: Synthetic primer
aaattcaggaaacacagaaaatcctatcttacagaagtcc

SEQ ID NO: 21768 - DNA, 40 bp, Artificial Sequence
  Description of Artificial Sequence: Synthetic primer
ttgggaacaggttgcctcccctcagagcaggatcattaac

SEQ ID NO: 21769 - DNA, 40 bp, Artificial Sequence
  Description of Artificial Sequence: Synthetic primer
ctttggtcacggtccagcggtcacctacccccagcaccac

SEQ ID NO: 21770 - DNA, 40 bp, Artificial Sequence
  Description of Artificial Sequence: Synthetic primer
atcaatacactgttagcacttttatctatatcctcttcag

SEQ ID NO: 21771 - DNA, 40 bp, Artificial Sequence
  Description of Artificial Sequence: Synthetic primer
ccttcccaccctcaacctctgctgtcaaagtcaaccttag

SEQ ID NO: 21772 - DNA, 40 bp, Artificial Sequence
  Description of Artificial Sequence: Synthetic primer
tgcttcccagtgtagttggtctagttttcccactattaac

SEQ ID NO: 21773 - DNA, 40 bp, Artificial Sequence
  Description of Artificial Sequence: Synthetic primer
gcttgttgattctcagacgtggggcataaaacacaaagtc

SEQ ID NO: 21774 - DNA, 40 bp, Artificial Sequence
  Description of Artificial Sequence: Synthetic primer
tttctcactttacagaaacaagggataacgtctagatttg

SEQ ID NO: 21775 - DNA, 40 bp, Artificial Sequence
  Description of Artificial Sequence: Synthetic primer
gaccgtcacaaaaaggccgctgttgttttcttcatttctg

SEQ ID NO: 21776 - DNA, 40 bp, Artificial Sequence
  Description of Artificial Sequence: Synthetic primer
cttggagccggctcccgctcctaccctgcaaacagacctc

SEQ ID NO: 21777 - DNA, 40 bp, Artificial Sequence
  Description of Artificial Sequence: Synthetic primer
gcctgaagacaggcccaactttgccatcattttggagagg

SEQ ID NO: 21778 - DNA, 40 bp, Artificial Sequence
  Description of Artificial Sequence: Synthetic primer
agaattctagatcctaagattaaacttcaacttcagtaag

SEQ ID NO: 21779 - DNA, 40 bp, Artificial Sequence
  Description of Artificial Sequence: Synthetic primer
atttttgtttacaatattaaaatgtatgttagcaaaatgg

SEQ ID NO: 21780 - DNA, 40 bp, Artificial Sequence
  Description of Artificial Sequence: Synthetic primer
tgaccccgttttccagcatgtgttctgttagatttttatc

SEQ ID NO: 21781 - DNA, 40 bp, Artificial Sequence
  Description of Artificial Sequence: Synthetic primer
acccccctggcctgccctgacccttctatcaggccttctg

SEQ ID NO: 21782 - DNA, 40 bp, Artificial Sequence
  Description of Artificial Sequence: Synthetic primer
gtcagcacttcaacaagtatctggattagtagaaagaatc

SEQ ID NO: 21783 - DNA, 40 bp, Artificial Sequence
  Description of Artificial Sequence: Synthetic primer
ctggaagaggcgcggaggcgcaaggaggatgaagttgaag

SEQ ID NO: 21784 - DNA, 40 bp, Artificial Sequence
  Description of Artificial Sequence: Synthetic primer
ctgccacacacatttgagaactgaggatccaggctaatgc

SEQ ID NO: 21785 - DNA, 40 bp, Artificial Sequence
  Description of Artificial Sequence: Synthetic primer
tgctgacaaagcttcatttagttcctctgtagttttcttc

SEQ ID NO: 21786 - DNA, 40 bp, Artificial Sequence
  Description of Artificial Sequence: Synthetic primer
atactcagtggagaaactggggcaaaatctaggctactgg

SEQ ID NO: 21787 - DNA, 40 bp, Artificial Sequence
  Description of Artificial Sequence: Synthetic primer
caacaatgaacagacagatagctgtaaaagttgaaaaatg

SEQ ID NO: 21788 - DNA, 40 bp, Artificial Sequence
  Description of Artificial Sequence: Synthetic primer
ctgtttacacatcttctagattcttgagaacgccagacac

SEQ ID NO: 21789 - DNA, 40 bp, Artificial Sequence
  Description of Artificial Sequence: Synthetic primer
catcttttttgcctccctcatgtgaaggtctgcttgttgt

SEQ ID NO: 21790 - DNA, 40 bp, Artificial Sequence
  Description of Artificial Sequence: Synthetic primer
ctccagtctctgaacagccttcttctttgactctactacc

SEQ ID NO: 21791 - DNA, 40 bp, Artificial Sequence
  Description of Artificial Sequence: Synthetic primer
ccacaaacactcttctgaaaacttcaaatccattctcagg

SEQ ID NO: 21792 - DNA, 40 bp, Artificial Sequence
  Description of Artificial Sequence: Synthetic primer
ttgtttctaattcttgttcaagggaattcatctgactgac

SEQ ID NO: 21793 - DNA, 40 bp, Artificial Sequence
  Description of Artificial Sequence: Synthetic primer
ttgctttgcatatcaagttgccaaaggaatggaatttctg

SEQ ID NO: 21794 - DNA, 40 bp, Artificial Sequence
  Description of Artificial Sequence: Synthetic primer
tggggctactgtgtgtaagtaagaaggacataaaattgag

SEQ ID NO: 21795 - DNA, 40 bp, Artificial Sequence
  Description of Artificial Sequence: Synthetic primer
ccaggccctccagccccaccccccggagtcatctctgtac

SEQ ID NO: 21796 - DNA, 40 bp, Artificial Sequence
  Description of Artificial Sequence: Synthetic primer
tggggtgaatcatctgagcctggccatctggatataagac

SEQ ID NO: 21797 - DNA, 40 bp, Artificial Sequence
  Description of Artificial Sequence: Synthetic primer
cacagactccattcagaatcatgggagccttcaaatatac

SEQ ID NO: 21798 - DNA, 40 bp, Artificial Sequence
  Description of Artificial Sequence: Synthetic primer
gcaggcagctccgacgggcctgacacctgacccctgactg

SEQ ID NO: 21799 - DNA, 40 bp, Artificial Sequence
  Description of Artificial Sequence: Synthetic primer
ctctgcctttaattcacgttgaacgctgggtacctcactc

SEQ ID NO: 21800 - DNA, 40 bp, Artificial Sequence
  Description of Artificial Sequence: Synthetic primer
ctgtatgtcttcaagttccttggcctttttcaattctttc

SEQ ID NO: 21801 - DNA, 40 bp, Artificial Sequence
  Description of Artificial Sequence: Synthetic primer
gaggccacagaaaacttgctctctgtcagtgattctggag

SEQ ID NO: 21802 - DNA, 40 bp, Artificial Sequence
  Description of Artificial Sequence: Synthetic primer
tactggtttccctggtgctgctggccgagtcggtcctcct

SEQ ID NO: 21803 - DNA, 40 bp, Artificial Sequence
  Description of Artificial Sequence: Synthetic primer
aatgctctgaggctgacaagtgttatttattgctaaatgg

SEQ ID NO: 21804 - DNA, 40 bp, Artificial Sequence
  Description of Artificial Sequence: Synthetic primer
cagttatgctaagtatctctcaagtctcccatctgtaaac

SEQ ID NO: 21805 - DNA, 40 bp, Artificial Sequence
  Description of Artificial Sequence: Synthetic primer
tgcctccctttgaaaaatgccagtgacaagcgaaaccaac

SEQ ID NO: 21806 - DNA, 40 bp, Artificial Sequence
  Description of Artificial Sequence: Synthetic primer
cgaaactcagatctggtttcagtctcttgaaattttactc

SEQ ID NO: 21807 - DNA, 40 bp, Artificial Sequence
  Description of Artificial Sequence: Synthetic primer
aaaaagtagtacagtctgagccagtagatgagtaacagtg

SEQ ID NO: 21808 - DNA, 40 bp, Artificial Sequence
  Description of Artificial Sequence: Synthetic primer
gcacaaacggggtcggattggatttcttcccaaaatcaag

SEQ ID NO: 21809 - DNA, 40 bp, Artificial Sequence
  Description of Artificial Sequence: Synthetic primer
agcttctggagcagagccgagacgaagcagttctggagtg

SEQ ID NO: 21810 - DNA, 40 bp, Artificial Sequence
  Description of Artificial Sequence: Synthetic primer
ttgtaaacatgattcatcattattatttcactgtcaaagg

SEQ ID NO: 21811 - DNA, 40 bp, Artificial Sequence
  Description of Artificial Sequence: Synthetic primer
gcagcatcggccgcatctgcctcagctacaacacctatac

SEQ ID NO: 21812 - DNA, 40 bp, Artificial Sequence
  Description of Artificial Sequence: Synthetic primer
tttattcctttaaaacaatgaagtgatttacataaagtag

SEQ ID NO: 21813 - DNA, 40 bp, Artificial Sequence
  Description of Artificial Sequence: Synthetic primer
cacctgtcgcctggccttttccgtgccggagggcgcgagt

SEQ ID NO: 21814 - DNA, 40 bp, Artificial Sequence
  Description of Artificial Sequence: Synthetic primer
aacttcatacacttcgagatcagcatcttaacaattcatc

SEQ ID NO: 21815 - DNA, 40 bp, Artificial Sequence
  Description of Artificial Sequence: Synthetic primer
aaggctggagactttcacaggaatgacagcatctatgagg

SEQ ID NO: 21816 - DNA, 40 bp, Artificial Sequence
  Description of Artificial Sequence: Synthetic primer
tcggaggcttgacccctcggaaggtacgccctcttatctg

SEQ ID NO: 21817 - DNA, 40 bp, Artificial Sequence
  Description of Artificial Sequence: Synthetic primer
tgatgagtaccagaagtggctgctgctcgtaggcatctcg

SEQ ID NO: 21818 - DNA, 40 bp, Artificial Sequence
  Description of Artificial Sequence: Synthetic primer
ttcagaaaacccttttctacagttagggttgagttacttc

SEQ ID NO: 21819 - DNA, 40 bp, Artificial Sequence
  Description of Artificial Sequence: Synthetic primer
gataccagggtctaactgggagcccgatggcctccatgac

SEQ ID NO: 21820 - DNA, 40 bp, Artificial Sequence
  Description of Artificial Sequence: Synthetic primer
tgaattaagtattgaattccaggagcctgttcctgcttcg

SEQ ID NO: 21821 - DNA, 40 bp, Artificial Sequence
  Description of Artificial Sequence: Synthetic primer
ggaacagtgtttcccataattttcttcatgcaatgacatc

SEQ ID NO: 21822 - DNA, 40 bp, Artificial Sequence
  Description of Artificial Sequence: Synthetic primer
ttgggcaattgcaagtggcagcagcacagcactactatac

SEQ ID NO: 21823 - DNA, 40 bp, Artificial Sequence
  Description of Artificial Sequence: Synthetic primer
aactaaggactgttggtgcatgcttgtacagagcttagtg

SEQ ID NO: 21824 - DNA, 40 bp, Artificial Sequence
  Description of Artificial Sequence: Synthetic primer
atccaaaacacaaactgtgggttgaaatattaaccgtctc

SEQ ID NO: 21825 - DNA, 40 bp, Artificial Sequence
  Description of Artificial Sequence: Synthetic primer
actgggtgaggtgttttggctgtggagtagggcactgaag

SEQ ID NO: 21826 - DNA, 40 bp, Artificial Sequence
  Description of Artificial Sequence: Synthetic primer
cggggaggtgttacttgaacaggcatcgtccccagtgaag

SEQ ID NO: 21827 - DNA, 40 bp, Artificial Sequence
  Description of Artificial Sequence: Synthetic primer
ccccctccgcagcaggggccgaggcggacatgctgtgaac

SEQ ID NO: 21828 - DNA, 40 bp, Artificial Sequence
  Description of Artificial Sequence: Synthetic primer
ggttcaggttaaagaggcactgtcaacttactatacaagc

SEQ ID NO: 21829 - DNA, 40 bp, Artificial Sequence
  Description of Artificial Sequence: Synthetic primer
ggaaacctgatgaaccagttctatgatgttcttatccttg

SEQ ID NO: 21830 - DNA, 40 bp, Artificial Sequence
  Description of Artificial Sequence: Synthetic primer
atatattcactttcatttttgacaggattccctccacaac

SEQ ID NO: 21831 - DNA, 40 bp, Artificial Sequence
  Description of Artificial Sequence: Synthetic primer
gagcacaactttaagaggacataatggggtcctggccatc

SEQ ID NO: 21832 - DNA, 40 bp, Artificial Sequence
  Description of Artificial Sequence: Synthetic primer
ccaggcccaactctgctagcttcccagaccacccccatcg

SEQ ID NO: 21833 - DNA, 40 bp, Artificial Sequence
  Description of Artificial Sequence: Synthetic primer
tacatctaaggggccaggaccatatgctgacgttgtaaag

SEQ ID NO: 21834 - DNA, 40 bp, Artificial Sequence
  Description of Artificial Sequence: Synthetic primer
gcagcgggagctggacggcgagcgcgagcggcgcgagaaa

SEQ ID NO: 21835 - DNA, 40 bp, Artificial Sequence
  Description of Artificial Sequence: Synthetic primer
gaggtggcgggggtggcggaggcaggtctgttcggattgg

SEQ ID NO: 21836 - DNA, 40 bp, Artificial Sequence
  Description of Artificial Sequence: Synthetic primer
gacctggtgtctccagctgatgatttgtccctgtctgaag

SEQ ID NO: 21837 - DNA, 40 bp, Artificial Sequence
  Description of Artificial Sequence: Synthetic primer
gcagataattttaagtctgattattttaatatgccagtcc

SEQ ID NO: 21838 - DNA, 40 bp, Artificial Sequence
  Description of Artificial Sequence: Synthetic primer
tctccaaccaaactcatgattacagaacagaagctaaaac

SEQ ID NO: 21839 - DNA, 40 bp, Artificial Sequence
  Description of Artificial Sequence: Synthetic primer
ccctcaagctcagactctggggcagttggctctcggactg

SEQ ID NO: 21840 - DNA, 40 bp, Artificial Sequence
  Description of Artificial Sequence: Synthetic primer
ctgccgctttcctttaattaatacttctgcttgcttggac

SEQ ID NO: 21841 - DNA, 40 bp, Artificial Sequence
  Description of Artificial Sequence: Synthetic primer
ctagcaagttagtatctgatgacttggattcatctttagc

SEQ ID NO: 21842 - DNA, 40 bp, Artificial Sequence
  Description of Artificial Sequence: Synthetic primer
ccctggtggcagcgagggtgggcggcggcggagggagctg

SEQ ID NO: 21843 - DNA, 40 bp, Artificial Sequence
  Description of Artificial Sequence: Synthetic primer
aacctctttctgcatattccctgtatctgtatcgttcttc

SEQ ID NO: 21844 - DNA, 40 bp, Artificial Sequence
  Description of Artificial Sequence: Synthetic primer
ctggcttccagtgcttcaggtctgccggaagctcctctgg

SEQ ID NO: 21845 - DNA, 40 bp, Artificial Sequence
  Description of Artificial Sequence: Synthetic primer
atccagtgtacgatgtgctgattagtgttgtctttgttgg

SEQ ID NO: 21846 - DNA, 40 bp, Artificial Sequence
  Description of Artificial Sequence: Synthetic primer
tcaagtaagatctcggaggcctgggctcttaggacgagtg

SEQ ID NO: 21847 - DNA, 40 bp, Artificial Sequence
  Description of Artificial Sequence: Synthetic primer
gtgaaaaatctgcttcttcaaagaattcaaaactgctgag

SEQ ID NO: 21848 - DNA, 40 bp, Artificial Sequence
  Description of Artificial Sequence: Synthetic primer
ctaacttcattaccaaaattggccaaatcccattagaaag

SEQ ID NO: 21849 - DNA, 40 bp, Artificial Sequence
  Description of Artificial Sequence: Synthetic primer
cgatcccggccgcccgctcgcccgccagccccgcggaacc

SEQ ID NO: 21850 - DNA, 40 bp, Artificial Sequence
  Description of Artificial Sequence: Synthetic primer
gcttagagatggagcaaagttggcctcaccttggggaacc

SEQ ID NO: 21851 - DNA, 40 bp, Artificial Sequence
  Description of Artificial Sequence: Synthetic primer
aatctttgtggctctcactgctgtagtaattagagggttc

SEQ ID NO: 21852 - DNA, 40 bp, Artificial Sequence
  Description of Artificial Sequence: Synthetic primer
agtccgacgacggtctctccaccgccagctccccggaacc

SEQ ID NO: 21853 - DNA, 40 bp, Artificial Sequence
  Description of Artificial Sequence: Synthetic primer
aaaaataaggtgtattgcgtcttagcagtgatttttatcc

SEQ ID NO: 21854 - DNA, 40 bp, Artificial Sequence
  Description of Artificial Sequence: Synthetic primer
ccaaagcctttccaagtgcatcacctgtctgtgagcttcc

SEQ ID NO: 21855 - DNA, 40 bp, Artificial Sequence
  Description of Artificial Sequence: Synthetic primer
ccaagtcagtgctgcagtagtctttgggtaggttgatctc

SEQ ID NO: 21856 - DNA, 40 bp, Artificial Sequence
  Description of Artificial Sequence: Synthetic primer
tggaacccaacgccaactggagatttcatctacttacatc

SEQ ID NO: 21857 - DNA, 40 bp, Artificial Sequence
  Description of Artificial Sequence: Synthetic primer
gagatcggcgacaggtcctgggctgttggcccccgggaag

SEQ ID NO: 21858 - DNA, 40 bp, Artificial Sequence
  Description of Artificial Sequence: Synthetic primer
tgttgaatatactctggaaacaacatttgaagatttgctc

SEQ ID NO: 21859 - DNA, 40 bp, Artificial Sequence
  Description of Artificial Sequence: Synthetic primer
acaaaggaaattgaagccattcatgcaatcttgagatcag

SEQ ID NO: 21860 - DNA, 40 bp, Artificial Sequence
  Description of Artificial Sequence: Synthetic primer
gttttctggggaaaggggacaaggaaggaaaagaaagaag

SEQ ID NO: 21861 - DNA, 40 bp, Artificial Sequence
  Description of Artificial Sequence: Synthetic primer
gatcaaccccagacacgagacacctaaggccagactcacg

SEQ ID NO: 21862 - DNA, 40 bp, Artificial Sequence
  Description of Artificial Sequence: Synthetic primer
gatccgccagttctcttcctgctctccaaggttcaacaag

SEQ ID NO: 21863 - DNA, 40 bp, Artificial Sequence
  Description of Artificial Sequence: Synthetic primer
cttgattgactcccttctcttctccacctctgagaacagg

SEQ ID NO: 21864 - DNA, 40 bp, Artificial Sequence
  Description of Artificial Sequence: Synthetic primer
ctctcgggagaagcagcgcctgttcccggggcagatccag

SEQ ID NO: 21865 - DNA, 40 bp, Artificial Sequence
  Description of Artificial Sequence: Synthetic primer
gctcttgttgactcttgtcaccatggatacccatggcagg

SEQ ID NO: 21866 - DNA, 40 bp, Artificial Sequence
  Description of Artificial Sequence: Synthetic primer
tggtttcttggtgtagtattaccaaaattttcatcttgag

SEQ ID NO: 21867 - DNA, 40 bp, Artificial Sequence
  Description of Artificial Sequence: Synthetic primer
aaccctcttcagagtaataaattcactgtcgcctaaatac

SEQ ID NO: 21868 - DNA, 40 bp, Artificial Sequence
  Description of Artificial Sequence: Synthetic primer
ccttaaatgagacagctgaagaggaaagtagaataagcag

SEQ ID NO: 21869 - DNA, 40 bp, Artificial Sequence
  Description of Artificial Sequence: Synthetic primer
gtgaaggtgggtctggttgaagactctccctccacagcag

SEQ ID NO: 21870 - DNA, 40 bp, Artificial Sequence
  Description of Artificial Sequence: Synthetic primer
aattggcactaagctaccagagaatcaagctatccaaatg

SEQ ID NO: 21871 - DNA, 40 bp, Artificial Sequence
  Description of Artificial Sequence: Synthetic primer
ctaaggcagcagtgacactcaaggctgaagacataggtag

SEQ ID NO: 21872 - DNA, 40 bp, Artificial Sequence
  Description of Artificial Sequence: Synthetic primer
gaaagacaagaactattaaaagaaactccctattgaaaac

SEQ ID NO: 21873 - DNA, 40 bp, Artificial Sequence
  Description of Artificial Sequence: Synthetic primer
ttcttgttgtttatatgaaaacactcaaaatgatgcaacc

SEQ ID NO: 21874 - DNA, 40 bp, Artificial Sequence
  Description of Artificial Sequence: Synthetic primer
cctctggaggctccaggactttgcaacttcaacaaaactc

SEQ ID NO: 21875 - DNA, 40 bp, Artificial Sequence
  Description of Artificial Sequence: Synthetic primer
gtcatgcagctctttcaggaccatggcttcttcccgtcag

SEQ ID NO: 21876 - DNA, 40 bp, Artificial Sequence
  Description of Artificial Sequence: Synthetic primer
ttctcttggatttggctacacacttatagatcttctgcac

SEQ ID NO: 21877 - DNA, 40 bp, Artificial Sequence
  Description of Artificial Sequence: Synthetic primer
tggacccagaagtgcgtaaatattacctatggtagtaaac

SEQ ID NO: 21878 - DNA, 40 bp, Artificial Sequence
  Description of Artificial Sequence: Synthetic primer
ccgggctcgccgtttctgctttctgcagccctgctttacc

SEQ ID NO: 21879 - DNA, 40 bp, Artificial Sequence
  Description of Artificial Sequence: Synthetic primer
cccacctctgaggtcctgaagaggactccttgggggtttc

SEQ ID NO: 21880 - DNA, 40 bp, Artificial Sequence
  Description of Artificial Sequence: Synthetic primer
agtaatctagatatctttattatgtaaatgagtttaggtg

SEQ ID NO: 21881 - DNA, 40 bp, Artificial Sequence
  Description of Artificial Sequence: Synthetic primer
agacgacagatacattgagaatagccttcctcatagaaaa

SEQ ID NO: 21882 - DNA, 40 bp, Artificial Sequence
  Description of Artificial Sequence: Synthetic primer
agactcttcatgggcggagagccggagaacacaggcaagc

SEQ ID NO: 21883 - DNA, 40 bp, Artificial Sequence
  Description of Artificial Sequence: Synthetic primer
cgcgtgcctcgcccgctgctggggcacggcagagactaac

SEQ ID NO: 21884 - DNA, 40 bp, Artificial Sequence
  Description of Artificial Sequence: Synthetic primer
aaaggattattactcctattatgcagtgttccacagtacc

SEQ ID NO: 21885 - DNA, 40 bp, Artificial Sequence
  Description of Artificial Sequence: Synthetic primer
gaggctgtgtcactgaagtatccgaggatttaaacattcc

SEQ ID NO: 21886 - DNA, 40 bp, Artificial Sequence
  Description of Artificial Sequence: Synthetic primer
gaaggccttgaagagagtccggaggaaaatcaagaacaag

SEQ ID NO: 21887 - DNA, 40 bp, Artificial Sequence
  Description of Artificial Sequence: Synthetic primer
agttgctctaagtggattggatatggttggagtggcacag

SEQ ID NO: 21888 - DNA, 40 bp, Artificial Sequence
  Description of Artificial Sequence: Synthetic primer
tggaagatcgatgtcccgatcaggaaggtagagagttttc

SEQ ID NO: 21889 - DNA, 40 bp, Artificial Sequence
  Description of Artificial Sequence: Synthetic primer
gtccgggaacacctcgctctccagccttgccgggctctcc

SEQ ID NO: 21890 - DNA, 40 bp, Artificial Sequence
  Description of Artificial Sequence: Synthetic primer
ttaagtttacattttagtttctttgacatcttgtttacag

SEQ ID NO: 21891 - DNA, 40 bp, Artificial Sequence
  Description of Artificial Sequence: Synthetic primer
gagttttgttgagaggcctccagtttcatctttttagagg

SEQ ID NO: 21892 - DNA, 40 bp, Artificial Sequence
  Description of Artificial Sequence: Synthetic primer
ctctgtgttctgtgatttagtcaggcaataaaatgctctc

SEQ ID NO: 21893 - DNA, 40 bp, Artificial Sequence
  Description of Artificial Sequence: Synthetic primer
aaaaatggaagaaaatgaaaaggagttagcagcatgtcag

SEQ ID NO: 21894 - DNA, 40 bp, Artificial Sequence
  Description of Artificial Sequence: Synthetic primer
gaagatgaagatttttctccaagaccaattcctagtcctc

SEQ ID NO: 21895 - DNA, 40 bp, Artificial Sequence
  Description of Artificial Sequence: Synthetic primer
cctgtagcccactctgctcgccttagcactaccactcctg

SEQ ID NO: 21896 - DNA, 40 bp, Artificial Sequence
  Description of Artificial Sequence: Synthetic primer
agcattggatttgctaaaggagcttaagaatattcctatg

SEQ ID NO: 21897 - DNA, 40 bp, Artificial Sequence
  Description of Artificial Sequence: Synthetic primer
tgctgcagaagctcagggccagtcgccgccgcttccagag

SEQ ID NO: 21898 - DNA, 40 bp, Artificial Sequence
  Description of Artificial Sequence: Synthetic primer
ctaagaaaacaactctgtcaaaagctgtattcttcaaaag

SEQ ID NO: 21899 - DNA, 40 bp, Artificial Sequence
  Description of Artificial Sequence: Synthetic primer
tggtttttgttttacagggatacttgggcggggagccact

SEQ ID NO: 21900 - DNA, 40 bp, Artificial Sequence
  Description of Artificial Sequence: Synthetic primer
caccccgggctcctgttctccagcccagatgccagtgtcc

SEQ ID NO: 21901 - DNA, 40 bp, Artificial Sequence
  Description of Artificial Sequence: Synthetic primer
cagtctcattgggaaaattatttgtctatctttacatctc

SEQ ID NO: 21902 - DNA, 40 bp, Artificial Sequence
  Description of Artificial Sequence: Synthetic primer
gctctaaatcctcaatcatgtcaagatcaaaattatgtag

SEQ ID NO: 21903 - DNA, 40 bp, Artificial Sequence
  Description of Artificial Sequence: Synthetic primer
ggggtggtggtgtctgctttcctcttcactcccttctttg

SEQ ID NO: 21904 - DNA, 40 bp, Artificial Sequence
  Description of Artificial Sequence: Synthetic primer
ctcacgtggcgtgacgtccagcacatcattgtcttcacag

SEQ ID NO: 21905 - DNA, 40 bp, Artificial Sequence
  Description of Artificial Sequence: Synthetic primer
aggcttcttaggaaaattaaatccagaccctcacttccag

SEQ ID NO: 21906 - DNA, 40 bp, Artificial Sequence
  Description of Artificial Sequence: Synthetic primer
acaaaagtccaactcaaaactccattcagtcatctagacc

SEQ ID NO: 21907 - DNA, 40 bp, Artificial Sequence
  Description of Artificial Sequence: Synthetic primer
gatctgtaatttttattttcaccctctgtaccccatgacc

SEQ ID NO: 21908 - DNA, 40 bp, Artificial Sequence
  Description of Artificial Sequence: Synthetic primer
cggctgcctggtccacatacagcttctcccagtaagcatc

SEQ ID NO: 21909 - DNA, 40 bp, Artificial Sequence
  Description of Artificial Sequence: Synthetic primer
agccagcggccacctgggccggagcttcctgagtggagag

SEQ ID NO: 21910 - DNA, 40 bp, Artificial Sequence
  Description of Artificial Sequence: Synthetic primer
ggtttgccaccgtcatcaaattctgcttgtggttgttagc

SEQ ID NO: 21911 - DNA, 40 bp, Artificial Sequence
  Description of Artificial Sequence: Synthetic primer
gattcgcacatgtgtgcgcaaattgaagtccagtgaaaag

SEQ ID NO: 21912 - DNA, 40 bp, Artificial Sequence
  Description of Artificial Sequence: Synthetic primer
ttttcactgctaagcatggaaaagattaagaaagcagaac

SEQ ID NO: 21913 - DNA, 40 bp, Artificial Sequence
  Description of Artificial Sequence: Synthetic primer
actccaccccatctcaaccagcacgcagtggtctctcctc

SEQ ID NO: 21914 - DNA, 40 bp, Artificial Sequence
  Description of Artificial Sequence: Synthetic primer
ttcccctggaagtctgtggcctgtttattacacatgaaag

SEQ ID NO: 21915 - DNA, 40 bp, Artificial Sequence
  Description of Artificial Sequence: Synthetic primer
cacctgcttattttaagcatattaaaaaggaaactaattg

SEQ ID NO: 21916 - DNA, 40 bp, Artificial Sequence
  Description of Artificial Sequence: Synthetic primer
taatccgagcagcaagacattgtcgccgaggtgtgttttc

SEQ ID NO: 21917 - DNA, 40 bp, Artificial Sequence
  Description of Artificial Sequence: Synthetic primer
tctctcttcctcctgccgtcttattccttctcctttccag

SEQ ID NO: 21918 - DNA, 40 bp, Artificial Sequence
  Description of Artificial Sequence: Synthetic primer
tttgcagaaacaggccaattccagaaaattgtgctctatg

SEQ ID NO: 21919 - DNA, 40 bp, Artificial Sequence
  Description of Artificial Sequence: Synthetic primer
ttcctggggatcctggatatagctggatttgagatctttg

SEQ ID NO: 21920 - DNA, 40 bp, Artificial Sequence
  Description of Artificial Sequence: Synthetic primer
ccccaggtcacccccttttcttcctactctgtgcctggag

SEQ ID NO: 21921 - DNA, 40 bp, Artificial Sequence
  Description of Artificial Sequence: Synthetic primer
tattaaaaaataagatctgcacgagtctgactggcctttg

SEQ ID NO: 21922 - DNA, 40 bp, Artificial Sequence
  Description of Artificial Sequence: Synthetic primer
tgcctttccaaatctactaccattgcaaccgccaccactg

SEQ ID NO: 21923 - DNA, 40 bp, Artificial Sequence
  Description of Artificial Sequence: Synthetic primer
gttcggctcggtcctgccggagggtgcctagggcccgtga

SEQ ID NO: 21924 - DNA, 40 bp, Artificial Sequence
  Description of Artificial Sequence: Synthetic primer
gagacattctagggagtcttctactgataaggaaccaaag

SEQ ID NO: 21925 - DNA, 40 bp, Artificial Sequence
  Description of Artificial Sequence: Synthetic primer
ctcgggcgcttctgacgccgctttcagtttcctagtgcag

SEQ ID NO: 21926 - DNA, 40 bp, Artificial Sequence
  Description of Artificial Sequence: Synthetic primer
cacggctcccccacaacctctgaagacctctattcatgtg

SEQ ID NO: 21927 - DNA, 40 bp, Artificial Sequence
  Description of Artificial Sequence: Synthetic primer
tacaaagtatctgtcaacctagttaccatttttgtatttg

SEQ ID NO: 21928 - DNA, 40 bp, Artificial Sequence
  Description of Artificial Sequence: Synthetic primer
tttttcttttccctcttgccttccacgatgagactctttt

SEQ ID NO: 21929 - DNA, 40 bp, Artificial Sequence
  Description of Artificial Sequence: Synthetic primer
cacactatagaggcataagtggtatcagttttcatttttc

SEQ ID NO: 21930 - DNA, 40 bp, Artificial Sequence
  Description of Artificial Sequence: Synthetic primer
aaagggtgactgggctccaaacacatcatagcagttgacc

SEQ ID NO: 21931 - DNA, 40 bp, Artificial Sequence
  Description of Artificial Sequence: Synthetic primer
atgcctgaacctgccctgacctcccgagcaaacatgacag

SEQ ID NO: 21932 - DNA, 40 bp, Artificial Sequence
  Description of Artificial Sequence: Synthetic primer
gcgaggtcttaatccttgtgcagacatctcattaaaatac

SEQ ID NO: 21933 - DNA, 40 bp, Artificial Sequence
  Description of Artificial Sequence: Synthetic primer
cggtggagcaggtgcacaccacaggcttccgctggtcctg

SEQ ID NO: 21934 - DNA, 40 bp, Artificial Sequence
  Description of Artificial Sequence: Synthetic primer
ccaatgaagggaataaacttctgataggagtcttcatcag

SEQ ID NO: 21935 - DNA, 40 bp, Artificial Sequence
  Description of Artificial Sequence: Synthetic primer
agcccaccgaggccagggtggttccgggccggggcatctg

SEQ ID NO: 21936 - DNA, 40 bp, Artificial Sequence
  Description of Artificial Sequence: Synthetic primer
tggcccatgacgggcaggtttgcactagttgagtacaagg

SEQ ID NO: 21937 - DNA, 40 bp, Artificial Sequence
  Description of Artificial Sequence: Synthetic primer
ctttccatttgaaaaaggaagtgtccaatataaaaagaag

SEQ ID NO: 21938 - DNA, 40 bp, Artificial Sequence
  Description of Artificial Sequence: Synthetic primer
ggcctggggccacactaagtgtcggggccgtgttttgggg

SEQ ID NO: 21939 - DNA, 40 bp, Artificial Sequence
  Description of Artificial Sequence: Synthetic primer
cattgccaagaggagagccaaccagcaggaaacagaaatg

SEQ ID NO: 21940 - DNA, 40 bp, Artificial Sequence
  Description of Artificial Sequence: Synthetic primer
taacttttagcattaaataaaaataaaattgggagcactg

SEQ ID NO: 21941 - DNA, 40 bp, Artificial Sequence
  Description of Artificial Sequence: Synthetic primer
agggctccatactgtcccaataaggtgaggccagtagcag

SEQ ID NO: 21942 - DNA, 40 bp, Artificial Sequence
  Description of Artificial Sequence: Synthetic primer
actggggccactgggtcttaagaggagctgtgaagttgtg

SEQ ID NO: 21943 - DNA, 40 bp, Artificial Sequence
  Description of Artificial Sequence: Synthetic primer
ggtgtgagattctatggtggttttcaacaaagcattgcac

SEQ ID NO: 21944 - DNA, 40 bp, Artificial Sequence
  Description of Artificial Sequence: Synthetic primer
atgccagcgaggtgctcatcactcccttggagaagtttcg

SEQ ID NO: 21945 - DNA, 40 bp, Artificial Sequence
  Description of Artificial Sequence: Synthetic primer
tgttaacaggcaatccttctctgtttctcttattactctc

SEQ ID NO: 21946 - DNA, 40 bp, Artificial Sequence
  Description of Artificial Sequence: Synthetic primer
agctgcaaataatctagggtttggtgaatatagtggaatc

SEQ ID NO: 21947 - DNA, 40 bp, Artificial Sequence
  Description of Artificial Sequence: Synthetic primer
aggggtgaagttagttagctcctacctgtaccccgttagc

SEQ ID NO: 21948 - DNA, 40 bp, Artificial Sequence
  Description of Artificial Sequence: Synthetic primer
aaacttctccaagggagtgatgagcacctcgctggcattc

SEQ ID NO: 21949 - DNA, 40 bp, Artificial Sequence
  Description of Artificial Sequence: Synthetic primer
acagtattaccactcttcttgtattatagatttagaactg

SEQ ID NO: 21950 - DNA, 40 bp, Artificial Sequence
  Description of Artificial Sequence: Synthetic primer
gaaatgcaggaagttcagagttctaggagtggaagaggag

SEQ ID NO: 21951 - DNA, 40 bp, Artificial Sequence
  Description of Artificial Sequence: Synthetic primer
gttacaatttacattcattttcccatcttctgatgtggtc

SEQ ID NO: 21952 - DNA, 40 bp, Artificial Sequence
  Description of Artificial Sequence: Synthetic primer
ctcccgaaggaggcataggcgccccgctcaccgctcttgc

SEQ ID NO: 21953 - DNA, 40 bp, Artificial Sequence
  Description of Artificial Sequence: Synthetic primer
tgggcccccctggattggctggaccccctggtgaatctgg

SEQ ID NO: 21954 - DNA, 40 bp, Artificial Sequence
  Description of Artificial Sequence: Synthetic primer
gccccggcagaggcccggacgctgtccagggtgctgaagg

SEQ ID NO: 21955 - DNA, 40 bp, Artificial Sequence
  Description of Artificial Sequence: Synthetic primer
tgattctcaagccagagacaatctagcactttaaagaaac

SEQ ID NO: 21956 - DNA, 40 bp, Artificial Sequence
  Description of Artificial Sequence: Synthetic primer
cctcctctgtagctgcccagaggccaacaccgcccatacc

SEQ ID NO: 21957 - DNA, 40 bp, Artificial Sequence
  Description of Artificial Sequence: Synthetic primer
ggggtgcccctcgggctctcgattgggggacgaaagttct

SEQ ID NO: 21958 - DNA, 40 bp, Artificial Sequence
  Description of Artificial Sequence: Synthetic primer
gctgctgccgccggggccgctccagtgcctgcgaactctg

SEQ ID NO: 21959 - DNA, 40 bp, Artificial Sequence
  Description of Artificial Sequence: Synthetic primer
agcgctgccggctctcacgatctggagcaaacacatatag

SEQ ID NO: 21960 - DNA, 40 bp, Artificial Sequence
  Description of Artificial Sequence: Synthetic primer
gccgcgcggagcgccccttcgcgtcccctgcaccatgagc

SEQ ID NO: 21961 - DNA, 40 bp, Artificial Sequence
  Description of Artificial Sequence: Synthetic primer
gactcagagctgcacttagtaggggttcctcaaaggaagg

SEQ ID NO: 21962 - DNA, 40 bp, Artificial Sequence
  Description of Artificial Sequence: Synthetic primer
tactgcagcagctgtagctaagatagtgaaacctgggatg

SEQ ID NO: 21963 - DNA, 40 bp, Artificial Sequence
  Description of Artificial Sequence: Synthetic primer
cgcgacgaataccagcgcacgtgggtggccgtcgtggaag

SEQ ID NO: 21964 - DNA, 40 bp, Artificial Sequence
  Description of Artificial Sequence: Synthetic primer
caagctcatgaaagaaatcttagataagaaggttgagaag

SEQ ID NO: 21965 - DNA, 40 bp, Artificial Sequence
  Description of Artificial Sequence: Synthetic primer
ctcagatccgctttgtaccttgaactgatttccccaaatg

SEQ ID NO: 21966 - DNA, 40 bp, Artificial Sequence
  Description of Artificial Sequence: Synthetic primer
ctggagctagctgagaaccgcaagctcctcaccgagaagg

SEQ ID NO: 21967 - DNA, 40 bp, Artificial Sequence
  Description of Artificial Sequence: Synthetic primer
gggttatgtccccacttcatatgtcgaagtctgtttggac

SEQ ID NO: 21968 - DNA, 40 bp, Artificial Sequence
  Description of Artificial Sequence: Synthetic primer
gggcgtccaggccgcgccctttccccgacgcccacccaac

SEQ ID NO: 21969 - DNA, 40 bp, Artificial Sequence
  Description of Artificial Sequence: Synthetic primer
tttccaggcccagtctgactctgtctgtaatacctgattg

SEQ ID NO: 21970 - DNA, 40 bp, Artificial Sequence
  Description of Artificial Sequence: Synthetic primer
gcagctgccataacagggctccataaagttcacaaatatc

SEQ ID NO: 21971 - DNA, 40 bp, Artificial Sequence
  Description of Artificial Sequence: Synthetic primer
ggctgagagctgcgagacaccctcgtccccgatcttgttc

SEQ ID NO: 21972 - DNA, 40 bp, Artificial Sequence
  Description of Artificial Sequence: Synthetic primer
ctctcggagctccgccgccgccatcaacctcttcctcctc

SEQ ID NO: 21973 - DNA, 40 bp, Artificial Sequence
  Description of Artificial Sequence: Synthetic primer
ttgaagcacaatgatccttttgctcctggtggaacagttg

SEQ ID NO: 21974 - DNA, 40 bp, Artificial Sequence
  Description of Artificial Sequence: Synthetic primer
gctggagattatgttaatattatgtatttctgtagcttgc

SEQ ID NO: 21975 - DNA, 40 bp, Artificial Sequence
  Description of Artificial Sequence: Synthetic primer
cgcatgcgttccctgaacacacgctcttcattgtctttag

SEQ ID NO: 21976 - DNA, 40 bp, Artificial Sequence
  Description of Artificial Sequence: Synthetic primer
tcttattaagaaaggagtagcaaaggttgatcatgtccag

SEQ ID NO: 21977 - DNA, 40 bp, Artificial Sequence
  Description of Artificial Sequence: Synthetic primer
acgtgaggaaatggcgagtgcaccccaccccgggcagcag

SEQ ID NO: 21978 - DNA, 40 bp, Artificial Sequence
  Description of Artificial Sequence: Synthetic primer
ggcatttgaacgatgcagtgaaggtgttttcttactgacg

SEQ ID NO: 21979 - DNA, 40 bp, Artificial Sequence
  Description of Artificial Sequence: Synthetic primer
gcgtgaactggctcactagcacattgaaggaaacaactcc

SEQ ID NO: 21980 - DNA, 40 bp, Artificial Sequence
  Description of Artificial Sequence: Synthetic primer
tctcacatggcgagaagctctttagttccttaatcatttc

SEQ ID NO: 21981 - DNA, 40 bp, Artificial Sequence
  Description of Artificial Sequence: Synthetic primer
ggagagccttccttgagaggaataccaaatcagttaaacc

SEQ ID NO: 21982 - DNA, 40 bp, Artificial Sequence
  Description of Artificial Sequence: Synthetic primer
cctttcttcattgcaagaataaagccaggtgttcatcaaa

SEQ ID NO: 21983 - DNA, 40 bp, Artificial Sequence
  Description of Artificial Sequence: Synthetic primer
tgccactgtggagcagataactgcagtggttttctaggag

SEQ ID NO: 21984 - DNA, 40 bp, Artificial Sequence
  Description of Artificial Sequence: Synthetic primer
tctgtcttttaaagcagcaggatccggcgtaggaaatatg

SEQ ID NO: 21985 - DNA, 40 bp, Artificial Sequence
  Description of Artificial Sequence: Synthetic primer
tggcaacagtgtcatgaagattgaaactgtaggtgctttg

SEQ ID NO: 21986 - DNA, 40 bp, Artificial Sequence
  Description of Artificial Sequence: Synthetic primer
gcaagttctaaacttttagtagtgctacccatacacaacc

SEQ ID NO: 21987 - DNA, 40 bp, Artificial Sequence
  Description of Artificial Sequence: Synthetic primer
cccaaaaagatatcaaggtttcatctagaggcagaacaag

SEQ ID NO: 21988 - DNA, 40 bp, Artificial Sequence
  Description of Artificial Sequence: Synthetic primer
ggagggccaccgcatggacaagcccgccaactgcacacac

SEQ ID NO: 21989 - DNA, 40 bp, Artificial Sequence
  Description of Artificial Sequence: Synthetic primer
cttgccaagctggcaggaagtatcccatgcccagcagctc

SEQ ID NO: 21990 - DNA, 40 bp, Artificial Sequence
  Description of Artificial Sequence: Synthetic primer
gctgcggccatcttcccataagcctgccccgtcatcgtag

SEQ ID NO: 21991 - DNA, 40 bp, Artificial Sequence
  Description of Artificial Sequence: Synthetic primer
agaccacgagtctcctcgcccgtccggaagcaggctgaac

SEQ ID NO: 21992 - DNA, 40 bp, Artificial Sequence
  Description of Artificial Sequence: Synthetic primer
caaagaaccaaacttccctcaagccaatagttttcaccac

SEQ ID NO: 21993 - DNA, 40 bp, Artificial Sequence
  Description of Artificial Sequence: Synthetic primer
cgcccagcgcggagctctacagcaatgctctgcccgttgg

SEQ ID NO: 21994 - DNA, 40 bp, Artificial Sequence
  Description of Artificial Sequence: Synthetic primer
ctcacagtaagaagtacaactgcaagttctgtagcaaagc

SEQ ID NO: 21995 - DNA, 40 bp, Artificial Sequence
  Description of Artificial Sequence: Synthetic primer
gctgctgtgggtgttctgctcgacggggaggggtttgctg

SEQ ID NO: 21996 - DNA, 40 bp, Artificial Sequence
  Description of Artificial Sequence: Synthetic primer
agcactgagcctcacataacagcagctcacccaatttttc

SEQ ID NO: 21997 - DNA, 40 bp, Artificial Sequence
  Description of Artificial Sequence: Synthetic primer
accaaaaaaagttgcttccatatggttacattgttaattc

SEQ ID NO: 21998 - DNA, 40 bp, Artificial Sequence
  Description of Artificial Sequence: Synthetic primer
ttcctatcagaaggacatggtgaaggctgggaacgtgagg

SEQ ID NO: 21999 - DNA, 40 bp, Artificial Sequence
  Description of Artificial Sequence: Synthetic primer
ggcccgagcgcccacgtgctgcgagcggatgtgccgctga

SEQ ID NO: 22000 - DNA, 40 bp, Artificial Sequence
  Description of Artificial Sequence: Synthetic primer
gctgctcccattgctgccaccagagccccctaacttcttg

SEQ ID NO: 22001 - DNA, 40 bp, Artificial Sequence
  Description of Artificial Sequence: Synthetic primer
ctgctccgaaatgtagacgattcggcccgtcaggaaggag

SEQ ID NO: 22002 - DNA, 40 bp, Artificial Sequence
  Description of Artificial Sequence: Synthetic primer
aataatgatgaatcatgtttacaaagaaagattcccaaag

SEQ ID NO: 22003 - DNA, 40 bp, Artificial Sequence
  Description of Artificial Sequence: Synthetic primer
cctgctcatttcccagaccctcagccaagctccccagctc

SEQ ID NO: 22004 - DNA, 40 bp, Artificial Sequence
  Description of Artificial Sequence: Synthetic primer
ttttcttttactgtagctttattcagtagggagtggcaag

SEQ ID NO: 22005 - DNA, 40 bp, Artificial Sequence
  Description of Artificial Sequence: Synthetic primer
ctgcttggggaggggctggctgtttatcaaacttgctctc

SEQ ID NO: 22006 - DNA, 40 bp, Artificial Sequence
  Description of Artificial Sequence: Synthetic primer
cttctctcctggttttctaaaattcttcaggtcaatagtc

SEQ ID NO: 22007 - DNA, 40 bp, Artificial Sequence
  Description of Artificial Sequence: Synthetic primer
ttccatcagccaattgcaaacctgctccttggtccacttg

SEQ ID NO: 22008 - DNA, 40 bp, Artificial Sequence
  Description of Artificial Sequence: Synthetic primer
aggcaggggtcccctcatcagcctcaaggtcaggacacct

SEQ ID NO: 22009 - DNA, 40 bp, Artificial Sequence
  Description of Artificial Sequence: Synthetic primer
cttcctacttagcctgtcccaattccaactcacaaaaatg

SEQ ID NO: 22010 - DNA, 40 bp, Artificial Sequence
  Description of Artificial Sequence: Synthetic primer
gatggagcacagtttgtgtcccagcgcccatgctccatgc

SEQ ID NO: 22011 - DNA, 40 bp, Artificial Sequence
  Description of Artificial Sequence: Synthetic primer
cagaatctacatctgcatcgtccacacaagtaaaattctc

SEQ ID NO: 22012 - DNA, 40 bp, Artificial Sequence
  Description of Artificial Sequence: Synthetic primer
caaaaatttgaaattacaacacctgccattttctaagagg

SEQ ID NO: 22013 - DNA, 40 bp, Artificial Sequence
  Description of Artificial Sequence: Synthetic primer
ccatgatggatcggaagtgagcattagggttaacggctgc

SEQ ID NO: 22014 - DNA, 40 bp, Artificial Sequence
  Description of Artificial Sequence: Synthetic primer
actggccagaccagcctcagcgaccctgtgcatctgactg

SEQ ID NO: 22015 - DNA, 40 bp, Artificial Sequence
  Description of Artificial Sequence: Synthetic primer
cgtgtttggggagagcggcgggggaggcggcagcggagag

SEQ ID NO: 22016 - DNA, 40 bp, Artificial Sequence
  Description of Artificial Sequence: Synthetic primer
taagacatgatttaaaatgtctttctacccttatctcctc

SEQ ID NO: 22017 - DNA, 40 bp, Artificial Sequence
  Description of Artificial Sequence: Synthetic primer
ctttcctatctacagaatatagctgcatagctcccaccac

SEQ ID NO: 22018 - DNA, 40 bp, Artificial Sequence
  Description of Artificial Sequence: Synthetic primer
ttgtcgagaagaggcactggaatgagtaagaaggacactg

SEQ ID NO: 22019 - DNA, 40 bp, Artificial Sequence
  Description of Artificial Sequence: Synthetic primer
gttgacaatggtaggaggtactaggtgctttgaagatatg

SEQ ID NO: 22020 - DNA, 40 bp, Artificial Sequence
  Description of Artificial Sequence: Synthetic primer
tgttgtttgaaaatctccgagtaatcttagaagaagacag

SEQ ID NO: 22021 - DNA, 40 bp, Artificial Sequence
  Description of Artificial Sequence: Synthetic primer
tgcggccgcctggtaccttccttgccgtctctttcctctg

SEQ ID NO: 22022 - DNA, 40 bp, Artificial Sequence
  Description of Artificial Sequence: Synthetic primer
tggcacaccaccggctcccggtccacgggctcccggtcca

SEQ ID NO: 22023 - DNA, 40 bp, Artificial Sequence
  Description of Artificial Sequence: Synthetic primer
gttccaagcggccccttagctggaagcgtttctccaggac

SEQ ID NO: 22024 - DNA, 40 bp, Artificial Sequence
  Description of Artificial Sequence: Synthetic primer
gagctgcgaggtctggcagccggagtaggcctggctaatg

SEQ ID NO: 22025 - DNA, 40 bp, Artificial Sequence
  Description of Artificial Sequence: Synthetic primer
tgctctataaatgccatctctcaggaggtaaaagacatac

SEQ ID NO: 22026 - DNA, 40 bp, Artificial Sequence
  Description of Artificial Sequence: Synthetic primer
tgcccaccttccctacagatatcaagaatacttcagtcac

SEQ ID NO: 22027 - DNA, 40 bp, Artificial Sequence
  Description of Artificial Sequence: Synthetic primer
cccaagaagggtgagaggcctaggttttgaccattatgtg

SEQ ID NO: 22028 - DNA, 40 bp, Artificial Sequence
  Description of Artificial Sequence: Synthetic primer
gtcacagggagagaagaacgacatgggcaccatgggtgaa

SEQ ID NO: 22029 - DNA, 40 bp, Artificial Sequence
  Description of Artificial Sequence: Synthetic primer
ccggacgtgccgctggaggttcgaagagatgctgaaggag

SEQ ID NO: 22030 - DNA, 40 bp, Artificial Sequence
  Description of Artificial Sequence: Synthetic primer
gaagcgcttcccacacagcagacagaagacggccatgtca

SEQ ID NO: 22031 - DNA, 40 bp, Artificial Sequence
  Description of Artificial Sequence: Synthetic primer
tggtctaccaaactgaaattcaagtcttatctctgcttcc

SEQ ID NO: 22032 - DNA, 40 bp, Artificial Sequence
  Description of Artificial Sequence: Synthetic primer
cctgctaaccaagcagattaataaattcaaagcaggaacc

SEQ ID NO: 22033 - DNA, 40 bp, Artificial Sequence
  Description of Artificial Sequence: Synthetic primer
ttacatgcactgcattaaaaataagctctgatgtatttcc

SEQ ID NO: 22034 - DNA, 40 bp, Artificial Sequence
  Description of Artificial Sequence: Synthetic primer
ctcaaagggtcacaggttgcccctgcatctccaaattaag

SEQ ID NO: 22035 - DNA, 40 bp, Artificial Sequence
  Description of Artificial Sequence: Synthetic primer
caatgcaacaagctcagaaacacacagagatgattactac

SEQ ID NO: 22036 - DNA, 40 bp, Artificial Sequence
  Description of Artificial Sequence: Synthetic primer
aatatacttgtttttattttcaacttgtttccttaaattg

SEQ ID NO: 22037 - DNA, 40 bp, Artificial Sequence
  Description of Artificial Sequence: Synthetic primer
tgcctgggttttccctcttgtactcctcaatctttttctc

SEQ ID NO: 22038 - DNA, 40 bp, Artificial Sequence
  Description of Artificial Sequence: Synthetic primer
ggagaagtataaagaactcccttattgttattctcccatc

SEQ ID NO: 22039 - DNA, 40 bp, Artificial Sequence
  Description of Artificial Sequence: Synthetic primer
ttcgcgtctgcccggccaagaggcaaaggggaggttacgc

SEQ ID NO: 22040 - DNA, 40 bp, Artificial Sequence
  Description of Artificial Sequence: Synthetic primer
tccaccagctctgggaggggacatggaaatggaagatgtg

SEQ ID NO: 22041 - DNA, 40 bp, Artificial Sequence
  Description of Artificial Sequence: Synthetic primer
catagccctggcgcaggatcacctcaggcgcaatgtattc

SEQ ID NO: 22042 - DNA, 40 bp, Artificial Sequence
  Description of Artificial Sequence: Synthetic primer
cctataccccaaatcagtcactgcaacaggcagtaggtag

SEQ ID NO: 22043 - DNA, 40 bp, Artificial Sequence
  Description of Artificial Sequence: Synthetic primer
atattacagaaactctgtagaggctgaactgttgatgttc

SEQ ID NO: 22044 - DNA, 40 bp, Artificial Sequence
  Description of Artificial Sequence: Synthetic primer
actcccggtgtgtttctgaccctttcagccccattaaagc

SEQ ID NO: 22045 - DNA, 40 bp, Artificial Sequence
  Description of Artificial Sequence: Synthetic primer
aaccagttcttcgtgatagaggagtacaccgggcctgacc

SEQ ID NO: 22046 - DNA, 40 bp, Artificial Sequence
  Description of Artificial Sequence: Synthetic primer
aaatgagagcaagagaaatgctataccaagtaatattttc

SEQ ID NO: 22047 - DNA, 40 bp, Artificial Sequence
  Description of Artificial Sequence: Synthetic primer
cgggggcgggatcagcgcggggctgggggtcaacgagcac

SEQ ID NO: 22048 - DNA, 40 bp, Artificial Sequence
  Description of Artificial Sequence: Synthetic primer
caattccacttcctggggagggggctcagcagtggatgac

SEQ ID NO: 22049 - DNA, 40 bp, Artificial Sequence
  Description of Artificial Sequence: Synthetic primer
taccatgctgtcctcttagtgacctcgtcgccctgcaacc

SEQ ID NO: 22050 - DNA, 40 bp, Artificial Sequence
  Description of Artificial Sequence: Synthetic primer
gcaaaggcagtccgagccctgaagaacaacagtaatgata

SEQ ID NO: 22051 - DNA, 40 bp, Artificial Sequence
  Description of Artificial Sequence: Synthetic primer
atttacttgtattcctaactgttttgtatatgctgcattg

SEQ ID NO: 22052 - DNA, 40 bp, Artificial Sequence
  Description of Artificial Sequence: Synthetic primer
gctctggggttgggtcgacaacctttaggatctttactgc

SEQ ID NO: 22053 - DNA, 40 bp, Artificial Sequence
  Description of Artificial Sequence: Synthetic primer
aggcagcgctgcctgggggctggggaggggaggcccagag

SEQ ID NO: 22054 - DNA, 40 bp, Artificial Sequence
  Description of Artificial Sequence: Synthetic primer
attttccttcacccaaccaaagttccagggcttttcaagg

SEQ ID NO: 22055 - DNA, 40 bp, Artificial Sequence
  Description of Artificial Sequence: Synthetic primer
gccctggaaaggagaaggaataagacggcaggaggaagag

SEQ ID NO: 22056 - DNA, 40 bp, Artificial Sequence
  Description of Artificial Sequence: Synthetic primer
ccaggaacaactgtgtcagcagctagcccttttcctcaag

SEQ ID NO: 22057 - DNA, 40 bp, Artificial Sequence
  Description of Artificial Sequence: Synthetic primer
gcgggacacgccctcccccgacggcggcgctaacctctcg

SEQ ID NO: 22058 - DNA, 40 bp, Artificial Sequence
  Description of Artificial Sequence: Synthetic primer
aacgctccactaacttaacattctttcccaattgttcagc

SEQ ID NO: 22059 - DNA, 40 bp, Artificial Sequence
  Description of Artificial Sequence: Synthetic primer
gctgattgattcaatgaccctccagcgaatttcatacctc

SEQ ID NO: 22060 - DNA, 40 bp, Artificial Sequence
  Description of Artificial Sequence: Synthetic primer
caaggtttgccaagttgtgttctgttttaaataaaggttg

SEQ ID NO: 22061 - DNA, 40 bp, Artificial Sequence
  Description of Artificial Sequence: Synthetic primer
gcgcagaaagcctcagtggaatcctgtatcagaactttgg

SEQ ID NO: 22062 - DNA, 40 bp, Artificial Sequence
  Description of Artificial Sequence: Synthetic primer
catgagacttgtgttgttgccaagcgagggagccactagg

SEQ ID NO: 22063 - DNA, 40 bp, Artificial Sequence
  Description of Artificial Sequence: Synthetic primer
cagataacaaactccttctatctgctttctggaggcattc

SEQ ID NO: 22064 - DNA, 40 bp, Artificial Sequence
  Description of Artificial Sequence: Synthetic primer
tatgccccacctgccctgcttcctggctccttatcagtgc

SEQ ID NO: 22065 - DNA, 40 bp, Artificial Sequence
  Description of Artificial Sequence: Synthetic primer
ttagagtgttattttgataaaatccagttgctctgatatg

SEQ ID NO: 22066 - DNA, 40 bp, Artificial Sequence
  Description of Artificial Sequence: Synthetic primer
gaaggctctttaacaaaaagccaccccctctgagatcttg

SEQ ID NO: 22067 - DNA, 40 bp, Artificial Sequence
  Description of Artificial Sequence: Synthetic primer
ccaacagcaccagggaagccaggaggaccagcggggccgg

SEQ ID NO: 22068 - DNA, 40 bp, Artificial Sequence
  Description of Artificial Sequence: Synthetic primer
gtgttgccatcactgcgcaacgcctctgccacatctcttc

SEQ ID NO: 22069 - DNA, 40 bp, Artificial Sequence
  Description of Artificial Sequence: Synthetic primer
cccgctgctcactttccaccctctctccacctgcctctgg

SEQ ID NO: 22070 - DNA, 40 bp, Artificial Sequence
  Description of Artificial Sequence: Synthetic primer
aaagctcacgatcgttagcacagttggctttggggaccag

SEQ ID NO: 22071 - DNA, 40 bp, Artificial Sequence
  Description of Artificial Sequence: Synthetic primer
cctgcagcaaggggtggtcagggtggctggcaggagtgtg

SEQ ID NO: 22072 - DNA, 40 bp, Artificial Sequence
  Description of Artificial Sequence: Synthetic primer
tgataaaaaatgttataaaatcaccatactccattcatgt

SEQ ID NO: 22073 - DNA, 40 bp, Artificial Sequence
  Description of Artificial Sequence: Synthetic primer
cgggagcgcttggctgccatgttgttctttctgcgccttg

SEQ ID NO: 22074 - DNA, 40 bp, Artificial Sequence
  Description of Artificial Sequence: Synthetic primer
agaagatgactttacactgcctggagttcctgaaaaactg

SEQ ID NO: 22075 - DNA, 40 bp, Artificial Sequence
  Description of Artificial Sequence: Synthetic primer
agggcgccctccctcgtgtgtgcggagaagcaccagtctc

SEQ ID NO: 22076 - DNA, 40 bp, Artificial Sequence
  Description of Artificial Sequence: Synthetic primer
gacagacagaagcagcatggtgctaaatgacagaaaaatc

SEQ ID NO: 22077 - DNA, 40 bp, Artificial Sequence
  Description of Artificial Sequence: Synthetic primer
gagtggagcgagggagagacggtgggatggtgatgaagtg

SEQ ID NO: 22078 - DNA, 40 bp, Artificial Sequence
  Description of Artificial Sequence: Synthetic primer
tggtcatcatataccacacaaggcggaggaatgaagattg

SEQ ID NO: 22079 - DNA, 40 bp, Artificial Sequence
  Description of Artificial Sequence: Synthetic primer
gaagaagggttccacagaccaggagaagattgaattcctg

SEQ ID NO: 22080 - DNA, 40 bp, Artificial Sequence
  Description of Artificial Sequence: Synthetic primer
atatgtttttatgtatgtattttaaagaaatttcatctgc

SEQ ID NO: 22081 - DNA, 40 bp, Artificial Sequence
  Description of Artificial Sequence: Synthetic primer
gcgggaagacctcctcctcgcacttctgttcctcgcagac

SEQ ID NO: 22082 - DNA, 40 bp, Artificial Sequence
  Description of Artificial Sequence: Synthetic primer
tttgcagctcagaaactgctcctttcccgctccacacttc

SEQ ID NO: 22083 - DNA, 40 bp, Artificial Sequence
  Description of Artificial Sequence: Synthetic primer
gttggtgctcctggagccaaaggtgctcgcggcagcgctg

SEQ ID NO: 22084 - DNA, 40 bp, Artificial Sequence
  Description of Artificial Sequence: Synthetic primer
gcagcccttctggctccttaaatgtagctacctctttttc

SEQ ID NO: 22085 - DNA, 40 bp, Artificial Sequence
  Description of Artificial Sequence: Synthetic primer
agctggtggattattgttcctatacagtgttttcaatgtc

SEQ ID NO: 22086 - DNA, 40 bp, Artificial Sequence
  Description of Artificial Sequence: Synthetic primer
agggcaagatcatctctggggccagcctcctcatctctgc

SEQ ID NO: 22087 - DNA, 40 bp, Artificial Sequence
  Description of Artificial Sequence: Synthetic primer
tgtctggacaagatcgatggctacgagtgtgcctgtgagc

SEQ ID NO: 22088 - DNA, 40 bp, Artificial Sequence
  Description of Artificial Sequence: Synthetic primer
aagtccatatgagacagtgctttggggctcaggccatttg

SEQ ID NO: 22089 - DNA, 40 bp, Artificial Sequence
  Description of Artificial Sequence: Synthetic primer
cattttttagatgacctctttccttgttttgttttcatgc

SEQ ID NO: 22090 - DNA, 40 bp, Artificial Sequence
  Description of Artificial Sequence: Synthetic primer
atatctttaactaaacagattgatcagttgtccaaagatg

SEQ ID NO: 22091 - DNA, 40 bp, Artificial Sequence
  Description of Artificial Sequence: Synthetic primer
ccagcccgtgatggcgggttccccgaacattatcagcttg

SEQ ID NO: 22092 - DNA, 40 bp, Artificial Sequence
  Description of Artificial Sequence: Synthetic primer
caggacccattttctcatctccaagcccttttccaagtcc

SEQ ID NO: 22093 - DNA, 40 bp, Artificial Sequence
  Description of Artificial Sequence: Synthetic primer
aggctgcaataagagatattttaagctgtcccacttacag

SEQ ID NO: 22094 - DNA, 40 bp, Artificial Sequence
  Description of Artificial Sequence: Synthetic primer
gggctggccgtggcaccccgtcagcaacacggcagaactc

SEQ ID NO: 22095 - DNA, 40 bp, Artificial Sequence
  Description of Artificial Sequence: Synthetic primer
gacatgactcggtgcaatttgctggaagtttgtaagtttg

SEQ ID NO: 22096 - DNA, 40 bp, Artificial Sequence
  Description of Artificial Sequence: Synthetic primer
acagattaactataacatcatcagaaggaattttactcag

SEQ ID NO: 22097 - DNA, 40 bp, Artificial Sequence
  Description of Artificial Sequence: Synthetic primer
acacgtggagaaggaccggatttccgactggggagagctg

SEQ ID NO: 22098 - DNA, 40 bp, Artificial Sequence
  Description of Artificial Sequence: Synthetic primer
gaccgagggtgccgagcgggagtggcctcgttggtaggac

SEQ ID NO: 22099 - DNA, 40 bp, Artificial Sequence
  Description of Artificial Sequence: Synthetic primer
gcacttatacaggcaactgggcacaaggaaaataaagacg

SEQ ID NO: 22100 - DNA, 40 bp, Artificial Sequence
  Description of Artificial Sequence: Synthetic primer
ggggcagagaggcgcccgaaacacagcggttagagttctg

SEQ ID NO: 22101 - DNA, 40 bp, Artificial Sequence
  Description of Artificial Sequence: Synthetic primer
cccactccgggcccgccttcggtgcggacggagatcagtg

SEQ ID NO: 22102 - DNA, 40 bp, Artificial Sequence
  Description of Artificial Sequence: Synthetic primer
tttgcacagggcagctatgctgaagccgccaaagttgcag

SEQ ID NO: 22103 - DNA, 40 bp, Artificial Sequence
  Description of Artificial Sequence: Synthetic primer
aggtcggcagcagtggtggcgagttggcagcagttggtga

SEQ ID NO: 22104 - DNA, 40 bp, Artificial Sequence
  Description of Artificial Sequence: Synthetic primer
tgtatgaaggccaggtgtccggaatgcccaacgacccaag

SEQ ID NO: 22105 - DNA, 40 bp, Artificial Sequence
  Description of Artificial Sequence: Synthetic primer
atgaaaacctcggaagttttaatttgaggttatctgctac

SEQ ID NO: 22106 - DNA, 40 bp, Artificial Sequence
  Description of Artificial Sequence: Synthetic primer
ttgacttcctggaagctggagtggtggcctgtttggattc

SEQ ID NO: 22107 - DNA, 40 bp, Artificial Sequence
  Description of Artificial Sequence: Synthetic primer
actcaggatagacaggaggcttttgagagattcagtttag

SEQ ID NO: 22108 - DNA, 40 bp, Artificial Sequence
  Description of Artificial Sequence: Synthetic primer
ctccaacagctgctccagtagatcctgggtaagagtttgg

SEQ ID NO: 22109 - DNA, 40 bp, Artificial Sequence
  Description of Artificial Sequence: Synthetic primer
aaagtgtacaatatgcacacttggaaaatacaaaattaaa

SEQ ID NO: 22110 - DNA, 40 bp, Artificial Sequence
  Description of Artificial Sequence: Synthetic primer
gaattattcttttctatatatttagttataaatctttctc

SEQ ID NO: 22111 - DNA, 40 bp, Artificial Sequence
  Description of Artificial Sequence: Synthetic primer
tccaccagcaccacctctggcaccacttctcccagtgagc

SEQ ID NO: 22112 - DNA, 40 bp, Artificial Sequence
  Description of Artificial Sequence: Synthetic primer
agcattccatatgaaatcctctatcacaggaatcacaaaa

SEQ ID NO: 22113 - DNA, 40 bp, Artificial Sequence
  Description of Artificial Sequence: Synthetic primer
tcttcgcggcagctaaggatttgaataccacatctaattc

SEQ ID NO: 22114 - DNA, 40 bp, Artificial Sequence
  Description of Artificial Sequence: Synthetic primer
ttgtcccagaattttcctctccaaagaaagctccccagag

SEQ ID NO: 22115 - DNA, 40 bp, Artificial Sequence
  Description of Artificial Sequence: Synthetic primer
tcctcggagaaaatcgtctatgtgtatatgaagctaaact

SEQ ID NO: 22116 - DNA, 40 bp, Artificial Sequence
  Description of Artificial Sequence: Synthetic primer
ttgctgccgtccacttcatttctttgcttatttttctgtg

SEQ ID NO: 22117 - DNA, 40 bp, Artificial Sequence
  Description of Artificial Sequence: Synthetic primer
gagagtgccatcatgaatccagcctctaaggtgatagctc

SEQ ID NO: 22118 - DNA, 40 bp, Artificial Sequence
  Description of Artificial Sequence: Synthetic primer
taatgctttacagttttctggatttggaatatcagggtag

SEQ ID NO: 22119 - DNA, 40 bp, Artificial Sequence
  Description of Artificial Sequence: Synthetic primer
cttggaagggaaaagaaccagaaggagcctttatgagatg

SEQ ID NO: 22120 - DNA, 40 bp, Artificial Sequence
  Description of Artificial Sequence: Synthetic primer
aatgcagctcaacctctgcagtaacagattagaatcaatg

SEQ ID NO: 22121 - DNA, 40 bp, Artificial Sequence
  Description of Artificial Sequence: Synthetic primer
agaccccggcccggcgaccgagctgggcccgtgagccact

SEQ ID NO: 22122 - DNA, 40 bp, Artificial Sequence
  Description of Artificial Sequence: Synthetic primer
aataatgaactaattctcttagctcattcaatctctttcg

SEQ ID NO: 22123 - DNA, 40 bp, Artificial Sequence
  Description of Artificial Sequence: Synthetic primer
cactggtgagcctgtcttcagttgcttgtttgaaaatatc

SEQ ID NO: 22124 - DNA, 40 bp, Artificial Sequence
  Description of Artificial Sequence: Synthetic primer
tggcagtgccgcacggcctccagcacctgccagaagaagc

SEQ ID NO: 22125 - DNA, 40 bp, Artificial Sequence
  Description of Artificial Sequence: Synthetic primer
taaaacatatgttggtgatcaacttcaaagaacctcaaag

SEQ ID NO: 22126 - DNA, 40 bp, Artificial Sequence
  Description of Artificial Sequence: Synthetic primer
gtctttttaaaaatactggcaccaaaagaaatagatccag

SEQ ID NO: 22127 - DNA, 40 bp, Artificial Sequence
  Description of Artificial Sequence: Synthetic primer
cccaggagctcattccgtacttcgtcactgtaggcgatcc

SEQ ID NO: 22128 - DNA, 40 bp, Artificial Sequence
  Description of Artificial Sequence: Synthetic primer
cggggccgcctgagaacgagtccgcagccgccgccattcc

SEQ ID NO: 22129 - DNA, 40 bp, Artificial Sequence
  Description of Artificial Sequence: Synthetic primer
ctgtgcctgcaaactatctgcattctctaccatgtccatc

SEQ ID NO: 22130 - DNA, 40 bp, Artificial Sequence
  Description of Artificial Sequence: Synthetic primer
cctgattcattctgctaacaatactaagcaagggaggaaa

SEQ ID NO: 22131 - DNA, 40 bp, Artificial Sequence
  Description of Artificial Sequence: Synthetic primer
cccctgagagatggaaacacttgtgaaaagaaataagtag

SEQ ID NO: 22132 - DNA, 40 bp, Artificial Sequence
  Description of Artificial Sequence: Synthetic primer
tgggcagtggatcagtattgtttctggggaaatccacacc

SEQ ID NO: 22133 - DNA, 40 bp, Artificial Sequence
  Description of Artificial Sequence: Synthetic primer
tggtgagcaggctgggtctttgtctgtcttcttctacacg

SEQ ID NO: 22134 - DNA, 40 bp, Artificial Sequence
  Description of Artificial Sequence: Synthetic primer
cctgttcgcgacaagcccgccgggatcccgggccctgggc

SEQ ID NO: 22135 - DNA, 40 bp, Artificial Sequence
  Description of Artificial Sequence: Synthetic primer
ccccacatttttccaaatagaagccagctgtgtgtctcag

SEQ ID NO: 22136 - DNA, 40 bp, Artificial Sequence
  Description of Artificial Sequence: Synthetic primer
tctgcccccacgacctctgtagcccctctctccaccgtag

SEQ ID NO: 22137 - DNA, 40 bp, Artificial Sequence
  Description of Artificial Sequence: Synthetic primer
cccccccagattttcccatttctctgggctctcatcttgc

SEQ ID NO: 22138 - DNA, 40 bp, Artificial Sequence
  Description of Artificial Sequence: Synthetic primer
tcctcagcagggggatcattcacagtgaggacagacacag

SEQ ID NO: 22139 - DNA, 40 bp, Artificial Sequence
  Description of Artificial Sequence: Synthetic primer
aatatatacaatatatacaaacagtacatccacatttttc

SEQ ID NO: 22140 - DNA, 40 bp, Artificial Sequence
  Description of Artificial Sequence: Synthetic primer
atctgtctgaaaaatgaggattttacatttggctgtattc

SEQ ID NO: 22141 - DNA, 40 bp, Artificial Sequence
  Description of Artificial Sequence: Synthetic primer
atttgaaattcctgtcccttcatctccaatttcagcttct

SEQ ID NO: 22142 - DNA, 40 bp, Artificial Sequence
  Description of Artificial Sequence: Synthetic primer
agatatgtgatctggtgtttccgccgctgctggcctgttg

SEQ ID NO: 22143 - DNA, 40 bp, Artificial Sequence
  Description of Artificial Sequence: Synthetic primer
cgtaggcacactcaaacaacgactggtcctcactcacaac

SEQ ID NO: 22144 - DNA, 40 bp, Artificial Sequence
  Description of Artificial Sequence: Synthetic primer
gtggtacaacagattatctctgaattagagcgatgttgac

SEQ ID NO: 22145 - DNA, 40 bp, Artificial Sequence
  Description of Artificial Sequence: Synthetic primer
gcagcttgcaagaaggtgctctgaagtgaggctcttagtg

SEQ ID NO: 22146 - DNA, 40 bp, Artificial Sequence
  Description of Artificial Sequence: Synthetic primer
taaaactcccaaagaaaatctgctctcctttctgatctaa

SEQ ID NO: 22147 - DNA, 40 bp, Artificial Sequence
  Description of Artificial Sequence: Synthetic primer
cccatatctccctgaggtctcaaggctataggactacttg

SEQ ID NO: 22148 - DNA, 40 bp, Artificial Sequence
  Description of Artificial Sequence: Synthetic primer
aacattattgtacaacaacttagcagcatcatacattttt

SEQ ID NO: 22149 - DNA, 40 bp, Artificial Sequence
  Description of Artificial Sequence: Synthetic primer
tttcggtttcagttgctaaccagtaaggaaacattacatc

SEQ ID NO: 22150 - DNA, 40 bp, Artificial Sequence
  Description of Artificial Sequence: Synthetic primer
acattataggactggaataagagcttaaacttctcactgg

SEQ ID NO: 22151 - DNA, 40 bp, Artificial Sequence
  Description of Artificial Sequence: Synthetic primer
tcaactttcacaatatttaattaaagttacttcctgtctg

SEQ ID NO: 22152 - DNA, 40 bp, Artificial Sequence
  Description of Artificial Sequence: Synthetic primer
ggcaagatcgtgtatcccacggagaaggtgaactgtctgg

SEQ ID NO: 22153 - DNA, 40 bp, Artificial Sequence
  Description of Artificial Sequence: Synthetic primer
gcaacagcatctgttaatctaaaagtgagtcctaaaagag

SEQ ID NO: 22154 - DNA, 40 bp, Artificial Sequence
  Description of Artificial Sequence: Synthetic primer
tcttctccataagtggagaaatgaaaagtaagaacagctc

SEQ ID NO: 22155 - DNA, 40 bp, Artificial Sequence
  Description of Artificial Sequence: Synthetic primer
gtggacaggattttgagctgggtgcttatggttgggattc

SEQ ID NO: 22156 - DNA, 40 bp, Artificial Sequence
  Description of Artificial Sequence: Synthetic primer
acagcagcaacctctgggttcagcttttgccaagcttcag

SEQ ID NO: 22157 - DNA, 40 bp, Artificial Sequence
  Description of Artificial Sequence: Synthetic primer
cctcgatagagacagaaactgaactgtcagtccttagagc

SEQ ID NO: 22158 - DNA, 40 bp, Artificial Sequence
  Description of Artificial Sequence: Synthetic primer
gcacaagttcctgatgatgaacagtttgtcccagattttc

SEQ ID NO: 22159 - DNA, 40 bp, Artificial Sequence
  Description of Artificial Sequence: Synthetic primer
aatttaaaagtgctattttgtttgtatttgaaaatctctg

SEQ ID NO: 22160 - DNA, 40 bp, Artificial Sequence
  Description of Artificial Sequence: Synthetic primer
ggtagcaaaaatgaccccgggactttgccctggccgctac

SEQ ID NO: 22161 - DNA, 40 bp, Artificial Sequence
  Description of Artificial Sequence: Synthetic primer
aatgatttttataatgaaatgacaagaataacccttttgg

SEQ ID NO: 22162 - DNA, 40 bp, Artificial Sequence
  Description of Artificial Sequence: Synthetic primer
gcttggctctcctcttttccttgttgacatctttctgttg

SEQ ID NO: 22163 - DNA, 40 bp, Artificial Sequence
  Description of Artificial Sequence: Synthetic primer
cctctcgcgccggggcggggtgcagcgggggagggacgtg

SEQ ID NO: 22164 - DNA, 40 bp, Artificial Sequence
  Description of Artificial Sequence: Synthetic primer
gtcccaaatcatcttgtgcagcttgtaatactgcattttg

SEQ ID NO: 22165 - DNA, 40 bp, Artificial Sequence
  Description of Artificial Sequence: Synthetic primer
cgatcgtcaggggtgccacggtgggccggagggtgccggc

SEQ ID NO: 22166 - DNA, 40 bp, Artificial Sequence
  Description of Artificial Sequence: Synthetic primer
ggggattcgggagcagctgactgatgttgttcatactgag

SEQ ID NO: 22167 - DNA, 40 bp, Artificial Sequence
  Description of Artificial Sequence: Synthetic primer
cttccttctccttcatgcggccatgcgacacgaggtagtc

SEQ ID NO: 22168 - DNA, 40 bp, Artificial Sequence
  Description of Artificial Sequence: Synthetic primer
gtcctgggcaagtagggtggcatgctattgggaggggtag

SEQ ID NO: 22169 - DNA, 40 bp, Artificial Sequence
  Description of Artificial Sequence: Synthetic primer
ttgttagtaacattcttgagttcttcttccaggtcaccac

SEQ ID NO: 22170 - DNA, 40 bp, Artificial Sequence
  Description of Artificial Sequence: Synthetic primer
agactaaatggggaaagttcccttgtactacagacacagc

SEQ ID NO: 22171 - DNA, 40 bp, Artificial Sequence
  Description of Artificial Sequence: Synthetic primer
gaaaatgcaggctgcaacaaaattggcaacttcagtactg

SEQ ID NO: 22172 - DNA, 40 bp, Artificial Sequence
  Description of Artificial Sequence: Synthetic primer
aaattgtttttgttgctatctgtaaatcttcctctaaagc

SEQ ID NO: 22173 - DNA, 40 bp, Artificial Sequence
  Description of Artificial Sequence: Synthetic primer
gcatggaactagctttagtaatataatcgcgaatttgaac

SEQ ID NO: 22174 - DNA, 40 bp, Artificial Sequence
  Description of Artificial Sequence: Synthetic primer
gactaaaatctttcatgatgattccctcggtcagaaattg

SEQ ID NO: 22175 - DNA, 40 bp, Artificial Sequence
  Description of Artificial Sequence: Synthetic primer
cagcagacaatttcttctgggtagttcacaggtctgatcc

SEQ ID NO: 22176 - DNA, 40 bp, Artificial Sequence
  Description of Artificial Sequence: Synthetic primer
ccaggctccccttgctgagccgctgccacttcaccctgtg

SEQ ID NO: 22177 - DNA, 40 bp, Artificial Sequence
  Description of Artificial Sequence: Synthetic primer
cgctcgttctccagagtctgctttgccttctcgaggtttg

SEQ ID NO: 22178 - DNA, 40 bp, Artificial Sequence
  Description of Artificial Sequence: Synthetic primer
gaaaaaaggagcacagtgatgattggagggaaggggcaac

SEQ ID NO: 22179 - DNA, 40 bp, Artificial Sequence
  Description of Artificial Sequence: Synthetic primer
ttaagacccagggacttaatcagcaatatcaacgtaatag

SEQ ID NO: 22180 - DNA, 40 bp, Artificial Sequence
  Description of Artificial Sequence: Synthetic primer
gctgtccctaaaattaagaaaggcaagaacctgacccaag

SEQ ID NO: 22181 - DNA, 40 bp, Artificial Sequence
  Description of Artificial Sequence: Synthetic primer
ggtcgggctgaagctgggcgacgagggcacggagctacac

SEQ ID NO: 22182 - DNA, 40 bp, Artificial Sequence
  Description of Artificial Sequence: Synthetic primer
gatgctgaggtccagctctccttccagctacagatcaatg

SEQ ID NO: 22183 - DNA, 40 bp, Artificial Sequence
  Description of Artificial Sequence: Synthetic primer
atccattctcatcatcctcatagaaccgaacctcaatgtc

SEQ ID NO: 22184 - DNA, 40 bp, Artificial Sequence
  Description of Artificial Sequence: Synthetic primer
tatgttaagtcctattgtacaggagaaaaagggttgtttg

SEQ ID NO: 22185 - DNA, 40 bp, Artificial Sequence
  Description of Artificial Sequence: Synthetic primer
ggatatcaagatctccttggattctgttgtgaagcctatg

SEQ ID NO: 22186 - DNA, 40 bp, Artificial Sequence
  Description of Artificial Sequence: Synthetic primer
agttggctcagagccagtgctggcaaaccattgcatttac

SEQ ID NO: 22187 - DNA, 40 bp, Artificial Sequence
  Description of Artificial Sequence: Synthetic primer
gattggagccttcgtaggtaaccagtgggtcccgcacctc

SEQ ID NO: 22188 - DNA, 40 bp, Artificial Sequence
  Description of Artificial Sequence: Synthetic primer
tttggggtggtatctctcggacttccaaatccatctgttc

SEQ ID NO: 22189 - DNA, 40 bp, Artificial Sequence
  Description of Artificial Sequence: Synthetic primer
gctggcagacactcacgcagctctcgtaatggctgtttgg

SEQ ID NO: 22190 - DNA, 40 bp, Artificial Sequence
  Description of Artificial Sequence: Synthetic primer
cataatacagaatccatattctttcagtaatttttcattc

SEQ ID NO: 22191 - DNA, 40 bp, Artificial Sequence
  Description of Artificial Sequence: Synthetic primer
caggctggaggtatcaaggcgacgctgataatcttctagg

SEQ ID NO: 22192 - DNA, 40 bp, Artificial Sequence
  Description of Artificial Sequence: Synthetic primer
tggagcacgttgatccactggggctcgagtttcagcacag

SEQ ID NO: 22193 - DNA, 40 bp, Artificial Sequence
  Description of Artificial Sequence: Synthetic primer
agatgaaattcaattccatgccaaccataccctccgatca

SEQ ID NO: 22194 - DNA, 40 bp, Artificial Sequence
  Description of Artificial Sequence: Synthetic primer
ttggcctccaccaccgtgttgctgcctataacggcgaagg

SEQ ID NO: 22195 - DNA, 40 bp, Artificial Sequence
  Description of Artificial Sequence: Synthetic primer
ggtcattgaaggcatcagccgcctcatctgctcagccaag

SEQ ID NO: 22196 - DNA, 40 bp, Artificial Sequence
  Description of Artificial Sequence: Synthetic primer
gcaacctggcaggtcacaagtcaatcatttcaccctcacg

SEQ ID NO: 22197 - DNA, 40 bp, Artificial Sequence
  Description of Artificial Sequence: Synthetic primer
tgttgtgggagattttcacctatggcaaacagccctggta

SEQ ID NO: 22198 - DNA, 40 bp, Artificial Sequence
  Description of Artificial Sequence: Synthetic primer
aaaaagaatagttcccaaccccaaaagctcttcaggagaa

SEQ ID NO: 22199 - DNA, 40 bp, Artificial Sequence
  Description of Artificial Sequence: Synthetic primer
gatccattttagaaggtatctttctccccctacccaaatc

SEQ ID NO: 22200 - DNA, 40 bp, Artificial Sequence
  Description of Artificial Sequence: Synthetic primer
ttctcctgcagtcgcccgctgtcaatgcccagcaggtagg

SEQ ID NO: 22201 - DNA, 40 bp, Artificial Sequence
  Description of Artificial Sequence: Synthetic primer
gaggctgtgcgggaccgcatcaggcgggtcatgctagccg

SEQ ID NO: 22202 - DNA, 40 bp, Artificial Sequence
  Description of Artificial Sequence: Synthetic primer
ctcattttcttccagcaacttcgtgtacgacgacgggaac

SEQ ID NO: 22203 - DNA, 40 bp, Artificial Sequence
  Description of Artificial Sequence: Synthetic primer
atgtccacatctgaatcctgatcaaaagatgtcttcttcg

SEQ ID NO: 22204 - DNA, 40 bp, Artificial Sequence
  Description of Artificial Sequence: Synthetic primer
gaaaaattaaagttgttgtgcaatacttaattcagacatg

SEQ ID NO: 22205 - DNA, 40 bp, Artificial Sequence
  Description of Artificial Sequence: Synthetic primer
agaattactagcaacaggagataaaggtggtagagttgtc

SEQ ID NO: 22206 - DNA, 40 bp, Artificial Sequence
  Description of Artificial Sequence: Synthetic primer
tgctggaggtttcttgggactctgactggcaggtgtaggg

SEQ ID NO: 22207 - DNA, 40 bp, Artificial Sequence
  Description of Artificial Sequence: Synthetic primer
cctagtggactcccaggagagaggggtgctgctggcatac

SEQ ID NO: 22208 - DNA, 40 bp, Artificial Sequence
  Description of Artificial Sequence: Synthetic primer
ctctggaagctctacacttaaacattttaagttaaattac

SEQ ID NO: 22209 - DNA, 40 bp, Artificial Sequence
  Description of Artificial Sequence: Synthetic primer
ccttccagctctggccctgatctgccagcagcatgcgcag

SEQ ID NO: 22210 - DNA, 40 bp, Artificial Sequence
  Description of Artificial Sequence: Synthetic primer
ctacacctgccactgtgacgggcgtgggggcctcaagctg

SEQ ID NO: 22211 - DNA, 40 bp, Artificial Sequence
  Description of Artificial Sequence: Synthetic primer
atttgtcagaaactctttcctgttttggtttggagagtag

SEQ ID NO: 22212 - DNA, 40 bp, Artificial Sequence
  Description of Artificial Sequence: Synthetic primer
tccagatcttctatagatgcccactgacaatgaagataag

SEQ ID NO: 22213 - DNA, 40 bp, Artificial Sequence
  Description of Artificial Sequence: Synthetic primer
atgcagagttacagtcacaaagttgtgtattttatgttac

SEQ ID NO: 22214 - DNA, 40 bp, Artificial Sequence
  Description of Artificial Sequence: Synthetic primer
gtgaacgtattggggggtgtacactagtcatagtaacagg

SEQ ID NO: 22215 - DNA, 40 bp, Artificial Sequence
  Description of Artificial Sequence: Synthetic primer
gaaaacctcggagccccgctggatctcctggctgccaccc

SEQ ID NO: 22216 - DNA, 40 bp, Artificial Sequence
  Description of Artificial Sequence: Synthetic primer
aagtagtccatcagcatgacataaccagattgttgcattg

SEQ ID NO: 22217 - DNA, 40 bp, Artificial Sequence
  Description of Artificial Sequence: Synthetic primer
gcgccagagtgctgcaactggggcgtgggccgctctctgc

SEQ ID NO: 22218 - DNA, 40 bp, Artificial Sequence
  Description of Artificial Sequence: Synthetic primer
gatgccggaggtctccggggatgactgtgaggctgattcc

SEQ ID NO: 22219 - DNA, 40 bp, Artificial Sequence
  Description of Artificial Sequence: Synthetic primer
attgaaagagctgctcggaagcagaaggcccgggaagctg

SEQ ID NO: 22220 - DNA, 40 bp, Artificial Sequence
  Description of Artificial Sequence: Synthetic primer
gctcatgctccctttccgggtacccgcagtctcagagatc

SEQ ID NO: 22221 - DNA, 40 bp, Artificial Sequence
  Description of Artificial Sequence: Synthetic primer
ttttattattaaagtactcaatgggtgtccatcttattcc

SEQ ID NO: 22222 - DNA, 40 bp, Artificial Sequence
  Description of Artificial Sequence: Synthetic primer
caaatgtctatctaatgaggaaaaacttataattcaggac

SEQ ID NO: 22223 - DNA, 40 bp, Artificial Sequence
  Description of Artificial Sequence: Synthetic primer
gatctgaaggagattttcttttaagatcattgacctctcg

SEQ ID NO: 22224 - DNA, 40 bp, Artificial Sequence
  Description of Artificial Sequence: Synthetic primer
gtctgctggtggagctcttctcaatggtatgaactgagga

SEQ ID NO: 22225 - DNA, 40 bp, Artificial Sequence
  Description of Artificial Sequence: Synthetic primer
ggtgttttaaaatttaatttgtttttaatcataagatatc

SEQ ID NO: 22226 - DNA, 40 bp, Artificial Sequence
  Description of Artificial Sequence: Synthetic primer
tgtctctgcctctgccgggctcaccctccggtcccagctt

SEQ ID NO: 22227 - DNA, 40 bp, Artificial Sequence
  Description of Artificial Sequence: Synthetic primer
atggctggggcaaatccagcagcccctgcatatggtgaag

SEQ ID NO: 22228 - DNA, 40 bp, Artificial Sequence
  Description of Artificial Sequence: Synthetic primer
ctaaaacatttgtttgcaacatataccccctttataccac

SEQ ID NO: 22229 - DNA, 40 bp, Artificial Sequence
  Description of Artificial Sequence: Synthetic primer
ggccacgcggtctcggatcacctgggggtcacagggcttg

SEQ ID NO: 22230 - DNA, 40 bp, Artificial Sequence
  Description of Artificial Sequence: Synthetic primer
gcatctctggctggtactcgtcaaagtcaaaggcctccac

SEQ ID NO: 22231 - DNA, 40 bp, Artificial Sequence
  Description of Artificial Sequence: Synthetic primer
agtggtgcttcaacttgttgaatgtataaaaaacagcagg

SEQ ID NO: 22232 - DNA, 40 bp, Artificial Sequence
  Description of Artificial Sequence: Synthetic primer
aaaccactcttccaaagagggtcatgccagggaacagcag

SEQ ID NO: 22233 - DNA, 40 bp, Artificial Sequence
  Description of Artificial Sequence: Synthetic primer
aatgggaggggttggaagtggaatgagaggggccgaggag

SEQ ID NO: 22234 - DNA, 40 bp, Artificial Sequence
  Description of Artificial Sequence: Synthetic primer
gtggtagaaaaaattatgagcagtcgttcagtaaaaaagc

SEQ ID NO: 22235 - DNA, 40 bp, Artificial Sequence
  Description of Artificial Sequence: Synthetic primer
cctttctttatgccgaaataggactcattttaatcttctg

SEQ ID NO: 22236 - DNA, 40 bp, Artificial Sequence
  Description of Artificial Sequence: Synthetic primer
agtggtggtgtcaataaacgctctgtggccagtgtaaaag

SEQ ID NO: 22237 - DNA, 40 bp, Artificial Sequence
  Description of Artificial Sequence: Synthetic primer
tgcagaggcaggtgggggcggagcggcccctgtggtgcag

SEQ ID NO: 22238 - DNA, 40 bp, Artificial Sequence
  Description of Artificial Sequence: Synthetic primer
actcacagaccaacgggatagccgatgacaggcagtcctt

SEQ ID NO: 22239 - DNA, 40 bp, Artificial Sequence
  Description of Artificial Sequence: Synthetic primer
tggcttctgggagggtcaccaggtggttcttgttcaggac

SEQ ID NO: 22240 - DNA, 40 bp, Artificial Sequence
  Description of Artificial Sequence: Synthetic primer
tgtcacaaagaaggaactaagaagcaggacagaggcaacg

SEQ ID NO: 22241 - DNA, 40 bp, Artificial Sequence
  Description of Artificial Sequence: Synthetic primer
tatcagctgagcgagctccagctggctgatgcatttcaag

SEQ ID NO: 22242 - DNA, 40 bp, Artificial Sequence
  Description of Artificial Sequence: Synthetic primer
gcccaacaacacctgttgcttttgttggtgctgttgttgc

SEQ ID NO: 22243 - DNA, 40 bp, Artificial Sequence
  Description of Artificial Sequence: Synthetic primer
ccaggagtaggtggggataggagggcaccctccccatctg

SEQ ID NO: 22244 - DNA, 40 bp, Artificial Sequence
  Description of Artificial Sequence: Synthetic primer
ttacaaatgatgtctagtacttccttgcagtcgacctttg

SEQ ID NO: 22245 - DNA, 40 bp, Artificial Sequence
  Description of Artificial Sequence: Synthetic primer
tctaacaggctgatcagcacttcgttctggagatctgggg

SEQ ID NO: 22246 - DNA, 40 bp, Artificial Sequence
  Description of Artificial Sequence: Synthetic primer
tcacatacttccactgtatcctccgggtaagttttccttc

SEQ ID NO: 22247 - DNA, 40 bp, Artificial Sequence
  Description of Artificial Sequence: Synthetic primer
catctggctgcgtacttttatttatccccgtagtttcttg

SEQ ID NO: 22248 - DNA, 40 bp, Artificial Sequence
  Description of Artificial Sequence: Synthetic primer
gcgggcgcaaagaacctcaggaagatgaagctgctcactg

SEQ ID NO: 22249 - DNA, 40 bp, Artificial Sequence
  Description of Artificial Sequence: Synthetic primer
cacggcagctctctctgcgcagcgccgggcggccgtagtc

SEQ ID NO: 22250 - DNA, 40 bp, Artificial Sequence
  Description of Artificial Sequence: Synthetic primer
tatggtggaatatttagagacagagactgaggctaagacc

SEQ ID NO: 22251 - DNA, 40 bp, Artificial Sequence
  Description of Artificial Sequence: Synthetic primer
aaaggtcattgtgcagggtcaaagggcaaaatcagtggtc

SEQ ID NO: 22252 - DNA, 40 bp, Artificial Sequence
  Description of Artificial Sequence: Synthetic primer
aggggctctggatccccttttaaattacacacactctcac

SEQ ID NO: 22253 - DNA, 40 bp, Artificial Sequence
  Description of Artificial Sequence: Synthetic primer
tcgcccccaggccaacgctcctctcaatcctgggctggtg

SEQ ID NO: 22254 - DNA, 40 bp, Artificial Sequence
  Description of Artificial Sequence: Synthetic primer
tctaaaatgtcattgttagcactaattacaggttcatgtt

SEQ ID NO: 22255 - DNA, 40 bp, Artificial Sequence
  Description of Artificial Sequence: Synthetic primer
tactttcaggtcacgtcttgctcctcggaggcactcattg

SEQ ID NO: 22256 - DNA, 40 bp, Artificial Sequence
  Description of Artificial Sequence: Synthetic primer
gcgcatgatccagtgtttgtccgggttgggcgcgtagttg

SEQ ID NO: 22257 - DNA, 40 bp, Artificial Sequence
  Description of Artificial Sequence: Synthetic primer
gagtgacagctggtgcagggtccgagtctggaagcatttc

SEQ ID NO: 22258 - DNA, 40 bp, Artificial Sequence
  Description of Artificial Sequence: Synthetic primer
cacagctaaacatagtgttaaacactgacagcatcagtac

SEQ ID NO: 22259 - DNA, 40 bp, Artificial Sequence
  Description of Artificial Sequence: Synthetic primer
cagctgtgcttgccgtcaccaccatgggttcacccgcact

SEQ ID NO: 22260 - DNA, 40 bp, Artificial Sequence
  Description of Artificial Sequence: Synthetic primer
cccgagaaccgtggtgctccgccagctggggctctccacg

SEQ ID NO: 22261 - DNA, 40 bp, Artificial Sequence
  Description of Artificial Sequence: Synthetic primer
tcttgcgcagtggaggagctcacgctgcagcaggggcaag

SEQ ID NO: 22262 - DNA, 40 bp, Artificial Sequence
  Description of Artificial Sequence: Synthetic primer
tctgcctgctacttggccactgtctccctccccaaagctc

SEQ ID NO: 22263 - DNA, 40 bp, Artificial Sequence
  Description of Artificial Sequence: Synthetic primer
gttattgtttttatactccctggaactctccgatttcttc

SEQ ID NO: 22264 - DNA, 40 bp, Artificial Sequence
  Description of Artificial Sequence: Synthetic primer
aaacagcagagtcagcatcttcagagaaaaagaaaacaag

SEQ ID NO: 22265 - DNA, 40 bp, Artificial Sequence
  Description of Artificial Sequence: Synthetic primer
caagcctgaaaatattctgtttgtgaattcagactatgag

SEQ ID NO: 22266 - DNA, 40 bp, Artificial Sequence
  Description of Artificial Sequence: Synthetic primer
tggagtggccaagatcggtgagattgccactgggtccccc

SEQ ID NO: 22267 - DNA, 40 bp, Artificial Sequence
  Description of Artificial Sequence: Synthetic primer
gggcagcaccggaggaaccttctcggggctgggccgggcg

SEQ ID NO: 22268 - DNA, 40 bp, Artificial Sequence
  Description of Artificial Sequence: Synthetic primer
ctatgaggttcagtaccggagccccttcgacaccgagtgg

SEQ ID NO: 22269 - DNA, 40 bp, Artificial Sequence
  Description of Artificial Sequence: Synthetic primer
tcctcatcacaatgtgctgtccaccatctgtatactcttc

SEQ ID NO: 22270 - DNA, 40 bp, Artificial Sequence
  Description of Artificial Sequence: Synthetic primer
cttaaaaattgtaatcgaccagcaatattttcagtatttt

SEQ ID NO: 22271 - DNA, 40 bp, Artificial Sequence
  Description of Artificial Sequence: Synthetic primer
accttccagtcactcttgtcgttgatggaggagactttgg

SEQ ID NO: 22272 - DNA, 40 bp, Artificial Sequence
  Description of Artificial Sequence: Synthetic primer
aggagtaaagtgcccgctgactgctgccgccacctctgtc

SEQ ID NO: 22273 - DNA, 40 bp, Artificial Sequence
  Description of Artificial Sequence: Synthetic primer
agaatctcagagtcgacctctttccaatcccagggacagc

SEQ ID NO: 22274 - DNA, 40 bp, Artificial Sequence
  Description of Artificial Sequence: Synthetic primer
cagctggccgggaacggcgggccccccgagggcagcctgg

SEQ ID NO: 22275 - DNA, 40 bp, Artificial Sequence
  Description of Artificial Sequence: Synthetic primer
tgaagtaaaagttgcccagttggctggctctgttgctgag

SEQ ID NO: 22276 - DNA, 40 bp, Artificial Sequence
  Description of Artificial Sequence: Synthetic primer
gacaaataagtctcctgaggccaaaccattgcctggaaag

SEQ ID NO: 22277 - DNA, 40 bp, Artificial Sequence
  Description of Artificial Sequence: Synthetic primer
agtagatacgctccgtctcacggtccccatcaatgtccag

SEQ ID NO: 22278 - DNA, 40 bp, Artificial Sequence
  Description of Artificial Sequence: Synthetic primer
ctcatcttgctcggccccgggtaagagggaaggtttttgg

SEQ ID NO: 22279 - DNA, 40 bp, Artificial Sequence
  Description of Artificial Sequence: Synthetic primer
gtggttgatcatggccttctgtgctctgtgttacttttac

SEQ ID NO: 22280 - DNA, 40 bp, Artificial Sequence
  Description of Artificial Sequence: Synthetic primer
aggagaaggtgggcaccggaacgtggccgcagcgcttatc

SEQ ID NO: 22281 - DNA, 40 bp, Artificial Sequence
  Description of Artificial Sequence: Synthetic primer
ccacattgcagtaaccgccacagggtttaaccatcatcag

SEQ ID NO: 22282 - DNA, 40 bp, Artificial Sequence
  Description of Artificial Sequence: Synthetic primer
ggaccaggaggaggttttcaggaccaaaattgtggaaaag

SEQ ID NO: 22283 - DNA, 40 bp, Artificial Sequence
  Description of Artificial Sequence: Synthetic primer
atggagacaaagaccataacggttgtgttttcacagtagc

SEQ ID NO: 22284 - DNA, 40 bp, Artificial Sequence
  Description of Artificial Sequence: Synthetic primer
ttcttctgactattacagccctctgcgggacctgctgttg

SEQ ID NO: 22285 - DNA, 40 bp, Artificial Sequence
  Description of Artificial Sequence: Synthetic primer
aatgaggaagcaggagtgacactgcaggaaagcagagacc

SEQ ID NO: 22286 - DNA, 40 bp, Artificial Sequence
  Description of Artificial Sequence: Synthetic primer
ggggcggtccctatcggccggcgttgggccacggcgcttg

SEQ ID NO: 22287 - DNA, 40 bp, Artificial Sequence
  Description of Artificial Sequence: Synthetic primer
ttttaaacaaatacatggaatggttgaaagatttattttg

SEQ ID NO: 22288 - DNA, 40 bp, Artificial Sequence
  Description of Artificial Sequence: Synthetic primer
ggtggaggcggttttcaaaagaaaagtcagtgaccacaac

SEQ ID NO: 22289 - DNA, 40 bp, Artificial Sequence
  Description of Artificial Sequence: Synthetic primer
caaactcaatgacagagggacagcggacttgtggatcagg

SEQ ID NO: 22290 - DNA, 40 bp, Artificial Sequence
  Description of Artificial Sequence: Synthetic primer
tttggatttccgaaagtcccctcctttgcatgagttcctc

SEQ ID NO: 22291 - DNA, 40 bp, Artificial Sequence
  Description of Artificial Sequence: Synthetic primer
ctaaagtactttccgaagctggatctgcagcaaggttttc

SEQ ID NO: 22292 - DNA, 40 bp, Artificial Sequence
  Description of Artificial Sequence: Synthetic primer
tcatggagattgaactggtttttcattccattccttgctg

SEQ ID NO: 22293 - DNA, 40 bp, Artificial Sequence
  Description of Artificial Sequence: Synthetic primer
ccttggaaaagtatctggctgatcttccaactctagatga

SEQ ID NO: 22294 - DNA, 40 bp, Artificial Sequence
  Description of Artificial Sequence: Synthetic primer
cctcaggacacggctggagccgtccaggtctgactgggag

SEQ ID NO: 22295 - DNA, 40 bp, Artificial Sequence
  Description of Artificial Sequence: Synthetic primer
gtaggcttccatgggggctgtcaccaccgcgtcaaacagc

SEQ ID NO: 22296 - DNA, 40 bp, Artificial Sequence
  Description of Artificial Sequence: Synthetic primer
agaaacagcattaccaaaaggcaaaatcccaccacagacg

SEQ ID NO: 22297 - DNA, 40 bp, Artificial Sequence
  Description of Artificial Sequence: Synthetic primer
ctctgaatacctttccttaagattatcaggtgaaaaatag

SEQ ID NO: 22298 - DNA, 40 bp, Artificial Sequence
  Description of Artificial Sequence: Synthetic primer
atcagttctgggacataacaaagaaatactaggagaaatg

SEQ ID NO: 22299 - DNA, 40 bp, Artificial Sequence
  Description of Artificial Sequence: Synthetic primer
caccctcatcaccaggatagcctcggtagccgtcttctcc

SEQ ID NO: 22300 - DNA, 40 bp, Artificial Sequence
  Description of Artificial Sequence: Synthetic primer
gaggcattgatgtagtctgtgccttctccactcagggatg

SEQ ID NO: 22301 - DNA, 40 bp, Artificial Sequence
  Description of Artificial Sequence: Synthetic primer
gaaaagtgccccaaagtattccatctttcttgtcatgtgc

SEQ ID NO: 22302 - DNA, 40 bp, Artificial Sequence
  Description of Artificial Sequence: Synthetic primer
tattcaaatctcatggacaaccttattttcctcactgaac

SEQ ID NO: 22303 - DNA, 40 bp, Artificial Sequence
  Description of Artificial Sequence: Synthetic primer
gaatgtagtggggcgtacatttcatcagggtgctcacaag

SEQ ID NO: 22304 - DNA, 40 bp, Artificial Sequence
  Description of Artificial Sequence: Synthetic primer
acgggcaaagccctcaacctgggctacgcgctggactatg

SEQ ID NO: 22305 - DNA, 40 bp, Artificial Sequence
  Description of Artificial Sequence: Synthetic primer
tgatgatccagacacatgagtttccacaggctgattcacg

SEQ ID NO: 22306 - DNA, 40 bp, Artificial Sequence
  Description of Artificial Sequence: Synthetic primer
aacaccaccattattaaggagagtactaggaaaaactacc

SEQ ID NO: 22307 - DNA, 40 bp, Artificial Sequence
  Description of Artificial Sequence: Synthetic primer
gatgctggccgaggtcaacgccaccatcacggacattatc

SEQ ID NO: 22308 - DNA, 40 bp, Artificial Sequence
  Description of Artificial Sequence: Synthetic primer
ctccctcagaggtgtctaaagcaaaggctagttctgttgg

SEQ ID NO: 22309 - DNA, 40 bp, Artificial Sequence
  Description of Artificial Sequence: Synthetic primer
tggaacataagcagcgtcccaaggtggagctgatgccaag

SEQ ID NO: 22310 - DNA, 40 bp, Artificial Sequence
  Description of Artificial Sequence: Synthetic primer
cacctctaacagaagaaaaggagaaaatagtctgggtcag

SEQ ID NO: 22311 - DNA, 40 bp, Artificial Sequence
  Description of Artificial Sequence: Synthetic primer
tgagttatttatccaaatatattaactatagacttttacc

SEQ ID NO: 22312 - DNA, 40 bp, Artificial Sequence
  Description of Artificial Sequence: Synthetic primer
aagaagaaactagaggaaaaagtaggtttttctaataaag

SEQ ID NO: 22313 - DNA, 40 bp, Artificial Sequence
  Description of Artificial Sequence: Synthetic primer
aacccaatataccaatctgaggaccctggacatttcaaac

SEQ ID NO: 22314 - DNA, 40 bp, Artificial Sequence
  Description of Artificial Sequence: Synthetic primer
agaaagtgtgaaaaactacttttagaaatctgttgtcaat

SEQ ID NO: 22315 - DNA, 40 bp, Artificial Sequence
  Description of Artificial Sequence: Synthetic primer
agatggcaaatattttagccagacaacagggagtcttcag

SEQ ID NO: 22316 - DNA, 40 bp, Artificial Sequence
  Description of Artificial Sequence: Synthetic primer
agagataacttcaggaagtccatttttgcccctgcttttg

SEQ ID NO: 22317 - DNA, 40 bp, Artificial Sequence
  Description of Artificial Sequence: Synthetic primer
agatggggctgattaatacaatcttgcttttcacctgttg

SEQ ID NO: 22318 - DNA, 40 bp, Artificial Sequence
  Description of Artificial Sequence: Synthetic primer
gagtgggcgcagcagcccagcggaggccaggcgcgcaacc

SEQ ID NO: 22319 - DNA, 40 bp, Artificial Sequence
  Description of Artificial Sequence: Synthetic primer
gactgcggttggggcgggaagagccggggccgtggctgac

SEQ ID NO: 22320 - DNA, 40 bp, Artificial Sequence
  Description of Artificial Sequence: Synthetic primer
gccacctggaggactacagtggcctgtctgtgtcctggtc

SEQ ID NO: 22321 - DNA, 40 bp, Artificial Sequence
  Description of Artificial Sequence: Synthetic primer
tccacttgaactatcgcactttaccttacccatgcatttc

SEQ ID NO: 22322 - DNA, 40 bp, Artificial Sequence
  Description of Artificial Sequence: Synthetic primer
caatacaattccttccccctctcagtgccacggccccccc

SEQ ID NO: 22323 - DNA, 40 bp, Artificial Sequence
  Description of Artificial Sequence: Synthetic primer
agatacgtgaattaaattactttctctaagttttagaaag

SEQ ID NO: 22324 - DNA, 40 bp, Artificial Sequence
  Description of Artificial Sequence: Synthetic primer
gcataccgactcgttccagaaagcacagcgcggggtcagc

SEQ ID NO: 22325 - DNA, 40 bp, Artificial Sequence
  Description of Artificial Sequence: Synthetic primer
tgtatacgagaaggagggcaagatgttccaagcaacaagg

SEQ ID NO: 22326 - DNA, 40 bp, Artificial Sequence
  Description of Artificial Sequence: Synthetic primer
gaaccagctgcggctagcgggtgcctctcctgctaccgtg

SEQ ID NO: 22327 - DNA, 40 bp, Artificial Sequence
  Description of Artificial Sequence: Synthetic primer
ccggggtcaggaaagaaactgctgtgccagcaaccaaaag

SEQ ID NO: 22328 - DNA, 40 bp, Artificial Sequence
  Description of Artificial Sequence: Synthetic primer
gggaaagtgttttgaggtagtttaaacctttggaagtttg

SEQ ID NO: 22329 - DNA, 40 bp, Artificial Sequence
  Description of Artificial Sequence: Synthetic primer
ggcctcaatgaagcctgggccgacctcctggagctcattg

SEQ ID NO: 22330 - DNA, 40 bp, Artificial Sequence
  Description of Artificial Sequence: Synthetic primer
aggcctggttctcattcaaattgctgatagactgcaggtg

SEQ ID NO: 22331 - DNA, 40 bp, Artificial Sequence
  Description of Artificial Sequence: Synthetic primer
ttcctatgcaaaaactgtttaaacaataaaatgagctatg

SEQ ID NO: 22332 - DNA, 40 bp, Artificial Sequence
  Description of Artificial Sequence: Synthetic primer
gtactactatatatataaaatctcaaatcaacttttcggc

SEQ ID NO: 22333 - DNA, 40 bp, Artificial Sequence
  Description of Artificial Sequence: Synthetic primer
ctcagatgaatcagtgcagtgagtttttaaattcaatttg

SEQ ID NO: 22334 - DNA, 40 bp, Artificial Sequence
  Description of Artificial Sequence: Synthetic primer
ggctcgccccccttctccccccctgcagggggaggagtcc

SEQ ID NO: 22335 - DNA, 40 bp, Artificial Sequence
  Description of Artificial Sequence: Synthetic primer
tggttccagctgcagcacgtggacgctgactcggaagtgc

SEQ ID NO: 22336 - DNA, 40 bp, Artificial Sequence
  Description of Artificial Sequence: Synthetic primer
ttactggaagacatggattttctggaagacatggattttc

SEQ ID NO: 22337 - DNA, 40 bp, Artificial Sequence
  Description of Artificial Sequence: Synthetic primer
aactgatactacagctgcagaaggcaacccaatatttaag

SEQ ID NO: 22338 - DNA, 40 bp, Artificial Sequence
  Description of Artificial Sequence: Synthetic primer
ttaattcttggcacctatatttaatatcttttatactaac

SEQ ID NO: 22339 - DNA, 40 bp, Artificial Sequence
  Description of Artificial Sequence: Synthetic primer
ttggttgccatggacgatgaccaccaggggcagagacagg

SEQ ID NO: 22340 - DNA, 40 bp, Artificial Sequence
  Description of Artificial Sequence: Synthetic primer
tcctcctggcccacgttctgctgcaatgactcttctttgg

SEQ ID NO: 22341 - DNA, 40 bp, Artificial Sequence
  Description of Artificial Sequence: Synthetic primer
tggtgggagtgtggacggcatgaccgagacttgctggttg

SEQ ID NO: 22342 - DNA, 40 bp, Artificial Sequence
  Description of Artificial Sequence: Synthetic primer
gtgggaggctccaacccactgggttcttacaagtgcttag

SEQ ID NO: 22343 - DNA, 40 bp, Artificial Sequence
  Description of Artificial Sequence: Synthetic primer
aggacagccaggctgaagtcctgaaggtcatcaggcagtc

SEQ ID NO: 22344 - DNA, 40 bp, Artificial Sequence
  Description of Artificial Sequence: Synthetic primer
tctcggagctggagggagccaaatgttccgcggggagtgc

SEQ ID NO: 22345 - DNA, 40 bp, Artificial Sequence
  Description of Artificial Sequence: Synthetic primer
acccaggagcacctgccagagctttgagccgccagagacc

SEQ ID NO: 22346 - DNA, 40 bp, Artificial Sequence
  Description of Artificial Sequence: Synthetic primer
tttatgaagagctgccaagctactagcaacactgatcaac

SEQ ID NO: 22347 - DNA, 40 bp, Artificial Sequence
  Description of Artificial Sequence: Synthetic primer
gtggccaatccgaaaccaaaatgggggcgtagcttgattg

SEQ ID NO: 22348 - DNA, 40 bp, Artificial Sequence
  Description of Artificial Sequence: Synthetic primer
ttagcaaagcgttacgaggagaagacccagaagcaactac

SEQ ID NO: 22349 - DNA, 40 bp, Artificial Sequence
  Description of Artificial Sequence: Synthetic primer
aactgtgccaggtggccctcggaatagatgccaggcagag

SEQ ID NO: 22350 - DNA, 40 bp, Artificial Sequence
  Description of Artificial Sequence: Synthetic primer
gttctgggtatttcccaaggcccagcctgactggagtgtg

SEQ ID NO: 22351 - DNA, 40 bp, Artificial Sequence
  Description of Artificial Sequence: Synthetic primer
ctggagccatgggctgggtgggcgggcggcgccgggattc

SEQ ID NO: 22352 - DNA, 40 bp, Artificial Sequence
  Description of Artificial Sequence: Synthetic primer
cagctgatccggcagacactcctcatcttcttccaagacc

SEQ ID NO: 22353 - DNA, 40 bp, Artificial Sequence
  Description of Artificial Sequence: Synthetic primer
agtaattttaacatagtgtgataattacatttgaaattag

SEQ ID NO: 22354 - DNA, 40 bp, Artificial Sequence
  Description of Artificial Sequence: Synthetic primer
tgatggtgaaaaaacagaagcagaatcttcttcattactg

SEQ ID NO: 22355 - DNA, 40 bp, Artificial Sequence
  Description of Artificial Sequence: Synthetic primer
cctgactctagcactgtagtggtaacgatcccagtgacct

SEQ ID NO: 22356 - DNA, 40 bp, Artificial Sequence
  Description of Artificial Sequence: Synthetic primer
ccctggccaggaatggacctccgaggcctccgcccagtgc

SEQ ID NO: 22357 - DNA, 40 bp, Artificial Sequence
  Description of Artificial Sequence: Synthetic primer
cccggccagagagctggtcagttctttagagaggctgggg

SEQ ID NO: 22358 - DNA, 40 bp, Artificial Sequence
  Description of Artificial Sequence: Synthetic primer
gacacccattgagtactttaataataaaatcgtatgtgac

SEQ ID NO: 22359 - DNA, 40 bp, Artificial Sequence
  Description of Artificial Sequence: Synthetic primer
cgctgggagccgcagccgccgcgggcagccaggccgccgc

SEQ ID NO: 22360 - DNA, 40 bp, Artificial Sequence
  Description of Artificial Sequence: Synthetic primer
gttttctccttctccgcacattttacaagatggcttgtcc

SEQ ID NO: 22361 - DNA, 40 bp, Artificial Sequence
  Description of Artificial Sequence: Synthetic primer
gtcccttctgcactcacgaccagagcaaagccattaagag

SEQ ID NO: 22362 - DNA, 40 bp, Artificial Sequence
  Description of Artificial Sequence: Synthetic primer
tctccgtaataagagcgtgttgtccctcatgcagaactgg

SEQ ID NO: 22363 - DNA, 40 bp, Artificial Sequence
  Description of Artificial Sequence: Synthetic primer
caggtatagtaggtcagtgaggttgatgaagagctggttg

SEQ ID NO: 22364 - DNA, 40 bp, Artificial Sequence
  Description of Artificial Sequence: Synthetic primer
ctgagtttttgtagagttaacatttgataataaaacttgc

SEQ ID NO: 22365 - DNA, 40 bp, Artificial Sequence
  Description of Artificial Sequence: Synthetic primer
attaaggatccagcttctattgaaaccaatatccatttgc

SEQ ID NO: 22366 - DNA, 40 bp, Artificial Sequence
  Description of Artificial Sequence: Synthetic primer
aaacaattgcttttgccagtattcacaaaaccacgtaaac

SEQ ID NO: 22367 - DNA, 40 bp, Artificial Sequence
  Description of Artificial Sequence: Synthetic primer
attgtagaaagactgtgtgataccagtgtatgtatttttg

SEQ ID NO: 22368 - DNA, 40 bp, Artificial Sequence
  Description of Artificial Sequence: Synthetic primer
cgaacccacacacatcgaaactcctaggtcgctgttgcag

SEQ ID NO: 22369 - DNA, 40 bp, Artificial Sequence
  Description of Artificial Sequence: Synthetic primer
cgaatcttgcaactccttaatggtatctgcaatcacatcg

SEQ ID NO: 22370 - DNA, 40 bp, Artificial Sequence
  Description of Artificial Sequence: Synthetic primer
aaaatatagtccatgttcttagctactatgttacttaatg

SEQ ID NO: 22371 - DNA, 40 bp, Artificial Sequence
  Description of Artificial Sequence: Synthetic primer
agcgggcagttgagggcttggcagagtctggtggctcaac

SEQ ID NO: 22372 - DNA, 40 bp, Artificial Sequence
  Description of Artificial Sequence: Synthetic primer
actcatctttattcccacttaaaccatgaggtcacaacac

SEQ ID NO: 22373 - DNA, 40 bp, Artificial Sequence
  Description of Artificial Sequence: Synthetic primer
agtagggagaagcgagcaagagcctgaacataggcatctc

SEQ ID NO: 22374 - DNA, 40 bp, Artificial Sequence
  Description of Artificial Sequence: Synthetic primer
ggagagcactgagtttagtaataggtgactgccggaaaaa

SEQ ID NO: 22375 - DNA, 40 bp, Artificial Sequence
  Description of Artificial Sequence: Synthetic primer
ttttgtaagctgggttcagtttttgaaccacccagaatac

SEQ ID NO: 22376 - DNA, 40 bp, Artificial Sequence
  Description of Artificial Sequence: Synthetic primer
ttatttccaacttttaacacttcacctttaactgcttcag

SEQ ID NO: 22377 - DNA, 40 bp, Artificial Sequence
  Description of Artificial Sequence: Synthetic primer
cgttctcggggcagcggggggcgtggcgcaggacgaagcc

SEQ ID NO: 22378 - DNA, 40 bp, Artificial Sequence
  Description of Artificial Sequence: Synthetic primer
cacattaactataatagctggagaagtatggcacactctg

SEQ ID NO: 22379 - DNA, 40 bp, Artificial Sequence
  Description of Artificial Sequence: Synthetic primer
gcctctatgacctgcagaatctgttttggtgtcattggag

SEQ ID NO: 22380 - DNA, 40 bp, Artificial Sequence
  Description of Artificial Sequence: Synthetic primer
agaaacaaaagagctaacgattgcaaccaaatctactaag

SEQ ID NO: 22381 - DNA, 40 bp, Artificial Sequence
  Description of Artificial Sequence: Synthetic primer
tttgttttggatcacagtattatttatttctcaagaagag

SEQ ID NO: 22382 - DNA, 40 bp, Artificial Sequence
  Description of Artificial Sequence: Synthetic primer
agtgggaggctgaggccccttgggggtatcattctgtttc

SEQ ID NO: 22383 - DNA, 40 bp, Artificial Sequence
  Description of Artificial Sequence: Synthetic primer
ctctctttccttcttcaccactgggaccaggaggaccttg

SEQ ID NO: 22384 - DNA, 40 bp, Artificial Sequence
  Description of Artificial Sequence: Synthetic primer
tacgtgcttggcgggtaactctatcggactctcccatcac

SEQ ID NO: 22385 - DNA, 40 bp, Artificial Sequence
  Description of Artificial Sequence: Synthetic primer
tttatccaaaattgctcagggaagaagtggacatgagctg

SEQ ID NO: 22386 - DNA, 40 bp, Artificial Sequence
  Description of Artificial Sequence: Synthetic primer
cgcttatcacagtggctcacaccgatggcaactaccttgg

SEQ ID NO: 22387 - DNA, 40 bp, Artificial Sequence
  Description of Artificial Sequence: Synthetic primer
ttaggccaggaccctattatttctctggacgcaactgctg

SEQ ID NO: 22388 - DNA, 40 bp, Artificial Sequence
  Description of Artificial Sequence: Synthetic primer
gaagcggagaccccgaggaacccagcagggtcaccatttg

SEQ ID NO: 22389 - DNA, 40 bp, Artificial Sequence
  Description of Artificial Sequence: Synthetic primer
tcgtggagggctactcgagcaactacgaactcaagccttc

SEQ ID NO: 22390 - DNA, 40 bp, Artificial Sequence
  Description of Artificial Sequence: Synthetic primer
tcatggctgccaacaacaacctggagctggtccctgaaag

SEQ ID NO: 22391 - DNA, 40 bp, Artificial Sequence
  Description of Artificial Sequence: Synthetic primer
tgctaagaggcacagaaatgggattgcatttggacaaaaa

SEQ ID NO: 22392 - DNA, 40 bp, Artificial Sequence
  Description of Artificial Sequence: Synthetic primer
ggtcagtcaaattattgacaaactgaagcacattaaccag

SEQ ID NO: 22393 - DNA, 40 bp, Artificial Sequence
  Description of Artificial Sequence: Synthetic primer
gtataattctctgggtcagcctgaacattttctggttctg

SEQ ID NO: 22394 - DNA, 40 bp, Artificial Sequence
  Description of Artificial Sequence: Synthetic primer
gtttcagcaagtaataaaatgcactgacacatctgctacc

SEQ ID NO: 22395 - DNA, 40 bp, Artificial Sequence
  Description of Artificial Sequence: Synthetic primer
cggtggaggacgaggggctccgggtcttccagagcgtgaa

SEQ ID NO: 22396 - DNA, 40 bp, Artificial Sequence
  Description of Artificial Sequence: Synthetic primer
gatgtagtattttggctttctgcattacaacgtcttctgg

SEQ ID NO: 22397 - DNA, 40 bp, Artificial Sequence
  Description of Artificial Sequence: Synthetic primer
tccctgcttccaccacgactgtcttctggctgggaagttg

SEQ ID NO: 22398 - DNA, 40 bp, Artificial Sequence
  Description of Artificial Sequence: Synthetic primer
tggatacattttccccctttgctggaatctatagaaggtc

SEQ ID NO: 22399 - DNA, 40 bp, Artificial Sequence
  Description of Artificial Sequence: Synthetic primer
ctctctcaagagacactgaacagcagaatggtggtgatgg

SEQ ID NO: 22400 - DNA, 40 bp, Artificial Sequence
  Description of Artificial Sequence: Synthetic primer
gtccctgggtgccgagacctgccccctgcctagtttccag

SEQ ID NO: 22401 - DNA, 40 bp, Artificial Sequence
  Description of Artificial Sequence: Synthetic primer
cacccgacagtcgcgggcacccctacgtcgtgtggaaatc

SEQ ID NO: 22402 - DNA, 40 bp, Artificial Sequence
  Description of Artificial Sequence: Synthetic primer
tgacagtgcctctgccaatatcaccatcgtggaatcaaac

SEQ ID NO: 22403 - DNA, 40 bp, Artificial Sequence
  Description of Artificial Sequence: Synthetic primer
gcacatatctgtactacaagaagcaaaggtgttgttgctc

SEQ ID NO: 22404 - DNA, 40 bp, Artificial Sequence
  Description of Artificial Sequence: Synthetic primer
atcccttatcctgatgctgagtaagttttacaccatggaa

SEQ ID NO: 22405 - DNA, 40 bp, Artificial Sequence
  Description of Artificial Sequence: Synthetic primer
ggaagaaaccatttgctgtacagagtgaaatgtgcggaag

SEQ ID NO: 22406 - DNA, 40 bp, Artificial Sequence
  Description of Artificial Sequence: Synthetic primer
gacgctgtgggtcaccgtcccgtctgggacaaaataatag

SEQ ID NO: 22407 - DNA, 40 bp, Artificial Sequence
  Description of Artificial Sequence: Synthetic primer
gagcaaaatttccaactttgccccaaaatgccatgggtgg

SEQ ID NO: 22408 - DNA, 40 bp, Artificial Sequence
  Description of Artificial Sequence: Synthetic primer
ctggtgctccactgaattcttcatcaaattccacttttac

SEQ ID NO: 22409 - DNA, 40 bp, Artificial Sequence
  Description of Artificial Sequence: Synthetic primer
gaggttttcattctaacaaggaccccaagggaaaggaaag

SEQ ID NO: 22410 - DNA, 40 bp, Artificial Sequence
  Description of Artificial Sequence: Synthetic primer
ccgcagctgctacctgagcagtctggacctgctgctggag

SEQ ID NO: 22411 - DNA, 40 bp, Artificial Sequence
  Description of Artificial Sequence: Synthetic primer
taaaagtagttaaataacatcagaaactgagttcctggag

SEQ ID NO: 22412 - DNA, 40 bp, Artificial Sequence
  Description of Artificial Sequence: Synthetic primer
agtcagcataataattgaatacgctaggacataagcagtg

SEQ ID NO: 22413 - DNA, 40 bp, Artificial Sequence
  Description of Artificial Sequence: Synthetic primer
ctcttctgatccttgggttcctgatccacagtttcctgag

SEQ ID NO: 22414 - DNA, 40 bp, Artificial Sequence
  Description of Artificial Sequence: Synthetic primer
ataaaacatcattggaaaacacattcattcataacactgg

SEQ ID NO: 22415 - DNA, 40 bp, Artificial Sequence
  Description of Artificial Sequence: Synthetic primer
ttcgggcaaagccatcgaactttcgctctcgcacctcctc

SEQ ID NO: 22416 - DNA, 40 bp, Artificial Sequence
  Description of Artificial Sequence: Synthetic primer
ttgttacttcccacaaagttctgagccaaattcacaatag

SEQ ID NO: 22417 - DNA, 40 bp, Artificial Sequence
  Description of Artificial Sequence: Synthetic primer
tactgaagtggtagcatgctctgttgattcacagtttacc

SEQ ID NO: 22418 - DNA, 40 bp, Artificial Sequence
  Description of Artificial Sequence: Synthetic primer
ctacggtggttactctcacaggctggcagaattagtaaag

SEQ ID NO: 22419 - DNA, 40 bp, Artificial Sequence
  Description of Artificial Sequence: Synthetic primer
aatttattttattttagcagttctgcaaatagaaaacagg

SEQ ID NO: 22420 - DNA, 40 bp, Artificial Sequence
  Description of Artificial Sequence: Synthetic primer
gaagaagaggcccggactcatacagagattgaaatgttcc

SEQ ID NO: 22421 - DNA, 40 bp, Artificial Sequence
  Description of Artificial Sequence: Synthetic primer
ctactactttcttctgttttggggctctcttgggcttagg

SEQ ID NO: 22422 - DNA, 40 bp, Artificial Sequence
  Description of Artificial Sequence: Synthetic primer
ccgggtgtcgggaaagctgggggagtactggtccaggggc

SEQ ID NO: 22423 - DNA, 40 bp, Artificial Sequence
  Description of Artificial Sequence: Synthetic primer
gcagtataagactgaatgttgtctccacaggctccaccac

SEQ ID NO: 22424 - DNA, 40 bp, Artificial Sequence
  Description of Artificial Sequence: Synthetic primer
tctttcgaaccggtaaaatctcacttagttggggtaaaac

SEQ ID NO: 22425 - DNA, 40 bp, Artificial Sequence
  Description of Artificial Sequence: Synthetic primer
ttgatctgcttttcatgagccacaaacggacgtcattgag

SEQ ID NO: 22426 - DNA, 40 bp, Artificial Sequence
  Description of Artificial Sequence: Synthetic primer
cccagactcagtgatggcgtggaagacgcggtccacatac

SEQ ID NO: 22427 - DNA, 40 bp, Artificial Sequence
  Description of Artificial Sequence: Synthetic primer
gtaacagaataagcagaagtttacagcatgatagtccaag

SEQ ID NO: 22428 - DNA, 40 bp, Artificial Sequence
  Description of Artificial Sequence: Synthetic primer
acatgggtgcactccaggaccaggcagcgtggcggggaca

SEQ ID NO: 22429 - DNA, 40 bp, Artificial Sequence
  Description of Artificial Sequence: Synthetic primer
caagcacttatggaccagagtggcccaggccagctgggcg

SEQ ID NO: 22430 - DNA, 40 bp, Artificial Sequence
  Description of Artificial Sequence: Synthetic primer
ctcctatatctcagtcaatttacatagtttaaaatagaac

SEQ ID NO: 22431 - DNA, 40 bp, Artificial Sequence
  Description of Artificial Sequence: Synthetic primer
cactcggggagactccaaacagtgagcctagagctggaga

SEQ ID NO: 22432 - DNA, 40 bp, Artificial Sequence
  Description of Artificial Sequence: Synthetic primer
agcctatggcagccgcgtcaaggacattgtgccgcaggag

SEQ ID NO: 22433 - DNA, 40 bp, Artificial Sequence
  Description of Artificial Sequence: Synthetic primer
aacaagaaggatctttgaatactctattgctgatataatg

SEQ ID NO: 22434 - DNA, 40 bp, Artificial Sequence
  Description of Artificial Sequence: Synthetic primer
ctggcccagcgggacacccacttctgacccccaggggagc

SEQ ID NO: 22435 - DNA, 40 bp, Artificial Sequence
  Description of Artificial Sequence: Synthetic primer
tcaggataaagtccacagtaggtttccgagcatgaggaac

SEQ ID NO: 22436 - DNA, 40 bp, Artificial Sequence
  Description of Artificial Sequence: Synthetic primer
gtcaggcagtccccccaccccccgcaaccccactccgtgc

SEQ ID NO: 22437 - DNA, 40 bp, Artificial Sequence
  Description of Artificial Sequence: Synthetic primer
gatggaaacgaacagctctctgtaatgcgatactcaccag

SEQ ID NO: 22438 - DNA, 40 bp, Artificial Sequence
  Description of Artificial Sequence: Synthetic primer
caggagccttgctgctcttcagctctctgtcccccgacat

SEQ ID NO: 22439 - DNA, 40 bp, Artificial Sequence
  Description of Artificial Sequence: Synthetic primer
gttgtagggctgggtccctggctcctgcctcaggtgcttc

SEQ ID NO: 22440 - DNA, 40 bp, Artificial Sequence
  Description of Artificial Sequence: Synthetic primer
tttctcagtcactgcaaagtagcccttctcgttggagcac

SEQ ID NO: 22441 - DNA, 40 bp, Artificial Sequence
  Description of Artificial Sequence: Synthetic primer
ggtgtcggccgtgtcaccagcagcggcccggtcatcaacc

SEQ ID NO: 22442 - DNA, 40 bp, Artificial Sequence
  Description of Artificial Sequence: Synthetic primer
gtacgtggcgctgccgcccccggcatctgcagatgcgttc

SEQ ID NO: 22443 - DNA, 40 bp, Artificial Sequence
  Description of Artificial Sequence: Synthetic primer
tgagtatttggtcacagtgttatacaggtccccgccgaag

SEQ ID NO: 22444 - DNA, 40 bp, Artificial Sequence
  Description of Artificial Sequence: Synthetic primer
tgaagataggcaacaagatgatgagggcgcggcagtatcc

SEQ ID NO: 22445 - DNA, 40 bp, Artificial Sequence
  Description of Artificial Sequence: Synthetic primer
atcaatgattgactaggcttaaaagataatgtgccacttg

SEQ ID NO: 22446 - DNA, 40 bp, Artificial Sequence
  Description of Artificial Sequence: Synthetic primer
ggtgaggtccaggacaccatcaaaccactgccaaaaggtg

SEQ ID NO: 22447 - DNA, 40 bp, Artificial Sequence
  Description of Artificial Sequence: Synthetic primer
atactcacagaaggagagtttccggcataaatttaatagg

SEQ ID NO: 22448 - DNA, 40 bp, Artificial Sequence
  Description of Artificial Sequence: Synthetic primer
aaggaatcgatggctgcaggaaaatggtgctggaaaatag

SEQ ID NO: 22449 - DNA, 40 bp, Artificial Sequence
  Description of Artificial Sequence: Synthetic primer
aaatgtctgcagccctacagagcttttgttgccaattgaa

SEQ ID NO: 22450 - DNA, 40 bp, Artificial Sequence
  Description of Artificial Sequence: Synthetic primer
caagcagctggtggaagacctggaccgcatcgtggccttg

SEQ ID NO: 22451 - DNA, 40 bp, Artificial Sequence
  Description of Artificial Sequence: Synthetic primer
gaacagcgagagggtccgcatgtgtggggcgagcgaagac

SEQ ID NO: 22452 - DNA, 40 bp, Artificial Sequence
  Description of Artificial Sequence: Synthetic primer
gcacaaaggtaacctccctgcaattcattcctacatcttc

SEQ ID NO: 22453 - DNA, 40 bp, Artificial Sequence
  Description of Artificial Sequence: Synthetic primer
tttgaaggagatgacttcttagacctttggcttgacattc

SEQ ID NO: 22454 - DNA, 40 bp, Artificial Sequence
  Description of Artificial Sequence: Synthetic primer
cagagagccctggtggccgtcacggtcacagacccggccc

SEQ ID NO: 22455 - DNA, 40 bp, Artificial Sequence
  Description of Artificial Sequence: Synthetic primer
cccacaggccctcctggtccacctggtcctcctggccccc

SEQ ID NO: 22456 - DNA, 40 bp, Artificial Sequence
  Description of Artificial Sequence: Synthetic primer
cgtatactgctcacaggctttgggacgtacttgtgtactg

SEQ ID NO: 22457 - DNA, 40 bp, Artificial Sequence
  Description of Artificial Sequence: Synthetic primer
agatgtagctcatgatatatttggcagccactgtttttcc

SEQ ID NO: 22458 - DNA, 40 bp, Artificial Sequence
  Description of Artificial Sequence: Synthetic primer
gcacaggttttttcgttctcacttccacaccaccttaccg

SEQ ID NO: 22459 - DNA, 40 bp, Artificial Sequence
  Description of Artificial Sequence: Synthetic primer
tgatgacgatgccgagtacatgaaacacacacgtctcttc

SEQ ID NO: 22460 - DNA, 40 bp, Artificial Sequence
  Description of Artificial Sequence: Synthetic primer
gggcgccggccgcaggctgccgtgagctctgctcctgcac

SEQ ID NO: 22461 - DNA, 40 bp, Artificial Sequence
  Description of Artificial Sequence: Synthetic primer
ctttaaaaattattcataaaacagtgggcaatagataaag

SEQ ID NO: 22462 - DNA, 40 bp, Artificial Sequence
  Description of Artificial Sequence: Synthetic primer
cgtagcgaagggagaagcagatatcacccaatttctcttg

SEQ ID NO: 22463 - DNA, 40 bp, Artificial Sequence
  Description of Artificial Sequence: Synthetic primer
atctgaaggacagtcatagctgccactcagccccagttag

SEQ ID NO: 22464 - DNA, 40 bp, Artificial Sequence
  Description of Artificial Sequence: Synthetic primer
atccttgaataaacctttttattttcacctcagaaaagtg

SEQ ID NO: 22465 - DNA, 40 bp, Artificial Sequence
  Description of Artificial Sequence: Synthetic primer
tccatgtcccagaatcctactgaaaagcttgatggaaacg

SEQ ID NO: 22466 - DNA, 40 bp, Artificial Sequence
  Description of Artificial Sequence: Synthetic primer
gtattttgtcctgattcactgccaattgtcacattttaag

SEQ ID NO: 22467 - DNA, 40 bp, Artificial Sequence
  Description of Artificial Sequence: Synthetic primer
ccttctgtttttcccttgttgacctttttcttcaaagcac

SEQ ID NO: 22468 - DNA, 40 bp, Artificial Sequence
  Description of Artificial Sequence: Synthetic primer
tttcttgactatcttttaatcagctgggaaaaagtcaata

SEQ ID NO: 22469 - DNA, 40 bp, Artificial Sequence
  Description of Artificial Sequence: Synthetic primer
gctaaggggagaagtcaacatttatgaaatattgcctgac

SEQ ID NO: 22470 - DNA, 40 bp, Artificial Sequence
  Description of Artificial Sequence: Synthetic primer
gatcatcaaaagatgagtgtaagccaccagcaaagtattc

SEQ ID NO: 22471 - DNA, 40 bp, Artificial Sequence
  Description of Artificial Sequence: Synthetic primer
gatctataaccaggcatgcaacatcattttcttcagcaat

SEQ ID NO: 22472 - DNA, 40 bp, Artificial Sequence
  Description of Artificial Sequence: Synthetic primer
gaggaccagggggaccctgttcaccttttccaccttgaac

SEQ ID NO: 22473 - DNA, 40 bp, Artificial Sequence
  Description of Artificial Sequence: Synthetic primer
gcaattgcacggacatgtggaagaagtgcctcgatgaatg

SEQ ID NO: 22474 - DNA, 40 bp, Artificial Sequence
  Description of Artificial Sequence: Synthetic primer
atcatatacagccatcactagggttttgccacccaattcc

SEQ ID NO: 22475 - DNA, 40 bp, Artificial Sequence
  Description of Artificial Sequence: Synthetic primer
ctcagcgagcgcggggggcgagccccgagtcccgagagcc

SEQ ID NO: 22476 - DNA, 40 bp, Artificial Sequence
  Description of Artificial Sequence: Synthetic primer
tcctcactcccatcggcaggccagtactgatcacattttc

SEQ ID NO: 22477 - DNA, 40 bp, Artificial Sequence
  Description of Artificial Sequence: Synthetic primer
aaggatcagaccaaaaggcttgagctcaaagagaggcctg

SEQ ID NO: 22478 - DNA, 40 bp, Artificial Sequence
  Description of Artificial Sequence: Synthetic primer
atgtacagacaggtgctattctgttttgtggctatgcttc

SEQ ID NO: 22479 - DNA, 40 bp, Artificial Sequence
  Description of Artificial Sequence: Synthetic primer
aatggaactatatgttgtttccatttttaaagtaaacaag

SEQ ID NO: 22480 - DNA, 40 bp, Artificial Sequence
  Description of Artificial Sequence: Synthetic primer
cttcgtaggttgtgatgatagcactggtttgtttctcaag

SEQ ID NO: 22481 - DNA, 40 bp, Artificial Sequence
  Description of Artificial Sequence: Synthetic primer
tttaacgagaaagagatgcgaaacaagttgcagagctacg

SEQ ID NO: 22482 - DNA, 40 bp, Artificial Sequence
  Description of Artificial Sequence: Synthetic primer
tgaatgcctccctcccacggaaaaggaaacttccgactgc

SEQ ID NO: 22483 - DNA, 40 bp, Artificial Sequence
  Description of Artificial Sequence: Synthetic primer
taaggctgcagaactcttcacccagtccttgtgagaaatg

SEQ ID NO: 22484 - DNA, 40 bp, Artificial Sequence
  Description of Artificial Sequence: Synthetic primer
agccttggtctattggcatttgctgacccataggatttac

SEQ ID NO: 22485 - DNA, 40 bp, Artificial Sequence
  Description of Artificial Sequence: Synthetic primer
gctgagacacaaactggttctccccattccctttgtgcag

SEQ ID NO: 22486 - DNA, 40 bp, Artificial Sequence
  Description of Artificial Sequence: Synthetic primer
agcgcagccggggagggtgggggggcagaggcacagacag

SEQ ID NO: 22487 - DNA, 40 bp, Artificial Sequence
  Description of Artificial Sequence: Synthetic primer
gtcatttcttggcatatcacttccagaataagagggaatg

SEQ ID NO: 22488 - DNA, 40 bp, Artificial Sequence
  Description of Artificial Sequence: Synthetic primer
tatgccttggtgtagcactgacattcatcttccgtttaag

SEQ ID NO: 22489 - DNA, 40 bp, Artificial Sequence
  Description of Artificial Sequence: Synthetic primer
ttaacttactaagtgcccaacaaggacgatgttttcacag

SEQ ID NO: 22490 - DNA, 40 bp, Artificial Sequence
  Description of Artificial Sequence: Synthetic primer
attgctggagggcagactggaggaaggggaaggcatgcag

SEQ ID NO: 22491 - DNA, 40 bp, Artificial Sequence
  Description of Artificial Sequence: Synthetic primer
ccatcgtcaagcaggaaccggcaccccccagcctgagccc

SEQ ID NO: 22492 - DNA, 40 bp, Artificial Sequence
  Description of Artificial Sequence: Synthetic primer
ctctttagcagcttttcgggagccattgtcctcattacac

SEQ ID NO: 22493 - DNA, 40 bp, Artificial Sequence
  Description of Artificial Sequence: Synthetic primer
tgggccggagcagccgcgggcgcccgaggggccgagcgag

SEQ ID NO: 22494 - DNA, 40 bp, Artificial Sequence
  Description of Artificial Sequence: Synthetic primer
tgggtaaaaacatcacaaatagcataaagtgcgtgattgc

SEQ ID NO: 22495 - DNA, 40 bp, Artificial Sequence
  Description of Artificial Sequence: Synthetic primer
caaaccatatccacacacaacaactaattgtatgaaactt

SEQ ID NO: 22496 - DNA, 40 bp, Artificial Sequence
  Description of Artificial Sequence: Synthetic primer
tatctttcatgaaaggcacataaagaatctaaactaacac

SEQ ID NO: 22497 - DNA, 40 bp, Artificial Sequence
  Description of Artificial Sequence: Synthetic primer
gatcgacaagtgggaagaccgatgggaatggttaagactg

SEQ ID NO: 22498 - DNA, 40 bp, Artificial Sequence
  Description of Artificial Sequence: Synthetic primer
gttcagtgggacccccgtgatccgactgcgcttcaagagg

SEQ ID NO: 22499 - DNA, 40 bp, Artificial Sequence
  Description of Artificial Sequence: Synthetic primer
caagaagacccagtcgttgtactggtggagttgtggttcg

SEQ ID NO: 22500 - DNA, 40 bp, Artificial Sequence
  Description of Artificial Sequence: Synthetic primer
ccaggtgcctgcgcctctcagtggcctggttcttggacag

SEQ ID NO: 22501 - DNA, 40 bp, Artificial Sequence
  Description of Artificial Sequence: Synthetic primer
atttttctgcgcatatttaactctttcctagcacttgttt

SEQ ID NO: 22502 - DNA, 40 bp, Artificial Sequence
  Description of Artificial Sequence: Synthetic primer
cacagacctgaccttcctggagaagctggaggatactgtc

SEQ ID NO: 22503 - DNA, 40 bp, Artificial Sequence
  Description of Artificial Sequence: Synthetic primer
gcctctgatcatgatgggaacattgtggagctggccttcc

SEQ ID NO: 22504 - DNA, 40 bp, Artificial Sequence
  Description of Artificial Sequence: Synthetic primer
gcagcagctggcagggaatggcgcaccgtttgaggagagc

SEQ ID NO: 22505 - DNA, 40 bp, Artificial Sequence
  Description of Artificial Sequence: Synthetic primer
tgaaattaataagcaggccttttatgtgagaaccatcttg

SEQ ID NO: 22506 - DNA, 40 bp, Artificial Sequence
  Description of Artificial Sequence: Synthetic primer
aatcattactggactgtgaagaattacttaatgttaagtg

SEQ ID NO: 22507 - DNA, 40 bp, Artificial Sequence
  Description of Artificial Sequence: Synthetic primer
ggtgtgaacatcagttttgtcaataaccctctctttggat

SEQ ID NO: 22508 - DNA, 40 bp, Artificial Sequence
  Description of Artificial Sequence: Synthetic primer
tgttttttcttgtcttttacttgagttcttcctgcaccgg

SEQ ID NO: 22509 - DNA, 40 bp, Artificial Sequence
  Description of Artificial Sequence: Synthetic primer
agtggcagccaaatatatcatgggctacatctccaaggtg

SEQ ID NO: 22510 - DNA, 40 bp, Artificial Sequence
  Description of Artificial Sequence: Synthetic primer
tgtggaagatgatgggcagcgagaggagcgtcagaagacc

SEQ ID NO: 22511 - DNA, 40 bp, Artificial Sequence
  Description of Artificial Sequence: Synthetic primer
attctttgtaaaggtgataatcttcaagactgtgccaaat

SEQ ID NO: 22512 - DNA, 40 bp, Artificial Sequence
  Description of Artificial Sequence: Synthetic primer
taccgagttaggcgcagtatggcaggcagggggcgaaaag

SEQ ID NO: 22513 - DNA, 40 bp, Artificial Sequence
  Description of Artificial Sequence: Synthetic primer
agtaaaggaactattcggctatgtgacatgagggcatctg

SEQ ID NO: 22514 - DNA, 40 bp, Artificial Sequence
  Description of Artificial Sequence: Synthetic primer
cagttagatgatgaagagggacttccagagaagctggtta

SEQ ID NO: 22515 - DNA, 40 bp, Artificial Sequence
  Description of Artificial Sequence: Synthetic primer
cctgggtattattctttgctcctgcatctgcactgtcctc

SEQ ID NO: 22516 - DNA, 40 bp, Artificial Sequence
  Description of Artificial Sequence: Synthetic primer
atcagcagcgtgcagctgcccaccaacgtgtacaacaaag

SEQ ID NO: 22517 - DNA, 40 bp, Artificial Sequence
  Description of Artificial Sequence: Synthetic primer
tcctcttcccggggtccgccccccagggccaccaggctac

SEQ ID NO: 22518 - DNA, 40 bp, Artificial Sequence
  Description of Artificial Sequence: Synthetic primer
ctaaagaggactgtgcatttttgctatttaaaggaatcac

SEQ ID NO: 22519 - DNA, 40 bp, Artificial Sequence
  Description of Artificial Sequence: Synthetic primer
aaatttgtcaaatatgcagtcattttcatacagtgaacag

SEQ ID NO: 22520 - DNA, 40 bp, Artificial Sequence
  Description of Artificial Sequence: Synthetic primer
aatgagtcattcagctttgaagtaccttttgaacaaatcc

SEQ ID NO: 22521 - DNA, 40 bp, Artificial Sequence
  Description of Artificial Sequence: Synthetic primer
ggagaaaattgctgcctttgatagctgtactttcacgaag

SEQ ID NO: 22522 - DNA, 40 bp, Artificial Sequence
  Description of Artificial Sequence: Synthetic primer
ttttttaaacaataactgtatttcaattaagtcatgaaca

SEQ ID NO: 22523 - DNA, 40 bp, Artificial Sequence
  Description of Artificial Sequence: Synthetic primer
gaggtcacctgaagaaaaagcggccagaagaatgtgactg

SEQ ID NO: 22524 - DNA, 40 bp, Artificial Sequence
  Description of Artificial Sequence: Synthetic primer
tagcccattcaatgtctcttgtagtttccacacttacgac

SEQ ID NO: 22525 - DNA, 40 bp, Artificial Sequence
  Description of Artificial Sequence: Synthetic primer
tctttgggttcttctttttcttctccatctgtcaatccag

SEQ ID NO: 22526 - DNA, 40 bp, Artificial Sequence
  Description of Artificial Sequence: Synthetic primer
aacaaattctaagttctcaacattctcatactgcgagccg

SEQ ID NO: 22527 - DNA, 40 bp, Artificial Sequence
  Description of Artificial Sequence: Synthetic primer
tcagcaacagaaccaaggtcaaacttgctccgtcaactgg

SEQ ID NO: 22528 - DNA, 40 bp, Artificial Sequence
  Description of Artificial Sequence: Synthetic primer
gcatgtagtgattgggcccagtagcctgattgtgcatttc

SEQ ID NO: 22529 - DNA, 40 bp, Artificial Sequence
  Description of Artificial Sequence: Synthetic primer
gccattgacgtgtttggagctggagacggcctgggtgctg

SEQ ID NO: 22530 - DNA, 40 bp, Artificial Sequence
  Description of Artificial Sequence: Synthetic primer
caaacaccaaggaggggtcttttttcagcaaagttatcac

SEQ ID NO: 22531 - DNA, 40 bp, Artificial Sequence
  Description of Artificial Sequence: Synthetic primer
cctgtcctcggcgtcgcagctggaccaagccctccgacag

SEQ ID NO: 22532 - DNA, 40 bp, Artificial Sequence
  Description of Artificial Sequence: Synthetic primer
caccatcgagaccgaggcgcaggacacggaggtggaggag

SEQ ID NO: 22533 - DNA, 40 bp, Artificial Sequence
  Description of Artificial Sequence: Synthetic primer
gactcagaaattggcggcatcaccattgcttggaagtttg

SEQ ID NO: 22534 - DNA, 40 bp, Artificial Sequence
  Description of Artificial Sequence: Synthetic primer
atatgtatattttatgaacatgtcatactttttctgattg

SEQ ID NO: 22535 - DNA, 40 bp, Artificial Sequence
  Description of Artificial Sequence: Synthetic primer
gatccagagctctactgagtcagatacagtgctctgcagg

SEQ ID NO: 22536 - DNA, 40 bp, Artificial Sequence
  Description of Artificial Sequence: Synthetic primer
tcgtcatcttgaactgtctcagctgctcctccacatcagc

SEQ ID NO: 22537 - DNA, 40 bp, Artificial Sequence
  Description of Artificial Sequence: Synthetic primer
gaatcgaggagcccagggacacacgccttcaggtttgctc

SEQ ID NO: 22538 - DNA, 40 bp, Artificial Sequence
  Description of Artificial Sequence: Synthetic primer
agtctgaagaattccggagtccccgatgacatcttcaagc

SEQ ID NO: 22539 - DNA, 40 bp, Artificial Sequence
  Description of Artificial Sequence: Synthetic primer
caccgaagacgccattgccgccaacctccggaagcgcttc

SEQ ID NO: 22540 - DNA, 40 bp, Artificial Sequence
  Description of Artificial Sequence: Synthetic primer
gctgccccagaatgtcctggacacctcgtggcccacgccc

SEQ ID NO: 22541 - DNA, 40 bp, Artificial Sequence
  Description of Artificial Sequence: Synthetic primer
ccaatttcactgtgatcctagtttctgggctcaaaatatc

SEQ ID NO: 22542 - DNA, 40 bp, Artificial Sequence
  Description of Artificial Sequence: Synthetic primer
ggcgtactcataggcttccgtcctctggattgcttcgttg

SEQ ID NO: 22543 - DNA, 40 bp, Artificial Sequence
  Description of Artificial Sequence: Synthetic primer
gccaggcatgccgatgacaacatcagcaaagatgggcaag

SEQ ID NO: 22544 - DNA, 40 bp, Artificial Sequence
  Description of Artificial Sequence: Synthetic primer
aaacgggctgcagacttccacgggaatgattttggtaacg

SEQ ID NO: 22545 - DNA, 40 bp, Artificial Sequence
  Description of Artificial Sequence: Synthetic primer
cagacagctccaaccacccagacaacaagcacaagaatcg

SEQ ID NO: 22546 - DNA, 40 bp, Artificial Sequence
  Description of Artificial Sequence: Synthetic primer
cagagttgatcgtccacctggccattttgaccctgagtgg

SEQ ID NO: 22547 - DNA, 40 bp, Artificial Sequence
  Description of Artificial Sequence: Synthetic primer
atctagaaatccagttgaaccacaggatctatcaattatc

SEQ ID NO: 22548 - DNA, 40 bp, Artificial Sequence
  Description of Artificial Sequence: Synthetic primer
accgctacgtcctacagggcttcttccgccccagcgagac

SEQ ID NO: 22549 - DNA, 40 bp, Artificial Sequence
  Description of Artificial Sequence: Synthetic primer
ggaggctgaacagacctgccgccaccttactgcccaggtg

SEQ ID NO: 22550 - DNA, 40 bp, Artificial Sequence
  Description of Artificial Sequence: Synthetic primer
tgggacctgccaggctgagggagttgcgggccgcagctcc

SEQ ID NO: 22551 - DNA, 40 bp, Artificial Sequence
  Description of Artificial Sequence: Synthetic primer
accttggagagagggttctgggatattctctcatgtcatc

SEQ ID NO: 22552 - DNA, 40 bp, Artificial Sequence
  Description of Artificial Sequence: Synthetic primer
aacttcaagtagatttcctggatcatgttcccctcacaac

SEQ ID NO: 22553 - DNA, 40 bp, Artificial Sequence
  Description of Artificial Sequence: Synthetic primer
aacacactggcgttttctcccattttggaggccagagttg

SEQ ID NO: 22554 - DNA, 40 bp, Artificial Sequence
  Description of Artificial Sequence: Synthetic primer
gattagggaagaaaagaaagaagacaaggtggaaaagttg

SEQ ID NO: 22555 - DNA, 40 bp, Artificial Sequence
  Description of Artificial Sequence: Synthetic primer
aactggcagcatggcacagcctccctttctatagtagctc

SEQ ID NO: 22556 - DNA, 40 bp, Artificial Sequence
  Description of Artificial Sequence: Synthetic primer
ccccacacgctgctggggaatgtggaatgttctagctctg

SEQ ID NO: 22557 - DNA, 40 bp, Artificial Sequence
  Description of Artificial Sequence: Synthetic primer
gcctcggccttcctgctccacgtgctcaagcccccacagg

SEQ ID NO: 22558 - DNA, 40 bp, Artificial Sequence
  Description of Artificial Sequence: Synthetic primer
aatcagctttcagtcacgctgtgacctaatgggagccttt

SEQ ID NO: 22559 - DNA, 40 bp, Artificial Sequence
  Description of Artificial Sequence: Synthetic primer
agagatgcagatccatcgttctgaggcgggcaatcaaatg

SEQ ID NO: 22560 - DNA, 40 bp, Artificial Sequence
  Description of Artificial Sequence: Synthetic primer
tggtcaatgttcccttggcgagcaattgaaacttgtttag

SEQ ID NO: 22561 - DNA, 40 bp, Artificial Sequence
  Description of Artificial Sequence: Synthetic primer
ttgtaatttacaattttgctattacaagctttcctatgag

SEQ ID NO: 22562 - DNA, 40 bp, Artificial Sequence
  Description of Artificial Sequence: Synthetic primer
ggagagtggaggagacaggccacaagcccagagaatgaac

SEQ ID NO: 22563 - DNA, 40 bp, Artificial Sequence
  Description of Artificial Sequence: Synthetic primer
gtcctgtcctggtgacaggagaacaatgttggtgaacgtc

SEQ ID NO: 22564 - DNA, 40 bp, Artificial Sequence
  Description of Artificial Sequence: Synthetic primer
aaaggtctacaaaatgcagaaatcaccaatttcaacagag

SEQ ID NO: 22565 - DNA, 40 bp, Artificial Sequence
  Description of Artificial Sequence: Synthetic primer
gtaaagttttccatcttaaaacatgtgtgtgagtcaatag

SEQ ID NO: 22566 - DNA, 40 bp, Artificial Sequence
  Description of Artificial Sequence: Synthetic primer
ctgtcctggtggctgggcccagcaggggccctcactcttg

SEQ ID NO: 22567 - DNA, 40 bp, Artificial Sequence
  Description of Artificial Sequence: Synthetic primer
tgaaccaaccaatacaggagcccatcactgaggtctaaag

SEQ ID NO: 22568 - DNA, 40 bp, Artificial Sequence
  Description of Artificial Sequence: Synthetic primer
tgcatgcttgtcttgccttccttcagagcccgcagcttcc

SEQ ID NO: 22569 - DNA, 40 bp, Artificial Sequence
  Description of Artificial Sequence: Synthetic primer
ggaagtctgtagacaggtaccatttctcactttccacctc

SEQ ID NO: 22570 - DNA, 40 bp, Artificial Sequence
  Description of Artificial Sequence: Synthetic primer
gaaataacaaggacagcccacaaactaagagcttctgaac

SEQ ID NO: 22571 - DNA, 40 bp, Artificial Sequence
  Description of Artificial Sequence: Synthetic primer
ctctcctggtggtgacataacattggttctacagaatcgt

SEQ ID NO: 22572 - DNA, 40 bp, Artificial Sequence
  Description of Artificial Sequence: Synthetic primer
tgtgtggaatgccacaatgcctggcacagtgtaaaattga

SEQ ID NO: 22573 - DNA, 40 bp, Artificial Sequence
  Description of Artificial Sequence: Synthetic primer
gcagatcatggagcagaaacagcaacttcttctccagcag

SEQ ID NO: 22574 - DNA, 40 bp, Artificial Sequence
  Description of Artificial Sequence: Synthetic primer
cacggaacttaaagagcagggggctttccttccgcacatc

SEQ ID NO: 22575 - DNA, 40 bp, Artificial Sequence
  Description of Artificial Sequence: Synthetic primer
ttcagtttagatttcccactttaaaatgcagtgatttgtg

SEQ ID NO: 22576 - DNA, 40 bp, Artificial Sequence
  Description of Artificial Sequence: Synthetic primer
cacaggtcagggccgagagcatgtacccatctgagccaag

SEQ ID NO: 22577 - DNA, 40 bp, Artificial Sequence
  Description of Artificial Sequence: Synthetic primer
gatgtgtttggagatagctgtgccgtttttgccttctttc

SEQ ID NO: 22578 - DNA, 40 bp, Artificial Sequence
  Description of Artificial Sequence: Synthetic primer
gagggtagatgccacagccaacccagagaatggcaaacag

SEQ ID NO: 22579 - DNA, 40 bp, Artificial Sequence
  Description of Artificial Sequence: Synthetic primer
ctcaggttccttatgtgtcatagaatagagaactatgatg

SEQ ID NO: 22580 - DNA, 40 bp, Artificial Sequence
  Description of Artificial Sequence: Synthetic primer
ctgcacctggaggcaagatgcgcacgcacacaggcacacg

SEQ ID NO: 22581 - DNA, 40 bp, Artificial Sequence
  Description of Artificial Sequence: Synthetic primer
tttaatatagatgtaaattatgacctcatttttttctccc

SEQ ID NO: 22582 - DNA, 40 bp, Artificial Sequence
  Description of Artificial Sequence: Synthetic primer
ggtgcccacagcaagatccgggaggtggaaattcacaaag

SEQ ID NO: 22583 - DNA, 40 bp, Artificial Sequence
  Description of Artificial Sequence: Synthetic primer
aggtgatagggctggggacgccggcggggcgagcgcgagc

SEQ ID NO: 22584 - DNA, 40 bp, Artificial Sequence
  Description of Artificial Sequence: Synthetic primer
ccattgcaggaatgggataccaagtctcccaacaacagag

SEQ ID NO: 22585 - DNA, 40 bp, Artificial Sequence
  Description of Artificial Sequence: Synthetic primer
tcagaatcccaaaaggtgaacacatgtaggtgggtcacag

SEQ ID NO: 22586 - DNA, 40 bp, Artificial Sequence
  Description of Artificial Sequence: Synthetic primer
ccgccgctgcaaggaacgccccgaacgcgcgcgcccggcg

SEQ ID NO: 22587 - DNA, 40 bp, Artificial Sequence
  Description of Artificial Sequence: Synthetic primer
gcgcagacagcacgacgaggcggcgcgcaggttgctggag

SEQ ID NO: 22588 - DNA, 40 bp, Artificial Sequence
  Description of Artificial Sequence: Synthetic primer
ctcacctaactcatactgtgctggagccactaactagagc

SEQ ID NO: 22589 - DNA, 40 bp, Artificial Sequence
  Description of Artificial Sequence: Synthetic primer
tcacagcaaaagaaatagaaacatttgtcagtttactcag

SEQ ID NO: 22590 - DNA, 40 bp, Artificial Sequence
  Description of Artificial Sequence: Synthetic primer
tcagtttctgttcaacttctatcattcgttcctccatgac

SEQ ID NO: 22591 - DNA, 40 bp, Artificial Sequence
  Description of Artificial Sequence: Synthetic primer
gcagaagacgatgcagagagtgtagctggggtggctggtg

SEQ ID NO: 22592 - DNA, 40 bp, Artificial Sequence
  Description of Artificial Sequence: Synthetic primer
caggagcctgacttcccgccgcctccaccagaccttgaac

SEQ ID NO: 22593 - DNA, 40 bp, Artificial Sequence
  Description of Artificial Sequence: Synthetic primer
aggaaggggactaaggagtgccaagggaacacagccacag

SEQ ID NO: 22594 - DNA, 40 bp, Artificial Sequence
  Description of Artificial Sequence: Synthetic primer
tacaaatagcctaaaccactcccaccctaccaaccaagtc

SEQ ID NO: 22595 - DNA, 40 bp, Artificial Sequence
  Description of Artificial Sequence: Synthetic primer
aggacagcgatgggaaaaatgcccttaaatcataggaaag

SEQ ID NO: 22596 - DNA, 40 bp, Artificial Sequence
  Description of Artificial Sequence: Synthetic primer
ctaattaagtctcttttctcagcttctaattcttcctttg

SEQ ID NO: 22597 - DNA, 40 bp, Artificial Sequence
  Description of Artificial Sequence: Synthetic primer
gtggtgtgtgctgggaatcctgggactttatgtggtcagc

SEQ ID NO: 22598 - DNA, 40 bp, Artificial Sequence
  Description of Artificial Sequence: Synthetic primer
cacataggactctcgagccttcttacgggccatctgcaag

SEQ ID NO: 22599 - DNA, 40 bp, Artificial Sequence
  Description of Artificial Sequence: Synthetic primer
aacagccttgtgacatgctgttccaatcctttcctcctaa

SEQ ID NO: 22600 - DNA, 40 bp, Artificial Sequence
  Description of Artificial Sequence: Synthetic primer
agggcaacaataaaatagcaatcctaaagcaagaatatgg

SEQ ID NO: 22601 - DNA, 40 bp, Artificial Sequence
  Description of Artificial Sequence: Synthetic primer
tttcctgctggctttggagcctgagctcgaggcccggctg

SEQ ID NO: 22602 - DNA, 40 bp, Artificial Sequence
  Description of Artificial Sequence: Synthetic primer
gaggaggaaccaaatggaactgattggagggaaagaagac

SEQ ID NO: 22603 - DNA, 40 bp, Artificial Sequence
  Description of Artificial Sequence: Synthetic primer
tgagtaagttgataagattcaaattaaagtgagtacaagc

SEQ ID NO: 22604 - DNA, 40 bp, Artificial Sequence
  Description of Artificial Sequence: Synthetic primer
gtccccagttattcataggtttctctaaaccagagatatg

SEQ ID NO: 22605 - DNA, 40 bp, Artificial Sequence
  Description of Artificial Sequence: Synthetic primer
caatgatgcagaaggggatgaaaatgtgaagcagccaagt

SEQ ID NO: 22606 - DNA, 40 bp, Artificial Sequence
  Description of Artificial Sequence: Synthetic primer
ggttggagtggggatcacactgaggcgcacgtttcctctc

SEQ ID NO: 22607 - DNA, 40 bp, Artificial Sequence
  Description of Artificial Sequence: Synthetic primer
tggggaccacacggaatttgtcaaaaacctgctgccaaag

SEQ ID NO: 22608 - DNA, 40 bp, Artificial Sequence
  Description of Artificial Sequence: Synthetic primer
caacacacaggcactgctaccttagtgtctgttaactttc

SEQ ID NO: 22609 - DNA, 40 bp, Artificial Sequence
  Description of Artificial Sequence: Synthetic primer
ttttttaacctcttctccctcccctccacacacactccct

SEQ ID NO: 22610 - DNA, 40 bp, Artificial Sequence
  Description of Artificial Sequence: Synthetic primer
cggttcttgcccggacccacgccggaaacaaacgcagttc

SEQ ID NO: 22611 - DNA, 40 bp, Artificial Sequence
  Description of Artificial Sequence: Synthetic primer
ccttgcacttgagatcaatgtcagtggtgccgaagccatc

SEQ ID NO: 22612 - DNA, 40 bp, Artificial Sequence
  Description of Artificial Sequence: Synthetic primer
gcttccttctttctaacccccagactttggcctctgagtg

SEQ ID NO: 22613 - DNA, 40 bp, Artificial Sequence
  Description of Artificial Sequence: Synthetic primer
atgtgtagtaccttaacagctctgaaagcttcttccgatt

SEQ ID NO: 22614 - DNA, 40 bp, Artificial Sequence
  Description of Artificial Sequence: Synthetic primer
tacaaagtagaagaatctgggtatgctggtttcattttgc

SEQ ID NO: 22615 - DNA, 40 bp, Artificial Sequence
  Description of Artificial Sequence: Synthetic primer
cacattgttcacggcggcggcccagtgcagggcggacttg

SEQ ID NO: 22616 - DNA, 40 bp, Artificial Sequence
  Description of Artificial Sequence: Synthetic primer
agctagtggactggtggaaacagagctccaattaaccttc

SEQ ID NO: 22617 - DNA, 40 bp, Artificial Sequence
  Description of Artificial Sequence: Synthetic primer
ctgtcttcaggtcctggcactgcttcagggtttcatgcag

SEQ ID NO: 22618 - DNA, 40 bp, Artificial Sequence
  Description of Artificial Sequence: Synthetic primer
aaggacttctccgcgctggagtcccagctgcaggacactc

SEQ ID NO: 22619 - DNA, 40 bp, Artificial Sequence
  Description of Artificial Sequence: Synthetic primer
cgttagttagtgagccaggtaatgaggcagggggggtagc

SEQ ID NO: 22620 - DNA, 40 bp, Artificial Sequence
  Description of Artificial Sequence: Synthetic primer
gaaggtgccttcgccgccctgcttgcgccgctccagcttc

SEQ ID NO: 22621 - DNA, 40 bp, Artificial Sequence
  Description of Artificial Sequence: Synthetic primer
ccgcgcacaggccggtggaatgggtccaggccgtggtcag

SEQ ID NO: 22622 - DNA, 40 bp, Artificial Sequence
  Description of Artificial Sequence: Synthetic primer
ggccgctgggcatttaaagttgatggaaaggaaattgacc

SEQ ID NO: 22623 - DNA, 40 bp, Artificial Sequence
  Description of Artificial Sequence: Synthetic primer
gtcagcaggcaggacgaatcacactgaatgcaaaccacag

SEQ ID NO: 22624 - DNA, 40 bp, Artificial Sequence
  Description of Artificial Sequence: Synthetic primer
ctttggattgctccacctctagaagatgatcttgtattgc

SEQ ID NO: 22625 - DNA, 40 bp, Artificial Sequence
  Description of Artificial Sequence: Synthetic primer
gacaccttcctgtccccaccatgctctgctcagttttcac

SEQ ID NO: 22626 - DNA, 40 bp, Artificial Sequence
  Description of Artificial Sequence: Synthetic primer
ctcttctttgctgcgcccatgaacaagtgtgtggtgagag

SEQ ID NO: 22627 - DNA, 40 bp, Artificial Sequence
  Description of Artificial Sequence: Synthetic primer
aatttggagaaattagagaatgtatggtcatgagagatcc

SEQ ID NO: 22628 - DNA, 40 bp, Artificial Sequence
  Description of Artificial Sequence: Synthetic primer
aagacactaatgttcaaaagttagaataaatacaaaaatg

SEQ ID NO: 22629 - DNA, 40 bp, Artificial Sequence
  Description of Artificial Sequence: Synthetic primer
gctcattcttgcctactttactctcccactgaagcaggtt

SEQ ID NO: 22630 - DNA, 40 bp, Artificial Sequence
  Description of Artificial Sequence: Synthetic primer
aaataaacattcaccttcccctctaaaaaacgaatctggg

SEQ ID NO: 22631 - DNA, 40 bp, Artificial Sequence
  Description of Artificial Sequence: Synthetic primer
gcgactgcagaaggacggcctgacgcaggcggacaaggac

SEQ ID NO: 22632 - DNA, 40 bp, Artificial Sequence
  Description of Artificial Sequence: Synthetic primer
tctgcttgcatgggtgagaccccctggggcctccctccac

SEQ ID NO: 22633 - DNA, 40 bp, Artificial Sequence
  Description of Artificial Sequence: Synthetic primer
cagaaaccctccttggggaaagtggggagcagactccaag

SEQ ID NO: 22634 - DNA, 40 bp, Artificial Sequence
  Description of Artificial Sequence: Synthetic primer
gcagtgagggctgcatctctgaagccacttgccctgatcc

SEQ ID NO: 22635 - DNA, 40 bp, Artificial Sequence
  Description of Artificial Sequence: Synthetic primer
ttcccctgccaaggcactggccaaatctgaagaagattac

SEQ ID NO: 22636 - DNA, 40 bp, Artificial Sequence
  Description of Artificial Sequence: Synthetic primer
agggcatgcacgggcatgcacacggctggtcactctgccc

SEQ ID NO: 22637 - DNA, 40 bp, Artificial Sequence
  Description of Artificial Sequence: Synthetic primer
tgttctagttttcagtttgtatatacccgtacaacgtgtc

SEQ ID NO: 22638 - DNA, 40 bp, Artificial Sequence
  Description of Artificial Sequence: Synthetic primer
ttcctagactggtgagcagagattgcggagtacagaatag

SEQ ID NO: 22639 - DNA, 40 bp, Artificial Sequence
  Description of Artificial Sequence: Synthetic primer
acatgcagtgacggaggcactgctgaagttaggggcaatc

SEQ ID NO: 22640 - DNA, 40 bp, Artificial Sequence
  Description of Artificial Sequence: Synthetic primer
aagtgggccagccttgggcaagggcgtgggtgtgaatgag

SEQ ID NO: 22641 - DNA, 40 bp, Artificial Sequence
  Description of Artificial Sequence: Synthetic primer
attcttgaaagagaaaacaaaagcatgtgaataaactttg

SEQ ID NO: 22642 - DNA, 40 bp, Artificial Sequence
  Description of Artificial Sequence: Synthetic primer
gccccgccacccgacgagatccaccccctggagatccttc

SEQ ID NO: 22643 - DNA, 40 bp, Artificial Sequence
  Description of Artificial Sequence: Synthetic primer
ccattctcccagcatttccatccacttgctcgttcgtgtc

SEQ ID NO: 22644 - DNA, 40 bp, Artificial Sequence
  Description of Artificial Sequence: Synthetic primer
gacagctgtcttcaaccagcccactggccccatatcctac

SEQ ID NO: 22645 - DNA, 40 bp, Artificial Sequence
  Description of Artificial Sequence: Synthetic primer
cttgagcttggtgctcaggctcagcttctgccggttctcc

SEQ ID NO: 22646 - DNA, 40 bp, Artificial Sequence
  Description of Artificial Sequence: Synthetic primer
ctggagtccggctgcaatgacagctatctgctggtgtaac

SEQ ID NO: 22647 - DNA, 40 bp, Artificial Sequence
  Description of Artificial Sequence: Synthetic primer
aaaatcggagacagttttacaatcgcttcatgtcaactac

SEQ ID NO: 22648 - DNA, 40 bp, Artificial Sequence
  Description of Artificial Sequence: Synthetic primer
cctctacagattgtcatttttaaaccctttgttctctctc

SEQ ID NO: 22649 - DNA, 40 bp, Artificial Sequence
  Description of Artificial Sequence: Synthetic primer
cctgaaaatgcaccctcttctgaaggcgggggactcaatg

SEQ ID NO: 22650 - DNA, 40 bp, Artificial Sequence
  Description of Artificial Sequence: Synthetic primer
tacactgctgaattaaactgttttccatgaaaatgtccac

SEQ ID NO: 22651 - DNA, 40 bp, Artificial Sequence
  Description of Artificial Sequence: Synthetic primer
caagttcttctatatatttattttcctgttcacgattacg

SEQ ID NO: 22652 - DNA, 40 bp, Artificial Sequence
  Description of Artificial Sequence: Synthetic primer
ccagtcactcctccttcgtgtcccctctttcaagaacctc

SEQ ID NO: 22653 - DNA, 40 bp, Artificial Sequence
  Description of Artificial Sequence: Synthetic primer
ctcttcctacttcctccccagggacggctgcttctgacac

SEQ ID NO: 22654 - DNA, 40 bp, Artificial Sequence
  Description of Artificial Sequence: Synthetic primer
ttgcagccgctggttctccttctgcagcgcgtgcagcgcc

SEQ ID NO: 22655 - DNA, 40 bp, Artificial Sequence
  Description of Artificial Sequence: Synthetic primer
taagaaaacagaaaacttctgaagagacatcaagtaattc

SEQ ID NO: 22656 - DNA, 40 bp, Artificial Sequence
  Description of Artificial Sequence: Synthetic primer
agcatgtcattggccctgtccacattctcttctggctgag

SEQ ID NO: 22657 - DNA, 40 bp, Artificial Sequence
  Description of Artificial Sequence: Synthetic primer
cagacaaactgttattgatccggtctcgtcggcgcttctc

SEQ ID NO: 22658 - DNA, 40 bp, Artificial Sequence
  Description of Artificial Sequence: Synthetic primer
agagaaagaagaaaaggctgtttaaagcaagtaagctttt

SEQ ID NO: 22659 - DNA, 40 bp, Artificial Sequence
  Description of Artificial Sequence: Synthetic primer
agctggctgaagcccactaagcccgttcaagtcccctgac

SEQ ID NO: 22660 - DNA, 40 bp, Artificial Sequence
  Description of Artificial Sequence: Synthetic primer
aaccaagatgaaatcaataaaaatgttatgtcagcgtttg

SEQ ID NO: 22661 - DNA, 40 bp, Artificial Sequence
  Description of Artificial Sequence: Synthetic primer
tgctcgctgtatcttttctctgtcatgactaaggttttcc

SEQ ID NO: 22662 - DNA, 40 bp, Artificial Sequence
  Description of Artificial Sequence: Synthetic primer
ccaaatgaaggtgcactggttgtgctgcttccaaatgtag

SEQ ID NO: 22663 - DNA, 40 bp, Artificial Sequence
  Description of Artificial Sequence: Synthetic primer
ttgtggaatttctcttccatactggcctgttgttccttgg

SEQ ID NO: 22664 - DNA, 40 bp, Artificial Sequence
  Description of Artificial Sequence: Synthetic primer
tggttatacaggacatgggaataactgctcgagggcttgg

SEQ ID NO: 22665 - DNA, 40 bp, Artificial Sequence
  Description of Artificial Sequence: Synthetic primer
gaggagtgggggcgctggtggcagacgtcagggaggctga

SEQ ID NO: 22666 - DNA, 40 bp, Artificial Sequence
  Description of Artificial Sequence: Synthetic primer
tgtcatcgttccccaccccttcgacatgctgccaggaaac

SEQ ID NO: 22667 - DNA, 40 bp, Artificial Sequence
  Description of Artificial Sequence: Synthetic primer
gggcgctaatcctgggccggtagtaggaaggcgggaagag

SEQ ID NO: 22668 - DNA, 40 bp, Artificial Sequence
  Description of Artificial Sequence: Synthetic primer
ctcccaaggcctggggaagctggcctatctgtcccatatt

SEQ ID NO: 22669 - DNA, 40 bp, Artificial Sequence
  Description of Artificial Sequence: Synthetic primer
ttttttcttctaattctgtactcacaaaagagaatctcat

SEQ ID NO: 22670 - DNA, 40 bp, Artificial Sequence
  Description of Artificial Sequence: Synthetic primer
cacgcccattctcttcatcactctgagtctctactttaac

SEQ ID NO: 22671 - DNA, 40 bp, Artificial Sequence
  Description of Artificial Sequence: Synthetic primer
gttttgagcaagtgagcccggtcagctgaagaagcaactg

SEQ ID NO: 22672 - DNA, 40 bp, Artificial Sequence
  Description of Artificial Sequence: Synthetic primer
attcagaattcggagttcttatccaggtgctctaactaac

SEQ ID NO: 22673 - DNA, 40 bp, Artificial Sequence
  Description of Artificial Sequence: Synthetic primer
ttggtcgggggtggtgtccggcgctcctcgagcagtgaga

SEQ ID NO: 22674 - DNA, 40 bp, Artificial Sequence
  Description of Artificial Sequence: Synthetic primer
actccgggagaaactgcgtcaccgggaagaccgactcaag

SEQ ID NO: 22675 - DNA, 40 bp, Artificial Sequence
  Description of Artificial Sequence: Synthetic primer
tgaaagagatgttcctgatttcactccaaggaaagccaat

SEQ ID NO: 22676 - DNA, 40 bp, Artificial Sequence
  Description of Artificial Sequence: Synthetic primer
aacagggtcgacccagagtggcggccgcgtccaccaattc

SEQ ID NO: 22677 - DNA, 40 bp, Artificial Sequence
  Description of Artificial Sequence: Synthetic primer
caagaacatctcactggggggaatcttcatcttggccagc

SEQ ID NO: 22678 - DNA, 40 bp, Artificial Sequence
  Description of Artificial Sequence: Synthetic primer
ataaagggttgggagggggaaggtcagggttggtgatgag

SEQ ID NO: 22679 - DNA, 40 bp, Artificial Sequence
  Description of Artificial Sequence: Synthetic primer
caaataatacaaaaatagacaatgacttttgggtggaaat

SEQ ID NO: 22680 - DNA, 40 bp, Artificial Sequence
  Description of Artificial Sequence: Synthetic primer
ctctgaggccaggggataaaaccaaaagatctaggagtag

SEQ ID NO: 22681 - DNA, 40 bp, Artificial Sequence
  Description of Artificial Sequence: Synthetic primer
ttccaaaatttttgtgaaatgtggcccaagatctaaagtt

SEQ ID NO: 22682 - DNA, 40 bp, Artificial Sequence
  Description of Artificial Sequence: Synthetic primer
ccagggaacaggggccggcctgggggctgggagggccagg

SEQ ID NO: 22683 - DNA, 40 bp, Artificial Sequence
  Description of Artificial Sequence: Synthetic primer
tggattttcaactaggatcagagaaatcaaatcttgaagc

SEQ ID NO: 22684 - DNA, 40 bp, Artificial Sequence
  Description of Artificial Sequence: Synthetic primer
atgaagggccattggtttggaaggtgaatagagataaaac

SEQ ID NO: 22685 - DNA, 40 bp, Artificial Sequence
  Description of Artificial Sequence: Synthetic primer
gatggtgcccgcttcccggagccgtgaggggcctgagaac

SEQ ID NO: 22686 - DNA, 40 bp, Artificial Sequence
  Description of Artificial Sequence: Synthetic primer
cccttcggttcacctcacacctttggttgaacacatctgc

SEQ ID NO: 22687 - DNA, 40 bp, Artificial Sequence
  Description of Artificial Sequence: Synthetic primer
ggtccccctgcggtagactggggtgtagttttctacagtg

SEQ ID NO: 22688 - DNA, 40 bp, Artificial Sequence
  Description of Artificial Sequence: Synthetic primer
caaatcctcttgatcttttgcttgcaggatccctcattac

SEQ ID NO: 22689 - DNA, 40 bp, Artificial Sequence
  Description of Artificial Sequence: Synthetic primer
atagttcctgttggtgaagctaacgttgaggggcatcgtc

SEQ ID NO: 22690 - DNA, 40 bp, Artificial Sequence
  Description of Artificial Sequence: Synthetic primer
ccctgtccagccaacccattgaccatgaaggaatcaaatc

SEQ ID NO: 22691 - DNA, 40 bp, Artificial Sequence
  Description of Artificial Sequence: Synthetic primer
gagaatgtaaatgtgccagtgtggagtggccacgtgtgtg

SEQ ID NO: 22692 - DNA, 40 bp, Artificial Sequence
  Description of Artificial Sequence: Synthetic primer
ggggttaatggcttgaacccagagggaggcttcctatcat

SEQ ID NO: 22693 - DNA, 40 bp, Artificial Sequence
  Description of Artificial Sequence: Synthetic primer
ccccagaatgttcccctgagcagccactcccgtttgttgc

SEQ ID NO: 22694 - DNA, 40 bp, Artificial Sequence
  Description of Artificial Sequence: Synthetic primer
agggagtttatttgaggacatcagtcacctttggggttgc

SEQ ID NO: 22695 - DNA, 40 bp, Artificial Sequence
  Description of Artificial Sequence: Synthetic primer
tgcgcctcgcccgcccggaccagcctgccccggcgccgag

SEQ ID NO: 22696 - DNA, 40 bp, Artificial Sequence
  Description of Artificial Sequence: Synthetic primer
agtgtgagtcctttcatgatatcgaagggaattgcaacat

SEQ ID NO: 22697 - DNA, 40 bp, Artificial Sequence
  Description of Artificial Sequence: Synthetic primer
cacatacccacacattccagggctggggtgagcctgactg

SEQ ID NO: 22698 - DNA, 40 bp, Artificial Sequence
  Description of Artificial Sequence: Synthetic primer
agaccctgctgcctccagccccccaggcgagcgtgggcgc

SEQ ID NO: 22699 - DNA, 40 bp, Artificial Sequence
  Description of Artificial Sequence: Synthetic primer
agacgagaacaagcaagacaagacttgaagggtttggaag

SEQ ID NO: 22700 - DNA, 40 bp, Artificial Sequence
  Description of Artificial Sequence: Synthetic primer
gatgtcagatcggccattttgacgtgtaacttacaaaagc

SEQ ID NO: 22701 - DNA, 40 bp, Artificial Sequence
  Description of Artificial Sequence: Synthetic primer
aaacacttggcatacaaaatatttaagtgaaggagaagtc

SEQ ID NO: 22702 - DNA, 40 bp, Artificial Sequence
  Description of Artificial Sequence: Synthetic primer
aaacgtgacatggagtcccaggctcatgccctccgccaga

SEQ ID NO: 22703 - DNA, 40 bp, Artificial Sequence
  Description of Artificial Sequence: Synthetic primer
tagcctgccagaaaatagcaatttctaaggtgctgccatc

SEQ ID NO: 22704 - DNA, 40 bp, Artificial Sequence
  Description of Artificial Sequence: Synthetic primer
gtcggtccctatagcggccatgcgttgttgctggggattc

SEQ ID NO: 22705 - DNA, 40 bp, Artificial Sequence
  Description of Artificial Sequence: Synthetic primer
aaggtagctgagcagacacccctcaccgccctctatgtgg

SEQ ID NO: 22706 - DNA, 40 bp, Artificial Sequence
  Description of Artificial Sequence: Synthetic primer
aagctatcccctggatctttctagcaataaacccatgttg

SEQ ID NO: 22707 - DNA, 40 bp, Artificial Sequence
  Description of Artificial Sequence: Synthetic primer
tcaggttcagtattatgtagttgttcgttggttatacaag

SEQ ID NO: 22708 - DNA, 40 bp, Artificial Sequence
  Description of Artificial Sequence: Synthetic primer
aaacggcagaactctaaccgctgtgtttcgggcgcctctc

SEQ ID NO: 22709 - DNA, 40 bp, Artificial Sequence
  Description of Artificial Sequence: Synthetic primer
ggcttatcacttttcgtattgctcagtatgtccaagatag

SEQ ID NO: 22710 - DNA, 40 bp, Artificial Sequence
  Description of Artificial Sequence: Synthetic primer
aatggagaaataggggaaagtcaagtgaaaggtggtgaag

SEQ ID NO: 22711 - DNA, 40 bp, Artificial Sequence
  Description of Artificial Sequence: Synthetic primer
gtaaattcaatactcaatcagaaataagaatatacctagc

SEQ ID NO: 22712 - DNA, 40 bp, Artificial Sequence
  Description of Artificial Sequence: Synthetic primer
ttgcaggccacacacccaccctctgaagacagattcttgc

SEQ ID NO: 22713 - DNA, 40 bp, Artificial Sequence
  Description of Artificial Sequence: Synthetic primer
tgcctgggtagtagttatgcgctctggcgacttcacaagc

SEQ ID NO: 22714 - DNA, 40 bp, Artificial Sequence
  Description of Artificial Sequence: Synthetic primer
tgattatcctaattacataatgaccgatttgagatagagg

SEQ ID NO: 22715 - DNA, 40 bp, Artificial Sequence
  Description of Artificial Sequence: Synthetic primer
tatgaggaaatacattcaataagcaaaaataaaagaactc

SEQ ID NO: 22716 - DNA, 40 bp, Artificial Sequence
  Description of Artificial Sequence: Synthetic primer
tggtttcatatttatacatatggtattttgcttaataccc

SEQ ID NO: 22717 - DNA, 40 bp, Artificial Sequence
  Description of Artificial Sequence: Synthetic primer
ttttgtttacaaggcagtttagggatcgtccgtgcgttac

SEQ ID NO: 22718 - DNA, 40 bp, Artificial Sequence
  Description of Artificial Sequence: Synthetic primer
tggagaagtcctccatgttctccgtaaagtggtccaggtg

SEQ ID NO: 22719 - DNA, 40 bp, Artificial Sequence
  Description of Artificial Sequence: Synthetic primer
tgctctgccataggtctaagatgtccggtgatgcaccaag

SEQ ID NO: 22720 - DNA, 40 bp, Artificial Sequence
  Description of Artificial Sequence: Synthetic primer
tgccagcaggaccaggagggccagggggtccagcatttcc

SEQ ID NO: 22721 - DNA, 40 bp, Artificial Sequence
  Description of Artificial Sequence: Synthetic primer
gaactttggaacagggttggcattcaaccacgcaggaagc

SEQ ID NO: 22722 - DNA, 40 bp, Artificial Sequence
  Description of Artificial Sequence: Synthetic primer
gccctggttcagacatgggttggacgcacactcgttgatg

SEQ ID NO: 22723 - DNA, 40 bp, Artificial Sequence
  Description of Artificial Sequence: Synthetic primer
cctgaaaaaatcagggcttccagacttgatacttggaaag

SEQ ID NO: 22724 - DNA, 40 bp, Artificial Sequence
  Description of Artificial Sequence: Synthetic primer
ggatttggacaaggccaattacctgtcccaggccctccag

SEQ ID NO: 22725 - DNA, 40 bp, Artificial Sequence
  Description of Artificial Sequence: Synthetic primer
ctacagttgtaacttctgtgagaaatccttccgccagctc

SEQ ID NO: 22726 - DNA, 40 bp, Artificial Sequence
  Description of Artificial Sequence: Synthetic primer
caaaaccttgaatgctggcagatacctgtgacaaactgac

SEQ ID NO: 22727 - DNA, 40 bp, Artificial Sequence
  Description of Artificial Sequence: Synthetic primer
attggaggtgaaacatttctctataatccttagaaagtgc

SEQ ID NO: 22728 - DNA, 40 bp, Artificial Sequence
  Description of Artificial Sequence: Synthetic primer
tacactcctgtgaatggatctatagtgattgtcagagcag

SEQ ID NO: 22729 - DNA, 40 bp, Artificial Sequence
  Description of Artificial Sequence: Synthetic primer
tgtctttcagggatttactaccggcttccgggacttgagc

SEQ ID NO: 22730 - DNA, 40 bp, Artificial Sequence
  Description of Artificial Sequence: Synthetic primer
gattaaaatatcctttcatcaatgggattttctagtttcc

SEQ ID NO: 22731 - DNA, 40 bp, Artificial Sequence
  Description of Artificial Sequence: Synthetic primer
tacttcttagactcctgaacgatgtcttcgtgggtcatgc

SEQ ID NO: 22732 - DNA, 40 bp, Artificial Sequence
  Description of Artificial Sequence: Synthetic primer
gtattcaacaattgacagaagaaattggtagacttaaagc

SEQ ID NO: 22733 - DNA, 40 bp, Artificial Sequence
  Description of Artificial Sequence: Synthetic primer
ctcaacaaatgtggacggagaaacaagtttgggatcaacc

SEQ ID NO: 22734 - DNA, 40 bp, Artificial Sequence
  Description of Artificial Sequence: Synthetic primer
gctgggtggagaggctcacatttttggccagataatcaac

SEQ ID NO: 22735 - DNA, 40 bp, Artificial Sequence
  Description of Artificial Sequence: Synthetic primer
agagaacttggacttccagaagagttagtttccaggcatc

SEQ ID NO: 22736 - DNA, 40 bp, Artificial Sequence
  Description of Artificial Sequence: Synthetic primer
tattacaacagccctttcaataggaccaaattggctaaag

SEQ ID NO: 22737 - DNA, 40 bp, Artificial Sequence
  Description of Artificial Sequence: Synthetic primer
tacactatctccatgtgtaagcaaaacaacttcttccttc

SEQ ID NO: 22738 - DNA, 40 bp, Artificial Sequence
  Description of Artificial Sequence: Synthetic primer
ttagaaactatttgaggctataaaaatgtccttgagtttg

SEQ ID NO: 22739 - DNA, 40 bp, Artificial Sequence
  Description of Artificial Sequence: Synthetic primer
gatggagcggggccgcgagcctgtggggaaggggctgtgg

SEQ ID NO: 22740 - DNA, 40 bp, Artificial Sequence
  Description of Artificial Sequence: Synthetic primer
gcataggacatgatactaataaccacacggctggcgtgac

SEQ ID NO: 22741 - DNA, 40 bp, Artificial Sequence
  Description of Artificial Sequence: Synthetic primer
ctgtcaaccctctccagggaggcccaggctagccaacagg

SEQ ID NO: 22742 - DNA, 40 bp, Artificial Sequence
  Description of Artificial Sequence: Synthetic primer
agtgggagcgggtcatgttcaggtccaactcggccccatc

SEQ ID NO: 22743 - DNA, 40 bp, Artificial Sequence
  Description of Artificial Sequence: Synthetic primer
ttgaagttcttctccaatcaaagacgcagcatcagtattc

SEQ ID NO: 22744 - DNA, 40 bp, Artificial Sequence
  Description of Artificial Sequence: Synthetic primer
cccagcacacgttgggcaggccacccgccgccggctcagc

SEQ ID NO: 22745 - DNA, 40 bp, Artificial Sequence
  Description of Artificial Sequence: Synthetic primer
cccaaggggcgcggatcgcccgggagggagccaggaggtg

SEQ ID NO: 22746 - DNA, 40 bp, Artificial Sequence
  Description of Artificial Sequence: Synthetic primer
tagatatgaaattccatcatgatagcacagcgcctgcttg

SEQ ID NO: 22747 - DNA, 40 bp, Artificial Sequence
  Description of Artificial Sequence: Synthetic primer
gcagaacctgcctgtgtcccagcttggaggcctggtcctg

SEQ ID NO: 22748 - DNA, 40 bp, Artificial Sequence
  Description of Artificial Sequence: Synthetic primer
ggcgggactagcggcagctgcagccccgcgtcctcggagc

SEQ ID NO: 22749 - DNA, 40 bp, Artificial Sequence
  Description of Artificial Sequence: Synthetic primer
catgttcaagaagttactcgtcaaactccaagaaggcaag

SEQ ID NO: 22750 - DNA, 40 bp, Artificial Sequence
  Description of Artificial Sequence: Synthetic primer
gaccggctgtgtgttgggatcgtggcctcggagcgagcag

SEQ ID NO: 22751 - DNA, 40 bp, Artificial Sequence
  Description of Artificial Sequence: Synthetic primer
gttctgacctgctcgggttcagctccggtggtgtgggaac

SEQ ID NO: 22752 - DNA, 40 bp, Artificial Sequence
  Description of Artificial Sequence: Synthetic primer
ctgcccctttgtatttgaagcagagtgatttggcctcagc

SEQ ID NO: 22753 - DNA, 40 bp, Artificial Sequence
  Description of Artificial Sequence: Synthetic primer
atatagcaagctaaaggagaagtacagcgagctggttcag

SEQ ID NO: 22754 - DNA, 40 bp, Artificial Sequence
  Description of Artificial Sequence: Synthetic primer
gtcaagttttcaggggccccagaacttccaggtgaatctg

SEQ ID NO: 22755 - DNA, 40 bp, Artificial Sequence
  Description of Artificial Sequence: Synthetic primer
tttaccttaaatgcttattttaaaatgacagtggaagttt

SEQ ID NO: 22756 - DNA, 40 bp, Artificial Sequence
  Description of Artificial Sequence: Synthetic primer
ggtgaccacctacagaggccccgaccacactggctgatgg

SEQ ID NO: 22757 - DNA, 40 bp, Artificial Sequence
  Description of Artificial Sequence: Synthetic primer
gaagtaccaccaaaaaagctgtattttgaaaatgctttag

SEQ ID NO: 22758 - DNA, 40 bp, Artificial Sequence
  Description of Artificial Sequence: Synthetic primer
taatcatggacccttctcctggggcatttgttttgttttc

SEQ ID NO: 22759 - DNA, 40 bp, Artificial Sequence
  Description of Artificial Sequence: Synthetic primer
cgtactgctggccttggccttgctggtagccggggtactg

SEQ ID NO: 22760 - DNA, 40 bp, Artificial Sequence
  Description of Artificial Sequence: Synthetic primer
ttccagccttgcagcatcactgggtcattgggttaaggag

SEQ ID NO: 22761 - DNA, 40 bp, Artificial Sequence
  Description of Artificial Sequence: Synthetic primer
tttaaaaaagcaaaggaagcatacttgtgaactaccttgc

SEQ ID NO: 22762 - DNA, 40 bp, Artificial Sequence
  Description of Artificial Sequence: Synthetic primer
ttgatttcacacaacacattaaacaaggcaggcttcattc

SEQ ID NO: 22763 - DNA, 40 bp, Artificial Sequence
  Description of Artificial Sequence: Synthetic primer
gtggggacatggggctggccaacggggagcaggtgtggtg

SEQ ID NO: 22764 - DNA, 40 bp, Artificial Sequence
  Description of Artificial Sequence: Synthetic primer
tgttaatgaattttcttttcctgacatttgttggtttctc

SEQ ID NO: 22765 - DNA, 40 bp, Artificial Sequence
  Description of Artificial Sequence: Synthetic primer
cagcaggggcgtaagcaactcctagagaagtggctgaaag

SEQ ID NO: 22766 - DNA, 40 bp, Artificial Sequence
  Description of Artificial Sequence: Synthetic primer
ggcgtctacacccccctcggggccagtgggtgagcagtgg

SEQ ID NO: 22767 - DNA, 40 bp, Artificial Sequence
  Description of Artificial Sequence: Synthetic primer
ttagacgacaaggtgtgtcaaggaagagtcctactagctc

SEQ ID NO: 22768 - DNA, 40 bp, Artificial Sequence
  Description of Artificial Sequence: Synthetic primer
tgtatttctgcagcagggaggcagcctggcaatcctcttc

SEQ ID NO: 22769 - DNA, 40 bp, Artificial Sequence
  Description of Artificial Sequence: Synthetic primer
tcctgttgcctgagccctggggggcgggcggagctagagg

SEQ ID NO: 22770 - DNA, 40 bp, Artificial Sequence
  Description of Artificial Sequence: Synthetic primer
ccagcttctggacgcgtttgactgcagccaggggtggggg

SEQ ID NO: 22771 - DNA, 40 bp, Artificial Sequence
  Description of Artificial Sequence: Synthetic primer
tatctcctgcaaggcgagtgcagtgtatacgagactgctg

SEQ ID NO: 22772 - DNA, 40 bp, Artificial Sequence
  Description of Artificial Sequence: Synthetic primer
gtgatctaaaacaccacaatatccaacatacacaaacctc

SEQ ID NO: 22773 - DNA, 40 bp, Artificial Sequence
  Description of Artificial Sequence: Synthetic primer
acatgaccaaagggtatctgaattagagaagactcaggtg

SEQ ID NO: 22774 - DNA, 40 bp, Artificial Sequence
  Description of Artificial Sequence: Synthetic primer
tgctcacaatccgctgggtcgatcacaatcaacaatttta

SEQ ID NO: 22775 - DNA, 40 bp, Artificial Sequence
  Description of Artificial Sequence: Synthetic primer
aaaactccatggtacttttgtcaatgtgatcctataaaac

SEQ ID NO: 22776 - DNA, 40 bp, Artificial Sequence
  Description of Artificial Sequence: Synthetic primer
aagtgtcagatggttttctacaatgaatgggatattcagg

SEQ ID NO: 22777 - DNA, 40 bp, Artificial Sequence
  Description of Artificial Sequence: Synthetic primer
gaggatcttctcaggcttgctgcaggactcggggctcctc

SEQ ID NO: 22778 - DNA, 40 bp, Artificial Sequence
  Description of Artificial Sequence: Synthetic primer
tctggatagagaggaaacagcctggctcaacatcactgtc

SEQ ID NO: 22779 - DNA, 40 bp, Artificial Sequence
  Description of Artificial Sequence: Synthetic primer
atcctgttggaaaatgaccttgccatctgtgacaagaaag

SEQ ID NO: 22780 - DNA, 40 bp, Artificial Sequence
  Description of Artificial Sequence: Synthetic primer
tcaaaacagaagaaaaaggctaagtcccagcaatacaaag

SEQ ID NO: 22781 - DNA, 40 bp, Artificial Sequence
  Description of Artificial Sequence: Synthetic primer
tatagcgtttggtgcagccagggagcttacatacatacgg

SEQ ID NO: 22782 - DNA, 40 bp, Artificial Sequence
  Description of Artificial Sequence: Synthetic primer
ccacggcccggggagagggagcgcgagcgagctagagatt

SEQ ID NO: 22783 - DNA, 40 bp, Artificial Sequence
  Description of Artificial Sequence: Synthetic primer
ataggctgttccttcaaccaccttcccaaacgctccagac

SEQ ID NO: 22784 - DNA, 40 bp, Artificial Sequence
  Description of Artificial Sequence: Synthetic primer
tcatcaattaattcaccgacgtattcatttacaaattcac

SEQ ID NO: 22785 - DNA, 40 bp, Artificial Sequence
  Description of Artificial Sequence: Synthetic primer
aatggtaactggagccgtagcgtcggtgctggaagacgag

SEQ ID NO: 22786 - DNA, 40 bp, Artificial Sequence
  Description of Artificial Sequence: Synthetic primer
gaaccctccagatacgaaggaagtggggagcaggcatatc

SEQ ID NO: 22787 - DNA, 40 bp, Artificial Sequence
  Description of Artificial Sequence: Synthetic primer
atacctaaagagaggaactgagcaggaggcagccaaaaac

SEQ ID NO: 22788 - DNA, 40 bp, Artificial Sequence
  Description of Artificial Sequence: Synthetic primer
tggcaacggtgaaggtggaggtggagttcgagttgagatg

SEQ ID NO: 22789 - DNA, 40 bp, Artificial Sequence
  Description of Artificial Sequence: Synthetic primer
agaagcccatcagactgcccccagcacacggaatggattt

SEQ ID NO: 22790 - DNA, 40 bp, Artificial Sequence
  Description of Artificial Sequence: Synthetic primer
gttcacataagccagtcagatcaggattctgatttcgtcc

SEQ ID NO: 22791 - DNA, 40 bp, Artificial Sequence
  Description of Artificial Sequence: Synthetic primer
cccctactttaagaaataattgtggcaatgtggtctgagg

SEQ ID NO: 22792 - DNA, 40 bp, Artificial Sequence
  Description of Artificial Sequence: Synthetic primer
atgcctgtgcgaggagggcggggacgtctactgcttcaac

SEQ ID NO: 22793 - DNA, 40 bp, Artificial Sequence
  Description of Artificial Sequence: Synthetic primer
cagcagcctgatcgctcagctagaagagaagcagcagcag

SEQ ID NO: 22794 - DNA, 40 bp, Artificial Sequence
  Description of Artificial Sequence: Synthetic primer
tgctgacttttttcattctccaataaatttcactgaactg

SEQ ID NO: 22795 - DNA, 40 bp, Artificial Sequence
  Description of Artificial Sequence: Synthetic primer
ctaggaaacctgcagagatgatcctaaacacaaggtgtcc

SEQ ID NO: 22796 - DNA, 40 bp, Artificial Sequence
  Description of Artificial Sequence: Synthetic primer
tggacttggagagatgggaggcagacccccaccaccatac

SEQ ID NO: 22797 - DNA, 40 bp, Artificial Sequence
  Description of Artificial Sequence: Synthetic primer
ggaccccagccccattgctgggctttggggacttggctgg

SEQ ID NO: 22798 - DNA, 40 bp, Artificial Sequence
  Description of Artificial Sequence: Synthetic primer
ctgttgttctccctctgcttgctttttcacattagcagac

SEQ ID NO: 22799 - DNA, 40 bp, Artificial Sequence
  Description of Artificial Sequence: Synthetic primer
tatgactatttacttcattccaagtggaagctacttgtgg

SEQ ID NO: 22800 - DNA, 40 bp, Artificial Sequence
  Description of Artificial Sequence: Synthetic primer
cgtcagcctcctgaatacaaccccaatgatgaagaagagg

SEQ ID NO: 22801 - DNA, 40 bp, Artificial Sequence
  Description of Artificial Sequence: Synthetic primer
ttaaatccagtggctgagtggacgatgacattcagaaacc

SEQ ID NO: 22802 - DNA, 40 bp, Artificial Sequence
  Description of Artificial Sequence: Synthetic primer
ggagactcgttgatcaaagttgctcggcaggtcctctcag

SEQ ID NO: 22803 - DNA, 40 bp, Artificial Sequence
  Description of Artificial Sequence: Synthetic primer
ctgattcctaggaaaacatttactacttgtaaagaatttc

SEQ ID NO: 22804 - DNA, 40 bp, Artificial Sequence
  Description of Artificial Sequence: Synthetic primer
gctgcaagagagatcctcctgatgcccactccagggaagc

SEQ ID NO: 22805 - DNA, 40 bp, Artificial Sequence
  Description of Artificial Sequence: Synthetic primer
ctcaatcacactacacatcacacaagatttgactgtaata

SEQ ID NO: 22806 - DNA, 40 bp, Artificial Sequence
  Description of Artificial Sequence: Synthetic primer
ttaggaacaatattttaggaaatagagggtttaaggcaag

SEQ ID NO: 22807 - DNA, 40 bp, Artificial Sequence
  Description of Artificial Sequence: Synthetic primer
ttcactgacagtattgaggaggaggctgcacaccatagtc

SEQ ID NO: 22808 - DNA, 40 bp, Artificial Sequence
  Description of Artificial Sequence: Synthetic primer
ccattgggccactcccctccttcccctattgaagctcctc

SEQ ID NO: 22809 - DNA, 40 bp, Artificial Sequence
  Description of Artificial Sequence: Synthetic primer
tttcgtatataactttacatgtttaatgtttaaaaaccac

SEQ ID NO: 22810 - DNA, 40 bp, Artificial Sequence
  Description of Artificial Sequence: Synthetic primer
caagtaggcttgttcttctactttgcttcagaattcagtt

SEQ ID NO: 22811 - DNA, 40 bp, Artificial Sequence
  Description of Artificial Sequence: Synthetic primer
aggatcaagaacaagcccaacagtaatctgcatcataagc

SEQ ID NO: 22812 - DNA, 40 bp, Artificial Sequence
  Description of Artificial Sequence: Synthetic primer
tactgatgatgctatctccttcattttgttgttttgatag

SEQ ID NO: 22813 - DNA, 40 bp, Artificial Sequence
  Description of Artificial Sequence: Synthetic primer
ctggagtgggaggtactggcaggccatggatctgggcctg

SEQ ID NO: 22814 - DNA, 40 bp, Artificial Sequence
  Description of Artificial Sequence: Synthetic primer
cctgcctcactgggtcccagctccccgctcctgttagccc

SEQ ID NO: 22815 - DNA, 40 bp, Artificial Sequence
  Description of Artificial Sequence: Synthetic primer
aacagatgacaacagccgtcctccctcctagggtcttgtg

SEQ ID NO: 22816 - DNA, 40 bp, Artificial Sequence
  Description of Artificial Sequence: Synthetic primer
tgcaagtaacacatctcaatcctaaacgtctggcaaaatc

SEQ ID NO: 22817 - DNA, 40 bp, Artificial Sequence
  Description of Artificial Sequence: Synthetic primer
ataactaaagattctgaactgcccacctgcagctgtcttg

SEQ ID NO: 22818 - DNA, 40 bp, Artificial Sequence
  Description of Artificial Sequence: Synthetic primer
accattggagtaggagggggtggaacacagggggcccatc

SEQ ID NO: 22819 - DNA, 40 bp, Artificial Sequence
  Description of Artificial Sequence: Synthetic primer
agtgacccccatgtgatccctgggccctgagtcacagccg

SEQ ID NO: 22820 - DNA, 40 bp, Artificial Sequence
  Description of Artificial Sequence: Synthetic primer
gaatctccttggagctgagaaccgagagctgaagctggtg

SEQ ID NO: 22821 - DNA, 40 bp, Artificial Sequence
  Description of Artificial Sequence: Synthetic primer
caggcctgaaggagaagaagcacaaagccagcaagaggag

SEQ ID NO: 22822 - DNA, 40 bp, Artificial Sequence
  Description of Artificial Sequence: Synthetic primer
gctagattgggaggttggctggtcactgatggttataatg

SEQ ID NO: 22823 - DNA, 40 bp, Artificial Sequence
  Description of Artificial Sequence: Synthetic primer
tttatccagctcgtcctctgtcccttttagtttcttctgg

SEQ ID NO: 22824 - DNA, 40 bp, Artificial Sequence
  Description of Artificial Sequence: Synthetic primer
cacaatcaataatggcactcagcagcaagcacagagtatg

SEQ ID NO: 22825 - DNA, 40 bp, Artificial Sequence
  Description of Artificial Sequence: Synthetic primer
tccgaatctctctgcgagcggcggagccggggcagcggcg

SEQ ID NO: 22826 - DNA, 40 bp, Artificial Sequence
  Description of Artificial Sequence: Synthetic primer
gttaatattgtgaagaaaaataaagtacagtgtgagatac

SEQ ID NO: 22827 - DNA, 40 bp, Artificial Sequence
  Description of Artificial Sequence: Synthetic primer
tgaaagacctctgtgaactgtagagaagaccaggggctca

SEQ ID NO: 22828 - DNA, 40 bp, Artificial Sequence
  Description of Artificial Sequence: Synthetic primer
tggagagttgtaatggcataaaacaacacagaatccactg

SEQ ID NO: 22829 - DNA, 40 bp, Artificial Sequence
  Description of Artificial Sequence: Synthetic primer
cagctccagcagctgccgcgcccgcagtgtccccggctgc

SEQ ID NO: 22830 - DNA, 40 bp, Artificial Sequence
  Description of Artificial Sequence: Synthetic primer
ccgcccccacagggtgcagaggctgtctggtcgaagagtg

SEQ ID NO: 22831 - DNA, 40 bp, Artificial Sequence
  Description of Artificial Sequence: Synthetic primer
taggttcgtgtcgtcgttggctctgagacattgataataa

SEQ ID NO: 22832 - DNA, 40 bp, Artificial Sequence
  Description of Artificial Sequence: Synthetic primer
cagagactattacattttatgcagcaaaacccagatgtcc

SEQ ID NO: 22833 - DNA, 40 bp, Artificial Sequence
  Description of Artificial Sequence: Synthetic primer
ctgttctgccccagtggcatgatgtccctcatcggcgccc

SEQ ID NO: 22834 - DNA, 40 bp, Artificial Sequence
  Description of Artificial Sequence: Synthetic primer
catcatttcctcatcggacactgatcctctggccattttt

SEQ ID NO: 22835 - DNA, 40 bp, Artificial Sequence
  Description of Artificial Sequence: Synthetic primer
tcactctttcttctgcacttgcacaatcgctctagctctg

SEQ ID NO: 22836 - DNA, 40 bp, Artificial Sequence
  Description of Artificial Sequence: Synthetic primer
taatttcagttgggaaggttcaatgaaataatgtctaaag

SEQ ID NO: 22837 - DNA, 40 bp, Artificial Sequence
  Description of Artificial Sequence: Synthetic primer
gaaaaccgatgaacttagaaatctacacaaactgctttac

SEQ ID NO: 22838 - DNA, 40 bp, Artificial Sequence
  Description of Artificial Sequence: Synthetic primer
ttgatctccacaaagttgatttcttctctccctcggttcc

SEQ ID NO: 22839 - DNA, 40 bp, Artificial Sequence
  Description of Artificial Sequence: Synthetic primer
ttttcaaacatgtcactgttgttttcagttgggaggacac

SEQ ID NO: 22840 - DNA, 40 bp, Artificial Sequence
  Description of Artificial Sequence: Synthetic primer
gctgagggcggagaggcgcatcgtgttcgaggcggagacc

SEQ ID NO: 22841 - DNA, 40 bp, Artificial Sequence
  Description of Artificial Sequence: Synthetic primer
gtgcctacatcatatgaaccaaccaatatatccattccag

SEQ ID NO: 22842 - DNA, 40 bp, Artificial Sequence
  Description of Artificial Sequence: Synthetic primer
ggggctttcccaggcaaagagggatgttcaggaacagatg

SEQ ID NO: 22843 - DNA, 40 bp, Artificial Sequence
  Description of Artificial Sequence: Synthetic primer
ccacccattctgagcagccgtaaaggacatgtagacttgg

SEQ ID NO: 22844 - DNA, 40 bp, Artificial Sequence
  Description of Artificial Sequence: Synthetic primer
aggaaagatgggaaaacgaccagagaggaccacatgaaac

SEQ ID NO: 22845 - DNA, 40 bp, Artificial Sequence
  Description of Artificial Sequence: Synthetic primer
tcaacacctgttctccttccaccaaatacacgtcccacag

SEQ ID NO: 22846 - DNA, 40 bp, Artificial Sequence
  Description of Artificial Sequence: Synthetic primer
taagccgtgatgcatgcggggttgacgcggccgggctctg

SEQ ID NO: 22847 - DNA, 40 bp, Artificial Sequence
  Description of Artificial Sequence: Synthetic primer
tccaccctcgggtatggacaggtgtgaggagtgtctaagg

SEQ ID NO: 22848 - DNA, 40 bp, Artificial Sequence
  Description of Artificial Sequence: Synthetic primer
gggcagtttgctttctcttgtgttcctgcccataaagcag

SEQ ID NO: 22849 - DNA, 40 bp, Artificial Sequence
  Description of Artificial Sequence: Synthetic primer
gaaactcaggcaactcagcaaagcgctcttcgaagtccac

SEQ ID NO: 22850 - DNA, 40 bp, Artificial Sequence
  Description of Artificial Sequence: Synthetic primer
gctatactcagctaacatggcaacagaataatgttcagag

SEQ ID NO: 22851 - DNA, 40 bp, Artificial Sequence
  Description of Artificial Sequence: Synthetic primer
agtttggctacacgattagctccaatttataagcagtatg

SEQ ID NO: 22852 - DNA, 40 bp, Artificial Sequence
  Description of Artificial Sequence: Synthetic primer
cgctcatatggttggagtgttaagtgaacctctgattttg

SEQ ID NO: 22853 - DNA, 40 bp, Artificial Sequence
  Description of Artificial Sequence: Synthetic primer
atgagggggtaggggtcatctctccttcctttttatcctc

SEQ ID NO: 22854 - DNA, 40 bp, Artificial Sequence
  Description of Artificial Sequence: Synthetic primer
tcagttgggggagaaactcacagctcctccgggatacata

SEQ ID NO: 22855 - DNA, 40 bp, Artificial Sequence
  Description of Artificial Sequence: Synthetic primer
ttgtttcatttcaaaatgtattatttagggtcagggaaat

SEQ ID NO: 22856 - DNA, 40 bp, Artificial Sequence
  Description of Artificial Sequence: Synthetic primer
aaataaaagatagcaatatgagacacaggtggacgtagag

SEQ ID NO: 22857 - DNA, 40 bp, Artificial Sequence
  Description of Artificial Sequence: Synthetic primer
tggcctcatggactgctggtcaaaacccacatctgggaag

SEQ ID NO: 22858 - DNA, 40 bp, Artificial Sequence
  Description of Artificial Sequence: Synthetic primer
agtgttctctagaacctctaccttcttccgaagctccaag

SEQ ID NO: 22859 - DNA, 40 bp, Artificial Sequence
  Description of Artificial Sequence: Synthetic primer
tgtgaagtagaagaattacatagaactgtccagaaacgtc

SEQ ID NO: 22860 - DNA, 40 bp, Artificial Sequence
  Description of Artificial Sequence: Synthetic primer
agcccctgaaacgcagatgcagttcctcaggggacttttc

SEQ ID NO: 22861 - DNA, 40 bp, Artificial Sequence
  Description of Artificial Sequence: Synthetic primer
gtgctcttcaggaatgtggctgcaagcaaggggctagaag

SEQ ID NO: 22862 - DNA, 40 bp, Artificial Sequence
  Description of Artificial Sequence: Synthetic primer
agccacaggcaatgtcccgagccacgtgcagaaggtccag

SEQ ID NO: 22863 - DNA, 40 bp, Artificial Sequence
  Description of Artificial Sequence: Synthetic primer
aggttcatctttactggagattccacacacgtaactgtag

SEQ ID NO: 22864 - DNA, 40 bp, Artificial Sequence
  Description of Artificial Sequence: Synthetic primer
cagagcctgctctctgcgtccagacagtctccccacgatg

SEQ ID NO: 22865 - DNA, 40 bp, Artificial Sequence
  Description of Artificial Sequence: Synthetic primer
ttcttaactgatgtcaacaacatcttgcggttattaattg

SEQ ID NO: 22866 - DNA, 40 bp, Artificial Sequence
  Description of Artificial Sequence: Synthetic primer
atcctgagtagccctgaagacagaggcagcagcctgtcca

SEQ ID NO: 22867 - DNA, 40 bp, Artificial Sequence
  Description of Artificial Sequence: Synthetic primer
ttctgtctaattccttttctttaaatgtttgttcttcaac

SEQ ID NO: 22868 - DNA, 40 bp, Artificial Sequence
  Description of Artificial Sequence: Synthetic primer
tgctgcagtgtctgaagaagagcgagaagctgagaaagag

SEQ ID NO: 22869 - DNA, 40 bp, Artificial Sequence
  Description of Artificial Sequence: Synthetic primer
ctggcctgaacagaaagagtcctgcaacctcgagccatcg

SEQ ID NO: 22870 - DNA, 40 bp, Artificial Sequence
  Description of Artificial Sequence: Synthetic primer
tgtattaaaatgtacaaaatgttttgttaataaaatttaa

SEQ ID NO: 22871 - DNA, 40 bp, Artificial Sequence
  Description of Artificial Sequence: Synthetic primer
cccggatctggaatttcgaataagggcagcgcttcttgcg

SEQ ID NO: 22872 - DNA, 40 bp, Artificial Sequence
  Description of Artificial Sequence: Synthetic primer
taaagtaagtaaagtgccaccagccataggaccgtatttc

SEQ ID NO: 22873 - DNA, 40 bp, Artificial Sequence
  Description of Artificial Sequence: Synthetic primer
gaagtatgcagctgcttcaaatgctgaggaccacaactgg

SEQ ID NO: 22874 - DNA, 40 bp, Artificial Sequence
  Description of Artificial Sequence: Synthetic primer
catggttttcaagttgcaacatgtccagaatattctttag

SEQ ID NO: 22875 - DNA, 40 bp, Artificial Sequence
  Description of Artificial Sequence: Synthetic primer
agtatacctgtgtcttctctggcaattgctttcattttag

SEQ ID NO: 22876 - DNA, 40 bp, Artificial Sequence
  Description of Artificial Sequence: Synthetic primer
aatcctacactgattctccaaacttggcagctgactgcat

SEQ ID NO: 22877 - DNA, 40 bp, Artificial Sequence
  Description of Artificial Sequence: Synthetic primer
gttccacaatggaggagttcaatttgaaatcatcatattc

SEQ ID NO: 22878 - DNA, 40 bp, Artificial Sequence
  Description of Artificial Sequence: Synthetic primer
gtggggattggctcattttcaggatttacttacaggtctc

SEQ ID NO: 22879 - DNA, 40 bp, Artificial Sequence
  Description of Artificial Sequence: Synthetic primer
cgcaggaccatggactgggggtggggcatggtggggattc

SEQ ID NO: 22880 - DNA, 40 bp, Artificial Sequence
  Description of Artificial Sequence: Synthetic primer
tgatgaaggataaagaagtatttgatgtgagcaagttacc

SEQ ID NO: 22881 - DNA, 40 bp, Artificial Sequence
  Description of Artificial Sequence: Synthetic primer
cttaaaccacaggtctaagttcagttttgtgattcctttc

SEQ ID NO: 22882 - DNA, 40 bp, Artificial Sequence
  Description of Artificial Sequence: Synthetic primer
aacagatcagtagtttgagagatgaagtagaagcaaaagc

SEQ ID NO: 22883 - DNA, 40 bp, Artificial Sequence
  Description of Artificial Sequence: Synthetic primer
tctttcatttgctgcttctgtttaagctcaagggtcagtc

SEQ ID NO: 22884 - DNA, 40 bp, Artificial Sequence
  Description of Artificial Sequence: Synthetic primer
ttgaaaacaagagtaaacgcagacagcttctagagaaaag

SEQ ID NO: 22885 - DNA, 40 bp, Artificial Sequence
  Description of Artificial Sequence: Synthetic primer
aatagcattggtaatacgcacaggtttacctcattctatg

SEQ ID NO: 22886 - DNA, 40 bp, Artificial Sequence
  Description of Artificial Sequence: Synthetic primer
cgggttgccttggaaggtgtcgctggacccccagccccag

SEQ ID NO: 22887 - DNA, 40 bp, Artificial Sequence
  Description of Artificial Sequence: Synthetic primer
ctggctttgggcccatcatgcgcttctccaccaccacctc

SEQ ID NO: 22888 - DNA, 40 bp, Artificial Sequence
  Description of Artificial Sequence: Synthetic primer
ccagcctcgtccagctggcggtcactcatctgcaggttgc

SEQ ID NO: 22889 - DNA, 40 bp, Artificial Sequence
  Description of Artificial Sequence: Synthetic primer
atccacgcagcaggagaagcaccccacccaccacgagagg

SEQ ID NO: 22890 - DNA, 40 bp, Artificial Sequence
  Description of Artificial Sequence: Synthetic primer
gcagtagcatatacatatatatttttaaataacatttttc

SEQ ID NO: 22891 - DNA, 40 bp, Artificial Sequence
  Description of Artificial Sequence: Synthetic primer
aagaaaccgccgggggagaatgacttcgataccatcaagc

SEQ ID NO: 22892 - DNA, 40 bp, Artificial Sequence
  Description of Artificial Sequence: Synthetic primer
ggtataaaatgctataagatttgtatgtttctctcttatt

SEQ ID NO: 22893 - DNA, 40 bp, Artificial Sequence
  Description of Artificial Sequence: Synthetic primer
ttcattttagggcctccgcgtcccgagtggctccctcacc

SEQ ID NO: 22894 - DNA, 40 bp, Artificial Sequence
  Description of Artificial Sequence: Synthetic primer
caggattcctagcacctccggtgtcaaaaggctgtcatgg

SEQ ID NO: 22895 - DNA, 40 bp, Artificial Sequence
  Description of Artificial Sequence: Synthetic primer
gccaactgctttcatttgtgagggatctgaaccaatacag

SEQ ID NO: 22896 - DNA, 40 bp, Artificial Sequence
  Description of Artificial Sequence: Synthetic primer
cactcaaatgcaaaggcttactaagtacccacttctgttg

SEQ ID NO: 22897 - DNA, 40 bp, Artificial Sequence
  Description of Artificial Sequence: Synthetic primer
tcctctccagcagggccagggggtccttgaacaccaacag

SEQ ID NO: 22898 - DNA, 40 bp, Artificial Sequence
  Description of Artificial Sequence: Synthetic primer
gtttttgttaatttatctcaataaaagcccactggaactc

SEQ ID NO: 22899 - DNA, 40 bp, Artificial Sequence
  Description of Artificial Sequence: Synthetic primer
atctggttgttgaaggcaacttgtagggtcacaagaccag

SEQ ID NO: 22900 - DNA, 40 bp, Artificial Sequence
  Description of Artificial Sequence: Synthetic primer
ccctcccaagctggctggggtggcctgtgtggccacttct

SEQ ID NO: 22901 - DNA, 40 bp, Artificial Sequence
  Description of Artificial Sequence: Synthetic primer
aggggaatcggagcagccggggggcggtttccgtttgatc

SEQ ID NO: 22902 - DNA, 40 bp, Artificial Sequence
  Description of Artificial Sequence: Synthetic primer
gacctggacgtgaggacgactctccggaaccatgtcttct

SEQ ID NO: 22903 - DNA, 40 bp, Artificial Sequence
  Description of Artificial Sequence: Synthetic primer
cagagattgcaaggctgcagaatgtactagacctcactgg

SEQ ID NO: 22904 - DNA, 40 bp, Artificial Sequence
  Description of Artificial Sequence: Synthetic primer
taacccattcccggcgcgtccggctgcagcgggagaaacg

SEQ ID NO: 22905 - DNA, 40 bp, Artificial Sequence
  Description of Artificial Sequence: Synthetic primer
tatcacgatgttcaattgcctttgaaagagagtagtccag

SEQ ID NO: 22906 - DNA, 40 bp, Artificial Sequence
  Description of Artificial Sequence: Synthetic primer
aaacagaaagataattgaagcacagcgaaaagccattcag

SEQ ID NO: 22907 - DNA, 40 bp, Artificial Sequence
  Description of Artificial Sequence: Synthetic primer
gcagctccagggtaaagaagatgattgcggagcatgcgcc

SEQ ID NO: 22908 - DNA, 40 bp, Artificial Sequence
  Description of Artificial Sequence: Synthetic primer
aacagcttctaggtgggctaccatcgagtggatcagtttg

SEQ ID NO: 22909 - DNA, 40 bp, Artificial Sequence
  Description of Artificial Sequence: Synthetic primer
ctcctgacaacacccctagtacttagtgttgaaatgagtc

SEQ ID NO: 22910 - DNA, 40 bp, Artificial Sequence
  Description of Artificial Sequence: Synthetic primer
atcaaatgctgacctccaggaacagggtttagggcaggtg

SEQ ID NO: 22911 - DNA, 40 bp, Artificial Sequence
  Description of Artificial Sequence: Synthetic primer
cccactactaccccaacagctacagtgatgcccactacac

SEQ ID NO: 22912 - DNA, 40 bp, Artificial Sequence
  Description of Artificial Sequence: Synthetic primer
tgaagtacagtatattcttgtaaatacataaaacaaaagc

SEQ ID NO: 22913 - DNA, 40 bp, Artificial Sequence
  Description of Artificial Sequence: Synthetic primer
ctataaattccttgaattcccgcaagttgcacaccatttg

SEQ ID NO: 22914 - DNA, 40 bp, Artificial Sequence
  Description of Artificial Sequence: Synthetic primer
gcttctgagccatcgatcccaatcatcaggaatccgtcag

SEQ ID NO: 22915 - DNA, 40 bp, Artificial Sequence
  Description of Artificial Sequence: Synthetic primer
cacccttgcagagattgatgtcatcttcaaggactttgtg

SEQ ID NO: 22916 - DNA, 40 bp, Artificial Sequence
  Description of Artificial Sequence: Synthetic primer
agcctgcatttctgcattctgcttaattccctttccttag

SEQ ID NO: 22917 - DNA, 40 bp, Artificial Sequence
  Description of Artificial Sequence: Synthetic primer
aacgtgagcttcatggagctgctgagtgcacaccgccgtg

SEQ ID NO: 22918 - DNA, 40 bp, Artificial Sequence
  Description of Artificial Sequence: Synthetic primer
tagaggaagtaaggtagcaggcagtccagccctgatgtgg

SEQ ID NO: 22919 - DNA, 40 bp, Artificial Sequence
  Description of Artificial Sequence: Synthetic primer
gtcctgggcgtgacccgtccattcttcagtgtctctgttt

SEQ ID NO: 22920 - DNA, 40 bp, Artificial Sequence
  Description of Artificial Sequence: Synthetic primer
catctcttcatgaattgtgagcactgaccatgttcttcag

SEQ ID NO: 22921 - DNA, 40 bp, Artificial Sequence
  Description of Artificial Sequence: Synthetic primer
aagcctcggtgctgcacaacctcaaggagcgttactactc

SEQ ID NO: 22922 - DNA, 40 bp, Artificial Sequence
  Description of Artificial Sequence: Synthetic primer
gtggccattcttggtagagctacgcgctccagggctgagc

SEQ ID NO: 22923 - DNA, 40 bp, Artificial Sequence
  Description of Artificial Sequence: Synthetic primer
ggcgcagcagtactttgagaaaatggacgctgacatcaat

SEQ ID NO: 22924 - DNA, 40 bp, Artificial Sequence
  Description of Artificial Sequence: Synthetic primer
tggcttgcacagctgaggataaagccttgttctgctccag

SEQ ID NO: 22925 - DNA, 40 bp, Artificial Sequence
  Description of Artificial Sequence: Synthetic primer
gtacagatgattgcttgttggctttatcagtgtcctcctg

SEQ ID NO: 22926 - DNA, 40 bp, Artificial Sequence
  Description of Artificial Sequence: Synthetic primer
cctgctccctaggaagggtctgctacatggaaacaggttg

SEQ ID NO: 22927 - DNA, 40 bp, Artificial Sequence
  Description of Artificial Sequence: Synthetic primer
ttcctcctacaactgtcccaactaagtataccagccatgc

SEQ ID NO: 22928 - DNA, 40 bp, Artificial Sequence
  Description of Artificial Sequence: Synthetic primer
ttcttcaacttgtgactgtacttccagaagtctttgattc

SEQ ID NO: 22929 - DNA, 40 bp, Artificial Sequence
  Description of Artificial Sequence: Synthetic primer
tattttcctatgtgctgtagctctcctttggaaataaatc

SEQ ID NO: 22930 - DNA, 40 bp, Artificial Sequence
  Description of Artificial Sequence: Synthetic primer
cttaaagtggagaaaataaagaatttgagtgtgcatgtaa

SEQ ID NO: 22931 - DNA, 40 bp, Artificial Sequence
  Description of Artificial Sequence: Synthetic primer
cttctaaatatttattttcttgctccctgcgcctcttttc

SEQ ID NO: 22932 - DNA, 40 bp, Artificial Sequence
  Description of Artificial Sequence: Synthetic primer
tctagagcttaaatgtaatcttgaaaataaaaaagaagag

SEQ ID NO: 22933 - DNA, 40 bp, Artificial Sequence
  Description of Artificial Sequence: Synthetic primer
gggcagcgggtccggggccgactgtacccctgggggatcg

SEQ ID NO: 22934 - DNA, 40 bp, Artificial Sequence
  Description of Artificial Sequence: Synthetic primer
catgaggagtgagagaatcagcattatcatggcaaatagc

SEQ ID NO: 22935 - DNA, 40 bp, Artificial Sequence
  Description of Artificial Sequence: Synthetic primer
ttcttatggctgctgaaatgtgtggtttttatgatttatt

SEQ ID NO: 22936 - DNA, 40 bp, Artificial Sequence
  Description of Artificial Sequence: Synthetic primer
atctttcatcaaggcaagttccatgagccaccttcaaagc

SEQ ID NO: 22937 - DNA, 40 bp, Artificial Sequence
  Description of Artificial Sequence: Synthetic primer
ccggtaagggtgtttcatgagagataccaggcaatgttgg

SEQ ID NO: 22938 - DNA, 40 bp, Artificial Sequence
  Description of Artificial Sequence: Synthetic primer
tcaagacttaacttttgaatcgtcaggaccctgcgtctac

SEQ ID NO: 22939 - DNA, 40 bp, Artificial Sequence
  Description of Artificial Sequence: Synthetic primer
taaagaagaagttggaaaatgaggtggaacaaaggcatac

SEQ ID NO: 22940 - DNA, 40 bp, Artificial Sequence
  Description of Artificial Sequence: Synthetic primer
gcggaactccagggggaggagggagacacttcttgagtcc

SEQ ID NO: 22941 - DNA, 40 bp, Artificial Sequence
  Description of Artificial Sequence: Synthetic primer
agcgccccctccaggaccccccagtgcgagccgcaggccc

SEQ ID NO: 22942 - DNA, 40 bp, Artificial Sequence
  Description of Artificial Sequence: Synthetic primer
ttctggtggagagaagtgagaataggcagcccccaaataa

SEQ ID NO: 22943 - DNA, 40 bp, Artificial Sequence
  Description of Artificial Sequence: Synthetic primer
ggcttgataccaatcgagctaaggatacctgctttggaag

SEQ ID NO: 22944 - DNA, 40 bp, Artificial Sequence
  Description of Artificial Sequence: Synthetic primer
tcccctttgtgtgtgtggttcaagtgtgcactgggaggag

SEQ ID NO: 22945 - DNA, 40 bp, Artificial Sequence
  Description of Artificial Sequence: Synthetic primer
agacccttggagcctaggggcatcggcaggagagtgtgtg

SEQ ID NO: 22946 - DNA, 40 bp, Artificial Sequence
  Description of Artificial Sequence: Synthetic primer
atttggtggcaaatccaaaggaaagttatggccgttcatc

SEQ ID NO: 22947 - DNA, 40 bp, Artificial Sequence
  Description of Artificial Sequence: Synthetic primer
taaaccattaaatagctttggcccaggagagttcttatcc

SEQ ID NO: 22948 - DNA, 40 bp, Artificial Sequence
  Description of Artificial Sequence: Synthetic primer
accagacatgaaggcctggcagcaaggagcgataggaaac

SEQ ID NO: 22949 - DNA, 40 bp, Artificial Sequence
  Description of Artificial Sequence: Synthetic primer
ttccctctgctccttggagtggggcaccggagtggaggag

SEQ ID NO: 22950 - DNA, 40 bp, Artificial Sequence
  Description of Artificial Sequence: Synthetic primer
gctgtcggggctggtcttcccgccggccaccacatacatc

SEQ ID NO: 22951 - DNA, 40 bp, Artificial Sequence
  Description of Artificial Sequence: Synthetic primer
gccagcttcacttcagtccgccactgccagacccacttcc

SEQ ID NO: 22952 - DNA, 40 bp, Artificial Sequence
  Description of Artificial Sequence: Synthetic primer
ctgttgcaaagattgacaaaaatgcacacttagaacatgc

SEQ ID NO: 22953 - DNA, 40 bp, Artificial Sequence
  Description of Artificial Sequence: Synthetic primer
tctctaacaacatcaccctccgagaagatcagcttgacac

SEQ ID NO: 22954 - DNA, 40 bp, Artificial Sequence
  Description of Artificial Sequence: Synthetic primer
aatttcataggcgtggccgagaaggccttttggctgagcg

SEQ ID NO: 22955 - DNA, 40 bp, Artificial Sequence
  Description of Artificial Sequence: Synthetic primer
ccgtgggagatgtttatccttttcgttacgtaacagaaac

SEQ ID NO: 22956 - DNA, 40 bp, Artificial Sequence
  Description of Artificial Sequence: Synthetic primer
aatcttgaaactaaagaacccccaaacccaaaccgaggag

SEQ ID NO: 22957 - DNA, 40 bp, Artificial Sequence
  Description of Artificial Sequence: Synthetic primer
ggagggcgcggtcgggctgttgcttctgcagtgcggctac

SEQ ID NO: 22958 - DNA, 40 bp, Artificial Sequence
  Description of Artificial Sequence: Synthetic primer
tcagacttctgacactgccaggctacccaacttgtggttc

SEQ ID NO: 22959 - DNA, 40 bp, Artificial Sequence
  Description of Artificial Sequence: Synthetic primer
gggccttctcagaaggtgccgggtggagagcaggaagatg

SEQ ID NO: 22960 - DNA, 40 bp, Artificial Sequence
  Description of Artificial Sequence: Synthetic primer
cacactttgtgattatgagctcgtggcaccgcttgtggac

SEQ ID NO: 22961 - DNA, 40 bp, Artificial Sequence
  Description of Artificial Sequence: Synthetic primer
cagcagagccatgcgcttggctgctgcaatgatgtcattg

SEQ ID NO: 22962 - DNA, 40 bp, Artificial Sequence
  Description of Artificial Sequence: Synthetic primer
ttagatgtcagtgagcaagtccagagggattttgtaaagc

SEQ ID NO: 22963 - DNA, 40 bp, Artificial Sequence
  Description of Artificial Sequence: Synthetic primer
tccttcccccatttcctggcagagagaccggctgtgaaag

SEQ ID NO: 22964 - DNA, 40 bp, Artificial Sequence
  Description of Artificial Sequence: Synthetic primer
gaggcttgtattgaccttgtaactatatgttaatctcgtg

SEQ ID NO: 22965 - DNA, 40 bp, Artificial Sequence
  Description of Artificial Sequence: Synthetic primer
tgtgctaacgtgatggcaggcgatgaccaaatacggtttc

SEQ ID NO: 22966 - DNA, 40 bp, Artificial Sequence
  Description of Artificial Sequence: Synthetic primer
gtacgacgagccggccgaatccgtgctcaccgaggacacc

SEQ ID NO: 22967 - DNA, 40 bp, Artificial Sequence
  Description of Artificial Sequence: Synthetic primer
cagtgatatgtactcctactgaggagagtgttttctttcc

SEQ ID NO: 22968 - DNA, 40 bp, Artificial Sequence
  Description of Artificial Sequence: Synthetic primer
gtatttccatttcttgcaaataaatattttttcttaaata

SEQ ID NO: 22969 - DNA, 40 bp, Artificial Sequence
  Description of Artificial Sequence: Synthetic primer
cagtttttcaacattagaattcttaattctattggaaaca

SEQ ID NO: 22970 - DNA, 40 bp, Artificial Sequence
  Description of Artificial Sequence: Synthetic primer
cttttcaaaggtgtggccatagctcttcatgatctcaaac

SEQ ID NO: 22971 - DNA, 40 bp, Artificial Sequence
  Description of Artificial Sequence: Synthetic primer
gcacgagtgtgggaacccccatacagtcaaaaagggaaac

SEQ ID NO: 22972 - DNA, 40 bp, Artificial Sequence
  Description of Artificial Sequence: Synthetic primer
cttaatgggaggttggaagaagatccatcgaggttgttag

SEQ ID NO: 22973 - DNA, 40 bp, Artificial Sequence
  Description of Artificial Sequence: Synthetic primer
catcccagtttgaggcagtgctggagtggggaaggccgtc

SEQ ID NO: 22974 - DNA, 40 bp, Artificial Sequence
  Description of Artificial Sequence: Synthetic primer
cttttcaaagatcttatcaaactttttgcttgctacaatg

SEQ ID NO: 22975 - DNA, 40 bp, Artificial Sequence
  Description of Artificial Sequence: Synthetic primer
gtccggccgcctggcacagctgcgcgcggcggggcagctg

SEQ ID NO: 22976 - DNA, 40 bp, Artificial Sequence
  Description of Artificial Sequence: Synthetic primer
agactagcaaatatgcaacccaaatccagtatacataaag

SEQ ID NO: 22977 - DNA, 40 bp, Artificial Sequence
  Description of Artificial Sequence: Synthetic primer
actaaactctcagacagtgagagggagaaacaccataacg

SEQ ID NO: 22978 - DNA, 40 bp, Artificial Sequence
  Description of Artificial Sequence: Synthetic primer
gtagtagactgaagaccaaatgacttgcaaaagtaaactc

SEQ ID NO: 22979 - DNA, 40 bp, Artificial Sequence
  Description of Artificial Sequence: Synthetic primer
aactgatcagagttatccactgtatttataaggaagagtc

SEQ ID NO: 22980 - DNA, 40 bp, Artificial Sequence
  Description of Artificial Sequence: Synthetic primer
tcgccggctctttttcaattgccccgcagccacccacctc

SEQ ID NO: 22981 - DNA, 40 bp, Artificial Sequence
  Description of Artificial Sequence: Synthetic primer
gatggctttggggtacaggcagttgcaatcaggcttggtc

SEQ ID NO: 22982 - DNA, 40 bp, Artificial Sequence
  Description of Artificial Sequence: Synthetic primer
atcctccactatcctcaaggggctagcagggaggctgtta

SEQ ID NO: 22983 - DNA, 40 bp, Artificial Sequence
  Description of Artificial Sequence: Synthetic primer
tgtccggctgcatccagctggccatgggggtcctgcgttt

SEQ ID NO: 22984 - DNA, 40 bp, Artificial Sequence
  Description of Artificial Sequence: Synthetic primer
gatggtgacttctcctgcggggtgctgggtgtggagaagg

SEQ ID NO: 22985 - DNA, 40 bp, Artificial Sequence
  Description of Artificial Sequence: Synthetic primer
gggatgtacataaatgtattttgcactgtcacaatgactc

SEQ ID NO: 22986 - DNA, 40 bp, Artificial Sequence
  Description of Artificial Sequence: Synthetic primer
tgtccacatggtgctctccatcttcctccacatcatggac

SEQ ID NO: 22987 - DNA, 40 bp, Artificial Sequence
  Description of Artificial Sequence: Synthetic primer
tgaagcgggcttcctccctgcatatgcaccacatcctgca

SEQ ID NO: 22988 - DNA, 40 bp, Artificial Sequence
  Description of Artificial Sequence: Synthetic primer
ttgcacctcttggttgtgcagctcttccatcctccgaagt

SEQ ID NO: 22989 - DNA, 40 bp, Artificial Sequence
  Description of Artificial Sequence: Synthetic primer
gaaaagcattattggcatgggaacaggagcaggcgcctac

SEQ ID NO: 22990 - DNA, 40 bp, Artificial Sequence
  Description of Artificial Sequence: Synthetic primer
tgggatctgcctcagcgaatcagacaagacagccgtgctc

SEQ ID NO: 22991 - DNA, 40 bp, Artificial Sequence
  Description of Artificial Sequence: Synthetic primer
atccaagaaggataactcagggtcattgaggatgtgataa

SEQ ID NO: 22992 - DNA, 40 bp, Artificial Sequence
  Description of Artificial Sequence: Synthetic primer
aggcggccgcccatcatctccgagccccagcatcctgatt

SEQ ID NO: 22993 - DNA, 40 bp, Artificial Sequence
  Description of Artificial Sequence: Synthetic primer
ccacgtgacgtggaagtccttcgttggatgtcacaacact

SEQ ID NO: 22994 - DNA, 40 bp, Artificial Sequence
  Description of Artificial Sequence: Synthetic primer
aaccaggaccccgagcagtttgagtgtactggtaatggat

SEQ ID NO: 22995 - DNA, 40 bp, Artificial Sequence
  Description of Artificial Sequence: Synthetic primer
agcggcagcttcactcgcagctctacccaacctggtcagc

SEQ ID NO: 22996 - DNA, 40 bp, Artificial Sequence
  Description of Artificial Sequence: Synthetic primer
gcaggtgatccggttcctaatatgtattgggatgttggta

SEQ ID NO: 22997 - DNA, 40 bp, Artificial Sequence
  Description of Artificial Sequence: Synthetic primer
aaggcttcagttgcccgggcagtgccttcacatagtcatc

SEQ ID NO: 22998 - DNA, 40 bp, Artificial Sequence
  Description of Artificial Sequence: Synthetic primer
taattgacacactagatcactctgaaactatgcaggatgt

SEQ ID NO: 22999 - DNA, 40 bp, Artificial Sequence
  Description of Artificial Sequence: Synthetic primer
ccctgctcagatacaaacagtgactccccagatgaaggtc

SEQ ID NO: 23000 - DNA, 40 bp, Artificial Sequence
  Description of Artificial Sequence: Synthetic primer
ttctttttttcttcttgggacccatccagtgagttcctat

SEQ ID NO: 23001 - DNA, 40 bp, Artificial Sequence
  Description of Artificial Sequence: Synthetic primer
ggtgaggcagggcttcgaggggatggagacagggcgagga

SEQ ID NO: 23002 - DNA, 40 bp, Artificial Sequence
  Description of Artificial Sequence: Synthetic primer
ttaattcatacattggatgtagaagtagataccaaaagtt

SEQ ID NO: 23003 - DNA, 40 bp, Artificial Sequence
  Description of Artificial Sequence: Synthetic primer
atgcagactggagcctctgtgcttgaggcggcctttgtgc

SEQ ID NO: 23004 - DNA, 40 bp, Artificial Sequence
  Description of Artificial Sequence: Synthetic primer
tctggggagaggccttgatacggggggatggagtgagagt

SEQ ID NO: 23005 - DNA, 40 bp, Artificial Sequence
  Description of Artificial Sequence: Synthetic primer
gaaagagcacgagcggggaagccccagagtgaaatctagc

SEQ ID NO: 23006 - DNA, 40 bp, Artificial Sequence
  Description of Artificial Sequence: Synthetic primer
ggccgggggacttggggtcaagtgtattgacatcccactg

SEQ ID NO: 23007 - DNA, 40 bp, Artificial Sequence
  Description of Artificial Sequence: Synthetic primer
gtgtggggacacccatcttggatacaccaacgcaggatgc

SEQ ID NO: 23008 - DNA, 40 bp, Artificial Sequence
  Description of Artificial Sequence: Synthetic primer
tatcatcataaaggaacttaaggaggttgtcatccacagc

SEQ ID NO: 23009 - DNA, 40 bp, Artificial Sequence
  Description of Artificial Sequence: Synthetic primer
cacaccttgcacgaaggaggtgccgtaaccggtatgtaat

SEQ ID NO: 23010 - DNA, 40 bp, Artificial Sequence
  Description of Artificial Sequence: Synthetic primer
gatggagaggaccaaaccaagcatgaatttttgacagatg

SEQ ID NO: 23011 - DNA, 40 bp, Artificial Sequence
  Description of Artificial Sequence: Synthetic primer
ggtgtgagaaacagaaggatgaacaggcagagagacattt

SEQ ID NO: 23012 - DNA, 40 bp, Artificial Sequence
  Description of Artificial Sequence: Synthetic primer
gggcagacaggagggcatccttcttcctgtcaaccagttc

SEQ ID NO: 23013 - DNA, 40 bp, Artificial Sequence
  Description of Artificial Sequence: Synthetic primer
cgactgcaaccacagaccctgaaggatgaaaaccagaaga

SEQ ID NO: 23014 - DNA, 40 bp, Artificial Sequence
  Description of Artificial Sequence: Synthetic primer
acgaggagcctttgatgcgcttcgggaggctgttgccatc

SEQ ID NO: 23015 - DNA, 40 bp, Artificial Sequence
  Description of Artificial Sequence: Synthetic primer
gagactttaacatcagaaaaaggatggacttgttgcagtt

SEQ ID NO: 23016 - DNA, 40 bp, Artificial Sequence
  Description of Artificial Sequence: Synthetic primer
cctcgaccaacggctgcgggcccagaacatcccgggagac

SEQ ID NO: 23017 - DNA, 40 bp, Artificial Sequence
  Description of Artificial Sequence: Synthetic primer
gtaccctacttcaaggacaagggtgacagcaacagctcag

SEQ ID NO: 23018 - DNA, 40 bp, Artificial Sequence
  Description of Artificial Sequence: Synthetic primer
aggtgatcctgcagcccgagaggatggtgctgtggaacaa

SEQ ID NO: 23019 - DNA, 40 bp, Artificial Sequence
  Description of Artificial Sequence: Synthetic primer
ttgctcagctcaaaaatctctatcccaagaagcccaagga

SEQ ID NO: 23020 - DNA, 40 bp, Artificial Sequence
  Description of Artificial Sequence: Synthetic primer
ttctgtttcatttctgtgtccttatcgtatttctccatcc

SEQ ID NO: 23021 - DNA, 40 bp, Artificial Sequence
  Description of Artificial Sequence: Synthetic primer
gttgctctgcagggcagagaggatggcatacagtgacgag

SEQ ID NO: 23022 - DNA, 40 bp, Artificial Sequence
  Description of Artificial Sequence: Synthetic primer
tccacgccgctctgcttcacgttgtggctctgccagtgga

SEQ ID NO: 23023 - DNA, 40 bp, Artificial Sequence
  Description of Artificial Sequence: Synthetic primer
tgccaaaacagagatacacagatctagtttttccaccatc

SEQ ID NO: 23024 - DNA, 40 bp, Artificial Sequence
  Description of Artificial Sequence: Synthetic primer
aacatcaacaagttcttttgagcacaggtggatggtcatt

SEQ ID NO: 23025 - DNA, 40 bp, Artificial Sequence
  Description of Artificial Sequence: Synthetic primer
tccttgtagaggggaacatctgaggccacagattttgcat

SEQ ID NO: 23026 - DNA, 40 bp, Artificial Sequence
  Description of Artificial Sequence: Synthetic primer
agagtctccagtgttggtcatccagaagcagcttggtaca

SEQ ID NO: 23027 - DNA, 40 bp, Artificial Sequence
  Description of Artificial Sequence: Synthetic primer
ccgagactccccaaccatcctgcagcaagtggacgagact

SEQ ID NO: 23028 - DNA, 40 bp, Artificial Sequence
  Description of Artificial Sequence: Synthetic primer
atcgtggatggaaaccaccggctgacccttggcctcatct

SEQ ID NO: 23029 - DNA, 40 bp, Artificial Sequence
  Description of Artificial Sequence: Synthetic primer
tcctgtcttcctatgatggtgcacctttgcttccattttc

SEQ ID NO: 23030 - DNA, 40 bp, Artificial Sequence
  Description of Artificial Sequence: Synthetic primer
ctctgccagcttcacacttggccccggcaaactccccatc

SEQ ID NO: 23031 - DNA, 40 bp, Artificial Sequence
  Description of Artificial Sequence: Synthetic primer
tgactctctgggcctcctccagctgctgctccggcacctc

SEQ ID NO: 23032 - DNA, 40 bp, Artificial Sequence
  Description of Artificial Sequence: Synthetic primer
atcccccaaaaggaaggcatgtatttgctacacctgtttt

SEQ ID NO: 23033 - DNA, 40 bp, Artificial Sequence
  Description of Artificial Sequence: Synthetic primer
tgcatcatcatttgaaagcactgcaaataagaaatccaag

SEQ ID NO: 23034 - DNA, 40 bp, Artificial Sequence
  Description of Artificial Sequence: Synthetic primer
gtgcctcctcaccctcaccccctgggaggttcttccttcc

SEQ ID NO: 23035 - DNA, 40 bp, Artificial Sequence
  Description of Artificial Sequence: Synthetic primer
aacagccttggcaggacccgtccctagagggggctctggt

SEQ ID NO: 23036 - DNA, 40 bp, Artificial Sequence
  Description of Artificial Sequence: Synthetic primer
ggcaccacccagaggtcgcatccagactctgtggggccag

SEQ ID NO: 23037 - DNA, 40 bp, Artificial Sequence
  Description of Artificial Sequence: Synthetic primer
tctctaagcagtggatgcgcattcgtcccttggtgggttt

SEQ ID NO: 23038 - DNA, 40 bp, Artificial Sequence
  Description of Artificial Sequence: Synthetic primer
atcccaggaagagtggtgggtggtttatacactggaaatg

SEQ ID NO: 23039 - DNA, 40 bp, Artificial Sequence
  Description of Artificial Sequence: Synthetic primer
tggtacacctgcaggaagaacggcctggggatgttctgta

SEQ ID NO: 23040 - DNA, 40 bp, Artificial Sequence
  Description of Artificial Sequence: Synthetic primer
actgtcctcgcagctctgtgtgcacggcccatccacagtg

SEQ ID NO: 23041 - DNA, 40 bp, Artificial Sequence
  Description of Artificial Sequence: Synthetic primer
accatgcttgtccgccaggtagtcaaagagcatcctacca

SEQ ID NO: 23042 - DNA, 40 bp, Artificial Sequence
  Description of Artificial Sequence: Synthetic primer
agctgccctcccgggcggccagaaacaggggtgtctcctc

SEQ ID NO: 23043 - DNA, 40 bp, Artificial Sequence
  Description of Artificial Sequence: Synthetic primer
ccttgccaattgttatggttttatttttaaacctattctg

SEQ ID NO: 23044 - DNA, 40 bp, Artificial Sequence
  Description of Artificial Sequence: Synthetic primer
cctagtgagaagctggccctgcaggtggtggcagcaatgg

SEQ ID NO: 23045 - DNA, 40 bp, Artificial Sequence
  Description of Artificial Sequence: Synthetic primer
agcattatggtgtaattaacaaaacaataacaaacagaac

SEQ ID NO: 23046 - DNA, 40 bp, Artificial Sequence
  Description of Artificial Sequence: Synthetic primer
tccttgtgggaatacagtagttaaaaatgacccaaagctg

SEQ ID NO: 23047 - DNA, 40 bp, Artificial Sequence
  Description of Artificial Sequence: Synthetic primer
ttttgcctaaatccattgcataacattgagtaagacatgc

SEQ ID NO: 23048 - DNA, 40 bp, Artificial Sequence
  Description of Artificial Sequence: Synthetic primer
ccgccgatagagggacggccaagaatgtacgtccagcctg

SEQ ID NO: 23049 - DNA, 40 bp, Artificial Sequence
  Description of Artificial Sequence: Synthetic primer
attgcgtagctctcaaatgtgtgttcctgcttttctaatg

SEQ ID NO: 23050 - DNA, 40 bp, Artificial Sequence
  Description of Artificial Sequence: Synthetic primer
ctctaaccaaggctgtgtttagattgtattaactatcttc

SEQ ID NO: 23051 - DNA, 40 bp, Artificial Sequence
  Description of Artificial Sequence: Synthetic primer
acacctctaaaaatggaaaatgagagtcaatccaaaaatg

SEQ ID NO: 23052 - DNA, 40 bp, Artificial Sequence
  Description of Artificial Sequence: Synthetic primer
ctcagcagctgctagttgtgcttgctgggataaatcttcg

SEQ ID NO: 23053 - DNA, 40 bp, Artificial Sequence
  Description of Artificial Sequence: Synthetic primer
gagtgtctcaagaccttctggaatcttctcccacacatac

SEQ ID NO: 23054 - DNA, 40 bp, Artificial Sequence
  Description of Artificial Sequence: Synthetic primer
gatcaccatagcaaggaacatcaacgctccaaatcacctc

SEQ ID NO: 23055 - DNA, 40 bp, Artificial Sequence
  Description of Artificial Sequence: Synthetic primer
cggggtcggcgctgggctggaggcggcggagcgcgagagc

SEQ ID NO: 23056 - DNA, 40 bp, Artificial Sequence
  Description of Artificial Sequence: Synthetic primer
atagctgtgctgggctcccaagccccagatcttgtctcag

SEQ ID NO: 23057 - DNA, 40 bp, Artificial Sequence
  Description of Artificial Sequence: Synthetic primer
aacctgggcaaagaacagtcaccaggaagcaggctggaag

SEQ ID NO: 23058 - DNA, 40 bp, Artificial Sequence
  Description of Artificial Sequence: Synthetic primer
gtttaagctcctcattttctttagttagctgatcttttac

SEQ ID NO: 23059 - DNA, 40 bp, Artificial Sequence
  Description of Artificial Sequence: Synthetic primer
cggaccggagtccggagcgcagccccgcgggcagggagcg

SEQ ID NO: 23060 - DNA, 40 bp, Artificial Sequence
  Description of Artificial Sequence: Synthetic primer
gtcgagccatatccctggggagttgactgagttccatagc

SEQ ID NO: 23061 - DNA, 40 bp, Artificial Sequence
  Description of Artificial Sequence: Synthetic primer
gtcaagtgggccagcagggttatggaatggagaagtccac

SEQ ID NO: 23062 - DNA, 40 bp, Artificial Sequence
  Description of Artificial Sequence: Synthetic primer
ctgccccaggtgtccgcatttttgcatggtaaggaaaagg

SEQ ID NO: 23063 - DNA, 40 bp, Artificial Sequence
  Description of Artificial Sequence: Synthetic primer
cattgcctgaaacaaagtgccctgttattcctcttatgtc

SEQ ID NO: 23064 - DNA, 40 bp, Artificial Sequence
  Description of Artificial Sequence: Synthetic primer
tgtgaaagtacaactgaaggcagaaagtgttaggattttg

SEQ ID NO: 23065 - DNA, 40 bp, Artificial Sequence
  Description of Artificial Sequence: Synthetic primer
gtttggtcggccatttctgtctcacctctaggccctctgc

SEQ ID NO: 23066 - DNA, 40 bp, Artificial Sequence
  Description of Artificial Sequence: Synthetic primer
ttcagactgttttctaactacatagacaataaaattaagc

SEQ ID NO: 23067 - DNA, 40 bp, Artificial Sequence
  Description of Artificial Sequence: Synthetic primer
gctccagacggtctgttcggccactcatgatttcatctgg

SEQ ID NO: 23068 - DNA, 40 bp, Artificial Sequence
  Description of Artificial Sequence: Synthetic primer
tttttttaataatgaggtgtgtgaaaaatctactaaaatg

SEQ ID NO: 23069 - DNA, 40 bp, Artificial Sequence
  Description of Artificial Sequence: Synthetic primer
agccaaaggaaggaggtcaggggaacgctctcccctcccc

SEQ ID NO: 23070 - DNA, 40 bp, Artificial Sequence
  Description of Artificial Sequence: Synthetic primer
gtccagtccaggtgcagcagcaaggagaacattctcagag

SEQ ID NO: 23071 - DNA, 40 bp, Artificial Sequence
  Description of Artificial Sequence: Synthetic primer
agcatcttggctgaccttgagtgcagctccccctataagc

SEQ ID NO: 23072 - DNA, 40 bp, Artificial Sequence
  Description of Artificial Sequence: Synthetic primer
cgcatctttcacacagctctccacaaaataagggacatgc

SEQ ID NO: 23073 - DNA, 40 bp, Artificial Sequence
  Description of Artificial Sequence: Synthetic primer
gaagagtgggtcatcagggtgaccaggatcttgggtgctg

SEQ ID NO: 23074 - DNA, 40 bp, Artificial Sequence
  Description of Artificial Sequence: Synthetic primer
tggggaaggtctccctgcagcctgcgggtgaggcagccag

SEQ ID NO: 23075 - DNA, 40 bp, Artificial Sequence
  Description of Artificial Sequence: Synthetic primer
gtgtagagctccatgtccacggcgttgagcgtgtgaagac

SEQ ID NO: 23076 - DNA, 40 bp, Artificial Sequence
  Description of Artificial Sequence: Synthetic primer
tacagtgcttacaccgcccagcccactcaaggatatgcac

SEQ ID NO: 23077 - DNA, 40 bp, Artificial Sequence
  Description of Artificial Sequence: Synthetic primer
caagcctctcagcttcggagaatggagtcttccatcaatc

SEQ ID NO: 23078 - DNA, 40 bp, Artificial Sequence
  Description of Artificial Sequence: Synthetic primer
tgacagactttcagatggagacagtaaatactctcaaacc

SEQ ID NO: 23079 - DNA, 40 bp, Artificial Sequence
  Description of Artificial Sequence: Synthetic primer
gctaagggagctgaagaggaaggggtccctttcagagttg

SEQ ID NO: 23080 - DNA, 40 bp, Artificial Sequence
  Description of Artificial Sequence: Synthetic primer
aggggaccaagctggatgatgacttcaaagagatggagaa

SEQ ID NO: 23081 - DNA, 40 bp, Artificial Sequence
  Description of Artificial Sequence: Synthetic primer
aggcaacaccattctccaaacacctcaaaatgctatcttc

SEQ ID NO: 23082 - DNA, 40 bp, Artificial Sequence
  Description of Artificial Sequence: Synthetic primer
agaaaatcacatttgtacctttaaacagactttagaaaac

SEQ ID NO: 23083 - DNA, 40 bp, Artificial Sequence
  Description of Artificial Sequence: Synthetic primer
tctgctcagcctcatgttaatggaggtccactttattctc

SEQ ID NO: 23084 - DNA, 40 bp, Artificial Sequence
  Description of Artificial Sequence: Synthetic primer
tccttgacaggccttggctccatctccttgggcctctgtc

SEQ ID NO: 23085 - DNA, 40 bp, Artificial Sequence
  Description of Artificial Sequence: Synthetic primer
ctaatggaaaacgattgaatgacaactacaccaaagtttc

SEQ ID NO: 23086 - DNA, 40 bp, Artificial Sequence
  Description of Artificial Sequence: Synthetic primer
caaatgttatctgggaaattaaagttctacgtaaagagag

SEQ ID NO: 23087 - DNA, 40 bp, Artificial Sequence
  Description of Artificial Sequence: Synthetic primer
gtccctctcgcgcaccagcctggagatctcctgcttgagg

SEQ ID NO: 23088 - DNA, 40 bp, Artificial Sequence
  Description of Artificial Sequence: Synthetic primer
ttgtgctgaataagtttatacacacggctaaaggtcttcc

SEQ ID NO: 23089 - DNA, 40 bp, Artificial Sequence
  Description of Artificial Sequence: Synthetic primer
agtaaccctaaagtgaggagctctccatcaggaaacacac

SEQ ID NO: 23090 - DNA, 40 bp, Artificial Sequence
  Description of Artificial Sequence: Synthetic primer
ccaaagcaaggatcttggccttctgttcctccacatgagc

SEQ ID NO: 23091 - DNA, 40 bp, Artificial Sequence
  Description of Artificial Sequence: Synthetic primer
gccgtctggtaggagctgtttgcagggtcctaactcaatc

SEQ ID NO: 23092 - DNA, 40 bp, Artificial Sequence
  Description of Artificial Sequence: Synthetic primer
aaagcctccacgtagtactgccgatagggcctccggttgg

SEQ ID NO: 23093 - DNA, 40 bp, Artificial Sequence
  Description of Artificial Sequence: Synthetic primer
taagaatcttgatttcttcctcatatttatcttctttttg

SEQ ID NO: 23094 - DNA, 40 bp, Artificial Sequence
  Description of Artificial Sequence: Synthetic primer
ttcagcccacttgagccactgggctacgtcatccctgctc

SEQ ID NO: 23095 - DNA, 40 bp, Artificial Sequence
  Description of Artificial Sequence: Synthetic primer
cacgaatgatctctttaatgctgttggagatggcattgtc

SEQ ID NO: 23096 - DNA, 40 bp, Artificial Sequence
  Description of Artificial Sequence: Synthetic primer
ggagggtcaccgcatggacaagcccagtaactgcaccaac

SEQ ID NO: 23097 - DNA, 40 bp, Artificial Sequence
  Description of Artificial Sequence: Synthetic primer
aacggtttctctggagaccctgcttggccttcacgctttg

SEQ ID NO: 23098 - DNA, 40 bp, Artificial Sequence
  Description of Artificial Sequence: Synthetic primer
ccttcattactgcagcttctttcaggaattcttctacctc

SEQ ID NO: 23099 - DNA, 40 bp, Artificial Sequence
  Description of Artificial Sequence: Synthetic primer
aaacaagtctgcgcaaaatttgtcgaggaggtttgccgcg

SEQ ID NO: 23100 - DNA, 40 bp, Artificial Sequence
  Description of Artificial Sequence: Synthetic primer
gatgtccttaccttccagtgaactgttatcaaagccattc

SEQ ID NO: 23101 - DNA, 40 bp, Artificial Sequence
  Description of Artificial Sequence: Synthetic primer
ctggacatttcctatttcttcttttagagcctttatttcc

SEQ ID NO: 23102 - DNA, 40 bp, Artificial Sequence
  Description of Artificial Sequence: Synthetic primer
gctcacaacgcccggctcgcctcagtgaagtattcaaatc

SEQ ID NO: 23103 - DNA, 40 bp, Artificial Sequence
  Description of Artificial Sequence: Synthetic primer
ccacatccatccctgctactttcttcattgactccaccat

SEQ ID NO: 23104 - DNA, 40 bp, Artificial Sequence
  Description of Artificial Sequence: Synthetic primer
tcttaagaaaatttttaacaaagggaatgaaatatatatc

SEQ ID NO: 23105 - DNA, 40 bp, Artificial Sequence
  Description of Artificial Sequence: Synthetic primer
tttactgaaacatctaggagcttactgaaatatgaaaagg

SEQ ID NO: 23106 - DNA, 40 bp, Artificial Sequence
  Description of Artificial Sequence: Synthetic primer
tatcagcaaagcccatatccaagattctatctgcttcatc

SEQ ID NO: 23107 - DNA, 40 bp, Artificial Sequence
  Description of Artificial Sequence: Synthetic primer
cggacatgtgcagaacagattgttgccaaaattgaagaag

SEQ ID NO: 23108 - DNA, 40 bp, Artificial Sequence
  Description of Artificial Sequence: Synthetic primer
catcatttgggaagttctgaaccggcctcggtctaaatgg

SEQ ID NO: 23109 - DNA, 40 bp, Artificial Sequence
  Description of Artificial Sequence: Synthetic primer
tgcgctcaactttctgcttcttatctgttggtgactctcg

SEQ ID NO: 23110 - DNA, 40 bp, Artificial Sequence
  Description of Artificial Sequence: Synthetic primer
cagagcctcaaagcggcagatggtcgtttggctgaatacc

SEQ ID NO: 23111 - DNA, 40 bp, Artificial Sequence
  Description of Artificial Sequence: Synthetic primer
gctggtggtgatgttgcattaactgatacaaaaaggcttg

SEQ ID NO: 23112 - DNA, 40 bp, Artificial Sequence
  Description of Artificial Sequence: Synthetic primer
cattgaagtgactctcaatacacattctgtacccttttac

SEQ ID NO: 23113 - DNA, 40 bp, Artificial Sequence
  Description of Artificial Sequence: Synthetic primer
tatccagttctgcaattgcatcatcaaaagctgcttttgc

SEQ ID NO: 23114 - DNA, 40 bp, Artificial Sequence
  Description of Artificial Sequence: Synthetic primer
agcaacgtccaggctaagagatgactcctattaactgctg

SEQ ID NO: 23115 - DNA, 40 bp, Artificial Sequence
  Description of Artificial Sequence: Synthetic primer
ccttgttataaccacattgcttctttctttctctgtcatc

SEQ ID NO: 23116 - DNA, 40 bp, Artificial Sequence
  Description of Artificial Sequence: Synthetic primer
tgaaaagactgggcttgtccttgctggtgcatgcgtcgtc

SEQ ID NO: 23117 - DNA, 40 bp, Artificial Sequence
  Description of Artificial Sequence: Synthetic primer
gagcagcttggcagcctcgtacattccctcctcgtaacag

SEQ ID NO: 23118 - DNA, 40 bp, Artificial Sequence
  Description of Artificial Sequence: Synthetic primer
atgtcaccccaaaaggtagaaatgatagtagggatttgtc

SEQ ID NO: 23119 - DNA, 40 bp, Artificial Sequence
  Description of Artificial Sequence: Synthetic primer
gacacaatggaaagattaaaccatacctatctattagagc

SEQ ID NO: 23120 - DNA, 40 bp, Artificial Sequence
  Description of Artificial Sequence: Synthetic primer
ttctgcccaggcccttgttcccggcagtgtgactgtttac

SEQ ID NO: 23121 - DNA, 40 bp, Artificial Sequence
  Description of Artificial Sequence: Synthetic primer
cgctcagttcacaacggattggatttttgtcaggaggttc

SEQ ID NO: 23122 - DNA, 40 bp, Artificial Sequence
  Description of Artificial Sequence: Synthetic primer
ccacccggaatcctcgccacggagaatccctggagaagcc

SEQ ID NO: 23123 - DNA, 40 bp, Artificial Sequence
  Description of Artificial Sequence: Synthetic primer
ttgattccggggacctcacaggacttgggcctggaccccg

SEQ ID NO: 23124 - DNA, 40 bp, Artificial Sequence
  Description of Artificial Sequence: Synthetic primer
attacaatgaagtgccaaactcactacaccatataattgc

SEQ ID NO: 23125 - DNA, 40 bp, Artificial Sequence
  Description of Artificial Sequence: Synthetic primer
aaataaatactactagaatatattaagatgaaaagttgac

SEQ ID NO: 23126 - DNA, 40 bp, Artificial Sequence
  Description of Artificial Sequence: Synthetic primer
atagaaatgatttcttttcaataaaaagaaagaaggactc

SEQ ID NO: 23127 - DNA, 40 bp, Artificial Sequence
  Description of Artificial Sequence: Synthetic primer
tcttgtcgtttacaaaaagtaacactttaaaagatcacag

SEQ ID NO: 23128 - DNA, 40 bp, Artificial Sequence
  Description of Artificial Sequence: Synthetic primer
cgagagaggtgaacaaggccctgctggctcccccggattc

SEQ ID NO: 23129 - DNA, 40 bp, Artificial Sequence
  Description of Artificial Sequence: Synthetic primer
gtgtgaatggcaaataaacagtttgacaagtacatacacc

SEQ ID NO: 23130 - DNA, 40 bp, Artificial Sequence
  Description of Artificial Sequence: Synthetic primer
attaaaatccttctcagatgccacagcgccaacacaagag

SEQ ID NO: 23131 - DNA, 40 bp, Artificial Sequence
  Description of Artificial Sequence: Synthetic primer
tgtgaattccacaaaatatatgaataaaattatagaatgg

SEQ ID NO: 23132 - DNA, 40 bp, Artificial Sequence
  Description of Artificial Sequence: Synthetic primer
tagttcttctctaacatagtactttctttccagcaaaagc

SEQ ID NO: 23133 - DNA, 40 bp, Artificial Sequence
  Description of Artificial Sequence: Synthetic primer
acatgctttgggatacgtttgtttttacttggaacatttg

SEQ ID NO: 23134 - DNA, 40 bp, Artificial Sequence
  Description of Artificial Sequence: Synthetic primer
acctggtgatgctggacactgccatgaaggactatctgta

SEQ ID NO: 23135 - DNA, 40 bp, Artificial Sequence
  Description of Artificial Sequence: Synthetic primer
ttaataactgtagcactatgccttttgagcccgagagagg

SEQ ID NO: 23136 - DNA, 40 bp, Artificial Sequence
  Description of Artificial Sequence: Synthetic primer
tgtgtagttgatactcagtgcatctccagacatagtaagg

SEQ ID NO: 23137 - DNA, 40 bp, Artificial Sequence
  Description of Artificial Sequence: Synthetic primer
tgatgtcattctgctgctgtagtaacttcatctgtctttc

SEQ ID NO: 23138 - DNA, 40 bp, Artificial Sequence
  Description of Artificial Sequence: Synthetic primer
agcacgtcgtgggacaaatagaagggctctgaattccaac

SEQ ID NO: 23139 - DNA, 40 bp, Artificial Sequence
  Description of Artificial Sequence: Synthetic primer
cagcattgagcaacaaagggctctcagctctgctaagtcc

SEQ ID NO: 23140 - DNA, 40 bp, Artificial Sequence
  Description of Artificial Sequence: Synthetic primer
cagtttggtccaatgtttgtgaattcagtgctgtgtctcc

SEQ ID NO: 23141 - DNA, 40 bp, Artificial Sequence
  Description of Artificial Sequence: Synthetic primer
tgcagagcagatggcagatgcacatgttggaggagagagc

SEQ ID NO: 23142 - DNA, 40 bp, Artificial Sequence
  Description of Artificial Sequence: Synthetic primer
tcttgaggttcctctgttaagctcctcaccagccatcttc

SEQ ID NO: 23143 - DNA, 40 bp, Artificial Sequence
  Description of Artificial Sequence: Synthetic primer
gctggattttcaaaacagttgtatggtatacttcaaatac

SEQ ID NO: 23144 - DNA, 40 bp, Artificial Sequence
  Description of Artificial Sequence: Synthetic primer
gcagggcacaagaacagtgcagagggttccccgacaggac

SEQ ID NO: 23145 - DNA, 40 bp, Artificial Sequence
  Description of Artificial Sequence: Synthetic primer
caatgtacctccacacagagggcttctctgggccctctcc

SEQ ID NO: 23146 - DNA, 40 bp, Artificial Sequence
  Description of Artificial Sequence: Synthetic primer
attcttctccagtaagccaggaaatatcagtgtcccaacc

SEQ ID NO: 23147 - DNA, 40 bp, Artificial Sequence
  Description of Artificial Sequence: Synthetic primer
aaggtgtctccaggtgctgatgtttctccaacttgctttg

SEQ ID NO: 23148 - DNA, 40 bp, Artificial Sequence
  Description of Artificial Sequence: Synthetic primer
cagccccgaggacgcggtcgaggcgctcatcagcaacagc

SEQ ID NO: 23149 - DNA, 40 bp, Artificial Sequence
  Description of Artificial Sequence: Synthetic primer
ggtcaaaatatattgtattgagagtttaaaaattaagagc

SEQ ID NO: 23150 - DNA, 40 bp, Artificial Sequence
  Description of Artificial Sequence: Synthetic primer
ttctctgccgtcacagaaagcagagtttctttcaaacttc

SEQ ID NO: 23151 - DNA, 40 bp, Artificial Sequence
  Description of Artificial Sequence: Synthetic primer
tgtctgacgaccacccattaacaccagcgagtagcgtttg

SEQ ID NO: 23152 - DNA, 40 bp, Artificial Sequence
  Description of Artificial Sequence: Synthetic primer
atttaacagaattgcaattaggttttgacaatgtatttac

SEQ ID NO: 23153 - DNA, 40 bp, Artificial Sequence
  Description of Artificial Sequence: Synthetic primer
ataagcattctcaaatgcaataaaaatgctggttgttcac

SEQ ID NO: 23154 - DNA, 40 bp, Artificial Sequence
  Description of Artificial Sequence: Synthetic primer
agctttcgacaaaagtcacaaaatgctaaggtgaaaaacg

SEQ ID NO: 23155 - DNA, 40 bp, Artificial Sequence
  Description of Artificial Sequence: Synthetic primer
ctagaaacctcctgagaaaaagaagattctgcagcacctg

SEQ ID NO: 23156 - DNA, 40 bp, Artificial Sequence
  Description of Artificial Sequence: Synthetic primer
gacaagcttcttttctagaaataagacattttttgacaac

SEQ ID NO: 23157 - DNA, 40 bp, Artificial Sequence
  Description of Artificial Sequence: Synthetic primer
agtgagatatattcagtattgtagatactacactaatttc

SEQ ID NO: 23158 - DNA, 40 bp, Artificial Sequence
  Description of Artificial Sequence: Synthetic primer
gactctcaagctgttgagacttctctcttaatgtggactc

SEQ ID NO: 23159 - DNA, 40 bp, Artificial Sequence
  Description of Artificial Sequence: Synthetic primer
tcaaaatatagtcacagttaagaatacccaccccgttttg

SEQ ID NO: 23160 - DNA, 40 bp, Artificial Sequence
  Description of Artificial Sequence: Synthetic primer
gcagttcttgaacaccttgccgcagtactcgcacgtgtcg

SEQ ID NO: 23161 - DNA, 40 bp, Artificial Sequence
  Description of Artificial Sequence: Synthetic primer
gccataccacagtaactagatctaatgtgagggctaaatg

SEQ ID NO: 23162 - DNA, 40 bp, Artificial Sequence
  Description of Artificial Sequence: Synthetic primer
taagttaaacctaagaatttctatgatgtcccagacaaac

SEQ ID NO: 23163 - DNA, 40 bp, Artificial Sequence
  Description of Artificial Sequence: Synthetic primer
tcttcaagtcagctctgacgtggccaattccctgacctgg

SEQ ID NO: 23164 - DNA, 40 bp, Artificial Sequence
  Description of Artificial Sequence: Synthetic primer
tatatccagcagttgaacaagtccaatttgtatatcgttg

SEQ ID NO: 23165 - DNA, 40 bp, Artificial Sequence
  Description of Artificial Sequence: Synthetic primer
taacaagaaattaaaactccaaagctctatgaaggtaatc

SEQ ID NO: 23166 - DNA, 40 bp, Artificial Sequence
  Description of Artificial Sequence: Synthetic primer
gatatggagtctctgaccaggaacatacagattaaagaag

SEQ ID NO: 23167 - DNA, 40 bp, Artificial Sequence
  Description of Artificial Sequence: Synthetic primer
aacaccacacactgtgagtttgcctacctgcgggaccttc

SEQ ID NO: 23168 - DNA, 40 bp, Artificial Sequence
  Description of Artificial Sequence: Synthetic primer
gcagcagcacaactgcactggaagctgaagccaatgttag

SEQ ID NO: 23169 - DNA, 40 bp, Artificial Sequence
  Description of Artificial Sequence: Synthetic primer
tccgccagaaactacacttggctgggcaaagagagacatc

SEQ ID NO: 23170 - DNA, 40 bp, Artificial Sequence
  Description of Artificial Sequence: Synthetic primer
tgggcaggacctggaggtaactttctgagctgtaaaatag

SEQ ID NO: 23171 - DNA, 40 bp, Artificial Sequence
  Description of Artificial Sequence: Synthetic primer
ccacagcacgtgagcctgcactcactgcggcctttgtaac

SEQ ID NO: 23172 - DNA, 40 bp, Artificial Sequence
  Description of Artificial Sequence: Synthetic primer
ccacggattcccctcgctggagaggctcctgtctgatagc

SEQ ID NO: 23173 - DNA, 40 bp, Artificial Sequence
  Description of Artificial Sequence: Synthetic primer
atttgaaatactgaaatgatctgacagttttaaagaaaag

SEQ ID NO: 23174 - DNA, 40 bp, Artificial Sequence
  Description of Artificial Sequence: Synthetic primer
aggagttccacgcccaccggacggtgctggcctgcaccag

SEQ ID NO: 23175 - DNA, 40 bp, Artificial Sequence
  Description of Artificial Sequence: Synthetic primer
tttggctttgctctgaatttaattaaaactgccttttatg

SEQ ID NO: 23176 - DNA, 40 bp, Artificial Sequence
  Description of Artificial Sequence: Synthetic primer
cgtcttccacgtcctgcagcgcttctttattctgctcttc

SEQ ID NO: 23177 - DNA, 40 bp, Artificial Sequence
  Description of Artificial Sequence: Synthetic primer
gccgaccaaagggaagcaaaaacaagggtgctgccaagac

SEQ ID NO: 23178 - DNA, 40 bp, Artificial Sequence
  Description of Artificial Sequence: Synthetic primer
ccaggactacagaggtctctagagaagacttgatgctatg

SEQ ID NO: 23179 - DNA, 40 bp, Artificial Sequence
  Description of Artificial Sequence: Synthetic primer
agcagacctctaggcaggcccaggcccagctgcttgtaac

SEQ ID NO: 23180 - DNA, 40 bp, Artificial Sequence
  Description of Artificial Sequence: Synthetic primer
ctaaagaatcttcagtctgttttatctgcttatccttttc

SEQ ID NO: 23181 - DNA, 40 bp, Artificial Sequence
  Description of Artificial Sequence: Synthetic primer
tgacttctgtatcttaacataagggaattttaggtaatgc

SEQ ID NO: 23182 - DNA, 40 bp, Artificial Sequence
  Description of Artificial Sequence: Synthetic primer
gcaccatagctttttctgagggtagcaaaattagcaaagc

SEQ ID NO: 23183 - DNA, 40 bp, Artificial Sequence
  Description of Artificial Sequence: Synthetic primer
aaggagaatcaaaatgcaaaacttgggaataaatcatagc

SEQ ID NO: 23184 - DNA, 40 bp, Artificial Sequence
  Description of Artificial Sequence: Synthetic primer
gaagccacagcccatgatcaagaaagctcgcaaagtcttc

SEQ ID NO: 23185 - DNA, 40 bp, Artificial Sequence
  Description of Artificial Sequence: Synthetic primer
cattacaatttgtatttatgtttaaagaaggcatcatttg

SEQ ID NO: 23186 - DNA, 40 bp, Artificial Sequence
  Description of Artificial Sequence: Synthetic primer
gtggtcgtggaatgagaagccgtggcagaggtggttttac

SEQ ID NO: 23187 - DNA, 40 bp, Artificial Sequence
  Description of Artificial Sequence: Synthetic primer
atcagatgtcatctggctgaagtttatctctgtctctcag

SEQ ID NO: 23188 - DNA, 40 bp, Artificial Sequence
  Description of Artificial Sequence: Synthetic primer
acaaggagctcttataagtcgcgcagaagccgctgtatcc

SEQ ID NO: 23189 - DNA, 40 bp, Artificial Sequence
  Description of Artificial Sequence: Synthetic primer
ctctccatcagcgcggcccgcagccgttccagctcattgc

SEQ ID NO: 23190 - DNA, 40 bp, Artificial Sequence
  Description of Artificial Sequence: Synthetic primer
tttggagaggagtttccagaccctcagaggcaaagaaagc

SEQ ID NO: 23191 - DNA, 40 bp, Artificial Sequence
  Description of Artificial Sequence: Synthetic primer
tgcacttattgaatatgtgattaggatctacgtctgagac

SEQ ID NO: 23192 - DNA, 40 bp, Artificial Sequence
  Description of Artificial Sequence: Synthetic primer
caaccctgggagagaaaaacatgctaaaggaggtatcttg

SEQ ID NO: 23193 - DNA, 40 bp, Artificial Sequence
  Description of Artificial Sequence: Synthetic primer
gcatttcttgattgtgaagttcttccatgcgtcttaattc

SEQ ID NO: 23194 - DNA, 40 bp, Artificial Sequence
  Description of Artificial Sequence: Synthetic primer
ttcgcagtacccgctctcatcgccctcaactcctctctgc

SEQ ID NO: 23195 - DNA, 40 bp, Artificial Sequence
  Description of Artificial Sequence: Synthetic primer
aatagaagaatttgctgttagatatttttcagaagtcagc

SEQ ID NO: 23196 - DNA, 40 bp, Artificial Sequence
  Description of Artificial Sequence: Synthetic primer
tgcttttgtaacaatacaagaatgtcttccagcagcaacg

SEQ ID NO: 23197 - DNA, 40 bp, Artificial Sequence
  Description of Artificial Sequence: Synthetic primer
ctggcagaggtgcttagctggcagcagctcactcaccagg

SEQ ID NO: 23198 - DNA, 40 bp, Artificial Sequence
  Description of Artificial Sequence: Synthetic primer
caggcctcagggactttacccaggagaagtccgtcttctg

SEQ ID NO: 23199 - DNA, 40 bp, Artificial Sequence
  Description of Artificial Sequence: Synthetic primer
caagcaggacagtgcttgatacaggaacaacatttacaac

SEQ ID NO: 23200 - DNA, 40 bp, Artificial Sequence
  Description of Artificial Sequence: Synthetic primer
cgggacgagctgctcttgcgcggctgccccgcgagcggcc

SEQ ID NO: 23201 - DNA, 40 bp, Artificial Sequence
  Description of Artificial Sequence: Synthetic primer
tcccctgagtttctatcagctgaaaatggcaactgctgtc

SEQ ID NO: 23202 - DNA, 40 bp, Artificial Sequence
  Description of Artificial Sequence: Synthetic primer
ctcctttagttaatgagagcctgaaaaagtttttaaatac

SEQ ID NO: 23203 - DNA, 40 bp, Artificial Sequence
  Description of Artificial Sequence: Synthetic primer
agctgccactctggtcttggaaggtattcattctcctcac

SEQ ID NO: 23204 - DNA, 40 bp, Artificial Sequence
  Description of Artificial Sequence: Synthetic primer
aagtcaaataagccttatggccccaccctgaccgcttgag

SEQ ID NO: 23205 - DNA, 40 bp, Artificial Sequence
  Description of Artificial Sequence: Synthetic primer
caggaagggcccaatatttgctgaactagcatgagccatc

SEQ ID NO: 23206 - DNA, 40 bp, Artificial Sequence
  Description of Artificial Sequence: Synthetic primer
ttgactgaaaagccagctttcttagtaaagaaccttaaac

SEQ ID NO: 23207 - DNA, 40 bp, Artificial Sequence
  Description of Artificial Sequence: Synthetic primer
tccacccaggagccccgaggccttctctgaaggacattgc

SEQ ID NO: 23208 - DNA, 40 bp, Artificial Sequence
  Description of Artificial Sequence: Synthetic primer
atgcagaaaccaggagtcacacaaagtccaccattcatac

SEQ ID NO: 23209 - DNA, 40 bp, Artificial Sequence
  Description of Artificial Sequence: Synthetic primer
agtgctagtgggtgctgtgcgaatctggtatgtttgtacg

SEQ ID NO: 23210 - DNA, 40 bp, Artificial Sequence
  Description of Artificial Sequence: Synthetic primer
tggagcctctgagtgatctggaggaaggattggaggaaac

SEQ ID NO: 23211 - DNA, 40 bp, Artificial Sequence
  Description of Artificial Sequence: Synthetic primer
atcaaatgattttgtacataaagttcaataatataaaagc

SEQ ID NO: 23212 - DNA, 40 bp, Artificial Sequence
  Description of Artificial Sequence: Synthetic primer
aactcacacattgcaagtaattaattttgttttgtatagg

SEQ ID NO: 23213 - DNA, 40 bp, Artificial Sequence
  Description of Artificial Sequence: Synthetic primer
agtatgatttataaatgcaatctccccttgatttaaacac

SEQ ID NO: 23214 - DNA, 40 bp, Artificial Sequence
  Description of Artificial Sequence: Synthetic primer
acatattttacatagttggaatgtggagcccatctcacag

SEQ ID NO: 23215 - DNA, 40 bp, Artificial Sequence
  Description of Artificial Sequence: Synthetic primer
tggtcccagatttggaatggtctccaattcattgttgttc

SEQ ID NO: 23216 - DNA, 40 bp, Artificial Sequence
  Description of Artificial Sequence: Synthetic primer
ctgacattttatggtaatttagctgcaaaaatgtaatacg

SEQ ID NO: 23217 - DNA, 40 bp, Artificial Sequence
  Description of Artificial Sequence: Synthetic primer
cactaaatcctgatactcggtatagtccttcagaattaag

SEQ ID NO: 23218 - DNA, 40 bp, Artificial Sequence
  Description of Artificial Sequence: Synthetic primer
cctggagaacgcctttggggcagtagggttcactgtgtag

SEQ ID NO: 23219 - DNA, 40 bp, Artificial Sequence
  Description of Artificial Sequence: Synthetic primer
tcacttgctactttcaaggccaaaaacacaatacaaggtc

SEQ ID NO: 23220 - DNA, 40 bp, Artificial Sequence
  Description of Artificial Sequence: Synthetic primer
gagaaagcaaagcactggtacagttatttaacaggcatac

SEQ ID NO: 23221 - DNA, 40 bp, Artificial Sequence
  Description of Artificial Sequence: Synthetic primer
atatgttcctgtgtcaacttaatcatttgtttgatattcc

SEQ ID NO: 23222 - DNA, 40 bp, Artificial Sequence
  Description of Artificial Sequence: Synthetic primer
gcatcggctccaaagctaacagaccgccttcgtggtcctc

SEQ ID NO: 23223 - DNA, 40 bp, Artificial Sequence
  Description of Artificial Sequence: Synthetic primer
agtttaaatgtcaagaaaaaatagacacacacaaaagtgg

SEQ ID NO: 23224 - DNA, 40 bp, Artificial Sequence
  Description of Artificial Sequence: Synthetic primer
tgatgcctacactttcagccgcttcaaatgccaacaagag

SEQ ID NO: 23225 - DNA, 40 bp, Artificial Sequence
  Description of Artificial Sequence: Synthetic primer
ttccttctctggcatatttggatatgacttatttgcactg

SEQ ID NO: 23226 - DNA, 40 bp, Artificial Sequence
  Description of Artificial Sequence: Synthetic primer
ctgtgcatatccttgagtgggctgggcggtgtaagcactg

SEQ ID NO: 23227 - DNA, 40 bp, Artificial Sequence
  Description of Artificial Sequence: Synthetic primer
tgcgtactctgagtatggaagaatcgaaagagagagaaag

SEQ ID NO: 23228 - DNA, 40 bp, Artificial Sequence
  Description of Artificial Sequence: Synthetic primer
gaggcaataaaacaaaagtatgaatgccatgctataagtc

SEQ ID NO: 23229 - DNA, 40 bp, Artificial Sequence
  Description of Artificial Sequence: Synthetic primer
tgtgtccacaagtacccagttcaaggtccagcgtggttag

SEQ ID NO: 23230 - DNA, 40 bp, Artificial Sequence
  Description of Artificial Sequence: Synthetic primer
acagacatgtttatccacatacacatgtgcacgcatgtgc

SEQ ID NO: 23231 - DNA, 40 bp, Artificial Sequence
  Description of Artificial Sequence: Synthetic primer
ggactatattagagtcattgaaatgctccgccatatacag

SEQ ID NO: 23232 - DNA, 40 bp, Artificial Sequence
  Description of Artificial Sequence: Synthetic primer
caccccaaacccagaagcaataggagctctaaagaaaagc

SEQ ID NO: 23233 - DNA, 40 bp, Artificial Sequence
  Description of Artificial Sequence: Synthetic primer
agagcagctggccagtgcccgtgccagaccacttgtttag

SEQ ID NO: 23234 - DNA, 40 bp, Artificial Sequence
  Description of Artificial Sequence: Synthetic primer
tggtgccattggcaggaacttctgaaactattttatatac

SEQ ID NO: 23235 - DNA, 40 bp, Artificial Sequence
  Description of Artificial Sequence: Synthetic primer
acaattgtttcatttcagaaaataaaaatttcaaatcatg

SEQ ID NO: 23236 - DNA, 40 bp, Artificial Sequence
  Description of Artificial Sequence: Synthetic primer
atgctggacttgcagagctggctcctctgcaaggacaagg

SEQ ID NO: 23237 - DNA, 40 bp, Artificial Sequence
  Description of Artificial Sequence: Synthetic primer
gtttttgcttttcgagttcagcagaatacatagctttttc

SEQ ID NO: 23238 - DNA, 40 bp, Artificial Sequence
  Description of Artificial Sequence: Synthetic primer
tccagcggaaaaggcgctcatatgttgccttggccaaagc

SEQ ID NO: 23239 - DNA, 40 bp, Artificial Sequence
  Description of Artificial Sequence: Synthetic primer
cactgaattgcaaaggaaaggtcagaactatcaaaaattg

SEQ ID NO: 23240 - DNA, 40 bp, Artificial Sequence
  Description of Artificial Sequence: Synthetic primer
gacctgtgccgcccgccaccttctgccattgttacattac

SEQ ID NO: 23241 - DNA, 40 bp, Artificial Sequence
  Description of Artificial Sequence: Synthetic primer
caccctgactgtgcttaaaaacactttcactaataaatgg

SEQ ID NO: 23242 - DNA, 40 bp, Artificial Sequence
  Description of Artificial Sequence: Synthetic primer
tatttaattgactattatcaatagcctgatattgaaaaac

SEQ ID NO: 23243 - DNA, 40 bp, Artificial Sequence
  Description of Artificial Sequence: Synthetic primer
ttaaaacgtgtaaatgaagatctttatatttcaataaatg

SEQ ID NO: 23244 - DNA, 40 bp, Artificial Sequence
  Description of Artificial Sequence: Synthetic primer
atggccgctatagggaccgacaaggagctgagcgacctac

SEQ ID NO: 23245 - DNA, 40 bp, Artificial Sequence
  Description of Artificial Sequence: Synthetic primer
gaaaataaacttttcaaaacaaaacttttccaggcatatc

(The sequence listing continues in the following parts.)

1. A method for detecting presence or absence of two or more classes of genomic alterations in a single assay, the method comprising:
(a) sequencing a plurality of polynucleotide library members to produce sequence reads;
(b) with aid of a computer processor, querying the sequence reads for presence of a sequence corresponding to any one of a first or second sub-plurality of a plurality of primers, wherein the first sub-plurality of primers comprises sequence designed to prime extension reactions into target sequence corresponding to genomic locations suspected of harboring a first class of genomic alterations and the second sub-plurality of primers comprises sequence designed to prime extension reactions into target sequence corresponding to genomic locations suspected of harboring a second class of genomic alterations, wherein the first class of genomic alterations and second class of genomic alterations are different, thereby identifying a first subset of sequence reads generated by sequencing the polynucleotide library members generated using the first sub-plurality of primers and a second subset of sequence reads generated by sequencing the polynucleotide library members generated using the second sub-plurality of primers;
(c) with aid of a computer processor, separating the first subset of sequence reads into a first data file, and separating the second subset of sequence reads into a second data file; and
(d) with aid of a computer processor, analyzing the first subset of sequence reads for presence or absence of the first class of genomic alterations, and analyzing the second subset of sequence reads for presence or absence of the second class of genomic alterations.

2. The method of claim 1, further comprising, before (a), hybridizing the plurality of primers to a sample of polynucleotides.

3. The method of claim 2, further comprising extending the plurality of primers with a polymerase, thereby generating polynucleotide extension products.

4. The method of claim 3, further comprising amplifying the polynucleotide extension products, thereby generating amplification products.

5. The method of claim 3, wherein the polynucleotide extension products are the polynucleotide library members of (a)

6. The method of claim 4, wherein the amplification products are the polynucleotide library members of (a).

7. The method of claim 1, wherein the plurality of primers comprises n additional sub-pluralities of the plurality of primers comprising target-specific sequences designed to extend into target sequence corresponding to genomic locations suspected of harboring n additional classes of genomic alterations.

8. The method of claim 7, wherein the sequence reads of (a) further comprise n additional subsets of sequence reads comprising sequences corresponding to the n additional sub-pluralities of the plurality of primers.

9.-58. (canceled)

59. A non-transitory computer readable medium comprising computer executable code for detecting presence or absence of two or more classes of genomic alterations in a sample subjected to a single assay, the computer readable medium comprising:
(a) a database comprising a set of oligonucleotide sequences corresponding to a set of primers, wherein the set of oligonucleotide sequences comprises:
(i) a first subset of oligonucleotide sequences corresponding to a first subset of primers, wherein the first subset of primers are designed to prime an extension reaction into target sequence corresponding to genomic locations suspected of harboring a first class of genomic alterations, and
(ii) a second subset of oligonucleotide sequences corresponding to a second subset of primers, wherein the second subset of primers are designed to prime an extension reaction into target sequence corresponding to genomic locations suspected of harboring a second class of genomic alterations;
(b) a set of computer executable instructions that, when executed by a processor, performs:
(i) receiving a set of sequence reads;
(ii) querying the set of sequence reads for presence of a sequence belonging to the first subset of oligonucleotide sequences or second subset of oligonucleotide sequences in the database;
(iii)transferring sequence reads which comprise a sequence belonging to the first subset of oligonucleotide sequences into a first data file;
(iv) transferring sequence reads which comprise a sequence belonging to the second subset of oligonucleotide sequences into a second data file; and
(v) analyzing the sequence reads transferred to the first data file for presence or absence of a first class of genomic alterations, and analyzing the sequence reads transferred to the second data file for presence or absence of a second class of genomic alterations.

60. The non-transitory computer readable medium of claim 59, wherein the set of oligonucleotide sequences further comprises n additional subsets of primers, wherein the n additional subsets of primers are designed to prime an extension reaction into target sequence corresponding to genomic locations suspected of harboring n additional classes of genomic alterations.

61. The non-transitory computer readable medium of claim 60, wherein the querying further comprises querying the set of sequence reads for presence of a sequence belonging to any one of the n additional subsets of oligonucleotide sequences in the database.

62. The non-transitory computer readable medium of claim 61, wherein (iv) further comprises transferring sequence reads which comprise a sequence belonging to at least one of the n additional subsets of oligonucleotide sequences into a corresponding nth additional data file.

63. The non-transitory computer readable medium of claim 62, wherein (v) further comprises analyzing the sequence reads transferred to the nth additional data files for presence or absence of an nth additional class of genomic alterations.

64. The non-transitory computer readable medium of claim 61, wherein the analyzing of (v) comprises simultaneously analyzing.

65. The non-transitory computer readable medium of claim 60, wherein at least one of the first class, second class, or n additional classes of genomic alterations are selected from the group consisting of single nucleotide polymorphisms (SNPs), insertions, deletions, alternative splicing events, gene fusion events, altered expression levels, copy number variations, copy number alterations, inversions, and translocations.

66.-74. (canceled)

75. A computer system for detecting presence or absence of two or more classes of genomic alterations in a sample subjected to a single targeted assay, comprising:
(a) a database comprising:
(i) a first subset of oligonucleotide sequences corresponding to a first subset of primers, wherein the first subset of primers are designed to prime an extension reaction into target sequence corresponding to genomic locations suspected of harboring a first class of genomic alterations, and
(ii) a second subset of oligonucleotide sequences corresponding to a second subset of primers, wherein the second subset of primers are designed to prime an extension reaction into target sequence corresponding to genomic locations suspected of harboring a second class of genomic alterations; and
(b) a receiver configured to receive a set of sequence reads generated by sequencing a plurality of polynucleotide library members, wherein the polynucleotide library members were extended using
(i) the first subset of primers, and
(ii) the second subset of primers;
and
(c) a processor operatively coupled to the receiver, wherein the processor comprises computer executable instructions that, when executed by the processor, performs:
(i) querying the set of sequence reads for presence of a sequence belonging to the first subset of oligonucleotide sequences or second subset of oligonucleotide sequences in the database;
(ii) transferring sequence reads which comprise a sequence belonging to the first subset of oligonucleotide sequences into a first data file;
(iii) transferring sequence reads which comprise a sequence belonging to the second subset of oligonucleotide sequences into a second data file;
(iv) analyzing the sequence reads transferred to the first data file for presence or absence of a first class of genomic alterations, and analyzing the sequence reads transferred to the second data file for presence or absence of a second class of genomic alterations.

76. The computer system of claim 75, wherein the single targeted assay is a single targeted sequencing assay.

77. The computer system of claim 75, wherein (c)(iv) comprises simultaneously analyzing the sequence reads transferred to the first data file and the sequence reads transferred to the second data file.

78. The computer system of claim 75, wherein the database is a data file or a list.

79. A kit for detecting presence or absence of two or more classes of genomic alterations in a sample subjected to a single targeted assay, comprising:
(a) a plurality of primers, wherein the plurality of primers comprises
(i) a first subset of primers designed to prime an extension reaction into target sequence corresponding to genomic locations suspected of harboring a first class of genomic alterations, and
(ii) a second subset of primers designed to prime an extension reaction into target sequence corresponding to genomic locations suspected of harboring a second class of genomic alterations, wherein the first class of genomic alterations and the second class of genomic alterations are different;
(b) a polymerase; and
(c) instructions for detecting presence or absence of two or more classes of genomic alterations in a single targeted assay.

80.-110. (canceled)
